United States Patent Application Publication US 2008/0114160 A1 - sequence listing, part 83

SEQ ID NO: 42577 - DNA, 5904 bp, Oryza sativa
acattatgtattcatcaaccaaggtattatatgttctatattagatttacttgtaatatatttgaacaaatattgctacataatgagtttcgtgtgttctcgtttgaagatgtacttacttgggtgaaggaaaaagagtccgagcgttaggaatgcatggatgatcaaagaagttgattggggaccaaaccaagatcttctccaagtccacttctatctcaccacgtcaattttggtccatagaagacaagagataaagttctacacattttagattcggattcaggcctcctgacattcaaatggatctagatgctgatctagaaggaattttagggcccatgagtacttgttgtaaagcttatgaagtttactttcaaatggatttcgtcccacgtcaaaactcccaccaagctatcggaaatctacaaaacaagctacatacctcatctagttcgaatctgatttgggtcttaggctaagcccaatggggtgtgcaccctagggtaaccctaggatatccttaatcatatttattcagtagccgtcatagtttagaatcgggttttgcttagattaatttgttaagaacaatttcactgctagatcggtttgtgaaaccctaaatttgagtgcttaatcattcatatgcaagtgtgttgcaatctatcttgttcttacttgtgttctttgattcgcatgcagggattagccttctcagtgatgtcaaccggatttcggtacagctgataaccaggggagaagtagtgctgcgattgtagggtttagatcgtgttgatcggaagccggatcgtgtgtgtcaagttttcaccaaatcgagagttatcaatacctatcggaagatcgggacctagcatccttatcatgtgacatcctggcccaattaagatttagcttatgttgcacataagagctgtgtgcgtatgtttattaccacgtcactagtttagcatgagtggaaccaacttataacggcttgccaatccaaccatatcacttctaggttaacccttttatacgtaacgaggacgaaagtgtaagtggggtagtatgtgtaaatgggcccacctatcagttgggctgtgctgcatggttctgaagggtgggatgttacaatagtcctatggaaatactgattacaatcactgagaggaacattctagcctccaagggtctcaagaatttgacaagaaatcaaagggcaaaatttagcaacaaactaaacattcctagatagtccggtttccctcgcctatatgcaagagagtagatgtatctgctatatgtgttttaataacaacccatccaatctaataggttaaaactaaatcgaattaccccaaactattgtgatagtatgaattaccctctcaattaaaaaaccagacattcttcactctcaactttttgtaccggatgaattataacaatccagttagcactaaaaataataataataagaggggctcacttgtcagttttgcctcctctttcggtcaccacatgtgggtcctacttttttatatatttttttatgctccacgtaggaccaaaaccatatgtgaatttattaggagggtatttcgaccggtataagaagttaatggtgaagaatgtctgattttttaattaagagggtaattcatactgccacaataccacaatagttcaaagaggtaattgggactttttccaactaaaacatcatttgtttatttcttgttacctacttacattcatgcctgcatccagagcgcatgtccatgtggatgagccgaatctacgtggaagtaacaagcaactttaacggcctaatagctaggcccggtttagacctcagattcacaggtcttacgacagacagcccacaagatcaccgtgtaagagagcattgtattcttagaccctatttagatcccaccctaaaatttttcaccatgtcacatcgaacgtttgatcacctatatgaagtattaaatattacctccatcccataatataaggcgtgcacgcattttaagatttaacctttaaaacatttgaccaatacttactatagtatgaaatgaattttatttgttaaaaaatatatcattagattgatatttaaatttattttcatatggttataattttgttgttacaaaccttatagtatattaaaaattataagctaaagattagttttagaaaccgtgctaactttgaccgtgtcttatattatgtgatagagggagtataggctaaaaaataactaattgcacagattgcgatgaatcttttaagcctaattgctctatgatttgacaatgtggcgctacagtaaacaattgctaatgacggattaattaggcttaatgaattcatctcgcggtttactgacagattttataattagttttttattagtgctcgaacacttcatgcgacaccctatataatacccgatatgatacgccaaaactttacgcccctggatctaaacaccctcttatttttgttttgtaattaactttagctacgattatactatctttttaactttatgattttgtaatacttcagttacgattttgtacctattttcttgaacttttttattttttcatttttaactgaagtttgcatttgctctcattatatatatattacgttaaagtggcttaatggtgttaaaatccactagtatgcctttgcagattcgttcctacttttccgagactttatatttttgctccttttttacattaagcttcattttataaattttgcccctattttaatcagggttttaaatctcccgctatagctgtttgaggagtacaatttagccgctatagctccatttagcccgctatagctgtttggaaagttaagcaccaaatatcttagcccgctaatttaaaacattgattttaatacgaatttctacttatttagttaaaagaattcagggaaagtacaaaagttaacaagaattttgacaaatataattgtcttaacggaatggggtaattataaggtttgggtaaaatataaggacaatatcacaaagttttataaaaaaatggataatatcataattggagtaggggaagcacaagtggtttaacaatggagtcgtgggtacatgactttattcaccaaggttcgaattctggtgccacggatattcatatataaatgggtttccaataaaaaaaatagtgaaattagatatgttccacgggtttcctatatatttgaggacgaagaggagagagacgtttggattgtttgagaaaatattatgattgatgtgacccaagcccataccgtagtgtccgatatttttctagacgtgagactcccggggtgaggcattctcgtcatttctttcctaacagtcttaaggttatgtagcgcatgcatattccgacaaaaattaaagagctaaccgaggctatctagtaacaacaataataaaacctattggatttggaaaagtgaggttaatatgaagattaaggtttttgtgtggttgttctttatggactgggttaatacaaggaccttctggatagaaagcactgtgctccattggatgcttcggttcaatgctccagctgtaccctgtgttagagaatccagagagcatatgttcttctttggggcatttgcacaactgacgctcttttgaaagctaagtattaatttgaccttattttattaagtttgcttatttgacccttcttttcaaaattgaagattcagtctgaccctattctgttaagggcatgcaatggtgttaactgaagcacaaaatatcccttctgcccttctcacttgaccctattgcacatgggacacacctgtcagttctctctcctctcttctctcttctcctcacctccactcgtgggggacaaggcgaggtgagcagcgggctgaggctgcgtgtgggcggagagaggccaaggtggtgccggcgagcggcgagagggcgtgacggcaccggcgagagggcgagaggacgccggtagatccgcctgccacagcccgagcaccgctgccactccttgtcgcctccaagccttcgttcacccctcccatgccagatccctccactgctgagccctaccgccaccactccctccctgcgcgccaccgctccctccctcctcgcggaggcaccgccactccctcccctgctagccggcaccgtcgcagatgcctcccgcgccccgtcaccgccgctccctccctccgcgagccggcactggcgtggatcccttcccttcacgccttgccgccgccgttcccttcctccacaagcccgtgcttccgctgatcccctccgtgcgtgccgccactgctcgccgagagagagagagagtgtgtgatggaatacgtgaaagagagatatgagtggatagggtttctttgagggcagtttggtcattacaaaaagtaattttatttcttgtttttttccaaatgaaactttaacggtgcagtagaaatagggttagatggattgttcatgtttgaaaaacatggtcaaataagaaaactaaaaaaagtagggtcgaattgattgttaggcttcgaaacaggatcaaataagcaaatgtccctcacctaaatacctaatgatataatcacagcatgcttcattctcccatccatgctttatgtaactttttctcttagctgcttagaatatttggaaggaaaggaatggtctaattcttcagggtatttagccttctattccttcttagaaaagaaatcataagtccgatttaagcctacatttacttcggctcaaggagatacatagccctttagtctcaaggattgatctactgtaattttcattttcagctcctccaatttttccccttttttggcgtttgccattatttttatataaacttcagaaattaatatatatcgtgggagcctcccttggtttgaaaaaaaaataaaatgtgggagaaagagaagtatgattgtaaatacgtagaacttgtgttcatcaatggtaaatagtagaataatataatcacaatattttcatggcagcagagaagcataaactttgttattgtttgtagagatttgtgcacatgtttcacaaatcacaacttagtgtagcacatgataaaacatgtattcccatttaatgaccttgctttggggtagtaggcgttgtcgaacacgttctgcgtcggcacgtccatctaaaaaataaatataaatctggtatccccactttttttaaaaaaaattgtcgtattttctctaactaatatatagaaaaaaaaaggaggagaacaccataactgggtcaggatcgggcagggtagccgccacgtgaccttttacaaacgctcctaggtcaccatgtggtattctataatctcatcgtcgattttcctttaaatcagtggacccgttaattttaaccattagatcttcatctaaaaaataaatctggtatccccactttttttttttaaaaaaaattgccatattttctctaactaatatatataaaaaagagacaattgctcatttgaccctatttcagagtgtaactatcaatctaaccctatttttcgtagttcgctcatttgaccctgtttttccaaaataaagttgccgtctgaccctatttctattatttttatttaggaaaagaaaaaaaaaatcaaattattatttaaattgatcaaaatacccttgaggactcaaccaaccctatccattcactcccaatcctatccagtcactctcaaccccatctctctcagcaccggtgcacagagggcggcggcaccagcggattaggattcagtgacattcccccgtgatattctcggtgacattgtgtcactg

SEQ ID NO: 42578 - DNA, 5804 bp, Oryza sativa
cacgggggaatgtcactgaatctgtgtccagcagcagctgctccgtgaggaaggaggaaggcgcaggagctcaccgccgaggggtgccaagggaggcgcacgccgccgccgcggggcgcggaaggaggcgcgcggcgcgggtcgaggatggtgcgggagctcgccaggaagtgtttggctgctgctttgttttttctgttgctgctgctcagctgctctccatctctctctcgcctctctctcgcctctctttgttcttgcccggctggagggagacggagccgctcctgctcaggaggactgcatgctgttggtgctggagggattatgtaatttcttttgtgtgaaatttatcaaaaatctgtcaaatgtatgttaaagtttgtcaaaaatatatcaaatctaagtgaattttgtcaaaaaaaagttaaatcaatttcaaacttgtcaaatccctcgaacctaagttaaatttgtcacttatcttagtaaaagaattgtcacttttttagataaaaatacacaaaattagacaagcaaaaactttgaaaaagtagtcaaatgagttgggaggcataaaagccatttttctcagaattaacaccgtaacaccgttatgttgctttaacggaatagagccagacctaacattcctttttaaaaaagagggtaaaaaagcaaacttaaggtaggattaaattggtagtcagagtttaaaatagggttaaaaacacaattaccaaaaaaaaaaaaaaagaggagaacaccatatcagggtcaggatcgggcagggtaagtacgttctattttttttcggcggtgtacatacgttactacgttagtattatttttttcgtcttttttttttggcaaacagtactttttctttacaccttctgcaaacaaacagtactactactacgcacatcgtacgtaggggagtttaggaggaagtgttaatagatatataaaatcacatattacggatttaagtgaaaatcgacagctagatatttttttatttctcataatttttaatatttattttaatttggagatgtgacatgtggtgatctacgagcgttatatatgagtgtcacgtggcggcttaatagcattggtaggaagtttaatagacttatatactgaaagccaaataaacttcctataaacactatcaagccgtcatatggcctcctacaaacgctcctatatcatcgcgtggcaccctataatcacattgtcaaatggtggatccgttaattttaaccaatagatctctatctcaaagaaaataaatccggtatccctaccaccaacaccttacgtatatgaggtaaaaaaaaacgcagtacgtatcccttccaccctccgaaactcccatcttctcctattttctactccctccatcccataatataaggggttttgactttttcttgtactgtttgaccattcgtcttattcaaaaaattctggaattgttatttattttatttgtaacttactttattattcaaattctttaagttcaacttttcgttttttatattttcacaaatttttttaaataagataagtggtcaaacagtgcaagaaaaaaagttaaaattgtttatattatgggacagagggagtagctaacatatcctattttatcattaacactcaatatatttaaaaataattcggacatctaaaaatgatcatgactctcaagttcaattttattctcaggtgttttcaattgttgtgttatttataattaaatatagatttcaaaatgcatattgctcatattttgttatctaaaaattagatcgtgcagccgttctaactgcaaatctctgggcttaatggtacacccataaacacttctaagttgatcgccacgtaacactctaataaattaaaataatatataagtgtgacaaatgaaaataaaacatctaaccatcggtttccacttacatcgatgatccatagttcaactcatcatgtgacacatccaacgatcgaaaatcatcaaataacatcgatccaacggcttccgcctcccctggcaaacaccgcgccttcggtgaaatcctaacgttggagattgatcccacctcccacctccctcaatcgccgcatgccccctctctcgctgttccactgcacccgccgcattcccattcgcacctgcgccgcatccccgatccctctcccgcacgtgatgacacagaaactgctctgccatcagcgctcccctcccccaaaagcctcgctgatttgccccgcacgtcatcaagggcgccggctcgccgcagtctccatcgccgcgatgccgcccactccgtcatcatcgcatccgtcctcgcccaggaatcacgtcgccgccgatgccctccgcgccgatctgttcctcaccgccaccgatccccgctgaaggctcgccctccaccgatccccccgccggaagcccttttgtcgtcaggtcgctgccgatgccttccacgccaagctgctcctcgccgccactgatccctgctgccatgtcgctgccgacgccttccgcaccgagctgctcctcgccgcgtgttggtatttcttaatgacattactagaaatataattcctagcaatggcgccagaaatacttctggtatattatggttacagagatcatccgcaagcgcacggatataccattgtagcatttcacccaagagtattctaagggtatcgtatttattttattcagtgggaagatcatgtagagagaactcaactaataatttatatattactttaatcatattctaagcaggggttaagataattcaagggtagagtgacacccaagcattaacaactcattctcataataaatgatctaagctaggtggaaagaaaagagtaagaaaatctattcctatacttctagtatagatagtatacatacattctagttaactgatatactagctaatacctctatccgatgccctcctggtacttcgagaagacacccctgactgccgagttccttatgacagcccgtcatgaccatacaaccggggctaaatatggaggaataccctccccaggaaattaacttaggattatatataggcgtggaggaatacctgtactgagctgtcaccatcagcggcccacctctcatccgcaatatataaccccaaataatgatatcccgtaatctagacaccacgtataaactaccagaactactctaatatcatcgtcatgacatagagtaattgcataagcaaacattatacccgcactaaagcatctcccaaataagctagccgtatattcagtataacaagaacataatgtaaggtaggtacttatatactcggaaagtatttcaataccataaatgtataaagaagagtattctaataaaagtacaaagcttacaaaagaggaaaggaaagctgctagagccatacccgaactctttcgaaggcttccggactcttggttcctattctatttctattccaccagctagatactactaaactaaacttgagagaaatgagagagctattgctgtgtgtaagtgaagtgagaaggtgaagtccttttatagctgaactacgacggttgtgacggttggaatggtcggtaataccctccaaccgtcattggggcttcatctcaaccgtccagccaaaacctggatccaacggaggcgagggaggttcggccgaacctggggacggcccaatccagcccaatttcggctggcggccttctccattgttcttctccgtagacttgtgaattttggcccaatgtgtcatgttatttctgagttcttggcccattcatacataagtttggttctcgacatcgtctgattgatttatcgtttgtgttgatgtcgattctcctccactttagtgtcattccctgcaagaggttattatacctaatactagtggaatattattattctaacatatttatgcattgcaagcatcactagttctcctctattttggtaatattgacggtcgaaactgatcgataacgactgtcaacaaaaccccccaagcttgaacccttactcgtcccgagagaaggacgaaagggaacaaagacttgattgattgatcaggagttgctactatgctgcatatctcagagatacaggtgcaaggtatatataccctcactcagattaaataatctttggcacggtggcttacccttacccctgattcccacgagacactgcttctccttgccttgggcggttgaaggacagaacatcaattagagtaccaatcacccaatctttattcacctcttattccggaagtcttcaaatgatttttgcaaaagaaagccaagttcctcaaatgattcactcagtctctctaagtgtatcagtatgaatttcctcaccaaatgttgccttgttgattcctactctaaggtttgtatgtggagatcggtagggatcaaacatggcatacttgcattcacatttattactaagtcaaaaacttagactagagcagataactaaatatactcaagatcaagatcgtgcataatgtgtgtgatatatggtggaaatggtatatgaggaaaaataaaaaaaaatacttcttctttgtgcttactttcttctcccaaaaatccttgttttatcggttaggagagggcatggctacatttttttttcaatcatgctcatgcttgatggagcataactttattattattattttttcataaccatgcctttccctccttttctctcttttttttttcaaaaggatttttctttttaggaggagaaagcacatgaaagcatggataatttattttggtggtaatatggaaatggaatggaatattgcttagctcccagtgtaggagtttagcatgtgcatatatgtgggtgtatgatcttgatcagagagcatgagaagtatctacacaagtcacaagagtttgacaaagttcaatggaatgtcaagcaaccaaaatgtatatggtttaatcatgatagcatatttttggctttggtaggaatatatatcaaatgaggaactttcaattttatcattttgaaaaacaaaacatccagaattcaagtcaaactagtatctggatcatagcaactcatatttactatctcatatctcgcaacaacttagacttagatcagcaagtgcaacccatttacctcaggttcccggataattgttggctacttatatttaacctttgagagagcacttatgttgacggtcgttatcgatcagtttcgaccgtcaatattactaaaatagaggagaactagtgatgcttgcaatgcataaataagttagaataataatattccactagtattaggtatactaactttttgcagagaatgacaataaagtggaggagaatcgacatcaactcaaacgataaatcaatcagacgatgtcgagaaccagacatatttatgaatgggccaagaactcagaattaacacgacaaaatgggccaaaattcacaagtctatggaggagaataacagaggaggccacctgccgattttgggccaggttgggccggcccctggttcggctgaaccaggaggttcggccgaacctccatctccaccgttggatgtggggtttggcagggacgctccagatcctctcctgatggcggttgcggggtacttcagacatttcgcagcagttacaaccgtcatacctgcctataaaaggacttcaccttctcactcattcacacacctcaagcaagagctctct

SEQ ID NO: 42579 - DNA, 707 bp, Oryza sativa
ctgttactccgagaaaagcaaattaaactccctgctggtcataccattccatcggctgaggaattaggcaagaaaaggtattgcaaatggaacaattctggatctcatactaccaatgattgcaaggtctttaggcagcagatccaagcggctatcgaaggtggcaaaatcaagtttgatgattccaagaggccgatgaaggttgatggcaatccttttcctgtcaatatggtgcatacagctggccgaacagccgatgggggccgtgcaagaggttttcaagtgaattcggctaagatcatcaataagtaccaaaggaggtatgataaacaacaggagatgcattatgaggaagatgatgatggcttcgatcctcattggagttgtgagttttttagattttgttggaatgaaggtatgaggctgccatctatcgaagactgtcctgaatgcggcaacgttgcggatggttcaagccggttgtatattaaaggcaatcggctgaagcatgcaagggttcctgttgatcaaagattaggcccggtaaatcaagatcatgacccagaggatgacgaaataggaagactcaatggtgtcctcctggtatatttatgaagaatcagaagagacgagttcaaagattgagaagccgggaacgctttcaggaagtcgagcaggaaatcaataatcggctaaggggtgcagga

SEQ ID NO: 42580 - DNA, 817 bp, Oryza sativa
gtaggatcaagactgccgactggaccaaggaagtagtgattttcatgtgataagcttggaattgctaccagattggatgaatgctacaaataatcgagaatagaggagaagaaaatgctatgaggcaagagaaaaccaatctgtggtaaaagaaagagatctagccgatagagacttacctcagcatactcggctggtggtgcagcagacgggatggcggaggacgacatcgccgcgggcggaagtctggccggagatgaagtcgcctggggatcgccttatgcgttggaggaatcgccggagagagagaggataaagtttggcttcagcggtaaaaacggaggaaacaatgtgaagtttctcgggggtgacggttagtatttaaagggctggagtaacggtcagaaaacggcaagtgcgatattcactcggactcgatatatggcaaatccgaaacattaccaaatattccggacttggggggcatgtgttgacaaccaaatttggtaatatcggcatcggaaaagaagattagatcaaagtggaatcggaggcggagatcgatttaggaacagagcaggaatcggctagagtctggatcggcttcggtcaggatcggcagagttcgagtcagacagggctagccgatacagccgattccaagaatacgactcggtgtacatcgtcgggttgagttgatatgcttcaagatgattgccacgcatggatagagtcctgagaaggcaattgtatctattaattatgatattttatgtaatttccttagagatatgtttgggcaaaagtctgccgcaaa

SEQ ID NO: 42581 - DNA, 1115 bp, Oryza sativa
tataacattctaccgctatctctgtttttgttacttctgttagtcgcaatgttattgcgttctctacatgatgatgatgcttattttatcttaagcatgctcctggttatgtttaattttatcactagatcacctcacattattcatgtcatgattattgtcttaatattttggattaaaatataccgatatatgactatatttccaacactttgtgtatatgttgttacgtacttacaatcctgcctacatccagagcgcatgggtatgaggatgggccgaatctacgtggaagtaacaactaggaataagtctatttcgcatcctgcatctctttaccctggttaaatcgcatccctgaaccacaaaactagaataacaccacccacaattttaaaaaccggtggaaattgactccttggatagtttcgaaagatgttttgctgacgtggcaaattgccttggtctaagtgtcccgacgtggcagctcagtcatcaaaggagttgaaatagaagtgggtccgatttgtaaggtacaatggtcaaaaaaattaaaaaaaatatgggatccacttgtcagtccttctatttctctcgcatcacccgtgatgacgagcatggggttgcgaccacgggagaggatcttggcgatgcggcgacaattcttctccccccgagccggcaaggttcccggtgggataagggataacagcgtcgtctgcggcggcgaagctgcaaaggaagagaagcggcggacagctacacatgggtaggcagccgaagagcggcatgggcagagaatggcgagcttgatgtcctcattgcggaatccgaccttgccgaagactcggctgacattagggtcatcgaggacgagctgagagagcttatgccaaccagctgcacgaggcggtggcgccaggccaccatggccaggtggtagtagatattgtacacctcgaatgccgccactgtcccactcgccgctaggaggatccaacatcggcgacagcgggagaaggtcacaaagctatccattgcagcgactcgccgaagctagggttaaggttcgcctatgtccaccacataggtggtgctaccgaaatcatgctcgg

SEQ ID NO: 42582 - DNA, 1997 bp, Oryza sativa
taccaaaacggacaaaatatgtcattaactaaaataggcgtaactttctcatacggactcagaatcaggaaaataatatatccacggacatctacagaaaaagttacatccgattcttattggctttgccgggttcgacgatattaaaacctccaaattctgcttgcaagattgtgtttttgaggagagaagtttttcggtagacatttggaaaattccacatgctacatatttcgtccgtttgagtttatttttttatggttggttcttgtgagttcctaagtatgaaaaaaatatcaaaaaaataaataaaaataaaaaatgtggacatctctctcctctacactagagaggagagagaggagaggagagaaaaaattctacaggtcacatattttgtctatttgagttcattttttctatgattggttcttgtctgttcctaagcgtgaaaaaaatataaaaaaataactattgtcttgtccatgacctcatcgagcgaccaggagggggaatttaactatttgccattattgcgtttggcaattatccaaatacccctcttgcatttgcactgaattttttgcccttcttaagaggtggcttcttaagaggccggccttcttcctcgctgccgcactttgcgcggcctgccgcccgggtggtcgccatcaccggtgttagcctgggcgaagtcaaagaagggcggatcaaggacccggagtcaaaaagccggcgagatcaccaccggctccgcgttgatccaccaccaccggcctcgcgttgatccaccaccaccggcctccaatcgcccaagacaccaccaccaccacactcgccacctccacgcgacctcgttccgtgtaacaccctgaaaattcctgataataaaaatcactaaaattttgaactttttaaaacttttgcatcatgctggttgttatgattcctattgcttgccaaaccataaatgatcaccaagaaagtaaagaaaagaactacatttaagcaatagatataatttacgagaatatatttaatcctacaaataattatgcacaagatattaaaatcaaataaaagaaaagttattattaacctattttatcaaatattaaaatatttgaataatgtaggtgggtgccataatatgagtacacatgaaatgatgattattcaaataaactgagctctctgtatatataatagaattatgggagtatttaattcgatatgtagatctatattacaccaagttcctaattgcatttagggattgaaatttaatatattaaacccctccatataaactaacatataaataaattgaactaatgtgctattgtgttaataacggtctcattagaaaattatagaatctttaataaaccttaaatattggataatattaaattttgggcaaattcacatttgaacacttaatacggtcacccaaatgcttaggagtaaatacaaatttaatttgcaacttttctcaatttataaatcaaccaaaaccctaaaagaagaaaaataggaaaactttgaaaaatatataataataataagaatatgttcaatattaaatttgaatataaatttcgatggaataacttaaacttggtgtattttacgttgtgacaaaattagtggcaatagtatatttttcctaattgcaaaataccttctaaaaacaaaaatggtcggcaagcactgttcattagcccccctaggtgttcgatttggttcctagccatcctagccctcttcctccgcactaccgccgccgcgtcatgtcgcgtcgccgtcgccgcgccgtctccaacccgccgcgtactgtcgccgtcgccgtcggctgcgccgcgccgagccccatgcgccgtcgcgtcgtcatcaccgttgtccgcgctgccgcatgttgccgtcgcccgtcgcgtcgccctcgagcccccgcccccacaccaagtcgtgcgcgtcgcgtcgccgtcgcccgtcgt

SEQ ID NO: 42583 - DNA, 2048 bp, Oryza sativa
aattatggataaaacttttactgtattattcatggtctagaaaccaagatgaaaactggactacaatgaaaaaaaaagatccaaaatcagtttcaaaatattaaatttttctatggctaataagcaggtgcggagctagaatagaattgagacgggtgtcacttacttaatttactctactttagattgagtttaagctaatatgggtgcctaaatttgtattgaaaggtacacacatggtaaaaataggtgatgtataactctaaaaaaattttcttaaccaggttcgtaggcacccctaatatattttacctcgcccctgctaataagccaataaatagacgacaagaggattatacgggtttcctatcagcggtggcatagagcatagtttaacgtattgcgaaattctagttcaataacctttgaattactactactagtagagcaaggattcgagtaggcttgagtttttgaaatgaaaaaggaaaggaaaaaaaaacaacgccgtaacatcactcggtgcctacaccttccagagtaaaagctcgcaccaaccgctgttctcctggaaataacaactcctggcacgccgatgccccccacgcttcccgacgacaacaattcggtgaaagtagtagctgtacaagtgacgagtacagctgacgcctctcgtagcactactagcagtctagcatgtaggaagacagaggtaggaagacggtgaatgcgaaagagatggcaaagcagacaagagcacgagaccctaccacaatcaaaagcccaagcgtttcgcctttcggccttatggacagtgagaacgtcggactgtacgaaaagccacaccgatccgtgtcagctctccctggtacggacggctatccttacatgtcacctgcatgttccacgcacaaaggcacctcgcgtgataagagttcgattgcgtctcccataaggcctgttttctcaaaaacttttcccgaaaacatcacataaatacatatatggagcattaaatatagataaaaagaaaaaataattgcacagtttgcatgtaaatcatgggacgaatcttttgagcctaattagaccatgattagctataaatgcacaataacctacttgtgctaatgacggattaattaggctcaaaagattcgtctcgcgatttccagacgagttatgaaattagttttttcattcgtgtccaaaaataccttccgatatccgatcgaacatccgatatgacacctaaaatttttcatttcaccaaataaacaggcccaagcaaaagatacgagatattttgatttttcctgtagaaagtactgtatctgtactggattatgtgagtcgtagccagatagattccgagttctgacgacggtacaatgtaggagtagagcactatagagccgcatggcaaaatagtaatttatcactcacaacggtatagaaccagagtcctgcagtaaaaccgaaacttcaatgcatgtctccatcatacatgggtttgcctcgtatccacagggtacaaggatgaaacagggttacgggaatttttttgggttttagatttttttttaatatttatagaaataatctatcggccaaaaaaaattacaaaaatagaccctgccgcccacctctggagcggcaagctgacgtggcaaacgggggaggaacgggcggtgacggagggagggttttttgcaggaaaacccttgccgccctctggtggggcggcaagggggcattcgggccccttgccactctctggccgggcgacaggcctcgctgcctataaaaggcctgccgcccagcccccagctctcattcctccctcctcaattccagtgaaaaaaaaagaagagaggggaggagaagagaagaaggggcgaagccctgccggattcagacgccgatttcaggtaatattcatagatcctatatgtgactattgagttaaatagtgtgtattttttaaaaatttgtttgaataacacgcactatatttttagggttttagttgtactaatctagaagta

SEQ ID NO: 42584 - DNA, 3096 bp, Oryza sativa
gaattatccgatccgaaaggtatccgtatccatttttgtccggagcggacggaaactatccgctctgttttcatccctactatacactggaagacaaattcgtgagacccactagtaaaaagtctctctctgtcagctcgaaagacaactgactgccatgggtctcatttatgtgataggggagacacaggtcactgcttgaggccacaggcagcggggcgtgatgttgtcgtgctcggattggaaactgaatttttgtaagtgattggttctgtttgacgtgggcggaagagtcgaacacttgcggaggatatggaaacggaccaaaaattgtgtgagacacgcttttctatgacatatgacaaaaacactattaatgttttaagtagataatgatatataactatataagtcgtattttgcaatgaaatttggtaggatcgatatataaatacattataacctatctctcagtattttcatattttttttaccgccgtatacatatatttcaagatttaaatatcgtggttttacattacaaacaatagtcatgaaaattttaaaaatattttatgagctttgataatggtgttatgtttggcactacaaaataactcgtataaaaagaaacaaagaagataaatgctcgagcaaaccaattttagtagttcaaggggtacaatgaggcaaaagataggttagtgggttaagggtgttcttttaactccatcttcctaacttatactcacttgtttccgatctgctaaacagtgtattttatgtaaaaaaaatataaagaaaagttgctttaaaaaatcatattaatttgtttttatgctttttaaactaatatttaattaatcatgtactaatgcgtgctctgttttactacaggctaaataggaggggttcctagcccctctttccgaactcagcccatatgaaccaatgaaatattctggagaattaaaatagattttctttcaaaccaatataataatatgcttgtgctaacgctacaatgatattatattttgacaatcaggcatacagatacagattcacgccaaggatacaggaaaataaacatccaacctgcatattcattattctgaagcacaaccaaaagctaccaatgcagctgaaaatgaagttttacatcatcccttccttcccaacattctcaagtttagttaaaactctttaaattatgttcgtaaaactccagatattcaggaagtttagaggaagaatgccaaccgctatttctctcgagagcatcctttactcattttttcagttaactcattattgctccattagaagcaaagagtgttgccaccttcatttcaaaatcccacacatttcaaagtcctacacaataataacaagtttaataccaagacatagttatagatttttagttttgtattagcaagttttttgttctgcgaatgtttcagaatcctaaattgaactgtgtttctgattcagatcataaccatcacaaaaactcataatagatcaaaatgttcgtatatttggcagcatgatggaccatgggtgaaaatagtgacccaaaacatttagctgtcttttagtttcagcagaattttttttaaccactttgataattcaacatatgatcattacaatcatcaggtttagtataaagatacagagatgcacatcaaattgagcaacaatatcttcggttctctttaatattttcctcttataattgaattatagagtatcaaatgaacacctcaaatggtcaaatttcatattaccattgagtcttgattatttcaagatcaagccatcatgcaaaagttaaaatgcttccatcaattccccacaaccaaaagtacaagacaatatatatttaccctgaggcctccatgatgtaagcttcagttttcttatacctacagacatcctcaaatgtaaaacacaattccaaaaggcatgccttccatctgacaaatccagggataaaatctcaattgctggcaccttggttatgtcttccatcgagtacggacaccacccatgatctacacaatcaacacggtttcataaacataaatttagcaaaagacaaaggatcaaattaaactttcaacactttagccaaatgcatgttgaaaatgacaaatattcatgactggaaagagtatctactaaaaaataaaatcagattatgggcctcaactttttattttactatgctataaggaaatgtagaaactataatacttcctaaacacaaccaatagcacactgaatttttcatgctaacaattaaaagatggagattaaacatgcccaatgatggagattaaacctgtagcctcaagaagctacaggtgacatgctgatagttacaagacctgagcgaagcaacatgaatctgagttttgcataggcagaacaacataaattatcagcagtgtcttactctatattcctcccattcatgcagacccagaacctccaaaatatcacatatttcaccacaatagttgttacaatacttaaaatgataaattttctgaatgaagaatcacgtacactaccaaagtattttaataatgttgaaaaataatgttgtgtaaaggtcaaagaaattcaaaaccaaaacatgcttcatgtctggatttgactacaataacctcgaatcaaacaactcataaaggattttcgctagaagcataagttgatcaacctatattctgaatgccattgtcaattaaactcaactctaatttgtacagatgtatataggaaaaagcaacagaaaccgatgtattctagcaaatcctctgtcagattgaagagataagaaatatatatttattcataaaaatggccaatacttttttctatgaaaggctacctttctaaaatggctcatttttgatagttcctaaccaggttctaagcagccagaaaccctgacatttctatctatcagcctatgacattcctacaaactagttcaattcactccaacgaatctaactgcatgtgcttcttcaacaagttctggatcctatccaacctgaaagcaaaagacatttaaatcaa

SEQ ID NO: 42585 - DNA, 709 bp, Oryza sativa
ctgctgctaggggctcagtcctgcctacctgtcccgggggttccggccgtaggtggggttgggtcggtactcttgtctatggctaggatgggttggaaactatgtcacgtcttccgtccgtataccgtggtggtatgtggcacgtggttacacgtgaggaagatgtgtcttgtgggtaaagatgtaaacctctgttcagagtataatctattcgaatagccgcgccctcggttatgggcaagcctagcaatgtacccaagttagtgttttaattcttaaaacctgcttaacaactaaaatgtggaatggttggcctgggttggcttgggacgagctgggacccagggtcgggttgccagttcggtctgaatcatcgtaggccttgggttaaggcaggttcgtgtgggttcacggccttgattaataatatggtatagctctggaatcgtgtttacaaaatagctttgagcaactaattatcttttaatgctgtttactgcaaaccctaaccctttatattataacccccttgtactcctgtcgcgactgagaaaatttgcattttcccgaacgctagtgtattaatccccgtcccaggaaaagccgggtacaccacacaaacatgatataaaagacacatctttattatatcgataatatttacattattacaaaggcacttcaggcctggcaatcaaaaataaacagc

SEQ ID NO: 42586 - DNA, 1417 bp, Oryza sativa
aaaaattatatgaatatatttgtcttgaaaaatactttcataaaagtatacatatatcacttttcaataaatatttttatagaaacaagaagttaaagttgtgttttggagaccgtgtcgctgtcctaaacgacttcctttacgagtatggagggagtatctgacagttggacacttggaatattaataaatataggattcgcggagctattaacacaactgcatcgatctctctgatattgcagttagcaaggaattggaccacacgttcaaatattaaagtgtgcattgcatatatattagccaatgatcacctagaactttggagaatgtatggctagttcgttggtgttcatattgtacttgcgtaatctcttcgctctgcatgtgcgtgtcgttgactagtgaggtgtgatatatcccagctagaagacacactaattattaacttaagcacaccattcccatgggtctaatttcttttgccaagttcaactacttgactagccggccgtgcatcaatatgcatgcacaccactacgtactgatcgtatgatccaactatagggtgcaaggatcggggcaagagacgatgcaaacattaggtgaactattttaatccctcgaacagagattccttgtttgttgaaaaaatcatactgatagttatgaacaaatctttaaatctttaataatattcatacaacaaaaatgtaacaatctatagaataggcataaactgaactcacgcattaagaaaataaaaagataaagacaacatataaataatactagtattttttttctcaatgtgttgtcaagtttgaacttgtttttcttgagcatgcaattaaacttgagagaaaaaagagaacggatattctctctagggattagaatatgttcctacaaacatagggcaattcgaacttaagccctacgtttgcctctctttgatccattaaagaaaaaaaatcaaaattctgaatatacaagagggctaattaagaaataccctcaagtggtaaagtattttttccctgtgaggggatatccctaaattctcgaatgcatttaaataattatgaaacaatttgataacacagatcaatatgtgatatatcatttcataaatatacaaaatcaaaattgatatatacaagttgaaacaaaagatcgaataatccaataaagaacatgcactaataatttggtttttttatcaaattttatatgtcgtatttaaacttacatgtgtatgaagtatatatcacatattaatctattattttttttagaatttaactatttgaatgatatgtgagaaactaaggaactagtatgggtttacgacagatgggtccaccgacctacatcgtccctgtacttcacttattttgtgccaaatgtgcttgga

SEQ ID NO: 42587 - DNA, 882 bp, Oryza sativa
tatgttatagatatcgtaaaacatatgataggatttaatcatttgttttgaaagccttcatagaaaatttttctatagaattgaaatccttcgaaaccgctatgttttttctacaaatcaaaagcgaagatacgttttcacaggggaggttatgttggcgtttttctcccttcaattgtagaaacttcaaacaaagttagggcgttaattaaccgtgccaatgccggtcagcgactgctcctactagcagttgcaccaacgtatatactgggtccaggtatatttgagctaagctggcggtataataataacaaacatagttagagaaagctatcgtataaacttacagatatctccacatgggagccgtgcagccagctaggtaattaatctgcagaaagcactaattaatcctagcatatcatctcgcatgatcatcgatgcatgcatagagatatctcaaggcacacgtactccactaatccactctataaatagcgaagcacgtaccacgaatccctcagctcgtaccagtcgtcgtcctaagcaagaagaagctaagctagctagctgtgatcggagaggtatacagtgatcagtttgattgtgaatttgtgatcgccatggctgcagcttcgtctactacgactcgtttttgccttctccttgcgctcgtcctgccgatgatttcctccgccgccgccggcgacgacgcgctgccgctgcccatgacaccgtcgtactaccgcaagtcgtgcccaacactcgaggccatcgtgcgcggcaccatgctcagtgccatcaaagccgagcgccggatgggcgcctccatcctccgcctcttcttccacgactgcttcgtccaggtagatgatcctagct

SEQ ID NO: 42588 - DNA, 623 bp, Oryza sativa
tgtgaggatacggggccttgattggcgccggcggcctgagattgtataaaggaggccggcgcccttccgaaggccggatcgtctccacaacccgtgggtcttccttggcttctcagttcattttccacccagatacagagaaaaaaacacactggacgtagggtactacctcttctcgagggcctgaaccaggataaacacctgcgtcaccatctctccttgatctagcgtaccccgtaaaatatatcgccgatactagaaatcgacagttggcgtgccaggtaggggggcgctcgatcgttttcaaggcggagatggcacctactggctttgagatcgccagcaccaccactttccccaccgccacccaaatctccttcggcgcattcgacttcctcgccgatagtgccggcatactccgtcaggtgagcccaggggtcaccgggccggttatggcttgccgctatgctccaggaaccaggttctccttcagcagtctcgacttcatcgccactggctccggcgtcctcaagctggccccaggggagcccgcgccaccgacgaccacaccaaccatacccctcggcatcaacaacttcaccgcttccgctgcccaagcactt

SEQ ID NO: 42589 - DNA, 2145 bp, Oryza sativa
ccaaactcccgcgtccgtctcgctgttgggtttcgtgcatgccgtgtgtacgcgctcgagcctcgagagaagtggagagccccatgtgctcccgcggcccacgcatacctggccggcctccaagccaactcacgcgtatgcgcacgcgtccctgcaatctccatgacatgttttgactccgtctagcacgtccccgtttacgttacgactgcgagattgcggtcggcttatgctcacgagatagaagtgaatcgggcttcattcagctggagattttggatgggaaaaatcgatcggtagttcagatttgaggccgtacgtcattttgaaacaggtcaaagaagatggaaaacactggcgagtgattaaccacatgctggcaatttggttgggtcgggatagttcgaacagttaatttgcacacaggtcgtgttagttggctcgtttgggctggttatgttgtttagacacaatcctgtatttcatggtcttgctatatggaggactctgtctgagtctaccattgctctgtgtaaaaaagaataaaaaatattctctgctatgcatttccatggtctactactgagcttattcaatcaagactcagcagcaatatcactgcaccaaataccacaatgctaaaaaaatggaaaacaaaagtcattggctatatgcatgttttggatataatactccgagcaaaataatattaagttttaagtggcatttctcacttgattctgaccacggatatttttcgtccaagtggcagcaatccaaaatctatcagtataagataacatgcaaaggaaaatcgacaataatcaacaaaatctttcttccacataaaaccttaagcaagtattttctatagatcttgccatcaggttaggtttgctgagatggtatacacatgttatgtttcactaggaaggaatcctacgcatatacgcaagtaaattatttataaaagattgctaaaagaagttatattttaccatattagtatccgcatatttattatttataaaaaaatactaaagaaattctatcgcaccatattcgctataaagacggtagattaccttataattatataaaaaatatatgtgctatagattttgatataccaaatgataataatatctgtcatactcaaacagaaattactttatcctggttatatgtaaacccacctaacaccgctatgtgttatcgttgttttgaaagctggtgcatttttaatagatggaattgcatccataccaaaacaaacctaatacatcattaatacaatgaaaatttaataataacaatatagattttatcatcgcacataacttaataataattaaattagatctacaatcataaaagtaaaatgaacttaatgttcccaaaatatattacttagaaagcaaaatttatgctaaaaaatgagatcatacaactaatatttgatacatttatgtctttggattattttatgtttaaagatccatattcactacaattctgtcgagggtgtagatcctgaccacggtatttgtagagcatggggattcttggtgccaaggtatacgcgagattgaggtaaaagaaaagggagacatggattttatataggttcgatactgttaactgataggtaacagcgctactcctgttggccgaagccagcgttgcctttatatatcaacatcacattagtacaatagttaggatgatctaatatagtctttatcgacttggaggcatggagctctcacacgtagttgacggctggaatagtattcattattgacgagattggaggtagcgctaggcccttcatatcggctttatggctctagattgggtttgtctaggcttgcctttctgttcatctagatttgtattggtttgtattctaacttggcatgtctagatctatttagatgtgttggcatattacctctctaattaactaggcttgtccctcctcctactaggggttcttgtatttataccctcgggtgcccccttgtccaagtagaactagggaggtaagtatggatacgatccgaatagtccttgttgtacccgagtagaactttgtttatcctttcatatcggaacaccttccatatatgaggcatgtgttgg

SEQ ID NO: 42590 - DNA, 671 bp, Oryza sativa
atagttttagagtaaattattttatataatttatcacaaaaccacatatttaagagcttgttttacaaaactatagattttgtgtctccatttatcacaaaattataggtactttgtacaatctatcacaaaactacagatttaagaacttatttcacagaactataaatttactatatttgtttaacacagaactatacatttaatgtcttcatttattacaaaactacagatttagtgtctccattatcacaaaactacagggtttaacaatgctaaaacatgttgttttgtgataatgaggacactaaacatgtagttttgtgataaatggagatattaaatgtgtagttttgttaaacaagttcttaaatatctagttttgtgatatattatgcaaaatacatgtagttttgtgataaacgaagacacttaatctgtagttttgttgaacaagttcttaaatctgtagttttgtgataaaagtttgtagcagcgggaacaatgttgacggcagcggccattactggttgttgccatagcagtaaattcttcttttctaaatgttttttctttccattcggtttgaatataacaaaatattggttgtggtgtcccttagcaaattacgaggtagttgggtgtcttacaaccccatcacgtttttgagg

SEQ ID NO: 42591 - DNA, 577 bp, Oryza sativa
gtcacctttgagggaaaatgcacctataaggggagtactcaccttctagggatacctcacccataaacactatcctaccttctgacagtgaggatgatagtgattatgtaggaggagatgattgcccttctgaggatgatgaagaggctagggagatagaaggacactacaaagagttgaagaggaagatgagagctggaaaggttcatgagctagatgaggttgtgtttgagggggtttaaaagtcagtcagctagaacagctggaggtccaaaagatggcaatgacaccccatatgcagatagtgatgatgaagactcatatgatgaggttggcagtgatggtgagcttgttagaagaaagggcaagtttccaaggtttcagaagcagccaggggttcctgtttttgagctaggaatgaagttcagctctaagcatcagttcaagaagaccattataaaatatgccctggctgaaaggaaagtgattaattttattaaagatgatcacaagagggtgagggcaaagtgtgattgggctagctgtccttgggtgtgtttgctgtccaagactacaa

SEQ ID NO: 42592 - DNA, 1752 bp, Oryza sativa
agaaataccaacaagcatttctggcgccgttgccggataactgttgttaattttttggtcatcctcctatctttatttttatttttggcttcttttattcctttccttgatggagcaacccacaattcaaaatctttctgctcctcgggctgatctttgtattcgcagaacagagtgcgtatcggttgcggaggcatcggctgaagtctgcattggctgaaatggatcggacagaagatagccgatttcattgagatggttataaaaccgtttctggacggctgaaatggatcggacagaagacagccgatttcataaagatggttataaaaccgtttctggaatcgatcaacgtgctacacaaggattgccacgatggagataagctctcagatatgcaattgtatctattaattatgatattttaaatagttccttagagatatgtttgggtaagagtctgccgtaaagacttatgtgtatcttagagtttgctagagataagagtcgtgtccggcaaggacctatcatgtatctcgggtataaatataaccctaacccatgtaattaacaacaacagttcaataacatttttggtgcatcgccaccctttttacttgctttcaataacagttcaataacaacaacagttcttgctttcgggttgagctgcatcgatttcaatcttcaacaagaggtaaacttgtcatggcggcttgcattctcgtgattagtgcttccatctttatgacattctaatcttgtatatgtaaatcgtcgagttatcatatatgctctataatctttattagttgcgccatctaacctgcaatcggctggtttctactgctagagagtagccgatagatctagattttggtattaatctagattatatagcatattgttgatgtgaaaaggaataagttcaccggaggtccctcaattgacaccgagattttttaaggtccctaaactagaataccagaaatgtgtacccctaaaattactaaatccgtccgtagaaggtccctcggcagtattgactcagtttttgcccggttttgctgacatgtcgcgctgtgggacccactagtcagtccgccgttggggagttaatagacggggttaacggaggggagcgcagctagccagacctccattctctctcctttgctcgaactctagctgagctgcgaccaggaggcgacttgaaggcgacggcgggtttgtcggcggcggcgagctggccatggcgctggcgacgagcatcgttttcgtccaaacgcgtggcggattccaccccggttagtaccttgttggctcggcattgcgtgctattgtagctggtactgtgttgattttgggggaagatttaaaatgtggtagattcgttttttgtttgggattcggtgtagaggtcaagtagtatattgtcccatatgctttaggtgtagtaatgcttttgtatacccatgtgaatctgggtgggttagtgttggggtggtccttttttaatcggtgttaggtgttaactaggtattagggatctggatgtagtgtagttttaatagtagagtagtaaagtgcttctttttttaatttttcagagctggcagcatggatcccttcggcactctagcagttaggttccatttcaatggggaatttgttaatagagggagacagaagttgtattgtggggggagagaagcaatgtcatacatagacagggataaagtgtcattacct

SEQ ID NO: 42593 - DNA, 629 bp, Oryza sativa
agaggaacaaacatcacacaactcttggtcaaccctagtgctcaagatcgagtgaaacacacactaggccctcaaaccccaaatccacaaccaccaagatcgaccacacaaagaacaagaggggatttgagagagggagagagagctcaaagatccaaagcaccttagcaccaagctcaacccaaagtgaatgtgaatgaatgagttgggtaaccctagaaaagggttaggtggggggtattcatagaagcccccaaaatgtggccgttgggagagaatcttttcatcccacctcggaaagtctgaggtgacatcggatagtccgatgtttttgacccccaagcaggccagagacagagaacgaaattctagagaatttcggacaatccaatcgatcggatagtctgatgtcatatcggatattccgttatttttgaaccaagaatttcatcctctcacagagactcaagttccattgaatttcttagtctctggatcattagatactccgatcatatcggatagtctgatttaaaactcactcaaaaggaataaaaagcaattcaaaacagagagtgaagttctgagaaatttcagatagtccgacgtatcggatagtccgaccttat

SEQ ID NO: 42594 - DNA, 633 bp, Oryza sativa
attggagaaccttaggaaatcattccatgcctaatgtagttattttccatgacatctttgaagggtgaccatgagtggatgcgcaatagcttgctcgacgttggagctgaacttggtacttttgtttgggatcacctctcccgcgagatcgccaaaccttacaaagccgaagacgaagcactgtccgaacaactggacaaatctgccgcagtgatggctgcaatcgcggcgcttatttttagtacggcacttaacatctttttcaacgtggaatcagtctaccacaacgctgcaaatattgcaattcaggagaaccatcaggcaaatgtggtaaaaacactcactgggttctcgctcgttggatctgcagctgccatcgttttatgtggactagctggatttcccatcttacatgccagactccgaatgcctggtcttattctgggattatttattctcattatatcatccgtgtgtacactgatggcattagcggcacggctgcacctggcgagtactcctcttgcatcggcctttacatggtcttttgtttatatttcaggtttatgtgtagtatactgctacatgaaagccagttacctattttcgaggttcgacgttcatgtacgtgca

SEQ ID NO: 42595 - DNA, 1260 bp, Oryza sativa
ccgacttcgtccatctccatccgtgtacttttgtttataaccagactgagccacaaactaagccttacccactagacatgtggaagtacggtagtgctttgcaacagaggcccgagcttaatccttatagggccggggtgctacttcccacaactagcatgcacccaaaccccaccgaaaaacaggttttaggggctttgaaagaggaagagaggggtatgtccaattccaccatgagccaaccattccatagtgtccaaatgatatgagaattcccaaagtctaaagttataaaaccacctaatgttgcctaattaatcagcgaagcatctacctaaattcatactagtggaaccatgaatagagtgtccactagttggggttttgtttattctagggtgaacaaggtaataataacaatagcaataataatgtcataacaaaggtaaataggcatggctaaataaaacagtgataacgcgggaatttaaataaagcgataatgcaataattgaaatcaaaataattttataaactgggattcaatatgttcaaggatgatgtgacttgccttgctcagagagaacggccttccgtaccttcggcgacgaccgcgaaccacgcttcgggaacctccggaatgacagaagctacgcgaagcacacaagcaaagctacaagcctataaagaagcaataacaatacataaaaagaaagcacacggttctttaggttataacaaacattaggagacttgaacgggtcgattcagagttcgtatgaccaagatatgatcatccgaagtttaatgctgttatatggagatttgcggattattataattaagctttgcaactataaaacatgtgtaagcgctagcctggaaaagacaggaaggctgcgctgttgacatgcggaccccacatgtcaacctaaaggaccgcggtagaccgagtacacagagacggtccacgggtcgacggaagcggaccccgtgtgtcaactgaggcgacaggccgacaaacggactccactagacaccacacgggctgcacacgtggagaccacgcggctaccgagcgggcacactaacacggacactacacggtcactacccgcacacgtgaacgactaccgacaccggtacacgggtaccggggttgacaaccgcacaacgggtacggggcgacactgaaaggacgaggacggggcagcgagaggagagatccttaccaccacgcgacgaggcgtgggaaagaca

SEQ ID NO: 42596 - DNA, 2219 bp, Oryza sativa
aattaagggggaaagagagaggagggaaaggggattaattccccccaattaattttggaatccaacgcttaaatcgcgcggattcgagggaggaacgaagctagggttcacgggagagagagagaggaggccgggcgggaggaaggaggcgaccggcctggcgcgtgggccccacgcggtcgggcgcgcggcgtcagcgcgcgtgcgacgcgcgtgcacgcgggaaggaggggcggctcgggcagggcgcggcttgggccgggcagccggcccaggaagagaggagggagaggcggcccgggggagagagggaggaggagggagtgggccgggagggggaggagaggcccgggagagagaggggaaagagagggagacttcgggctgggcttggcccaaaggaggaagaggatttatttttaggtttttctttttaataaactttgataactgtttttgttgcttaataattatttccggtgctctgaaaattcaagtaaaatttgagggctccttttagaccaaggagaatttaacaaaaattctccgggccacatttgaatttttcttgtacgtattttagtgtttgccaatttaatttttcttgtacgtattttagtgtttgccaatttcttttcgaattttaattaattctattattccttttagcgaatgatttttatttcgggatgaatttatcaggacgtgacaaaatccatcgcccccttttgttccttgtgatacaatttgtctaccagcggcggctgcgagtggcggcgcctaattcacacgtagggctttcatcgggtacattttaggggttaggattcatcagctaccatcggcatgcttttttctgtgtttactgggtgatgtttccttgctgttgtgtctttgcaccaggaggggagggggaagcggacgccacggaccgaaagtgacgaggcggcgaagccgctatgcatctagacgcgaatcgcactaagtcttctgcttgtgtttctgagggatgcatatcctctacctttagctagtaaaaaaacggtgtaactttatttcatctctaccatccaaattaactttacttcatcaacaacttcactttaactatttaactgtatttctattaactagaaaggtagcccacgcgaatgtgtgggcatgcaacctaagttgtatttgagacacttatacaagcggaatattaactggataatatttgcatgccatgcttcaaaagtgtgatttgtttcataaatttccttcttggcattgtttagataatttttctaacctattagagtagttccaattatctaaggcaattattattgaatgtttattgcaatagtcgtttcaatttaagtgtaaagtaagaagtaattttttttctcaattggttaaatctactccgtattgatatttttatattttctattttatttcatacaagtcttatttgaagtataaaatttgtgatatgataaatagtagcatagcagtacacttttttctttatcaactttcataaaaatttcaatcgccttttatataagttggtaaggctagtatatattctcattgatcaataattggtggattggataggacatgaggctacactacatatatgggtttgtagagtccaataggtgtagcacacaatctatttgtgaacactattttgcgtggtatgcgtggtgttgacggtccttaaatcataatatttgaccgttaatacttgcatataatgaaataaaacatggtatcgaacttagtggtaggtattattactaatcatttccactagtgttggtgaaatatgtgtatgtaggtaatttgagaagaaaacacatccgtcatgtaacaaaatgcacctccgcacattcaggacgcgtttacacggattagaggcccaataagtcaataaaaaccatttagaattgggccaaaacatagcccaggttattgggggcccaataagcaacctcccggccgaaggagaggccgggaggagagtttttgtattcggccgaaccgaccagtttggccgaaccaatcctgacgcttcccgcgatctgctttcaccttgacggctcggatttctcctctaaggcagttgcagggtgttttggtcatttcccatacccctaaccgtcatttggagcctatataaggaggtcaccttctcatttccaagacacacaactttgagctga

SEQ ID NO: 42597 - DNA, 3209 bp, Oryza sativa
aaagctcataatttatatccggttgctataattatgttgtattctatcaaaccatagaaaatcagtgttccaagaccaaataaattctttcattttttttcatttctagcatgaaaattgtttggttgctctacggttttctcgtagttccttgtaaatatgttccatgactaaaaaataaggcctaggtacgctggttgtgccttgtcccacctattattggttcattattcttaactcgtcaagactggtctactaactctctccccacttctctttctctcccatgcacttgtttgtgcatgaaaatatttggttccaaagtctgaataaatttattacaatttgtgtgtgtgtagtatatgacaattgtttagtgacaatagttttcttgtagctcctagtcaccttgctccatgttgtaataattgtgtagatggtgagatgtatttgttgtacctatgaaggatgtatacggtccgttgtagtgatgtttacataattgatcaagtttagttaatcattttttttattgtcctgggatagatatgagtcatctttttaatggtttgtgcacaaagaaataaatgaaattatgttcatacctaaaaggtgtagaagaatatctatatatgatatatgatatatgatatatgatggcgcaaacatgtgtcataaaattattttgtagttttttattcaattcggacgacatgaaaaaggcaagtgttgtccaccataaaaatatttaccaatttagctttactatgcatatttatagaatgatctatgtaatgatgtaatatatgtcgatattttatcatatttctttgatattttgatgacatctagaattcatgggttgattatgatatatttcttatatagaaaaacataggcatacgaaacttaatttgtttgcttaattaaaaatagagaaatagttatattagatatcaaacatgtagcgtgtagctatagaaatatcatcatttaaaaattaaaattattaattatttctcttttagttggataactaaataataggaacggagagaggaatgaagagtgccagtttaagctagtgggaggagcggacattgataaacgtatgtgaggggagggggacgggggagataaagggacctttgttttcttagagatatatttattgggtccacaggtgaagaaaatagatggaattgtttgtaaatgatgtggtgtttaataattgtttacattatttggtgcgaaagggcataaaaagacataatacggtttcgtgtgaaatttttttaattaaaatattgctaatatgtgttgtaatattctttatctagagtaaattgcacctgcgatgcaacaactaggcaagtgggtgtaatttggtataataacttgagaaataagcgttctagtgcaacaacttggtaggaatgtgcaatttagtataagaactttagaggtgatcacataaatgcagcaacttgtaaggtaggtacgattttgatacaatatattaagaagttatgtgacaacttaattatttggagcatttttatataattcgaatacacatacttacttataatggataatatactagcgtggatttgaataagcatacttatatttttatcctaataactaatatctgaaagcaattaacctggatgtagaaattattatatttcggttgatattttagaaggtgaagaaaaaaaatcttaaaagtaattggatgtaaattgtatgtgcagtataattcttataaagattaaattcaatattataaggtaatatccgaaggaatactatgtaatggcatattgatatcgtgaaaaaactcaccttgcatatgtttagccaagttgatgcaccaaaatactaaactttcaaatttttgtactagaacgcacccacttatcaagttgttgcactcggacatttaattcttaagtttttacactatatcgcactcacctgtcaagttgttataccgtgggtgcaatttactcttttatctattatagataagatagatgtgctatgttttaaatagatatattgattgtttgtttttctcgatggtaggtgcctgcgtacgtacgtacatgtttttttactttgtcatcgatagttaaggctgtcaaaaaaaaagctcgaggctctcaagctgcttgaactcggctcgtcttaggctcggctcgagctcgattcgaccatagtacgagccaagcccaagcttgcagaaaggctcgcgagcctcatcgaaccgaactcgaatagctcaacaagctcacctgctcacctacaatcaaaaagtgacatgctattttcttactagtatgtttgacttgttttatatctatgcaccacgggctagcagcaagcccacacctgtcttatatgaagtattaaattattcatactagcctagtacacctactagcactagcacactccccaataaaaagttgcatggctagattcgtgtgcatctctatctgtgctagtagtacaagctctcacatgttatctgtccggtgctagtagtactcctacaagcttacatgctgtcctgtgagtgtacataccccaagtaggcctatcaaaaatgctcgaggtccgtgagctactcgagcttgattcgttatgagctcgattctagctcggctcgtctaagaatcaaaccgagctcaagcttgactttaagctcgcgagcctgtcgagccgagctcgaataactcggcgagcctcaacgtctggctcatgttctttctcctaggcatttcctccccctctctctctcttactcgttcaaattactggagtagcacaattgcacatgtactggcagggcaggagggagcactatgcatttgttgtcccatttcccaacaagagagtaggagtactagtgtgtagtagtaggagtactagtgtgcggcttgcacagttgcactagtatacataggagcactagtatattacttttagccatctaatcatgcatcacagtgtcagctttttctttgaatgggatgaattgttccagtattccaccgcacgaagcaggcttgagagaagctcgaagctcgaacgagccgagctcgagctcaacttcaagctcgtggcaaacctaggggctcggctcgagcctcgactcgagtctatagagagcttgagcctacacatggaagctcgct

SEQ ID NO: 42598 - DNA, 1507 bp, Oryza sativa
caaaataaaagttatagatctttatgagttatacaactttgttgttgatgactttttcagttgaaatcatttactgcttcaaaatattaaaatgttttgaaattcaaatttttaattgataaacacaaagtcacaacaaaaagtgcccaaaataatagcattaagaacacaataacatgatagagcatgattttagaaacatttaggaaaaagaatcatccaatttggagttcatatgagagagatacactagtttcaaattttatttttgcttacggctccttaagacgcccgtatggaaaaatcgatttttctatgcgggcgcttaaatgagccgcgtgcaaaaatgaccttgttttttcatgcggatctcttaagaggcccatttttccatacgggcgtcttaagcagccgtatgcaaaaatgccgttcgatttttgcatacaccactagttatggtccccatggaaaaatgatggggcctcgtacagaaaaatcacttttgtagtagtgttctgtgcgaacacagctaagtttcaacgaggaagacatccaatcatcgcatgggacattaagcagaaaacacccactgtttgagtatcacggatctgactaaaattttgttgaaagtccatcatcatgtgcataatatttatgggtgccaagatttaaaccctaatggatgaagtcatgtatctactactacaccatctcatcactaatctcctgcttggtattatcttcccatcttagcaatgcgacctcctctgtctctttttcccgtcttccacctaagtagcatttttggagtaacttagaagtttcaacaaatgaccgaagtaacacacttgttctttacaactaggaagatagcccgcttgatgcgtattagtttgttctgaaaatagttctaacaaaattaattgaaattaaagtaaggtgttttctattcttaattgtgtgttgaatgtatctcttttttctgaaaaaatctcgacaaaattttattggtaataaatgtattttttttaccaccatgttagccctctttttgattgcttcatatatatgcaattcattttgcatgtgaatcaataaagagaaaagttcttaaaaaaatatttattgtattttgaatttaatgattgagtgattctaattttgaatttttattcaaataaaatcattattttattctaaattgtcttttttaggattttaaactgtactttaatatcgtatcgtgttgtatttggactcttcttttaatacttactttattattccaaatttcaaatatttataacttatacttttatatggattcttatattttatattctacgtgaaatcttgttatatttttatagttttattattctttttatttttgaatgtgtattttaataaaattgcttgttttatttttttctgaatttaattacgaactccttgtaggccttgcggatcatctcgtcgacgacctcatcggtgagcctctcctgat

SEQ ID NO: 42599 - DNA, 1277 bp, Oryza sativa
ttcctgcagcccttactctactccttttatcaatatagctacatggtctgtctagatttattaattgtagtaggatatgttttatgtaatataaggttggatgaggatagttaaacggtaaaagtaaaggaaacagtgagtgccctttgaatcacatgaatacaaaaattgaggaaaggaaaaacacatgattctaacaagagcaaaacaaatgattgcaaaatatagaaaaacatagggataatcatttgattggaccgcagtaaaaacataggaatcagatgagagagataaactcaaaatgaaattttcaagaggtttaagctcttactaaattttctgtaaaatctgtatatgattgtttattctatagggatttcgaacgatgatataggattcaatcttttgtttcaaataccttcgtagaaaatttttctataaaatttaaatcctttaaaatttttatattttttcttcaaatcaaagacacatgaataacagccaactccaaagagaggagggggccaccaccacattgaagtcactagcccccaccccacccccccagagccagattataccggtgcgcaacgcatgcgcggggggacacacgacacgagagacagcgacgtgtgcacgcaccgttcgcgttatcgcacagtgattttggtgatttgattcgattcgccgcgcggccaccggtagccgtccgcctcctctggggctctgctgtcgccgtcgatcgatcggctcctttccgccaactgccgccgcgactcactttcactagctttgcactaacacaatcgatcatgcatgcacacacccccgcctgagaaaacaaaaggcgcgaattatttttgtgttcctctgttgcctgttgtggtttgtttatcttgggtattccggccaatatgagatctgatgggatcgaggagaaagcgacactgccatttcacatcttggagatgggaaattgctcctgagttctcactcaattattctgggaattgctaaaataattaccgcaaatattgttaactatgatataactgcactggaatttttatatagcttaagtacattttttatggaagttacatgtattttaataatagtgcaaatacattataaattatatttgaaagttttctgacaattttctaatagtcttatcatttttaatgtctttgaacttatcccttatatacgcacttgaatttttattttgattctcactatatgcattacattagttaactgttagttttattcaa

SEQ ID NO: 42600 - DNA, 685 bp, Oryza sativa
tcagtgcacgcctaacctgaaatagtgagcttagtgtggtgtgattttcgtataatgtgagcaagctagggttcataactatgaatgattgcctccaggttgtgcagcaaagcaaatcactaatcaggttggtttaacagttggtggatgattgatgaaacaccaaaagtgtctccaataatggatgtcatgttgatggcctaatcatctgtccaagttggtgtgatcggttggtttcactgtgatgcttgatacattgtactactggccaaatcatgaaaaaaaacactgatgaaatcgttgtccctgaccaaagcattgtaagctctaatgatgctaacatagtagtagtaaatactggtccatttagctgtgattcagctgatgagctactagagaaaaatgagctcaattttctcttttccagctggtttggtttggggctaaaattgaccttaccaatttttgccaatgccaaattttggcaagacaaagttgtgtttgattgaagctgaggttaactaatgatgttgcctaccatttaggcctgctaaaacggcttcagtccaaatagataatagacagtattgaaattacaaaaatattgatgaggcaatttaggcaacaaacaaaaacaggcccttcatgcatacagaagtctgcttaattaatctgcacatttgaa

SEQ ID NO: 42601 - DNA, 848 bp, Oryza sativa
acccaggtgggaggatgcccaccacccgtgtcgccgcccgcaccgccaccgaccgctcgcgccgccgtcgtggaaggccagaggtctccaaggccgcccgctcgccaaatccgttgccgtcgaggaagttccgagctaggacgccgatgccgcacgcccactcgccggatccgcctcccccactgcgcgccggccgtcgccgtagccgcagccgctccctgggggggatccggccctctcgagggcggcaccgccggatccaccgcccgttgatgccatcgctgcccggcggcgctctcggagagggagagggagaggagaaaagaaagaaagagaggagaggataggagaaaaagagagagagggcagggtaaaagaatagaggggagagagaggggagatagttagaaaatatttgaagtggtgggagggaaaagagagtggagggagatgaaaaggttggggtgatatttttgcatgcagaccacctaaggagccgcatgcgtaaatagatttttgcatgcagttccttaagtgggccgcatgcgaaaatagtcattaaaaaattaatttaaaaatataagaacttcgaatcaaattatatgatattaaatgaactcatatgaaaaggttgttaaaaacaaagttgtagaagtcgttgagatctaccaattttcttttggttatttctccatccgagtttgattgaactatataaaatttaaattttaaattcaaataatttttcggatagtaaatgatttcaaatggaaaagttatcaacaaccaagttatataacttatcaagatctacaacttttgtattggtcatttttctatatgacttt

SEQ ID NO: 42602 - DNA, 697 bp, Oryza sativa
caggtttggagaacttcttctatgaaataagcattcgtgttcctttcttatgttatttaattatttagtctgagtaagatatatttccatctttgtgggttcattgtttagtatttatactaagtgctctagtactaggactctggataaagaaggaagttcctgcgcaagtattagagtagtaattaataacttaggcgtggtgtctaggttagagattacctttgtttgttgtgtatcccacagatttgtcagaggtaggtggcaggtggtgacagccctgaattccgtcccagtaatcctccacgttcggatacatcatagagctatagccagaaccacgctagcagaccagcaggggtcggtgcccgaagcaacagatagagaattaccttcaacttagcttagataattaaaacccatagaaagacctctctagcctagcctacctatcatcagttgcggtccttggatcgtcttaaccttaggtagatcacaaacgttccctgagttcaatatccttttggggtcacccgaaggtgaagtgctacagccgtattctatatgcttgcggatttatctgtggtcgtaagaaataccaacatgtggcttcatgcagcctatcatgaacacgatcgaacaactaaataaatataatcgtgcaggcatcattatatcattattttaaaacaagtac

SEQ ID NO: 42603 - DNA, 570 bp, Oryza sativa
ttgtttttttctctgcatcgtcgtcgtacctagcactggcacgggacgaagctagtttaagctagctcgcggccgggctcgtcgtcgtcgtcgccggccatgaaaggcggcggaggcggattgtggcggccgcgggtggagtcacgggggacgttcaggcggcggctgctgaccgtcaccgccggctgcttcctcttcttcatcgtcttcctcctctcctcccgccacgacgccattgttctcctcgacacccgtcgtcagtgccactgcctgcaactactttgcacttgcactagttgagttctcttctccctcccgcacggcaccatgatctcacagtgttccggccatgacgtcatgcagtgggagtgggacgtcccacggcggcgtcgttgcgctcgccggcggcggccgacaccctgccggacgccggctcagctggtcgccggaatcatgaggctccctcctcgccggccttttcttcaggggttagagaaacggtgaccggggtggagactaacgacgactgcgccgagagaggggcggagcccgcggagcgcgacaacgccg

SEQ ID NO: 42604 - DNA, 947 bp, Oryza sativa
tttttttccaccttctttttatccccatataataattaaaattaaaaaaaattacgggcctagaaagcccatcaacctactagatccccactgctccccacccatcagaccatttgtgtacatacgcttccttccacttctccattaaggaaaaaaaaaggctgcaagaaaaaagaaaaaaaatgcatatatgcgtacgtaccccagaaaaaggaaaaaaaacacatacactatttgacagaaaatataggtatgtacataggtacatacgaatacgatatagaaaagcaaactatctatccttatccttatccttatccttatccttatagatgactatttaaaatgtggcatatccatcttatctctaatattaacatattaattatattttaatttaaaaattatcatataaactcatattacagtcttttatatctttcagttcgatctctatatatgactgtataaaacatgacacatctattttatttattaaaaaaaaatattacatcacatttatattttagtttaaaaattataacatcaaccatattatggctctctttgtttaggcttataaacaaaacatttctgagcctaaacaaacaattagctttttgtttggtttttttaagccataagccactttaacactaataaaccaaaatttaatagctaagttggagactttttttcttatataaggtagatgtatgactccatcactaaacttaggacattcaatccacaggcttataaatcatataagccaataaactgacttaaaagtctaaagcaataagcctaagcctaaacaaagaatgcctatagttttttatgcctttctcggtcaaatagtgctaacaattactccctttattaggtttgaataactcgcaaaaaacaccctattcattgacaaatatttccacccacttcctggg

SEQ ID NO: 42605 - DNA, 633 bp, Oryza sativa
attcctgcagcccaatcaaacaagaattgtagtgtagccgaacaatataagataatcttaaagtacatgagggatgacgatacatgtggatgaatacataactaataattaattcaacattgggtagaagaacaactatgagttgaaataattttcaacaatttaaattagctaagaaagtgtataaatcaatttatactgctgagtaagcggccctaccggcccagccaagaaacagcccgaggaaggatacacgcaagagcgcagcacagcgtgcggaataagttcacattgggttcctctatttgtcgtccagtctgattttcgttccttgatcacaaaaccgggtactacaggtccccgaacttatgaaaccgtttaaataaggtcccttggcagtatttgactccggttttgggtgaggtggcgcctacgtgactaattaactcggtcttcatctgacgtggcattgacgtggcacttacgtggcaattcgatccgaaaaataataaaaattatgggacccacatgtcagtttcacacacaataattaaaaaaatggtggggcccatgtggaccccacctgtcatcctcactacccctctttctctattcttttttctttctctctct

SEQ ID NO: 42606 - DNA, 1984 bp, Oryza sativa
  unsure (1)..(1984): unsure at all n locations
aaagtgacacgtggcattttaggagtgtttttagactcccatgtggtggcttaggagtgtttgtaggaagtttcatggacttttagtatataataaatagatatcacaaaaatacatatttaatattgaacttatcacaaaactacaacttttggagtttaaatccttagcaccattgttatggtggagctataaacattattactttgtgattaaattggttctaaacctgtagttttgtgataatttagttactagacttgtagttttgtggcacttcatcttaaatgtgtagttttgtgataaatttggtgttaaatgtgtagttttgtgatacaccgagttaaatatgtagttttgtgataatttggtcatagtatctgccgttttgtgaaatctactcttttaagtttgagtgtaaagttttagaaaaatttggttggaatttttttaaatttgaactaaaagtttcaaattagattgaaagtttgtttggtgcttcatggtgtccgggctccatgattgaaattgagtatatacccaattcaaatgagagtgtgtgtctatatatatacacacacatacatacatacatttatatatatatatatatatatatatatatatatatatatatatatatatatatattgtgacgcctatatattttaatatgatcttcgatgatatactttgctattaatttattccaggttatgttctcaacaaatatgaaataaggatcacataaaagtactttaaaatacaaatatagtgatataacatgcataatacttagcatatatatgattagtatgattattagtcaaaatttattgagtttgatttttctaaaaaagagggcatcctgtaatttgggacggagagagtagcacctttgaggtagcggtgcatgtgttctcccgatctagtagagcgcctgatgtgcacatctggtggagatgagcaagggacatggaacaattacggatatacttttttttacaatgacttatgcttatatacatatatgagaaagatttgcannnnnnnnnnnnnnnnnnnnnnnntatacgtggtacctcgacggtccagcattttgtagctgtgggaccatcacggagccgtaggaccgtcggtcactagttttggagctgcgggaccgtcatgataccgtgttttcatcctgcgggacgggtatattttttgcaaatacttctcatacatgcatataaacgtaaattataaaaaaaataagtatattcgcaaaatttttttcaaggacggataaggttctttttactgtagctgcagatcatagcgccatgcaaatgtaatttaaatttgtgggatatttgcgtgactgaagaatagagacagtccattaaattttaaaaccaactgggcggtgaatgtgaaattttgtgggatttttgctcttttgatcaactgctcttgtttctcttatatttctttatatcgttttacagtttttcttctacgttactcgtgcatgcatggttacttcacataggaacaatcaaatgtatgacggttgattaataatgtaaatgtcatttgcagaactgaccaccatactggtgaattgggaatgtagtctcataaaaatcccagatgaatctggcaggaccccacttcactatttggccgttggatgctttggcagatcatcacacctgctcctcgactatttgttagtcgaatgcgttggcatattatcacacctgatggtccggctcctcgactatatttcagtcgacaaccccattatcgctgggccctttttcagtattactgccactaaaactctccttgcgaaagatccatcgtcaggctattgtgcagatttagagggatcattgcccattcacattgctgcgttgaatggaaaagttggtgtcatccataagttgatacaaatgagtcctggctgtgaattatcatgcaatacgtcggccagact

SEQ ID NO: 42607 - DNA, 749 bp, Oryza sativa
acacccttagtggggttgaactttatagatactactccctcccttccatatattgatcatcatataagtgttttgtaccaagactaagaaagacttaattaacatgcattttatataatacgggtatgtggtgagaaagaatcaagaaatatacagactttaactcctcatatgcacaagaaacgagcacttacctaccccgaaatgcctgcatgcatactcaatttgcatacatagatgcaaaatgttgcacgtcaaatgaagggtcaaggattatatgattatatgatgatcaatttagaatttctatctttggttttgatgatcaatatggaattaatggaggtagtagttggcaccccataagaatggagggagtagttggcatcccacaccttgctacgggatttgttagttttattgtcaaacaaatcaaagttttagataattaggtgcaactctatgtatataaaaaaagttgataatgtggtttcatatataacctttgttattacaatactatccatgctttatttttgaaagcatgattgtgtattgttaggatatatgaatgttattttcatgcacattgcaattagatagtttgcactctctgattcatctcaggattattcttctgaaaatgagttttgtttaatgatgtgaaaaaattatatgaaatcaaattgttcataataaaataaagcttagttaagtaataatttaagttgtattcgggaaaaaaaact

SEQ ID NO: 42608 - DNA, 1275 bp, Oryza sativa
actttgagctgtaatatctttcatgtgattaattttaataagagatcagcggatgattgctcccaatagcttcaggttatactttgagcagtaatacattttaagtgggtaataccaacagcaaagtgtgaaaaatcatcacccatcattagttccagcaacacccgcgtcgctccgcgttaggggcgacataggcggtgaacaccctgtcacgactggaaataacccaacagattctccattcgtgcgtgtattatttctcgtcccaggagacgatgtacatagaagttgatacaatatctatctattatatactaaaagtccattaaactttctataaacgctattaaaccgtcaagtggcgctcctgcaaacactcctagatcgccacatggcactgtttaatctcaccgtcgatttttacttaaattggtggacccaatattttagactattagattagatgtattattttaaaaagtaatactttcctcctatgtggtccggaaaaagaaacagaagtattcaatatgtacgacgtacatctgaaagaaaatcgattaaccttacctactgctcactggatgagagaggaaagaccatgtacagcttatatatatgatgaaaggttattttcaaccgttatattagatctatttaaaaaaaaaactcacttcttctaatctcccgttcactactgctcgtaaaaaaagcccaaaataccaagtacatacataacgtactataataaaagtagattacagaaaaaacataaaaacacaaattatatacatcaatttaaaaaatacaaccgcttctctctccttcccacctttttccatgtatatgtgagaacataattatattactgataataaatttaaaataattataattttacaaacatagactatatatatatcatcataaagtaactctttacaaataagtataactgaaaattaactctacaatgtttaaaggagaagtttataaaattagatttttaacccattaaattaataatataagataatatttttcttaaaccggtggactcattatttccaaataacacattgtgtgaagtttacaccattatcttttatatctattaaattcactatttataatttatgtgtactaatttatacttaaccacaagtggacccattatttgagactattttttagttaaaatatttgaccatcaattttcatttaaagtgatggataataaaccatatatatatatatatatatatatatatatat

SEQ ID NO: 42609 - DNA, 705 bp, Oryza sativa
taattattaaattgaggtaatgtgtcacatataaaaacagtttcagagatgtgctagtacaaatcttggtactacccatgaccatgaacaatagaaccaaaatggtgaggcgcgtcgcttgctgtctaagctaacaggcaaaccgtttttagccatcaattgtgcatagtatttttaacagaaaatgccaggaattctgcctgacagttttcattaattctttatatgcatgttcagaaaaccaattgcttcatggaaaagcaccctttattccctgaaaaatctaaattacaccaaaggggaacaaatgccaaacttcttgaccacagtacattcctcctagttgaagcacttgagcacacaatgaaaattttaatcaatctcatttccttgcttttttttttcttttaaaaaaaatcttatcaccaaactttgcatcctgaacaccatccaagttatatgggggaaaacagataaggaggaagttaaactttgcatcaagaacaccatcttccaaagttccaagttaaatgacatgttttttttgggggaaaggaacagataattaatgaagaggtaaaaaaaaagtagtagctgagaaaatgaaatggagtggcttactgagtgtagtagtagaagatggtgccaccatcggagatgacaatgacgatgagcaagctgagaaggacgaggggctgcaggaat

SEQ ID NO: 42610 - DNA, 575 bp, Oryza sativa
agctacaaaatatttcaactacacctgttgcaccatcatatattatttctcaaatgtgaataactaaattggatgtatagtacctaagaaataaatacctcgaataagaatagtccaagccactacataataatatttagagggagaaacaacactgccacgttacatgttgtctgaattgctataaaaaatatgaaatagtttgagaacaccaatcacaacattatacattgttttgcaaacatcaataactaaattagatatacactatataaacaaaaagagctgacttatttgaatagtccaagctgctacataaaataccagatagataaaacaatctgattgcttcatgagctttttaaaagtaatgtgctcaaataatccgagcaaggaaaatgatctttcaccatttgtgaagtgctatagactttgaaataactattgcattgaccaatgcaaaacaattgccttggataattagaacaacactaataggttagaaaacttatcttagccacgccaacaagaatatttttgaagcaatcatacttctgaagtatggcacatgttat

SEQ ID NO: 42611 - DNA, 557 bp, Oryza sativa
agattcatgttgactagttcttttctttaaaatatttaaaataccgtacggtctcacatattaaaaagaagcgctatataagatatatatttgatcaattaaaaggagggctagcaggatagtaaaaaaacttaccagcaatgaaaactttctcgagacttcttgaggaaaaagtaaacaatgagaattcgattaagaatgaaaaataccttactttaattttaacttattttgttagaactatttccgaaacaaaataatatgcatgcccgtgcgaatgcgtgggccatcttcctagtttaacctaaaatctgtagttttatgataaatttggtgttaaatatgtaattttgtgatacaactctttaaatctgtagttttataataatttgatcaaaatacctatagttttatgaaatttactcaacttgaaattttcatggccaccttccacggtctcacccgtgcaccaccaagtagcttcactgagaacggcagacccagaagtcaagtcacttattttcctaaagtcaaacgacagtgaagtgcctcaccct

SEQ ID NO: 42612 - DNA, 553 bp, Oryza sativa
agtgggtttagcctcatcacagatcattggccagtaatgagaatacctcatttgtgatgggttaaaacccgctagtgatgacagacatctatgacgagtggttctgtaaaatgcccctaaaactttcagggccaaaaaaggtaactaatgatagtttctagctatttctgttaagatctctagtgtggcctattatttggcaaaacaataacatatattgaataataatccacggttttgcacttttaacttcagtattaaaagtacgaggtgtcataggtaccacccatcataagtaagtgtagcatccgtaagagatagtcatatgtgactggttgtcactaccaactgtacttctgttggagtcttaattagtatttacaattgggaaaatccagaacaaacaagtaccaagagaacggtaaacctgtgatgcacatttttattattgatatgccgtagagacaatcataaagatgattgtatcacgtactatgtttatgactttataaagtgtttcttgaaatggataacttattattaatcaatgagt

SEQ ID NO: 42613 - DNA, 1647 bp, Oryza sativa
ggaatcaatgggatttaaaaccccccaattaattttggaatccatggtttgatttgcgcggatttggaggaggaacggctctaggttttcccggagagggagaggaggctgagcgggaggaggaagaagacgacggccggcctggcgcgtgggccccacgcgggcgcgcggcgtcagcgcgcgtgcggcgcgcgtgcgcacgcggctggctcaggcagggggggcgccgctcgggttgggcccggaggtggcccaggtgggagggggcggaacggcttgggccgagaggcggcccaggaggagaggagggcgagggagcccgggagagagagggaggagggagtgggccgggaggggaggaggcccaagaggaggagggagagaaggagagggagagaaagagagggaggagagggagactttgggctgggcttggcccaaaggaggaagaggatttatttttaggtttttctttttaataaactttgataattgtttttgttgcttaataattatttccggtgctctgaaaattcaagtaaaatttgagggctcctttttgaccaaggagaatttaacaaaaattctccgggccacattcgaatttttcttgtacgtattttagtgtttgccaatttctttccgaattttaattaattctattattccttttagaaaatgatttttatttcgggatgaatttatcaggacgtgatagaagctcattaggtaagatcttatttacatagttgattaattattagttactaagttcacaaataccattgagaaaaggaatggaatgatatctcattatctcctctgttcttattctaggatttgaaccgctgcgctcacaacgtgttctaagaacttttatgccaataatgtattctaataacacatcataaatctagagaaaaccacaaaaagagaacatcaaagaacacatcatgaatctagagaaaactatgcaaatgagaatctgtaatgctagtagcgagcaaatgtgttattagttactaagttcacaaataccattgagaaaaggaatggaatggtatcacctctgttcttattctaggatttgaaccgctgcgctcacaacgtgttctaagaacttttatgccagtaatgcattctaataacacatcataaatctagaaaaaaccacgaaaagagaacatcaaagaatacaacataaatctagagaaaactatgcaaatgaggatctgcaatgctagtaccgagcaaatgtcttattaactcgtatgatcgtacctacgttgtactgattaaattggggacaattctgcccttttaactctattttgtacatggtatctgtgattgaggagtgttggagttttacctttttgaatgaaaagtcataaaagttctctaaggacagtcccaacccatagtgtccataagcagtgtctatggtgccatgtcaataagacatcacaatagaaactacactctacaactcatggtttcttaaagtggaccattaataaatacatcatctttcttctctaccaatcatatttattcttcatctattatgaagacactattatctcccaatacaaaacttgatagtgtctagtgtataggttctcgtgttgaagctgtgtcttgcat

SEQ ID NO: 42614 - DNA, 1684 bp, Oryza sativa
cgtggaaaatgatcatgagaagcaaacttatgtcaacatcaaggattgggtgttcactcaaacgcgagcatacgacccagaccagctcatcaaaactggtatggatgttgatttcaatgtatggcaagctataggatcagaagttcttatgcctgtagatgagcaaggcccatgttttcttagcatacaatttctttacaccttgcgagatgcgggcaatggtattatgttttgatttttcataacacaataccatctcaaatggaagagcctatgcatttatctgggattcaacaaaaggtgttctgtggacttggagtcaacaacttcggatttcaacaggaacgagttttggcatcacattgtgggtgaagttgtctgtgggaaaccacgaaccaatgacatccacaacccaaccttacgcttgatacacaaatggctggctttactctattccctcgggaagatatgaggccaatatgcaaagataagttgagaatcctatataccatggttaaaaagactaaaatctctcctattaaagctatgatcaaacaatggttaggaaacattaagatgataggaccagttgaatgcacatgcttaattactcttataaccgtgaaagttggagcgttggaggatggtccaatcatagacatcccgagggcccccacgtaaggtaacttgtctcttcatttcatttcattgcatctaaaaaaagaaaattgataaaattttggaaaagataaatagaataccaaaaatatttactttccctgcgaggtaagaatgttttttagttctcaaggttgaaatgatgaacaattgctctactttatttccctctagttcctagtttacagcttagtgttcacataagttttgagtttgttggataaaaatccttgccttgaaattgaaacttatggttgcatatccatgatctaattctaagttgtagtgagatatgagatagtgaagtagagttgctttaatctttcttcaagttatacttgacattcatagttttttttttccaaaagaatgaaaatatataagtttctcaataatggtaaattcctaccaaagtcatatgatgattacattgcaaagctttcacacatatactacttatcattacattgagcttttgaaattgttgtgacccttgtgagaatctcttcatgcttccctgatcaagatcacacgccactaaatatgtttgacctctacactagaggtcagcaaaaacctgccaatcaacccatgatatttgctttacctctgcattgggggttagcaatccatccgccaaataaagtactccatcttgtcgaccaaaatgtatctggtagtagtttgcaaaaagaaatggttgcgattgaaaaaaaaagaagaaagaagtagaaaatattctcaagtattatgtgaagaaaaaaagagaaaaaaaggagaaaaggagtgtatgcccaaaaataatcttgagcatcatgcaaaaaaatatagtctatgacaaggtgtagcaccaaacaactaccaccatatagcctcacacttgcacttgcacatcttgatcatattgtatgatttattttcttcttgggtcctctttgtgattttacaatacttgtgatgtaagtaatgcctcatttatcttccctacattgagctccccatataa

SEQ ID NO: 42615 - DNA, 1254 bp, Oryza sativa
acccgatcctagcatactagatgaattgtacagcttgactatggcttttaccgattcagagtcaaaacagtaagtttgactttgtctttgaaacatcgacctgttaggctgtgatgtttatttactgcatccatgacctgccttattgataattgcgataacgatacaggaccgattgggtatcaatcaagcacccatcgttccccatcagatcaaagcttgaagatatccaggaaacagtaaaacctggaggattgatggataccgattgcctcaacttaactgtgagaaatttggcaacagaggatgctgaaaattttaagaacactgagtgtttgggttggaggcattacgttaaatcagattggacggtaagttggttgcgcaagagttggggggggggggatatacagtcttttttttttcacttatgcttatactcatcagccaaaatttaaattttaaaccttaaatttaaagttgattttgggtttttttcatcgtaatttatttttcagtctttacttttatattgctaaaatatgcataaaaaggtttatttacaacttattttctatttgcaaatatgccattttgtttatgcttaaaatcagccaaacgatggggccgataattccgagtcaactcttctagtagtgtcacaaatgacacctattttttgtttgttttttcctccacagcaactggtcgctagtcccacgaatctgaggattgcatattcgtgtgactctactctgtatgatgcttcaggatcacatctggtatgatcgatcttaattattatatcctaattttgtagggctgaaaaatacttgctaatatcttgtcaccaaatcggtccattgatgaaatatgacttcttacatacgacttaaattacagaatgcatgcattctgttaattaagtaaaatttgaacattatattgttttttaatatgtgtaggtattcatccccgtattacattgcgaccactggacacgaattttttttatttataattttttttattaaaagttttacaaaaataattttccattttgaaaattgacggaaggagtcgcctaccgccctctgggagggcggcgaaaatgacgtggcagacggccgttcgctctcgggcgacggccgtcaacgaaatttgcaggcggcccccttgccgccctccgctagggcgattttatactgtgcggggggccgcctgcaaattggcggcgaggggggcatggaattt

SEQ ID NO: 42616 - DNA, 1236 bp, Oryza sativa
gcctgcaaaattccatgccccccctcgccgcccatttgcaggcggccccccgcacagtacaaaatcgccctcgcggagggcggcaagggggccgcctgcaaatttcgttgacggccgtcgcccgagagcgaacggccgtctgccacgtcattttcgccgccctctgggaggcgatttttaaaaatcgccttcccagagggcggtaggcgactacttccgtcaattttcaaaatagaaaattatttttgtaaaacttttaataaaaaaaattaaaaataaaaaaaattccactggacactatatgctttcaacatgtgtgataagaagctcagtattctggactctctaccagatgccagtgaaggtggtcaggatagtctgaagcgtcatgaggaaatcagaaaaattgtatgtggtgctcttaacaaaaccatggatgttgcgttctgttttttctcttgggagtacgagtttccaaaagtgcctaggcaacagaacaggtgtgacctgtaacacaatgtttcttactagaatcatcttgttgtctgatatatgttttactaagtgtcaagtgattaactcatttcttcctatgatttatttatttagttatgacggtgggttctttgtattcaattttatgcgattatgggatggccatcgactgattcgctggttttcaactgtaagtaataattcctagagatttaattttgattggaatgcatattcagaatactattatcatacatttaatttgtacacattgtcttgttaggaaacgatggacatgcggaagagctttctagcatgcatactctccagcaaaaataatgatgccaccatgcctactaatgtttctgagttgatcaaaacgctcccaggttagacatagagaggttttctatatgtttgtgacagcacaaataatatcttgaggatatactatcacaaatgaaattaattgaaatgaagaaagaaaaacattagaaacattaatgtataattacgagcattaattacattcaagaaagaaaaataataaaaacatttggagcccctaaataccggaaaggaaaaaaattatatacatgagtacgtgaaatcaataaaaaaataaaaaagaacagaactttacgaggacatgcatctttgagtcgtaaatataggtttagtggcatttaacaactcacgcttgaatctaatggcatgagagcaattaggcgaaattgactg

SEQ ID NO: 42617 - DNA, 899 bp, Oryza sativa
attcctgcagcccaatctaatctattagagcatcatgtgatgtcttagagtgtatgtaggatgccacgtgatggtttagaagcgtttgtaggaaaagtttaatgggcgtttatataaagttgtgtgtttgtgcaactatattttctcacaataataatgaacaacgtacaaatatgtttgtagaacatttttgcactgtggatataacattatcacattaaacttttttttgtaattaacgaaataatttgttatgacatcacaggggtgcggagtgaggtttgaatgtttttttaaagaaaaaaatagatctaacaacctaaaactgatttatgtagaaatcgatgatcgaattttattttttttttggattttctctaattcaagagtgctaggtagttatgtagaaatatttgtatgatgtttagtgtactataaagagagtacaaagaaagagcttgctcgatccagaaggttaatatctatctatggatatttttaggcccataaagaaaaaataataattttagttattatggaaataaaaaaagagaaaggaacggacgaagggtaggttagatacatgcgtgagaacacagcacaaaggcatggacagagggagatttttcttaagatagatctcacgatttaaaataatgggttcattgatataaatgaaaatcgatggtcaaatttctccgttttattataataccacgtgacgactcgaaagtgtttatagggtgccatgtgtcgggttaggagtatttctatgaagtttattggtctataattatgatcatcaggtatctataagcaatacgtatttacatgcgtaaatattgctaagataaatgtaatagtagaaaataattgatcaaccatatttaagtggaaat

SEQ ID NO: 42618 - DNA, 763 bp, Oryza sativa
acagaaaggatgcagctggactttcggcatattagtgggacgcagcgacgtctatttaagcttcagaaacaaaaatgggcacacgcctcttgatcttgcggtactgggcagcacaagccgactgaaattttggccagtatgttctattaaccccttgctcctctcctcccacaccctttgcactttcaaacactatctaatatattcctattatatcatatactttcacacaatatatgatattgttgactttttaacatatgaccattcattttattttaaaaaagaaaaaaaagttcattttactctcccgaactatttcacaagaacacttaatcccctaaactatttttttttactcatatttatccccccctcccccgtcccccaactattgaaaatggttaaatttactccttataatagcatttcttttatatgttacgctttatacaagttgttttctcagctgaattttattagagccatagatgacacaattatctaatttgaaaaatatgttcaatttttttcataactgtttgcttgaacattaaaatcatgatgtttgaatcagttttaactatttccaacctatgtaaacagtgagaaaaaaaatctttaaaaaatactgagaagtgagttataacacatctattattcttctaaaatttcggtgcaaaatataactcatacaaagaaaaaacgaaaaagagaaatggcgtaaagaagtaaagtgaactattttaagtagttcagggtg

SEQ ID NO: 42619 - DNA, 603 bp, Oryza sativa
taaaatatttgaccatcaattttcatttaaagtgatggataataaaccatatatatatatagacagagcgaggggctgcgggccgggagaccgagagagcccccgcgccaccggttccaccgggggcgcggagggagggtctggaccctcgatctgtggaacggtcgcgagagagcgagagcacaagaccccgacaatgggtacaggtacgggccgctgagaagcggaataccctactcctgtgctccggtggatctgtgtatgaggaagtgacagagcaaatggagagccggagagctaaagctctagagccccacatcccccttctcttctggttctctggccctcctccccttacgcgggcaagggcctggggttatatctcaaggggatacggcgagcactactgcccatctacccttctactgagtggggacgaggcctatctccaccaaatcttcaactcgcgccttcgcccggacgctaaaacaccgattgcccttgagcgatggcgagagccgccgctcgcgcgacacaggggaacaggcggacactgcctcattaatatgaggagatctacaaaggccgctggctgaatgaccc

SEQ ID NO: 42620 - DNA, 695 bp, Oryza sativa
ttgacggtcactgcacaattatcacgtaaaccgtcgagttaccatcgaggagttgtaacctgcccggtgatggtttgggaaaccttgctcataggcattatagccgtatacaagtttatttcctaactttattggaagataaattgcataggcacatatacttcttagtttcaaaattcgctttgatatgcccttattgaacatatgggatatatggaagttaaatacccttccattacctgggcagtgctttgatttgtctgtttactcgttatggtaggtaattaacagaatacgttcggttggcaccgattaaataaactttcatgcaacaactccaaatatgatatcccacgtcacatccatatgctcgcatagcgtgcagtttatttaacgataggaaatatacaatatcaaggtgttaaaaataaaatggaaacaattcaattaactattgtcaggtactattagaccatatgacgtcgtgggagtaagctactaggttatagcacacgttctattaaaaatatatgttgcccaatagcatcaaagataatttaagtaaaaaaaccatagtagagagaacatgaagtggtaaaaaaaccattgtcacgggttttggttagtcatatttgattactcgtcaatatttttactaaaataaaagtgattgagtttgaatgtaagcaacttct

SEQ ID NO: 42621 - DNA, 683 bp, Oryza sativa
ttgttttggttcatctctgtttttcagtcctttaatggaactgtcatgtcacagattgcaggttatggtttttggtccacttgttaggttacccaagacaggttatgattctggtcttatttctcagaaaggagcatagaagcatttagacagatcaaaaggccgtaaaagatgccaccctcaccctcaacaaggagatctccttcaaggaaactttcctcaggagggtcaacagttttgggaatgctctgcctgctaaaccaaaggatgaggatctcactttgtttgctgatatgcagaaaattgagaacgataatttcttactggaaccctctgaggattttgatgagtcaatctgtaatgctcttataaaccattctcgttctcgtcctttatacaatacttcagtttctataaactattttccgttataatactgcctagtgttaaaaatgttttctactgcaaattgccattaatttcctttgtaaaacaatgcttccgtgtatcagcaaaattgagtatttccctgatgtcaagcttggtgtcaacatccctacacggagagaaagccatgatttgcttgacgttgatggtgacaaaaatgattatgagtggtatgtaaactaaatagcacattacattttgttctatctcgattagtatagccatatgatggttat

SEQ ID NO: 42622 - DNA, 627 bp, Oryza sativa
cattaaagttaacactaaatagttaaattcataaatatgaaaattttctgacagattataattgtttccgtaaaaataatgataacttttccaaccatctccgaccgttttcatccagggagtatagttactgtcaaactcatcgttgatgaagctgagaaaattatgcgggcccaatccgatacctttgcctggtttctgcgtgcgaaaaatctcgatggccagacgtgcttgcacgaggctgtgcgccacggtcacgaagatgttgtgaaatatttggtttcgaaagatgcagatttgggggatgtcccgttgccgctggtgcagatagtggacaacgagggcacttctccgctctacttggcgaccacattacgcagagacagcattgttaaggtgctcacagaagcagcgccatcaggcatgcctagagccgcgtcctattctgggcctgcagggaaaacagctttacatgctgctgttctcttcagtgaaggtacaaactcagtcttatgttcgttgccaagttctgcaaggtttattacatgacatctctccacgtttagtaggctaatatatcttacattttctgcaaatcatgcacaatttgctcctacggagtttcct

SEQ ID NO: 42623 - DNA, 600 bp, Oryza sativa
ttgccattgcccagcgtcgacgcagcataatccccgtttttccttcttcaccgctttaaaattttttgtgttgatctaacaactagtgataaaaaagatgctcaaggaggtagtccttcgccattgaggactgcttttgctgatgaatcggatgtaaagtccgaatgtcttttggcgggcaatggaatttatctgtaacttgtgctttttggcaaataaatgaggtgtggtgcgtgttacggctgttcggctcatactttccccttttggcctttggcaaaggtatttttaggagtaaatcccttgtgtacacatgaaaactcacctaatcccttctataccctcgaattttacacgatcctctatgtacccctgaaatttcgctttgatcccttccatgcccctcccgttaagtttccattagatacgttgctcaaaccgtgtattgtgttgtcagaatttttagaaaataccaaaatgcccctgccaacccaaactaaagttccccttttcttctccctcatcctcttccatgcgaatggcctctgcacgccgccgtcccgctgccctccggccacgcaggtcgttgtccagccgccg

SEQ ID NO: 42624 - DNA, 591 bp, Oryza sativa
ggtactatggcaaagggcgtgggtgggtgaaacctcttcgcccgcagcctttgacaccgtgccttattggcactatggcgaagggcgtggcgtgtggcaaaacctcttcgcctgcagcccttgacgccgtgccttattggcactatggcgaagggcgtgggtgtggcgaaacctcttcgcccgcagcccttgacgccatgccttattgacactatggcgaagggcaagggttggcgaaacatgttcgcccacagcccttgacgccgtgccttattggcactatggcgaagggcgtgggttggcgaaacctgttcacccacagcccttgacgccgtaccttattggtactatggcgaaggatgtgggtgggcgaaacctcttcgcccacaagcccatgacgccgtaccttattggtactatggcgaagggcgtgggttggcgaaacctgggccctgttcgcccacagcccttgacgccgtaccttattggcactatggcaaagggcaaggcgtgtggcgaaacctcttcgcccagagcccttgacgtcgtgcctttttggcactatggcgaagggcgtgggggtgcaggaat

SEQ ID NO: 42625 - DNA, 1094 bp, Oryza sativa
taaattctcaatagctatcttctcgtcactcctcagctgcttctcgaaatctcaagttccccataagagccctaggtagccagccattggagaggtcatgcaaggacaattccatccaattgatgaattgcaatggagtagcagtaggatgagcttgtccaaattgtaccatcctgtgccataactctcattacagcataaggtactgtgtgtggtctcctctcctttccctttgttgtgtcaatgaacagtatgattgtgcttgatgtgacttggtagccgtagtggggctgtacaattgtcaccaattatatccagggaaataaattgccttcaactaatcacccagaagagccactgtgctcatagactgcaaaacaatccagtgccacttccacagtacttgggcatcaataatgccttgtgtaaggaggatgagatccatggaatttaaacattcaaatgcctgcagaaattcataggattttcacaagaatcggtttaatttccgtaaaacgtacagatataattcttatccacattacaaatagagtcttttatgtgtgcaattcactgcatactgtaagatggatgagatcggtttaattttcacaaaaaagggtaagaaatggagcctttttaagcctgcagagagtttcccaagaatcggtttaattttcacaaaaaacggtaagaaatgaaaacaaattccacgttacaaatggagcctttttcagtgtataattcactaccttcgttaaggtaatctgattggggcactagtaaacttagcaggcactcaaagtagttgagatgcagatccattgcagccattctttgggagtgtagtaccagacagagttccactcctagtattgaatgatcaacagtacgccgtgccaagatcaatcgcagccgtcgattctcgatccaacggctcgcctacacttggtacaaaccactgcgtgacactctcacattttctcacacatttgcagctactccagctttcatatctatcatggcacactgctgcaaaaatgcatcacctgatcagtgatcagctctgtttgcctgtctaagtcctctgattc

SEQ ID NO: 42626 - DNA, 1559 bp, Oryza sativa
agggagtaacacaataacaccaatttttcgttgagcacaaatgccagttcagaactaaggttaggttcaggaaattaatgtaggggtcccttgggcctaaccaacccagtacttcacataatgccacttaacccaatgatgcctaggtctagctagttgtactgtgtatgcatgaaagcaacagagctgggtcagtacaattcaccagaattacatactacatccgtcccaaaataagtgcagccgtggatatccgtgcccaacgtttgaccgtccgtcttatttgaaaaatttgtgaaaaatttgaaaatatttagtcacacataaagtactattcatgttttatcatctaatagcaataaaaatattaatcataaaaaattttcaaataagacgaacggtcaaacgttgaacgtaaatagtgtaaaactgtacttattttgggacggagtgcatgcttaattgcatgggactctcttggagttagcttctcatcactgtcccatccttaattatgcatatcatacataagacaaatccaatggatcatagtctatgtatattctaaagtgacagcacatcctaatgctaccaggaaaaaagcctatggctaatccaatttaggtactccctatctgagagggaattaatgtgttaattaattagcagataatcacaagggccgagttgctaaccaagcaagtgcatatctgataaggacaacacccaaatatgatattgccacatgtggggtcatcctttgatgcatgaaaggttaagaccaagacatatatatctctctaggaggttcataatatcatctactcctaattaaaattgagaatattttgctttgctttgtgcaagagtggtctagagagcccaggagggggcaatgatgatgattaggatggaatcaatgttccccttggggctagctaacttttaattatggagacctcatgcatgcatgcatgccttcatgcctgttgctaaagagagaagccctgtactgatgcatctgcaggcacgcttgctcaccttatgttttactgtacatttctagctgtttacatagagtttacatatataccaggttgcagtcttgcagatacataaacttaattagctataattaaagtgattttttttgcaaagaaatgattttaatcgtcaaattttaggtccttgagagttactagaatttttcgtataaaatttggtaccctctaatatctgaattattgggagaaattttacacgggacctctcgagaaccgtaggtagaatcactattttaaactagttgacctcatgagcaccacaatttcactaagtaattaaaaaaaagaactcacaaagtcattgctagtacattcaattattgtttattaataagcctaggattgatggtccttagtgctttatgtgatttatttctttaaactagttaatgtgtgttttggttttatacatcttaattatacaaaggttgagagtgttgtcattgcagttgtatcatcttgatgcaatttactgagttcaataaaaacttctat

SEQ ID NO: 42627 - DNA, 935 bp, Oryza sativa
ctccagaagtagaacaaatcaaaggtgaaaattttcaagagtatatgttagttccaatctgcacatgactgcaggctgaacatatgtcacttgtatttactgcaagaaggatacttgcaataagtaacagaatatacagacttgaggggcaaagattgtatctctttctgaatttggtcatacatgtaatgcatacaagcttttaagatgatggccctactcaataaaaccaactaaccctagagtggctatttctgaacattgctacataattttatactgctggtacctaacctcacaatcttcctttgttgattgacagtggggaagctaagctttagggcctttgccctaacttgaggaagaataaggccatcttaggaagcatcattggatgcctttcttgaccacttttgacactatgctactactactacctctcgatgaaattgtcttgtcatgctttgccaccacatgcatttctttctttctttctttctttctttctttctcatgtccaagattattcattttagttttttctaagcacagaacagagagggcccaatatatggacccaccagctcattgagtggactaggagcaatgcgggtgaatttatctccatcaagtctattcttgttgtcagttgctatgtacagtactacttatgtgttctacccttgatgtagtacatttttttctgaaagctgcatgccaaagttcagcaataattatattatgcattatgtactcaaaatcacttcttttcatctctctctctccaactgatgtctctgtaagattgttactgtatattgaaaaaaaaaagaaaacactgtactccctccgtctcaaattgtacacggatctgaacgtagctataaaagttggtttattttaaaacggatgaagtatctaatatgtgaaaaaag

SEQ ID NO: 42628 - DNA, 642 bp, Oryza sativa
cgatccaggcgtatctctgatgtcgatatctggcggcttgtcttggcgtatgttggcttgtatgttgatcttgtgtcttgatctattgttccatgtatgttgattgtcgtctatggtgggtctcttccatggtgggtgtgtcccctctcctcctagggggccttgtatttatacccatagatacaatccgagtagtccttgtcgttttcatgtagaactctggttgtcttcccttatccgaaactcctcctatatccacaggttgtttccgtataggacatggtatgtggtgggtcctgccgagatttagtcgactactattaggtatgtggtatccataaccctgacacttatatagtttataaactataagagagatgtgtaaaatttgtgaacaatgttactgtcactttgtcagatgaagaaatgactaaaataaatgttatagatattcatgagttatacaactttgtttttatgactttttcagtggaaatcatttaatattttaaaatgttgtttgaagttgtcataatttgaagttcaaattcaaattattgaaacaaagtcatatagcaaaatgaccaaaataaaagttatagatattgatgagttatataattttgttgttgatgacttttt

SEQ ID NO: 42629 - DNA, 665 bp, Oryza sativa
attgttcacaaattttacacatctcatatggttttataaactataagtgggatatataaattttgtgaacaatgttactatcattttgtcggatgaagaaatgaccaaaataaaagttatagatactgatgagttatacaattttgttgttgatgacattttctgttgaaatcatttagtatttgaaaatattatttgaagttgtcataatttgaaattcaaattcaaattattgaaataaagtcatatagcaaaatgaccaaaacaaaagttgtagatattgatgagttatacaactttgttgttgatgactttttcagttgaaatcatttagtatttgaaaacattatttgaagttgtcataatttaaaattcaaattcaaattattgaaacaaagccatatatcaaaatgaccaaaactaaagttgtagatcttgattagttatataactttgttgttggtaattttttcatttgaaatcatttactacccgaaaaattatttgaattgagaggagggaggcaaaatagacttctcggcgagggaggatcaaaagggctaggccggcggcccgaagagagaggaggaagaagagagaggctgcgggttgagggagggagagagtaatacttgggccgaaaaggccccagggctgcaggaatt

SEQ ID NO: 42630 - DNA, 1289 bp, Oryza sativa
gtcaatggtagtacaggtcccgacgctaattaaccgcgagcacgactactcgaatagattgctttactcacactgcagtggatgtacgattttaatcccgtactccgcggcttgcccaacacatgagcctagtcccaacacatgagactcgccacggcccggcttttcagtcgctctcgcatttcggcacctgctccaaggactatgaacccccattgcaccccagcactccaaaaccctactgccggatggtgaggggagtcctggcgctcccgggaaatgggatatctactactatgaatgaggtgccgccccacgagagcttcctaatccatcaggtctgcccatacacatgaaatgcggtcgtacttttttcgtttcccgtatagcttcttgactcggtccttaactaacctgggtcggcgactaaccatttctagacccacccatattctattcatgccgccctagtcgaaatagttttgttgtattaagttttggttttcgcaaaaggtttgtgtgtggcgggtggcgctcatgtctccaccctcaaatcatcaatcactacatcgagtgatctcacatccataatcatctagcataaatatggagtgtacgtatatctacaatagcattactaagcattgtcaataattgaccgcatataaataaatgactcaggtgttcaaaggtatacaatatgtataaaggtaatcaatatcagggcaagctataattaattgtaggtacacaatttataaatagcattaaatttatttgtaaacaaaaaatttataaatataggatcaatatgttcaaggtagggagcatagtgacttgccttgctatcagttcctaatgtctttgagagatccgcagcagttagataattagaatacccacgatcgaagaataaccagaatattcacgttcgataaacggccaaagaaaccacacacaatcctaaaagaaatgaaatagagtaacattcaatacaactaatggtgccattaaatagatctcgatttttgagagattatggaatttgaacggagtcgatcggagttacggtttgaaatatatggattttcgaagtcaaaaggttttataaaccgaggaggagctgctcctcgggtagggaggtgatttggactttcagagagggctttgggctgtatagagatgcaacataaactttggcgaacgcgagggttgctggtgggttacggctgagatcttggagaagggaggtaatacatactctataggaattgctactccgggtttgg

SEQ ID NO: 42631 - DNA, 1545 bp, Oryza sativa
tagttttcatctgagtacaagccaaccttagatgtcagaccctgcccctatatatatcaggggggggggtttcccggttaaagggaaaaaaaggatagatcttatctctactccggttcagattagcccacaagaaacatatctcctagagttgtttcacaacactcccccttgggcctatccgcgaccaactcatgcctcgtcaaaactcctaccaaaacccagtgggaaaaaggctaggagaaagagtacaacactatggactacacggtccatactgtgggtcatgttctagggtgcgctccccttgaacctagcaaacctcaagtcttctcatcccaattctccagacaagcttatgagaactaacagttgggagagactaggtgatcaatcctctagattatcactcaacttgaattgctactcacctcacctcgcctaaggagttctgtgaggtagccaacttgtatttggtgtcggtcaataaagacatatcttcttatgataggaccttagaaacaagtcaagtgatcatcatcgagtcaatgtccttggcataagacatttcaatgtctcgcaaatgacaatcaacacatagcacatactccccctgacgacaacttttgtcacaaaccatgttccaatagcataaaacatctctcagatgtatgcgtaggcaagaatccttcagatcctcaaaccattagtcttaaaagacttatctcatttcaccactaaaacgagaatagggaacatagagagtaatgccttccatcactatcatgtaccataataccatactgttgtgcaacgcaatctatttcatccttccaaaggattatggggataaataagtcgcaatggcatgcaccacctgggcgtgactctatcaagcactaggcctgatcattgcaacatactccgatggtgtccacaacaattggggatccacaagatcaaacacaagccttccaaagacatgttgtaacgatcagagcaattagctagtctgaaaatttaagcactgtgggcatagtacaaaaaaccggaccggaccgacggttgaaccggaaccagaggtttgggcggcccctgcatctgaatcggagcaaaccgcctgaaccggacggttttcatgtgaaccggtgaaccagggcaaaccggattcgaacacaggttggttggctaagatctccatgcctccaccatccggccatctttcatgtgggatgtacagagaatatgcaaataaaataagacttccggttcagcattcgaaccacgtgaaccggcggttcaagcgctagactggtgacccaaggactcaagcggttcgatctccggtccggttttttcaactatgactgtgggggataacacacagccaacaacaccaagtatacctcaataggtattagacgacaccaccattccaaccatcaggtggagaagatttcaccagtgtacacactctatgtgcctacagaccccatctgtttgatgtcattaggttcctcattgcaatattatcgggtcacaaat

SEQ ID NO: 42632 - DNA, 891 bp, Oryza sativa
cccgaatttttgtccttgtgacatggcgaggggagagggatcgctctgctgaacgaggggccgaacccctggttcggccgaaccagggagctcgctaatcggctccaaaattgctggggagcctggcacagctaaaggggttgagcccatacagcattcgccccttccatcgtgtattcttccaccggaatcaattgatttgccagtgtcggctctccggtgaggttgtatgtggaattggatgaagagccgatgaatggaatcaaggatttgctagccattagaggttcaaagaatttggatcgaaggtcttgggggtgaatggcagattgaatagagaagcttttgcaagggaggaagaaagagaggaactagcttcaggggtgtgatccgatcgttctacctccaaactggcatcaaaatagactcaggactagcgggggagactatcattcaaaaatggggccgaacgggtgctgccctggttcggccgccctggtgggcccggctggccgccacctttcttcctattgccactaatttctaagctaagcacaaaaataacaactatacatggttttaagcatgcattagatgagatcaccatggttcataaacaattaattcaataacatccacttcttcctctaaagtttcatttggctcaaggaaaatctttaagtgttgactgtttaccttaaatatgttacctgaatcgtcacggagtgtgattgccccttgcaaagagtgtcgatgacattgaacggtccttcccatttgctgcgcaattttccgtggccaaaaagctttaccctggagttgaacattagcactttgtctcctggctagaatttcttgatttcaattcttttgtcatgccagcacttcgtc

SEQ ID NO: 42633 - DNA, 849 bp, Oryza sativa
caaaatagaaatcaacacacctgctgagaattcctaataaaacaaccaatcaattaatatcattcaacaacaaacaagatcacctcacaataacaagctatccaataatttttttcatattataggctgtaaaacaactatgtaaactatgtaaacctgtttgttcagatgaggagtatggcccaatgaaaaccgaacttgctgctcactcctatcttgagacctatttagcatatggatggcttctccacctgatgacctaaaaatacagtaataaaaccaaggcaacgaagaattataccagatatgtattaggtaaagatgattagcaaataaatccttaaggattttttaacctgctagtaaagaaggacatgaagcataggcgtgtgatgatgcccattgaaccgtgctagacggcgggtcgatgatggcagcagccccgttggcggaagtggccggattcatggcgccaaagatgaccagatggtccagatcttcttggcctcggcggctatggtgccgggcgtcgacagttgggggaagagcaagcgcggcgtaggtggcaatgtgggcaagcaccatgggaagaccctcgtggtagccattgatggaaaagagatctgcaagcatgttccctgtcgacatctcaggcgccaccgccgatcctctcccgccacatgctatcaaggtcacttatcgaacgcaccgccgtcgctggtgtccatctctacctcccgtatacaccgtcagctcagcttgtccgcctgatttggctcgataacggcggcttgatcctcactcgcgggcgctgttgatgggggatcggctgtaactctccaccgaagg

SEQ ID NO: 42634 - DNA, 2074 bp, Oryza sativa
acggatataccaatgtagcacttcccctatggagtattacaagggtatcgaatccaagggaacgtgtatggtcagatcttcctccggttcatccatggacaccaagcaaaggataggcttggatagagaggatttactagtgagaattagtgtctagggaaagcttaactttaatcctaacacaatacttcaggcactggcaacccgctgttcccagatgtcgctctactacgtacccggacaggaaggacttaagtgatctcgagggctgtcaccacctctacacctacctcaacgtactgtgggacacgcatcaattactggataataattacctaaacaccacgtctaagcaattaatatctactttagtgtttataactcaccaaagcaatcactatgttttagttgattatagtgaacaataatcctgtatgctatttagaaactaaccaagagataattctcacaagataaatctaaattactcaagaagaatattatattgaattcagagtaataaacagaataaaagaaataggagaagattaccgacaactccggaattcttccaacttcttctactctactctcttcctattctagtatagaattgttgatgtaaaaacatgaggcctgggagatctgcttaactccagtgcaggtccaaaacttgcctttgggtgtgtgagcatgccagttgatttgatcctgcaatcaacaagagacaaagacaaagaaaccgcggttaaatctataaacgatagccgatcggctagatgccgatgacatatcattgatcttgagccgatgtcatatatgcatcgatcggcagacattaataagtaagaaagaactaaatctacttgatcagctgttgatattaacaatatataatccttatgtcgatatatacttaaatcaagtgattgggatagattggtcgccatgtcgagacagtataaatcacttagaccgaaatatatattaacaacaagattatatatgttcatagcatagccgatcagatagatctagcatgtatcggctaatactccgataccgttttatattgagatattaaagcaagtacaatataccaaacggaaagcttaatatacttaaatacgacgagatcttaacataaagggcggatttaacatgtcaatcaagcacataagataaatatattcaaatcaggtaagatcggctgaaaccccgatgctaccctaattggcaaccaaaggcaggctagagattgagattctaatcacgactcataagatcaaatccaactgatgcagctataagtatgaaaaaaaagacaatatctagacaattaagccgttggatgtgtcatagagtggtggatatcctatataatctaagtcaacatcggtatttaacctagtcggctgtcttctactgacagatcgatgttagccgattgtaggttagatagcgatattgccggagattatataagatatatgataattcaatttatcacataaacaagattagagtatcataaagatggaagcactaatcccgagaatgcaagccgccacaataagttttacctcttgttgaagattgaaaccgatgcagctcaaccccaaagcaagaactcgtcgaaacaaaacaaaagtaaaagggtggctatgcaccgagattgatttgaacgtgtgttagttttattacatggggctcggggtctatttatacccgagattacaaaatatgtccatatcgggcatgactcttatctctaacaaactctaagatactataagtctttgcggcagacatttgcctaaacatatctctaaggaaattacataaaatatcctaattaatagatacaattgccttctcaggactccatccacgcgtggcaatcatcatgaagcacgtcaacctaacccgacaacgtatgccgtgtcatattgttggattcggctcaatcggctaaccctgtccgactcgaactctgccgatcctagtcgctgccgtttcggacttcagccgattctactctgttccccgagcgattccatcttaaattccacct

SEQ ID NO: 42635 - DNA, 659 bp, Oryza sativa
tgacacctgaatatgtcgatcactgcaggctgaaacattgtctattgacttaataaaaatgtatacacttcaaatatatctacttagtcacaccaatcttactaattccactatgcaccaatagaacaattcaggtttagcaagaaaagaccaacatattgtctaataataatatgtactatcttaaggtttcatatgaataggtcagttttttatgtagcctagagcatttcaaatggagaggtccctcctctttttccctgattgcagcaagaatttcgtcatggaccttcagaacagcatatatattgtaacataacatttgcacaatagaagtgcaaagtatacataactgcagaactgccgaatgctacgattaatggtatgaaatacccaaaaaaaaatgggctcactgctttctcttaatatttgcttgatactattctctgaagatattttttcttaggatctggatacctaattagatattcacatctcagaaatgcagaagctaatcatctctcttcttatcctctacatgtattaattacataaagatgattaaagaaaaacacatcataaggattatgcaaatttcagtacataaaaagatagcaattgtttaaagaaagtatcgctataactcaagatatgtcatt

SEQ ID NO: 42636 - DNA, 608 bp, Oryza sativa
aattcctgcagccctataccatgacataattaaaaaactatagtcaaaatcacaattataatatgtttgagagaaacaattggcatttgatacaatataatatgaaaatgaaagggagaaatgtagtctgacatatacaccctttatttacaaatttacgatgtcttgaacatcaatatgttagtgaatacctataaattgtaatattatgggaacatcttttacgagttgtgaaaaatctagtgagactttttcaactgatcagactaaacatttcttatatatattataggaaaaggtagagacctttaactgcacgttttatataaaatcaaaagtatctaaatagagggtgtacctaaagctgcatgtgctagctatttaaaacattgtttacaacagaagggttactaagtggaatataccaccaaatcagatgaattaaacatgaaatcaattttaagcgcagagatcccttttgaaatgataaataataatgaataaatccatcagtccaaaagtttaacaaaaggtccagacagatgttgaacatgaactagaacattgtttgttactagctatgtggggcccaaatgtcagtgggtggt

SEQ ID NO: 42637 - DNA, 1621 bp, Oryza sativa
taggaatataaactgcaggggagacacccgtactgagctgtcaccatcagcggcctgcaaatcacccagagaatatacccccaaataatgataagcggtaacctaagctcatgcttaaattactacttattactctacaaccttgcaatcggtgcagagcaccatagtcctcgggccatagctctcggcctagccagagtagacttatgaccaggtaatcagacattataccaacatcaatgcaaatcccagaaggtttaactacacagattatactacttatgaataaactaagactggtactcatactctatgattggaataaagtaccgaacttgtataaagaagaatattatattgataaatggaagtcttacaaagaagaaaggaaaaggtatagaacctttaccgaactccccgaagcctccgcggacttggaactattctaactctactccactaacactactactaactttgtagagagctttgatccttgcttgagtgtgtattgaaagtgaaggaggtgaggtccttttatagcacccaatgacggttgtagagcatgggaattgtcggaaatgccctgcaaccgccatccggagttcatccggagcgtctacaccaaaggggagagccaacggctgagatcaaggttcgggcgaacctagtggttcggccgaaccctagagtggcccaataggcctggtttttggcctgctgctacctcctcggtctcccttatctcttggccaaaatgtgactggattgggctcaacaaagggtcggcggaccccctatgggctcttctggccctcagcttcctcctggagacttccatgtgggcccctaaatcagtgacatacattctaggcccatttgtgattattaaattggacttttgggccttctcatgtaattgtagatcgctggcagactttcgattgattgatcgatatatttccacctccttctcttcatttaagagtgcttctcctgcatacatgttagtagcaaagcatatagttgaagtaactattttatttgagaattatgcatttcaagcatagctagtcttcatatattggataatattgacggttgaaattggtcgataacagccgtcaacaaaaccccccaagcttgaacctttgctcgtcccgagtaaaggacgaaaggaacaaagacttggttgttgatcaggagttgctgcaatgttgtatatctcaaagatatagatgcaaggtatgggtactctatctcaaattaaatatgtttggcatggtggcttacccttacccctgattcccacgaaacactgcatctccttgtcttgagcggttgagagacagaacagtaattagagcgctagttacccaatctttatttaactttcattccggaagttttaaaatgatttttgcaaaagaaagccaagttcctcaaataattctctagatcactcaaagtgtatgaatatggattcctcaccagatttgccttttgattcctactctaaggtttgatatgtggagcttggtagggataaaacatggcacacttgtattcacatttattactaaatcaaaaacttggactaaaatagatgactaatcatact

SEQ ID NO: 42638 - DNA, 1758 bp, Oryza sativa
cggagcagagtataccgatagctccggtactcctcccgaattcctcctaggaagctacactcgtcgaggcagaagtcggatgagcgccaaacttctgggcactcctccagagcttcctctcactctctaccttattctaatgtataaaagatacaatagagcctcttgtaattcagctcaaagttgtgtgtgttggaatgagatgaagacctccttacataggctccaaatgacggttaggggcatgggaattgtccaaaacaccctgcaaccgcctctgggaaggaatccaagccgtccacgtggaagcagatggcgaacggccgcagaacgggttcggccgaattggtgggttctgccgaacccaaaaatgtgtcatcccggcctctcctttggccggtaagttgcttaatgggcccccaataacctgcaccatgttttggcccaattttaaatggtttttattgacttatggggcctccaattcgtgtaaacgtgtcctgaatgcgcagaggtgcattttgtcgcatgacggatgtgttttctcctcaaaatacctgcatacacatatttcaccaaaactagtggaaatgattagtaataatacctaccactaagttggataccatgttttatttcattatatgtaggtattgacggtcagatattatgatttaaggaccgtcaacaagtatccgtttccacatcaacgggaaggaagagaagtttgagtttcaaccaaggacagaacaatgctccatggtcaggataaagtacgggccgaacccacagaatattcaagttgttgttggcggttgttaaatgccattctcataccgccaacatctgcataaagtcgagacaataaaacatccaacatagtaataggtgcttaatctcacatattccacaagtgttcgtgtatatttgtatgcagatgataaaccctgaagttgggaggaaaatcagactaaagtgaggagaattatgtatccatacaaggaggggttgtgaacttcattgaaacatcagtaaatcaacccaaaactccgagaaatggatagaggaaggcctaggaagtccaccaaccgaaggccagactaggagggcccagcccaggttcggccgaaccccctggttcggccaaacccttatgatcgccgttgatcccaggttttggcatggacgtcccagatcactccctgatggcggttgcggggcacttcaaacatttccccttcgccaaccgtcatacctacccctatataaagacatcatctcactcacttcaacacacacttccaagcttgagctgaattataagaggctctattgtactatattgtatactagaagaggaagagagtagagtagaagaagttggaagaattccggagttgtcggtaatattctcctatttcttttattatatttattactctgaattcaatataatattcttcttaagtaatttagatttatcttgtgagaattatctctttgttagttcctaaatagcatacgggattattgttcattataatcaactaaaatatagtgattgctttggtgagttataaacactaaagtagatattaattgcttagacgtggtgtttaggtaattattatccagtaattgctgcgtatcatacagtatgttgaggtaggtgtagaggtggtgatagccctcgagatcactgaagtccttcctgtccaggtacatagtagagcgacatctaggaacagcgggttgcca

SEQ ID NO: 42639 - DNA, 757 bp, Oryza sativa
gactacggcaataccctgaactattttagcaagaggaaaccactcgttcctttgccacctccccgggaaaattttttccccccctttaaaatttggggggaaaaaacccttccgggggggttttttccctcgggtacctacgagaaactgtctgggtgttaacatccataatgagcgatgaatggctaagggaggcagagctttcatccgaagtaattcggataaataccgctccccgaatcattccttgctatatggaagggaacgacgtcggtattctctacagtccaattgtcggggccaacctcgtctctgagtcttttgcattcgcttatttaagcgataaggcagtgaccccaacaaacaaatttttcaaacatccgaacggaaatatcattggaggatttgggattgtacaagatgtacctgtctgctttgaagacagggaggcaatcttggatttccacatctttgaaatccaaggctttgacatcctaatcatattgcccattgagcaactcctaatcaacacaccccgattaggtagcctcaaaataacactgggagaaaatgtattctcaattccattctcacgggcaaggatcaccttgaccgaccctctcccagaaattgagtcagcggaagaggttaccgcagttccccttcatgagtctcccgaagcccttttggaagatgagttccccaattttatcaaagaagaagcagatcccggtgagactctcgacctgccaatcat

SEQ ID NO: 42640 - DNA, 712 bp, Oryza sativa
atattacatatatgcatgtgttggttcctaataataagcaaagaaaaataaaccagtcatatcaccttgaaactaaatcaaaatatttccatttgcacattatgcaatatatatcatctgcttaatgaaactcctctgttgacaaaactcccctacaagcaaccttcagaatgccttcttccgcataatgaaatgataagagctttgagtatagttctatttggtcttacctcctaatagaaatatcagtaaccggatctaactttttttaaaagggaaatgttattgtcttgcaaaaccaatgagcagtgtaaaaggttaggaaatattattaattcaataagctgcaagctgaaccagaggaatggaatgtgctgatcataatagctttacgctgatgtgaagttaatctactgaatcattttatcaagcatttgttgaatacaataatcaagtggaactttgctcctcattccaataagcatggatatttatcagtggatgagactctgactaatgtttgtgaatttaatttctaaagtttaactgcagcacataggtttcctaaattcatgagtatttatagaatcaggttagaaagcaaactataaacataccttttgcttgctctaccacttcaacattgcagtttcttttcctttcccacattccaaaccagattgcaccctccccccccccgggctgcaggaat

SEQ ID NO: 42641 - DNA, 615 bp, Oryza sativa
agaacaattttgaatcgtattctagaaaatacttccttcatgacacaatccaatgaaccccagcaggaggcattcgtgtccaagatagaggaacctctaatgatcgagccacgcactgaaccatccacttcagctagctcgattgatgagaaagttcttgagcaaccgtccgtcgaggatgaagagattcagactccggattgtgccgcaattctgttcatggacggcttcgacgaagactacggcaataccctgaactattttagcaagaggaaaccactcgttcctttgccacctcccgatcctatggaactcgggttcctacgagaaactgtctgggtgttaacatccataatgagcgatgaatggctaagggaggcagagctttcatccgaagtaattcggataaataccgctccccgaatcattccttgctatatggaagggaacgacgtcggtattctctacagtccaattgtcggggccaacctcgtctctgagtcttttgcattcgcttatttaagcgataaggcagtgaccccaacaaacaaatttttcaaacatccgaacggaaatatcattggaggatttgggattgtacaagatgtacctgtc

SEQ ID NO: 42642 - DNA, 668 bp, Oryza sativa
ccctgcataagcatgagtcgataactcgacatgctagataagctttagacacatgtgtcccggaaacactagtgtgtagaggatacacacatctgtgcccatgaggtggtgtgagtgtggtgtgtgtttgctgccctgtattgataaatattcagaaggacttcagtgtaaaagagggttataaagtcatccccacccctcctcccagttaatctacaagtaacattaaccctaggtggttcttggataacacagaatccatcataatcaacggataaaactaagaatggtgggacccatatatatgagcatctaatcttcctcttcatgtgccttcttcctcctctcctcttctctcaagtgctgtaccaagcttgccagttcctctgtaatgcattaccacctggtcaagcatgccactttcaaagagcagcagccctgcaagcctaatagaaccttgtttcctaggccaagacagcctataagcacgtgaatgctctgctccaccgtgttgccattactggcctagaactacaagccttacttctgagcagcagtcatcaactagaaactaataatactatttgttataaaaaggattttcctatgacatctagaagccacatactagtttacatgggatctataaattcaactacaccaagaaa

SEQ ID NO: 42643 - DNA, 615 bp, Oryza sativa
  unsure (1)..(615): unsure at all n locations
tctcctatgtacctggacaggaaggacttcagtgatctcgagggctatcaccacctctacacctaccgccaaaaaaacccccaaattttaaagncctttgggggtttaaattggaatttaaaccggccaaaggccccaaattttaaactggatataataaattacctaaacaccacgtctaagcaattaatatctactttagtgtttataactcaccaaagcaatcactatattttagttgattataatgaacaataatcccgtatgctatttaggaactaacaaagagataattctcacaagataaatctaaattacttaagaagaatattatattgaattcagagtaataaatataataaaagaaataggagaatattaccgacaactccggaattcttccaacttcttctactctactctcttcctcttctagtatacaatatagtacaatagagcctcttataattcagctcaagcttggaagtgtgtgttgaagtgagtgagatgatgttttatataggggtaggtatgacggttggcgaaggggaaatgtttgaagtgccccgcaaccgccatcagggagtgatctgggacgtccatgccaaaacctgg

SEQ ID NO: 42644 - DNA, 614 bp, Oryza sativa
tcagttcaattcaattcgtcggagaacttgcatctccaactgatgaacactgcaacattttgttcatagatcgtcgacatggatgcaatgtaatgtagtacttggcagttgagctctgtgtctccatgttgttggcgcgctgcttcttggagtactcgagcagctctgctccctgcgacggcgacgacggcgtgcgtgcccgcttctgcgaaccagaggcggcagcgctcttcggggtggttgtcacaatcaccatgccgttgtcgccggaaccgccggagctgaagcaggaggaggaggaggtcgtcgccgtcaggccatggccgattagttgcagctcggtggcgtgggcgtccatgtccatgtccatccacgaattgcgttgtgctcctcgccgtggccgtcgaaggtgagcgcagatgacgaggacatggaggtagctgcggcggcggcgtggaacccccatccccaattccgggaaaccggtttccgtttggccgggccccaaaaaccccgggggtttttaaaaaacccccccgggactgcgggtcgcgcgcgtggatcagctccgtgcccatctgtagtaatggctagcactagtgccagcgaacccg

SEQ ID NO: 42645 - DNA, 601 bp, Oryza sativa
  unsure (1)..(601): unsure at all n locations
agatcatgcaccgattgttgttccctcctttggttagataggaaacggatattagaaaatagaaatccatgataaaaaataccagtgataactttgtttcacatcaacactgatagcacaatctaacatattaataattcccttttatctccgtgtgatatatccaaagaagaaaaggcagaggatgttgcattgtgaatattcatatattatatatatttctaaaaaatcatgatgaaactaaaactataacaagaggtcaattcatcatgtatgttaccatgtctaaagcaatagattaccgcattttaaatcagcataactaatatcataatgctccattaaaattgtaataatacttcatttagcggagctacaacatgtcagtcatagaaaagcaagaagcaaaccttgtctagaagtaatccagtaagcaaataaatgttgtgccttctttttactggaaaaccaaaccccctttggaaaatttattgggtttccggnaaattttcccaaaaccctttggggcaggcctgaaacattgtctattgacttaataaaaatgtatacacttcaaatatatctacttagtcacaccaat

SEQ ID NO: 42646 - DNA, 609 bp, Oryza sativa
  unsure (1)..(609): unsure at all n locations
ccaggaggcagaggtacaccaaaagttgatacatttcagagtttatcaagcggaagcgtaaataattaatttattacatgggcggcgaaggcccagccacacaaagacaaacgggaaacagcggaagactagggcgacgaccacaggcgcttgacggcaggcacgagctagacaccaaagccttcatcttccaggaactcctcttctgggtttgggaaaaattgagcaagactgagtacaaccaccgcactcaacaagacacacccacaagtgcagaataaatgcaagggagtacaagggagccataatatagggggttagggtttgcagtaaacagcattaaaagtcacttagttgctcaaagctactttgtaaacacggtcctagagatatacaatattattaattaaggccgtgaacccacacgaacctgccttaacccaaggccttacgaatgaatnttccaaggaaaacccccggaaaaacccttggnggcaaaaaaaccccccccccggaaaaacccccccccctttgtggtcccagctcgtcccaagccaacccaggccaaccattccacattttagttgttaagcaggttttaagaattaa

SEQ ID NO: 42647 - DNA, 1483 bp, Oryza sativa
ctacattgttttttttcacggttattcatgtagcatgaaaagcaagaaaatattccttgtcttgttcggtttggaggggattgaaagggattgaggaagaataatttcacatcattatagagttggaaaaaagtacccttaaattcctctcttttgggagttgacgaacaaggcttttaagaacgtgttaggttaatcctcacgagaaaggtatcggagggaattgaaatagattaattccacatctcaatagaataattccacacacctaattcttagggacggattaagtgaaaaaaaatagggatgaaattaattgatatcccccaaaaatgtcatcgtgaatatatattttttttaaaaaaaatgtcatcggaaagaaaggaggaaggtagacgattcccttgacaacaaggcccaatcaactgttcacctccagcaggcgcggccaaattctgcaagcaattgaccaagctaggaaataaacaccatatctgcagtcgaaaacgtgagactaaacaggcatcaaaagtcaggcggcggcgactacgcgcgagctgagctcttcgaagtctcgccacctcactcacacactcaccatcaaggcatatattgatcacctacttggaggctccgtgcgtcaaaaagatcagataacaacagctgctaatgctgtggaccatcatcagcaggaagagtgaaatgtagtggagctctgacgagaaacggatcgacctgctttcttcttgtctcatctcagattaattgatcagtactgtcattagcagctatgctttggcttttgcggttagtaagtcaactgagccaaccataacaagccagtttgggaaggtgtgcgtcttgtccgggccaaatgttcatgcagagttaggtgttatacactggtgttagcttgtgtctctactgtgtcttcaagactgcaatcaccgaaaggcgatggcaatcgtggccatgcaagttactagtatatcagacgttcagagggagaaaaaaaacacaaacgcactcagtttgaacagcaaattcagaagttcagtacttcagttcagtgtcactcgtgtagaatgatgattagcaaactgttctgtccaaaatgcatataaaattcagtactcctactagccatgttgagaatgcatatactttgcgttgcttcggactcaaatacaatagtcatgcacttatttcacattgcgggtcgcttcaatcataactatattagccctaaaaaataatactatctaatgactaaaaagtctaaagtgcaactcatctttttcatctagattagattatgtcttttaataaaatgttcagtgaacacatggttgtacagtgagtcagtgactacggaatgtgaatagcgaaagcatcttcttttctttctttttttttgtcattggaaaaaatcagggaaaaaccattcgaatttatgggaagaacaatattttagtagccttgg

SEQ ID NO: 42648 - DNA, 947 bp, Oryza sativa
attcctgcagccctgttgtataattattgtttccagatgttcttggaccgatgatcagagagaacattatgtacaggcacgcctaaccgaagtctgaacgctggagtttagcacctgacagctgctcaccgtctccaatcaactcatcacactaagatggtaccaataacactcacagcaaagtgacaaggtgcacacaaagagtggcaactcgctactacattacaatggaatataacaacacgcatacttcccgagatcctaaatgctgcgatgcaaaaaaagttcttgaaatatcaattcaaattcaaaattcatttcttaaccttaaaatagtcaattaatccgtttatattctcgtacaattcagcattccatttcactccattcaacccccaaaaaagaaagacatacccccgaattaaaggaaaaaccttttgtgatataatgttttcataaattgtgagacccatataaggacaataagttagatgatctaatttcaagtttgatgatgccctgtgaacatgtctcggcccaaccccaactaatgtcagtacggcaccttggattccccaccccgctacaccgccaaaaaccgcaaggctccgaggttttttttccttcaccgaacgcgtctcgtcagtcatcagtcgtcaccgcacgcactcgtgtcccgcggagctcatttctcgcgtgtcgtccacagccaaaaacccaacccaacccaaccgcgcgcgccgagccgtggacgcgagcctctccccgcaccaaccccgcagaaaaacgagaaaaacaccgcgcgattgcgcgagacggagacgaaatcaccgcactccgcaccgcaccgcgccgcgcgcaggcagcggccgcgcccacgggatagtcgcattatacgtatttagtactactagtatatatcctagtaggggggggggggggggggg

SEQ ID NO: 42649 - DNA, 652 bp, Oryza sativa
  unsure (1)..(652): unsure at all n locations
acattttgaggttgacagcatatgtaaacatgaaaatcatacagagaaatcccataaccatgtcaagtccaatggaagtggtagaatcacccaggcaagatgatggcttctaggttgaccaatgctgcatcatgtaagaacttgagaaacaattttggagcaggaaacccatatgggcctcccaattacccgttttattccgttaatcccacctatttatatttctaattgagcccccatataatgtttaacatctcattcttctactctctttgctccctaatagttgcctctatgacaacacacagaaagtagaattgcataactccaatatagacaaagatgatactcatgtgcagaagggcagaattatacaagctctacctctaaagagatctgataatacaagaccaaggctagttaactaaactagcanntaccattgattatacaatttcgttctttcccctactttgatgtccaatattgattttgcccatgtttttagggttttcgtttttacccctacttttttgaaacgaaacaaccgtttgcccctgttccgttaattcttcctaacggtgttaaatgtgtgtgtaagtttggaggggggggttaaaaagacaagtatacccttagatattttcccgtg

SEQ ID NO: 42650 - DNA, 517 bp, Oryza sativa
tacgttcgtgcaacgcgcgttagcgtacactgtacccggcgcttttgctcgccaagccaaacgccacgagcgcacggggacgcgcgccgatcgagtccgtgtgttgtttttgtgggtgggtgatcggtggccagtgggtggtggtacaccagtatccaaagtgtaccatgatccaacgcaacgcaacggcgtacggtgcatccgtacgtacatacatacatatatatatatatatatatatatataacattaaaagacagtaatactgctaaaataattcaactaagagatgccataactaattttggaaataaatatacagtaagattgcctttcaaagaaacactattcaaaaacactattcagtttactgtttaaattactgttcaatactgttcacttcgagagatattttaactttaggatctttgcagggtggcgaatcctatttagacagcctcagaagcttgtttcagagcaaagcttctaagcgcgctctcaccctccattccaccat

SEQ ID NO: 42651 - DNA, 853 bp, Oryza sativa
attttagactgaaatcagctctaagcgcaaaatgtgtgttggagatgaagtacatcaacaaagcattgcacatattttcttgacacttcgctctttctttttaaggaattgcttattattcattgttaacaaattttagacaggttatgcaagaagctgctaggttcacatttgtaccttttggacttcgaaatgcactagcgtactgtcaccacacaatgcagtgcagaactaactttagtaaaattaagagttttgagctccatctgaactccttttcaagagaaaagctctgtcccaagcaaaggcatggtagagtaatcattgcagcttaccatcaaaccaggtgcattctccatacaatgacaatggattatgtgggctcggtgaaggtggtggtctacatgttcagtacaaagcaaggcattggtatgcaaggtacaaaggaaggcatggggtcaaagacatgagcatgttctacacatacacattttgtcttacaaaatcaatctgcaaggctttgatcataaccaggacaattagcgccaccattagatgattctatatttcaccatctaaacttgttaaatctatcttagtcacgcacaagcaataaatgagggagaagctattaaataacctttagccagacccttttttttgctatgtagttacaacttacaaccaagaagggcttattttcttctccattctcaaaattataaccttgcagctgtgtcgtcaccaatcacacgcatttaatgctgagagatgattgtacctcccaattcataaagctaatttaaaaaaaaatagtttcctgtcatctactgttatcagaaatatatattca

SEQ ID NO: 42652 - DNA, 688 bp, Oryza sativa
cattacatttacagttagttctgaacagataaaaagggggaaaaggatgcacaattctatgtaacatcagctaactctctcctggagcgaacttaactccttttctagatacagtatgtgtgttggccaaaatttgatacctcaaaacttgggtatgattctctgttccaatatttagaacaaaattggcagaatatactatatacgatgtacagacacgacctacaagtcagctagtcatatctactcatcagtattaggtaattgtacaaccaagtcggatgacagtatcaggtctgcaggctacttggcaaaatggaaaatgtaccagcttctatattctctaccagggcatatccaacaacttggtttgttctttcaacctgcatgcaaagcaacagtgaagagttagcaatttagcacagtgaaaaatgaggtcccaagtgaagttaaggtacataccttgtaatcaatggacgagactatccccgattggaaggttacaacttgattcatatatagtatattcccgaaaaatcaaaacagtacacggtagtgtacaagtttaagaatatgaacattgcagatgccccaaggacaagcacaaagttgatgcatcagcataatctctgagattctttttgaggtaactgggtgcttccctctgaacatgggggctgcaggaatt

SEQ ID NO: 42653 - DNA, 671 bp, Oryza sativa
aattcctgcagcccctgcgaatgctaatactgcgccttcccatggcgagatttcgttctgatgggttctccctgtcgttggtgctgctgctgatgcagattgctgcctcgcgctctggtggtaagcgatcctcgtcgatctccccggctccatttttttttaccccgacctgatatattcgacgccccccttttcttctagatctgggcgaatctgtctttttatttctgaattaaactagggtttaaggaatctaagtctgatgagcataaggacaatgtgtgattccgcattgagttgttcaatcactcgcagccgtggagattgcctagattcttaatgcctgtttattatgcgcttgtttgcattcttaaatttgatcggattttaggtgcgaggaatacattgcgacattaagggacgcgttgcacctttgtcagttccttttattctttattactgaaaggaccgcggaatttagattggcctcaggaatcagatccaggatgacacattactgtttcatgtaatatattttgttcaacattacgcttcaaagttctcataatggcaaaagtaaaacggttcctggataggaactaaactgaagtttgtcgttttaaagacagctccattagcttcaagcatcagcagcgtcaatgagcagtcac

SEQ ID NO: 42654 - DNA, 868 bp, Oryza sativa
ttcctgcagccctgaaagcttatctgtgagaggattggtactactgatcacgcttatatgtcatgtcttggattctgtcttacttttttaaggcaaggattttgtcttagtagctaactggaattgtaccatcagtcatttatgttaggatgttattactctctccatttaataatataagacggattttatttcattagaacaaagctttaactaacaactattttactgatattatcatctatgtgataaaaaaattaattataagaaagtattttttttgttaatataaatataatagtaacaaaaaattatgtcataatagagtaattgttagtcatagtcttatcctaatgaaataaaatacgtcttataattttcaacggatggtattgcaataaatgaaagatagatcatggataatgcctacaagaaatacgatgtatttagtttttgacatatttataacaaaaggacatgcatgctaccttctcaatgaagtcttggatgtaagtggcatgagatatgcgaaactctgttttttcttgaaaaaaattgtgtaacactcagtggcgacatttctcatccttttgtttttaatttcagaggccagtggttggtaattagtggcaggatctgatgcactttccccctctgttttcttataatatttctgctcatcttttgagcaaaagaaatgaaagtcatggttcctttctagtttctacgcttgccggaaacttgtagtgcaaccagaagtttgctgcccattcaggtatccatctttctatttatttatttctatctgcttttcttggcacgcatctacaaaggcaataataatacacccgtcaaagccatccaatga

SEQ ID NO: 42655 - DNA, 513 bp, Oryza sativa
  unsure (1)..(513): unsure at all n locations
tctctctctctctctctctctctctctctctatatatatatatatatatatatatatatatatatatatatagagagagagagagagagagagatgtccctttcagatcttcagtcccagaaaaaaaaactgaacatgtaagtaattatgcattaagatcatacacatggtaaatcactcattcttttttttttcagtatagtaggctagcaacctttgctcaacgtggtgaatcaaatcgtattgacctagtttttatctaagaaaaccgtttaactcaagtgacagagatggtaaaaaggtgtttctcaaccnnnnnnnaaagagagatgataaaaagtacaagcacttcattgtcatggtaggtaatcgatcgctaaaggtgaaaaaaataaatgcacaaagttggtaagaatttcacttctaaacgacgactacgggcttcgacagtcattttccgtgtaaatttgaaagagaaccagagaaaaaggaatattagatccggagggcaat

SEQ ID NO: 42656 - DNA, 650 bp, Oryza sativa
tctgtgatgtgtggcagtggggttactgtgcaaatagagttgttttagccaggagtttggttacgttgtttggaacgaaattatattgcaaagacctcatctccctctctacaggaccataaatcttaaagcagacctcattaactcccctaattgattagatgccatgcaacagtcatggaattaatcaaatcatgatagcattgacagattagaacatgtcgacttcatcgtttgtatagtgaggacctgaaaagctgaaaaatactatatgctgtaaaaagtttgatgttcgtagtgtcagattcttgccgttttagtcaggctagtgagctgcctttggtatacatctttttaaatgtgggttagaaggtgcacccttcgacatgttcccagggttcactttctcgccggtaaccgcgcggtaaccgcggttaccgggcttaccgtggagggtcggtaacgaaaaccggcggtagggtttgggcaaattttgctcaaattcaaaaatttgaaaaataatcgaaaaaaataaaaaaaaatcatggatgtaaagcttgttttgtatgttgttatggtgaaaaaatttcatcaaaaagatgcaggtaaattcaaatttgagcgcaaaacctattgtgaattataaaaaa

SEQ ID NO: 42657 - DNA, 627 bp, Oryza sativa
ttcagctagctccaaaaaatggtgcactagacaacttgggttcggaatcgtaccttttctaattatttgatattaggtcattccctaatattcacgtcttttagtatagtgcttaagtaagtggattaaaattaggagtagctatattttttacgctattttttagttaaattagttttacacggtaaattattatagttacactatagttatatattgcaagttttaatatttacattgtaatttcttggattaagagaattatgttaaaaacaatttattatctacttagaagagaagagaggtgaggttgatatgaagcgcacttacacacgagagagacactagtacagatccttccatttgtgacggcccataacaagactggaatttgcgggccgtcacaaggaagtaatttcaatcgggccgaagtttcgcccgattgagatatggtcgcacagccatgatatatcggcataaaactaaagcctatcacagatgacacttatctgtgacaggctatagttgaggcccgattgagatgagggttccatatctcaatcgggccctaaaagaagcccgtcacagatgagggtcatctgtgacgggctacaactagaggcccca

SEQ ID NO: 42658 - DNA, 970 bp, Oryza sativa
aattgcatcggatgggcataccgaaggaccccaaaaaaaaaaaaaaacttctcgggttcgatggcgcttgggtcagtccttcgctactagggctagggcctagggctagcggaacgatcgtagttgcagggagacgcggcggcggcgaggagcggcgaggagtgtaggagggggctggtcaaacctgtggtcgcggcggccgctgcagcctggaagggcggcggacctcccgccggcggcgagacgccgagacgccgcttctctgctcttttgtattatttcgtttttatttagtttcgccagaagaacgggaaaaggaagtagacctgccttcgggcctatggtgggccttgctgtttttactaggaataagtctactatagctccctcaactctcaccctcgataaatcacatccctcaaccgtaaaaccatctttatataaacggtattgtaaaatttaagagttatttaagggttgaatatccggttttaaagtttagagtgctatactttcatccaaaatttaggatatatttgaactctttttttagaaaaaaatggcattctcaaacctgcatatacgagtcaaacatcgtcaaacctgcaatcgtacaaactccagatcaccactccaagcccagataaggatccagtgcagtcatagtagaaactacaagtttggcagttggaaccgtttttcattatagaatcaagacaatcaaacggctgaaacagacgctacggttgttttaaacagtaattgctagagtacctaccacaggaacgtacggtcctttatgagcagtatttagaaaagatctaggacgctaatttctaatccaatggtttcagtggaactgcttaatttgtaatcaggtgatcccaaattcccaaatccagcatctggtcccgccaacggacgccgccacgcgtcccttccccgtcgcgctgacgatgccgcggcctct

SEQ ID NO: 42659 - DNA, 652 bp, Oryza sativa
ccgtcaagctttcgttgcttacaacattacagacaaagataataaattaaaaatcacttagccctttttttcgctcattctcttcccccatgtgtattgtaaaagtttctcaagattgctcccaaaaaaaaagtttctcaaattcttatggaaaagggattaatcgatggtgcctttaattaatgagattgtacccccttatacttgcagctattgttagttgttaactctaggaacagagctacatataagagagggagtaccaggaacccggtcaagaatttttttcaactattaattctttatatattttcatcatatgtagtatgtataccaccttcaatgtaaatttagacatcgatattagcctaaatttgatccaaaataaaacggatgacacctccttattttgttctaactctgttcctggtcaccatgcaccaaacaaggccaccatttttcgtcgctggctcgctcgctttctcctcgcgctgtccgatcctgcggccaaccggagacaaacggcgatccacacatgcatcctctcctcccccatccgtccaactcaccacgccgagacaaagcggccacactccccccggggccccacttgacggtcctccccactccccgacacctgggccccacccca

SEQ ID NO: 42660 - DNA, 2114 bp, Oryza sativa
aattcctgcagccccctgaagtgttttggaccacttaatcacccatgttagtatagtaaatagtatacatgatatgccttagaataaattaggttgaaccaagaacccatgtatgctctgaaaattatactaagtaagcacctttttttttaaaaaaaaaaggtatggttactagtattatctttctcagatagatgttgtcctagaatgcgtatagtcaaacctccaaaccttaaatgattaattgatgcaaaaaataagtgtttgatatgagaaattttatttgtcgattttttgtgaaaaacactttcatatatctatgcttttaatatttttttttttgtaaatatatagttaaaagaagtaccgatgagactagtgtatattagacactgtgttgatgtccaaaatgataggtaaaaaggaaggtagtacagattggttgggatgaattaagctaaagtttacttctaaatttcatcggaataatccatcatttatattattaagatgactcaagaacaagacaccatgtttgtttgttgtggatagcaacttctgcattaattggagaaaaagataaataattacactgttagattctagtggttcagattgtcaaagaaaaaggtaggtttgatcgatttagttatatataatatttatgaaaaaaatactccaaccattttacattataagttgttttgactttttttaagtcaatgttctaaagtttgatcaagtttggagcaaaatataataaaatttttaacaaaacaaatatattatcaaaatctattcaatgttttacatttaatgagactaatttgattttgtagatgttgctaattatttttttttacaaacttagtcaaacataaaaaatttgacaaaaaaaagttaaagcgacttataatataaaactgagggatcagtagaagcaaaagttgtgtacaaatgtatttatgaaattgaaaacaagagttgtatatcacaatttacttttaatatttactataaaaaaatctaggtctgcacaaaatcgagcaggaaaccggctaattcagtgttttttgggccaagaatagttcacaatttcggactttctttatgttgtgagttacagatacggtagatgacacattgatctttactctgttactctgttcgcaaggggtgttcccaacatttccctctcgttttccgtacgcacgcttttcaaactactaaacggtgtgttttttataaaaagtttatatatgaaagttgtttaaaaaaatcatatttatccatttttgaaaaaaaatagctaatacttaattaatcacgtgctaatggactacttcgttttccgtgtgcactgtgtatgttcccatcctcccctagcaaacacagcctaacagagcatagcagagcgagagacaattcgtaagacagaactgcatggcaacagtccaagtagaacctgaccccgacaagcaaacaagaagccctatttgtggcttgcaccctaaactgaacatttagtgcaatagcaatgcaagctatggggcccatacccatagcctaaagtcacagctcaaagatactccccccacagtgcaagcacccatatatgtgtggatagagacactgatgaagagtaccaagcccacagtgggcgttacccaacaatgcgcgaggtcacgggaggggcaaagaaattttcctcacctacccctcctggagcgagggtcgaccctatccattcggcgattccagcaattcctctcgtctctccgcctcgtcctcctctcgccgcgcttcctcccactccgccgcacacgccgtcacctcctcccactccggcacacacaccgtcgccctccccttgttgccgaccagatcgattcgtccactccatctcatatcgtctgtccgcccgcccgcctctcgctgcacatctttccctcgctcgtcgtcgcgtcgtcccattccgctgctcctttgatccgaccgaaccatggacgaccgccccaagttcacgcagatcgagctccgtagtgggcttgtgctgctcccgccgggctataccccgtccagagtggctaggggtggcgggaagaagaaaaggg

SEQ ID NO: 42661 - DNA, 1678 bp, Oryza sativa
taaggtgctttagttttttaattgaatttatttaagtttgatcaagtttttatgaaaacatagtagtgtttttaacacaaacaaacatagtatcaaaatatatctttttgactgaatactatcaaaaatctacttttttaactgaatactatgaaaaaaactattcaacatttaaatttaataaaactaatttgttggattttctataaatttaatccaactcaaagaaatttaactaggaaaaaataaattattttataatataaaatagagggagtacatcacgttttatcatacacatctcacatatacccctcacacgaaaaactcttttgatccctcgtgagattgtcaccttgtttcttcaattaaataacatacaaatagttattaaaatgttcttagaatgttgtactcgtttgatccctcgtgagtatgttcttagattttgtttttacaaacataaaagctaatatgacacgaatcttgcacgatgcaataggtccactcgtcaagttgcaatttactcattaagaggtgttctctgcttttcataatgtttgtctattatcttgaagtatggagtttcacagtatttgtttgtagtggaaaaataaaaggaacaaatatttttcctctttttattatacagaaaacctaaacgcacacaagtaagtgacaagtgagctctctaataacattcaaagaagtatatttaaaccatggtgagtacagttatacgcatatgacttcacattattaatatttttccattactttttctcgtcttatttaaaaaattttgaaattattatttattttatttgtgacttactttattatctacagtattttaaacacaactttttgttttttacatttgcaaaaaaaattgaataagacaagtggtcaaatgttataagtaaaaactcaaatttctttatattgtaggatgaatggagtatcattttagcaaaggatacacatggttactttttctttcgtttctgcgtgttggctcgaacaaatataattagtatcaaatacagggagtactatagttaattgcgatgcctatgattgatgtggcaggactgttaagcactaaatgctgtgtcggggacagactgaacgccttcactgttggattaaaagttggtaggccaatcctttagtagttggtgtttctgttactaccatattacttatctttttaagtttttatttgtcaatgtttgatcattcgtcttattcaaaaaattttgaaattattatttattttgtttgtcatttgctttattatcaaaattactttacatatgacttatctttttttatatttacactattttttcgaataaaacaaatggtcaaacgttgcaaataaaaagtcaaaaacatcacttattatgggacggagggagtactctgttacttaaaagaagtgttcttaagtggcagaggtagacccaattaacaaaacctttaattgaccctctcctcatccatctagcccattaaatatatactcctggttagtttaatcccctttaaggatttaatgatgatttaattaatggtttattaattattaaactcctgtttgcataatgatgtttaattaataactaatctccatgtatgaacaggcctcaattaaacttcaattgaagctttt

SEQ ID NO: 42662 - DNA, 677 bp, Oryza sativa
  unsure (1)..(677): unsure at all n locations
aattcctgcagccatgtatactctgttcgtttcaaccacagcttgagaaaagaagagtctaataaataaatttctatctatctattctgttgatgtgcccactcaaaagttctacaacaccatgaaaaaaaatactagaccaaaagggtggaacagggtgtacctaccacatacctttccgaccatgatgtgccaaagtattggagtcaaaagggacgaagcagtggggaataggaaacagtaactggcagcaatnncacaaggattgatgatggagtaactgggtcaactgcagtggctggaagcatagaaaatatgattttcatgtctaaggcacaaaaagaaattacacaataacaaaagttgaagcataatcaagagattagatatgtatacagtgttcatttcaactacaactttaagagatatatttatctgccaaaagaagggcaaaacatgcagttatagcctattgaataagaacagtagttcatatatttttacgaagaacttctaaaaacaacagcttgcaagtctcttgaaaagttgaaagtagataaaccaaggttgtctttgttctttagagcgaaaggcacacataatactctacacacttgcatcctattagagaaaacaatcaatagcacaaaaatttaaattttcccaaatttatggac

SEQ ID NO: 42663 - DNA, 683 bp, Oryza sativa
agtacttttcacatccacagcagaccacacaatttcaatgcttacacatacaccagcagagagtgaaattgaacttgctttaataggaaaagtttgataacctgaagtacatggtcaatccgaccatctggtgaacctgtcagcctttccatcagcatgtaaccatatgacttctctttctcattattgctgtcaacatcctctgaacaacccaaaaacgtactcagaacattgctttttgtgacttgcaatgtgtagaagacagaaaaaaatctaccatatgcataccgtctgtgtcatttctgctcagtgatagcaaagcagctactgctttaacctcacacaaaagggagattaaaagtcccaactcattaagaaagagctacgtgaacagctatgtttctagatcattcacaggtaacaaagtgtttatgtaccaaggcccatgtctcatattaccatagccaaagagcaaaccttaccttcagtgacttgaactggcgagcaacagcttgagaccgtgcagcaatatcttcagtgaaatagtgaattcctgcatgacatgtcaacccaaataagataaatcagataaacaagagtaatttactataacagagacactcgcctaaaaggtgtccaagaatatactgaatcactcacctgcactcctacatgtatcctgg

SEQ ID NO: 42664 - DNA, 668 bp, Oryza sativa
tccaatatggcaaagtggcctcctgattcagtggcctaattagctggttcatgaaggatgatgagttaaactgaattcctcagcattagaacattattatcatgggtccttctagaagcttctgagggaggatatatactagtagtggtagcattaaacaactcgcaagtacagtacactccatctctctctgaagctaaacctgaggctccctttccaagtgcacagggaagacaattaatcctaacgaacctgatagatcatgtaggagcatgaaagattccgattgagatgatcagaaacgaatcaaagatttactaaacacaccctaagtgcagtgattgatcagtacagtacagaagagtacagacagttgaagagcagaatgcaatggcactaaagtgaaagcgagagggcactactgctgctacttctaccactatttggcgtcaataccgtactttgcacgttgatgactcgactccccgaccaaattcgtggctcagattgaatctttttcatcgtttccaggggctctcattgcaactgtgttaagattagatacctggttttaccttgaagtcaagtctagctcagctgtcacccctagcttttgtatttggagcctggcactttccattgattaacccgtctgtttcttcttaatt

SEQ ID NO: 42665 - DNA, 766 bp, Oryza sativa
agaaaaaggaggcttattttacagcttgcagcagattcagactgtgatcagtatgtaatagacgttgcgcaatgacctgcaggctaggaaatcaatcgccgattcactatagctgtccatgaaataaatacctgcatgtgaaaatcaatatgaacaatttttttggagacggtgtacgtatatatctagcaacttctatgatgcgtcagggagaggagagagatattgaggcttgcattcaagtgtttttatggaggacactttctgcccggatctaacggcaaagacatcataattcagcaaaatttcgcccatacaaatgcataaatttgacaatctgtcccatttccagaatccagacgtgaacctgaaagagccacaatgcgatagtgtgccaagctaaagcaatcctagtgtatattgtaggcatcactcacttatggcatgacatttaataggtagtattatactacaatattgttattagctggagaaatttcaacagttgatttataaattttactacaattagattttttactagtaataatcgagatgataatacaaataagggaaaattagaaccataccattataattttgcaaaatttgaaatatgtcatcatgacccacatgtcattgactcatgtgggtcctacatgtcattgatataccgatgatatatctcaaactttgcaaaattataatggcatggttccaattttaccaaataaataaatatgattcattggattggaaaagatga

SEQ ID NO: 42666 - DNA, 694 bp, Oryza sativa
aattcctgcagccccatcgtcgaccacgaccaagctgctgatcatccagatcttggataaaaatgcccgatcgtcaggggaacaagctgctaactactccctcgttccattacatgtacaaatataaattttcgtgcccaacgtttgatcgttcatcttatttgaaaaaatttataaaaaaattaaaagttaagttgcgcataaagtattatttatattttatcatctaataacaataaaatactaatcataaaaatatttaaataaaacggatggttaaagttggacactgaaatccacaactgcgtttattatggatagaggaagtagcaagataggcagtattacggtgattttatttctagctgttgtcttactgctctatgagagtcgttgatactgaccggtgaacagtgaccaaccctttttcttctcttatgcaagtagtgtcttttactgttgctttgcactttttcttttctctctttttcttattcatcctagtaggaatacttcgttttcatttctcgaagctttatacggcctgatcgagaaatatgggtgtccctcgtccaatgcgaattgagtttggtgaagactagctaacatgaggtaggttctttgatccacaaacaagttcagtggcgtactactagcactctagcagagatggatctgaagaatggtgaagtat

SEQ ID NO: 42667 - DNA, 522 bp, Oryza sativa
ttttcgtgacctggcatgtgcatagagttatagattgagtggcatgcagatgcaggggatcgaggggagaaatatagagtggtgcggtactatgatcgtagattgtatttaaagtaaaagtaaaaccatattatcgtaataatttatttaatttgtaggaaatgacggaagtgattttgagataaaatggttgacagttgtatgcatgttgtcacggacggactaaaggcttagcgtgatcttggacagccgccatggattgactgtgagctccaaaactttagatgacatgtactccctccgtcccccccaaaaaaccaacctatgaaggatcacatcccctcatagtacaacaaatctggacaaagttattagttgtactaggaggggtcacatgttggtttttttaggacggagagagtatttgctagtgtcccatcatgtatgtatatagactaggaaaatatggatcttcaaattttactaaacttcagaaattttatgcatttatcctttcataat

SEQ ID NO: 42668 - DNA, 699 bp, Oryza sativa
gaattcctgcagccccacgtagtgggctgcgaccttttggacagctgggttgcaaaggccaaataacgcaatctatggctaatgggtagtacatgccacaaacgtctgaatcagcaaagagaattggcatactcccttccctaccctttttaacagataacaccgatgacttctgaacacattttgatcatttgttttatttgaaacttttatataaatgtataagatttaaatcatgtttaaaatattttaagtgataaaataacttacaaaataaattataatcacgtaattttttaataagataaatggttaaacgtgtgattaaaaattcaataacatcatctattaaaaacgaaggtagtatatgataagagcatatgtatataaaagagacgttagcatacaaacatacgatggaaaaaaatatgagggctgcatttcgttcctaattaacaagaatcgctgcctcttgtataaatagaaatgaacgaggtaatttgtttctgaatgctcttgttatacccaccaatagtgctattggtgggcaccagttcgtcaacagcataaataatgcatcatggtagattatcataaaccatcggaaaagctattgatccctagtaggactatttgttgactgccctcaacgatgtcgctagctcctctctattgttcttcattgactggcttgatggt

SEQ ID NO: 42669 - DNA, 548 bp, Oryza sativa
  unsure (1)..(548): unsure at all n locations
tggcggagccatcgggggtgccggagggggccaacacccccctatcccaccccccctcctttacntataacaccagctataaaatgtcagttaatccattagcaaatctataaaaaacgtcagccaagcaagaaacatgatctataaaattaattaatgagagagattagagaagcatcaaatgcctcatgttcatcacttcagttttgcacccgtatgcgacagcgatgcacgcacgtctccgtcctcccatcctgtcttgccgttgagcacgcaccgatggctgtggcctgaggtctgatctctcttacaatatagcaatacctaaatacatgacctttagtttatttcctatccctaatccatagattgtagtcagactgagtactcagtttgtgatttctcatcttttcaaaataaaatagaagatgcttatttgtgagattcttggtagtttacgttgaaacgatttagcaataactaaggactagtttcaaactgccagtgatattattaaagagctaaaatttaagttttttttaaaagga

SEQ ID NO: 42670 - DNA, 525 bp, Oryza sativa
attgtggtttcttctgactaaaccatttgcattttgtcccaagcaaaatctactagccaaactgttatagtgctattacctgttccttccattttattattcacatccaataattttcactatgtgaaaactatactgttaagagttcactgtgataatatattgttttggtgaacatgtgaaagatataagttcttttcatgatgtgaagtttcactgttagtagatcgctgcaggattccaggatgtaacaaaatgaaaaaaatccagtgcatgtgtataatctgttgtagcataatgtttacttactgcagactagagttttcttttcagtgcatgcggtctttttgttggatattttcttcataattcaatttaatatgtttactttcacaagtgagttacaacttacaagttcagagtaaaacctagcatgatgacttagtgttttccatctttttgaaatagctcaattagtatctggtaccattgcaataatcttaatttgcatgtctgcattttttt

SEQ ID NO: 42671 - DNA, 667 bp, Oryza sativa
attcctgcagccctaatatttgtgtcttttaagtacctacaagcctacaacttgattgataaaaaatagtactaattagagtttgatagtaaagtcagggtgtctatgacgataatatattcgcgtagtgttacgatggaaacttactacgcacttgctgagaggtggcgtagttctgcgtaagcttaatccaacactggacgtagtagacgatgatgaaacacttttactaacggatttttattgatcatggtcctacatttgttggtggatctagttgccactgctttacagggcattttcatttggatttgggtgttgataaaataggtggggatcgctaagactaatcaatataatcatcatagacaggctagatctattaaatgccatgaatggctgtgaatgcttcctgctttacagaatggagcaccgatgttagtcatccatctctgaaatctgaacaatattgtttcactgaatgtctgaataattaatggatagtagtagtatcatccaaagctcaaaagccagcaaactttaccccacatttacatgaggtaggcggttacaatgatttttaccactaggtcacatcatgatctttcgtcaggagacagcccaaatctgcaagcgacgagctttcagttcttgccttaaccatgaa

SEQ ID NO: 42672 - DNA, 665 bp, Oryza sativa
tttaaaattgttttgctagtatagtcaagagccagcttggcctatttgacaaacatgtatgttctgctgtagattaacagaatgcctagtactatttgcacaatacagaaggttcatttgtcagaaagtacacactggtctccagaacgcacatggtagtcggtccacatgtttatcagtataattttatatattatattcgatgtaaacacattttattgtgcaattctcgaagcaccaaagaatctgacagctgccaagtgccaaaacgagtggttcaatttgttattttaatgcagcttatctttctcttatctcttttggaatgatatcatgtgggaaaattttcttttcaaacaattttgtgtaataaaaggcgaagttcaggttaggaacaacgcagagctttaacattgaggaatcttgttgcatttttttcagacatggatgtacatttctgttccattgatgctgtatgtcggtgaaaggatgctacgagccttgcggtcaaatgcttatgctgtcaaaatcttgaaggtaatttggtaactgtaaatggcataaactttttgtagtttctaatactaattgattgacttttctgcacctctaaaaagttttatgctatttcattagtgctgattgatctactttactgcctagta

SEQ ID NO: 42673 - DNA, 525 bp, Oryza sativa
actgctaaatagtgcattacacgttgcatgatttagaaatactttctatataaaagtttttttaaaaaaaataaataaattcattttcctttttaatatctaatactcaattcctatgttaatgaccagtatcattttgtatgccctagataagctcatctaatgagctggatcgcacaacctaagtaggatataaaagacatcgacgcgattgtcaaaagaatacatttgatctttaatttctaataatatataaataaagataactaataatatatgaaaaatacattcatggtaaatttagttatattatttcgatatatcaatatatatcttttattgtagggagggaataattactggagttgtttttatttttgaaaatgtaagtctaattttactttgcatattagtatgtgatatacaattatatattgtatattattgatttgtttagattttttttatggatgtttcgatgatgtacatatagtagaatagaacttaaaataacatatatttttt

SEQ ID NO: 42674 - DNA, 528 bp, Oryza sativa
aattaaaagtttggttgaaattggaacgatgtgactgaaaagttagaagtttgtatatataggaaaattttgatgtgatgaaaaagttaaaagtttaaagaaaaattttggaactaaactcggccgtagtagctaggaagcatcggtaaaggacagcctacgtgtgtcacatggttggagatgaggacggtgacggccaccgccgcgcacacgaagagccagtcgccggagtagccaccggcaggagctagcagcagctgtgtacaacacgtactccggcgaggtaggtgagagttcagtgtacttccacacaccgaattgaccgacgacgaaagcgatgacttaggtcgacctaagcagctaagccaagggtttgttagccagtgatggatgcagcaacgcaccacactactactggttcagtgcaccgtgtagaacacggctgcattgcagatgttgatgcctgatctcttttttttttctcggtctctcggtctcagtctcgccttttagggctggtttggtttg

SEQ ID NO: 42675 - DNA, 895 bp, Oryza sativa
  unsure (1)..(895): unsure at all n locations
ccagggatttttcggctagctccacaaggtggtgggctagatgacctggtcgggttcaaagcctcacccattctaattatttgatattataggtcattccgtaatattcccgtctttttgtagagcacgttgtggctaggcacatgatgtgttcttgttgcttagtagtagttttctctctttctttttttcncnttggtatgcatccttgatcggtgtagaggcaacatgctttcaatttattaatgaattaaaccttacattatctagaggatatctaaaaataccagattcaggatcatgagaatggtgtttgtatactttatctacctttgccattgaaatgctatatataatttcccactccccatatgtaggacaggtgatcgatgtctcaaactaaaagagagagaaggacatgtgtcacagcattgtgcatcccccaaaaaaagaaaatccatacatgacaaaaccaatcataaccaaaaaccaactcaactaataatattacatgttccctcaagaatacaaaataatttagtcgttatgcagatacatgcatgtatctaacgacggcgagtagccattagccaatatgcacgtcacatgcatgtaccgtatccaattataatcttgtaaagttgtagttgatccatccaatccgaaaacaaacgttgatggtcaatggtcgatcagattgatatcgatcccggccgaccatagcgaccacatatatatgtttcccgagatccatcaatcgatcgatcggctgattagagataccattagtctttgatgctgaccattaatttactactaatcatcctactaagcccccgttccaacctgattaattaagtacagacacataaaatgagaaagtcataagcacata

SEQ ID NO: 42676 - DNA, 1357 bp, Oryza sativa
acttttgaaacttaacagtgctaagacaattttttaactttaattttcaataacaaaaagaaaaaccataacagttaacagtgtaagaatgattttactagacttattgtgaactaaggtcttatttagggagcttttatcagccgcaggttgtcttagaatcttcaactctctcaaccagtcagtttttaaaaatatagaaaaattattttttgtgatctacgatatatagattgctattttttatggccattaactaccaaccatcttcttagaatattaagcatctcaaacaagaccaaactatcgaaatatacaactcttctatttcaaaaaatatatatcttatactcccttcgttttatattataagtcgtttaactttttatcagtcaaaattctttaggtttgacctaatttatagaaaaatagcaatatttacaacactagattagtttcattaaatttaacattggatatattttgataatatatttgtttcgtatttaaaatgttactatatttttctacatacttaatcaaatctaaaatattttgacaaagaaaaaaatcaaacgacttataatataaaatggaggagtagggattaccgttttaagtagctactctatccattgtaaaatataaatgtttttggacgatggatatgataaatcatagtacaaattcgcatgttaaactatgatttatctatctaaaattatttatattttagaacaagggagtacatgtgatactatcttaaaaaaataattatatttatggacgacggagggagtagttacgtgagtatatagcgctacattgtcagctagctagctgatcgatcagcatgcatgtcagtacaccatgggcgcccgcggccggtgcgccggtgcgcgcagctgagctagaggacgacgcgcgcgccgcgcgccggcggctggtccgccgggcgccgcatgtcgtcgtcgtcgtcgtcgttctcgccgcccatgctcgcgcccagcaaaagcgaaatgatttcaatttcgctttaatttgtcgtgagctatagcgcgcgcattgagctttttttttttccccgagagtttaccggcggccgccggccggcattgatgaggggatcgacgccgatgcacggatgaggggctctagctaccgacgccgtactcgggagtaaatgcgggctgcctgccggccggccgatcgagctctgcgttaacgtacacgaattaggcggccacttaattgcgcccactgtgtgtgtgtctgtgtttcagtgtttgctaccagccgtttggtacttggtaaaacggttatttaaccgtcggggggggggggggggggtaatttt

SEQ ID NO: 42677 - DNA, 1298 bp, Oryza sativa
cctccggccgatctagggttagggttttgggaggaagagggagagggaggaaggggaggtgagaggaagcacggccactgcaaggccaccgccgccacccgccctctccgtccctcagtccctccagccggatctgagagggaggggaaccgccgccgccctcgctcgtcctctatctggctagatctgggagggaggggaactgccgccaccaccctcccccctcccctcttcggccggatctaggagggaggggaactgccgccgccggccccgctgtcaccgtggccgtccccgcgcctcgccgtcgccggatcccgccacccctgccgccgaacacccacagccgctgagggagagagggagaggagagctgagggctactgagggaaatgagaggtgagggagaattgaggagataagacttaggaaaaaaattagcgatgtggcgcctatttatatgccacatcaatttttgcaggcggaccatataaaagctccgcctgcaaaaataaagagtatttttgcaggcgcaccgcttaagttgtccgcctgcgaaaatagatttttgcaggcagacaaccatctcaccccacggttgttattttcgcaagtggtcatttagctttcagaggcctgcccacctggaaaaaaaagctatcatcgggaaaaaaaatggttttttagcagtgtgaagggaatgtcggttttcggtaacagcttatttaatttggtggggagtggttgatacatgtcttggctttaggagagtggtaatcatcgatttgtagtatgagatgtccaacactttaactttgatatctaaagtaaccaatgttttacattcgacgatttaattgaaggcaacaatatttggttattttgcgtaaaaaaacaatatttggtcataatatggcgcaacaaaaataatctaaacttatactccctctgtccaagtttgatcgtcatatttcaaaaaattatattttcaattttgatcgtcacatttgcagtcagcagccgttccatctcgtccgatgcgctggccgttcctattcgcgtgcgaaattaatcaggttgcgcgcggacgcctcgggagcagtctaaaaaagcttgttgcatgcatgcaaaattaatggcaatcacagctggctacatatcattggttccgtcgtgcatgcatgggccattatgattagaaagatgtaagtgcaataatgagtagattagaaagatgataagtgcgttttctgtccttggtctgtgtgtcaagccaaaatatgacgatcaaacttgaa

SEQ ID NO: 42678 - DNA, 1044 bp, Oryza sativa
tgtttgctgtcatcgctagacaaactttcacacgcttcaggatttaattagaaatttagtttttttttctgttcataaaacctggaactctgctgtctattacctttctactacaaactgtgattagccaaccactatattcgtgcctcagtttttaaacggaggcactaacgacatgaaagcatgtatatttgtcgtatgctagaacagtttcctgacttctaatcaactgagggtcctaattttaataatcaccgattagttggttaattggtatttaatagcttgatctgcgcatattggatctcctcatcttgctcttgccacgtagtaggtcctgaattagggattcaggactcatagtacgtaatatataagcacagggcgcaggaatattttttttggtgaataattcatatgaatttattattgtatactaaaaccccagaaattaattgttccatttagtagttcctttttttttcaaggacattttgcagttccatttattaaagaaagatatatgtagcaggggaggacattagtattctctcctatgattgcagcgttcatgaatgtcatcttctgggaatcaaatcctacaagtgacaaagggcacaggactatctttgatttgacgaccacaccttcaaccgctctctcctggtgctataattgtggactctagagagaatcataaacagagtatgatggtggagtcgtgaataaatggctctatatatccacccgaatttaaatcctgatgtcatcaataactattacacacagtcgcatattgtgcattttattagagaaatttattgtgtaggtgtgttctttatttctacctttgagcttgaaagttgtagaactcaacgataattttttaagtacatatcattgggaaaaaatggtttataggatcatgaagtttttttttttcaacataatgatggcggtatgaagtatttgtgggaaaaaatagttatttgaggttaggaggaatctaaaaggacctagatgcctttgtgggctgcaggaatt

SEQ ID NO: 42679 - DNA, 3182 bp, Oryza sativa
  unsure (1)..(3182): unsure at all n locations
tcgcccacagccgcgctttcctgccgctgctcgcccaatgcactaangagcccccgcgcctcccgcacctctgttccccacgtcccccgcctctctctccgctcacgctcaaagccgctgacggcaatgaggccaagcggcgcggagtcgtcggcgccgctgctccctttctagtgtggtggcggctccttccccagtggcagcggttccgcctcgccccgccgctctcctccccatccgtcggccactcggccagccgccaacctatgtagagaactgagaagtgagagagagaagagagagaagaggggaaaaagagaaggtgttgacgtggcatcctgacatgtggtgcccgtatgggtccaacgctgactcaaccgctacatcagataaaattgggtcaaaaccaccgaaggaacaaaggtaaacggttctgtaagttaagggatgtcatatatctggttttacggttgaggatgatttcgtaactcgacgacaagttgagggaccttgggtgtactttttcccaaaagaaaccaccatacgagcggattggcccaaatgtggcccatatatgtcctcttccagatttatccgacgcaaaatcgatagaacaatcatccatgcccacggagtcatgtacaattcttcaatgaagcatatacatatatacagtattactacaactactactactagtagtattcaatggtgtgtactcgagacagtacatagctcccagttgtattcatgtagatagtacgtactacaccagagaggtagtatagtagtgagtactactcactactcagtactcactcatgatagcaactactagtagtaaaaactagagaaaaaacgaagatgaaaccaacgtgccgcggcgtactactctccgtcctcttgctgctgccgccgccgctgccgctgctgctacatgtcgtcgttgctgccgtttccgctgcgcaatcgtggtgggggaacgcagaattgaattccgagggcaaagggtagttgttgcaggcacggagtgaaggcacatgcgccccagagattcgacagtgtcgatcgtgtcgctgcagctgctatagctgttgtactagctcaaaagccctcctctccattgcgtcatcccatatacgtgactgaatgcctgattggttcatgcacctgcgagtgaattgatgatgtaccgacgaccacgtactggcaattgtcggtagagctagccgggagggaaaaaaaattaaaaagaagaagaagaagaagagttggggctagaaataacggctgatgttgagagagagttaatgacgatcgtggagcgggcaacgaacgaacaatgaatgcaggtgttctcttcatcgacaaaaaaaatttaaaagtgataccccaacagtgtgtgcagtgtcgtactggtagtcgtggtactaccatcccgacaagcacacgccgcggcgcacaggcccggaaagccaagcgcgacctaacctacgcagcgcacgtacgtacgcacgcagctggctgccggctgcatgatggtttacgtcaccggttgaccactaaattggtagtatggttttcgactaatttcaaccacttttcgataaatttcgattggactttaaccaaatttactataaattttgattggattttaaccaaatttactgtataacatttgattttatccgaaagcatttgaaatttggttttcgttggctttgtgcaacctagctgtgagcctgtttggggagcttctgctgcagcctctcctagaatcagaagctcacataaatagtgcagcttttggtctagattctgaaaatccgtagtcgtagaatctagacaataaactaaggccagaagctgaaaaacccagtttttccacattctcagaagctgacttccaaccagctgcttctcagaatctcaagctccccaaacagccctgcatcagcttggccaccggagtaaatgctagaaacattagccacgcgcgtcgcggtggccgccggcggagcggccgcgcgcgctagggagagacttttttttttttgggagatcgtcgttgctgttgcggcgcccgtgaattccgcggccgcggccgcggcgcacatgggagcgtggcgtgcggcgcgcgggcgcgtgaaggagagttagcgcatatatcgatcgatcctgtgcacagcgacggttcaaccgtacagaccggccggggcgttgcgttgctctagtctacggattaattaaggattattagtattcgttattgttgttattataggcacgtttctgaaactaataaaaacgaataagcagtagtagtgtgagtctcacgtaagctttctctatccatttttctttgaaaactttttaagtatttaattccgtaatttatgcccttggataattatcataaaatcaatttcatctgtcatcatttgtataaggctacgtttggacctataaaatttcatcttctacattttcgttttttcacacatatgcttctcgaactactaaacgatatgtttttttttaaattttttttataaaagttaattcaaaaattatattaacttattttttaaaaaacaatttagctaatatttggttaatcttacgctaataagctacctcgtctaccctaggttcgaacacaacctattacttcctccattccaaaatataaggtacaaccaccttgactcaaagaccaagaaacaattattatcacctctttatttgaatcaatccaattaatacaatacatgcaaccaatagaattaaacatcttgtaagtgtatgatttaaaaaataataatttaggagagaagagatgctaattaattgtcatgcatgcatgcacgtcttatattatgaaacacctttaaaaagtagttgtgccctatattttagaatagagggaatattttagtaagacagacagacagacgatgaacagctgctcgtcaacaataagcaagtgacgacgaagttgcatcagtgacggcgtcttctcctacgaggtgaccgtagcttgtttcgatttgttgaaacgggtacatttagaagacacacaacacacatataactacacacatatacacttgtaggtttaacacatgtttttaaattagaggttaatttggaggacctaaactctatgatgcaccgga

SEQ ID NO: 42680 - DNA, 740 bp, Oryza sativa
atgtaaatttccaggatgttcatgtagttagctcccaaccaaagtggaatttggtttttgttcgtatacttcaacaatgtgaatttttttcctgcagtaaccttggtttttgttcctgcagtaattgaatttccaggatgtgaattttcaggatgttaatgtagttagctcccaaccaaagtggaatttgctttttgttctatacttcaacaatgtcacatgtcttagtttaatttggttttggctaatttagtcttgaaaacaaaatgcactgtagtaggaatcacttgagaaattcatttatttcataaatacacatgatgaaattatttttttaaagttctgttattggttgccctgtcgatctattgagttcacaaggatcttcgcttggtgagtataaattttgaattctatcctcttcgtctgtttctcttctcttgctcgatttgctttgctgttggtgcctctttgtgactgtactgtatctgctacttttttttgttaatcttgtcatggatctcggaaaggttacctgatttcgcatagattttgtggcttaagaagtaacaatcattgttaaagtaagtgagatttgaaataattatttcctaataagtgagatattagataatatgctggtaaattatttcatatattattactcctaataagtgataatgttaaatttttctcactcttcgcattagctacgtacaagcattataacaaacatctca

SEQ ID NO: 42681 - DNA, 731 bp, Oryza sativa
gcaccaatatcgtgagaatatcccgatagatcaacatctgcgggactactcgttttttcttgatactttcgttctttttttagttctttttggttttatctatttcaaactgtaaaaccctgcttaatataaaccagctaaccctggcttcggttcaaaaaaaaaaaagaaaagaaaaagaagaatgtgcaatcgccggtgtgtatgcagcaggtatgtttatagtcttaaaaataaactaggcatttgatggcttgatctaaaaattttctgaatttttacggcataagattctgatgtcttccatgcatccttctgcttagaatggggcaatattatgtagcaattcttttcttttattgagaagatttagtacttggttgcttgcatccattatcctttcatccacaagcctaacaaactaacaaagtcatattaacctaccagatcgattgatagtacttgtaacatatatttgcccatatagtatcgaaattaccccgtaagatcaacagcgttcgtcgaggtggccggtaggcaagctaccaaatcgatctgatagatagctgtgtatggcatgcaggtaggttcagacttcagtgtctcctgtcttcgaattccttcttggggctgtttggttttcagggacttatttcaagtccctgtcatatcggatatttagacattaatttggaatattaaacatatactaattacaaaatccattccat

SEQ ID NO: 42682 - DNA, 660 bp, Oryza sativa
aacgatgtctttacttgctgtatgtatgcaaaacagaataatacatgtttgcatagtttccctttttgatggatttcagctctaatttttcttatcagttctatgagcttattttggggaaatcagaagatattttgcgacgtgatgaagagatgcttttcaaggttagctgcagtgcatgttctaaggatttgttaattgttataacatgcgtacattaattattttttatgacattctattgcatatatggaataggtgtctattctaaggccaagtaacggtttaaccttccgtgcaattgtcaatgctgaagtggttgacatgagtaggaagaacaggtttatcctaacgctctacagctagtcttgcaaatttatgttctaatgtttgtattatgtctcttaattgacagatggcctgtacctaaggcggagtggctatatccatgtacggacgatagatgtgatgaaattgtcgcgcctgatccgatagttattcgaacctgtgaagatagctattatttacgtaaggatcttatttcttacttttcactatattataatagattaatgaactaaaatgcgtcaaatatataacattgatatggcctctgtcaatttgaatgaatttagtctgtactgcagcttataaagctgt

SEQ ID NO: 42683 - DNA, 1043 bp, Oryza sativa
aagtaaattaagatctgtgatgtgaatgttttgggatgttactttgatttgggatttggggatatgcatctcactcgatttgggagaaaatatagggattaaactctggctaaagaaacaataaaaaaaaaagagaaaatgagacctattgacagtgccattgccctctctttagtcctagttggtgttactaaccgggagtaaagatatcttctctttagtcctggttggtgttatttcaaccgggactaaagatgccatctttagtcccggttggaaaaccggaactagagggggttaccaaccggtagtataaacggtttctccacaagtggtaacatcaaattcgtttcataaaatccaccgtgaaatgtcttgatggtaaaattcattattgtaaatgttagtttatttcctataagatcggtcgtagttagaggagtttgatttataaacaaaacttaaatataatttattactacagtaatactagtgcaacaatacgtttgatcagatcatcagatggagtacttatttcatctctgtactataacttcttcatgtctccatatgcatggcatacacttcctttttctccatgggcgacgggcacgaaccacaccaaccaactctctctctctctctctctctctctctatatatatatatatatatatatatatatatatatatatatatatatatatatatatcaagtgtggtatcacaagtgtggtatcagagccagtcatcatagagaaatcaaattcagaagctaatattggaaagataattactaccaaagataatctgaatataaggtgtagattaaatcacattgaagaccatagttggcactctaacaatagtcaattaaatttaattgttgatctgatatataatttttatataaattgggataaaaagcaggaagatttagagcgaaggattgaagatttgtttaaagaacgaaagcaatctgaagaacaatatttgcttgtcagtaataaattaaattcagtgctaaaagagctagaggaata

SEQ ID NO: 42684 - DNA, 1173 bp, Oryza sativa
  unsure (1)..(1173): unsure at all n locations
tggttataatagacgaattgtaatggcatttttctgaatagctaaatttacagtggcatggatcaaattaaccctatttaaaaatgaagtatcaagtaacaaaggttatttatgctgtgagtttgcgatcctttttgtgcggtacattatgcagagagaggaaggcctctccaaaaactggacgagcatttgatatcgacacatggggtagccttttaggattcattcatgtcgatctcananaatatggcttcaggtcatgacatgcaatggctagggctattgatttgcatcttgatttgttcccaggatatctgatttgactggagccaatcttagcaaatcctgagcttgaccggttctttgaggcttggtcggcttaggactagacaactggtaccttacactgacctttattgaactgggagctattaatgaataactcacaactgttttaagcatctgtttttttgtgtgtggaaaagattgcaatttcttgccttattcttgccatgttctagagaaccagaaaaccaaaacaatggttacagtctccggtgagcaaaatcaatctgctccaaatcaagccgggagtacgagctgcttggctcaacacgtgtagctgtacacagaactatccaattctctgagctgtaccgtaagaacgtgaagaaaatacaaacatgatattcagcacgtgttgtgttacacatacaatgtatagacaggcttgcatgtgtgttgcaagaaaaatatacggccaatctcggccttggtggtgccatacctgagacaggatatgtttccttggaccatgggttaaatgcattgtatagcaggtgctgtgacaagagtccaaggggaaacactcgggcccaagctccccaatcctgatcagatatctttggtacggcctgtgggtgagcatgcatgaccaactcaactcagcccaaatgcatgactctttagtaaattttggactccaatgtctccttgccagttgccacagcgatcctgtatgattgcatcagcaagctgaagtacaacatttctgatgcatgtgccagagttaactgactaaataagtaataactgatgaaagccaaggtgtgtgtagaaaaaaaataactgatgaaaggaatggtctagattttatactacctccatcccaca

SEQ ID NO: 42685 - DNA, 2211 bp, Oryza sativa
gatgtgatagaaaagttggaagtttgtgtgtgtagaaaagttccatgtgacggaaaatttagaagtttgaagaaaaagttagaatctaaacagggcctaagttttatgcacggtccagccgatagcattgggaggtcagtgcaggcgatagcagggaggttgcccaaccgacgacgtgggaggacgtggtggcatcagggaggccagtgaaggtggtgtgccgcagaggcctgcggcagctgaccggcgaggggcattggttgagcgatgtcctcgcgttgacagagacgaggggcgttggttcagcaatgtcctcgcgctgacggaggatggcatgtggcattggttcagcaatgtcctcgcactgacggaggatggcctgtggcagagcaatggagcatgcagatcgatattggttcagcaatgtcctcgcgctgacggaggatggcctgtggcaaagcaatggagcatgtagatcgatattggttcagcaatgtcctcgcattgacggaggatggcctgtggcagagcaatggagcatgcagatcgatattggttcaacaatgtcctcgcgctgacagaggatggcctgtggcagagcaatggagcatgcagattgatattggcagggtgacaggtgtaaaacctagctcagctttgtcagcccgacaatgataacattttcggtatcgtttacctttttaggagcgctgtcgagatgtccctctctctctggtggtgttgtcgggggaaaaccctatcttcgttctcctcgagaccttgatgaatgcaacactgctcatcgctgcttttctccatggagatgtcgtctaggaggccctcttgccaaatcttctcttagatagcttgtttgtgctttctctatacgtttgtcctcttatgatgacacactagctaatgcaagctaaccatgttggcgggccttgtggggaagagcggttccatccttctcggggcatttaactttctaccacttttaagatgtggcaattaagaatttgccactagcaatctatgatatgtgggcctagtggcaaatagttaattattcctggttttgggcgattcggttatagctactttattgatctagtggtgactggtccggtgccaaccttctcttgggttctatgtgttgtcggtgcgaggtggtggttttattctttcgcgactactgccttacagagtgctagccttgcaattttttcttctctattcaatgaatcatcgtttcgtctggcgttggtcgttcaagataaatgaaattcttatactacccctaaaagttgcaacataagattagatgatgaggcggaggagagataggatgagtcacccccttacgcaagggaccatctttacataaactttcaaaacaaagtgagatggtgtgagagtgaagcaataaaaaaataattggatttttatgtgttggaagtaaattattgtatacgttgcctcttaattaatactccctccgtcccaatatataagaacctaggatcggatgggacattttctagtactacgcatgtccagatttgtagtactaggaaatgtcccattggcatgtctagattcgtagtattagaaaatatcccatccggtgctaggttcttatatattaggacggagggagtatgtagatgatataattaaatttagagatagcagtcattcctattataaaacttgcacaaacagagctgagcagctgctactgcttgattgattaattgaatatcaggttgtaggttgtaccgagtaccgtacgtacgggttaacaaccacatactgtaacaaaagattagggctacccaacaaaatctggtcttggcattttccgcaaacaaacggacgaatcagcagctgtcgtgctcagaggtcagagctgattggtctcccctgcggccttcctgtactgttcctaatctttccgggctgttcttgtacggcttcccagcgcaaggaaatctaggagtaacaacattttgcacggtctggagcattggttgcatgcatgatccaaagggtggagtcgtcttgcaacagcgcatcacaatcccgacacaacaccagcattgctaagctagcggtgacctgacctcatgatattatatggaacttcaattcgttgataatactattttttggattgtttgtttatcaatgaatttttattctctctaa

SEQ ID NO: 42686 - DNA, 1293 bp, Oryza sativa
cccttcttccttcttttttcactactgcgacaacccctcccctcgtgccgcctctcagcaccgagaaaaaagaaggaagaaagagaaaaaagaaggaagaagggagaaaaaaataaaaaaaattccatgtcattgtccacgtgacgtgtcacgtaggcaagaccatagtcaaacgcggttttggaccgagatgatacaaaaccaagtttagggatttcgatgtgcggtttgcaagttcgtggacctaagtgaaacctcctgacaagtttaaggatcgttggtgtattttactcattctagatcttccttaaacaaaagcctaacaaatgtaacaaattaacataacttacacttctcaatcttatcaaatacaatactaaaatttgataaggttcattttcagatcaaatgaacaacccataaagcgatgtgtttagtaggaagggttggtacgctttaaaaaaaagaacggtagatcaatccatgattaattaagtagtattaactaataatattttaaaaaataaattaacgtgatttttgaagtagtttttttatagaatttttttaaaaacaaaccgtttattaattcaagaaacatacatgtgaaaaatgagatgcataggttagaaaagtgtgaaaggaatacaacaaattttaaatctactattatttaaatgcaccattataattgaggaagcgtaccagtagaaagaaaacgatgggctggtttggtttgtgacctaaattggccttaccaatttttgtcgatgtcaaattttagcaagttttggcatggctaattttggcaaggcaaaattgtatttggattgaagccaaaatagcctaagttaacgattgaaatgtcctattttctaaggcatgctaaaatttggcttcaaactaaatagacactaaacactgttaaaattgtcaaatattggtaaaaacaatttaagcctcgaaccaaaccggcccgacccgatagaagtaagaaagcgtgaaaaaaaaggaacacatcaaatcgcccagacctaccaccgttcagcacgaggacgagacgagggaacgttaaagacgcgggggccggcagcttccaccacgcatcccacctaccctgctacacacgcatcctcgtctggcggtggactggccgcgggccggtgtgctgtggactccggcacgaccacccgcgggtcgccgacgcgcgggccccaccaccacgcaggccccgtaggcggcgtgtaccggacgcgcggcgaaacggcccgccccgcatttaaggcccacccc

SEQ ID NO: 42687 - DNA, 655 bp, Oryza sativa
ctaaccccgtacacgtggcgtccacacggaggggttcggggcagcccgacccccaggcatggaggggacggccaccaccctaccctgggcccgacccctttcgggggagtgccacgtgggtattgggggcagcatcctccctctagtcttgataccccgagcccatatcactaacaaatgacttaaaagcttatgatgaaaaatcactctactgagagagctaggatatattctgaaacactagagcaatacgtgttcgtgagttgtaacctatagcttatattgctagaacaagaaaggagttaactacaacttgagataaaagaaaagccaaccaaggtatcgacaagtgcaacagatccaaagaaggaagtggcacagcggtgcgttcatatgctatgccactgcagggttgaaggatgtaacaagtggtaaagcaacacgaaaagcaagcgacaacgtagaaggaaagcaaaggcaaaagagtatgcctttgttgtgtacactataaagctaccggtcacaaatgcatcctcggaaagaaaagaagtctccctccatgctgctgcttcctcttcgcgactactcccacaactatattctgaccctttatgagatgacatgcccctcttcctcccactcttctcatcccgtt

SEQ ID NO: 42688 - DNA, 682 bp, Oryza sativa
cctgcagcccaaatgaatggtgaaaggttatgattgatttagaagagaaggtaatagaaaaattaaatagggatagattggttaagatgagaggatttggcgaagaaatagttgcattttaaaacaaatttgtattctagaaatagctatattttagtcttaacagtggtaacaacaagccaataacagtccatgtaagaattggcccctgtgcattcgttcagtggctatgggtgtgtttagatcccaaaaatttttggacaaaaatagacatcaaatgtttggacacatgcatgacgcattaaatgtggaaaaaaaatcaattacacaatttgcatgtaaattgtgagacgaatcttttaagcttaattgtgccatgatttaataatgtgatgctacagtaaacatttgttaatgacagattaattaagcttaataaattcgtctcgcagtttataggcggaatctgtaatttgttttgttattagtctatgtttaatactttaaatgtgtgtccgtatacttaaaaaaaaattggccaatgaactaaacatggcctatggaaacaaacgtctggaaattgaggttcagattactgcatagtgcatacccatgaggccacacggcttgttcctcttcgggctagtgggctaccaagtccatgacggcacgaccattatca

SEQ ID NO: 42689 - DNA, 634 bp, Oryza sativa
caggacgcgtcgttttctttgcacaatttttcgtcgccccgggacccgggtgatcctatcacctcgcatgcctcgcttggatcggcaacaacgcgtgcgggatgtgccatttgagtcccagtttttatccttgatgatgaggatgatgattcagctagcgtagcgttgttaacttttccgtcctttgcagagctgtgaggctgcctgaattcagccagaagaaacgaaggccatgattgagctacgtgcctaacatatcctaggttagtgcatatcatctctttaaaagttcaatccaatattttttatttgcggggaagttaaatgacaaaaaggccgtgctttatgggattacgagcgagaggcgattctccagtaaattccgcatccgctggtcttccggaactgggctaactgtgaaccgccctcccattagagcaagtttaatagtatagccaattactagctccaaatcatctataaccaatgtaatagctaattcatacaatagttgcttactactcctttcgtttcacaatgtaagtcattttagcatttttcatattaatattgatgttaatgaatctagacacacataacatctatataaatgtgggcaatactagcatgactt

SEQ ID NO: 42690 - DNA, 1108 bp, Oryza sativa
aattcctgcagccctgcatgtgcacactcatatttcttttgggggtgtgctgttgattgtgtgggtgattgttttgttatgtgtgtgctacaccacagatgtattaccttgtggttaacactgcacaatagattccacgaaaatccttctctccagttgtatcctttctgcaaccattgaagcttagagttatttacttaagttcaatacacacacaaaaaaaggtgaatggtgattcatgtggtcattcgcatgccagttaaaagtaagaaaaataagtgagaacttacgaattaaccatatttcttatgtcatcaatgtcctggggagctgtttctgcaaatgcatcctatagatacaggataaagtgagacttttgcagcacataagtcattgacatatggaggcatatttaattatagacaaatcaggagttttcaaaatgacaaccagaagcaccacgcaacttactttgaagatctcaatgacctgatgttgcacatcgctcctcatattcgttccatttaaaagttgccaacaaatgttgtatcttatccgtctgagaaaggcaatatcttccctctttttcagtccttcgtgtaaagaagcacgtagcaactggcatttctcacaacacatgaagttgaattgcgtgtattctcccaaaactttcagaggtgcctgaaatgttgttcaagacaacacgtgcctatcacaaatcaaaatgatagccttcctccaccgcatacaaaggacaaggcaacatacctttggtttttgaagtccattgttgtagcacttaacatgcaatgctctctcacactgtacatgagaatacggcacaatttcaaggtgacaatcttatctttcttttttgaatattataagactgatctaagtatcaaaggcaatctgttgtgggagaaaaacattaagcagaacattaacctggttacagaagacaatcatgtcaacactaataactccaagcaccgtatggggtttcctgtcaaaattttaaggtgtagagttacatataaatgagcttacataatcttgacattgcgaccagtccacatattcttattcttaccgacacatataacag

SEQ ID NO: 42691 - DNA, 636 bp, Oryza sativa
aattcctgcagcccactctcttaaaacaaccacaatcccctctctgaaaatgaagttagaaaatacagtaaaaaaatctatgaacacataattaattaattaagttgcacgttcatttaatattttaaaacaatttttatataggaagtttttaaatgaaacatagtagtttaaaaaacgtgctaacaaaaatcgagataaaatttatatcgtaataaaagagaacaccaactgagacttgaaaaaggaatgtaaacattcgtgagctatagttttctacgcaagtatatagcaactagtagtaggaaggatttctatgtaggataacagtataccaccagtcaggttgtgtttagttcatgccagagttggaagtttggctgaaattggaacgatgtaatggaaaagttgaaagttcgaagaaaaactttggatctaaacacaacctcagtctattcactttattgctaaaataaaccctactagttatcctagaataaaccctaccagtcagtctaaaataccaccaaatttgacaaggtaacaaatctaaaatattatcaaaacttgacaacactactaaaatttgataattctagatgagtaaaatgcactagcggtccttaaacttgttgg

SEQ ID NO: 42692 - DNA, 1095 bp, Oryza sativa
cacctttatatactttcctccggagatgttctccgtcttcttcatgctcctgccgccgtgagcacccctgcctctcgtctcgcggccgctgattgcttgccggtgtacgggatcgtcgaaggagcttaacggcgagacgatgaagccgccgtcgccaccaccgcagcagacggcggcgaccacggcacgaggtttttttaataatccctagatttttaaatttaaatgattttcacggattttacaacgaatacctacaagaatactcatgaaaattacattgtaactagtgaactttacattgttccatcttcgtttcatgaacaggtgatagatcgtatttttgttgcttaggttgtcttcttatgcacaagcgatacttatacctctcgtttttcatgcacacgctccctaaaccgacaaatgatattttttttgcaaaaaagttctatacgaaagttgattttaaaaattatattgatctatttttcaatttagttttagctaatattctgtctgtttcatatgatgagttgttttgacttttttatagtttaaatttaaccaagtttataggaaaatatagcaatattttcgacataaaacaaaacatattatgagaatatattaaatgctagttttaatacaactaatttggtgttattaatgttactaaatttttctataaacctgattaaacttaaataaatttaactataaaaaagtcaaaatgacttataatatgaaacagagagagcgcttaattaatcatgcgctaataagaaaatgacctcttctcccgaatacttgtgcggcaattaggcctactagtaatactcgagtggtctaatgattaaggcccaacaaagatctgcggatgcattggtgcacagatggcgtgccatgtaggagcgaaaaaccaactgaaatcataattttcttatatctatttagttacggaagatatctcttcatcaagaaatcaagatcagttctaaaaagaaaaaaaatcaagatcaccttttatatattttcctccggagacgttctctgtcttcttcctgctcctgccgccgtgagcacccctgcctctcg

SEQ ID NO: 42693 - DNA, 714 bp, Oryza sativa
ctgatcgaagagcaacagatggagctggtgacgaggcgcaagctgcgcgaagagcaagagaggaacatgcagatgcagggccagccgccgatccagccctgatcccatcatctattcatcttattgttcgttgtcccctgtccttcagtccttgtccataagaattggcatggtcaccggcgaagggtgtcactgtgcgtagatgctactactccctcagtcccataatataaggagattttgccctttctacttgtcccaccatataacacaaattaagtatactttaattacctgaatgacacaaattaagtatacttagagaaatctacagtatattaacaaaataagtaaaaaaacaaaatgagtatagaaaaaatgctcgaaatgatttagttgttccatcacttcttatgttattatagcaaatcacaccaaccttgcaaggcgttgcatccgtgcgctcacttgttagattcttgtactagattgtacccacatatcaaattgttgcgctaccacgcttacttctcaagtttttacactaaattgcacttgcatgttaagttgatgtaccattaatgcaatttattcatcatgtataatactatttgttattgtatagctagcttacaaattggaatgatcaaattgagttaaactaaggagatagtcattggcacctcaaaattatgggagttaggctccactgca

SEQ ID NO: 42694 - DNA, 512 bp, Oryza sativa
acttttcaattgagtgccggattccaactcctaatggtaatggtatgaaggttttcatcaaattttggtaaaaccaaaaatccccatcaaatttaatgtttcaaatttgaattctcaaaagtgattcaaaaatttcacacggaatagcttttgtcccacatcaaaaccttgaattttcacagtttcttgcatttttgtcaaaaatgtgaacatttactccctgcgtaaaaaaaaacttctatctcgaacctgaatatgcctatgccgaggttcctatctagaaatgttttttcgatgaagggagtaaagtggtgtttgtttttactgaaaatgaatacaaaattaggatatagaaaaaatccattagcacatgattaattgagttgtaattgttacaaacataaaaaatagatttatttgatattataaagcaacttttatatacaaagttttcatataaatacaccatttagccgtttaaaaaatattgctaaggaaaatcgatgtaaaat

SEQ ID NO: 42695 - DNA, 5351 bp, Oryza sativa
attttgaagcagtgccgcactgtcttgcaggacaaaatttgaggcgtgcataaaagagaccgggctaccgttacagaaatggaactcctagctagccaaccgagaaacacaaagaatctaaacaaagcggaattgttgggggatcggctttgccctcctccgctctagaaaacgggcctccctttctctgaagaaggctctaaattcgaaggaagcttagaaggggcctccagaaacgatggaggccagctgggtggcctcttcctcgaggaggctctgtcggaggaggccctcagctgagtattcatggtgagaagatgggttattaagggcacatttaatgcccacaactatctgccgctctctcgtaggaagcccgcagctaagcattcatggcgagaagatgggccattaagggcacattcaatgcccacaactatctgccgatacactcgtggtgggagcaggtagggtggatgtcaaggcgcctcgatcatgtagcatgcctcagcatcgagctgttcatcccaggattcacggtttaattgaggcaaccattttttttggccctcataggattttacctttttgccccttgggctaagaccacttgtcagcctcttagtacgtagtaggcggaggcctggggtacccttgtaacttttcatacgatccatgggactatacaattgtaattcatttcccaaagggagcaggagcaaaagtaatccagaaaacacacgatccactattgattcatgttggattattctatttcaacattgacatcatctatggggatcggacaatattatttttatgaacacgaagtcgaccgctcgagagagaatggctccgaaaagataggctactagtgccgcaacacagcaccctaggagggcagcctgtcacctagcccggttgaggcacccggtgctcgctacctttggtgaagtcgctccacaacgacgacagcgcaaccggcggtagtgaaacaaacgtggggcagggctcggccctgccctgcgagcaggatgaggggccagtcccaccacccatccctgctgacttggctgcagccatccagtctcagctggatgatattgcagtcaaaagccatcgggtcgacacatgtgccgaaggactcgtcacctctaaattcctgatgtctccaagtcccaaatatccattgctatggcatgaagctctgaaggtgaagtgtgttttcctacctatggccatcttatcttcttggttgatggagtggccctggttgtcactctgcctgccaaatatatagtgtacccattattgatgaataatgttgatatttactgcgtaccaaactcttagtcagcaaaggtacaacaaattgatccatcatcatgagcagtagttggttaatcatgattcagaatgaataaatgtcacatttaggttctgatatgggttatcacgagcctatgctttccaaatttttaaacggtgtcatttctttttttaaaaaaaaaaagctttctatatataaatttgatagaattctcttttaagataacattttaaatttgtaatagtcgttaatttattcattcgtagtatcaaatattagcacaaaactagttaatccatcatccatttagcactgtttgaactgggccttaaccatggagtctagaacgatcggactgtcaagcatgcatgttacagttacactgttcagtaaacagtgagaacgctgatgtagctgagagtgaaaaattaatgagggatgagttcatcctcttctctcttctaaattctgttttcaaatgacaaagggaaagcaatggttaatctgttgccaattctctacgtaataatataattcagatacatcctgacagcggttttatttaggggccaaagttttattcagcgcaaagcgaggatgcaggtacaagtatataaacggctaaataaatttcttaaatttgccagatgaaatggcaaattaatactccaagtgacagatcgctgttaaacaaacaatgcacattgaagtcggtcgcggagagttcgttctaaaaacgtaacttggtaaggtggtggttcacccaaagcagcgtgttagcaaacatagaacagctaggggcctaagggttaatcctatgtttgtctccaaaattacgtataaattatcttaaatcatcatgtaatattttagaagcaaaatcaataatctgttagttgagtcccagattagctctaatctttagcagattctggctctgtcactggttaaaagtacagaggatcttgctaacaccattgttccagtaacttttgagtataacagtaaagtcccgcactgatgctcctcattcttgtctagatttgcccagtcggcccaaactgaaatttcccgatgtctctcatgcttaattacataatagttacatgtatgtttttgttactctttcaagctcgagccgcatgcatctggggtttctcttgagcagagaagaagagatcatgaaagtagtgtagctgtgtatatatagacaagaagaacactagttgatcactagcaagggtggatccagcgtgggtgttggagggactcaagtccccctatcccgctggatcaccattgatagaaggagagagaaaggggggaagaagagggagaagaggaagagtagggggactaaacaaagaagaaggaaatgaattcaccctttaatattgttctggatccatgcccatgattacctgttattgggtttaagttctcaatccatattattattgtagttatggccgtaaagaattaataggagtaagtgtcaatggtacaagactagttaataaagggcatgtgaccatgcatgtgtgcttaactttgggatagtggtacgaaaaagacatgtttttttcttttacgtttgtaaattcttaatcttgaatctaccgattaaccgagaaccatccaacatatatgcctgtacgtacgttcaacttttaaagagaacaagctgaaaatgtataattttacaagctacaaattaatcaagtttattagttcagtgcactatttcacaactttgtgtaaaattttgaggcctccttttgaatggagtattttagagaaatttaatttaatagtattaaaataattgcaacagaaatcctataattttctaatgtttcaaaggagcccttataccagggaacactaaagttcaagtgtcctaataataatccaacatagaattcctactctcctaataaccatacaagaagaaacaaattaactaattacccctcgaaattcctgactattccgaacttatttttatcgataggcatttctatcattctcctcgttttctctcccatattaatgaagggcatagtagactttcatcctcttgcttaatttgtctttaactaactaaaacaacagtcttttagggatggtgcggagtatgagttttgttccttcataattttctcatctttgagtggcttatgctagaacgggggcatctcctgccgatccaagagtgagtgagagagatgcatatttccatgattacaagagatcgagaagcaatccggtataggagcaagttggcacatagctatatatgcagttgtcatccaagccttctccccatctgaaatgtgatacttgcacatagtactgtagcatagagctggagtaaagaaaaagaaacaaaaattaggagcttatacaacagaaaacaaatctaggaaaaggttacttgcgtgagaaaaaggaattaatgtgtgacctctaaatttccgatgcctctaagtcccatatcgtatgtacacaaaatggacgagcatccaggcagagaacgacacattatattgtgttttgctctagctactagcttaattattggtatcttatattcttatttgttgacgatggaagagaggcgaaattaagcatcatctcatctgcagatatacacataggtagtggctcttgatggcacactgcctgacttagtgactttttccaccatgtgcaataattatgattctgaattactccctccgtacttgtaaaggaagtcgtttaggatagcgacacggtctccaaaacacaactttaacttcttgtttctataaaaatatttatttaaaagtgatatatgtatatttttatgaaagtatttttcaagacaaatctattcatataacttttaccttttcaaactcaataacttgagagttatttatgatttatattcttaaggtttgacttaaacattgtcctaaacaacttcctttacaagtatggagggagtacttccccgttgcaacaattaaacccggcttcatttctgagaataaagaccagatttgatagtagctacggagtagtaataacgacatgtaattgatgcatcaaccgattcacacggtacattaaccagtagaattttgtaaattgaaggcacagatcctcaatcactacttaaacaagaattcaccagattaactaagccagttgaactaattcaattttgccaatgcctgctaaaccgcttctgtaattttttcttatgttttaacaagacacattggctacaacattgtgtagtaattcgcattcagggccgcacatgctcgcggttacatatggagtatcaaaattcacttggcttaattactaactctgataactgtgcataaggcactgagatcggctaatcagatggcattgagatcctgagccgtcggtactaggtacctcgcagttctgggagtgaaaacgattgtgattcagtagaaagaagttcatgtccagcaggggtaagttcagacgcctaaaattgaaaactcctgatgtctctcatgcttgactctgcataaatatgaagtagcatcgatctgatcaggtacttgtcgatacatatattcttcaagagaacagagctaagagatgagagcactatattcttcggaagaaatcagatcgagctatatatatagtccctactggtactcccaattcaattaattatcacgatatatatatgcacatttatgcgattacctaatcgtacatgcagtgataatggtccttacattttaatctggtcgcatcgatttgaagatatacggacagaaacatttcctggaccaaacaaagatgtcctcaattagtagcactaatggcaacctgatctgatctgactaacttcatgaaaaagagtaaagagtaacgtgaactctatgcattttgccctagcttcttaataacttgcactccctccgttttttaatagatgacgccgttgattttttctcacatgtttgaccattcgtca

SEQ ID NO: 42696 - DNA, 6110 bp, Oryza sativa
agagaaaaagaacagtccagtttggaaagagaagggtgcatgtggtatccccttgaagtataaaaggaggaccttgcccatagagagggggttggttgattctttcccagattatgagcttagaacgggggagaagtcagctcacacttgtagctcattcatacgcagatccaccaaaacacaggagtagggtattacgcttctcagcggcccgaacctgtatagatcgtcggtgtctcgtgttttctggctggcatacgatatttccacatacagagagagtgagagcttgagatttcaccctaagcccccggccgaactggcaaaggggggcctgcgcggtctcccggtgaggagccacgagctccgtcacattttaaaccatatcaatttttgataaagttgttaaagatgtgcatccatttagtttttttaccaaactttagtaaatacataagaaatcctgctaaaactaggcaatatcactaaattgtaaaaattttggtattgccaaaatttggtaagatttattttggctacaatatgaacagccccttcattttcaaagtgtgttttcaaatctaatcatagagagaaatgaacattgataatatttcatatatatgtttttagaaatagaaaaatatcaacacttaaactgatcttgtttatttttcccatttacttagcaccataaaaatgcttcttgagtaaaattacaacttatcagcacctaaaattataaaggaaatatatattatcaacaagaatctatctatacatacaattttgattgttgaatatagaatctttattaattcactaatcagtattatatagatactagtagataatcagaagtggtagatagtatgtaattattcactaatcttaaaataatactttggctcatacagtactcatacaattttaggcatgggcccctagctaggacgggccctaggccgtcaccctcattgccatgccccagagccgggcctggctgtcttctttcaatggccgccgctgctaggagctccacgccatgggtgaggtgatgggggagggaggaagcactagggatggccttcctggctccagcgatggcctcggacgagggaggatggaaaaaaaaaaggaagaagatggaaaatgtgatggtgttgatatgattattatttttttttttcgggggtgatgatatgttttcaattttgcaaaatttcaatgcaggatgacagtacgtttgttattagctagttggccaatgtttcgtaatccaaagttacaattcccaatcaaaacacaaaattagaattcgtcaaactagttaatcccactaaagtgttcaattgtcggtacaaaacgatattttcatttaacaagctaagctagcacataatatatacattgtgcaaaaataagcatttcgacatgcccgtgttcattgagatagttgcaccaaacgagatcaagtagtctggtttatagcaagtatgtcacaactagatcctaagaaattattggcgagctacaccagtcgaggagggaaaacaaataatgcaggacaaacgtgtctatctgcatcaccgatgctttcatttctgttcgtgcgtagctcttcatcatcgcaaaactgaaaactcctgacgtctctcatgcttaactgtgcatatctgcttgagcttagctcgatcttggcactagtatgtattcatggagtatcatctcaagcgtgcagacacatgtagatatctctcacagaacagagctatgtatatgcaggctatatatggtgcatcctgtgatatatatgtacatttattcgattacctaatcatgtgctacggtgcatcctgtgatttatcgggacatgcatgtacatttatgtgagaaaaattttggggaaaatatatctgaattgcataaatcatggatccaatcatctaataaccaatcgaccctaactgatgtactaatttaaagcaacagtcagttatcaaaagtactttccaagctaccagtaatatgtgaccacctcagtgtcatgtctcatcccttgtagaacaccaggcaccaatttgatttcttccatgttgcctgagctatgcacccaaaattcctctgagagactaatctggtttttatttctcttagaaagatgtgattttttttgtgggcaggaatttaggaaagaaattaatgatcatggatcacacaatgaggtcatagtggagtgctgcacttggtcaaaacaattgggagaattgatattcatacaaatataaacaccgtagttttggtcaggcacttgatccatgatctgcaggatttgttaattagatcaaccgatcgtttttagtgatctcatacgatctcatgctttcatctgtatagattgcatacatgtcattctagaacttcacaccgtctcgtgcaagtcgttcaaaaaaaatatacatgtcattccacaaccattagtaccagctcccggggcaagagtaatgatgcaagaggcatggaagcagaatggtttgcatgaagataacgtggaatctagttatatttgcaggagagggacaatcatcttcccggtgcctcccagatctagctagtaactaagcttcgttttttagacacaatggtaactagcttcattgcacaggccgatcaatgtagtatatataaaaagcttcatgagcctaaaattatagctatggcgtacagtgatggagtaaaacacaaacttactattacttcgaattcaagatgaagaatctatatagcatgggaaagaaatttaagttgtacattagaattcaaagtgttttttaattgtagattagatttttccgagcccagtcgtaaaacaatactaaaaatatcttaaaaaaaagtatcaaattctaacacttggaaacaaacttcaaattataatctttagctgaaccaagcgggctcaagctcttaattgctaaaaaaattataagatgattaaggaataaaaacttattgaagcactaactaattagaaggcgtttatgtggcgtgaaatcgttacttgataagaacatagctcacgctcattcgcttgcgtcttgcattgcacgtcgaccgagcatccaagccaagttgtttaatttctttgcttgcttatcagctggctatcacaaaggctcaaaacttcctaataatcactgtttaatttgactaaagccggtaaggaccacagaccactgactccgtgaggtacgcaagctccgtcaggacgtgaagcgctcctcctcgcggtcgagctagcgtcgtcgttgcctcaccaacagatgtcattcagccatggcaggtcggcagctcaacggcgatgtagaagactgaggtgtatgggggtattggtgtcaagggacagctatggcggccgccacagcatgccacaagggagggtccgcccctgtctgaaactctgcatgttatgtttatctccatgtatggcactacacggtgtctagcttcaagcctatatatataaagccggtgtgaaaacctatatgtacagtacatttatttcatccatggcggatatagattttcatccctcaaggggatgtcccctcgttgcttgcttgaaaaaaaaattgataacatagattaataagaaatatatcactccacaacatgcaaggccaaattagacttttacaagttacaaccaaagaaacaaattaaactggaaatagttatcatacactcgcagttatatttgtattttttttgttacagcttgtaaaggttgaattttaacctgcgtgtttgtggaatgatacatttcatattaatctattttatcaatttattttaaatttttttatgactatttagatgacatgtatgaaacaagagaatatctcctcgagggatgaatacactttcccatccatggcactctatatatatcttctaaaatgtgggatactaaggagctagggactcagtaccaatgtagcttgagccagttatatttctatcaaattttggtgaaataatattgggaagaagtagagcatggtcaaaaagatttagtctactgatttagtgagaaaatggggatgaacttgaggactgaacaaggcaaactgacacacctgtgcttctccacgaaccgtccgatgtacaagcagcggtctagattgatcaggagccaaggtggcaactttccacgatgcacgattaatttttaagaagtgaacaagtagatccaagaccgtccaaaatcgggtcgcttcttaccgttagatgggacataaacggttaggatgttaaatcattttacataagagcccttcaattgcagtcaatgcatgcagctactcccttcattccaaaatgtttgacgccgttgattttttaaaaaatgtttaaccattcgtcttattaaaaaaatttaagcaattattaattctttttctatcatttgatttattgttaaatatacttttatgtatacatatagtttatatacatatagttttacacatttcataaaagtttttgaataagacgaacggtcaaacatgtttaaaaaaatcaacggcgtcaaacatttagggaatgagggagtatttgtcaacccgtgtgggtacctcatgctaccctaaatagcctccagtgtcattatataattttctcttacaaatactccgtatttggtattggtaacaaaccaaacatactttacctatgtctgccttaccaaatatcagcaatagtaaaatttggcactacttgttttttcgcgaacgcgcaaaaggattacacatcaatatattagacgaaatcagaatataacctgccaagcctatataaagcatatgtctgcatgtgcatgaaaactctatgtagcctgcctcaagtgattatactcaagtctgccctgccctaagatcagttaatttcctgatccattacattctcatgaagagatgtacaccagtatatgaattgatatggatccataagcctatgactatgaattgatatggatcccatatcagtcttccggattttcctcttggatgaaaaagaatacaataggcttgggaggcatcgcgaatttgaagttaatagtactacttgaggaagagcaagttactgaatgatttagagctcttctggttgctgctcttgctgggatcattctgcctggagcaaagccggagaggtatgcgtgtgggttgtttgattgccaccctaaatttctccctggctcaggcaactcaatcatgttccagccaccacaaagtgacaccaaactcactcaagcatcaagtagatggaagattatttttgtgatgaacccaaaaaacaaatgtgtgatttgaactagtttcagtttattgtaccaaaacatgtaaaggcttaggtattgaatcaataattacaatagactgatcacaaagacaatcatgagaattgatgatggaggatatatttgttcttttgagacatgcatggtttttcagagtgctgccaatctggttactactcctttagatgagatcgcttattgttatttaaccttcagatgagatcagacattgtcattatcaaatctcattggtgtactccatctgttccagcatatacagggtttatgtgattaaattgtccgatcccatcagcatacgcggttttcttaattggctatagtactggtgtcatttaggagtatttacacgaacgaacaattagtatagcacatttagtttaacttcaattatcaaatcacagtatctccccgagtttcccatattggaatcacccttaataactgtatgataaaggcagacagactgggactaaccagttttttttttttgtggactgggacacccttattaagcattatacatgaaacaagtgtaatttcagttagttcttttgtaaatatcaaattaaaaaactcccactttgtttggaaagtctgcctgatctcatcctccagttgaatgcctgaatgtgcccactgaactttcttcagttcattttcatcagtcagtcacctttttctcactactgtacacgccaacttaaatactggccagcattcatgctca

SEQ ID NO: 42697 - DNA, 1155 bp, Oryza sativa
aattaaacagcaatgttttcctcaagggataatacttgtgcgtgaatttgggttttggcatatcggcggggctaagggttccaggccattaagcagccaaaataagagatttgctccgatccaataaaaagtatttcaaggtaccagtacctcatgatacggccttaaaatactttttgctggactggagcaaatctcacaaaataaatcacattactcctgtaaattttctcttctttttttcttttctctgaggccttaagggatcttgtacaacttttttatctttctacttgatacagctactccccgcgttctcgtacatctttataaagaaagtgttaacatacacatctttataaccgtctgataatattatttgaggcattttaaagaaagtgcataaaaagaaaagcaaaggcattatctaaaatgcctgggaagaaaaattgaggcatatgttaaaatgcctcaaaatgtgtttaaaggcaatctaaaaagtgccttcatctatacttatgaaggcattttgaaaagtgccttaaaaaatcccttttcctacagcagtatatccaacactttgaggattggaggcatttttttaagtagttgaggcattcttaaatgccttcaaatgctatccatcctatagtgtttcttatcttctacttaatacaagtacacccctcggggtttcaaagaaaagacactgcagtttcgcggcaaagagcggaggatcgagctgcacactatgagacttacaatactgactttctccgtatgacgaagctgaaatttccccaagcctctcatgcttattgttacatccatgcatgcacacacgatttagcttagttatattcggcctcattaatcaccaaaacatagtagaacgtatttaaacattctagcttcttcttcttccttggctagctagctatttgcagagaaaatatacaccttttttttcttgttcagttggttaatatatagaccctattgtaataaagctgtctagctacgcttctggagaattgttcaaacccagaagggttttttgagaaacacatgaagctgtatatataagcaaggagagcatacaatacagtcctgccatgccatgctgggattgcactacaaattcaaagcatacag

SEQ ID NO: 42698 - DNA, 654 bp, Oryza sativa
atgtcactcaatacggtatcagaaccatatatctcaagtatgaatctaggttggcacacaattaatcaaaaaaaaatacaatccacttctattccacgtgtggagattatgagtactatatacccacatagttggtttatcggactggttataggggatattttatatctctataatatgtaacggattaagacttgggcattatgtttccttaagtattaaaggaaacagcctacaatcctggattcagaatattgtaaaatatatgttgtatttagttaacttttatatgtaatcctgccttcctgacctatataagatgggtagtaggcccccttaaggatataaccacacttaagatcatcagatcaatacaacacccgacaggtagaaatctcaaacaacacccgacaagtagaaatctcaaacatgagaatggtgttacctattgacaagggcctaaacttttataatttttttgcaattcaatccatctactttagctctcgtgcagtatgccttcttgtattgccgattagtagcatcgacaccatggctgagatatgagggagccttctcatgtaactggatgtattgaaatatattagtgaattgtccgtcttttttaaaaacttccattttttattggaatgg

SEQ ID NO: 42699 - DNA, 3511 bp, Oryza sativa
tctttggagcacctcaacggagagtaggattgcaagaccaaacttcgggaaaaaaatcgtccttgtcctctttgtgatgattctgtgcatgttgctatagttgtgtatctgctctgtcatcctgtagtttatttcgtacaatttagttcaagtccctgttaaatctttaggttttactatcgcccggaagttccggtagtaagaacaccggaagttccgggcattctgagcagaccggaagttccggtgttcccgggcctactgaattttaccgttgcgaatttgtttgtaattttcaggaaagcctattcacctcccccctctatgctatatctttgcgcgttcaatatggagtcgctaaccacctcaacctagcaaaaactagatcaagatgagttttgtaagattaaaccggcaagcggagccgatttagatggaacaaaagataaatatccgtctcgtgagtgaacggaaggtttacaggacaaacctacaaaatagttttgcactaaactaggcaaaaaagatgtcatattgaaaaaaagattcttggctaattgggttgaaagtagattgtctctaattgaaccggtcttgtctcttataaaggtgttggtcttgcctccaatacagatctctttcacatcaaattcaaggtagagatcaattagaactcgaaaatcacctctctatgcaaggaaacccgagacctgacaaaattcgacatgaactcgcactctaccggtctggctggtcacatgccgccgatcaaaccaaccgtacacatcggtcaaaccggcctatatatggtggtctgaccaactccatgaaagaaacccgacgacgccttcgaaatttttacaatatttctctttcgcatctaggtgtcaaatttaggtgtaaacatatgccccttacctttttttgtacttgtgaacctaaatgcacataacacatggtctttgggcgataatctaagacaaatttttctacaagacactcaaagtttgtggtttttgctgtgagacacccaataaaagtgtatcttctcatagagactgaaaaatatggtaattagctgctggacacctgcctcattattttattatattccatggtcgcggatctccgcctcccacttcccccacggcctgcgccggattccccggtatagcgtcctccgctcccctcgccatcgactgctcctcctcgtccgccgctgcacgcatagcaatcagtagttcagttcgtatgcatgcaaaatcaggtagttcagttcatatgtatgcaaactaatggtaatcaagctgtattactatttaattacattgctatttctatttaattaccttgctcggccggtggagctacagcggtggtggtggtgaattggtgaagtcgtcgtcgctggcgtgctgcggcggcgccgcggcggccagagttcatcggctacggagaggctagctcctcttgccgccagggccgtggctgttgatcagcgggatggcgccgccgcacatatctatcttcactagctcgatcgatgcttgccgcgaagcaacggcgaacggcgagagcagcaagcaacctagtgcgtgggtgagtgcggaccgtgtaggaaggaaggaaatctaaaccgatggccaaaaaaatgcaacaaaattaagaaaaaaatcaaatcaaaattgttgttcttattttcttaatcgatttcgctttgcgcatccttgttggtggaggtgctggagctgggagtggtggtgcactcgctcatcatcgcgatgtcgcggagcgcctccgacttcccgagcacggtgcggccgctcgtgccggcacaccacgcgtggtgctggacatcgagggcacgcggtgacggggacacgcgacccacacgcgtacagctgggaagctatcgtgccgctccccgtggctgcagccacccacggctgctcgggaaggcagggtgagatgagatgaaagaaaagaggaagtagaatatttctaggggtatttcgatactttcaaggctctttctctctctttttttatctaaaataataaaataatgcctcggatatccagctgctaattatcacatttttgcagtgtccataggaagtaacacgttctttgggtgtctagcagcaaatgccacaaactttgagtatcatgtagtaaaatttgccataatctaattacggaccatataactcttcaagcatcctgccaaacactcggtaaatatttcttcaagtatttctcatagatcgatctctgaaatttgaattcattctccttgcaatgtctcaagaatcgaataattccacatattcgataagacactcccaactaagtgaccacttaccgaattccttagatctaggaccctctcaagattccgagtctatatgagaaagttatgctgttttaagaaagaacactcgaatgtaaaaaaaaaatagcaaacaataggaagtctcttaccaataaatcttcgggagcaattgctcaattgaccctgttttgaagcttaactatcaatatgaccttatttttttatgtttgcttatttgaccccattttttaaaattgaagagcaatattgaccttattctgtgaagattggataacggtgttaactaaagggcaaattatccatctttccgctttctacatacaaattaaaagaagagaaataaaaggaaaaaaagaaatggtagcaaagaaatccaagcatgcccaaactaacatatgatgatttctccttgccatgtacagcacttccttccatcattcaacgattatttctcccaaccacatgcaaagcactagcaatcaaggggaaaaggttgggctgggatatggcgcctggatttttcagattttggtacttatgaaaaacttatttcgcaaatagacccctagaaaaacttatcctagaaatggtcctttttggggtgccacagtggctggcgcggtaccggcgctagcctctctggcgccgtcctcctgccaccatggcacacgcgaaccgacatggcaggaggagggtaccagcatggctggcgccgccctagggaggagggccagtatggctggcgcccccccccatcccctacccctagcctccattcctgtttctctatatggagttacaacctttttatttttattttattttttcagatgtttattcacacttaggatcacgatgcaaccaaccacaaaaaaaattaaactcgaaaataatgcaatctaccactaggtgaaatataaccacataaaatgagcgtaactttctcatacggactcagaatcaggcaaataatatatccacggacatgtacataaaaagttacatccgattctccccaacttcaccgggttcggcgatattaaaacctccaaattccgcttgcaagattgtgttctcgaggagagaagttttttggtagagctttggaaagttccacatgccacatatttcgtccgtttgagtttatttttttat

SEQ ID NO: 42700 - DNA, 956 bp, Oryza sativa
tggcgcctcgaaaaggaccatttctgggataagtttttccaggggtctatttacgaaataagtttttcaaaaggaccaaaatgtgaaaaatccaagatatggcgctgtggtgatagcttcacgacaggggtcggcatgacggtgggacaagctaccttcctccgcgtaggtccgtgcgacgtcggggtcgccaaggacagcgcaccgccgcagctcctcgggtcgtcgctggggtcagccacagcttcgccgtggccctcccaccgccaccccaacagcgcgaagcagctgctcctgcgcgcaccgataccgccgccgccgctgctctctccctccgctcgcgagccggcactgccgctacctccacccacgagctggcgccaccacagtcacctccatgcgccggcgacgctgcattgccgctacctccaaccacgaccgacgccaccgtagccccctcgccgccgccgtccccacgccgccgccgcccccacagagctcctccgtgccccctcagagcgccgccaccgcagccctccatctccacgagcgggtgccggtggggctccgcttcacaccgccgccgtcgccgcacgcgtagctcgccgccaccgcacgatttgcacgagagagagagtgtgttgcacaagacagtagataaggtttggagggtattttgggtattaggaatattataaacattttctttttttaaaaaaaaaccttaacggagtcgtggaatggaggtcagacgggagcttcatttttgaagagggtcaaataagcaaactttaaaaagtatggtcaaattaatagttacagcttaaaacggagtcagataagcaattgtccctaaatctcttaagtggatttgagtagaaaggagagagagtaagagcggcactcgagcttagacagggtaggtgcaatggtgtgtgaggggagggggggggtga

SEQ ID NO: 42701 - DNA, 860 bp, Oryza sativa
tttggctagtctcatttggatatgaaaataaaattgatgagaggtatgtattaaacttcatatattctaacttggtctctcttgtggatccaaaatatagtgtgagctccgtcattgatcttgattgattatgtgcatatgcgttcctttatatccatatgtatgcatatcttaagggggagtttattttatattttgtttattataagatctctagcttgatttaaaattatcgttcatctcatctttctatattgttatatccagttattatctatcactaaagagagaaaagattgaaagatctgggattaaacaatttgtgtaattgttactttggtgatagatgataaaccaatgtttatgggattaacctctcttttttataagttgtcaactaggttatttcccaatgatgagatgtggtagatatgcattctttggtgatggaccttaatcatgataaggatgaaatgcatggagataaagcgatatgtatcacttcttactcctaccttttgataggttcatatatatatgattttcatgttattgttatataagtgtgagactaatgtttacttgagtcttatcttatttagtctcctttacattgagaacatggagatcatgaaggtatgtgtttttgtttatcattatcattgctacatgccttctccatgtgtataggataaacctcattgcttcttctttacttatgcatacacttgcccctcttataaatttatttgtatgcatatatttggggggtgcaaatcctattcatttattgggtatgttctatatccatgttattctcctcttatttatatcggatctttgcacttgagcttgcgtac

SEQ ID NO: 42702 - DNA, 549 bp, Oryza sativa
tgcactttatggtgataaagattggagatcagctctgataaataccattaaaaatgctgtgagtttccccaattcatttgcctataaatattatgatatttaagctataacttctctgtggccttccactttgcactactgggaaggaaccacttatgttggttatgtgtaacttccgtagaatccaaacatctgttacttttgggaaggagggagggaattctatgcttgcctactgacattcaagtttctaattgataacctctgttggcccccttcatgcatatatgaagcatattgttcgacgttatcagcagctctgagatgattttgcttctgttcttaaaattgatcactttttttagtgggaatacacgattaattctatatttttatgctatgtataacaacttgagcttattgatgtttaattttgccttgccagttaactgtgaaatcttccccaacttgtgttgtggctgacgacagcatgttcttggctctcttaatttcctccatgtcacccacttcaaaagtcatcgcgatgta

SEQ ID NO: 42703 - DNA, 1100 bp, Oryza sativa
aagaaaaccaattatacagttcgccaggaaatcgcgagatgaatcttttaagcctaattgtgccataatttaacaatatggtgctataatgaacatttggtaataatggattaattatgcttaataaatttgtctcgcagtttcctagcgaaatctgtaatttgttttgttattagactatacttaatacttcaaatgtgtgtccgtacatccgatgtgatatgtatgggtaaaatattttgccaactaaacaagcccgtacgaacattcttgttgttgggcttgggctatgaagcccaaccaagtaggtcaaatttgatggtttgatgctgtttcttaaatctagcagtactactagtatttcagatcgtacttgcgaacaaattactacagtagtatgtacttaccactcatagtagtaaaataaattaattgatggaaaatagaaccagtactgaggactagtagtattaggtaggtatactgagtaaatttttcagatttggaaatatgactagattttggaaatatgactagatggagggagtatactagtatatgtaccttagagcaagtttaatagtatagctcactactagttccaattcatctatagccaatctaatagccaattcgtacaatagttgtttactatactattaatatatggtcccacatgtcatacacatattgtgtcttggagttcgtgttgtagctggctacagatctgtagcccgctgctcttctctctcatcttttatcttattaaaatatatttatagctggctaataatatgctattgtatttgctcttatcttctaaacaaaatactctctcgacatccccatgttcagattgaatcagacaatatttatacacttggaatggaagtagtactaggtaggtattgtagtactccatttctcccaaaatattgagtatatttcatcgtaagtcattttctattactgatatttcgctttgaaccatcctctaatcaatatttttacttggaagtgagtaatcttgcctttatttcaatttagatcatctagactcttttatttcaatttagatcatctagagggctgcaggaatt

SEQ ID NO: 42704 - DNA, 676 bp, Oryza sativa
aattcctgcagcccaaatgaaccttacaaaaatttgacaatatcaaaattttggcaaattgacaacattgctaaaattttggtcggattggcttaataatattgtcaaaattctatacacattaccaatatttggtgacaaactaaacgtatcgacataattgtcaattttaacaaataatgatatgattgaaattttcatcaatctaaacaagccctcgtaaccagaccttttatgaatgttgttagataacaatggcacacttcctccgttttatatattgtaagtcgttttaactatttttttcaaactttattagatataatcaaattatagacaaattagcaacatctaaaacacaaaattagtttcattatagaatatattttcataatatatttgttttgtacagaaaatatgattatattttatttataaacctagtaaaaaaaaaggttgaatatgaaaacgggaggatttaattggattgtaatgttgttttgagttttcaggcgtcagcgcaggagtgttggtggtgctagtggccttgttgttggcgtacgtgggcatggagaagaggaggatgctgagggcgaagcagaggttcttcgagcagaacggcggcctcctcctgcagcagcagctgggttccctggccgcctccggcgtggcgttc

SEQ ID NO: 42705 - DNA, 645 bp, Oryza sativa
attcttcacatgcccttcacacgaggtaaatcgattgaggttaattttttattgtgggggtattactgtttttgggggtaaatcttctgaaatctttgcttgttctaaaatgtacagaagggtggaagtggttgcgatttttggtattgggaggaagggtatattaaatacctgaataggaaaggcttgattgagcaaaacacttgtgcaaagttgctgaatgaagcaaaccagagggaaatgcagaggggaactgaagaaatcaagctggatgcagatgtgaagaagaagagcacggttcaagagattagaaaagatgcagatgttgaagaatttaagcaggctgatcatatgttgctcattttgagggagatgatggtgatgatgaagctcatgctagttggtggtgtgtgttcagttggtttgatagtgtgttgtttccttgttctatggtttaagtgatgtgtgcccattgtatcagtgaattttgggttgtattcaggctaaaccatactgtgttggtttgcaatgtgcaatgagatgtgaaacttttgaaatggtaatgtcaggtttgcagtctttagtacatttgtcatctgaattgattatggagatgcaaacaaaatgaaaatatttacagactga

SEQ ID NO: 42706 - DNA, 649 bp, Oryza sativa
ttgcagacaaattctagtatgaaatatatgaagcaacagggctggatgcagaaaaaacacaagaagtccccgacataatatataatgttatgccaagtgacatagaaagaacaggtaaaaaatatagggtcacagttgatgcagcacactcaacctactcctgctcgtgccacaaatttgaaagagatggacttctttgctcacacatcttgagggtgatggctgtccttaacatccatgagattccaagtaagtacttgctgaaatggtggtcagagcaagcgacattgcaaatacgtgatgagtacaatggtccagcaccatcaattggagtcccggcaacaagcaagctgagattcaacgcattatgcagggcaatgacaagccttgcttcagatgcatgtgttaatgaggaaaagtacttgattgtttcagctgggattcagaacctacacgcaatggttgcaacaccacacactgttgagacacaacatcagtaaggtatttttcctagtcaacaagacccatcaagttcagctaagaatccagcaaccaagaaaaggacagggaggctggtagaaaaaactcataggatgaagccaataggggaacaaataactgaaagcagcaagaagaggaggacaaaaaa

SEQ ID NO: 42707 - DNA, 681 bp, Oryza sativa
cttacaactctttggcatctgccttccttgacctatttggcaaagaatcaacaacagatcttctgtacacatcatctatttcagaagcggtcttcaacttcttcgcctctacatcactatcacctttctgtgcccttttcttcctatttttcttctcatgggtgcttggaccactactaccagcacctactatagaggaaaaaacattagagaggggtaggggtgttgttcatagttactttacccacaccgaaaagagagagagagagagatagagaaagagaaggaacaaaaaagtggtgattttacctagaggtagcgagcttgtagcacgtggcggtgaagatgtagctggggatgttgcccttactgctgctagagagagaactactgaagttgatgtttttgttgcaatgggtgaagggggggctggagaaggtgtccttgcagtgggtgaaggagttgcagaagatgtccttgcagaaacaggtgactgaggtgatggagaaggtatccttccatccattgccgattgaggaacatttgaaacatccaaggagagcatctcaacagccaagtcctgagtactaatgaaatcaggatcagattcattgaagagtctgaatgacggtgcatcacatgcatcatctagatttgagatatcagagggctgcaggaatt

SEQ ID NO: 42708 - DNA, 1504 bp, Oryza sativa
tgctacgtcagttgttaggactagtctttgcatttgttggccatgtggtccataacctgctaaatgtccagtcagatctactcagaattgcaattgattttggtagagtagagactaacatgcatcccatagtgcaaaagaaaccagacctagaattttcaatgtgaaaggtggttccttctccatatattaagtgtattcattcagataaatgttagaagaaggttttcttgtcactgcaaatctgcatcaaattctttagggagtcatcactcaacactagaaacattccatatcacaatagattttgtccttttgtactcagctgcataaatgaaggactatttgcagtttatcttcgagcggcttgtattgcagcttcaatttgcgagacgactgttgcaagattttcgatatacttgtggtcactcagctttgatttgtccattttggctctccctctctgatctttcattttcaggatagcactatgtatggctacacgattgagacgacatgccatccttttcctgccctgggactagtagtaatcttttcaacacaaagcaacaggcaaatctcctctgcctcccattggtttgtatgtattgtaggctcacagccaagcagttccttgtcccattgtctttcctcgtgtacaccttgtacacatgtataattatttcttatgggtgtgttattatatgtcttgtgtttaggccttaatcatttggtgtcacatggactttgcctctcatcacatgtagaccacacttttttttttaatttcacttgtcccctccacactctatcaggtagtaatacatctcatctccattagatgaactttcattttatcttttggcccctcatggaactagtgttagttgagcttgaaccacataatacagttgaaatgcatgcacttgtgtcttgtctcttcttgtacagtggtgaccacaagttagctatatatgttctgataaatcccaacatgttctccaatgtgaaaagtctgcaagagtttatatccccaactgcaattgatcaatgaatatatagctcaattagagaggaggggggaaagaaacatgacataccgtatttttgtttgaacctttgctgaaagatggagatatgatctgataaggactaatgcctgccatttcttgattgaagattatgacctccaaagtagctattaggaccacacaggacactttcatgggatgccaaaatttgtggactcaaagtaaagttgtaatcagctaaacatctataagcattgctcaagtgtgaatgatcagtttaggaccatactgacatggtgagctgaatatccaggttagaaactgtttctaaaataaaagagaagcatcttcattgcttctgaactctggtgccttgcatgtgaattaacctcaggataaaaggggccttgggatggatatatggctgctttactttacagatttctcttgctgcccaggaaaggtattttgca

SEQ ID NO: 42709 - DNA, 665 bp, Oryza sativa
ttcgtctgaagaatataaatatatgatgctatagaagtactactattgtttgagttggattggtgataaccatggagtgcaagcaacaagagaagtagtatgtgaagtgcaggaagcattgattgagcagggtaggttgcttgagcagtgatatactgctacagcagcatgaaagtaacgcccatcgatcgtgtgcgggtgcagtcgcacttttttaacttttttttttgagaactttgttaacttttgtagaggtctgatatatactctgatagtgaaaagagtgaagtattatttaatgtacttttaatttaatgatgtcccagcagcttaatttgagagtttggcagaagtacgcatgaattgtatgtgtcaagtgatcgatggttataaatacggacaccgtgatggagtgatcgatctaaaaatgcagagtataagtactactcctgtggtagtacagtacaacacagtaggtgagcacttgagctgctgctgctaaggaaagaaaagaagattggtagaatcaagaagaagaagaaggtgagtagtactgtacagtacgtgtttgattttcagttagagcttgactatttgttgcagcacattaactctggctctcacaacaaggaataaactaagcaaagcaccgcccaacgaaaaga

SEQ ID NO: 42710 - DNA, 1831 bp, Oryza sativa
aattcctgcagccctcatgggtattaaccttaggcaaagccaaatggatattactattttgtccaaaatgtcattagtattagtcttgggccacaaaatacatgaatgttaatctttgggccaaatttcgtgagtattaactttaggccccaaataactaaattttacccttcaacccctagacacatgagtattagccacaagtccaacatctaatgattattaaccttagtcccaaaaccaaatgagtattagtgtttggcctaagatttcatgattattagccttggccactgaacacatgaatatgtttctttgggccaaattttatgtgtattaaccataggctccaagatgttgaattttacccttcgatttgaaaccataggagtatcagccttcggcctaaaatttcatgactattaatcattggcccaaattttcattagtattcatcttgggcaaaaaaaaatgcatgactttttttttaaaaaaaagaggaatccttaagcacaaaagcacatcagtattagcctttggctcaaaatttcgtgagtattaatcttgggcaaaacaaatgactgatagcattcagcccaaatttcaagattactaaccttgaggccaaaaatatatgaatactagcctttggcctaaatttcatgagtattaaccttatagttgaaagccacatgaatattagtcttccatctactcttggaccaaaaaaaatagatgagttagccttcttggcccaaaattttatgagcattaaactttagtcttggaaacaaataagtgttaccctttcgtcaaaaatataatgattattaacttcggcataaaacgcatgaatttcatgaattaccttgggccaaaaacacatgaattttaacatatttaccaaaaaatttgtgactattaaccttgggccaaaaatgtatgaattatatgtttttagtgcaataacatatgtatatcaacattcgaacaaaactccctagtatagcctttgggccaaaatttcatgagtaataaccttgggccccaaaagtgttgaattttaccctttggcccaaaaacatcttagcattaatctttggcctgaaatttcatgaatattaatcgttggttcaaattttcatttgcactgaccttgtgcaaaaagaaacatgatttttatccatgggcagaaaactacataagtatttgccttccactcataatttcatgagtattaatcttgggccaaaaatgacgccaaaattcatgactatcaaccttgaggccataaacacatcaacattagcctttgaccccaaaattttacgagtgccgatcataggctaaagacacatgattattgatcttgatcttagaaatgtatgaacgttagtctttctcccaaaaacacgtgagtattaaccttcagcccaaaaatgcatgaatattagcattctgttcaaactttcatgatattacccttggggaaaaataagtgcctttgaaacaaaaaaaaacagaaacaaaactctcgggcaaaaaaatccttatgcacaaaactattagcctttggtttaaactttcgtgagtactatccttgaacaaaacaaatgattgttagcactacagtcaaattttcaagagtattaaccttgaagtcattacaagtgatgaaattataattcgtgtcaaattgaacattagcatttgggccaaatttcatgagtattaaccttagacttatggacgcatgaatattagtctttccgctaatttttgtgattattagccttgggggccaaaaaaaaagcatgaattcggcccaatt

SEQ ID NO: 42711 - DNA, 639 bp, Oryza sativa
ttttcccaaggctaatactcatgaattttggctgaaagctatataactcacgaccaaaagctgaaaataatgaaagtttgcatggagggctaacacatgcatacagttttagtcctaaggttaacactcatgaattttaagtccaatgagtaaaattcctattttttttggcgagaccaatttttttgtattacaaaattttaggtgaagacttaaatttatgaattatggccaaggagtataattcgcgaaactataggctataatacacatgcagtttttcccaaggctaatactcatgaattttggctgaaacctatataactcacgaccaaaagctgaaaataacaaaagtttgcatggaaggctaacacttgaatacagttttagtcctaaggttaacactcatgaattttaagtctaatgagtaaatttcctattttttggcaagacctttttttttgtattttttggatcaaaaactaatcatcactaaattctaaacaagaaaataatgttaatatatttttatgtcagggctaaacctcgtaaaatgttagggcggcgaaaaatacccaatggtttttttccaaggttaatacccatgattttatgagacaaaccagtaaaaattccggt

SEQ ID NO: 42712 - DNA, 681 bp, Oryza sativa
tcctgcagcccctaaatgtctcgtgtgcatgctaccaaactaaaatgtagacaacaggtatcaaaagtgagaattttgttttggggaattgagaaaagttgttaaggtatgcagttcaatgaaggattaatgtactatacttcacatccatgcagccatacacacctaacaccttcaaagggaaagaaagtgaagagatctagcgtggatggaggcaagtagctcatcctagtgacagatatgagtttgttcaggcatccttctctgaatccggaagaggcttgggggaagaggaaaacatgaccaaacttcacacgcgacgagtacctgctaagcctatctcacacgaattctcccttgattttgatcgagcccatgcatgctccacagactgtttttttgttggccatttgcaatgcagtcatccaggatgatgatcaacagagtaacagactaccttcctcctcgtcaagtcactgtcttgcgagtcttttgttatttgctcaattgctcgtgcagtcgcttggcatgtaagaataaggttaggaaaacctatgctagctcagctagctgaagaaaagttgtggcctgactagcagtggatgcactgcaccagaagcggtcactcccttctctgaacttttcccaaaaattcctctctcaaagcaagaattcaactac

SEQ ID NO: 42713 - DNA, 1092 bp, Oryza sativa
taaagattatatatgttgatagcatagccgatgttgcagatctaacatgtatcggctaatactccgataccactaagatatcaaaatagacaaaatacattaaacatggattaatcaagtgttaaagtagattaacagattaataacaagcttaatatatttaattacagtgagatcttgatataaatggcaaatttagcatattaagtaaacctaaagtaaacaaaataaccaaatcaggtaagatcggctgaaaccccgatgaaacccaaatcggcaaccaataaactggctagagattgatattctaattacgacttataagatcaaacttaactgatgtagcaataactatgaaaagaagaacaatatctagaaaatcaagtcattggatgaatcatagagtggtagatatgctatattgtaggatcgaacaaggccagacaaacctaccagaggggggtgaatggtagggaaaaccaaaaacccaaaatcttttgcggaataaaagattacctcgaacgaagttgattatcgccggtcgaaccgctcaatcaccgccggtcagactgccgtattctcgccggtcagaccgtgtgcacacctacgatcagattgctgcactcccaccggtcagaccaccgccctgcctgcggttagaccgtcgggacccagaaacaccggtagatgacaaactcgaaatgtagattagaacttttcgactttattgcatcaactagtgtttacgaagtgcaactatagcactcctcaccaagatctcgaattaaacttaaaaccctaactttctctcaacttgtatctcactaaaactgatactgggagaccacaacctccctttctatttatacatgaggtaggctgtgcaaagcccacgaatctaacacaacttaggactcctatccacgtaggaaatcctctcttgcaagtatccaactcatccatttccttatctctttcaatcttcccgaattcggactctcctccaaattcgactcctctttccatatgtacacaatccacttgtataccctatgaaatcttcatcaccacgtgcattatcctctagccttt

SEQ ID NO: 42714 - DNA, 698 bp, Oryza sativa
aagtataggaatagattcttttcaatactctttccacttagcttagagatttaatataagagtgagtagcttccggtcctcatggaaagctacactcgttgaggtagaaatcgaagagagcgccaaacttccaggcacacttgcagagcttccgctcattctctacctattctctaatgtacaaaagatataatagagcctcttgtatttcacctcaaagttgtgtgtgctggaatgaagtgagctcctccttttataggctccaaatgaaggttactgctatgggaaatacccaaactaccctccaaccatcattgggatgaaatcaggagcatcgacaaggaagatggcgatcaacggtgacagacatggattagccaaactggtggttcggttgaagcaaaaaaacccacctcctggactctcctttggccaataggttgcttaatgggctcccaacatcctgtactatgagtttgcccaattctaagtggttttgattgacttatggagcttccaatccatgtaaacgcatcctgattgtccgaaggtgtactttgtcgcatgacgggtatgacatatttcaccaacagtagtggaaatgattagtaataaaccctaccactaagttgaataccatattttatttcattatatgcaggtgttgatgatcaaatatgatgatttaaggaccgtca

SEQ ID NO: 42715 - DNA, 637 bp, Oryza sativa
tcgaggatcagacttatggatagatgggctgagaacacagaaaagacatgatcaattaagcccaaaattccatgttttggattgaggagcaaatgaggagtcggcccgccaaaaattgggccgtttgggccagatcatggttcggtcgaaccccttgtttcggccgaacccctatcacagccgttcaggctggggtttggcgtggacgctccagatgaactcctgatggcggttgcggggcatttcggacaactcctatgctctacaaccgtcatacctacctatttaaggagccctcatcctcacttcacaacacacactcaagcaaggattgaagctccattttattaatataatatttcttctttatacaaggtcggtactttattccattcatagaatataggtaccattcttagtttattgataatcagtataatcttagtagttaaaccttctgggattttcattgatgctggtagaatgtctgataactgggtcataagtctgctctggctaggccgagagctatggcccggggactcagatgctctgcaccgattgcaaggctgtagagtaataagtagttacttaagcatagggttcaggttatcacttatcattatttgggggtata

SEQ ID NO: 42716 - DNA, 678 bp, Oryza sativa
gcggaagtacgtttgaaggtcatcgtgctgttgctgcatcaggttgttgatgttggtgaactgagcatcagcattttgttgccattcttgcgtctgtgctatgtgttcctcgaggttgtattggatctcttccgtttgcatatcaagggtatccattctcctagtgatttcacctaagtcccaacgagaggaacttgagcgccattcaccgagagatggaggcataccgcttgatctgggggactgatagttcaagcctccccattgtatgtcatgaggcactgtcaacgaccaaatttggtaattcaagtatcggagatgaagataaaatcgaagcggaatccaagagatagatcgaccggaaacagaataagaatcggatgaagtccgaatcggctgcgatcagaatcagcagagttcgagtcggacaaggtagccgattgggccgattccgacaatgtgacccggtacacatcgttgggttgagttaatgtgcttcatatggattgccacgcacggattgggtcctgtaaaggcaattgtatctattaattaggatattttatataatttccttagagataagtttgggcaaaagtttgccgcaaagacttatggtatcttaaagtttgttagagataggagttgtgtccgaccaggacagggctgcaggaattc

SEQ ID NO: 42717 - DNA, 970 bp, Oryza sativa
aaaatagaaaagaagaaaaggagaaaatagaagggaaattgggggagaaattaggaggatttaggaaataaaaatggtcggggttaatcatagattatttttggaaattcctcgagcgtaatagtatttcgatcgaaattccgagttaattataaaatatgtttcttgatcagattagattaaaattggtagtaatttagatataattaataactaaacaattagatgaattctcatagattattatagattatttttggtaatctctataagtcatcggttcacggtagaaattcgaatttaattactaagaatcttagccgcatattatatttaatcgtttagtcatagaataaattaaattgtataatatttctaggatttcctccgatatttagctcttaatagaaatttctaacctattatatggatataatgctcgggaagagtaaattaaaaacttatgacaacaaaatatttatgcccgcaaaatagtttaagtcgaaattgggtttgccgtagttcgcagatagtaaagttaataaaaaggaatcgactttcacattcgactttcatttggatttatttggatttttatttgaattctaaccgaattcaaatcaatttttgcacgtaactatagagcccgagggagttgcggatccaagcgaaggccgagacctgcaagactctgagcaaggcaagtcatcactattcctcgaacatgttgatcctaattacgaaattgttttgtttacaaataaaaattgcatgaaataatgaacatcctacttgtgattatgccatgccttgattattgtttacccttaaatctttgtaaccatgcttacgtatgagtccctagtcaactatgacaattgcttagaaatgctattgtagaatcatgcatactcatatttatcaaatgctatatgcttgggcaattacttcgggaagggctgcaggaatt

SEQ ID NO: 42718 - DNA, 4079 bp, Oryza sativa
cctgttcatgataatgagatgattattatatatgccatggttcattagattagagtttctcctgtgcaacccatgattaggcagtgggtagagagcatagaggtctccgctcctataaaatgcacttctttgatcacttgtatagcaagagggcttggggttattacaaatgatcaaattgcttatatctcagtctctcgtgtttatataaatgaatcataactagtgcaaggtcatactttgaaacatggagcagatgtgaccttagtattcttccaacccggttgtagaaatgaaatcctgttacctaacccggggtatcatttgtataactgttatgcactaaccattcccctgcagacgatagaggaatcccgtgcaggtgcgacacataggagtaaccgcagaatggcagcagatgaacaggaggattcaacgtactcaccacccggtcatgcttatgagagtggctggaaatcagctagagatgcctccggctgggcccaagccctacgtcatagcactggaggatctgcctagccgagtgccggcagttcctagtggcagatgcctcatgaggtgcgctgggggcacaccaactcagcaggctcaagtggcgtgcctccaacctccagctggtggtgctcgagttcctctcgctgggacaacagtccctcgaaggacacgtgatccaggcgcaggagtagcagcaaagtgttgatgcacagttctcaaatatcaacaatatgatgcaacaacaacaagctgatctgcaagcctacttccgccatcaaggattcaatgcttactctggaccatgagcaaggagcaagcttggggggagaagtctctcccccgcaaaggtgacttgtatctgcatttatcttgcatatttcctttcttgcatgtttcaattcttgcatttgcatttataactcaaaaacataaaaatttgcaaaatagaaaataccaaaaatataggatagattttaccatgctaggtaagaaaacctagttctccacattgaaatgatgaatatttgctctgctttatatctctaatgtatctgtacatagttaagtactctctcaagttttaaataatgattagccaaccattatccgggaacctgagagatgtgagttgcacactgcgtgatttaagcctaagctgttgtgagatatgatatagtgaaatagagttgcttaaatcttgatccaagcttgatttaaattttggatgatttgtttttcaaaatgataaatttcaaagttcctcatttgatatatttattcctaccacagccaaatataatttgcacttgaaaaccttatataatatttggttacttgtagttccattgaactttgtcaaattttgtgacttgtgtagatatctttcatactttatgaacaagatcatacacccacatatgcacacatgctaagcttctacactggaagttagcattcatctcactcatatccatgtcatcatcgacaaataaagctctccattcatgcattcttctccaaagaaaaatcttttgcaaaaagaaaagaaaaagggagagaaaggtgtggctataaaaaaatgatgaataaagtcttgctctatcaaaatatggagcgtgatgaaaatatatagccataccctctccatgaaaaacaaaggataatttggaggagaagtataagcacaaaggagaagcattttctttatccaaattttattttccaccacacattccacacactttgcatgatcttgatctaagtatgatttgctatctgctttagtctagatttttgacttagtaatttatgagaatacaagtatgcctcatttgatccaaccaagctccacatattcaaccttagagtaggattcaaatagggcattatctttcgtgaggaataaaatatctatacactttgagtgatcaagagaatcatttgaggaacatagtttttatttgcaaaaatccttgaaaaccatccgggatgaaaactgagcaaggaaaaagaaaatggtgctctatgatctgttctatctctcaattgcctaaggtggtgagaagcgtgtgttccacaaatgttaggcataagggtaagccactatgcatatttacttaacatgagagagagtactcaaactgtgcacttctacattctagatatacaccatagtagcaactcctgatcaacaaccaagtctttgtttcctttcgtcctttactcgggacgagcaaaggtttaagcttggggggtttgttgacagtcgttatcaaccaatttcgaccgtcaatatttcccaattactgaagactagctatgcttgcaatgcataaattccaaataaaatgtctatttccactatgtactatgctactaacatatacgcaggagaagcacatataaatagaggagaatcgacagaaagcaaacgaacgatcactcgaaagctatcgagaagcaaacttgtgaaaagatgggccaataacacaaaatacgcacgagtaaacaagcccaataattcacatcactggattgatgaatcaacaagaagtccacctgcaaagttgtgggctgattgggcctagttcggctgaaccagtagctagcccaattagcctaattcttcaccagctggtagttatccatgtcccaagacggttatgaccagttaaactgaagaaaccatcgctggacacatgtcacaaggagatgaagctaaggagaatatgctccttggatgcttggagcatctccactctcccaaatgcaactcatggcctataaatagctcctcctctcattcattcccagcaaagatcaaagcttctctacaagtttagtgttagtatagtgctagtggagtagaattggaatagctctgctagtcctcggagccttcagaaggagttcggtaaagtctcttgtatcttttcctcttcttttgtaagacttctactttcaatagaataatcttctttatataattcaggtgctttattccaatcttagaatatgcgtaccgactttatagtattcatgaatagtataatctgtgtagctaaatcttctgggaattgcattggtgcgggtataatgtctgattattcggttgctcaacataaattgctaactgaatatttggttgctctatagatatagatgagggagagagagacagaggaagacatggagaaagagagagtggctgtcaagaaaatgagagctggcacctggtcaggctggtagtgtgcaacaagggtttgcaaaaccaccggtgaccatggttacagtggtaatagaaaaaccacggtaatctccttaaattcaaataaatttaaaaaataatttgaaattttgataaattttgcatggtttcgtatggtttgccacggttaccgcgcggtaaccgtgcttaccgtcggggcacggtaaccccgtccccggcggtttgggaaaccctgtgtgcaacagaatttggtatgatctccttgctattttacttttttaatattaacataaaaaccatcaattcttaacttcaatatttaatgagaaaaaaaccataaattttaacaaaaaaagttataaaggtttcaaaaaagaaaaataaaatgcaaacgaataacaccaattttcacaattctgacgtgtgtcgtcggtttaactccacgtattttcttcaggtatcaacacatactatattctcatagttaaagtggataaattaccacaaaattccatttattttttttagacttacctacttaaaagatatcaatatttccgttcatcacataaaatttccatccgtcgccttctgtgcaaacacaatcgcattgttcttccgaacgttcttccaacgctgcaaccatccagacaacatgtcaaaggcatcattcacatcccgcacatgtagggaaaattttacccagtgtgacgcactggcatttaggtaaggctttcgggttttttgtcagtcttttttccccttattttccttttttttcacccgctttttattcgttgccttttttagtccgtctttttttcgtttttccctt

SEQ ID NO: 42719 - DNA, 2340 bp, Oryza sativa
cgctatattgtttttaaaaaagagatgctgctgaaatttctttgttttggcacttttatagggttctttagtggcatcccagacttgtggagatttctagggtgttacaggctgtatctagctacacccagtctctctcttgagcttatgtgtcgccttggtttagctttcatccactcctagtggtgcacaacttctcgctcccgcagcatctacacttatacaagcaagaggagatgccctcttctttttctaggcggcgtttgctccagttcgcagttgcacatttgccaataaaaaagagatgcttcctacatctctacaatattgtgccaacggatcataccttcaaggcaaaaggttcttgcacccgacgtgtgtgcatgactaaaccgctcgcctgagttggcatggtcgaggtgccttcctccgctataatccgcaacgagatggaggagaaatctacaatcaaatgtgaccatgcaactgccccaaagattccaatatatccatcatgttggcggtaagtacactcaggtatgcgaaagataaaacaaggttcaccaagcatttactcaataatatcaccatgtgaatatggcttgatcatacatgattatgtttaccttgtctattttcatatactctggtttgggtatttccatagactttttaaattaagcatggtgcttaggttaaaattgtttgctttaatcaaattagacatggagttgagattgattaatgaaccatcagagttaatatgttcatcgacattggatatatatcttctgtggactaacccctacaggaaagttttcaaactgacaggtgagtcctcaagttcaattctcattggaggtaagtcagggcccgggaaacaaatcagtaaattgctaacatgcaaaggaggagcacaccatcttttgattatgttcatgcaattttacatcagccctgtatgagattttgcttaaacaaaaatttggtgaacaaaaaaaattaaaaaaaaatgttttcaagaacaaaagaagtgtctctcaaaaaaaaataaatggcaaacttttgggctcgacgcttcttaagttttgaatacaatttctctttagcgtggatgtgaacaactaatcttgaggctatgataaaatcttttcaattatttatagtctctcgggtatttactgtccactaaccgtttgtagggaataaaatgacaatcaacagcagtgtacaataagttcaaacacatatatcacgctccttggcctcataggaaagagatgcacatggaaccaaacagaacaaatgcaaaacttgttgcattcgattcggttctaagcttggtaagatatatttggtaagaatcccaaacatcttgtgtatcctcgcctcatatatccatcctgctacgatacccaccatatccattgtggccataaaataaaaaaaagataaaaaataaaaataaaataacataaaataaatttggctccttagtcttccaaccaagtgagtcatttttgcttcactcttgtctttgtttttcttttttgtgtccaacaaagagtcccatgtacaaagagaagtgtgggggtgatcttgcacatcaacgccgtaatcaaagcaagatcaccccagaagtgatgagccatgacaaaccacacaaggaaaattgacgcagtcagacccaataaggggtcaaccaaacctccagttcggctgaactacctctaacatgaatcgtcctctgttttttacagagcgcaagtttgcacattattcatttggacatccattctatcttgagtttagtttgattatcaattctaacatatcgaagataattaaactcaagctagggatggtacaattagagtttatggtctctctgaaaatgacatgcaagcctattattcttagctcattacttgttgcttgtggtgatatatccaatagggaccccatgccatctaggtaattgatgaatgagatatagtctaatgatagaaatcctgctcttcatgttgcacacttgggaattttataaaaaaaaacataacgatgctaaactcatcattgatattttttttattcccactagagccataggttgatcattcatgattggcttgctacatatgctgcttgttattacattgagcgttgtcaagttttgtgacccttgtgaaatgcttatcatacattcatggtcaagatcacgcacactccacatacacgcacttatgctaaatttctacactggaagttagcattcatcatttgtcattcatttcatccattatccacaaaataaatactccatgtcatttatgcctcttc

SEQ ID NO: 42720 - DNA, 1537 bp, Oryza sativa
ccatacgcatagaaaccatctagaagtcaaatccccgaaggaaatattcaaatccgacaaaacaactcgaaaccaaaacaaactggaacctgcctgtaataccctgaaaagaaacattttagtgtcggcttcgggatggtttataatatcatggtagcatttagttaaataaataatgtcttaggagtgggccaagccaacctgggccaaagcccatgaacccaatcactcctctcccatctaaaaccctagaggaggaggggccggattccctcttccccctcgcggcgcctcttccccctccactcctctcctgtgcgtactttcttctccctctcctctccatcaaaccttgctgtccgtagatctgcaccttcatagcttggatcaagaagcgaagtggaaaaacggaacgaggaggaggagaagagaagaatgatgggttagatcggagtttccccgccgtttcccacgggatatgaaaggaaaaccctatgtgaggtttaccccccctgttgtatcagttgttctagggtgattttagtggtttaattcgtggtaaacaaaggttagagaagggtttttgtttgttgtggctcggtttggtagttctcctccgttggcagatttgcattgtttcggtttttttgttgtttcgggggtctaaatgatgttttctacgaaagtgtataactaggaagttgtagaaaattcatagacctatcttctgaccagagggcgcaattttatctttagttgtttaggatatatgaatttttgagtatgactgttgtttttatgtcataatctggacattagtagattgaactgcaattgggggatccaaaaaattttcaaaaagcaatacaattgttcttttcttccaaccactgtcgagagaatcacgcctttcggcgtgacatagttgtccattcgacaacagctggagccatccgtggggacctccgaccgaaacactgagagtgagtgaaaccactgatgccaccgaagaagatcgtcagtgtcacgtcccaaaacgatcctaaaatatatcctttaaattatgcctagaataattaaatttctagtgaaagcctccaaaattaaaatgtgcaaagttaaaagtcaaacaaggcttagaggatttttgtatatttcctaaaagcctaaaatgtgtaatcaaattttagtggaattttcagagcacaaataataattattaagaaataaacaaagttaaaatgattttataaaaagaaaaaccctaaaatcccttcccctctcttgggtcaaatccggcccaactccctcccccatctctcctctccccgcggcccactcggcctccccctccctccccgcgcgagcgccgctgatgtgtgggcccgtccgccaccctcgctgacgggcgggacccacccatcatccccctcctcccgccgctccctccgcccctgcccgcgcctagcgccggctccgccgccaaatccgcagtgcctagccgcccccgcgtgaaattgaatgggggaaatattcc

SEQ ID NO: 42721 - DNA, 1813 bp, Oryza sativa
caattttagataatctaaattcctagctataaataattgcattttaagatagaatgagtaattataaatttataaccagaaatagatatatttttggacggaggagtaagagaagatattaacttattaaggcctgcagtgataaggaaagttatgctttttatttcattccattgcattctgtagttattgttaatcacagctaggcagctagctaattatatagttatgagaatgaaagacaagggtgatcaacaggtgaagtttagtctggtgcagtacatggaacaccaatgcaaaaataagatcttttgcttgaacaaagaggaaaggctgacttgatcccagttaagaacgggtatcatggatcctgtccaaaagtacaagatttcctgcgagatttaacaaacactaaataggagtttttttaaaagagttgtcaatactaagcatgaggttgttaatttacaaagcctgcagaggctacaacttcccctctaaaaaaagagagagagaatttgtaatttctctccattgttgggtactgtatgttctttctttgtcatattgttatatgttggttaggaaccagactttgagaaaaacccggtggttgacttcaggtaagctgatctgttctgattacaatctttggtgacattgacactggacaagcactaatattgaatattccccttcacgccaatgattttacttatcataagggttggtaccctaccatccagtgtaaacggtatttatccttccattttgcaagagatttcccctacagcatgttcatgacacaaggacattagcatcccttcaagctaagtcaagggataaatgttcttgctcttggtgaacagaacttgataattttggacatatcaattaccaatatgacgttttgaatttgaactaaaatgctactccatctgttttatattataagtcgtttgattttttcctagtcaaacttttttaaatttgaccaaatttatagaaaaatatagtagtattttcatcacaaaacaaacatattatcaaaatatatgcaatgttagatttaatgaaactaatttgatatttcagatgttgctaaatttttatataaacttagtcaaacttactccctccgtttcataatgtaagtcattctaacatttctcacattcatatggatgtatatgtctagattcactaacatccatacgaatgtggaaaatgttagaatgacttacattataaaacggagggagtaacatagtttaacttaaaaaaaagtcaaacgacttataatatgaaacagaaagagcattttatttcattctttatataaatatatttttaaaaaatattattacaggagaaaacggattgattaaatcctacctctacatctaccaggaatatacatagccaagagttacacacttacacaagagctacataagattacttaaaaaaggttttgacgaacaaacaactagattacgaaaccgttcaaacaacatagaaaattacgtaccttgttccagtcactctgaaagtccgaatttcaatcacgaattttcctgcgtgagtacttgtccgtttgcactttggcttcttgcacggtaacacattaataacattgcagtttggtaatccactcgtggagcacaacgactctgacctcaccagatcacgcggttgcaagagaaaacaacagctacggctcatgtcccccactttgacttcgcagtactctcgctttctacatgcatgggccggcatatagaggtgattacacgacagctccagcctgaaa

SEQ ID NO: 42722 - DNA, 1527 bp, Oryza sativa
ttcaattggaccagcgaaaataataaaatatggattatgtgtcctctagtaaattactttttgaatgcgccttccaactatgatacattttttatgatgttcacaagcaaattacaaaaacttcgagtgcgctatagcaaaatttatctttttgttcatggagttcccctgcagtatcaattggagcaaagcacctgataatcaattacctttttctagtcaagagaacatatcatctacaaaattcagttcaatatctatttttttatcaatgtattttataacatgacgaaatattatgtacggaagtacgttttcttcgagacaaatatatgagcaagatctttcaatgttcagtttaattaaatataaaaataaattgatgcaaagttgaaagtttgacctcatccaaaacatatttttgtgaccagagaaagcaccgttacttggatcttgtgtacgtagcttattagacagagtcgtaccagaactaccattgtccacaaatttaaaactccactaatgccgcattatttttttgttgagacttattgttgcattatttgtggtagcggttgccaattggatttggatggaaatgtgacgccatccaaatgggtcacttcgtgcaaaggcagcagggggtccatgaagctttacgatgattgaggtgattgtccactgcaatgtttgcacccagcatggtgtagaactcactacaagtggataattatgaacggaacagtgatagttatgcgaccaacactgttcgaggttaggtctggttgttttgagctatggttacaagacgtagacaatttaaaattttagaacatagtttagttgttttagaacattgtttgatcgagctgcgacttataagacgcagtcaatttccaatcaatttaggtagttctttgtcgttttcgtcactgaaccctgaacttgattttggacaaagaactaggagggtaaaagatcttagtttaaaattatttctcgttgtatcggtcatatgtcttcgtccccgtttaggattctaaaaatctgtgggtagtaactagcttatgagaatttggagaaattggatttttccggtttccggcttttagtttattttctgattctacaactacggattctcagaatctggataggagttagaaattctgtgagaagccgcaactactaaaagctttcccttagacttatacgcaagttaaaagtgccttttgtattgtgcttttccttctaacgtagttgattatttaccggcgatagttagctattctttagtgttgagtgggaagaatggctaaatagctgaacgatttgtgataattatttgttgtacaaacgaataaattgaatgtcattaagttaaaaagttagattaaaaatagtattataaggaaattccttatataatgttttttttaagaaagtttagcatcgtttacgagcttggtaaacgtgtatgttaagtgcactcggaatttctgtgatgcgttattcatggcaataaga

SEQ ID NO: 42723 - DNA, 660 bp, Oryza sativa
cggttttatctgtaggacaccgtacaaagtgacttaattacgggaggagacactatgtaaatgtggtaatttgccggtagataccgcacccattaaaataataattttcagttggagaggagataattaaaaaatcacgtgaaatatcaaaaatacccttgtacccacatgtcagctctcccatctctcttctatctctatcccctccatcggtgccatggggatcattgccgccgacgggaagcaacacgggcgggcgggagagggaggtcattgagctctgtcttggctgagcttaggctagcatcatgccgtgccaccatcttccacaccatgtcaaacccaaccgtgcgtcgcgccaagctgcctcgcccttctccatgtgccacaccaatcaccccccttgctgctgttcttcctttaactcgcacttcgtcgtcgagtctcatcctcggtcccactgccacagcaggtcaccgcccaaacaccaacaacggattggaatgtcgcttgtcgtgcatccatctcgccaagcagcgctctctgctccgtagaaaaatcattgtgccacctcacctcagctagtcctgcctcagcgtgaagtctcgccaccgggcccgcttccaccgcacagaccgctcaacataccgttgtagcgag

SEQ ID NO: 42724 - DNA, 2644 bp, Oryza sativa
acgatgtgaagtgttgcaatatgactttttgtcacatccattccgtggcaacatctaaatttattaccacaaaataaaaatcgttacaataacctattaccacgctatttattaccacggctagcaatgattttataattgtggcaacatgtatctattgccacaattttagtattgatgccacgatttttttttggcaacaaatgattttttctagtagtgtatatgaactatagataatggcttcaacaagaatacgaaccaccattgtcatgtacaaccagctaagactagaccttaagatataaaccccaagtcaaattattagcaacaagcaccatctcaaagaagcctctcttagtatgcccccgtcattccgagacagtgtcgtcatatataccttctgaacttagcacaatcacaatcaaccacaaacattacttcatacaaccttctgtagacacgatccctacgaagataatactgcgaaaagccaaaaggcacctggccaaaatccatacatctgtcctatataaagagaaaaaaaaaagaacttgagcatgcaaggacaggctgcacaggccaaagccagcccagataaacttgtgtctgtcaaagggaggagcctaagctgtcgatctgccatacgttttcagcgttatccagtattgcagcagtcagttgaaacgagtttggacgagacatgcaatcatgcaggtcttgggatccatgattaattggcatacgcaaaagcgggatcacctgctaaatctcgttgcacacgattcgccaattcggtcgaagacaaatcgcaccacacacacctttggtccacgctagtttgcgtccaaaatatttgtgatttttgggtggtcaaattagaccgctgtctaatgtcccgggcgtgtagtgtgtgcagaattgtggctggatttgtcagattgcacgtcaaatgttcagcactaatcaagtagtaaacgtcacagcgcaggctgaaatatctatctgacaggagaaaattaacctcataaatcatatcaatttgatccaaatcaacggcgaaacatacaatgttttccacgaggctgatttaggaccgtagtgcatgcaacagcggcagccgccagacaactatgtatattttgtctactaaattattacatctctccatcctaaaatataattatctagggctagataagacatttactagcactacgaatctagatagaatgtttgtttagatttgtggtactaaaaaatacctcattcggtcattggttcttatattttaggacaaagggagtacatatgaacgagtagataaaacgtccacttcgtagtagaaagcgggggaaaaaaatatgctgtatgttatactgcattacagttttcagaaactaaacaataacaaaaattgagacctttcttgacaatggttttcagagcacctttgcaaaagaaatggatgtgtcaagaacatggccaaaatcattgatctctcgatggaaaaagtttatctcttgcatgtagttatctgtcttttgcatggtgaatggtacagggaggatgcagagtttggtctgatcaggtaattcaggggcagggaaaaagagctgggagacctgccgtgagaaaactgcatgccactcactcttaccttttcttttccttctttctttttattttttttgtgtgcgtgcagagaataccataataatccagattcagtggtgcttgtagccaaaaagaaatacaaaaggaaaaaaaaagctgcatcgtccctatctgaacgcactactctgccctcctcaacggtcgtgctgcattttagaacgacgtcaacttgaacagtttcagatgctacgtgtcagccttaatccgatcttgagattaaatctcaatccaattgcaggtttcaggatgacaacaaacccttggttctgtcagagagtaaaaattcagagcaagaaaacctgaaaaacacaaaggtttcatctgaagttctgaaccattgcacatttggccaatttgaatttcaagaaagtttacacacacaaaaaaaaactgtaaacgcattttaagtagggctttatgcacacaagcttttgacagacagatgggggcccctaaatagttggagtacagatttgtcaattccatgagcacttaagcagagagaggatgcaagtgggatgcagtggactgaccatccatgtctgaagctgcagtctatataagcatggaaactactaatgctactacatgaacttatatgtgcatcttagcaaatgagacttcagaaccgagcagatggaaactactatagatgtggcgacatgacgcatctcattcggaatctggactcccccggcatatcaactcccactgatggggagtcttcttctttctccccatcactcatggcatcttgcaacaactttgttttcagaggggggagagagagattgacgtgcatggtgccactcaaagtgccacgaatgtttatttgtggagcgggttattcctgggtatgaaggtgctaaatttggtataatcacgtcatggttagaccgcgaacgagatattaggatgtgtttggttggtgacctcgaaaggttttgatccgcccttgatgctgtct

SEQ ID NO: 42725 - DNA, 961 bp, Oryza sativa
ttttgtttgggagcatatgttccattcgcattatataagtagcattcattcgatcctatatgcactaggcacttcgttgcaaggtcggctaatatatggatataaagtgaagtaaattccctaagaatatatacaaatatatatatatgtgctggcagaagagaatccaaagagatatctcgaaatcaagctaaaaatcagagaacttttcttatagttacgcttaaactagtataagcttttaatagtcctcattgctcagttaacttaagatttatttgacaaagtaattagcgcagtgtccaaacaagagtatttcacagtgcagattttgcctttacataggcttaggggagcttagagtgagaggaagtgttccaatatataggtaactaaatcacgtgtactttgcctttagatgattgatgcatacgacttaatagtttttggctattattcttcttgaaaattcatcggtctagaaatttctaccagatttaagttgttaggcccaaatattgtacattccattccacaacaaagaagtgttgtttgggtagtttggcatattctaaaaaccaaaattttcaccaataattatcaatacattcaatatatctgtcaaatctaatgaaataaaattatgatatatactatgatgattgataatattgtgaaaatgtacgtgcatttataatattttgattgcactaatttcaggaggcttatttttaaattggtgcacatattttttctcgaatatgaaaatggtcagacaaacatacaccctcgtcttaaaaaaaaagacaacttctaaaaatgaatctagacaaattcattcatagaagtttttttttatgcaacggagggagtatgttatcttgcccgcgggaattaaattcagatggaactttaagtaggatatatttttttttacaatttgcgacagatcacatcgaca

SEQ ID NO: 42726 - DNA, 1372 bp, Oryza sativa
aaaaaaataagttaaattatgagacgataatttttttattgcaacgaatttgttgatcgtggcaacaaaaaatagtgaaaagtaccatgtactatataaattgccacaaaaattaaaattgtggcgataaaacatgttttttgcaacagtacgattttttgtgacgatatctcattttctattgcaacaaaagtactaaataaaacaacgattatagattgttgcaataaaaaataattatttaccaaaaaaaatatcattgctatagtataatatattgctacgaattattttttgttgtaataatttggaggtaatagctcaattatattgtagtgataatttccctcggtgaaaatttatgttatgattttagttgtttagagcataataataacagtacatctgcaaatcattcttttaaggcattgttttagggagttcaggtagagtttggagatgaagttcacttgtgattgtagatcgccgcgacacaatttatgtagttgtcacatttttttcttttctttcataatggtggtaggttgtgtgcttgtaactatgcataaaccgagggtagttttagagtaattgtatcattttaatgcaattgcctaagatcaataaatctctctttattatcttaaaactacaatagacgcacacacatacatacactacacatataacaccatactcacacacccacgaatgtgtaccctaacccacactcaaagtgacggtaaccaaatcacacatcccagattttactattttgtttttatcaaaaaaatccacttacgtccgtctgatactcgtgagcaccaaaatttaaacactacttggtggggtcatgcattcacaacttcactcacgctgctagatttagctaagcagcagcaggatactccctttatcccaaaaaaaacccttacccgatgagatatgtctaaattcgtagtactgaggccctgtttagatcccttggtaaaattttacactctatcacatcgaatgtttggacacatacatagagtattaaatatagatgaaaaaaataactaattacacatattgcgtgtaaattacgagatgaattttttaagtctaattgcatcatgatttgacaatgtggtgctacagtaaacatttgctaatgatggattaattaggtttaataaattcatcacgcggtttacgggcggattctgtaatttgttttgatattacttattataatacgtttaatacatcaaatgtgtatccgtatatccgatgtgataagctaaaactttacacctctggatctaaatacagcctaaaatatattacattaagtggttgattttatgggacatatggagtagacggt

SEQ ID NO: 42727 - DNA, 2795 bp, Oryza sativa
ataagaatcttactgcaagattaaagtatttatcacattcatatctaccacgagaggtcattggaccaaaatttgtttatttttcttttcatggaaatgtaatattattctcgattgaaatccattaaaaattgctcggctggtaagatttccttatagtggaacactggaacttacctatccaaatttaaattatagaccacgagtgtttacatttacacagctattttattcttttggtgtaagcgatgaatacactactagataacacatcttttatccaatgctccaaaccacaaattcaccgatgaattaagaaccggtacttaaaaactctttagtatccgttctaaaagcccaagtccccaaaaatatctttagttccagttggtaacactaatcggtacaaaaaatgcacttagtattaccaatcgatgctaaagaagtctttagggttagttaaaaaaagaaagcatttctatacaagtaaatgtgtggggttggtgggatggttacatacgtgaggattaaggtgagagatcttgagtttcaatctcacatcccacttattttgtttgacttaatatgtatctttagtactggtttcttcaaccggtactaaagatcacaaactttagtctcgatttccttatctcggttgctacaactagtactaatttaagggggtttattaaccggtagtaaagatcatttctctactagttatatgtcggcctattctttgaaggtacgtataagtatgcatgtgtgcgtctatatggatacctatcctagtttttttaggggtttctaggggtgggatgtgcgttcataagagtgagtgtgtggggtatctatgggtctacgactttactgtgttttcgaaaaaaaatccatgaaaacaaaatttgatactgctgaaactgccaaaaaatatttcagtctcaaggaactattctaatttcaaagatgacaaaattgacagcgaaaattaataaagaaactacaaagtctgttgcaaatgagcctgcctgatcaacttggacccgcatgtcataagcaactgcatcactttccaacagttcgagttgccatgcatgtactccgctaaatgtagggggtgggtagacaatgggcaagttgatgaagttgtcatacgcaactgcatcactacctgcaagttctgtaagaattcttcgttgataaaatatatgtggtttctgaaaattgaacttgatgttgcacttagaattttttacactaagttgtaggcttatgaaacttattgtaacagaggtcaactaacatgctgacaagttggattagatttcagttcaagaattgggaaaagattaagaactagtggaattcactgcgagtttgagtccattatttatatgggtgacatttcttcatttgactgacccaaaatgtgtccagattctggtttagggctgggcctgtttagtttgttgtcactttcaacgtaccaattttttttgaaaagattcaacataccaaattttggtaaagcaacaaactaaacacacttcaatcattactatcttaccaaaatttaacaatcactactggataactgatctttcgtcgtggtacccaaaatcacaaatatctcggttagattaaaaaccggtactaaagatgcttttagtaacggttctaaaagtccacatccctggaaacattttaagttccggttggtgctaccaaccggtattaaaaatacatctttagtatcggttggtgttcggtaacaccaaccgagactaatgctagaagatctttagtcctagttagtaaaatcaacccggactaaaaatttatttttagtaccggttggtaacaccaatccagactaaaaacatttttagtactaaatatacctccagggttagtttaaaaagaaagcatctttatccaagtcagatgtgtgtagtagggtggaatgttaatgctcgtgagagctgaggtgagagattttgatttcggatcccacatcgcacatatttttttacttggtatgcatctttagtactggttatttcaacctcgatcgtcatgatttgcttgtcacggttgctacaaccagtactaaagggggtttccaaccggagttaaagatcatttcttcactagtgaattctagaagctctcttaaaactcaccaaattttggtaaaagcatcaaagcaaacaaagcccattaccagattttggtaatactaaatgtacgagaatttggcattgtcaatatttggtatggttgatttaggcaataaagtgaacaaacccttaattcgttcactaacctataactataactatgaccctacctgtgtagttagttataaatggatttgagaagctgacagattttttttgtgaagctgacaaaataactttgtccacaaagatatcaacttttctagtggccacataatacaagtcaacaaaaacaaagcaatatccctttccgaaaactcgatcaggaaaaagaaggaacatgtatactccatgctatatccctatacattacagggtgcatttggaagaaatcatatggacaggattctccatttcctcatttaatcaagtattttccctgctgctttgtcaaggaccttaatcttgaagcaaactcccaacctaacaaacgaagatctgctaccatcatcaagtttgttttcttgtctttataatagcaaactaagttaactaataaaattccataagtcaccatgcacatgcacaagggatcacggcctgtcccccccc

SEQ ID NO: 42728 - DNA, 1798 bp, Oryza sativa
taacatcttacggcaaaaaggacttactaatctcatgcatgtttttctttcaggggtcaaagcaattatgcaaatgtcctacccatatataatttagcaccaaatggttaaatttaaataaccctacccatgaaggcagtagaagtgatgagctgccttttgtccagcctatgttgaccactgttgttagaggcttggagctagctagcgaggagattaagctaccgacaggaaattaaagccaacaagtcggccaccggttcggatcccgatcgtttgataacaacccgttacacatcattctcacatcgcacaactagtacagatcctctcatctgtgatggtccctcacatacctaggttttacgggccgtcacaacgaagtcatctcaaacggactcaaaaaggaccgacaaagatatactcgcacatacatgctagatgtgcataataattgagcccgtcacggataacacctatcagtgacggaccccaacttgaggcccgacaaagataaccgatgatatctttgtcgggccctaacaaaagcccatcaccgatgtccatcatacgtgatgggctccaccttgaggcccgtttgagataactattaggcccgtcaccgatgaatgtcatctgtgacgggctccaacttgaggcccgattgagataactattaggcccaccgccgatgaatatcacccttgacgggctccaacttgaggtccgattgagattagtcccgttaccgatgaatgtcatccgtgacgagctccaacttgaggcctgattgagataatgctttgactagggttcacactcgctcagatcttgatcgaaattttttctaagtgcacgtcctagcaccgccgccgtcggccgccgtccccgagcccgcgttggccgccgtcgaccacctccacgacatccctcgcttgccgatgccgcatcgatgacccctgtcgtgcctgagcccgctgtcctccaccgaccttctccgtgccatccccaagccggccgccatcctccacgccgtcccctgccgtcccgagcccgtcgccgcgtcggctgccgtccccgagcacgcgccgagcacacccgccaccgaccaccttccccaagcatgcccgccgcctcgacctcctccttcgccagttagaaatttgttccaatttacaactcgggtttgcaggtgtttgatgcttagcacttgaagatgttattgtgaaatatgtgaataatggatgtgtatgtgaatggatgtgtgaaatatgtgaatggcatatgtgtatgtgaatgattagaggatattgtgaaatatatttgtttctgctattttgcagcaggcatggctagcaaagacttgagggtagccaaaaaaacaaaatttatttttttggggggaaatactcatcagtgacgggctttaacttagcccgtcatggatgacctcatccgtggcgggcttaagttaaagcccgattgagttgagtcatctgtgacgggctttagtttgggcctgtttgagattgtggtcattcgtgataggcgttaattaaggcccgattgagataaggtcatctgtgatgggcccttgtttgactggtcgtctaggtcaaagctattagtgatgtgctttagtggaggcccgattgaaataacttcatccgtgacggccgcatgcccgatagagatgacttctcacatcagtgacctttacgccgtgacgggcgccatacccaacacagatggttgctgcccgattgagatgtgggtgaccgttgtagtgcatacaact

SEQ ID NO: 42729 - DNA, 1122 bp, Oryza sativa
cttgtgttagcctacttttgtccctaaaccagtcacttgtattggatgtatggttgatggtaaaattcagatgtggtggttccattggatgatggttaattgatatatttttgcatatttcatttctgggagcatatggcgtgttgtatgtgtgtgctcccctcctgttatgtgtgttaactggtaacacatatgcatgttaaaaatttctgaaaaaaattgtcttgggttcatggtccatggacaaatatgcagacaagtaacatgaatgctcatgagcatcttgtttaattttaattttctgttctcaaggtagacaacaaatacgttatgcatttgattatttgtacatgcaaccatccaattttccaaagtataccaggtaggaggtattctcaccatttccatccaaaaggtgatgacaatactcatccatcctaccaaacaaaaaattggctcaccatatccaccttttatccatccaaccaaacaaaaacttggctcatcccatctatccaaccaaacaaaaaactggatggccatatccctaaaaaactggatggcccaatcccatccacccttgaccaccatccaaacacatcctaagtgaagagagatatttttttcaagtggatctcttaaatgatggccggcgaattcgctggtggccactaaagagcaccgccattgaaaaatatcgccacattaaaaaaaaatcgccggcacactgccacccaccgcttctccttctcatctctagatccacccaccctccccaccgcttctcctccttctcactgcccttgaaaaatatcgccacatttaaaaaaaaatcgccggcacactgccacccaccgcttctcctccttctcatctctagatccacccaccctctgctcctccctcaccggcagcacctccatcacccaccgtagcacccctctcctccttcctccccattggcggtgggtccatcgatcggcagcggctcgcacaagcagtggcggctccggcaacggcaaaggggaggggtggcggtggtgaggcggctcgtgtaggcgacggtggctctggcggcagtgttcaagagggcggaggaggtgtggaaagatagatccgaca

SEQ ID NO: 42730 - DNA, 11571 bp, Oryza sativa
  unsure (1)..(11571): unsure at all n locations
tagcagacttcaaagtcaactatccttctcaatgaagtcctgggcaggtggatcggttgtaagagagggctacgtcaaggtgatcctatgtcaccttacttgttcatccggcagatgtgctccaatgccttcttagagcaaaccctgctctggacaccatctgtaccctcagagacctcgtacagctctgcagtatgccaatgttatattgattatttgacgagcttcgattgcttatgtaacaccactaaagcattgcctagacgagttttctagggcaacaagtctgcaaatcaactttagtaagagcacaatgatatgcatctatgtgggagcggaggaagagtctcagctgattcacactctgcaatgcaaacaggaatccctgctaatgtcctaattaggtcttcctttgtcaatccaaaagttgagaacagcagacctgcaaccaaccattgcgaaggccgacaaattcttagttggctgggaggcgcgcttactctcacaagccgaggctaggaagagctctgtggagaggaagaattgaaaacagaaaaatatactattctgatatcttgatctcgagtgccaactccataatcattatgcgggagatacagtacaacgtttccgatcgtgcttgatgtgtgttcctccaagagccgactcataggaggtgttgaaaatttcctaagcagcagaaaggctcggaaaaacattttccacacaccattgaatgtggcaaagaattccctgaagaaaaatagaatgggggctaagaatgagaaatactaacaaaaaggtatactccatggtacataggggaaaatatttagcatagggatctcctattttgttaatgtaatattcaagttactcacagacaatgtgttataaggtttatctctccacttgtcaatagatgccgaggacaagtagatatctgtagatgtctagaagtagctgttgtatctagtgttgtgcataccgtaaatttggttgaaacaagtatcatttctttaagttggttttattatttttatactttcctaggcaacattttctgcatcactatcacattagtatatctttacgttgccagcgatgtccatgacttatagtatggagtacaaaaccttggagaataaaaaggacaataagtaaataacacttatttgtccatatctatggagacttgaatataaagacctgagagaataaaaggacaataagattcacttgaccacatcctggttagattattagctagcacaacctaaatattccagaagagtattttttttagataatagatattttattaatcaataaggtacataaaagtatctgttagaacttctctttttagatatgcactagcttgctagatatgctcttagtcaatttcgtaaaaatatctattaaactattttctttcaaataacaaagcctaccaaacattttttgttcttgaacatgtaggatagctgcatatgattttatttatagacgaagaaaacgattttttttttaaaaaaaaacaggggtccacccgcttacaactcttatctcatagacaccacgtgaccaacaggaacaatcaaggctgaatttagcagcataacaatgtgcagaggctgagctacataggagagggggatgatcaggaacattgtctaagaattttttttaatatagtttatctattttcactatatatgcacccctcaattcaaactctagcattcgtatcagcctaaacttgatcaaaagtagagtaaagcaagcgagtgggacccctctccatttcgttccgccctgccaaagtgtaccttcctctttaaccgaatgcactactaaacctaaatttaggataacatctttaaaaacgcaatggttgcagtgcttaattccaaatctaccaagctggtaggataatcaaggagtcgagcccttttcgttgtagcttgtgaacttgtttgcttgctcggtatcaccaacttgaaagcctaccaaacatatatatgcacaaccttaacaagatcaactaaggttagattagacggctggcatatactattgggctaatcaaccaaagtacacgaggaacacataaaaaacatctgtggaataggctgtttggagtggttactgcaatgctgcatatggttgttggaaggaaccctgctccagccaagaaaaatatatgcagctgcagcccggtcaccaatgcagtcaaacaatcttggggacaaagtttgctgaaatttgttggttcaaaagagtaccataccacctaggagtgagtggccacctcactcaccgacctgcagaagctgcaggccgccctaataaagcagtgtaaagagacactgagccacaggattaaacaatggagacatctgatctcgcaaatgccatcaaattaaaggaccctctgcaattttgccaagttgatctctggtgatcagttatcttctcacctttttgtttctaccctcatgccaagatcagagaggaatataccagtgtatggctacaaacatgtactatgacactatgtgatgtcttgatgacatacacatgattgccagtgttgggatcctggacaggatagttttttttttccttggagttatctgtagaatagtatagtgaaaatcttggttgtcataacaactgtctccattccaaaacataataacttatagcaatgaatctaaatgacaaatctataaaagtgtttatacatatttgtagttagaagtattgcatttaaggacgaagagagtactgtatatgtatgtaccactatttatatggtatgatcagggttgaaaataattcctcaattcacatcgcaatattcacatatactgattaagatgttaatatcagttctccacttctacctattaaagatgtgttcagtaatgcatatatcattctgatatgtaatatgtacagtacagtagtagtaatctctttgaaagaaatgtactccttggtaaggaatggcagttggaattttatactctcatctcatgtctcaagtctcaaccgaaagcctgaaccagggatggcatgcttgcatcaactgcagcagttgtcagggatggcctatgcaactgcctacccccagctggcaaaggatttgcagtagttggactgtaggagtaagtattcaagccttcaaaggacctcacctcatcacctgctgcccaaagacaagggatccaacaaaaaacacagagataggttgctagtgctagcccagccttgatcctaggcattcatcacgattcacacacaccagtactgccacatactgtaggtgtgcaacctctgtcgtctggctctgaccttggtcaaagaatcattggcattggcatagcatggcaaccaattcagatcctgtgcggtactgctcactgacatgtgggcccgagggtctgtggggcccacatgtcagtgaaggaccctcactccatggcaacctatctgctttttattttctgtctatctgcagcagagacactgctcagctctggattttttttttacattttagccatttttgaaaggttattttacaattatacatatataaaaaacttattctagagattgaccctttttctcggagctagaatcattgacgccaagattcaatgtcttggcaccaatgacactagcactgacaccctcgaccccttggtagctaagtcgttgatgtgaagggggtcgacgcttatattttgaccctttcataaaaaaatattttactaataggttcttgccactggtctatttagtgccgaccgctccacaccttggctgctaggggcaagggtattggcgctcagatgttagaccttggtgccgaggttactggcgctgagaaaaaagaccattcttggtgtaaacttgtctaaagatctatttatcccttgtgtattgtactactccatattgtactccacaatgattcttgtgtattgtactactccatattgtactccacaatgattcttgaaggctactttgatgggaatggccaggtttacttatggtttgttcagatttcaagaccattgcaggtaagcggcggagctaggaaatttttagagtccgaacaaatctaactacacagagcatttgctataaaaattatattttcaatcctacgataacattaaattcaattgtgtatttgctgacgagcacaacagtcgaccatcaattgagttttattttcccttgtttgcttggtcagttcgattggctttcttatcatggccattctgatcttctttctgttccaatgataggatgagattgttaaaatctatttatgttttgagtggttcccaagtgttttatgtttatgttaagttgagagtagtggtgttttcactccattttgtgtattaactggtagggcattaaccaatcatgaaggtaaaagggcgtcaacttagcataactctgctagcaagatcccttatggtggaacgtgtctcaagtctaaacttgacactggtgcttatatttatgactgattatttttccagtggtacacaatttacatatcgataacgagacgtctatgatgactttgttaatatatcggtccagtcttcggaggtgctcataagggttaagtagtgcgggtgtgtctctcatgcatttgtatggggtgtttcggaaaaaaataagctagagggcgaacacatgaatacatgatatatttataaatatcaagtctctgtaattattctgcagtagcaatacatcataaactcaacacagtattactaaaactttctattggctactaatgcaggcaaactcatacaagacatctctttgtgtatctatacctttttagttacctaaaactcaatatgcaagcgtagcaattattaatcctaaaacctaacatgtaagtatatcacatcaatgtaagcacctaaatctaatcttaacatacaatcatactaacttatcattttcgcaatattttaatccaattctatccataatttaatatattcatttataatatttccaacgcactaggcgtcacctagttactgctatgtttgaaccaagaagaaggactaggtacatctattcacaaagtgccctttgcagtatatggactaaattatatccgcccaataagaatacatgatgtaaatctgatgcaaacttttcataaccttaaacataagttaaatgtgcgtttctatatggacaatctgaaatgacattacctgctgggttgacatgaattattcaaaataattggatttttcattcactagcatggaacagctcatatgtgtcggcgagggattccatcacaaatcaaaggtcagtgatgtgaaaagtcatctttgttgggtcggccgccgtcacgaatgacaacatcattgtcgggcttaaataaaagaccatcacggatgacattaccacccgtcacgtatgagagtcatccgtgatggttcataagtatgaaccttcatggatgagaatttatgatttttgaattttaaatgcataaaaaaccctaaaatattttaaatattactaggatattctaacaatggtcacacattactactaagaaattcttgatttttcaagtgatatatgcatacatgtcatacatgagattcaaacctaagacctctcaacacatacaaaccaaccttaccatctcacctacaaaccacgttacattggtaatcagatgttattcttttaactattcatgtccaaatatgaaacacaaatttgaaactctagatgacttcaaatgagaacgctttgaactacaaagttgcagatctcatcaagctctacaactttagtgtagggtacatctccatccaaggtcgtttcaaaattcaaaaaaaatatttttgatatagatcacatcacttgaaacacttattcggagatgaaaacaatcttaagtgaaaatattgtcaattagacagttgtagatcataaaaccctttgactttgatatagacactattacaaaaagggccaaaggtgccgggtcctaaaggggccataggtgccagattttcatccggcaccaatactagcaaccgacacttataaggaaaatagaaccggcacctttagcattgctcgagccaaaaaaaaaaaagagagccagctcgaatccgagccgaactcaccaagcgttgtcaccgcgcatgcgcccatctcaaaatcaaattgatatccccaaaccccaaaatcatccacaaatcatcaccaaaataaattgatatcacagaatgaacatattcaacaacaaattcatcaacaaattcacaaaaacatcaacaaaaattctagcgggatagatccatgtcgatctgaagagaagaaaaagagatcgatggcggtggcggcgagagtagtggatgaggatccagatctagagaagaggggagggcgccgccgcaacccatcgcccgctgcctgccgcctcccctcccgccagatccggtggaggggaaggtgccgccaccgcccatcgcccgccacctcccctcttgcgtcgcctcctgccgcctcccctccagccactgccgcgcgcgagagagaagtgagagagccgagagagagaggcaagagagagacagacgagagagatggagagagaacagataaggttgactcatataggggataaggccgatgtgtcgggctagatcagctcagctcggtttggacaggtcccggtttttaaaaaaaccgacccctattatttattataggtgccgtttttttatttaccgacacgtataatatattnaaggtgtngggtttttttnnnnnnccggcacctatgctataagtgtcggtttttctttagaactgacacctatagtttcttaaaggtgctgattttttgtgttttcagcccgtggaggaggaaaaatcattatatgtgccggttttagctattccggcacctatagtgccgatctctatgggcttttttagtagtgaggccatgtctccatcggagatcatttgaaaaattcaaaattacgtatttcaaaatagctctcaccacttataatgcatattcaggcgtgtaaactatctcaaattcaaatagtatcagttttaaagttatagatctcatcgagatctacaactttcatatagggtaatttgaggttgtttgaaaatttcaaaaatttgaattttcctcatccgtgtcagttcataactactccctccatcccaaaatatagcaacttttgtttggatgggatgtatcctagtactatgaatctggacattaggcttatccagattcgtagcactaggatatgtcccacctaaccaaaaattgctatattttgggatgggggagtatcaccctttacagataacattatccgtgaagggtagtaattaagacccgtcgcggatgagtgctctcatctttgatgggtcatatcattgcacctgtcatggatgacatgttatccataacggggtatggctatgacccgttataggtcatctgtgacatgttagaactatgacccgataaagatgactttaaatcgatgacggggcatggttgtgacccgttataggtcatccgtgatgtgttagtactacgacccaacaaagataacttatatcggtgacggatcatcccctatagttatatcttaagcgggataccttttgaaccattagagatgagtcatccgaaatgggtcgcattcactcgacacagatgactcgtcaataatggtcggatctgtactagtgattctatcccttcctccttccaagttccagcaatggacaagaaaattacactactagagaaataattattaacaacggaagacttggtcgttaaaagcccaaatgggatcgttaaagttcattaacgaccactaattttgtggtcgtacgtggtcgttaaagcctccgtcgttaatagttttaacgaccacatgattttctcccgtcatgatttcattacggcctgtttggttggagggagtttttaggagggattgggagtttagagggatgaggctattaagtgttttgtttggttgaaagacatgggaattttgatgggatggggatggagaattgaggaaggaactccctccttttcaatacctgggtaggggcaggtaattgggagggaattcctcctttactttgtctaagcaaatctcagccatccgtttttattaatgacctaatctccaactaaactccctatcaatttccatcacctttaccaaacaagatatatcgagattaaaaattaaattccaatcttaatctcatcatcaattccctcgtgtaaactcccaatccccttccctcgagttaccaaaacggtgcttttttgccatcgctatctcattaacggcgatgtcttttttacatcgttaattctaattaacaaccgtggtattgtgtcatcataagctttttaacgatggtagtattgcgtcattgttaattattttaaccatctctgttaacatccaatgattatcaccatggtacactatccttgatagtagagaaccatacaattgcagtctgcacatctaggaattaacatgcatgcttatcaccatatattctgacacaaccaaccaaatttattcaattgaaatacataataataatttgtttggaacatccaactaaataactaagtatttcaaacagaactaacatcttagtttctatcaaaattataacactcaatctataaatatgtgattggaggtgcagtggacaattcctttatcattcgatcccatcatcattcgcaggtattgtcttcagatgcaccgttctcattgtctcaccattgattctatacaaccaacaaaaaatgatactagctagttaaaacgagctgtatatgtggtacttcatacataaaattcgttaaggcgcatgagtttacctcttatgatgtcattttaagtacgcatcacttccattcactgcacaaaaattgatatgataaaacaaccccacatactttagaaaatcgtagtgttgagaggagccaatttttgcagatatgttgtgtgcacattttatattcgaataattgtttgtccatgttgaaaataaagcacaatagaacattttgcctaaacaaagctagactgaatttattgtgacctaaggtagaatttaaacctaacaggtgcatgttcaaataattgcttatcttttgcagtaggattaagaaagaacatcttattctgaaaagaagcttaacttaccttcttgctcaaggaatgaggaatgctttgtcaccaactagcttcatctaagtcctgtaaattcagagagctttactacatttatatttcgcaattagtattgtaacatcgttattaacccatgagtactgtaactcatcataattgagatagtgtcagcagtagcttcactgatattgaatagcactgaaggaatcatcaactagttaaaagaaacaatccatcggaggcatagttattaggaccggaccgacagtccaacccaaaaaaaccggaaccagagccctcaccggtttggttcgattaaaaaaccgtctgtgcaatcgagtcggtaaaaaccggatgaaccggtgggttttcctttgaaccgggcggttttttccttagtaaaccgctaaaaaactggcagtcacgtggacgtgcgtggccaccctccgcactagcaggattaaatgccataaaacagcttgaccatggttcaacccatgacctgtgcctgggaggaaagattccctaccactgagctatgacttgtattgtgcatttgctatagaaattactatatataaactggattaagccggtggtctgaccggttgaaccaatcaaaccgtgaaccaagcacttgaccggttcaatgtccggtccagtcctaataactatgatcggaggtgtcatattcctatgtattgcatctaacttgttgtgggtaacaaatcaagcccatgaatgaccgacaatggaggaactattggaaacttggaatcctacctgaaaagtggttgctcccctggtactatatttgggccaggccaatggagtgtactaatcttgggttcctactaaaatagatttgaactgaaaatttctaaatatataaccaatagaataatctgaaaacaaaatgatgcacaccctatgtaacaccctgaagattcgaccgacaaaaatctaaactctaaaaatatgggccttcaaaaactttttaaataaactgcataatgccgattttatttacctattccattgaattttgatttcggagtttgtagaacgcaaataaagaacaattgattaggaataaaacctaaaattaaatgagcaaaataaataactgaaatataatttaaaataaaggttgaggtgaggatagaaatgaataaaataatatcgcgatcatattcgtattaattaaatctaaatacgacggagtgagaattaactctaattaaaatcaagtaaattatataaaaataaaatatgggtacaattaatctagagtggatccattggttgggataatacacatattgagtaaacttcatttatgcaagatttagaaattatagaatcaaatttatataggaaataaactaaaatcgggataaatgggaaaatacactgttcattatggcataggtgttcgatgcagtccctagccttccccctcctctcccacctctgcgccctagccggccttgagcccacgtcgccgccgcccgtcgcgtcgccgctccgcgccgtcaccgcgcgccgccctctcgccgcctcgcgcccagcgctcgcgcgtcactcgcccgtcgcgtcgtcgcctcgcgccacgcgccctgccgcgccgctcgcctgtcgcgtcgccgccacgtgccccgcgccgcgctgcccgcccgtcgccatcgccgcctgccgcgccacgcgccgcccgtcgcgtcgccataagccaccgccccttcccctctccttctccccctcttccctataaatacttccccctctccatttcccccactccatctccctcttcctcccctcttccctctccaccgagccaccgcctttgtgtcaccgcgccgctgcaccgccgccttcgtgccgccgcgctgtgcgccgtcgtcgcgccgccctcgcgccgccgcaccgccgccttcgtgccgccgcgccgtgcgccatcgtcgtgccgccgtcgccgccgccgccgtcggtaagctgccacccccttcccttgttcggccgccgtcgccagagagccgagagagagaagggagaagaagccgggagggagagaaagagagaaaagaagaaagagagaagaagaaagagagggagagaaaagagaaaaggaaagaaaagaaaagagaaaaggaaaggaaagaaaaaaggaaaaagggaaatagaatagggaggttaatagtttagaaattttaaaataattataatttaattatagattaattatagtcgtaga

SEQ ID NO: 42731 - DNA, 1500 bp, Oryza sativa
  unsure (1)..(1500): unsure at all n locations
tgacagcattcgaaccgggactaaagatgatctttaccaaccgggactaaagatcaaatatgcccgttcccttttgaaccgggactaaagatcatctttagccccggtttttattgcatccggaactattgtggaaatcggccgaccgacgaaagatggtttctccaccagtgttactagttgacgaggagatccgatccatgacatgaacaaaatttaagtggtacgtactacttaagaggtcgaattagggagtatcttagtatgaacttgccctaattaattaatataaggagtaataattaagaggtcgaattttccgaacacatttaataatcgagcctaacatactaatgtgaatgtatatgttcgtaaattttagtatgaatgcatggctttcattaactagttgcacttatacatgaggcgtcatatatacatatatatggcaacaatttgtagcataaatatggcgtgcatggcatggatacttgtgtacccgtgtaagttacgttgtatacatatccacttatttctcagcaagatatatatatatatatatatatatatatgattcatgcatatgcatatataatacgtagataggtagagagcatatgcatgaactgatatattgacagtacaacatctgtatatatatatatgtaataactgcangataactgataacagaatggatgaacgacacaccatatgcaagctaattagtactaattaataagctgtctagaagaagggtacataatagtacgtacatacatggtagctagtatgtgcacgcaaatttagtctcaagtatgcaccaacatggagtagtggatcaaaatctggcaagtactagatagtaacagggtaacattaagtggatcatatacatatgtatcgtcgtcgtcgtatgatatactagatgattagtggtaataattatatatatgcatatactcctatatatctaaggagagcagaggtagctgcagggggggtctttagtacagttaagcagcacgcagttatataatatggtagaagcaagcagctagcagcttggagcaagctaagacacgtagagtgaatatttcaaactggcaaaacggctccgatcgtagagagcagctggtcgaacgtgtagatatctagatcagccatcggcgtgaaagcttgtctccccatcctgagtgccatgcaacaatcaccccagttctggaacagatcggtgtgttgctcaccgacagtactctcttcgtctgctgtcttacccatcaggtacacgactcgcttcttcagcaatgggaatctgaacacctccggaaacacagcacaggtcttgaagagcatcttttgcaagtctgacaatcggaccattcccgcgttgtgctcagggtcatacaaactcagcatcttatagatctgaagtggagtttgtctgctcaccttgagttgtgctaagtttgccgccattcctcttactccgtagttgga

SEQ ID NO: 42732 - DNA, 834 bp, Oryza sativa
atagatctccatgtttctgctctgatagcctctctgatctcgatcttcagttagccaagccccctgccctgcatcatgatttatcgactactgagatatactatactatactatactatacatgtgtatgagagattcaaacatgcatgacagacacaatctatcgatgtatgcagtacacacaaatcaaacaagcagatgatcgatatatttttagataatgaaaatgatttacatctacggcctcggcacacaaccaacgagttttagcacctaaagaaatcaagccataaggtgatgagacaaattaaacccccaactcggtctagacaagttcaactcaaaaaaaggttataaaatcacatcacttttgttcgcacagcactggatgcatggatgaattgaaatgaacatggcagatgattaactttggttgatttggagtatgtatggatcgccccctcgcactggagcacacacgcgccggacgaaacgaacgaacggaaaatctatcgatcgagtagttggtggcctggcctcaactaggatcagctagcaatgcaagccggagaacgcgtatgcaggatcatctacgatcgagtgcggaggaaattaatttaccttagtcactcactgtaagtatgtgtagtggttgaagagcgcagcgccggccggtcgccgtcaagggtttcgagcggccgccggcttcttcttcgttctctgctgttcaaatctgctgttcaaatctgcggcgacgggaatgagattagctaactcaattccagcgcgcgtgcgaggacggcgagctcgccgaggaaacttacctgaatctca

SEQ ID NO: 42733 - DNA, 645 bp, Oryza sativa
atggaaaagacccgtagtggtggaaaagacccttagtcgaggagaagatccatgttggtggaaaagactcttggccatgaagaaggcgacttggacaataaagatgccaagagaatattcccagggaccactcaaccactccatctagctggcaccaaaagactataatgacccccataatgtaccaaaatgcccttagggtctgttgatatgcaggggcacgattgtaatttcatgtgggcccaacaaagagcacaattgtaatctcacatgtaaagctgtgtactatatagagcagacaaaagcctgtagcagacaggacatcttggaatactaaaaatcttgtcactcagggtgtgatcatttggtattcgggctcatttctcaggataggcaggaaaagggtgttttcctgtctatccccaatcttgtccgtgaccttgtgtcacgacaaattattttcaggatttttcttgaaattatttgagcattgtaattatttttaacaattcaaagatcatttccatgattaatttaaatggaaaagtaaataaaattcccttttccttttcgggccagtcttcagcccattcttcctctttgcctgcttactgtctccttctttcccgaagaactctatttctt

SEQ ID NO: 42734 - DNA, 4969 bp, Oryza sativa
ttacaagcaaaacacccaaaagacagtggtccaaaatatattttggcaattagcacagtacgagatatagttataaagttgagaaattttagagcccttgagaggtacccaaatttttagtgtaaatttggtacctctcagtagtactggaggtagtaagaggtatcaaattttatattagaaaatatatgacacctcctaatacctcctcaacctcatgtactgtaaaatcgctctataaagtttacacaaccactgagatgtgtccgcaaaatattggttttacgggattcaatacacaaataaggcagtacattttcattttagataggaatcaagctttgttataatttccattcaagttgaaaataaaaataaataccacacttcagagcatgtaatcggggtacaatagtgcacatggaatccatgttggcaagaaataaatcattgcaatggagaagaaacaaagcctcattttttttatcggaattaaattccctgagtagaatgacaacaatatatttacaatagatgaataatatatttgctttgttcttaatgaaaatacgtcaatatatattgttgtaacacctggtaggttcaataaataaattaacttaggatcttgtatcatgtgtcactgctatttagcataaaatataacaactgccatttaattcatctattcttcacttgaaggttgatgatgagagaaaatagctatatgcgaaatgatttgtcacactggtggagaaaccatctttggtcggtcggccgaaatccacaatagtcccagttccactaaaaaccgggactaaagatattctttagtcccggttggtaacatcaactgagactaaagatcatttttagtcccggttcaaaagacggcaggtggtgtcagacccctcttttatctttattcccggttggtgacaccaaccgggactaaagatctatttttagtcccggttggtgttatcaaccgggaaaaaagatcgacatgcgccacgcgagatcgagagaactgaggcgcacgggtggatcagttaataagttctgatctttatctcctcctctcctcactcaccccatctcttcctcttcctcctcccatctcttcctctacctcctctggatctgcccccttccctctcctccccacttctcaacctcctttggatctgccccctcccctctcctccccacttcttaggcggcggcggccgggcggcgcggaggcgccctcacgcggcggccgggcggcggcggaggcggcctagcgcgccctcacgcgatggccggacggcgaggcacagcgcgcggcgggtggcggggctgcgcacggggcagcagcgcgccggttctcctctattttttttataatttgtgattgagagatgtataatttcttttttagaatttgtgattcattgcatggatctaagatgtataattgatctgtgatacatttgatttgtgtgtaatttttttaagatttgtgatgtatttgatttgtgtgtaagtaacttaggatttgcatttgtgatgtgaatgatttgtgatgttactttgatttggggatttggggtttgatttaggtatatgcatgacactcgatttagagatttgttgtttgatctgggtatatacatcccacttgatttgggagaaaataaaaagaaaatggactaaccgggactgcccctatcctctctttagtcccggttggtagcagtaaccgggactaaagagagggttggtaacaccaaccgggactaaagatcgatctttactcccggttatttcacccgggactaaagatagcgatctttagtaccggattcgtaatctcggttagaaaactgggactatagaggggttataaaccgggagtaaagatgatttctccactagtgtcatgttctgaccaacctgaaagtgcaacacaaaatgttgttttgcaagataatagatataatgttaaggttgtgatgaaaataaaaatgctcacaatatggcaaattgaaaaggatgcttctcttcttccaccagtccattggcccttccgagtagatcatttcaaacatcttattatcaaatgtatttgtcaaaaataaaaacatatggaaagaccgagctagcaccaacactggattttttacaatttggccctttttgaaaaacttatttcgtaaatagacccctgaaaaaacttatctcagaaatagtcctttttaaggacgccagagtcgctggcgccgtcctcctgccaccgtggccgggggagtgcgccaatgtggctggcgagtgcccccccccccctatttttccctctcctctctagtatagaggagagagaaatgtggaacttatttttttattttttatattctttttacacttaggagcacataagaaccaaccgtagaaaaactaaactcaaatggcgttctctccctgttttggttttggtttttcctatagtccccccaaaagaaagtagattatatttcgaacactcttagcttttttttaatatcttttacatccctataaaaaaagttagggttcatgtttttttacatgcgggtgtcatttcttaaaacaggcgtaactttctcatacggactcggaatcagacaaataatatatctacggacatctacgaaaaaagttacattcaattctccttggctttactgggttcgacaaaattagaatctctaaattccgcgtgcaagattgtgtttcgtccatttgagttttttttctatggttggttcttttatgctcataagtgtgaaaaaatataaaaaagtaaaaaaaaacaaaaagttgcacctctctctctcctctacactagagaggagaggaaaaaatgtggggggcgctagccacattggcgcgctccccctgccacctcagcaccaccattccgttggacgacggcgccagcgactctggcgcccaaaaaggatcattttaggataagtttttcaaaaagactaaattgtaaaaatccagagcaccaacatggccttacacgacagccttccagtgttcatgcaagtccaggcataataacatggggtgtgaaagaaggaaaattatcatggggtgtgcaatatctcagcaccctaaagcaccatagcttgcaggccttgcacactggaaacaattgatcccaataatcccaaaagaacatgagtgatgtgatttcacactaattaacagagttgtattgtataacttaaatcatgtttaccttgaagccagtgcacatggattgaaattcaatatttaagcttgacaaatatattgcccctcaaatattcctacggtgacaaatacaacgtacacataactaaaaacttgatattattcacagtgcctcaaaatttagaaatttcttgtaataatatagaaacctaaagtgattttctttcttggacatttgctcaacaaaattatgaatttaactttggtttatttgtaacttccatatgtctgctgattgcaagaaaagctccaataccaagagcatcgtcccttatggatatggaattggtttttttctcagagcaacacaaaaacaatcaataatacattagtaataggctgcagctaatgcgatttttttcccaacaaaataatctgtctgagtgccttccatgcaatatttctttaaagaaaataggttatcacctatcatatgacaaaggtaaaaatgtattgctaccgattggtaataggctaacaacaaactctagtttgttttgctgcaattgcaatgagtcgatgcaacttgaaaactcccatgacaaagtaatctcggtaataactgaatgcacgagtctgatatttaccgaacataaagaaagttttagccaaggacatactatcagacattggaatgaaaaaaaaaatcaactatgctcatcctggaaatcagtagcagatcctcccaaacactcctagtccggtagtccccttatcctctgatgcacatagggagcagttgctctgatgcggccatcctgtggtctgaaagttatcgaccgtgaaaaatctttctttcaatgccaaccacaagaagaatttgattctagagggggctcttgtatcccacagcagagtagcacagttccatttggtgtgtgtgatgaagaacatctcatatgcgacattgccgaggccactgggaagactcccatcttctgtgaattttcagattatcttgtctttgttttgctgttgcactactagaaacgggcacacacgtcgcctgtaggcaaaggttcacagccatatcatatgtgtaggaggaagggcgagcggcattacaatgcaaggacacattactagtatggctaaaagtgaataaattacccaaacaaaacctgtgcaaaatgatattcaaatagtaccatattccttcccaaaatcttatattcaaaatcaagaaaataacctcctaaaattcctatgaaaagttcggtgctaatcaatccttaagaattcaaagatccaaatatcatacatatttcactccaaaattctttcttgatcaaaatacaaatttgttcaaaaaaaagatatcagcttcaaatctttccacaagttccttcgaatttaccaagtccaagtatccaatttaaatcataacttccattcaaattcataccaaaatccttctcttaagataaaaatatctagtttaaaaggttgattatttacaccaccaagtttagcattagcacaagttctgtaaaacaagggcccaatagagtatattctaattcatctgtaaaaagatgcccagtagagaatttaattaactatatattctaatccatcatcaaggttgaccaaacaactttcacccgcatcttgtaaagaccacagctgatcacctcctcatccaaccctctagtaaatggagtgaacctcaaagtgcgactgg

SEQ ID NO: 42735 - DNA, 1000 bp, Oryza sativa
aggatcaattggagggattccacccccaaagcccttgtcagtgtgaataccaaaatagtaaattgttctctttgtttttaacttgaacctttgtgaaatacccaatcgcaacaacaaatcattgcacttttgtgtttttgtttgctaccctacagatcttttaactcgcatgatgctcggtttcaaaagaaaaactcgcacatgcttggttgaagcagggatgaaggcccaaattatgaaccctagtccaaagtggtgcaaaaagggtaatgctatgtggtgttaagtgtcctggacagttaggtctgctcttggtctattgtgaaactttggttaataaagataaccaaagtaaaatttactcaaaaaatatatcagatttccaaattaatatgcactaatggaccaatgcaatctttgtgcaagcttggatatttaatctgagcacaaccttgaagtaacagaaagccagaaaatcctcagagaatgtgtaagaaatgtggcaaaactatataaaatttcagaaaagaatactattatgccgagaaaattccctatatacccctgaaaatttactcaatcccttcaatacccctgaatttgacattatcccttatatacccctgagttttcattttgatctcctctatacccatctccgttagttgaccattagttgaccgttaaatattttaaaatgactatattacccatcctatacatatgtgtggtacctacccaataaattttcatatgaaaaataaacttatacaaaatacaagcaatataatcatttaatgcccaacttaaaaaataaaacttattattttttattttttaaaaattatgattaaatccatacattagtttcaccagaaaattaagagcaaaaactaaatgttatttaggtttaaatttttgggaagatatacgaaattcatcaaatttgatctgaaatttatttaaaaattttaaatttgttttctaatttgtgataaac

SEQ ID NO: 42736 - DNA, 713 bp, Oryza sativa
gggacacattcacatcaaaagaatggagccctttcagggttcgcttgcttgcaaggccttttacgcagctttgtattggcaattggacgtttctgattggcatctgatgcttggttccgtgaacgagaaactcgagttgaagcttcagaccctgagaagtcatttggtgatatacctgcctttttctatcagaattggagaagagagatattagaaaaaaaaagttaacaatagctagtagtctagctacgtagggtgaaatctagtaaagcacaacaaacaaccttatccatcaatatatagcacatagcttgcccactaaacaaaatcaattgagtcaacatgatcatgataaataacagtacttgtgcatatatgatgaaaataaccttgcagctaagtgaacaggtgaggctgggtgcattgtggagccagcactggcaagtcgtgcagcgaggtgtcccagccttaggtctgtgatgtttggacctcttcatgggccttaggtgcactactttgtgcccattgcatttgaatgtctgcaaatagaaacataaagggactggtgtaaatacaagtgatgaatgatttttagtgactcggaatataataaaaggtggtagcctgaatagtgctttagaaatcatttgaagcccatatatagctaggaagaaatgtcgaattcttaaacagtattcaatcccatacagtgc

SEQ ID NO: 42737 - DNA, 680 bp, Oryza sativa
cttgttcaacgtgtatgaaaaataaacaaaccaacagttactgcaaattactactcctactagcaaattagtagcagagaaattaagggtctagtacacatactagcttgtacatgaggttcagtttttcatcgatcgatctgaactttgcacatataagtatcttgattccaacaatcgaatcccacgtctcttttcgtatcacgtcaattagtcgatcgatcggatccatttcaattttattagttgctgtcaaggcataatgcgatcgatagcgagtcggtgtgggcagggagcatgccagttgtgtgaaatgctatcgaccattagggggtgtttagatggggctaaaactttttagcccatgtcacatctgatgtttgaacgctaatttagagtattaaacatagactaataaaaaaactaatttcataaataagagctaatctgcgagacgaattttttaagcctaattaatccataattatgaaaagtttattgtagcctcatattattaaatcatagcgtaattagactcaaaagattcgtctcgcgaattagtctaagattatggaatagattttaaaattagtgtatgtttaatactctaaattaatatccaaactatcatattctctgtttctcagacatgcccttagtcaggtagaaacatgaacgtg

SEQ ID NO: 42738 - DNA, 3088 bp, Oryza sativa
tgaaaagttcagaggacgagaggaggggctgaagagatcttgacattcacatcccccagcgcatgtgtcaagacctgaacttaggtactttacatgtagtactaccgtacttgttgcgttacatcacggtgcattgactatatatttgacatgcgcaactcaacatttctcgactttataagtgcagggaaggtgctgatccaggatttcaaggtttctaggcccttgtttaatccaaactttttcttcaaactttcaacttttccatcacatcaaaacttttctacacacataaacttttaacttttccatcacaacgttccaatttcaatcaaactttcaattttggcgtgaactaaacacaccaaaattgagttcaacaatatatctttttaaccgattcaacaatttagtattactttctgtctccctccatttcaaaatgaacacaactaaattccttttagtgtttcctaatacaaggcgtgcatacaagcatgcaataaatagcacattttactcctctaaatttttttaatcctctattcacaagatctctaatctaattggttgcttgcattgtatttattagggtaatataaacattattattattattattattattattattattattattattattattattattattattattattattattcctccctccatccacaagtttctatttgtagtctttatgcattcaatacttaaataaagagataaattaaatgtttgattagaacctaacgagtcatctaaatactcattagttatatgcatgtattcactacttgattttgtaacattcaagatgatttaatttctcttttatcttggtgacaaaaataataggtgtaaattttgtgaatggagggagtattatttattggtctttgcattagtgatagttgcgtcttatattttgaaatggatggagtactattgctaaatgggaatagaaatcaaggtccataattgcataaactctaatgcaagttgttccaaacatagacaacgtcacacaatagcttagacaaattttaaaatcattaataatattactgctcgattattaattgtgctttggaagccaggtcacatcagcaccctcaacatgtgaaaaaactcagcgctagcagtcctatcttttttttttacttcttgttttagacatcaacataatcttcaattacatctctcatcattgtgttctctaattgtatgtttcaaaaaaaatatattacaaaataaccatatgaagtgtcttcatgacaaatctattaatgtcctttttcacatattaaattctaatattttcaatctactaatgatttaagaaatcgaggtgctatggaacttgatattactgaatttaatcgagtggtacttcacttcattgaactttagcaaagccggagcgacatagttttgccacgcccaatgtaatattacaccgctttactatatttacgagtacaaggaacatacatgtaattaaacaggatataattgtcaataaaactcaatctcagctcaactacaattgtgaaaaaaaaggaatgcgctggtgttcagcttgtggacactgtagccccccggcacagctccggcagcagcttcatacaaagtcttgcctgtctgacacgagggaacggaattgtgctcccacgcaactgcatgttttgctctccttagcaagcaaacaacaactagtagtagtaacagctaattaaaggccataatcaacacacatgacctagttgacgaacaaagagaatctagtcatgcaagtagtagattaaagccgactactgtcactttactttctagctaaggatttttgcagcagtcctattgtttctaattaaggagacaccgagtcctaaaagcaatggctcacatcctttgcccagagaggaataaaattccagaagaatatcaccaccattgatttataatatgatgaagggaatgagtatgatgattaataaggtttgctcattagcgagaccagcacgactactgatttggctcgcttgcaacagcaacagaaacaaaggaagcaaaagaaggcccaactttggcccacatgctgcagggaacaagtctatcttaccttcctcatctcttgcctatgattgaatcgtctctctcaatcacaaaaccgggtataacgcgtcctccatcttctaaaccaccaccacctcctcgagcacctgcctccccgagtgccgccgcctcctctatccaattctaagaacaagtgaaagtgagctctcttggtgagagataggggaggggaataagaaagggggaggtggaaggagaggggattggctgctcctctatggcctagctcagtcaccgccgccactacctcgcttgtcgctcagatttaatttggggcagcgtggcacgattggcgacgggcaactgggcgtggagctcggtggcagtgcaaccttgttgagcccctatctccaaggacgtgagcggagccaaagcgtccatggtccttgcaccagtagtggagtctcgagcatccaccattacatgatagatttgtccctatttatatgtttttctttgtgaaaacatttttcagaaagatgaatagtcaaagaaataaaatatcaattacatcatacattaaaaaacaaaggcaatatgctgtattcttatggccaaaatgttgtattgatgggatcaaagtgtaatggggcgctcgaagtgcttgttaagcttaagcactattttttcgcttagataagcactagaccatcaaggagcatttacatgtaagtctgtgtttacaaattaaatttttgcatctcggtgttgcaatttctcacattcactgatggttagccttttcgtccaatttctagagacgcatcgaaaaccagataagcatgctctatgcactctagtgtaagacattctagcatttttcacattcatattggtaacatcaatatgaatgtgaaaaatgctaaaatgacttacattgtgaaacggaggaagtacttagaaacacaagaacaaggacatcaagatgtaagaaatggag

SEQ ID NO: 42739 - DNA, 648 bp, Oryza sativa
gtcatttttaaggcatgctttgcagctcatcgagtcattttgttgggaacaaaatgcagtgttgtttaatcggtttcgatatttctatatcaagtgatttgcatttttttctgtgatgaatatcttgcatcagtgtacaggtgtaacctggtggccttagcctaatctttgtgataacatttttcacttgataattggtaataatattttcccccttttcagcttccctgctttctaagtatcagttggagctaccatgacgacccaagctaaagaaaaatgcccactttgcacagaggagatggatttgacagataaacagctgaagccgtgtaaatgtggatatgaggtgaaaattcaatgcttgagcaccaatttgtagttcatctgatgtgcttccttttttcccttggatatcatgctttatatgcttgtgataaatacctaacggcgagagacatctttagtctgttgttcttcaaatgcttaaagagtcgaagttcatttgcttgtagattatttattttggtgaaattgagcaactcttatctctggatgcatgtcctttcttcaattagaggttttttttttttctgaatgaaaggttaatgaccttgaagtattagtgcagtttggggctgcaggaat

SEQ ID NO: 42740 - DNA, 548 bp, Oryza sativa
ttccttgtgcccctgatttttcccactacactacccgttgtgaacaacgatgacgaagtaaaacccgaccaacaaccagtcaaccattgacggaacttgccaaacccgacccaattatcaggttaactcgtcatctactagatggcaaagggtataaccgtatggcaaaaggcaaaaccgaaaaccagtcatcattgtcgccactcagcactcacagggctagaaaaccaacatggtcacatacataccgcgctggtgagctctcataagttagatggcaacacgtatcaatgcgcacctggcactacataaaacggaatagttttaacaagcacaggaacacataaaagaagggaaactttgatgaaccagataacttttgcctaatcatcatcaagagtaacccaaaaaaaaacaatgcttgcaaaagagcgatcagcgagtgcttagtacacgatgttgctcaagaagtcgaagaatcaggcccagactacaagcgagggttactcagcagctcaactcctacactacagaacctaacactaaca

SEQ ID NO: 42741 - DNA, 924 bp, Oryza sativa
gtatagattttttataatgtatggcaaagggtataaattttgtagaatgcatggcagagtataagattttggtacaattttggaggcaaatctaacaaaatagattttcataattggatcgaaatatttaaagtaaaaattattgtcaaagtttaaacatattgactgcacgtatttcaaaacagaactaaactgtgaccggaggcaacctagatcatctgggatgtaaatggacaaaacactttgtttttacgacttaattatgttgagatctccatccaagcatgttgtccccatgcttgacaatccaggtaaaaattcagaatttcatagaacaaaatttttgcataacccatgaaagcagcatgctatgctggctgctttccgaagtcggaattcaatcgaggtggaatgtgtacacgggcaaggggtaatcttcattttacacatgggttacaaatccataggaaaaaaggaggtccaactgagtgattgcaataatcatatagctagaggatggagagggatatttttttttttttggggcaatcgagtgaactgcgttgcaaacatgaatatacatctacagggcgttgcagcgacgaacagcagcactactaatgtcaatggaggatcacagattcacaggcaaaatttgaaggtcgaaatacccaaagctatctgtggttgaagccttaaaaaagtggattgaaaccacaagtttgagatgtgcaacagtatgcatgtccgcatgttatagctgcagaataagagggcaaattagcatcatagtgttaatgagatgagtagacaaactggtttaacattcaaggcttctctgttgttcttttttccaccccatgactgaaacccaacatatggaagtcgatactaattcaatttcaaacagcataccaagcaact

SEQ ID NO: 42742 - DNA, 2113 bp, Oryza sativa
ttaatttgaaaaacaagtccaatttactccctcgaactatttcacttaaccccctaaactatttttctgctcattttaacccctaaactgttagaaatgattcactttactggctaattacatttctcttctttgtttctctttatatgagtagtattttaagcttatattttgaagagccatagatgacaccattatcaaagttctaaaatagtttcaatattttttcatgactattttcttaaaattttaaacctatatgtttaaattagtctcaatgcttgcaacctatgtaaacagcgattaaaaatgccaataaattgttgagacttagttataatgcatatatcaatcccaccaaatttcattgcaaaatttgacctatatagagataaacaaaaaagataaatatcgtgagggagtaagacaacattttcaatagttcggtgagtaaaatgagccgagaaattgtttaggggattaagtgctccagcgaaaaagtttaggggggtaaaatagactttttcccttaatttcacatataaattctatattgtaacttaggaccatagcgtaaaaaccagatcggaccggcgatccaaccggaaaaaaagggaaccagtgttgcccatggtttggttctatgggaagaccggatatgcaattgacctactctgaagtctgaactgcctgaaatgcacggttttaccatgaatcgggattaaactgtcacctgttggaccaacagcacaagaaattttgggctgtacattccttattgggccaaatcaaggcccattaccatctcagatgtgctatttacacaaaaaaaacacaatagcgcacgcagacagggagttagaacaaaaacacgcatcactttattgactgacggttcagcacatgaaccggcagaccggccggtttcaccgccgtaccggtgaactgaaagctttgaccgggttgagctccggtccgagtttttgtactatgcttacgactcaaaataagttgatagtataaagatgtatggaggatttgccccatactttaagtacacttaagttgtagattctgatattgagaaacagttgccgcaatacttcaaattccacgatatcatcaacagagtaagtaggtgccagagggagaactttaaacattgcaaaaagtgcatatcagatgtggttgcatattgaatcgatagaaatttcatcgatgttcatgttccacaatgttttatactctgcagaaaatgatctgtctcgttgcatgctaattaccttctgtagaatgactatcctggttactatggatactgcctgtaactatagtatttcttaaggaaaataattaacactttatcattattgataaagttaatgaaatcaagagtaccttaagggacacccgccgagctaatactctcctcaaagcagataaaattccagcagtaagtgggaccaccatttctttcattccaataacttgtgttcccttctccagtgattcacttccaaagctatctatacaaagtgagggattttcaacatcatttacttgagttcataagaaatttggatggaagtcttaattgacaaaaaagatagaattttgcagcgtgttatttcagaatcagatctgcaaaataggatacatagtggtgaatgtgttcttgtagcccatccatttcctaagagatagtatgctaccagcatagcagcgagcccaccaatctacaaagccaggaaaaacagatgtgaaaaatcatctaatgaagaacttactggttgctgacttgctacttcattttttatatcagtataggagcaatgttttgagaaattcagaaaaaactcacagaaaaaattcaatagttgctacacatgatcatagacaagaattagtttatccagtaatataatcacacttgcacagatttctaacagttatctttcctgaaaagaaaccatgaagaatgtattcctctgaatattcacttcaagattcgtgcatgcatgcatgcagcctcatctgtgctttatgtcgatcagattacccatataaatgcactatacgttttcaaaaattgaagtgatatcttttaaccaca

SEQ ID NO: 42743 - DNA, 1910 bp, Oryza sativa
ttgttggtttgaacatgaaatgaaatgctgaatgtatgtataaaaactggttcaaaaataaaaaccgaggtacatttcacattctagcaagtatatcatggttgtactagcaggattcatggtgccaaaaaagaaacaaatgcttcttaccatgtattaatcatgtgaattggcaactgaaatcacactatctaaaactatctcaattttctcaactgagttatgtaggacatacactgtccacagaaaacagaattatagaaatgatgcatcttcggtcttcagtcagaatatggtactgacccttcttcttacctgcagaatgaattcctcagttggatctgctggaagaattatggaagaggtaccaaatgaggggagtgatgtccttggtgaaagaagtatgaaagagcaacagagtgacaaggatgatgtttgtgttgaaagagagatggagcaagtatcaagtcatgatgatgatgtgttgagggaagcaagtcatgatgatgatatgttgagggaagtactgcttgaaactgggctgtttacaggtgccatgagcattgatcagattgatacaggtgatgggtttgaaatacaagatgactttggacgtgaagatggagagactaaagacgagggggtccaatctcaacctgcagtccctactgttggtatggagttcttttcagaaaaagaagctcaagattactacaatcgttatgcaaagaactggggtttcggaacaaagatttcaagcaaaaaaaaagcaatgtcaccaaggagtataatagatatgagtttgcttgctactttgagcgcacaagccagaaaaagaatccaaagtcaagcgctagcagtgggtcaaaaaactgcgagagtttgggaaaacccaaaggcaacgcaagaaagtgtaacagtctaaaaaaaactgattgcaaagaaagaatggtagttgtaaaaaggaaagacaagtggtgatgagggatgttaggtcccgatcttccgataggtattaataaacaacgatttgggcggagtcgcgacacaactcgatccggcttctgaacgaacacgctactgagccccgcaatcgcagcaccacgtctcctctagttatcaaccgtgccgaaacccggttgacctcgccgagaaggctaatccctgcatgtgaatcgaagaacacaagcaagaacaagatagattgcaaccaaattgcatatgaatgattaagcactcgaatttgaggttccacaaaccgatctagcggcgaaactgttctggacagaataatctaagcaaaacccaactctaaacgatgacggctactaaattaatatgattagggacgtcctaaggtttccctagggcgcacacccccttgggctaagcccacgatacaattgcaaggcccaaaacctgagtcagattcagactggatgagatacgtggcttgttttgcagattcccggcagctcggtaggaattttgacgtgggaccaaaaccatctgaaattagactccataagctttccaacaagtactcatgggccccgaaattccttctagatcagcggctaggtccgtttgaagttgatgctatcagaggcctgaatccgaatccaaaacgtgtaaaactttatctcttgtcttctatggaccaaaagtgacgtggtgaggtagaagtagacttggagaggtcttggtttggtccccaatcaacttcttcaatcattcatttattagttacgctcggtctcttttccttcgcccaagcaagtacctctgcaaacgaaaacacacgaaactcattgtgtagcaacgtttgttcaaatatataacaagtaaatctaatgtagaacatatgcacctttatttgattaatacataaggtagtcatggttatatca

SEQ ID NO: 42744 - DNA, 631 bp, Oryza sativa
agtaaaaaaaaatgtgtcacagaacattgcatccacacaaaccaagtatctttgaaatgaacacataaaagtgcatgattttataactgcgacagctgctgtcattacatcatgaagatttttcacattactgttaaaaaacaaaaacacaaaaaaagctatcaccacatggtcgcccccctaggtgcagtgaacaaaagcgtcaaatacgtgcttttgacaacgctggtactacatagttaactatagtggactttacatagttaaaaagcaaccatcgctcattttgcacgatgtggatgtaggtcattgaagcgatgctatatcaacctgtgacatagctgcttgcgataggttggaatgcctttctgaggaaaaaaggaaacaatatgagaatccaatgaggtttatctctgtatgaataaaaaaacccaaaaacagaaaaaaaaatggatttaggtaccaagaccacttacagaagtgtatccaacaagactccggccattgtgacactcgagcattctcagaacgcagaacccgcaatcatgactaggtagagaaaataaaaaaaatgtaaaacttataaatgtgtacaggaaaaactatggtgtaagttagttaaatagaacaa

SEQ ID NO: 42745 - DNA, 1031 bp, Oryza sativa
ataagtgttttaatccgaattaatctttaaaaattcgtaactaattcatcttagctcggatttagttggttcaagtctctaaatttttctaaaattaagatctacatgttaaaaatatccacatgtactgttcatgcttgtttatgtgctgttttggtgattttgctcctttctgtttagattccgacgtttccggagagtctgttttcgcaggagaagattttgaagagttccaaggccagcaaggcaagtcacacagatcccaaacaaccctttgagcatgttgatcccgtttaaagctactgtttctattcaactattgcatttattttcgaatgtcattgggtggaattaacctattgtttgttatagccctttttgttcttgattactttattccttgataccttgggttattataatttgactagttgggctatatatattggttcagctagatattagatgtgattgcttagccatgcttagaaacattagcacactattgggataacttatgactcactattatttaatgatggcttaatgatagttcacgatggtcaatcgtgattggttaattaatgtcacgtcctgataaattcatcccgaaataaaaatcattttctaaaaggaataatagaattaattaaaattcgaaaagaaattggcaaacactaaaatacgtacaagaaaaattcaaatgtggcccggagaatttttgttaaattctctttggtctaaaaagagccctcaaattttagtggaattttcagagcacaaataataattattaagaaataaacaaagttaaaatgattttataaaaagaaaaatcctaaaaagtcctttttccccctccccctcttgggccggctcggcccatccctccccctctctctcttcttccccgcggcccattcggcctgctccccgcgcgcgcgccactgacgggcgggcccgcccgccaccctcgctgacgggtggggcccatccggcatcccctacctcccgctcgttcccgccgcctc

SEQ ID NO: 42746 - DNA, 724 bp, Oryza sativa
taccagcgtaccccaataccctctatatccggtctacgggtatcccccatcgacagtggcgtgtcaggtaggggaacttggtgctcaaggttctactaatatgtcatcaagcttcgttgacaacagcgtcaaccctggcatcaaccaaggtgtttctacttcgacaatactgatgtggactcaaatcgtcttcctggtttacaccacggtgccaatcttgactggtccatcaatgaccgaaagcgagaacgctgtggttacaaccctggacggctccatgtcgaaggatcctcccgcaaaagtggagaacagaacatcgacgacatccgagcccgagaaggatcctagtgctgctaaatcttgtccttccgacgagaatcacgagccgacaaggacaacttccgaggcgacaaggtcctggtgtcctatccacaaaaccaggaaacataccttgcaagcttgttgggaattcaacgtacttctccaacccgtgatgtttattgtcctattcacaagacgaagagtcatgacctgtcaagctgcaaggttcttctcagcgccctgaagacgtcacctcctaaggtccagtagtcacaaatctctcttagagatgcgaacaagcaacgaggagcgatggttatctcagactgattcgttggggtaatcaacatcgatccccacgagccggtgtcacgcccaccaaaacttttcgttgagatcttga

SEQ ID NO: 42747 - DNA, 574 bp, Oryza sativa
attttaaatcatgcagtatgtacattaatatcttaattagagtttttaccaatatgataatatcattcatatatatgctaagaatatatatatattggaatttttattaattataagtcatatatttgcttattacgatttatccaattaatttattacagccaaaaataatttttcgaagtaattgtcattaatctttgtactttaaataatgttaatgcattaacttctattttataaacacatatgtaagcgaaaatcatatgcagtgctataatctttagtcccggttcttaaccctaaccgggtttaaaaagaatttcgaaatagcgggaaaagatatttactcccggttgttgagaacaaccgggactaaagatatctttagtcccggttcaaaagggtaacgggcatatttgatctttagtcccggttggtgttaccaaccgggactaaagatcgatctttactcccggttatttcacccgggactaaagatagcgatctttagtcccggattggtactcccggtttggaaaccgggactaaaggggggttacgaaccgggactaca

SEQ ID NO: 42748 - DNA, 3453 bp, Oryza sativa
caacctcttctccccctccggtatgccatcaatggtatcaatcaccataattttatcacattaacctcactcgatcattctaaatctaaactcccttctctttgctctcctggtctaaatacaaactctaactagatatactcttgttgccagatttcacgaaactcaaatcgggtttagaattaacatggttgtccttcgaacaatgaatttgcattcctttcttttaaagaactaaaaatacatttcacaccacatcgaagagccacttccacttacccatctttaacgactctggacgatgagcctccagtgacaggaaaaatctagggaaagaggccaaaaagaaaaggattccacctcacggtagtcgttgtgctgtggtcctctacctcctcacacttcgccactagagatcctaatgttgagtagtctgccgaatctggttgatttcgggtagggagcaacagccagtgtcggagccacgttcagcttagatggtgcacaggaacccccataaagccaagatttctcactttaaaacaccggaatgcatagcgtttagattgaagctttctaggttttcaatggtagtgcaccaccttagttttggtgctagctccgcccctggcaacagccgccatagttggatccaaccctcaccatcgttgtcgtggccgaatctagcgccttccgtcctcatgcaagaggagctagagactctcggcatcaagcgccatcaccaaccatcactactccgcccgtcaacctgatgcctcgagttcctcactagcatggagaagcgatgggagaggagaccggccggttgtggcggcataaccgctacgggacgagcccaacgcgtggggtggagcagaccaccttgtgctcgtttcaaataatggtttaaatattcaacctttacatatgttattacaaacggttctacttaagctgttacaattacaaatgactggttgcaaataaagggttatgttgtaatgtgttctaacaatatgtaggactaacatgctagtttatctttataggcctataattaagtacaaaatttactggttgtattagaagtatgtagcaccgtacattttccttaacatcgatcagcatttttcatgtactatcatgcatgtaccactgaactgttggtcgtgacctacacattcaatcagcatgactattaatctgtacatgcacgataaataatgttatacgtctagttaagtttcatgcaggtacgcacaaatatattgttgcatgtaggctccacgtaccatacgtttgagaattgaccatactgaattgtagcagaggatcgatagctggtatatgtgtactacgtactcttttgatgtttatcataaaaacaaattaaacgttgtaaattaatgcttccaaatcgcacttgttagtattacttttggaacagtaggcagtaagagtataacttttccttgcacggtaacatacaattaagtacgatctgaacatatatatacacattgacgaagaaaccaacaaacaaacaaaacaagaaaacatgcacagtggtttaattaatttacatccccatcatgtatactctctgcacaatcagcattattattacatgctagagataataatcaaggaagagagattaacaacttgtaagaccatatcaaagtcatcaaaggccgagtttagttacaaattttttcttcaaacttttaacttttccatcacatcaaaactttcatgcacacacaaacttttaactttttcgtcacatcgttccaatttcaactaaactttcaattttggcttgaactaaacacaccaaaatcagagtacctactctctctgtcacataaaaaccaaacaatattagatgtgacacatcttagtattacgaatctggatatatatctattcagttttgttgtaatataatatattacatctaattttagatttatcttttttatttaaagacggatggaggatggagtaattagcccaagcagccgcatgcgaccggccgggtacagagatgagacgaagacgaagacgaggagaagaggactgcaaaggtgtgtgtgtattctctcctgtcagtaaaaattcctggccgtgtcctttgtcgccaagtagtcatactgtttttgacaagaagcaaggcaggcaggagagcgaatggcaggtccggtaattacgcgggaaacggcatggcacaaagatgagcaaaagcaaagccacagccattgcaaaatctctccaccattttcttcttcccttttttactttctctctcttgcatctttgttctttcatccggttggttagacagagaaggaagcaaggaaacaagcagcacagagataaggtcagatagagagagagagagagaagaagcagaagcagcagcagcaactgcgaggaggaggaagaggaagaagagagagaagatgagcaataaatagaaaattaaaggtcggagctagccgctctcatggcggcgtttgcaggcggcgccctagaattcctcccctcctgccgctgcagctacacccactactcctcatctctcctcttctttatatagcccatccacctctccttctcaccacctcaaaaagctacctaagctaatcacccccatcatcttcttcctcctaacccttgttgcttagaccccaactagtagcaagaagctctcaagataggaagaagaagaggaggaaatctttgtagagagaagtggagaattctagctagaggtgagtggtggtggtagtagtaactgtatttgtgctagtagagtggagtgatgtgtactgtatactagtgtactgcactgcatgccactcatactcactagctctctcttcatcctccatggatatggcttgcatgatctcactacagatctatctatggcttctagtttggtagcaagtgtgtgtcatctttgcagaagattatgattcttctagtagagcttacaatcccatgccttttcttgtgtggccaagatctgattttttttctccttttttttgtgtgtgtaggggataataattaaaggggagattttatcggagaagaagaggagaaggtggtgttgcactcgaggtttcttgatgggcggcgcatggcgggattctctctgaggggaggaggaggaggaggcggcggaggaggaggagtcggcggcggcggaggcggggggaggggaggcgaacgcggcggcggcggcgatcacgccataggggccgacagtctgttcctgtacgcgcgcggcgcggccgccgcggccgccgacacggcgggcagcggcggcgggggtggggggatagggttccagctatggcacccgcagcagcaggcggctgccgcggccgccgccgtgccgcacacgtcgcagttcttctcctcgggcgtggccaccggcgt

SEQ ID NO: 42749 - DNA, 2597 bp, Oryza sativa
atgccgacctagtattatctacagatttaaatcaaaaggagtagcactatatttgaggatgtttagtgcctgtgccacaacccataatcaaacaaaagcttttttgcaaatgcagggcaaagcaacagtgcaaaagtccaaatacttgaaaaggcaagtgtactcctcttccataaatggaggtattgggttttttgctggtaggtttgctacagtagcatccaaaaaggagcaggcaataatcaatctgatctgatctgatctgatttgcaagtgtatgcatatccctgcctttacacattgactcctcccccattggttcgtcggttggctggttgctccctactttttcgcacatacatcatccatcaattctcatcgtccctccgtcggccggcggaaaagtctatgtgtgattaactaaaaagtctatgtgtaatcgctaaacacacccgaccatttcacatacctgagcttgattcgttgtattaaactgagggaggagtagatagtatactctcccagtctaaaaggttaccgttttaaattggttatcatagattaaagtttcatgagaaataatataaaacattttattaaatgacatgtggtaaggatggggttaggagaaatatgaatgagagataattgatgagacaagtactttagagtgccaatttttgtagcacaaattttattttattttttaaaaaataaagggatggagggagccgtatatatcaaacgagaagggaaaaacaaaaggaggaaagaatgtgaatgtccaaattcagagagcagaaagttgctttgaatgggatctgctccaccatcgaatatcccaactcagatatgtcgaatcagattgtgttcctatgctttaccgtgaattcttttccaaattccaaagggtggcctgccaattatttttggcctaaaatgatcccaagattgttatgattatatgccagtcagcggcctgttctactataattcattcattccttttagattataagattattatagctgatagattatatgcaaattattcatgcccgttttctcaaggtatgatttctccaaaaatctttctgcacctgcattgcaatctcgagtcgtaggtaagtgtgtaatttgtcaaagaaatcagactcatagaattctaatagtactttcccagcgttgaaaatttgctgtatgatgatagcacaacgagaggtccaaagtgcaagagcagaagagaagatacaggggagatcccgatcgtgcagcttttgagtcacagaatgaaaaagcatcagcagcagccaaatgagattgtatatgtgtaccagctgctagctagagttcgtcaactcgatcgttttacagcattttttttcttcctttctggtggatggtgaccacgcaagttaactgacgtgtagttcgttttatgttgtcataaagtggatccatcattgcacagttgtgcactagctttgttatccttaatttgttaatcacagctgacgtacgggttaattttgttgcagtctgcactaatgacgcacttcctctatccatcaatcaatataaggttcctctgcactaaggttaaaagtgaaatcactttgatgctcatagaagtttgcctgcctagaagtgatcatgctcagggacacatcaataaatacatggaattattgggagatgttggactgggaaaatagtaatagagaaatatttgaatttataaataaattttggatgctagaaaatacttatatttatagatatagatgacttaatcacagctgaatgtctcgatctcgcattgtagacgtaaatagtgaaaactaaaactaacaagtactaccccctccatcccagaatataattatatctaactataaatctaaacaactatatgtatcttagatttataatataaaaaaatatattgcggaagaacaggtaatactaaatgtgcttcctctatgctcttcgactctgctctctcttccgtctccgaggtcgtagagtccattctctccaagggtcatctgtggtcgttagttggcgttgcttcttttagaatttcttgggagtatagtgtactctgtctctctcccaactgattagagttgcgctcaactgtcatagcattctcttccctttttcttggctgtgtgtttttctcttcccttggcaaaagccaatctggctgattgcgtcgtgcaacagattttttttataatatattaacatgtaattcttttaagcgttcacggaaaaaaaatcctcgttttcttttgctttttgcaacgacgaccaacgctataataatttccagctagttcgatgagtgatcctgagtcccctgatgcatgtgtacacgtcgtgcctaaaagctagccgcatgggcctgtgcagctgtgctctgtacattgtgtggaggcaacggcgacccaacgtcgcggctacccgcgttgcagcctggctgtacatacatgttgctgctgtgttagcttcgcttagcaccacacaaacacaagctgaccagtgacctctcctctcatgttcccatatctatggccgtatgggggaggtgg

SEQ ID NO: 42750 - DNA, 3756 bp, Oryza sativa
cgccgcctgcgccgccgccgagctcgaggctgcgcccacgaataaggccgcgacgacgaccaccaccacggcgacgaacgcccgcgccgccataggtgatcagagcgatcgagtgaggtcgcggtgatcgagcgagcgagtgagcgaggtggtgtgggtagagtgtacgtagaggcgtttgtgtgtgggttgggttggcggttggtgcatgatatatgggacgtgtcagtgtgacactgccagggaggtttagttggcggcttgtacgtcggctagctggagtacgtttctttctttccacagctaattaagctagttagatactccctccgtttcaagttataaactttgataaaagtaaaactattttaagtttgattaaatttatagagaagagtagtaatatatttttaacccaagacaaatttagggcatgttcactttgacgtcaaaaaaaaccttaccaaattttagcaacttgccaaattttggtaggatttcttatatagttaccaaaatttggcaacaaactaaatgtagccacttttttgacaactttatcaaaatttagtaaggttgaaaatgacatcaaagtgaacaggcccttaatataaaaatatattcaattattgatttgattaaattaatttagtattataaatactattatatttatttataaacttagtcaaacataaaacagtctaactttgaccaaagtaaaaatatattataacctaaaacggaggtaatagaactcatgcgacgagtaagttataggcattacgctgccaaataaatatttcaaactaaatttaaaatttattgatagttaaagttttacccatttgattttagtcattttttaaaaagtcaataaattatggaaatataatatattattgtactctctctaaagttgaaagtatttaacccatcttgtcgaccgacctgtgtgtttggaaaaatcttaaaaaaaaggtcgatcggaatcggaatggactccggattgggcttagctggatcatcacagaaaaaagcccaccttgttgctccaggcgaacgtggtagagattgtgcagtttttacggccggcgagcagttgaaacttgaaagttgcagggcctcgctcgtactttcctctattctaaaataagctcatttctcagcttacctacacatatcaataaaaaagtaaaaaagataaaaatatcattactgtatttaatcttaatgtaatgattcctttctttatctactttctctgcatttattcagtacttatacaaattctaatataatgattactaaaataaaattatttaggacaaacggtataggctaaaagaacttaggatgggggagtataccgcgggtagccactaaaggacctgttgaggttgtagctaaaatgaaccttactaaatttttgacattgctaaaattttagcaatttaataatattgctatgttttggtgggattttttatgtatttttcaaagtttagtaaaaaaaattaaatgggtgtgcatatttgacaattttattaaaagttgataaagtttatttcggcttgatcaggcccctaaagctgcatattcgtttggtcgcaggctactcgcgcgtgccgggcggtcgtattgctgtccagtacagtgcgacgatctcgatcactgataagatgagcatgcatgtacagtagaggatggttcgagaaacaccacacgcatgcatatgatcgatcgatagcgtcgagggcacgcgcgtaggacgtactctgatcatgcatgcatcccctatcggaaggacaacacagaccagctacggcatcacatcggaatccaatgcaaaactggagtgagtacacctcggcggtctcctctgcagtcctgtatgtactctctctctcttctataatataatggattttagaagaatgtgatacatcctatcaataacggacacacccattagacagggtgggtcggctggtccagctatggtctatgtagtcccacatctccaaaccttattttagtcctatttctaacacattagttgctagtctactattgaataatcaggtaaatcaagtattttaagtaggaacaaaaatatttatgaaaattcgtgtataagtagtaggatgtgtctattcattgtactaggatatgtcacatctacccaaaatttgttatattataggaccgaacagatggagtataatattgttcgacgaaacatggatatgtgaggatctgtagtaccttttccgtttcatattatacttcttctgttctaaaatattgttcgatgatacatggatatgtgagaatctgaagtactccttccgattcatattatactacttccatttcatattacacatccggtcaaaatctcttatattttaagacagagggagtaagtcatttgattttttccaaactttattaagtttgatcaaatatataggaaaatacagtaatattttcaataataaataaatatatttgttgaaggcatatcatgagaaccttcgaccaaggctgccaaaacctggtgggctcgatcgggcgaagcatagggggttcactaaaggccaagacacttttgccacctgagggcccataacaaagcccatcaaggagcccaaggcacaatagactctagttaccctcacaaatgcccatatcataagggtattcatgtaaattctccttactaattaactctagggtacatgaaccctgtactcattaactttaggttgcatgagtttgtactaaagctataaatagtccatagggcatgtaatgggggattcaaaattccacaaatcaatacacattgttttacttttcactgtgtgaaccacgtctttcgacgtacacagttgtcaatcgacaataatattatcaagatatattcttagttaaatataatgaaactaatttgatattgaaaatattgctaattttttctataaacttagttaaatctaatactttctccatctactcccttaatctttatatttcatcttagcagacggaggaaacggaggatttttgtgtcagcgaggccggcaactcgcctggatcgtcgcatggccttgtcgccgcatgcacgcacgcagctgggatcatagtctcaactgtacacactctcttaatttgccggctgcagtagcatgagtcctgttttatgtgctcgtttcatgtgaacacacacatgcagtatatgctctccagttatgctcctctaactagcatgagttctgttcagattgcaacctgcatatccaaagatgcactgttattaatgggagccgtctatgtcagagctataataatttcttaattaaagtctacctatacttccatttggtggtgcttaatctcaagttaatgcacgcagctgcttctgtcctttggagtccccactatatatgtatactcctatcaagttaggtttggttcacatttgctgtaatcaactaatcttgcatcaaacttacacagttacacataacacatcagttgctagagctatcagctatgtgattcagatcaatatccattgcgtgccatggtaatggcagttcagagctagctagagcagatattgatccattatattggttaggcgcccattattccacttggtaataatatcacaagccatagatggacagatcgatcgatgcatacatgcatagatagacacacatacagctagccttcatgcccatt

SEQ ID NO: 42751 - DNA, 1785 bp, Oryza sativa
ttggtttcattgtttcctgctctacatgcacagcacgagccaatcaagcatacaactacacaagacaagcgcagttcttccgaattcagacactatatgcagccatgcaggcaggataccctttgcattgcaaccatggatggatgggtcgtgcagtctgaaaacgatcgatgcttttcgttcgattaattgcttcatttttggtactacaaggctgctagtggctagccaagaaacaaatgagacatactcaaaccatcttataatataaggtatatattataattggaacagagaatcagtttaaattcatagtaataagatttgtcctatccaagcctaatatcttatattttaggacggatggatacatatataccttatttaagctctccctagataattactactatctccgtgtttcaatgtatgacgccgttgactttttatttaacgtttgatcattcatcttattcaaaaaatttatgtaattatcatttattttattgtgacttgaatcgttattaaatgttctttaagcatgacataatattttcatatttgcacaaaaattttgaataaaacgaatggtcaaacattgattaaaaaatcaacggcgtcatacattaaaatacgttaaaatacggagggattacagcttgcttgcattgcaggttctgtacatagccaagaaaaactcaaactgcaatgagcgagaagtgagaacatagcttagctagctataggggaatggtcagctgcgctacttattgcggagattgaggtatatatcaggctcttgaatgaatcttgattcccggcgccgcgagttcgttcgtcaaagcgtgatactaatccagaatcctaagtaaagaaccaactgataaacaaatcacacggcatacctaagaaaaaggtatggccatgtatcttctgtagtaaaagctagctcaacgcatgtaaaagtacatgctttagggcttgtttgatttagtgtcctaccaaagtattggtagtgccaaaacttacgtatgttttggcactaccaatattttggtaggatagcattttaggtgaatggatttggattgataccaattggaagccaaatttatattatactcaggaaagttctagaattataccaaattaatcatggtcattaccattcacttggcttcaaaccaaaccattacattcactattcaaactacgaaacaaactggtagggcacattttggcatcaatccaaaatggcccataatgcttatacagtaatatagtatagttacttttttagatcataatatagttactttctgaaactttgatgctttcacttcgatcatggccatgtttagttcacccccaactactctaaacttccaactttccatcatatcacatcacattcaaaactttcctacacatataaacttttaacttttttccaaacttttaacttttcccaaacttccaacttttttcaggaactaaacacagcccatatatcatgtactaaagaactgtgttcggatgctacttttcccaacctctctctctcgtttccgcacgcacgcttttcaaattgttaaacggtgtgtttttttaaatagtttctatacgaaagttgcttaaaaaatcaaattaatctatttttttaaaaaaataacaaatacttaattaatcgcgtgctaatggatcgtcccttttccgtgcatactgtacaccgtttccatccaccggtagcgaacacaccctccttcaagaaagtatagaaggaat

SEQ ID NO: 42752 - DNA, 2654 bp, Oryza sativa
atccgtcccaaaatgttgctacctaggatgggtcatcctaggacaacgaagctctgtctagattcgttgtcctatgataggtcaaatcccatcataggtagcaacattttaggacaaaagaagtaccaaactttagtaaatatataataaatcttacaaaaatttggtaagatttattttggctataatctgaatggccactatggtttgagaatattgcgtttgaaaggagcacaaagattatgtgtatgttagtgttactacttactaccatgtgggacccgacgtggcaggcttaggtggccacgtgcagttaacatctgccaactcagctggatgatggcatgatgcatgttggccggccggctttctgcagcacacatctggaattgcaggattctgtccatggccgacatgggagggaggcgctctttcttttcctttttctttttcttattattgggccttttggacaatgagatatttagcccggccttattttgttgaattcttaagcccgctcctgcctgtgcagcgggccagccttgccggtgcagatgcaggttggcaactaggccgtccgaaaggcccaaacatactagtcgtcttcttctcctatgggctggcccatacagagcaggccaaaattgattgacatgtaccttttgtacatgatccacattacatacctttcgtaaacacgaaaaaaaattacatatcaatatattagaagaaaacagaatttaagatacacaatgcaacgtacgccgaaagcgggaggtacaacaagaaaaaaaaactagcacaaaaacccgtgaaaagagatttaaaggactaaagccggtaacacattacatacggggtgttcggttacccaactgcagtgctctccaacgctgttgctgcagcggttaccgtagagattgtatgtttgttactgtatttgcaggcagccatctagccatatcgaatagcccccaataatattatcacctttttagataatggtatgataatgagctattcgtgcgacatgatagtgagacgccggccaatatggacaaggggagttcagagaaaatgtcgctttaagctcctgttcctttaaaccttttttttcatttttgccacggattatttgttccgcagttcttgaaaaaattattatattctattgtttatactatttattgatttatcacgttaatcaagtaaacaacgcgtaaaaaaattgtgtaaaattctgtttcaaacaggcctgtgaatatatatgcactgtggcgtgcatggtgtaattaccagcactgtggcgtacagggtgaatgcaccatgcatcacgacgaatttatttgttggccggccaggatttacgatataataacactactattatcctatcattatagcaaagattaatgtttgcagtgttataattacaaatcccccctatctatgcatggtctggccggcctgcacattatattgtttgtggattgactgatcaatcagcactactcagggtttaccttttgatttttaattaaaaacctctcctaatcagtttaccgaaatctaaccgaaaacttgtaaaaactgataacttaccatccggtttctacaaactgaccaacaatggtttcaaaaaaccaggcggatttcacgaaaccactcagttttgataaccctagcactgctgatctttcaggttttcttcactgaatcatcccttgcaaataatgtggagtggtggaccgtttttgttgtttgtttgttgagcattacgatcatgggctgcatttgttaatagcatatgcggccggcatcgtttatataacagctaatatatggtacctaggttctagctaggcgcatccgcgcatgtacttatctattctattttaaatgatactagtggtgtggtgtacgagtctgccttcaatgccacgagctgatgtgtagtatctaatcaattaactatgctataaacttgtaattatagtgcttgtttggtttagggccataccaaaacattggtagtgccaaaacctaggcatattttggcactaccaatattttggtagggtagaatactaggtaatgtgtttggattaataccaattggaagccaaattttatattatggtgaagaaagttctagaattgtaccaaattaagcatggtcattaccattcatttggcttcaaaccaaaccatcatatttactattcaaactaccaaaaaattggcatgacacattttggcatcaatccaaagtggcccatatagctttttctttggatatggcattatatgactaaccaactaactatgctataaattaaacttgtcatttttgtttttgttttttggttttacaatacccgttgcaacacacgggtctttagcttggttgtgtgtgtgttggcatatacaaacagcattcccctagcttgtcaatagttgaggttgttgatggcacagggtagctgttctctaattaagttccctgagcttaggagatggcagaaaatgaattctgtatgcttgactttctttaattttgacattgcagtgaattgaatcatggtaatcttgctttactgataatttttcaatatttgtttatgcgtttggctcttaatcatctgatgaca

SEQ ID NO: 42753 - DNA, 684 bp, Oryza sativa
aagcaggatcgaacagcaggaggcagcagccatgtgccaacgaatccgggcgaaaaggcgttccatggactgttgcacatcgactaaattaaacaaacaagattaatggagtattaattaagcatgcatgggtgtgtgtgtgtgaatgtgtttgttaggccagtcacaatggctagtgtcattgcacggctacccaaaatattataccatcttctctcaaatgaaatcttttatgaaacaatccccacagtggaggggtttcactttgacgtttccaagactaagcaaagcatttaattgatacaagttgctgggatcatttgtacccaaaatccggcgcggcgcgggagaatgcagaggtcgcacggcggaggcggacgcaagagatccggtgaatgaaacgaatcggcctcaacgggggtttcactctgttaccgaggacttggaaacgacgctgacgagtttcaccaggatgaaactctttccttctctctcatccccatttcatgcaaataatcattttttattcagtcttacccctattaaatgtgcatgacacaccagtgaaacccccattgtgactggccttaggctaatataaataacacaaaaccaatcgcaatcagatgagtggtggcgtgatggcccctgggcgtgcataaaggccaaaagctaccttttgga

SEQ ID NO: 42754 - DNA, 1576 bp, Oryza sativa
gatgcttgtgcttcaattggtctattgaaatatactcctatgtaataaccaaattaacccgaaagcttaagttgatgagtagagacgggtaattcactaatgttgcaacactcattctctcacgcgaaacgctctaaatcttaagcgtggaataggattaggctgcaaacttttatttgataattgcgtgttagtcaggatttgaactcaagatgcttaaactcatgaaaaaaggaggacggcttacttctattttaaagcgttcaacaattcaactcaaaaagtttcaaacaagacaactcatcaaccaacctcctgaagaattctaccaagttggcaagttccgctccacaatcttgcatatttacgtcaaattctgtatgagtagaatttcatcacctgtctcccggatcccaattctcttggaacagacacatgaacttgcaattgttctgttttgtttcccaggttctttgattggtcgtatggttcggtgcagtttttcacttctgacgcctactttcttcacgaaggttttgagtagcgacctcattttcgtccttttgtcgcctacgtgtgaaccataaatataatcagaacgtgcaaccacccgttttgttgaatgtcgatcacatcatcacgcacatcagctatgctgcaaacactggaaaattctccttttttttcaggtcaaaagacattttcaggcacgaattggacgtctcaaaccaaacaactgacgagtctgaaaattccaagccccccaggcattcctcatctataagtaacatgacgtgtacagtagtactgaatactgatgatgctgtattattctgaccaaatggctccatctccattctagaagattcacaaccagaccctgccaaccagaaagagcagccatacttgtcaaagagttgatatcaatgatgggtttcccttgttcattgatgataaaacaaaagggaaattaatggccacatatcttggttcagaagaacctccctgctataacaaacatcgatccgcctatatctttttatataacaaatatggacagtgatggaaagaaaatgaatgaaaaaactggtttgtggaccacttggttggtgacaaaattataacttatataagcaggcaattatcttacaaaaagaagggggaaaaaaagaaacaacacgcttctatttttacaatcttcacggaataaattatactactagatctagaatatgggactcttttataggagtgaatggcggtaagaaagtgtgtagaaagtacatgataatacagcaaagattgtgatgctgcagccacaataaaaagcggagccgatggaaacacagcttctattgaaacctacaggactattgtcgggatatactttttttttcaccatcatcatctggagaggaaaccttgtatcgccagcctaggaccacaaaaggagatactgtcaactaaaataataaaaaaagaaatcacttgtatgattaaagaaaatctgctgcttatgttcatcaagttaatttttttgtatccaactaatatctttttttcccctcaaaatcat

SEQ ID NO: 42755 - DNA, 705 bp, Oryza sativa
tatttatattaaattgattattaactagttgtgtctcagaatttttagcttttcgatatgcccttcaacaggggagggagggagggaggaatgaagaggaggcactgacaggttctagacccccaagtggtgtcaatgccgtgccaagcagcagctgctgcagcagcagaaagccaggaaggaaagcatatggtgacaacaagacaccaattaaaaacgccatggccaacaacaagccagcctgaagcttctttcactataacacatccattatttcacctctattttattctcttcacccattcagctgctgattgccgcttcgctagtagtattaatgctgtttactgtgcagtatgctgagctgaaatgttttactgctagctactgtagacatatgggccttcgaaaaggtaagaggagagatgaatggagatgagaggtgggggtgggcccggatgggcagcggctttcacggcccgaaaggaccccgacacacgacctcgattcccgccacgtggctagacatgcgccgtccgctcgatcgtgcctagacggccacgatggcccccaccctctctccctcggggttttaaactcatctagctacgtgcacacgctatatacttagctctgctgttgtgccgtcccggccggcgttgcaagaacccctcccctatagtctctttttttctttggactgtt

SEQ ID NO: 42756 - DNA, 583 bp, Oryza sativa
caaaacctcaccccttctaattatttgatattatgtcattttctaatattcgcgtctgttttgttgtcatcgtctttctaagcgtgcgtgcttgcaaaggaaaggagtagagagagagagaggcacatcagcagatcgagagagagaagctggtatgacaaaagaaaagaaaagacagaagatgactcatgcacacttgcgaaatcaaaccaaaagagaatcaaagcgaggcaatatgtacgcgcagaagcaatgatgaagcgaaagccgaaatggtgctaaccgttgggcggccagccacgcatgcagcgaatcggtcgatcgatcatgcagctgctaacacacacacaagagaagacgagacgaaactcagccggccggtgattcgatcgagagtaggtgacacagccaagcaggatagaggctatttttaggagagcttctagctgctgcaacttctctcagaattagaagctccccaaacagtatatcttttggttcatattctaagaagttgtaggtgaagaatccacaaagtgaaccataagctagaagctgaaaaacctagcttttcaatattctc

SEQ ID NO: 42757 - DNA, 706 bp, Oryza sativa
caaatcctgaggataaatctgaacatgatcatcatgtctagtttcatcatcagaatttgattagagttaagaaaccctcttcttattccttttaatttgggacaagaacacagtcaaatttcaagtcggattcgctcgaggaaataaatttgcattgtttgatcttgacatgtttgagactgatttgcccccacacttaatctggggaagcttcaggaaaatctacgtacgaataacctggatcaacatgatcgtcaaaatagggttggctagcgaattgattaagcccacctcattggtttgattgaagaacacgtcggtatcgtcaacgctgctaattaaactcccataatcatgatccttcttcctttctcctccacaggatcgtcgctcacgtcccgaccatcagaatcttccacgacacctacatacaactatttatttgattgtggaaaactgtttaatctgaatctatcaatggattatttctctatacttaaaaaatatatgtttttttttgtaaaaaaaatgctcttatgatgttttgcttagaccacttgttaaattcattttttactagattaaatggatagtactttgcaacaatagttctctcaataatgtaaatcaaataggacatccaattggctgttaaagtttttatcgctcaacataaaccaaaaacccaaaataaaattgtgctagt

SEQ ID NO: 42758 - DNA, 1579 bp, Oryza sativa
atgtaaggtgcttgagcctttgtgctccttttgtttgtgaacatgtgtgtatgaactgagcttgtttggtcagattttctgtggctgcatacacccccgttggtgtagaagccaggttttataaattcccattatctaaaaaaaattaatagcaattaattttgacacctatttacaattgtaactcttacatattcattttacgactttaatgatttatcaccatgactcgcatgaaaaaaatatgtagtacttaaggtttaggatagctgaaattaatgaattatataatttatgtgatagctatttaagggtataaacaaatgaattgacttataaaaagttagaatattgtttaaagaagacactatttagaaacttggaaagcgtgcaaacaaaaatccaaaatatggaatcgagaaaaaaataaagggccttaaactccctttatcacccttatcacagtaagagttctattaatattcgtcaatattacgctcacatttataacataatgattcctttcacctttacgaacaaatagtacaaaatccaaatacgacataacacaatacattataattattatgtaatcaactctcggtttcaacttaaacagagctaattagtgttgagaaaaacacaacccatggtgcttaattattctctcgctgcatcacacctttaattttcttttcatgttattaacaacattaatcatctccatatatgatttgatatgtggcaaagcggtagctttacagcggttgtgatcaccttatatgtctcagacactacaccttgtcacacatgcgaaaggtaaaggtgcagacgtgcattgtgcagcgggcaaaaagagaattttggacgctttatttattagcaaacaatagatccgatgattataataataaatccaccagttctagtgtaagtgtacattagttaatatagattttaaattgttaatttaatgggtacacaatataatggtgtagaccttattttgaaacagtgcattacttaagaataatataccaatgtaataaaaagtagatccgatgatttatataatggggccatcagtttaagtgtacgtataaattagttaatatagatattgtttatttaataggtacataatataattgtgtaaaatttattttaaaatagtgcattatttgaaaggaagattttttgttatatgatggtagattctttgttttgtaaaattatgattatttaaaaaatatattcaatatatatatatatatatatatatatatatatatatatatatatatatatatatatatatatatatatatataaagttaattggaaaagtactatcataatcttataaactcaaactgaaaattcttatttaaatattaaaaaaattatcattgggagtacttatttttcttttttataattctctatagttctctattcgccaagcatgcacacgcctagtataccaagagagattttcttgatggagtttgatacgtgagaaacaatctactgcagttcttttattatttttcatgcgactggtatatggggcgtcagg

SEQ ID NO: 42759 - DNA, 648 bp, Oryza sativa
aactaaaacaaagaaaaagttcaataagaaatcatttgtgaagaccaaattttggagctggaggtactacatatttcatttcaaccaaaatgctggacgattcagtacttctaggtgcagaaaattcatcaatgtcaaaatgccagaatcaagcaaacatttcaatcccaaaaagagtacttacagcaagaactgacagctgccttgcatcaaattcattttctttcaacctggaattaaataaaattggccttacgtagcatgaacattatttataacaaaaaagcagcaccacaagcaaaatacaaacccatgtatgtaaagatatgatgaatgtgtcagcagttctttctcatatagttgcaggcaaatttctttgcttcgcttgtaaacctgcagttaaaagatatatcagattacttgtttgtatgctctatgcctctacatggttagaagtgtaacaaaagaatgaacatgtgtgcttcagcagtagtctatgccatttcaataaagataggacacacatattcaaacaccaaaaggatggtaaagactcagggaaaactgggactgcataaatgttgttgctgtcagagacaggttgaccaccagataagggagcaaagtcaacatagggagcaaaaatct

SEQ ID NO: 42760 - DNA, 1343 bp, Oryza sativa
ctgcagcccaggaacccttcctcccaacatgcaaaacggagcaacagattagcgtatgagtgttgtttcagtgtaactacataccacttaaaagtaaatttcatcgcatgtagatgcttctcgcatgcccctaggttgttgtttctaagtcagcgcatcggttcagcctaattatgcgcatctatttggccatttggctcaaacttgtgtgtctattcggcccgacatgtggctaagagcaagttttataatagagatgactactacgtccaatttagccgtatcatctactcattgattaagaggcaacatgtacaacaatttacctccaacacacaaaccctaataatttttttcgttgattcactctcacactatttcactttgctcttagagtttgtgtagaggttgcctattacataaccaactacgaggagacaaccagtctaagggggtgactcatcctctctcctcactttcctcctccatctcatcacctaatactatgtgatatttttatatgtagcactaaggctgggttcttcctcttattttccaactcacctttcttttatttcgtacacacgtttttcaaacttgctaaacagtattttttgtaaaaattttatatatgaaagttgttttaaaaaatcatatgaatttatttttcaagttttttagctaaaacttaattaatttcgctcttatcgcttgctttgtttttcgtgtgaggaggtaaccttgcctcccgaactcacgtgacaacctgctctaattcagcccaaaggtgagtctaaatttggcccgtatattcacgtaaactgggccacgtgggtcaaatatcagcccatccaatatcctaattggaactatttgaggcctaggaaaaatccgtggcacgtctaatattcaaatttctgggccgaaatatattccaccatcacttgttcttccctaaatctgagctgtctgattaaatacataaatagtcgctatacaatatatgcagatcttgacatactgcaattatcttatctcctttttttttatacaatagaaatacagtaactcaattgtgagaacatttattatttacaggtgatggtaaaactgtcaaaactgactatagaaagacacaaaaaattctaagcagttacacaatgtgctgtgcttctgctgctgccactgttgttatgcttttgctcgaattcttgctcaaaacacgctgggctacacatgaagaccatttctgtgagatgatctctgagagcttcaagacttttgatagttcattgaagattggaactgtgaaatttgtcaaagggaaaatcaacggaagctgt

SEQ ID NO: 42761 - DNA, 1164 bp, Oryza sativa
aagtaatcggacagcgagaagtcaatactccgatcaaactagtgatcttactatctatctgagtagacattctcacattcatatgatttgccaattgccagttgacaccaacgcagcatgccattaggcactaggcacaaactgaaggaggagagatactagtagattctaagaatgcattacgcattgtattatcttgaagcaatccagaacccaaccaaacagattcagagttcctccaagaccaactcctaataatctatactcttcttaaacaccaagtataatattttttttatttaccatctaattcatcatgttttctactaactaccccatatacttttatgctataaaataatccatctacatatatgattctatcatatttcacctgaacaatagaacatctccaggtacaaaattgtcccaaaaacctcactattaaattgttttaatccgtagcaaagcacgggctagtagtaacaatactccaaagatgaactgctgctacaactaattaaaagaaacacacgcctcatttcttctagggtgttctacgcaggatgaaaacgaagaggcggagattagaacaaggcgacgcgggataccgatggcgatgaggtcaggaacggacagcgccttggcgaggtgccgccctttgcccccaccggccggcgcccccgccgccgaggactcggcgcggtcggcggcggagcacgccggcttcctccgcaccaggcactgcaagtcctgcagcgagaggcgggtcgcgatggccgagcccgacgcctgcaaatcctgccacgagaggcgcctcgccatggccgagggacgacgagtggctgaggggaggggaccgagggaggagagatcaagaactcgttgttttggtaggcagttgacttttctcgataattaaaacaacaactagccggaaaagtcgggcgttgacttttatgtgtcggtgttgggaaacacttctacggtttagcgagatagtagtggtaaaattccattaatttctactgctcccgatttaatgtgaagcaaatcatcaaaagcgctattttttatataaaaaatattttgacggtgcatataatctttttttcgaaagcattttctagttcattaatttctacagctcccaatttaatctga

SEQ ID NO: 42762 - DNA, 884 bp, Oryza sativa
attcctgcagccccataaaatcgcattgagttatacttctaatgtttttaatgtttgatgtggttaatttatcttattaaaaaattatacgaatacgcacaagtatatcattcttaaaatacttttaatcataaaaaaataattgtctagtattttttaagaataaatcgataagcagagcggtaaaagttagtatagaaaatcagtgtttgtaggagttctataagaaaaaaatagtatttttttcctttttcataatatattgaaccatatgagttgtagaatatatttttaatagatgacgccgttgatttttgaataaatgaatgaccattcatctccttaaaaaatttcatacaaatatataatatataaatcatgtttaaaatatttggtaaaacaattcacaacaaaatagattataattatataattatgtaagttataaataagacgaatgatcaaacgtgcgatgaaaaatcaatgatatcatttattaaaaacagaggtagtactgaaaagaattaaactgtgttcgggaggggcctggcatgcaaaacgatgttcgcattaactcgggattaattaagtattagctaatttttttaaaaaaaatagatcaatatgatttttttaagcaactttcgtatagaaactttttgtaaaaaacacaccgtttagtagtttgaaaagtgtgcacgcagaaaacgagtgtgaggagttgggaactccagcaaagaacgcagcctttagatttagtcatctaaattgtagtttccgaagaatatgtctaaaagtaaaaggatcgatatgacatgtattagtgaccagcggagtatatgcaaaagcaaatataagagcaaggtcaatagtgcagctagcag

SEQ ID NO: 42763 - DNA, 873 bp, Oryza sativa
tgaacacagcctaagaagaaatggaaaagtaggacatttccctttccgcactgcaattaattgagatccatcattggacagattagaaagaagtggatgttttcttgttctgcatttatatttctatcaccaaatgtgcaaaacaattcacacaggaaaagatccccatggaacaattggttgacagagattttcctgaaagcgagccgataaagcctcctgctttggatgataccccttttacacatgtcgaagacttgaaatccttggaggtgctagctacaaagctgaagagtgcaaccgagtttgctgtaagttttagtagtagtttttactaaagatattttctttttggcttcaaacaaataatattgaaaatattcagaattctattactcttattagctgagattagcattgtaaagaccagggtttcaattgtcttttttcaatatatcgctgagcaccgtatggacacataggggtattgctttcctattataacttctgaggagtggatgttgagagttaaacaatcatattccatactgcaactgtagcctctctttatatattatatattttggtgggaatctgaagatgaactgttggaagtaacatgtgagatcagttatgttatattgatctcatgatcctatctgccgccaccacgcaactatcttttaccaataactaacaaaagttggtggtgaattgatggattctgcacgttgagcttacatttagcaaccacatttgaaaatttgcatggactagttaagttgaaacttaggaaaaagtccactccccactcaactctttatccggttaattttacaccctgaacttcaacgccaattagttttcatccct

SEQ ID NO: 42764 - DNA, 656 bp, Oryza sativa
atgcagtgagggacagatgaggcgtcgcacatttatggctgttcagcctgtgctcccctctcgctctctccctccgccgcgtggcagccgggtgagggcctcggggtgaagccgcgggatagaccgaggggggtgacgccatgccccgaggccccccccctcccggcgcttccacgactcgcgtgacgtgtgaatggaggtaacttgcagagtcacatggccggagggaaaataattcccctctacttcacatacccccgggtccatatctccgacgtagcccccggcgctatatcagatatcgatttcctgagatcgttctgacatggcgcctcacgactcctcgagctggggttgtgggcccggcagggaatccaaaaggatatcgccgcgtggccaggttggcgtgctaaccataacagcggtttgaccgccactgaccgcgctcatgatgaagatgcttgaggcgtgataaccgagagggggggtcagtcagaccacgcctcgattctctcgctcgctactcctgcggcggtagttgtgacggtttgctcaacttgcgctcatggccgttgcgcacttcaccttgagtgtgccactgacagacgcactaaaggcgggagcggatacaacgggcgacgtgatgagtgggcgca

SEQ ID NO: 42765 - DNA, 662 bp, Oryza sativa
tgctccctatacggctgtacccagaatatacgtgtgaacatatacgttcatttttatgttaaataatagaaggttagttagctagatctaaaatgtgagcttttctatggggtggtgccctggtatacaataagtatatggttaatattttcagtattctgctttgtttgatctctataaatgtacagatgtctcaagccacttgtaaaattcatgccaactgataacaaatacagagcagtatatggtatatttttttatctaatccttacatggataatctatctatctatctatctatctattatctactaaaagtctattaaactttctacaaacactcctaaaccaccacgtgttattcctataaatactccttgtcggtgacatgggaccgggagtatcatgactagaggcttggggcaggagcaatcacccacgtggcctgaccccctcgggggggtcgggcccgagggtgatgtggccgcccccctctttgtctccccgaggagtcggaccgctctcgtttcggccccgagggctgaggcgccccgaccccttgtgggttttgcgccgcgtgtatgggttaggtgagcacaacggggcttacctaaccgcatttattgcgggttggacaagcgcgtcacgcccaatgtaacgca

SEQ ID NO: 42766 - DNA, 674 bp, Oryza sativa
attcctgcagccccgccggcgagggggtgtagagggtggggggaagggcggctacggcgctccctcccgcgtgcggagcggcccgccgccaagcttacgcaccgatccctcgccgcggcggtggtcgccgtcggctgcttcggtcggcggcggcggcggtggcctggctggaagtgggcgcgaacaaagggaggcggctgcgcgtgcgcggattgctggtcggtacaagggggagagagagagagagaggattttagggtttagtgcaacccgtagcttcactttgttttggcccacttgacggattgcttgatgggccaacattttgaggaagaaagcccaacccactctacgtataacccagaaagaaaacgtatactttgactccctcaactatctcccgagtatgattcatgtcctccgaccacaaaaccggtatatcgactcctctaactattaaaaccggtgcaaactatgtccctcggtgattttgaagatggttttagctgatgtggcgcctatgtggtggtcttaactgggtctttgtcctatgtggcgtttatatagctttagaatgtatctatctatatctatataccaattataaaaattcaagaaattcaaggtgtttttgtctagaaatttgttacgacacatccgtgttaaaatcgatt

SEQ ID NO: 42767 - DNA, 938 bp, Oryza sativa
tttgagctacgcacattatatctttaagacatagttggcttagagctacgcgcattatggtttaagtagtcggtatactatctaagttcagccactcgcaaattcacaccgtatatgctatatatttatggtcaagtcactaggcttactgactttgtagttcttgactatatatttagttgttttctctctaactaagcacataattggaggctatgactaattaggtgtatctattcgatgcacttatttatttaatttttcttcataatccctccatagcttcttgcaatattttgacgaggactcttgaaggaagaactcccgaagccttttcaaggaagataaaatcactctgcaatgataaaaaaaaacctagatgaggattgcggactatgaagaactcagacgctatggagaacataggtatggtatacccacacgacatgttgttaatgaaaaatccgacacatttttatccaactacgaatagaaggttggtcagatccatataatatgtgatagcgtaagactcggtcactagaacgggatagctcatctgtaacgagtgggaagcctcatctgtgtcggcaagaggtaccgtcacgaaccaaaggtcactcatgtgaaaagtcatatgtgtcgggtcggccaccgtcacgaatgatagtcatctttatcgggcctaaatataagaccatcacggatgacactcttctgtgatgggtggtagttaagacctatcacggatgagattcatccgtgactgttcataagtacaaaccttcacggatgagaattatgatttttgaatttcaaatgcataaaaaaccctaaaaatattttaaatattaataggatattctaacaatggtcacacatcactacgtagaaattcttgttttttttcaagtgatatatgcatacatatcatacat

SEQ ID NO: 42768 - DNA, 3465 bp, Oryza sativa
  unsure (1)..(3465): unsure at all n locations
gtgaaagtcatatgcatggtgggtgtgtgactgactgatcgatatatgctcgatgagctgacggggcctgacgggttggattgggcggcaccgagatggcgagatgttgtaccgtcccaagcaaggaattctactagctgagtagtactttccggctggccatgcatggcatttgcaacacacacatgctttctttctttcttttgcttgtgcccaattgcccaaatatttagtggggaaaatatccagtgaaaacatgtggaaaacatactcaaaagctctttaaatttatgaaaaattgctgcagatatgtaactataccaaaagtttttccaaatttataaaaaaccactactagaaatacgtacctataccaaaagtctctaaatttgtgaaaactttactagatatatgtataggtatcaaatactttcataccaaatcttaactccaaactcaatttcatttgagagacctaaaatttgtctttttacttccaaatttacatgaatttacagaactttaaggtccagtttttattggtttttacatatcgatcgttttcaccggctatgtcaatggtttagtgctaaccttgttatggacattacaagtactaactttgactactgcaaatttatatcacaaactatttaaataacatagtttctagatcttcagcttcgctactgcaaccaaaatttaaatttcaaatcttaattataaagaattgatttttatgttctttcatcgtaatttattttttaaaacactatgagcacatttattaaagttttattcacaaatgactttttgtcattaagctatacagtttataatcatccataggctaaaccgatgggactgatttgtagaagtactcaagtatgctcaaacgctaatttatatgcaaattacaaattttgtctcatataatatagcaacctctacacttctttataatataactataacagtctctcataaatttctttatctacttactcatctcaactatttacagcaattatattcatttaagtttcatcttaaaattgattaaaaattctctagtataatttgttgagacagagctagctagtataatttgtcacacgacgtattttagtcgttggatagtgcattcagctgggaaaaaaaatgagcatccaactgcattaaactgtactcccttcatactcgtaaaggaagtcgtttaggacaatatttatgtcaaaccttgggattataaataatcatgaataactctcaaattgttgagtttaaaaatataaaaattatatgaatagatttgtcttggaaaatactttcataaaagtatatatacatatatcactttttaataaatatttttatagaaacaagaagtcaaagttgtgttctggagaccatgtcgctgtcaaaaacgacttcctttacaagtacggaaggagtatttcagtttgaagcaaagaatgtccaatactgnccgtaataaatgggcccccgtcctttacaagtgagccatgcatgcaatcacgtggtgcgatatccctcgtggttaatagtagcgctcactcctcttttttcttgtgaacctgagcatgcaataattatgaaagaaatggcacatttaacttactcttgtgcaaattgctgatatatttcaacacaaaaaaaaatctgtgttgatgttctcctttaaccatgaaaaatctcatcttctttatatacattgttagtcacgtaggccacatttctatccattaaaaataacactaattataacattcacatgcaatacatgtctccatttatgtaaatatatttttggatgaataataactgaatttctgtaaaaaccaagttatttatgtattcaacctagcatatcctacattatctcatcaaatccattaatgaaacaaagcatgcacatatatatatatacatagaagcattgaaacctgccaggaatgtcggtagcaagtgagtttctcatttgatgttggccatatgacaaatccttaggcattagaagcatggaaaacaattaatatatgggattaaaaacacgttgacgtacttaattactcaagagatgtaataattatttcaatttcaaaacatgaaattaattagagcacgttaattaggagagaccatcttataatgtggactgttggaatagaacgatcttaaggatcaaagtgcatcgcgtatgttttatgtactggtacacttgacaaacaatgaagctcctccctttatatacaagttttttttgcagagcacaaaagcacatacctatatatattaatatatatatgaacacagattacatagataggtcccactagatgcaatatttgcacgttctctcggtccacgcataaaaccacgtcatctcaattatttttaatagtttgatggttttatttatgatatgacattgtaccgaacatatgttagacttaatctaatccaatagaagatgggcgaaactgcaagttatatcgacatagtcaacgcatcatatatatactttagactatatatgatcgatctgtttctgactgcaacaagcaaagaaaatatagtaccatactgcaatgttgtaactatcaactgtagcttgaagctattttcagaaaatgacttgacaatatcacacattgcaacattaattattcagagttaataggatcggatcatcggagtatgtttttactcgaacacactgtactctttaaactacacatcatcaatagatccgcatgattcatagccacttagtactaatggcatgtactatataacaattaaactaatctactgttgtgtggaggagagagaaaatatggtgctaagcttaaaatccatacttagccaagataggaggggatttaaatttattgcctgacactaggaaaaggaagggcaataaatttttttggtgtatgaatagttagagatcgatcttattgtctcagctattttaaggagttagtctctaaataacgtgtagatcataggagcatgtattaggctcaactgttgtacttacactcatgaggagataatcaaaggactttatccccaaatcaattggaaggatatgtcactactacagaaatcatttgtacaagcgattggcatatttgtctacaacgggatctaagatgcacccacctgctactaaggcggagggaccttaaggcttagcgttccacctgcagtaatgtggcaattagcgcgagttgtgtgtgaagacatcaacgtgcgaataatgtatttacacaagcggacaatagttgatacccacccaaactaacaagccgatttacacaggttgttctgttttaccatccgcttgtgttaatagatctccatataagtagtcgtctttctcccagcaatctgtttagacaaagcttcactacgcatttagcacgggccaaaaat

SEQ ID NO: 42769 - DNA, 871 bp, Oryza sativa
aaattaaactaggaattttatagaatttgaaagggctttctagtaattctatggttttaatccagttcaattcagatttgattgcgcatgccagtgctgccactagctagatctcgtatgtgcgcctacaagggacgatgacacgcgtcgtggtggtgattcctgatgattcatcattaaaaatgtatatactgtggttataagggatcaattaccggtcaaatattgtaagttgtaccatagcagtgtgtagaaagccttacacattctaaattttgctagctaggttaacatattcgtacgagcgagcctgataatagtaccaatttttttatttagattaactactttcatttttaacaaaaatgatatcgtgcaataagaaagaaagacaaaattacacttttaaattttatgctatgaactatttaagtgaaagatcaaattaatctacaccgttagatcatttatactaatagtatatacatatactgtcagtaaatttattaggccgcatgttcagctatcggggtagtggctacgcgatagttaatcggaacagtgcgcggcggctgcaacatccaccagcccatgccagccaagtaataagcctattatagaaacaaatggactcgtggatttgttttcgttcttaattctgcggagatactaacactgaatttgatagacgtcgctgctgctgctgctgctactgttatgtccgcagagataaaaccctaaaactaccgtggccaattggatcatttgctaccaagcaaacaagtcttactacatcttctgaaaagtagacatcaacaaagagctaggaagcacaaaatacactaaataaaattgtccttatgcatgaaaa

SEQ ID NO: 42770 - DNA, 3871 bp, Oryza sativa
attattagaggatagatgactagatgcagctagagaagaaagggctcattcggattataggatatagcaataacataggaaaagtataggaatagaaaaggaatctaagcgtaaaatagagaaaatgaaaaataaaaggaatacaaaagctaagggcattcggatcacagcgagttgattgcctaggatttgcatccaagaagccaaaaagagcttgaggtggaccgatttttcatgtactttttctttgaaatcagtatcaaaggaaactttcctttggattttctacaaccagttttcatgatccgaatgataggaaaggaaaaaaaatcgtatgcacaatattcctcgaaaagacctgtgaagtcctctaatccgaataagcccttcctggagatggtccaaataagtataacaaacttgtctcaaataaaaatattagctagaggatggcccaaagtaaatggtaacaaatggtagaccaagttacaattaactcttaatttagtctaactgggcatttttttctgattacaagcaaacgcacacaaaaacaaaacaacacacagatatccacaagtacgttatctaattacaagaaagagagaataaatcgttgatgctgcaaatgttttgttgaagtacattcgcttaaacataatatagactattggatgaagttaatatgcaactagaccatgtctccaccgacccacaaagcggtggaccctattctgtaggacttcttagatcacatatagccgttttgcctttttattagataagcctactttgacaaagtatataaagtacaaaaatatcaaattgattctagcgatggaacaaaccaagtgggtggaaaggaatactagtgttctcctactacggctctatgtactacatcagacgttgctcttgccatgtgacattaatctatatatattttaattagctagacgaacaattatattagtgaaggtatttaatagccaccttggaagcgttagttaaatctgataagctcgatctatcagtatctatctggggacatataagtaactaaaagaggagtagaggacacatcatatttcagtgggaaatataaatctatcgaagagaagttaccaaccttctctctcagaatgcaccttaatagaagttcccaacctttgcatttcccatgcatggtccgttaatctatctaaggttttactgtatgtctgtttagttaattttgctgattatatggaatataatatttataaagttgaaggcattagtcaatgttcaaaattttttggaatggggccgggggaagtccacatatatgtatgcttggttagatttaaaacaactagcttggtgattgcgactgcgtgtgagctccagtactaccacaaccatttacacttcaaaacctttatatatataatttgtatgtatgcattttcatttatatgccttggttaattataatttgcatttgtttcacatcttagaagccaacactactacacaaatcttaattggtgctaatttaatttgaaaccccacgaaggtgctggatttcccaatcgacaccaagaaggcagcactgacgtggagcggacataggtgccggttgcggtgccggtcttggaaccggcacctttgaggttccacgaataaaaaaaatagccagctcgatgcattagcttgaatcgagctgatgcatcgagcaattctacatcactatgaccaatccaagaacatccaagaacactaagaacaataaaaacactaaaagcgggccgatgtcggggagggcttcgtcgctgccaccaccttccctcccgtcaccgcctatcgctgctatcgcttctcctcacgctgccgccgccgctgcctcccctcctaccggatctggtgaaggggagagtgccgcgagaaaagacagagaggcgcgcgtgagaggcatgcacgagagagagagaggcgcggtcctccgcttcttattcgctcaggtgctcaggaggataagaacaagcggtctgcatggcttagtttttacgggtgcggggtttttaaaaaccaacaccttttaatatattgtacgtttcgaatttttaattaacctgtacattaataaattatatgtgttggttttttcaaaaaaggcacctatagtattgtgtcgctcttttatcgaaccgacacctataatcacttaaagatgttggttttttcattttcagtctatagaggtgggaaaaatactatatatgccgattttagccgtttcaggacctatagtgctgacctgtatgtgtctttccgtagtagtgcatgcaggctggaggagccgattaaacaaccccattacctcaaggaaaaaggcatacatgtaattgtataagctagtttacatcattaggttgtaaaatttaaatttctaatttctaaaatattatttgaaatttgtttttcattttgctaagatttatttttttctatgcgtacaatttgtctactcagtactaagattggattgatatgaacaaatatatgttctatagttacatgcctatgtcatgtattatcattttttttaacattgttgtgatatattattgttatgagaagtcttaaaattggcatatattttttacgctatatttttatgatcgtaatcatttgtccagttggctctcctcaaattggatcattggatcctagcttcaccactgtatatacatatcggcaatcaaatacatatggtgatcaaaatttatatgagcaactgttgaggttcgactttattctttatatccaaaacttatatatatatatatatgctatatattaacttcagacccttttgcggatatattctatattccaatactttaatattcttgctacatctttcaatactagaaagctagctacacggctacacctaactagatagttcagtcgttggcacttttctgttgcgtggctataactgacgaagacgaatgctgctgctgctgctcctgcttgtcaattgtcatgcatgcgagaaaggagaaatttcccctagttcgcagcagcttcttccgttgtcatcacatatatacgcagcatgatctgctcgattttatcgagcgccgcactattcatctacaccaacgtttgcgccaatattttccagcagctatgtagattgcattaattcttccgaccaatggacggagacatgcacatggcgaaagtacacccttcggcgccggaaaacgccactctgtcacttgtcagtgaagatttgctttgcttgctgttaaattaatcttggccatatatatgctcggtttggagaaacatgaaccttccatttgttacctagtcgttatgatgtccttttaattggaggaataaaaatgtcagccaccagatgttgcctttgatcaaaacagatgatccgacagcttgagagtgtactggacttccatttttttatataatatgtacatactttttccgtcacaaaatatacttacctttagatataattctagacaagggtgatgtctagattttttgatagagcgagtagtattttttttttataaaaaagaggttgcatgaagagaacaggtaggatcaattgcacggtgtttgagtttaggtttagtgacaaaattggttatataaggttttactgttattttgtgatagagcagttttttcagagatttttttttgatagagtggttgactagattgatggattgcgatcgagttcgcctataacattacacactaatcaatataatgtattgcaatataacgagagacagcttccactcatctcattaatcttgaggagctaaaagacagtgtggctcgt

SEQ ID NO: 42771 - DNA, 725 bp, Oryza sativa
tttcgcccgcgattccctgtccaaacccacaccaccaatccgcatgacggattaattaggcttaataaattcgtctcgcgattttcaggtgagttatgaaattagttttttcattcgtgttcgaaaacttcttccgacatccggtcaaataaaatgtttgatgtgacatctaaattttttttcgcgaactaaaaaaaaggccctagtcactagtgtgggaggcgttgactggacttcgaagcatatgagatcaggataaaaacctttgctatatatattcctcatcagctgctgtaacggactgaatagaggaggctgctctactagcctagtagtagtactgtagtatagagataacttgcacgccgtctttagcgacgattggagcagtcgtgtttcagcttctggtgacgacgacgacactgtcagcagcagccccgaccccgatagccctgcctggttgcccggaaagctgcggcggcatacaagtgccgtaccctttcggcatcggcgacgggtgctcctaccatggcttcaacctcacatgcgacgacgaggcgcaccaccaccagacgccgcccaagctgttcatggccacagacaacggcaccgtcgtccaagtgctcaacatctccttgccggacggcactgtacgcgttcgcagcaagctttcgcagtcatctattgccagctcctcctcctcctcgtctaatgcctcgtcgtca

SEQ ID NO: 42772 - DNA, 1073 bp, Oryza sativa
aactattactgtaataacaaattttccaagaatctggatgaatagagaatatgcagagatcaatctgccatctaacataaagaaggaagtgatagttttgttcaaaataaacattaggatacatcactgatcatacaaaaagcccagccttgctggatccctccttgcgttgcaggccacttcctgtcttgtgtcagtctagttctggaaaattatcatgtttctatcttcacaaataatcaagatgctgttaaagtagatgtttgcaccattggcctctgacaccagcctatgaggcttgctacccaacagtcaacaatgcttcagtagatgaatggttgaacatgctgaaggaccttacaactaacaacactgaggacagtgaaccaggataagcaaaaaaaaaagtacaaattcctgtttttactttgtaaactacttgagttcgtgttgtaatgaagatatccatgtcccttgtccacctatcataacacaagaactaaaatagcaaaagctcatttcttgttagaaaagtttatatgttgttacactccagtataatgaaaatcaacttcagatgcaacacacaggtgcactgttggtcttctaaaattttatgggaatgctataagctgtacaagctgaaggttgaagttcagctgtgtaagctgaagtttggacggtccactagccatctatttttcagatatcattttagtctgcactgtcaaagattaattgccattcactctgagactgagtatactggctgtcagatgtgttccctatcatgtcgcaggtattattattgatttattggaaacatgtcttatttcttggagtacttaacaattttaataaacatttgtattaattggctgctggtcttatcaatatgctttgtgcttcacaaaataaacatcagaagaaaaaaaaatagctccatacagccacccgaatcggaattagccagctttgacatctacccaaaagtcacaatcagtcaagcacatactctagctaataaccaagcacaaaagtaaaggtgcgatgcactgcgagagctgaagcct

SEQ ID NO: 42773 - DNA, 621 bp, Oryza sativa
caaatattataattcactcatagtccagagttcagtctcgaattttcttgaagctaaaaaggaacaaataaaagcttagaaaaaaacgaagtgatcagaatagggccaaggctgcaataatcaaagctaaaacagcagaaatttgcattcactcatgtaaactgcgatgatttgtcatcatatcttttacgaaaatttaattcccaaactaataatttgaagctgtatggaattttctagcaggttcataatttgtgctaaactgattaattataggtatactcaatcatttttttacgcagacaatgattaaaaaacagcatcagaactccacttgccaatcattatcccggtggtatgcgaaaaacaatcattatccacagaatgactcccaacctgaaaaaaaattttggcagcaaaaactgtgatgcgtcgtgttcttgcccaagtgaattcagacatcatcattcaaccaaatatttcaagtttagttacctccaagcttgccacccaatgaaacttggaaatttcgcaccaaacaaatcaaaagtctgggaagcacccctttgctagttgagtcgtaggtatattactctacccaaatcttgataaccacaaggg

SEQ ID NO: 42774 - DNA, 951 bp, Oryza sativa
agttgccacgtgacgctctaataaattagagaaaatcctagaaattctaagaaaaaaagcaaaacatctacctctttattttcacttaaattgatgggtctaatattatacgccgttagatgagattgatcataaaataaacaaaataatatgggtcccacctctcctgtttctccgtgcataggtcacgtagtaggtacatggatacgtagtacgtacggttccctccatttttttccctttttttcttcttttttccatttatacaattgatatattttttaaaaattttacaaacaaagaatataccatcatgtaattctttataaacacatgtaactaaattagctctacaatctttgaaaataaaatttattccattatacgtttacccattaaatcaataatgtaagataatttccacttaaaccggtgtactcattactctgtactattattttcaaataatgcactattttaaaataaaatttacataattatattgtgtacctatcaaataaacaatttaagatccatattaactaatttatacgtgcgcttaaacagatggccccattatttaaatcatcggatctattttttattactttggactattattttcaaataatgcactgttttaaaataaagtctacaccattatattgtgtacccattaaattaacaaattaaaatttatattaactaatttacatttacactgaaccggtgaacccattatttaaaacgtcggatctattgctaataaataaagtgtccgaagttctcctttttttggcccacagcacaatgcatgtttgcacctttgcctttcacacgtgtgacaaagcgttgtgtctgaggcatctaaggtgatcatgaccgctgcagcgctaccgctttgcacacatcaaatcatatatagagatgattgattttgttaataacatg

SEQ ID NO: 42775 - DNA, 1931 bp, Oryza sativa
tatgccccgcatagataaacatcttatttagttgatagtcaaccattatatttgaatcaaagcgagtttgatttccctaatttgtatataaccaacacttaacagcgatgggtgcctcttcctccccctcccccttcctctcagtatccataaggaaatagcgtgggcgacaaggaggcaggcaagctatcggttctaatttagaaccgacacctatagggtatacccattattttgtaaatacacctaaaccctaagccctccactcaaagcctccctactatctcacctagctaacacttattgtcttggaagcaaacattattcttttgagactactcttatctaaaacttatattacatatttagcaccatatatgagctaaaatgaaaacattgttaactacaaaatttcagatctcatagagatctacaagtatcatatagatcttgtctccattcgtgatggcaatgaggtacccaatcttctatcaggtgaagataactagataactatcgatttggcgaaaacttgacaccaatgatccggcctctgatcaacacgatctgaaccatgcaatcgcaaaaccacatctcctctggttttcatgtatttcttacattcacagataaaatctacaagcgcacggatataccgctgtagcacttcacctgaaaatattccagggtatcgaatttccacagggaacttctgtgtgtagcttttctctatgttcatccaaagacacaatataaatgtaggccaaaggatagagatgatcttctaatatggttattagagagtcgtttagaaagcttaactttaataattcctatcgcttcaagcactggcttgctcgctattaccagaacgcgctctactccgtacacgggcatagaggactacggtgatctcgagggctgtcaccacctctataccaacctctaacgtactgtaggatacacaacaaacactagtaattaactatctagacaccacgtctatacaattaattactactctaatattagctaaacactgaagtaatcgctattaaaatgtgaaaacccggttttaaacgaagaagcaccaccgataaggacattaaggacgttacggacgtggtgctctgtactagtgcaacgatgggcacaagaagacgatgtaaaatattgtaatgttgaatgcaatcaattagcagcgcgcggatagaaattatgttctacattaaggctgtgttcgtgggaacctcactccctagcacgtaaaacaaaccagcatttatctcataattaatcaagtattagctaaaataaatttaaaaaatagattaatatgattttttaaagtaactttcgtatataaaatgtttgcaaaaaactcaccgtttagtagtttaaaaagcgtgcgtacggaaaacaagggaggtgagttgagaaaatggaaataagaactcagcctaattggtggatgaagaattgaaatttctttccatttgtgatagatttgtggtttaaaaggtgatatttgacgggtgggtgcgatatagtccaataactttagaattgaacgtttgagtgcaacaacttgataagtgggtgcgttctatgacaagaacatggcaatttagtattttggtgcatcaacttagctaagcatatgctaggtgagtttttctcgcgatgtcaatataccattacataacaatcctacggatattaccttataatattgaatttagagtaaagtccatcaccggtccctaaacttgtaccgatgtgtcatcccggtccccaaactcgcaaatcgaccattcaggtcgtcaaacttgttcgactgtgtcatcccggtccctaaacttgcagatcactcgtttttgtcctccaacttattcagttgtgtctccccggtccctaaataagacggtcta

SEQ ID NO: 42776 - DNA, 1488 bp, Oryza sativa
attcctgcagccctgggacaaaaaatgacttataataaaaaaaattcaactataaagttgtagatcgcgtcgagggctagaagtttgatataaagtttgtttcattagagttcacatgaaaaagttatgaattatttttaaatataaagtctttagaccgtcctatttgacccagataatattcaaatccaagtttagggaccagggtgacacaactgaacaagttggaggacctaaacaagtgatctgcaagtttagggaccggaatgacacagtcaaacaagtttgaggacctaaacggtcgatttgcgagtttagggaccgggatgacacaacggtagaagtttagggaccggtgatggactttactcttgaatttaatctttaagaattatactgcacatccaattacctttaagaatttttgttttcttcaccttcccgaatctcaaccaaaatataataattactacatccattttaattaactttcagttgttagttattaggataaaaatataaatatgcttatatacaaatccacactagtatattgctaaaataagtacatgaaaattgaatatgtataaaaaagtgatccaaataattaagttgtcgtataacttcttaacttattgtaccaaatcgtacgtatcttgcaaattgttgtatttatgcgatcacttataaagctcttgtactaaattgcacccatctgccaagttattgtactggaacgctcatttctcaagttcttgcaccaaattgcacccatctgctaagttgatgcaccgtgggtgcaatttactcaataaattagcttttcatctgcccaaaatgtgaatgcaggatgaatgccattatcccattgcccattattgccctactcaacgattttaatagcgcaatcagtgatcatgcatgaaatatatagttacagttagtcatcactacttttttccaggcagcccaatcatattctcgcaggcgggcaagccttccgcctgcacctcaacacctgtgaaaatagttgattttcgcaggcgcaaaacacgtccgcctgtgaaaatagcttcgggcgctaaaaaaaaaaggcagccaccgccgtttccggcggtagcttcccgttcccaattcagttcccacccattccctatccaatccagtgaatccaaattcaacagagaaatcgccagtttatccagttcatccaaaatcaccaaatcaatactagcaaagaaaaaaaataaaaacattcctaaaataaatcacggccccgccctgccatcatctgccgccgcacgtccgcgccgcgccatagtccgccgccgctgccgccctcccccggtctccctccagccggatctgggagaggaggggaggggaaccgcgccggtcgccgtcgtcgtcaccgccgccgccctcccgggcctccctccggctgaatctgggaggggagtggaggggaaccgcgccggtcgccgtcgt

SEQ ID NO: 42777 - DNA, 5392 bp, Oryza sativa
gtgggggctgggacggcctggtaggagagagagtgtgtgttgattgggaagtagtggggagggggtggaggccgagaagataagtactagtactacttaagatttttttggtaggaacaatttttgcagtcggaccacataaggttcgcctacaaaaatatattttcgtaagcgtcgcttaagtggtccgcctgcgaaaattattttcgcaggcgccgcttaagtggtccgtctgcgaaaatagaggaactttaccccgatttatatttttgtaggcggtcatttggctctaaaggtcatgtccgcctgcgaaaaaaagacccccacgtcaggaaaaatgctttttctagtagtgcatgataagttggatattcttccagaagaaaagggaaaaaaaagacagcaagtcatgcatgtattcatacctcctgggtcttacttttctgtacgaccattatacacacaattaatatttatactagacactatgttacgttaacctcactgcacgattcacgggaacatacttagctcctgcataaatactcctgattcatgcattattctactttcggtgattcgtgaattagttcctgggagaattagttttggtactagttgatatttttctttgcattgttctcggaggaaaaaaattgttgattttttatttgactacggaatgaaaaattttcactacatattctactttcggtggtctgatcgatcgtatggtaatcagctcagaactggccggtagtaccaatcgaagacaatatctatcggatctagtattagtccgagaataatttatactttacttacagacaaagttcttgaaacggtttgatatttttttccgagaaacactatagtttgatttgatttgaaaatgtactcagcaagctatgtcaacatttgtaagaattttgtaacaaaacttttgtatgtacatatcattttccttgtacttttgatcatgcatgcatgtagattaattggacggaaaaatatgtagtgcaaaccacatatgtagtggaaacttggaaaactaccactgatggagaacccatttttactctcggttggtaacccctttagtcccgattttctaacggggagtagcaatccgggactaaagatagacatctttagtcccggttgaaataaccgagactaaagagagggatctttagtcctagttgctgttagtaaccgggagtaaagaggaatagcggcagtaccagatggcccacttttcttttctttttccttttttttctcccgaatcaagtggcatgtaaatccccaaatcaaaccccaaatccctgaatcaaagtagcatcccaaattcacatcaccaaatccacatcacaaatcttaaagttatttatacacataaatcaaatatatcacaaatcctaaaaaattacacacaaatcaaatacatcacagatcttaaaaagttacacacaaatcaaatacatcacagatccatacaataaatctcaaatttatacatccatgtgaatcacaaattatttaaaaaaacaaacaaagcccctgccgccgctcgccacggccgccgcctgcggccccgctgccgccggccgtcgggcacggccccgccggcctccgaccgcctgcccgccacggccgccgtcgggcgcgaccccgccggccaccggcccgacagatgggaaggggaggagggggaggaggaggaaggggaggaggtggaggagaggggatgaggaatagagggtagatctgatttgtaggagtggaggaggagaagggggagagattcgatctgtgagttgtgattgtggaggagagaataagggatagggattatatactaaacgttcaattttagtcccggttggtaaagtggtgagatcctcagcctcctgacatacatctaacagggaatgaaccgggactaaagatcatctttaaatccagttgagaaccccaaccgggactaacgatcataaaatagcgatagggttttcaaccgggactaaagatcatttttagtcccggttctttttggaaccgggagtattgtggttttgggtcgacccagcaaagatcatttctccaccagtgtaccgttggatcgagaaatggacatccgagattcgtctacgtcaccatgagttaaaatttaactcgcagattcactcatgagttaaaattttactgggagttaaattttaactcatagtgacgtggacgaatctcggacatcatttctgaatccaacggtagttttcaagtttccactacatgtgtggtttgcactagatattttccctgaaccacacgtattcaagtaatctccaactgttaaaaaaaactgtttattttttcccacaaaaaaatgtttgatgttttattgtcactaatggttgcaaataccaaccattggaggaaacaagaaatctgtaacggttggtaataaaatcccgttaggccttgtttagttaattctatctcatggggattgaagtggattcaaagggtaattgaagtggattccaaggggaatatttcctcatctattaaggtttgagaagcaacggtgcttcactgaagcagtttaatgttacaccaaatctgctgttgaaccactactaattacgcatacacactactccctccggctccatattaatttacatttcggccaaggttaaggtcagtctctgatagattacacgatcaataactttaaaaatatttagtttaaaggaactagaacaacatatataggtttgtcttttaaagtactataataaaagtaaacatgcatttatttattatatatattataatagaaaaataaggcaaagatgtattttgtagaccgtgtcattgtctaaaacgtcaattaaaataattaaaatgaaaccggagggagtaattaatttgtgccggtatattagatcgcaatctggcctgaatttacgaactccttgcagtgtctaaattaatgcagctttaccaaatagcttcagcaagatagtatactccctgcgtccaaaaatacagtttgttttagtttaagaatttgtcttaaaaaccgcaattttaagtaaagtccagtagaactctttaatactacgtacttcatcattttcttatgattttaatcatccaactaagtaccccatccttctattcactttctccctctcctaatttttttatcacattaatattggatatagtagtattttaacctcatgcttaatatgtttttacttcatccgtttctaaatatttgacaccgttgactttttagcacgtatttaaccattcgtcttatcaaaaacttttgggaaatatataaaactatatataaacatataagtatatttaacaatgaatcaaatgataggaaaagaactaataattacttattttttttaataaaacgaacggtcaaacatattttaaaaagccaacggcgtcaaatatttagaaacagaaggagcattatctaagggtgttatcggttgccgaaaagcttattataaaccgtaacgacttattaacgatcagaaaataatttatgtgtaaaactttaatatatgtgttctgtgacttaaagtcaatggtaaaaaagaaattgcgttaaaaatatctcaaaatcaacatcaaaattaagttgtagaattcaaatttgggctttggctttacctttttagccaaccgatggggctctaaaggtgggttacatattttaaaggaagtcaatgcttgtcaaaatttccgggtaaaagagattttaaaagagtttatccataaggcccaaaacgtgccgccaatcttaaccctagcccccactaccctatttgtcgcccaaacctgaactctcctgcatcggtggatctactctgcaggtggcgatgactcaacttctcctagtgttgtgttctggaggcagcagcggtggggagcgagagttgagggagagaggggagataatgagagagatggtgggctcgagatagaacgcgactagtaaagtacccaattgaaaaaaataaaagtaagagagagagaacatggctcgacggctcggctttatcagtgcaaggtctcttaaaaacccgcattgatgtgcctctgttaacatcagtgttgggtttcttaatgaaccgtactgatatttatttcattggtgccgggtttttttcagaacatgccgtactgattgtatcgtgtggggtatgacggatgggaaaccactatcagttctagatgtagttaaatcggcagtaatgacgttgcactgatgtgctgttttctggtaggtagtgatatttattcttgctgttacattattcccattgttaaatattagattctactatttttaggagaaagttgatttatttgaattatagatactttgcactaaaaaaaaccttatagatatattttttctctcatactattatggcacttttcaaaatgcctcataagagagtaggggaaacaaaacactttacaggactgcagaggtattttcgaaaatacctcataagttcctcttgctgaattgtctctatgaataaagaaacattttgaatagaaaggcattacataaaatgtcttgccttgcatcatgtgttattttttatgtttataagagagcaaagacatattaaattgtggtacaaaaatgtaaaaaaaaaacaaagtgaaaagagagaaaaaaaattatcccctacttccttgaactcaagacctcttgagtaaatcttctttatcttcaatgcaataacaatcccaacctcatgttattgcttatatataagtaatacaagtcacacacacatatatatatagacatgtggttgtatattaagattgtgaaaagtgtctctaccaaagttgttgacggcatgttcgtgagggccttcggccgaccctgccgaaacacattgcttagcattgagacgaggcatcaaagaggcggagtgtcgaagtagcgtggcatcaagctgaagcggagccaagaccccctgttgaagggggcaaagcaaagaaccttcgcccgaaggcgaaggaggtcgaagcccaaccagactagacttcttgggaggatggcccattaggtggctcaggagggaaactatagggcgcagaaactgggtagatgggcgaattgtctatgattacccttgtaaacgtcccaattacaagggcggtcatgtatattccccagtacatgagaaccctagggttgtgtaaacttgtactgtgaaacctataaatagaccgcaaggttgtgaaacaggggatcgataaattttgagcattaatacatttaatccaccttcatacctttttgagtgaagcctgtcttccgaca

SEQ ID NO: 42778 - DNA, 688 bp, Oryza sativa
gtgttttcgcttctgatctccctcctggaaatgctagttctcagggatctggtgccgatctttctgcttctgggaatgggactgatcagtggagaagagtgccaactaatgatcgcactagggtttctgcatcagctactaactttggtctggaagaaggtttcaactcgcttgggcattcggcgccagcccacaaggcaccacgggcgccatgacgttcctaagctagaactgccaaggtattggcgggagccttggcagtaaaaaaatggtctatctttgccgtatcatagcatctactaacgcgcaggtaactttcatttctgaaacaaaaaatgattccctttctgtcaatgatcttaataatgccttttgtgtagataatagctatatagttcctgttgttaatacctctggtggtctttggcttttgtggagcgatgagatggacatcacggttgtgaagagtagtgctaactatatcttaggtgtaggtgttcagagccctaatggcactcttttcaatattttgtgtatatatggtgatgccatagggctcctatttgtatgggtgatcttaatgacattatgagccccaatgaaaaatttggatgtaatccttctaatcttaatcgcattgcatccttttgtcactacatgagaaatctaggtctgattgatatggggt

SEQ ID NO: 42779 - DNA, 629 bp, Oryza sativa
cccacatataaggtttctgtgcagttagaggaaatcaacaatgtgtgaagtgttacatcaaagaatgcatattgtaatgaaatttaaaacaaggtatgtgtatttctataaaagattactgaagtgaaacaataaaatttctagtagctatgatgacatcaatgtcattttgcagaattgataaaacatgaaactcaaaaggctaccaccaagattccatggcatgtttttgcagaattgataaaacatgaaactcaaaaggtaccaagattccatggcatgtgttatcaggatttcaccattatttacaggaaatactggcaacagccagcaattaagaattaagaaaaaaatcaggaacaggttgtatttcaatatattgcactttttgacgagttacatccgtgattattggcacccataccttcgtcttcagcgttagcttcttttattttcttaatctctgcctctatctgctctttggtcaaattttcatcgtcctgccaatgtacaatggaccttacttaaagttgagacagattaaagcatgcatattcatctcatgctagaagaagaaaaccagattatacagaaagagaagaagaattcgacattggataaaaaagcat

SEQ ID NO: 42780 - DNA, 660 bp, Oryza sativa
gtgtgtgcgcgcgcgcgagcgagagacacacatggagaaagtgtgtgtgtgtgtgtgcgcgcgagcgcgagagatcgtgggtcacacacaaacaaggtctatatatttttttttgtcccactctaaaactatatggttttttgtctctccccggacaaaacatgggataaatatcttttttagtcccagtttatttagtgtgagaccgtggcacgcacccaagtatgtatagcatcggttagttgtttataccaacggggatacacatacaaaaaactcgcgcgggggagagagagagaaaaacgtgtgtatgagccccatatatatatatatatatatatatatatatatatatatatatatatatatatatatatatatatatatatatatatatatatatgtgtgtgtgtgtgtgtatccctcaaccttatcgcctactagtgctcatccttctcctatcttcttatcctcttctcctcgtccctcctactcctcctcctcctcccctcccctctttgtcggctgttgccggcaggcgaccggatgcgagaggacacggcagccgtcggcggcaggcggcagcacctggtgcggcgggcggcggtaggcgcgccgtcggtggcaggcggcaccgcccggcgcggtgggctgcggctg

SEQ ID NO: 42781 - DNA, 1291 bp, Oryza sativa
ggagataaaaaatagagagaaaagaatggcgcacgctgtacatgggcagggagggagggagggaggtttggaatgtttttctaaatgattaatctaacagactaaaataatgtgtcagatgtttatgtcgaaaccgatggtcggatgttttgttttcttgtcagaattttattaggattttatttgatttaagagaataacataatatcttaagagcatttataagatgtgtaatcgacttttaacaccgtatgccgcaaaggagggagggaagaaggtttagggtgttcttttttttttaaaaaaaaagatctaatgacctaatataatgtgtcaattaatccattgaaaaaatgtgtccatcgatttatgtcatatctaatggttgggttttttttttccaaaatttctaagatttttctctaatttaagaatgccatataatagcttagaggcattaataatatatttaatggattttaacaccgtacggggatggggagggagggaggaagagaggtttgggttttttcttattaaaaaatacaaatcgatagccaaatgttttgttgtttttttaatattttctagtattttatttaatttaatagcacacgtggcagtttagaggcatttgtaggatatttagagttacagagcgagagtgctagacctaataggtggaggtctctttgtgatttttttaatgtaaaaataattttgattataatttctcatgaacatagctcgttggtacgtacgtgacgggaggttcggaatgcgtgcttttttttaagaaaaaaatctaaccttctaatataaaaataatagatcaccgatttaaataaaaatcgatggttggattagagtgccacttggcgacctaggagcgttcgtaaggtaccacttggcgaattaaaagtatttttaagatatttaatgaacttttatatataattatctttttcttgaaaattctaagaagtatgtgatatagtagcttagaggtgttcataaaatgtttaatggattttaacaccgcataggggtggggagggagggagagaggttgtgttttttttcttattaaaaaactaacaaatcgatagccaaatgttttgttctttttttaaagattttctagcattttatttaatttaatagcaccacgtagtagttcagaggcatttgtagaatatttagagtcaaagagcgagagctgctagacctaataggtggaggtctctttgtgatttttgaatgtaaaaataattttgattatgatttctca

SEQ ID NO: 42782 - DNA, 697 bp, Oryza sativa
cctgcagccctgggaatcgatcaacatcatacatgtaagcataaggaattctctgaaaatagctgcttaaattgtactcccttggttctacagttcttgacattttggacaaggtttaacttttgtaactttgactatcaataactttaaaaagtatttagtttaaaacaacaagaaaaacatatatgaatttgtctttcaaagttctacaataaaagtaaaacatacatttatttattgtatatattatagtagaaaaacaatgtcaaagatataatttgaagttcgtgccactgtcaaaaacgttaagaattataaaactggagggagtagctgcatatataaatagctataacaggacttaaaagtctgatctgaagtcattgtaattggtactaataagttattatcagtattctatggatttaccaaatagctaatgtctttgctattatgaacactaggaaaccatataacctaagagttccactttatctatctatctattatatactaaaaagtccattaaatttcctataaacgctctcaaaccgccaagtgacaccctataaacactctcaaatcgccaagtggcaccataataaataagaaaaatctgaccatctatttttacttatgttggtagacccattgttttggatggttggatttagttagatctattttatttataaag

SEQ ID NO: 42783 - DNA, 2247 bp, Oryza sativa
  unsure (1)..(2247): unsure at all n locations
tcaattattccgagtacatccttgtcggcaagactgttcccaaggattcggcacccattttttttctccataaatatttttactctcgtgcacaatgagcaattaaaaagttatttgaggaataacaattcaataaagtatgtacataagcatttatcattcaaaccacacactagcatcaatattgcatattggcttaattcaagtatagaatataagtgtcattcatcatctctcataaaagcaatatctaaacctcataaaatatcacgcccgggaaacagagcactagattccatttgtgagagcattatttccttgccctaggaggcaaggtacacataaccaagttgataattaacagagtttacaagtggaagcgtaaacatagtacttttattacatgggcgacaagggcctaacactgcaaagataaacgaaaaagaagaggcgacggccaacacgcgggcaaccacaggcaacggccaacacgcgggcaaccacaggcacttgacgtcaggcatgagctagaagtcgaacccaccatcttcaaggtactcctctgctaaagtgggaaagcagagcaagactgagtacaaccaccgtactcagcaaaccatgccgaaacaatacaaaaataatgctaagggtgtacaaaggatcatataagtatgttggggttaacttgcagcaaatgagcattttatttggcaaacagttggaaagcattttattaaaccacgccctatctctagtcaaattgctaccaagttgcgctacgacgtgaacttgcgtaagccacactatgacgcgaacttgcctaaggggcactacgacgcgacctccttaacccaatcccataggctccaaccatgtgttccaacctaatagacagaaaccactaactttgggtctttgctccgcttgcctataaccgagggcgcggctattcgaatagatttaattctggccagaggtgtaccactttaccccacccaacacgtctcccttacgtgtcgccacgtgccacatgccaccacggcatttgggcggaagctgtcatataacctatcgtccaacgttgccccgaacaaggaataccgacatagacttccacgaccaataaactctgggacaggtggacagattatgcccctaggcgcgactgctaggaacatcaacacaaaacttgggcctcatccatccctatccatgcctttcttgatcaaggccacactaagcgatacactacaccttacccactagacaggtggtcggatggaaaatgctttgcagtcgtgccccgaagtccggtccatatgtcggccgaggtgtgacaagcaaaaccaaacacctcaagcccagccgaaaataggttttgaggtatttcgaagagagagctacttttcacggaagaacaaccgctaaccaacattatcaaatgaggggagaggggagcggcggcgcagcgaggggagagagcagccagcccgggtagataatgggagagggagttcccatgctcaccgaggggaacggaggggcatacggagatgacgatcctgtaggcggcctcgtcggcacaagtggagnnnnnnnnnnnnnnnnnnnngcggtggaggcggcggagcggcgcgatggcgagggatgggcggacgggttcgggaggcgaggaaacagggataaggtggatcggggcttccttttataggctgcagaggaggaggaacggctgaggagcactcgtccggcagccatcaatggcgccagcatgctggcaggcatttactccccaccgaccacgaatcgcagggggtaaatagggagggagaggaagaggagggtgtggggagcattttccctagctccaatggagaggggaatgcagttggcaagcaggccgggcgcgccaaggagggagggaggagacgagccggaggagggaggtggccctgataggtggggcctatccgtcagcggtggtggcgagggcgttggctcggcttgggtagagctaggctagcatgtgagagatgggccggggaggcggcctaggtttgagaaggaggagggggaggtgcttgctaggctgggccgcgaggggaaaggtgggagggagtgggccaaaaacaacccaagggggaggaggggatttaaatcaatttattctttttaacaaagctgacaagggttattgtggcattaataatatttccagtgctcttaaaattcaagtaaaaattggtt

SEQ ID NO: 42784 - DNA, 749 bp, Oryza sativa
ttcctgcagcccagatcgatccccagtagaatgactcctgttcagacttcttcatgtagctccctccccggccagaccagtcaatttgacattattcttggagacaaacagatgaacacaacaatggtatatacagtccagtgtttgtacagtatgacactcaatctaactggcatcctgatttttttttgcaaattttattagcaatgactatggaagtcagagtgacatttttttacgaccaaacaatgctttagattaaacattaaataatatcatgccacagttgttctattgtttcggaaatataatgaacaaactgccactaactctcttttttttttggttgatatccttcaggaaaaaaccccatgttattttgaagatttgagcttagaaatatgtataatttgtcaagaaaaactctagaaaaaacttttactgtggtcaacagttcgtagttattcttccttccaatacacgcaattaactatttttgtgtgctacactacgcacaaatgcagcgtggaggaaactattgagaggtacaagaaagccaacagtgacacctccaataccagtacagttgcagagatcaatgcccaggtatactaacatcatctgaattctcaaaaaaaaaagaaatcatctgtcactaaaaatgcagcatgcagtagttttctatgctgtaattaaccaatgcaacattccttgtaattaaccaatggtttctatgctgtaaaaaatga

SEQ ID NO: 42785 - DNA, 675 bp, Oryza sativa
attaattctatgcctattcagtcaccatgatgcacggaggaacaatggagtatataaaacacatggacgagcatagaccaatcatagaggagacaaagacaatttttttctaaagttcggatcacacggatcctactctccattgaggaactccaaagaactgggtctcgattaaccctttgcctcacttgtgcaaagatcctagaagaagtccaccatcttcaatctaacacccctaggtcattctctagaatttaagttaccaccaagatcaaactcaactttcttctagagagaaccacaagtgaggattgctctactaggactacctctgaaacctcagcacaatttccttaattgcttactttgtttccttgcggaggtgagtaataccttcacaaacttgcccaggacgtccacaatcttgaagaaactcgcgggtgacacttaatcgtctaggaggtgtctctccaagagtaacaagcttcaaatcacagcccacgagataccccaagtgttgaaaccttcctaaccttcaaaactttctccaaatcactccaacaccctcacaatcactctctcacacacacaataatggctcaagatttgggtggaggaagaaaaatcacattgggagaggctagaaacagctagggaacaaagagcaaaagtgaa

SEQ ID NO: 42786 - DNA, 749 bp, Oryza sativa
ttcctgcagccctgcgctagtattagagtagtaattaaaaacttaggtgtggtgtctacgttagagattacctttgttggttgggtatctcacggatttgtcagaggtaggcgacaggtgatgacagccctgaatcccgtcctagtgatcctccatgttcggatacattatagagccatagacggaaccacgctggcagactagcaggagtcggtgcccgaagcaataggtaggaaattaccttcaacttagcgtagataattaaaatatatagaaagtcctctctagccttgctagcctactaacggttgttgtccttggatagtcttagccttaggtagattacacacgttccctgagtttgatatccttttggagtcactcgaaggtgaagtgctacaacgtattccatgctcttgcggatttgtctgtggtcgtaagaaataccaacaatggttggaattgatcaaggattatgatgaacaggaagagtgttgacggtccttaaatcataatatctgaccattaatacctgcatataatgaaataaaatatgatatccaacttagtggtaggggttattactaaccaattctactagtgttggtgaaatatgtatatgcagatatttttaaggagaaaacacacccggcatgcaaggaaacacacctccggccaatcagatgcaagcacatggattggagggcccacaagtcaggtgaaaccgcatggaatgggtcataactgtc

SEQ ID NO: 42787 - DNA, 638 bp, Oryza sativa
ttgaaacccagaagttcctgtgcttgaacttcggaagttccgggcagtataaagctacctggaagttccggtgttcttcaccaagaagtttcgggccccgttaaaatttgaccgctgcgattatttttagtgattttcaagaaagcctatttgcccccccccaccctctaggctacatctttgcatgttgacctcctacccatgctaacaccatccaccgatctactcgatctccggttgctagtttcagaatccgggggatggcccctcggtgagatatgccgggatgccgccgaggtcggcacccttaatcactggccgccgcatcccgcctcctctcagttcatccttacacaactatatcttctcctcatttttctaattctttatgagttaatttgattcactaaaacttggaaaaactcttgtggaagataggttttgaaattgataatagttgtttcttttctccttaacaaatggttagggtttacagtgaaattatatacacatattgtgatgcaatgtaaccatgataggatagtatagttattggcttctattttatctattttacatcaaattatatagtatttcagttgaaagttaaggcaattattttattcaccatctagtgg

SEQ ID NO: 42788 - DNA, 763 bp, Oryza sativa
ggctctattgtactattttgtatgctagaattagggagagagtagagtagaagaagtcggaggaattctggagttgttcgtagtccttctctcgtttctgataagtaccctgctttaattgaatatcattccgagtatttaagatttattctgtgagagttacctcttagttagttcctaatcaacgtacgggatcactgatcactataatccattaatatatagtggttgctttagtgtttagctagcattaaagtagttattaaactgcgtagacgtggtgtctgggtagttaattttcagtgtttgctttgtatcccacaataggtttgaggtgggtgtataggtagtgatatccctcaaaacactgaagtcctccctatccgggtacgttgtagagccatatctgggagcagtgggctggccagcgcccgaagtacctttttaggatcaaattgagctttctgtatacatcgtctctcactagtaaatcctttctaccgttagcctatcttagcttcgtgtccttagacgaacctggtgaagagctgacacacacgttccctatggaaatcaataccttggaatactcccgaatgaagtgttgcatcggtatctttcatgtgcttgcggattctatctgtaaggttaagaaataccaacaaagagctattgcaatatgactcacgcaagcccgtgttcagcaatgctatgcagggacatggaaaggttgaatcttcacatcatccaccaaggctctctg

SEQ ID NO: 42789 - DNA, 696 bp, Oryza sativa
ttgatgcggcatcaattgtccactttcctccatcagttcttgcagaatcgccgttgtcgcccacggaccttctcttgcagaggaagaagaagcagtgggaagaggggttttgatccagcttcattccttatgagggaggaagacaataaatttccaccagccaagttaacttcagttcccttgtgtttctctgcgtgtagctaaattgagtgagcaatctgtatgggcagttcaggggcattactaggctcagcgtgattaaggcagcacagagacttcagtggtatggagtttaattcctgctggaactggtgggaagcagacatttgataatggaactccaggttcttcttagcaaggatcacatacagtcctttcttgtcttttttgtgcagttgaagcagttgttggttggcccaaatttagggagtgtgctttggccagatgggccatttgctgcttggaaagctgatgggtggctttttgtgccgcaggcaatccatctatctgcaggtgaatattttctagggaaatatgcttgtcctttgaattggcttcttccacaccctcccaacagtgtgcacttgagtactttgttgacaaatttgcatagggcccaccagagcaaggactttgccctccaccgaactgttcacctgtcctgtcaggagcgttggaaggattttcggggtgcag

SEQ ID NO: 42790 - DNA, 732 bp, Oryza sativa
ctgcagcccccctcaacccaaaaaccaataaataattattatcatcttgtagtttggatcatcctaataaatataatgcatgcatccaatagtattagataacatgagagtagaggatttaaaaaagtagtaatttaatagagaaaatgtcataattaattgcatgcatgcattatattatggaactctaagaaaagtggttgtgccttatattatggaatggagggagtaagttacttatgatcaactgactaatcttgccacagaattatttctcttagtaaataaattatatcttttagtaaataaattattatttggaccggtgcaaattacttatgacaacccttctatcagtgactaatcttgccacaaaattaaatatgttacttacgatcagcttattaatcttgccacaaaatctcttagtaaattcttgcagtgaataaattactcctatacttttcttctgatatctttttttagtaaataaattacacctaggctgctggagtacaagatcttgtagtaaataaattactcctatacttttcttctgatatcttctttcggtaaataaattacacccaggcttctagagtacaagatttaagaacatactgttctaaccacaaaatttaataaaatcattccaatcaaggaattgttcgaataagattcagtattatatcaatagtctaatcacatatgcaatgcgatacataggtagaa

SEQ ID NO: 42791 - DNA, 965 bp, Oryza sativa
caaccccagcctcggaagacagtatttggaattggaggctcaactgcttctctcgaactcctacgtatagcacattatttatgggatagttacctgatgggcctgatcttctgtcatagtgctaaaagatttttggtgcattgaacctgttcgatgatatggcattatcaatgatgcaaacaccaattaaacttatttagctattgagttgaacatgatattctgactagttcatgccatgtacgagcagaccatggacattcagcattctattgaatgccgcagaaactttctgctaccctgttaatcaagcaaagttgtactccctccgtcccattataagtgcaaccataagtttccgcgcctaactttgatcgttcgtcttatttaaaatttttttataattagtatttatattgttatgagatgataaaacatgaatagtactttactcgtaacttatgtttttaaatttttttaaaattttttcaaataaaacggacggtcaaagttgggtacgaaaaaccatggctgcacttataataggacggaggtagtagtcaatagtaggaaagtattacaccaatatgttatgccgctggatttgtttataaaacaattaccaatctgtttctctacattgccatgcctataggattttaaataaatttgtgctaacaatattttcactggatttagaccaaagcaatgatccccttcatttatgttgcctcttttccaattaaaggaattaactaagttctgaattttcaagagactaatttacatttatggatgataatataattttgatagtttatttctcatgtttaaccttgaatcatttgtactaaaaacattctctctatcctttaatagtcccggcgctgatcctccatcaacgtcgtgactttcaaccccgcagtcaatcgccggaggtctcaccacttggcagtgccccgatc

SEQ ID NO: 42792 - DNA, 2416 bp, Oryza sativa
gccgccgcctcgtcgcccgtcgctggccgccggctgccggactcccgcctcccccacccgtcggctgcgctgcccaactgaggagaagaaaagtgagagaagagaggtggagaggctgacatgtgggacccacgtgggtccgatgttgagtcagctactacgtcaaataaaaccggagttaaaactaccaaggacctattttgcactggttttataagttgagagatgtgttgtatccggttttgcggttcaatgacgatcttgtaactcgatgacaagttaaggcatcttcggtgtactttttccattcgtctacaactggctaatgggcttagaatacgtctgaattggcctaaatatttaggtccagaaaaggcccattaaatgttactgatctgacattttcacaaggaataagttcacttaaaatcccttttaacggatgaaccaaatagcaagtatatatagtccatccactgtatcattattatgccgtgttaactttgatctacaatgatcagttttgattgacgtaggaagtggaacccacgtgggtcccacatgtgagccatgaaggacgtctcgttggtacggtgcggattacctgtggctgtgggcgcgagtggtgcacgcgccgccgtcgtgctttcacccgcgactttgcaccgtggctttgcgggggattcctaacgcggcggattgtttaggtagcgtaacagactgttagttaagaataatgacagtaattaaggaaaaaaattattttgagatttttttcactaattgattgaaaatttttaagttatatttgaaaattttcaactcgagatttgaaaactttcaactcagatttgaaaactttcaactcagatttgaatatcgaaaactttcaactcagatttgaaaacttttaaaacttttaagttaagatttgaaaattttcgactcaagatttaaaaacgttcaactaaaaacatgctaaagattaaaaaaataatcagaaaaaagtggggaaaaaaagcgaaaaaaatcggttaaaataaaagggcgtggggaggaggcgcgcgcgaattagcaaatccgggctttgcacgccgcccaacatcgctatctcttcatcgctgccaagcatccactgcccaaccatagaacacatcccatccagaaattcgcatctctgatttgactagatagcacccaaacaaaacacaaatcgaaactcccctaaatgctccataccaacaaactaaattcacgattcatctctactattataaaatctgaagatgttttcgtggtccgtcatccatgtttgagtcggttataaataaatgatataaaatttaaagatgttttcgcggtccatcatccgtgttttgagtcggttttgattttatattttggttttaatctatatctcttctctatctctactattataaaaattgaaaatgtttttactgatattttagtatgttattcgtgtatgagtcggtttttaagttcgtttgctttttaaacttgtcaaatttgtccctcgcaaaaaaaaaacttgtcaaatttgtcaaacctcttatgcttggtacactctaatcctttcccgtgataacttctcaaattcactccagaatacgtttggcatacaaatcaaagaatagaggaaaggattaggaagaagcaatctagaacaagaagaagcaggctattagaggctagagaattagagtttgaatcagagaagcattggagaataggagacgaggcaaacgcctttgttcgatgccgtgttctgtggctggcagttcctttgtactcctgctaatttacttgctcccttttatgtgacttgggccaagcccagtttaacctgcagaccactatccagcccatcgtgtatcacatcattgggtacatgacatggcgctagctcttcttcattggcatgtaatcttaatcttaataataactaattaaaatatttatatttttccgttcgtcacccctctattcgtccgtattttcgtccctccctcaaattccaatccgatttcaattctgtgaatgatcgaaaaaattgaaaaaggaaaaagagaaagccaaactttaacacccgaaaacaccaaatatatcgacccaaaacaccaaatacatcgagtccgtcgccgccgctcgggattgggttaggcgccgccaccgttgccacctaccggtgatgggggagggcgccgccgccgttgccggtgttaggggaagacgccgccgcactgccggtggtgggggaggacgcagccacgccgctggtggtgggggagccgctgtcgccgctcacggggggaggacgcccctgccactcgcggaggaggacgctgccaccgctgcccctgctcgttgccgctgccgctcggggggagaggcg

SEQ ID NO: 42793 - DNA, 763 bp, Oryza sativa
gtgtcctatccacgtattttcgactccagactagcgtgggttccctccataaatttgtttcattaatggcagagagtagcgttgtacagctagacataaaacacgctcgtcatcccaaccggcccggtgtcacgcccgcacgtcctgaaaaagatagttgtgttatatttagacaagcttctcgaagatgtctttgatgaatatacatataacatgtctccacgctcctctcacaaaggactccagaattccgatgtaggcagagatgagcatgggacccgggatagggctgggcccaaggtcggtctttgcttattccccaagctgtgtatcttgtatgtgtttctacactcctctcgctgaagatcgtaggacgtacaaggatagagtgagcctgggacccaggacaggggtgggtccgaagccgacctctatttacattcttaagatgtagatcttataggtctctacgcttctctcactaaggatcgtaggatttacaaggacagaggtaagcccgggaccaaggacagggctgggtccgaggccatcctctgctaatgtagacataaggaagttgcgattcctcgtgctcagagttttgagtcattaaagattctatatgtttcaatactgctctttagcagtggttcacatatcgacagaagtgggcctggggtccttaaacaagccgaccctaaatctatctcttcctattattactaagatatatttcgtgtaagcttgcatgcctgcaggtcga

SEQ ID NO: 42794 - DNA, 1052 bp, Oryza sativa
attttctttaaccaggctgaccgaagtattggagccgaagtattggagtccaaaaattattaagctaagggagcaaatattattaagctggaccggagaggcagtgaggaggccctcccaggagggtgaagcagcctcctctagattctgatgagacgagggccgcgactgtggccttgactactgcctactggtgcgatgacggagaggggagaagcatgcagaggccgctcactttctacatcgcgtcattgttgttggttcgctacgactacctgggacctcgagggaaactgttttaaacactcgggtggacgtccacccaagagattagaatccatcctcgggacctcgacttatctgcccctgtccattcgctctactcggcttggtaaaaaaatcccaatttttcttcctgtatgtctaagtttgtaaatataattgttttgctgaatggagatatatcatttctacaaagaatgtcagtatgtaggtagaaagagtgaatgttgttgtgtattttccagtttatacctactaaaatctgaataagccaattggctgggcgggagtatataatttttggatgtaatgtacctgtgcattttttccaaggttaatgtgcctgcatttctttaaatatgccgataaaatgtaaatcttttggtgaatggagatatataaatatcagttatagaatgtcattttattgccagcctatctgaaatactttatgttttctgagcaggacaacctatctgaaatctattttctccttgttcttttggattttgagaggcaggacacaacagaactcaggcagtggaggcatgacatccagggccgagaggttggcggctcagtagggtagctgaatggcgattggcgacaatggcgttggccaagtagcgccacagcggcatcaaggagtgctggcggtcaactgtgccaggattcgtgcaagtatcgatccgcgtcgtcggccctaattagtccttgcatcaatctccattagcatatccatcagtgatggtgctagggggatccactag

SEQ ID NO: 42795 - DNA, 576 bp, Oryza sativa
ggcggccgctcatggctagtggatccccctgcacctcaacacctgtgaaaatagttgattttcgcaggcgcaaaacacgtcgcctgtgaaaatagcttcgggcgctaaaaaaaaaaggcagccaccgccgtttccggcggtagcttcccgttcccaattcagttcccacccattccctatccaatccagtgaatccaaattcaacagagaaatcgccagtttatccagttcatccaaaatcaccaaatcaatactagcaaagaaaaaaaataaaaacattcctaaaataaatcacggccccgccctgccatcatctgccgccgcacgtccgcgccgcgccatagtccgccgccgctgccgccctcccccggtctccctccagccggatctgggagaggaggggaggggaaccgcgccggtcgccgtcgtcgtcaccgccgccgccctcccgggcctccctccggctgaatctgggaggggagtggaggggaaccgcgccggtcgccgtcgtcgtcactgccgccgccctccccggccttcctccggccagatctggaaggggagggaaggggaacc

SEQ ID NO: 42796 - DNA, 678 bp, Oryza sativa
agaattttgtaacaaaacttttgtatgtacatatcattttccttgtacttttgatcatgcatgcatgtagattaattggacggaaaaatatgtagtgcaaaccacatatgtagtggaaacttggaaaactaccactgatggagaacccatttttactctcggttggtaacccctttagtcccgattttctaacggggagtagcaatccgggactaaagatagacatctttagtcccggttgaaataaccgagactaaagagagggatctttagtcctagttgctgttagtaaccgggagtaaagaggaatagcggcagtaccagatggcccacttttcttttctttttccttttttttctcccgaatcaagtggcatgtaaatccccaaatcaaaccccaaatccctgaatcaaagtagcatcccaaattcacatcaccaaatccacatcacaaatcttaaagttatttatacacataaatcaaatatatcacaaatcctaaaaaattacacacaaatcaaatacatcacagatcttaaaaagttacacacaaatcaaatacatcacagatccatacaataaatctcaaatttatacatccatgtgaatcacaaattatttaaaaaaacaaacaaagcccctgccgccgctcgccacggccgccggggctgcaggaat

SEQ ID NO: 42797 - DNA, 505 bp, Oryza sativa
agggcatcctcccttctaaggaggtcccgctctcctagaataagcaaggtggtagtaaactccacatgcatgccatcccatgaggtgggtttttgtgattttccaaagaattaatcttcgaatgggccttagcccatctattaattccaacaaacctagcaaatggaccaggtatcatcaatctcagtccaatctatttaatttaaaatataaaactattttaaaagtaaaataggtaaacattttctaataatggataaaccatccaagacaatagctagagctcaaaggcatattagtacaatagcctaggctgtgtttttttcccatgggttctgacccatttccctcgtttttcgcgtgcacgtttttcaagctgctaaacggtacgcgttttgcgaaaagtttatatcggaaagttgttttaaaaaaatcatattaatctattttcaaatcttttatagttaatacttaattaatcttgtgttaatctatcgcttcgttt

SEQ ID NO: 42798 - DNA, 1560 bp, Oryza sativa
agatcgctgcctgccgttgcgctttattaacgccgacgcgcattaaaaaaaattataaaagaaattacaaaaaatgttatttcctgtgaaattgaagaaaaaagagtgttcccgtgctgcggcgtctcctcgtgggtgacgacgatggtggactgggcgggtggacccgctctacggatgggtggggatggttgagtgactgacaggtgggcccgtgggtgaggtgttgtgaacttgtgagaggggtggtgtatggtgggctacgttcatggaggaattgggaggttggagtgtgggcaccagctatggtgggcgggtgtggggcccagtgcgtgggccacgcccccaacttgaggctgcggtgggaagaggaggaaggccacgtcaccggacggcggcgggggaggggggatttgctgccgtcgccgtcggagtgtcgttgccgccgcagttacgactcggaaattaaaatttgggattaaaatattgcttatttttaattgtgaatttcagttattgttaaattaaaatttgaaataaaaaataaaatgaattccaaaatttaaaataaataagagttcaactaggaatacaatttataaatagctaaaatttataattaaaaaataaaaactattgaaagaaatgaccatctaaaacacgatcaataaaattcgaaataataaataaaataaatttagaaaatagaagaataattataagagtttatgtaggaatacaatttatataaataaaaaatataggaatgaaaaatatgaaattttcaaaaaaaaaacatctagaacagtaatgacaaatggcaataaaagatgggagaaggtaatgaagcagggtagtggtgattgatggaacatctaaaaactataaacagagtcccaaattgaatccctatgatgattaagaggaggaacaacgagcatgccattaagcagcaccagtcacgacgattagtggaacttctggaaagtaaaaaaataaaccccaatgataataatgttggacttttacaatctcaaaagcaataaagagcggaagcagcgggcaagctgtagaggagtataatgacgaagccgctaatgattttactagacttatagagagtaaaataataaactcaaacgataattatgttcaatttttaaaatcacaatgacaataaatagataaggcagcggatggaccgtagcggactatagtgatagtgtttgacgagacttctaaaaattataaaaacaaaacccaccagaaactaatgaattatactatgcatgtaaccaatgaggactaagatagttgttcatatttcggtcaacaatttaatttagcatgagactataaatatgaccatctcttttggaaagaaaaacaacataccgaaatgtgtaacacttttggatagagtgaataaattgacccttttgataaaattataaataagttctaaaagtttttctatagcggacctaaagcatactccatccgtcccataatataagggattttgggtggatgtaacacatcctagtatgatgaatctgg

SEQ ID NO: 42799 - DNA, 1709 bp, Oryza sativa
cccaaaatctcttatattatggaacagagagaatacaaaaggttttgttaaatacaaccttagagcatggctaacagttctatgtctatttgcctaaggattggagttctcttcccccataaaattcggtcctcacaagttgggagccactcttgtcacaaaatcctcactcgtagctactttccttgcactgagcggagaggagaggaattacgctccacccacaggagatagcccaaagtgtggaaagggaggttggcccttttctttattattatttagggctcaaattagagtatatttggggaagaataatatttccatgtcttaaattctccttattagaaaagagatttaggagattgagtttatgtgaactgttggacatgcttacgcggacagcagatcatcttacatgggcacattgctatttatcctttaaaacaatagtatcgattgacatgtagagagagaaatgaagatttggctggctaatgtttatcttttgaacgaaaagagaggataggaaaaggtcatattttgtgcattgttgtctcccaacgttggggttaacatatttggttgacttggtaactatatatgactacacagaggctaaccattgtaactacaaaaagtttcgaatcttcaaatataaaatatttcgcactttataaagaaaagatgcttttttttattgtaacagttcctttaaactcctttcattcctaagactttttattctttggctcatgcattacattgcaaaagtgaaatggacattaggggatattctttggctgaagcatcactttccctaaagatgtctttactaacaaaaacccgggataaaggcaaaataattttacacaacttgcaaacacacaaatactcttccaaacggtttaataaccgcgttgaccactctgacatcctaacccaattaaaatattgtctacgtgacctatgagtgccatgtgcacttgattaataccaccttgatagttaaattaagagtgaaatcaacttataagacattgttcgttatgaagaatgaaagtgtaagtggggtgctacatataagtggtgcacggttatgaatggcaaaagaaccatcaatgtcaaggaataaagaaaaccttacatatagcttgataacattagacaaccatgcaaaatttcaataaggagctctacttcatttgattttgagatatgaaattgccaaattgcagagaaattttttttaggaaagtgcttttttcaaaattagttaatttcatatttcacaaacaaagtcaagtttgcttttgagattttgtatagtagtttgataacattagacaaccatgcaaaatttcaataaggagctctacttcatttgattgtgagatatgaaattgccaaattgcagagaatttttttttaggaaagtgtttttttcaacatcagttaatttcatatttcacaaacaaagtcaagtttgcttttgagattttgtatagttgcacaatataatgtgaatttttttttagaaactttgagttttatggttttcacctaagttgtggtttgcaaccaaaggtttcttatcgactcgagatcataaaccattcggtaaactagtcaaggtcaaactggattttaaatttttgataaaatttggtcaaatttcactgttagtcaagttttcaaacagtttccgcgaa

SEQ ID NO: 42800 - DNA, 1272 bp, Oryza sativa
  unsure (1)..(1272): unsure at all n locations
tcgactagaatcaaaactggcagtgattccgtttctatgatttggtctatcgagagatgctagctggacaaaagaaaaaacacaatttggcgacaattcaaactgagatacagaatttacagggacggacctaacatggggcatcaaggttcagttgaaccccaatattttgggtaacaaacaaactgttattagtacttgaggttaaggcaaacagtaaagcttccacatacatcagagaagctaatgttaacacaaattcgagcaccgtagagtgcgtacgggtgctcgtcggcgagcatgcggcggagcaagcagccggactcgcgaggggactcgggagccgaggccgaggggaccggggagatcgactagggcgaaacgcaactgagtcactcagaagctgccaattacgctggaggggtgtccgcggggggttgagcgccacacggcggcgaggcgaggcgaggcgagcggccgtcgttaggacggaggggtggctggcctcgccggagcagcggaattgggaagataaggaggtagggttgcggcgggaattagggcttaccacgcgacgtggagaggggcgaagcggatctcgcggcggcgggcggcgatgggagggagggagggagggcggaggagacggccgccggctccccgcctccggcggttcggcggcgccggagccggagcgggcgggcgggaggggcggcggcttccgagaaggcacggggaggagtcgtggagtcgcggtcggggggagagagaattccgagtgagtcgatctactcaattcttcccttcccctttttaaaaaaaaaaatattaaggcgtccccgcgcaattactgccgcgacccaccgcccttcacgatttctgtcataattttttcggctactcgattattattgtcgtaggtttatttatttcaccaagggtgtgttacaccaaaattagaagtttaaattggaacgttgtgatagaaaagttgaaagtttatgtgtgtaggaaagttttgatgtgatggaaaaattgaaagtttaaagaaaaagtttgaaactaaactcggcccaatttaaaaataggggtaattataaaattgagtaaattgtatcggcggtacacgaacttgttaggtgggtgcaatctantgtatgaacttgtaaaatgctcattttggtacatgaacttatcttgcatgtgcgaactaaggtcaaaaggatattacatgactaattttgttgattgaggtgctgattaggatactac

SEQ ID NO: 42801 - DNA, 1368 bp, Oryza sativa
acccactcctattttgtcaaaaagaaaacattggacgacagaagttctgccagatatattataagaaataaagaatgccattgttacaatcaacagagaggaaaaaagacatgtcagagaccagagctctcaaaacagcgcaccatatatatgcatcgccttacataactgcaagatttcttttaaaaaaattgttaagggcccctttgaatcacaggattgagaaaacgtaggaataggaaaaagattttgataggactgtaagtgtaaaacagaggattgcaaatacagaaaaaacacaggaataaccgtttgattgaaccacaggaaaaacacaggaattggataaaagatatagactcaaaggaaagttagcaagaggttgaagctcttactaaatttcctccaaaatctctataggattgtccattccataggaatttcaaaggattagataggattcaatcctttgtttcaaagggcttcataggaaattttcctataggattaaaatcctctaaaattcctatgttttttctccaaatcaaaggggccctaagagattaggccctgttatatagtcttggagtcacaaatccaacgaggtggtcaacaaaaactgagtacgtacctattaagaaggtgcagtgttcatgaccatatattccaccatgcaaattgttgcaactagatttaggattgggagttatcagaatctcgcagcacctggactccatgtatttaactgcattatatcgatccaagttgaacattgaaggtcatttggtttcgccaatatagatgggtggcgcagtaagagaacaatatggaaaggttcatgcgcaaactacaaggagacaagaaaaatttgggcaccgttggtacacacaacgtatatgcgcacaaaatttttgaagtgatgtccatgtttaagttcccaggcaaaaaatagccattgccacaaaccaaagtatgtcatctaatctccatttccatgtatccgcgacttgtctgaccgaaggaaaaatttggagattgagtgaatctagcttaggtcctgtttaagttcccatgcaaaaattttacacccggttatatcgaacgtttagacacatgtatggagtattaaacatagataaacaaaaataactaattacacagtttgcgtgtaaactacaagacgaatttttaagcctagttagtccatgatttgacaatgtggtgctacagtgaacatttgctaaagacagattacttaggcttaataaattcgtctcgcagtttacaggcggaactgtaatttgttttgttattagtctacatttaatacttcaaatgtgtgtccgtatatcggatgtgacacgccaa

SEQ ID NO: 42802 - DNA, 5619 bp, Oryza sativa
gtcttcattagagttcacatgaaaaaattatgaattatttttaaatataaagtctttagaccgttctatttgacccagatgatattcaaatccaagtttagagaccggggtgacacaactgaacaagttggaggacctaaacgagtgatctgtaagtttagggaccgggatgacacaattgaacaagtttgaggacctgaacggtcaatttgcgagtttagggaccgcgatgacacaacagtacaagtttagggaccggtgatggactttactctatttttaatttcttctaggataatcggtttagtagtacacccccgtcccaaaatatagatattttcagcatagtgacttatctaaatttctacatatatcacctcttatcaaccaatcataaccattcttcattttttttttcatctactttcttttctcagtcagtcataatatttctacaaccattttactttcttaatacacgtgtccaccaaatactagcattttgggatggagaaagtaatatcgagtgatgtcggtcaacgccttgctgatgttcgctccaagcagaagaggaggaaaagtatatcatttttctcgcgcatgctttctaaaccggtaaatggtgtgttttctaaaaaaattctatagaaaaattgctttaaaaatcatataaattaactgtttaaatttaaaataattaatactcgattaatcgtacgctaatggtttacctcgttccatagccttggccactcttaaggttgagtttgattctacgttttctcaatttctactctctcggattctacatgtacatttctcaaactaaattgtatgcattttgcaaacaagttctatacaaaagttgttttgaacaataatactattccaattttaagtgttttttctaatacttaattaattatgtgttaataaatcgctcccttttacatgcatagatgattggaaaccacacatttattgaacacagcctctaagttgttgtttcaagggatagggtaggaaaaaattttcgtggcaactcctatgctaacaatcggactctgagctctataattttcatgtactaaaaatttcacatttaatatttttctaagaaatcaaaatgaggtgtgataaattcaatagcaacttacctagctctaattcggtggtaggcaatgcttaaagccatacttgtgtatgtcaaaggtccaacgagcactattgtacatggctgtatgagttatcaaacgttagcacataattattagcacatgcttaggttttttttttctttccgagcgactaggaattgggcgcttggtagattttaaaaaatagacactccactcctacccactttccctactaggtatgcatagctctaacatattagtctccctacgtcacgcatctgcacattgcatgcatgcaccaaagtatctctccctatctcttcctaattaaacattcttttataagctttaaactatttttctcttaaaccattgaacataccataaattaattattacactattataattattataattaaatatttatatctcacatgattatattttggatgaaaaaatatgtctaaataattaggcgttgtttaactacgattagaaagttgttccatcacttgataaaaatattttatttcactttacaaaatattttagagagatgcagcatttcaaatattgactgcaagaccaataactactatatgaaacatttagccactatataaaacattaaacattgagtcccaacaatgaaacaatcggaaaaataatatctaaaacatacaatatatttgtaacacttgataatatagtgaaacatttttacatcatgtatgaaaacattagattctaactattgaaacaccataaaatacttgctgaaacatccaaataaaaccatatgcaacacttaaaataatacattaagaaaagctaaatatttttttatcaaaatataaccatgtgtggtcttgtttcaaagatttaattacaacaaatttaatggaccaaacggatcttagattatagaagtaagttaagagaaaaaatagtttgaaatttatcaaaaaggtggttatatatatatggggggaatatgaagggagagaaggaatattgggagagcttacggctcggacgtccggcatcacaccaaaaatcgaacgtctagccaggcaacgagcgcatgtgagaacgaaccctgtcactgtaacgtatgtgcctagctgtttcttttcattctttcctcctctctttaaatatttttttctcttaaattacttatccgatctacgatccgataacaccgttgtattcgttgaaattaaatctttacaataagataccacatgattatattacgtcaaaagaaaaacatgtgtttcaaaccgttagaataaaatgtttcatacgtgatagtgatatgtttcaatatgtgtcttcggtgtgtttcacaaaaatcctgaaactacctgctactactctctctccacctcatgcatgcatacatgcatgtattttagcaagcttcaaaatgatttttcttttaaattacttattcgatcaatgatccgaccacaccattgtattcgttgtaattaaatctttacaacaagatatcgcatgattatattttgataaaagaaaaatatatgttttaatccgttaatacttgttgttttatatgtgacagcgacatgtttcaacgtgtatcttcaccatgtttcataaaatatttaaatgtttcaattgctgattttttttcaccatatataacttaatgtttcacttattggtcaacgctcgcccccgcactgccgctcgcccacgttgctcccgtgccgcgttgcttgcctgcactgcatgtgttgcttgcgctgctgcttgcatactctctctccctctccctcctaatacacgtgcctaatttttcctcaaattttaaatatttttctccaaaattatatatctgatctaaatttcaattataccattaaatttttgcacaaatacttaattatgttgaaatatttttaaatcggacgctacaaatcgtacgtacaatatttttttcaaatatcgaagctgctcctcgtctgtatgcagggacgcgttggagaagcgaggttgtcgcacgcatgcatgcaggagtagagctggttgccaaggtggcctgaggcaccattactttctctctctcttaatcaaactttaaacaaaattttaatctaaaatatatatccaatctataatttataacaagatctcacatgaatatattttgataaaaatatatatgtgctctagaaaaaacaaacttatgttgaactatttaaaaataattctttcatcacttgtggagatgtttcaacccacttcacaaattattccaaagaggtacaacatataaaaagtattgactgcaacaataatcattattacttgaaatattaagtcccgactagtgaaacatttttttatatttagattgaaacatcgaattataattattgttgaaacataaaaaatgtatttgctgaaacatataaaaaaagatagcatgaaatattgctaatgcattagtgaaatatcaacaaagtcttgttggaacatttcagtaacaatgtgtgcaacatttaaaaagtaaaataaaaagtcatcggaatgtagtcatgtgatatcttgttataaagatttaattgtaacgaatccaatgatataattagtttgaaattcggataaatagtttaagagaaaaaatcatttaaattttgaaacatgtttgcatgcatgctccgttggcttgtcagtacacctaaccaattatttcaccatgcacctacactgttgttcttttagattgagacgtccgattttttattcctagccgaacggccaatggtaagtatttccgggaatattgcacactgtacaattgtagtgctagggggcaacatgcagagaatgtatgcagcagtaattataacgaatacaacggcataattatatcataaatcgaataagtagtttaggtaaaatattattttgaaaattggaacaaagtttttttatcacttgggagagagtaagcattcctaacatgtattgatgcttgctgtattgggcattcggatttttttacctcaagctggaggtctgaggagaagacttctccgctatacagtatacactactgcaattttcttttgtctttgacaagaaactagactagcaacacgttgagtgattccctttgagagaaataagattacgaactttctagatggcaaagatattagaactcctcgttatggtattatctttccatcgagaaacttcgtggcggcgctgccgctcatgttcagatggcttttaactactgcagcatgatactaccctctaaaaagcaatggttgtcgtatatcagaaggatatatatatagggggtgtttggttcaatacctaaaacaatcataaaaatgtttggtttattgcatggaaaaacaaaatattttggcgagactagacaaaaattaacttggccaaaatcttaatatcaaaccaaacgacaaactttgctaaaattttcacattataaaatttttaacttgccaataaagttaagaatggctacaatctaggtccatactcgagtagtacactgcactgtcgtcacgactgaatttctagaaagaaaatataaatcaaccacctcttgtggagcatccagaaagttcattgctgtcatcttcctcgatgagaacacaccattccttgtatttattataggttccacgtattattggtttggttttttttgttagatgtaaagacgtttgtgttattggttatcctcacaaactaagcagtagcaattcttcattgtatctggacatatataggcacatttttttaaggatcacccgatcaagatatattgctaaaaatatgctagtatattggagaatacttctgatggaacgtccgatccgaacgaaaagatattgggtgctctcccccacactcccagctgctacgggtgacctggccgctttgtatagtgctaatgtatgatgctcggtatattaacaatgtacgtatgtactaattaatcatttttctatattaaatcatttatcctatcaacgatccgattacaccagtgtattccttacaattaaacatttaattttaaattgtttatatgtgactggccaaaatcttaatatcaaaccaaacaacaaactttgctaaaattttcacattataaaatttttaacttgccaataaagttaagaatggctacaatctaggtccatactcgagcagtacactgcagtgtcgtcacgactgaatttctagaaagaaaatatacatcaacaacctcttgtgaaacatccagaaagttcattactgtcgtcttcctcgatgacaacacactattccttgtatttattataggttccacgtattcttggtttggttttttgttagatgtaaagacgtttgtgttatcggttatcctcatcaaactaagcagtagcaatgcttgattgtatctggacatatatatgcacat

SEQ ID NO: 42803 - DNA, 1426 bp, Oryza sativa
atcttagggaattttgcctacagaatgatagtagatcatacgaacaaacaatgtacaaaatcatgacagcaaaaagaaaacaaaaatgtacaaatgaaatatactccaaccagatgacataccttcaataaattccaaattgatgacatggttccaggaaaagctttttcaatgactttccacttcttcaccttaagggggacctcttgtcgcacacagacagtgacctcacttttaaagacacttgtgtgcctaccacagacttttccaaactgtgcagcaaattgaatgtctagcggcacaccccttgctctcagttttgcaagtgttccattaatggtgagacccctacctttcctacgtttgagacctaattgaaggaagaacttttaatttatttgcttgtgaaggaatagattaatgaagtgaaggtaaatatgttaaatacctgtgtttccggttggtcccatccgtccctcattcctagtattgggtatgacttgtcgagtagcatcatccgaagtctccatctggttcacggacggacgaacttgggaaaccattttgacctacaaaataagaaatgagtacaaacagatctactacaagattacaaaccaaattgactaagatagaaatccccacaaaacaccgatatactattagattgagaaccaaattaactaagaaagagaatcccaattaaaaatggatattaagttgcatctaattaggaaattaacacaaatcataaatgcggaaaaacaagacggagagagtggacgccagaaggggcaggtcatatccctgcgacgccacgctatcatcaataggactgcagtgatttggagatgatggttgtgtgattgtgtcctggcagtggtgggtgtaatctctcaaagatggatgtactctagggctatgcagtgaataaaaattggggaatgccgaatggatcctataggattgcgaggatagcaaagagccatagtatatttgtttctttacctttgactgcaagtgtgtgcagggatcgagaactctagatgcgaatggattgtactatatgggcagccttatatagcgaggtaactctgtcaatttggcgggagtaaaattttgctggcaattactttttgagggaaagtatgttttgctggccgatttatgcgtgcgtgcataacaaattagtttgtttgtgctgatccaaaatatttgttcaccagcatttgttaacaacctctcataaacaaatatggcaattgtttaatgaatcaataacctgtggagtgaaaaaaaatgatacacacatgcacattaattgttgatgtgggttggcaccagccacgtgtacctagagatggacacgtttagtgttgcacacatgctcagctgtaatttatccctttcataatccaggcttcag

SEQ ID NO: 42804 - DNA, 1445 bp, Oryza sativa
ccgaccccccctcgggggaaatcaggaggagggcggacacctcaccctcgggcccgacgtccccgaaggtgccaggccacgtgggcggttgcgtctgcctcaagcctctggtcatgatactcccggtcccatatcaccgacaattatatatgcatatatatgtattgaaacatatatatgcatatatatataaaccatgcagcaacagggccatgaaaaaaaaaggtcagctcgatctttagtcccggttggtaacatcaaccggtagtaaagatggctcagccggccacgtggctaagccatctttagtcccggttggtaacaccaaccgggagatctttagtcccgattatttcacccggaactaaagatagcgatctttagtcccggattggtagtcccggtttggaaaccgggactaaagggggattacgaaccgggactacaaacgctttctccacagtgctttttgatagcaatcacaacgtcaaaatattcaacggatagagggaactattagcagtaaaatattattttgccagtacattgaataacgaaagacctaatcagttttattccagtagttccaaaaggcagcagagtctgtcacggacatactaacaggacaaagcgtcaaagcaggcataaagatgtttgattcagtcagaagaattcggaataggctatccaataaggatttaaacctttatacaaatttgacagtgggaaataatttccttggacagtaggactgcatgcattctgaatcatctaaacatacatcaatcgcattcaatcattttaactaataaatccataaatgtaggttgtttcatttttataattagtacaatgtcagtaaaacataatccagaaaacaatgtttgacatcaacctgacacttcatattccccaaataaccacacaacttgacaatatgggcaggaagatttcaattccaaaatcagcgttacacatctagccatgctaaacgacaacatatcattgtactaaacggcagaaacaaagtaaaatatgaataatgacagcattagacataaaactcgtcgacaacacttctccccactactacaaaaaggcaaatagatgtcgccactataggtgccggcacaccaaaaaccagcacctataatacctttcccgtccacgcgcccacccccacgcaccacatattcaaaaaccggcacctttatattcaaataggtgccggttttacggtttttaaataaaaccggcacctaaaacctgtgtcagagaaaggtgccggttctagacccaaaaccggcaccttttatattcaataggtgtcggtttttggtctagaactggcacctttattccgaaagtgcttttcatgcctcacacaaaggtgccggtttttgggtcgagaaccggcacctttcttccaatagtgcttttcatgt

SEQ ID NO: 42805 - DNA, 1903 bp, Oryza sativa
ggaagacaattctttttagggataattctttttatctcttttgtgtccattgttggatgaaatgctaaatttgtgttaatgttttcttccatctacgtcatggccgttagtcaaattaatgctagtcaaactatgttaaggccacgaaaatatctattgatagcttgatttatctcgaatttatgttaggatgcccatcgatccgctagaggaggtggaagcggttttgctcgatttttcttaggttttggttgaagattgaagcctacaaggtaaaatgcactactcatttgtatggatctatcagccattcgtagatctgttctctagtgttatgctaaatttgaattaaggtgacgtgggtgtgtacaaaatcctcaattttatcgtagggtaaaatggtccttcctcgttgtttttattctaatgtgcttgtaaattatgaaatcttcattgttttttccttcacggtttgtaataaacgataataatcgcaggtacccattggatataatagatttagaatggataactacagcgagatcgtgactctgtggagtatttcaggggagtaacggctctcgttgctgcggccaccagcacaaactcagtcgatgcaccggaatatatttggtgtccatgccatgattgcaagaaagacaaacaacttccggctcaacgggtccattcacatctccttacaaggggttttatggaaaacttccttagcgaggaggagcaaggtgagagaagtgatggcaactgtcatgggcatgatgcggatgtcggctgcgaggaggaggaccaaacatgtgtcgattagatgctgcgtgacggggagagatttgacactgatgatagggaatatcacaagttcacaaccagggtgaaggactccaaaactccagtttacaatggatgtaaggcggagcacagcaagctccaagtggtcctatcgctgcttcacctgaaggcgagcaacggatgttccaataagagcctcactgagcttttgcaaaaaagtccttcaatttttatgtaactagaaaaaatgctcgtgcgttgcaacgggtgaagtctattttaatcttattatttttatatggtttagttaagataaaattcactgtgggagttcgcttggatatatttatttttagaaaatcatgagatgcagttagaagtccgatcgtcttaagttagcatgcgagtttttttagcagatttcttgtatgattccttctgtattactaaaagtgaatgatctttaaaacctcaaatacagatatgtatttccaaaagcaaacaaacttaaaaatcgactcatacacagatgatgtaccaaaataccggcaaaaaacatctttaatttttataatagtagagattcgatctcagtcccaaagaacagtacctcagagacgctattttatgtagagacccttctaaaagccggatattccaaacaatggatagaaaaatagctactccctccgtccctaaatatttgacgtcattgaattttttaaacatgtttgaccgttcgtcttattcaaaaacttttgtgaaatatgtaaaactatatgtatacataaaagtatatttaacaatgaatcaaatgataggaaaataattaataattacttaaattttttaaataagacgaatgatcaaacatgtttaaaaaagtcaacggcatcgagtatttagggacggagggagtaattaggactgcgcttgaaaaagtgcaagtataggggctttttcgcaaatgacctccactaaccctagccagcgccgcccccttgtacctcttcctctcccgccgccgagagccgcgcgcgccgacgcctccgcgtgcagagccgtgcacgccggcgcgcgccgccacccccatagcccg

SEQ ID NO: 42806 - DNA, 1144 bp, Oryza sativa
tccctgatctccgcagcccacttgcccaacggtcgccgcctcaccccgcggtacttgcgcgctgtcgcgggcgcagccaccaccaccgccgccgccgcctcggccacgtttgccccgccggcgtgatctcccgctgtaaattaaacatcgcagtacacaacacaacataaacacacatcatcatcatccgttccgcgggtcgagcagcacaggatggagcaacaaacagaggtaccggagacgacgccgaccatctcctcctcccgcgcaacgtcgacgcgccgcccgccgcctgttcccgcccgcggcggcacgaccaacgacggcgcgggcggcggcacgcagacgccgccgccgcctccacgcccgccgtcggcaatgacgcgcgtcagcgcagccacgatggccgccgtctccgcggcctcgaagagcgccgccattgccggcggccgcatcgatcaagattatattcaagaacgctgtccgtccagtgggatttcgcgtggcgacgtcgagatcgaacgtgcacttgatcttgctgagggcatgatcgatacgtgggggagggaggcctatttataatggagtttgtgagtgaggcgtgtgtatgatatggccaacgcgataaggaaaagaagcgtatgggcagcgtttccagttccatgcaatggaagaagaagaacttccagaagttgctcgacttttcccagcttggaatgtatggcttcgtgacctcactgcaattggccgggagtgttttcgtgtgctttttcttattatttcactacacctacgacatatttttaagagtaaagttcatcaccgctccctaaacttatattgctgtgtcatcccggtccctaaactcgcaaatcgaccgttcagatccttaaacttgttcgactgtgtcatcccggtccccaaacttgcagatcactcgtttaggtcctccaacttgttcagttgtatcaccccggtccctaaacaggacggtttaaaaactttatattaaaaagtaattcataactttttcatgtgaactctaatgaagacaaattttatatcaaaatggtagccctcgacacgacctacaactttgtagttgataagtttttgaattaaaactgtttagggtcctaaaata

SEQ ID NO: 42807 - DNA, 696 bp, Oryza sativa
attcctgcagccccgccactcgaccgcctgttatcatgttgcatgaaataatttggtacaatttttttcatgttgcatgaaataagttatggaattatataaattgttattacttaattgaaaaatgctacaggacggtatttcattcggataagatgatacctttaaagcatcacctagtacctctgataggtatcggctgatataccgttcggacgggataatatctctgagatatcagctgatatctggtagatgataccactgtcttattttatcggttattaatgctcagtgattatgatttagtacacggcttctaattaaatttcacgggcacccggtagcctacctgtatttttcgaacagtttatcatcatttctttgtttttctctagacgagacatggctctgctgctgcttgcagaatgcagaattgcagatcctaacggtagtgtgctcgcgcgagctgttgcagcctttggcaccggggccatcggttagatatccccgtccgactctggcaacggtcgtggcttgtgcatgcaagctggggttaattttggtccaatggcatttttttttctcctaccagaaaacgatcggtaaaagctatagcaagaaagaaaagaaaacaggggtaaagaccggcagtaccactagctggtacgaaacggtgacatatgcgtgtgctta

SEQ ID NO: 42808 - DNA, 625 bp, Oryza sativa
attcctgcagccctgatccgttgcggccgtcgacctgttcgatcttgttgttttgcagcatttggaggatggatgtatctgtgggtgtgaggtgtctggtgtccgaccaaatcatcatgacaggataatgccatgtactgtcgtgtggaatcatttgcattggtcttgtgtgatcagttaggattagtatatatattgctttccagagaattcttcagcttgagagaaattgctagtggagatatagtttgagtttgattaattattctttggccacaagtcttcttccagtgcctccttattataatatctgtcttaatggtttacaaatcataaaccaaccgtcgccatttgcaaatttggaatgtttgttagtaccgaatgattatgtgcttatcatattagaagcctgatgttttttttaaaaaaaattgtgcttcttgtgtgaatgggtgaaattacattacttcgtctcaaaattgagttccaagtccacgtacgcttgcgatcacggatctacagtcagagctgagagctctggtcctctctcctctctgacgcggagctgaacaatttttgttgctttgcacagcgcttcatgatcacaatgtgacagaacacattt

SEQ ID NO: 42809 - DNA, 1282 bp, Oryza sativa
taataacaaaacaaattataaattccgccaggaaacaacgagataaatttattaagcctaattaatccgtcattagtaaatatttactgtagcattacattgtcaaatcctggcacaattaggtttaaaagattcgtctcgcaatttacgctcaaactgtgtaattggttttttttcatccacatttaatactccatgcatgtgtccaaatatttgttgtgatgtgtgaaaagtttgttttgataactaaacaatgcctcaatcttctcattctcctcctcacaaacccgagaaaatcaacattctactatcattgaaacaaggattcgtaaaaaataccacaccatagttgggattcgtcataatgctactcttaattgtgggcttcacccaaataccattttcttccaattctgaaagataaaaatagttttgtcccttttctctcgtctttgttgaccaaaatccccctggttgaatcaattcaattagttcaaaaatgtagattacatagtacatatttcccaaatgtcttgacatgcatggcggtggagcgacgcctccgagggggcagcacgggaggcgggtggtgatggcggggaggcaggccaacgagcgcgagtagcagagcggcgacgggaactctagcctcccaagcagctgctaccttgctagaacagatgatggggatattttgatgatttaatcttctttgattcaactaagggcattttgatcaacaaatagaacgaaagggacaaaaaagaaactattttgatttttcagaattgaaagaaaatggcagttcgggcgaaaccccaaagtagcattccggtgaatcccaactgtggagtagtagtattttggcgtagctcggttctgatgatggtacacaagttgcgagtatggcgcacgcataccggggattcactttctttctcccccatccacacatgcagacaacggcacaatgccgaccataccgttgctgctgcctttttccggtgaggttacagcgccccgtccggccaccggcgcaccactacgaagccgctcgtgaagcctggttggaaaaggccgccatccacgccggagacagcccatgcaccgattccacggacgccccctcccgaaaacccggtgcgccaatccagcgacaagcccaccacgagagaagtaataaacaatccgacggcccgtattccgtggtccacggccacgaccgggcccacctgtcacaagcacgcactccccacctcgcaacctcgcctcggctctgcct

SEQ ID NO: 42810 - DNA, 698 bp, Oryza sativa
atgcttgtcatatttataataagttcattttttatatataccgcaaaaaaaaaagaatcctatgctgtgcctgtttactgtttcaaagctttagttgaccatcatagtagaagattaaaccaactgatgcagtgttagaaagggacttgtatatacggagtactggcttgtttctctaaagcaaatgtgaaacataaaggcagctggaaaggaatgtgtcttgaaagcatttatgatctgatgtatttttttaaaaaaggtagcccatgatatccaatttggtcttattttcctgtagcccattcatgaatcgcctatgcggctatgctatgcatgatgccacgagtccacgatgctcattcagtctatgacagttttctccaattatgatattgccagtcgatctacgtctctgtatattaagtctgtgttagatgctgtgacaccggagattcattttttcttgttttgggtttagttgcagaacactataactattgattgatggtacaagtatccaatcgaagtttgtagtatattttcctgaccatttttttcctggtgcatgtgcagttctttggaaaatatagcgagaagatggttgagtttttacagagctcggttggcatcattcataagaaccatgctgagagtataacttctttcattaaggagagtgttgatgaggagctgagggc

SEQ ID NO: 42811 - DNA, 846 bp, Oryza sativa
aatagtgtcgggtgcacgtaggggtgggtatttggtctaaccgaaaaattcggttcggtttctcggtctttttaaaattcggtctttgtaatctcaagaccgatcggtctccaacaaatctcaggactgagcaaatcggtcttcggttagtttggtttggtcttggtcatagaccgaactaaccgtaaaaacagcaaaaacaaagcaaatcaacaaaactatttgtaaaaacagcaaaagcaaagcaaatcaacaattagtggaggcggcgcccggcggtggagccagcgccgggccggctgggggcgatgccaggcggtggaggtgaaggcacgctggctagaggcggcgccgggccggctggaggcggcgccggcggtggaggcggaagcggcgcccgacgatggagcgaagaaggatgcggatgggatggagacgggagtcgggacggcgccgctccaggatggatggggatgaaacgatgcgtcgatgcctgtgaggctgtgacgcacctgcccctaggatttcttattagtgggtttattggaccaactagatctattgagcctaattcggttatttcggtcaattcggttaattaaggcccatgaccaaataaaccgaatatatttcggtctttcaatagttgagaccgaatttttcgatctcggtctcggtctcttcggttcggtcttattctgcccacccctagatgcacaacacgcactagggtagaaaaggtgatgacggtaaaatgagaatgtactatggctaggttctcatgtaaagagagatcacgcgataccattaaatacactcggtggaatttcggtagacatgaagggc

SEQ ID NO: 42812 - DNA, 705 bp, Oryza sativa
attcctgcagcccttgctactcttacaagtggtgataaaggatttactactggacctacatgtcatatacacatgagagcccacatgttatagatagcgagtgataaatccttaattgccacattttaaaagttaaaaaaaaattaaatgtcccacggttaaacatgtgcggctaaaatagagtgcatattcccaggacctgttagctggttttccaagcttctgatttctagtttattttctggattctacacctacttgtttttaaaacctagactctaagagaaagtgtagcagctaaaaacttttccaaacatgccctcaaactcccagcacaaactagacagactaatgcaagttaaggttgccattaatttaagttgtacagtactactaaatgtgatctcatgtctctctcgtcgggctgaatgcccttaattagtcttcaattggcgccttgatccataatgcttggcacatggctgcgaaggagatggccatgaagagctagcaatgctttgcacatgtcgactaaacaatcgctttccctaaacgaacgtgattagcacgtgccactgcgtttaatcgacttgaaatatggagaaaacgtgctgcatgcgtgcagaccgacctgagaacattttataaaggagaagagatctcgaggtagaaagcagggacattgtagaagaacattcacctttc

SEQ ID NO: 42813 - DNA, 633 bp, Oryza sativa
attcctgcagcccttcagcaagtatgattccctccagccacctgtcatgccagaaggtggttccagctccatttccaacttccactgtagttagctcgtgcaggcagggcagcagtttttgtagggaggcccaatgagggccaagaggcctttgtttcataagatagttttcagaaggaataagttcactttgtgtccctctatttgtcgcccagtccgattttcgtcccttgatcgtaaaaccgggtataacccgtcccccaacttacaaaaaccgggtaaacatagtttactcggcggttttgaaggcggttttggctgatgtggcgtctacgtggcttgtttgactagatcttcgttccacgtggcattgacgtgacactcacgtgacaattatatctcggaaaaataataaaaagtgtggccccacatgtcagctgcaaaaaaaaatttaaaatggtggggcccacgtaggccccacatgtcagcctcactcctctctacttccctttcccccctctctctctctcgccttcccgggcagcgaacggagcgagtgggtggcggaacatgcgagctccggcggcggcggcgggcgtggtcggcgccgccccccgaccggagcgctgccgg

SEQ ID NO: 42814 - DNA, 707 bp, Oryza sativa
attcctgcagcccaattaggcttaacaaattcgtctcgtgttttccaggcgagttatgaaattatttttttcatttgtgtccaaaaaccccttccaacatccggtcaaatatccgacctaagtcgtaatctgggcttctagctggtgctgtgaccataagacctgatcacctaaaacctcaccaagtgtttttagtaaaaaattatcatctaaatttttacataatttttttattttagtagataacgtttaatagataaggttgttaagttttgggcacacgttttatttaaaagttttatgcagatacaaaagatataaatcatgtttaaagtgctaataactcacaacaaaataaatagtatttatataatttttaataagatggatgattaaacgtgtgttacataattgtcttggattttctctactttcaaagacggtgtagtaaaaaatttgtcctgttttcactaggctactactagtacatttccacgagtccatctcatttcggccattgctgatcgtcgtgtgttgttttgttcggtagcaataggagaaacatgttgtgccacgttccagttggtgaagattgatacattttcctttttgtcttgcttgtttcacgtcatgctttccgttcagaggtcagccagacgttcatgtggcatggctctctctctaccgttgtagtaccacagtactag

SEQ ID NO: 42815 - DNA, 672 bp, Oryza sativa
acgaacggtcaaacgttgaacgtgaatagtgtaaaactgtacttattttgggacggagggagtaattatttcaggatcactatgacgatgactgaaatgtgaggattttgtaatcgcgaaaaaaaaacttttcttcttcttcttcttctgcttcttcttagaaaagggctgaagtactcatgaggaatttaccatccagattttgtaatcgaaaaaattaaatatgatgaacttttaaggaacttaccatccattattgatagagaagaaaatgatgagataacattttcgtgcattgctcttggcagctctctaccagccgagatagttaccattcttaaaatttgaatccagactggtgtattgctcctggtagctctatgtcagtcgagctagttactgttcttaaaaattgttgaagtaataagaagaaacttagcatccattatttaaagagaagaaaatggtgaggtaacctgcgacagagaggatttgtacccatactatcgagttgctcttggcaactctctgccagtcaagctagctaacattctctttttttagactgaaatgtaagaaaaaaataaatgtgaggatttttagtcatctttattctctagatttggggaggaaagaagaggggacaggcagtcagatggctacttagcggcg

SEQ ID NO: 42816 - DNA, 704 bp, Oryza sativa
attcctgcagcccctattttagtatttttcagctattagatttacaattatatagtggacctgatattatacgtcattagatctatttttcaaaaaaaaagaaaaagaaaatagcatcgatcccctcccatcccgcttaagtacatttccatttacgtgaactccatctgtgtacgccctcccctctgttccttttctctcctattttcatgattttcatgctattttagttagatggaaattagaatttataataatattttttctaaaaaaataaaactaaatcactgtccttttgtagaaacggacgtatgcctcctccttcgtgttccaaggccggtgtccaccctcctttttttatatattatttaaattcaaactagactgaatatttttaaccattaaattattaaattattattattatatcaaatagatttttaaaccttttgattaacaaaatgcactaaaattagaataatttaagtagtttaattagaaaatacagcacccaaagtattttaaattagatctaatattaaatgtatttataaaaatagataactctaaattatagtgcacattcgatctattttaaaaacagtaatctcctcccatcatcctgtctttcgtaataccactctcctcccactctggctcttgcatcctctcctctccaatgcaattatcgtctcttttatttt

SEQ ID NO: 42817 - DNA, 657 bp, Oryza sativa
tgaatagtgccgatacctttcggtgtgcagttggcatttgggagcttccgctatggatgctttggttaacagggtctccgaggtgaaaaccttgctccgcttctggtgctagcaacggtgactccctcgagtgccgttctccttctttaaggcgttgcttttggagccctcgtttcaactccacttcaagggaattctccgggtgaaaactttagattcgttaggatcggaagttgccgtcgttctgtcggcgttaccttcttgaaggctttgttttaggagtttcttctctttgttggactactgttctttggttcagtttgtcaatgccgggttttcaccggttttcatgaaattaaccgtgttgttgtaagatttttgggtccagttttccttataaactggatcgactatcttcttctatagtgaaattgcaggagctccctgcatgtcccctcgaaaaaaaagaatgtgtttgaccatgaaaaatctacggaaccctaacttcagacgacccatctacagatatgcaccctgctcaatagagattgcttgcgtccgatctatcgagccccatcaagaacataggcaatggaagcatgcttggctccggcgaaacgaaggacggtccagcgaactctggcgagcgaaacgaag

SEQ ID NO: 42818 - DNA, 653 bp, Oryza sativa
ccctaaccggtatcgggtgatacttgtcagttattatgcgattctaccacgtatcaggtgatactagcggggtattagatgatcctcgtcatctccactgcaccgcatgcccattcctcccccggcggcgctccaccaccaccaatgcatcggcgccccagcaggaggaggagaggatcccttggagtacaagcagtacatcgttctcctaaggccgcgaccggacgacaacgccgttggcatggacgacgacggcacacgacggagctggcacctacccttcctccccggcaacaccaccgccgatggcaagccgcggctggtccgctcgtacaagcacgtcgttgacggcttcaccgccctgctgatggaggtcgatcgagatggaagaggtgtccaagaagcccgtcttctggcgctgcttcttggacggcatcgctcgcttgcatccaagccctctaaaaaattcattcacttgcattgctggtttaagcaggaaggaggatggcaaccttgcaggatccggccatggcattgcacacgacggcgccaccattctctctccaatccaatccaatccaatcccttcgtctcgcattgttgcggtggacgaaagaggattctgtcccgacgggatcccgttgttagcattc

SEQ ID NO: 42819 - DNA, 1517 bp, Oryza sativa
attcctgcagccccgctgcatattgtcctgtacttcgttcattcgaaagatgctgtttttaaagaaagatgctgttgttaagagatgtatcgtctaaatatgttttatttatagaaccaagatgtccattttgtcataaaaaagttgttccaacacttttaataattcatctaaacaacctaataaaaacgctctcttaatactatttatctgtgttcgcggaagagtttatgatcttgagtgcttccaatactggtattgcgaaaaactggtccatagtaaaatgtgttaacatgttatttgatcatgacttcctgagttcatcgtcatactagctccaagagaaatataagtgttaggtcttgtttagatgcattatcggaatcataggtttacaaaagccttttgtgttgcaagtgtggactggaaagccgcaattttgtgttggttaaaaagtttgctatatagttatattaaatttagctactaaatgagcataggattacatggcacgattctagctatgaaggcgtgtcaccctatatatcattgaggcttcaaaacaaaatgcattaataaaaagttaaaatcattgaacttggcaagattaaaggtaacatagaaacaaacaacccctaacataaatataagactgataaacatgatccataataatcctatacaacatcgggagtcgactcatatgcaccaccagctatcaaaaattcaactcaccaccctaaattacatgaatcttaactactctctccgtttcacaatgtaagtcattttagcatttttcacattcatattgatgttaatgaatatagatattgtcattttagcatttctcacatttatattgatgttaatgaatctaaatagataaatgacttacatcgtgaaacggaggaagtagttttttacgaccatatgactattgcaatttcttagaaaatccctccactgtacaaccgtacttgagttgacattattgcacacatttgaagtgtatacagtgtccatcttagcgttgttccttgatacaacagtcaaccgactcaatccaatagatcgttgctaaatactaacgaatatcctttactttagtttcacacatcctctatcataataacattatcattatagacattgatatatgagataatagtaaaataaaacccacattactataccggtagtaacattacaacgtaacatcctcacccccttagtctcttcggccatccatcgtctaaccgtaaacaccaacgcctgagattaaagaaaaccacgaggaggaaaagtaaccgtaactaccaaaccaccaagcccaatacccataacaataaataattaataaaagagcgcgggcccaccacccaacccacctctcctctcccgcggtcaaactcgtccgggtcaacacacgcgtgacgcgcaggcgcagcgagctcagttacctctcctcctctctcgcgcgcgcttgccccgccatatataccggcgagctcgcg

SEQ ID NO: 42820 - DNA, 694 bp, Oryza sativa
ccgacacacaggcgaattctgaatcctctctggccacaagcccagctagcccacaaccggtcaaccaaaaccctggtcgctttggacagggattgcctctctacgcgcgcaccgccaccagttgttgcacggtgcattcaccaacgcacgcgctcgctggagatatatacgcaccggtgaccggccggcccctgagctatatagcttagcctggtcactgtcttcccggacaatgacccactggaccctcccccgctttaccttccctccccattactgatgaataatggatggatagatgctctatgctttcatgtcgcgcctcagctccattatttgcttggagatgcgcctagcttgatctgaggctgtgtttagattcagggtgaaaagttttgacgtgtcatatcgaatatacggacacatatttaaagtattaaatgtagactaataacaaaataaattatagattccgtctgtaaacagcgagacgaatttatgaagcctaattaattcggcattagcaaatgtttactttagcactacatgtcagatcatgtagcaattagtttttaaagattcgtctcgcaatttacacacaatctatgtaattagtttttttacccatatttaatactttatgcatgtgttcgaatatttgatgtgataggatgaaaaattttgtcgggatcta

SEQ ID NO: 42821 - DNA, 705 bp, Oryza sativa
attcctgcagccctgaaaaaagaatcgtacttgttatttatttttcttttttcaacttgtaacggtagtagtacttctgtcacgtagtgcgatgtactacgactgccgagctcagtaataaaccgacgactaatcaatggattttggagcaatcagtccccaagtcccaacaaaaaaaagccgtatccagtagtaaccagtaatggattttggagtatactgctgcaacaaccggacacaacacatcggtgctcacgagagaaacagtcgtcgtaggacgagtcaccctccagcacagtgcaacgaaagctaggctggtgtcacgcaacatcacagccaaacaagtctcctgtagctcaagccattgcagtccacgggacgatcatacgaagctgaaaacggaatgactatccaacaagtacgtgaaacgcgtacgaacttccactttacgcccagtagcaccgtcctactgtttcaaaggcacctactacctatgtgatgtgcccacagaaccggtcccaaaattggtatgcacggatctgttccttctctctcagcattgatcagctacttgaccttctacatacaaatcactgttcacccttcaacaaaaactattttagttcgatgcattcttttttttatactactcgtataataacttcacttgagtgtcttctgttgtagcctgggaattttcccaac

SEQ ID NO: 42822 - DNA, 667 bp, Oryza sativa
aaaagttagaagtttgtgtgtgtagaaaagttttgatgtgataaaaaagttgaaagtttgaagaaaaaatttgaaattaaactcggctaaatttaggataacccaggataaaccaggccctactctataggataacattggaagatcagagcaaccccacgccacgccaagtcgccaaccccacgctagagctagcagcagcctcctagcactgaagattctcacctcaaatcatgccagcacagcgcacccgcacccctgcgcgtcggcaggcaggtactaggcaggcagagcagagcacagccgagagcccgagacagacagggacggaacctaccatttcctgatacattacccccacatctcctcgcgctgcgccgcggcgtcgaacgtgacgcgtctggatccacgacgccgctgccgctaccgcgaaggccgaccaatccgtacgtgggtgtatggccgcgactccgcgaggccggcgctgcaatgcgttgcggctgcgcgcattcgtgagaagaacatacgctagctcgtgcgtttggtcgcactggagattatggcaacaatggaaggacactggagattattgcaacaatggaaggacacgcttgttcgtcgttcacggataatgctcgtggtttcacgctttcagccgagatgacag

SEQ ID NO: 42823 - DNA, 1303 bp, Oryza sativa
aaaataatttgaatttttgataaattttacatggtttggtacggtttttcacggttaccgcgattactgcgcggtaaccgtgcttacgccaaggcacggtaaccccggcccctacggtttaggaaaccctgcagaaacctcacatcgataaaagaaataggcagaaacaaacgataaaaaatggctgagatgcccaattgaaaacaacccattaagatacctctcaacttgctgtgcacctgttctcagttgaagttgttacttctctgaaacatttatggaagagacaccctatatgaatggcaagataggatacacctagatcctttctgatcgcaaaccgtaccccgaccacgccacatggctgaaaccctactactacaagtggatgtcacccacagacaggcatggcaagtgagtgaaaatggggcttgtccatgcaatgaatgatgaggtttcctcctcctcctctccctgatcattaacacgccattggataaagatgtggcaacaacacacaggttgtccctggaaagaccacagtaacaaatgtccccaaacctctcatcacatcactttgctacttaccagcctccattagtcattcagatggtggaaaggattctcttcttccaggtacagagggagatcatggccaagctggacatgcacaataatgtggcggcttgcccttttggtttttatatggcctagtcaaaaggaaagttcttgcactggctggctggctggcaggcacacattctctcatctcctttggattttggattgccttctttaattgtatgtctatctatctacagcttgcttactttgccaaatgccatgcctttgctttagtttgttcggtggccttttgctaactgcctgcgccagagaagcagcatggtttatgcccatcattagcagcataaacacttggtagtacttgtctgcttttggtttggcctgccgccagcagccatgcaaatgagatgtaaagatgagttcttatgcctaattaggtatagcatcagtgtctcagtaaaaatgggcaagcaaatggctatgggaggtgaaaaatttgtcccgacacagcgccgcgtgaccattaaccaaatgcagagtactatcaagagcaacgacaaaacggaaggagcagatgaacatgaagagtaacatggttgccaatgatgacgacaaaaacgaaatgcttctcttctaaaaattaacatgttgctgaaagagaatccatggatgcaatgtacagacagatatacagatcagcaacaggggctgcaggaat

SEQ ID NO: 42824 - DNA, 822 bp, Oryza sativa
atcatggcagacttaaagctaaagcctaaaaggcctcaacttcataaaagcaagataaagaaaaaatcgtggggctcccatctagatgctctcataaccaacgtcaaattctcaaaaatttgatggcctttaaggactgcaccaaaagttgttcagaagcatttcaaaagggttttaatgcaaaatccgtgtccttttctggggctaaaatgtaaagaactcaacatttgtgaccttgtaaccctgttgcacgaataaaaaaaccagcatcccagtgtacttcacatctccattttttttattcgtgaatgtacttgtctttgttttgtttagcagaggatgcatgcactgttcctcgtctttttgcccgtgaaaacggagggctcatccatcacggttatctcacattctcactgtactctgcaatgtttacaaagctggtttggatgaatgttaggtggaggttgaggcgcttgtgatccaagggcccaagctgggcaccgtcctcagccaggtgaagaagctggatgcatctgtgctggtgctgagccaatgcaagccatctcctttctgctggtaaagcttgtactactacatctaagcatatgcatgcatgcatcacaatccctcatctatgcccacagaatagtagttctgcacaaaggtgaaagagagagaatctttacatagctggcacagtagcacagcccatcgcactgtcaagtcccttgtttctttataagcaaaatgttagtactttaatagctggtcatgtctgaaggttcctcagagtaatattttaacagcttaagttgtgtttct

SEQ ID NO: 42825 - DNA, 1173 bp, Oryza sativa
gcggagcggaaggcgaggacaaagcgtgtggattccccgcgcatttgcgccgccgcggggggagggctgggaaatgctccggattccaccgtacggcccacaccgcagtgacgaggagggaaaggaaaacggcgagattgctaccttcccacgggtttgggccgtgtggagagcacacctggcctcgtcgcggtgtgggcctgatcctacagtatctttggttgcgtgacctgacgcgctgaagtgaagtcagctttgtcctgaccgctccaagggaaaccgagatggacgcagattcagtgacattaccccatgagatatcgtcctcgtaaaaccacaatgctataaacaacatccggatgaaaattacggagttgtttggttggcataatcatattgtcaaagtttgctatacttcatttagctaacatgcctaacatgttgccaatgaaattaaagccacacttcagccatagaagagtaagcttgccacacttttacgtgccaatgacatgtgagacccacatcatcgtgaaggaatcttgccacaagtgtggcacgaaccaaacagatatggctgggcacatttagaccgaaccgacccgaaaaaaccgagatcaaaaaattcgtttacctgttcggtcctagtcatcgaaagaccgaatttatttcggtcaattcagttattgggctcggttaactgaattaaccgaaaatgaccgaaattttggcgcaacaagcgaagcccaataagcccaatagttatctaaccatagaagaagtggagaggcgcacagcattccccatcctctcggcctcggcctccaccatgctcggcctcggcctccagccctccactgctccggcgtcgtctcgccttcgtcctccaccgtgccggcgccacctccgccctccaccgcgcgggcatccatcgcctcgggggcacatctgatggtgcctcctccaccccaacggcaacgagtggcgccaaagccgatttaggatgagtatatgacagcgaagaaagctaatctgggtttttatgaaatttcttcatgtgtatgattttttgggatgagtatatgacagcgaagaaagccgatctaggatttttatgaaatttcttcatgtgtatgattttttggatgagtatatgacagcggggctgcagga

SEQ ID NO: 42826 - DNA, 682 bp, Oryza sativa
ttccgtcacatcgttccaattttcaattttagagtggaacgggttgtgtttagttcacactgaaatttagaagtttggttgaaattggtacgatgtgatagaaaagttgtgtgtgtatgaaagattcgatctgatggaaagttggaagtttgaaaaaaaaaactttggaactaaaaacagggccaaacagtcataatgtgcagcttgtcctgtcactagtgcgcagttaattcatctggacaaattgctctccatttcgctcagatccccaccaagacacgcacaaaaacacggagcacctgcaatacaagaaggaccaggagttttgcgagagaaggatccaaggcacggacattggacagtggacaggccgaaggaccacagaaacgtgccggtttccacctgcgccaacgaaccaaggccattaactcccctacccaccggccaccgccacacgccgccgccgccgcccgacggccaacctgagctacctggtatatccaccggacggaaagccttccagattaatttcaggtctcatttggaacgaacggaatttacataaagggattaaactgatcccatacaaatatgagtgaatagcaagccagcttggctcgtttgaacttgttaccttaacgaatcacggctcgttaatcttaacaggctaaaaatcctagct

SEQ ID NO: 42827 - DNA, 664 bp, Oryza sativa
agatacagatcaacaaaccaaatacttatggcctgttcactttgataaaaaaaaaccttaccaaattttggtattatcaaaattttaacatagttgtcaaaattttgacaacttaccaaaattttggcaggatttcttatatagttgccaaaatttagcagcaaactaaatgtaactattttttttggcaactttatcaaaatttagtaaggttgaaaatggcatcaaagtgaacagtcccttatttaagcattttaaaccttacaagtatgctttatatgattatattgttagttagcacttgccaatatcaaacgagaagtacatccgcacaatttcatgctgatgatatcatgccttctctgatcctacttcgacaggatccacattaaccgtccataaagggtttaagggctttactccgtactccattttcttgagagtgcttggaagttggaaccccctcagcaaatcgcacggaccctcggaaacatgctgaaatttaaaccgtgtggctaatcaaaatcaccagtaaacctgaccaaccctagctatcaactggttatttttttctattacacgaaagacacttacatagtacatactcccttcgtcccacgaaaaattaatctagaatagaatgtgatatatcttaggataatgt

SEQ ID NO: 42828 - DNA, 1021 bp, Oryza sativa
agccgagtttagatttcatccctcaaccacagtaccatatacaatgcatccttcatcttccaaacaggtgtaaatcgaatctctcaccgaaggtctctaagcctggtcctggcttttttttttaattgctcggaccgaaggtactgagctttgttttttggtttcacacttgtaaagtttaatcctcttctattaaatgaaattggcagcttgccgattcgttaaaaaaaactggtgtaaatcgaatctctcaacagtatacaaagcggttttgactaatgtaacacctacatagcagtaggacctggtaattttggtgagtggcatttatatgggtccatatcatcttctctcctctctcctcatctatctcctctttttcttcatctctccggtgacagctctcccccttcagcatgagttggtcgcacgagctcgccaatggagagaggagaggagaggaagagccatgctagcgacaacatcctctttcacatgatggggacggagcggggtgtggggatggaaacggggggagcttgaccacggcgtaggcggtggagcggaggggatggggatgggcagcggcgacggagcggaggggatggaaacaggaagctcgaccgtgttaaaggcagcgaagcagagggaattaggacggacggtagtgggtctccacagcttcctgtgacgccgatggccgcatcccctccacacagcggcgatggagcgaaggggatgaaaatgggggagctcaaccaaggtaggggcggcggagcacaggggacggggatggggatggggtggcgacgagtctccgtggcaacctgatcctccttcggctagcgcggcaaatggtatggcggctagcctgtggctgagctcagcctccatcgacgtcgctctgccgagctcgtccgcttcctcgccgccacctccgccgtgctgatctaccccgtgcggcaacgacgccacattaggaccgccaccacgatctctcccatggcagcaacgacaaagt

SEQ ID NO: 42829 - DNA, 684 bp, Oryza sativa
tttactgaagtttaatcaatcggcatgcagtaacaacacatgactccatctgcagcagtcgctctctcaaactgtcaaacagccaaccaattcaaaccaagccaagcaggccaacgaaacgcaacgcatgcgcgcgcgcgcgtgcccaataaatggcgggaagcgccgcacaccagccatcgccgtcgtcccgcgcgcgtccggccggccgtccgtccacccattccatcctccgcctgcaatgcagctagtagctagctagccaccgatcggtcgagagagaggtaggtgccggttggtcggtttcgcgctcgatcatatcgacgcattacataattctgcagttggtgacgggtcaaactgctggcccgatcgagcatcatgcactgcattgcaattggctctcgagctctctcgtcttgtagggtttgtagttgccgttgccgcccccttgcaggtggatggatgcatgtttgctgagctgcagaaaacgagagcagaagaatcatggcgattgatgactgcacaacaaccagagagaaacactactcacaaccgcacacacacgtacgggagaagagaagagagtatatatattgctacattagcatccacttgctatgaagatggctgagtgctcgcggacggcaagtactgcacaatgcaggcagatatacagttgga

SEQ ID NO: 42830 - DNA, 908 bp, Oryza sativa
cgtcgacagatatctgtgaatgcacaacaagtctgcatcacttaagtgttcaaataatcaaaacgaccaatatttttttctttttcaaaaccaaaaaaaaacttattgcttgggtgactgtcggcagagaggctgaagatgagatccattttcattagttaattaaatcaaaacgaccaaacatagcaagaaacaaaaaagaaaagaaaaagaaaagaaaagaaaagaaaatgaacatctctaatcatttcaaacttcagtggaacagaaattctaaagctgtgggcatgtcaatgatgctatcttgggcacatctctctgatggaccattatcgttgatctgtaaagataatgtagctaacaagaatctctaataatccacccaaaggaaacagaacccgctacagatttgatcacgacattatccattttggcgtatgctgaagcttgcacacacatgacacacgacttctcagcacctactgctacagctgctcgtgttttgcataaaaaacttcagaaatctcagtcagtacgatgtagggcccagttgcactattatcaaatcaataatgcagtcataaaaaataaaagaaattgttattaatgatgcagtttggttttgggtcccgttctgatttgaagaccttttcttggtgataatagtatactgacatgtcctgtagcagatgtttaattccatgatcaaagtgttgccacgttaggtatgccatgaaacttctctagcatacagtcacgactaggaaattaaaccacagcattcgtcataaatacttgatgtatagcgaccagtgagtcagcgaccagctagtatggaacttcacatgaacaagatcagccggatggctttgccttaacggcacgagctatccccatcaggcagtaaa

SEQ ID NO: 42831 - DNA, 673 bp, Oryza sativa
ttcaccccagtgcttaaaagagttccccccccccattttattgttgtacagtagaattgtgaatcggagtcagtgcttcattcaacataccattttacatttctttctcaagtgtagcatctcaattgataagaaactatttttgacttcttttcagtaaataagaaacaaatcagtaggtgaacttacatcaaactgcttacagaaatagtgacattcctgcagttgcagaagtagtaaacaaaaacctactgtccatgcaactgagatgctactgctgaactgcattacaacctgaagactcttttcgaacatatacagaattagggataaaggacttgacaatgtgattgagcacaactgcacaagaaccctattaagtcctaatgatttatctacagacatgaaccctgctcagctcgggagctagctttcctccattgcttgcgtctgatcggttgcatgctagcgagccatcaagaactttgggagaggaagcatgcacggctccggcgcgacgaaggacggtccggcgaacaccgcgtgccgtggcttgctgatctccttgttcgtcgtcagcctcatggtcatggcggcgttgcggtcctcctcgccgtggagcgcgtccgcctgcagccacggcttcttctggatgtcccagcgctcgtcggag

SEQ ID NO: 42832 - DNA, 1383 bp, Oryza sativa
attcctgcagcccatccctcctccctcctcgagctctctcgccggtgggttgccaccgttgatgaccatagcggctgagcatggaggccaagcaccaccacaccaacggcatagagggcgagtgttggtggaaactcccctcactcatttcttctgtcgtggccatcgccaccaccatgccactcgttgtgccgtggaggaagatgaaggcagggtggccgtgggcatcggcggggagttgaggagggaggagggaaggccagcgagctcaccatgccgctcgtcctccatgtgaggtgcgtagctgccatggatattagcctccgtcttgttggcctctagacccctccaatatcgccggccaccactgcatctgtggaaggagagcaaagaaggggggagaagacgtcgttggccacgtctggttgggtaagggttgaaagggaaggaggtgctacccactgcatcttgtggcgataggcagggtgaaagaggtaaggagtatttcgactagtgctcagtctccatggtagtctgcgatggtagcagcggtggccgtccaacgagggagctcgaggagggaggaaggaaagacgggagggagagaggagaaggggaatgaggcattgtcggccatggcaaaagaagcgagtaggagcgctccagcctccagcgctcccgtcggcctctgtgcttatcgtcagtggtgactgcgggaaggtgacaacaactgcaggaaggcggcaacccggcggtgagggagcttgaggagggaggagggatggctaggagggagaggggagaaggaggcgtcgccacactgccgtccgtggagatagagaggagggttccactatttttgttatcttctggctgactaacatgtgggctccatattttttattttttattttttatattttgcttctagtgccacgtcaccttcaagtatgtagcgcccgttccgtcgtggcgcctagcgggaaaattatctcttaaaaaccctaactgcgaaatttgtttctttgcttgttgtctagtgtccgtgccatctcaagatctcaatccccgatctatcgtcgagttcaattccgaatccaaatccttccaatcaaattcctccgcaaaagtctattttgcctcccccgaggtcgatgggccgaatctcgctcggcccatcttcccctcttccccggccccctctctccccgggcgctctctctctctctctctctctctctcgcgcgctctcccatctctccccccccgctcggcctcgcccgtacgctgctcgcgcgtgcgagagccgccccgagcgcctctttccccgctcccccgctcagcctcgcccgcacgccgcgcgcgcgtgcgcgtaagccgccg

SEQ ID NO: 42833 - DNA, 655 bp, Oryza sativa
tgtacctacatccaagctaagtctactgaacaatcacatctaatgcaaaactcaaagcaccatctgaatctgaataagagatgtaactcattctatttgtagtactaaaatgagtcaaatctctctaacatcccgtatattatgggatgtatgaagtatttatcgtatggttcttgtgctcgaaggtgagatgagaagacgataacattgagatgatttttctctcgagaaacattgagatgattaaaagaggactaaaggataagaagattatatgtaggtaaaaaagaacttgcaaattatatataggtagtagggaaaaaaaggaaacccaattaatatatatcaacttcggatgaagattcataaataggattcattaaattgtggtttcttttattttgtgttggtgcttattaatttgtgcttgccgtttttgttaaatttcggtgtgttcatgtgaaccctttgatatgtggtcgcttttgaatgaatttgtataataattgattgtaacttgttgagcgaatgtcaaaatttattccattacaaagaaaaaaaactatgctgatcgtgaactgttgtctcaaacactcagccaccgaaccgcttccaggctcacagattcttgggggaccatataaacatgcatcta

SEQ ID NO: 42834 - DNA, 3742 bp, Oryza sativa
aatatatttttataggtatatattttttatgtatacaaaaaatatacacatatgcatcctttgtatacgacatgtacaaattttgtacaaattttgtatatgatgtatacaaactttctatataacgtgtacaaactctctatacatacatattaaaaaattgaaaaaacaaaaaaaacatcatgtatattcgaatacaaatgtacaaactttatatacgacgtatataaagtttgtatatacgtcgtatacaaagtttgtatacacacatacaaactttttatatgtatacgtatatactaaaaaaaccaaaaagaaaaactggaaagaaaaaaaacgaatggaaaaccgcaaaaaacggaaagaaaaaaaccgaaatcagaaaaaaaaaccaatggaaaaaaccgcggctccaccccgacacgcgctgccgcgcggcccactctacgcgcgccttgtgccttgcagcgcgcgggggtggggggggggctgatcgcgttttagctggcgagacccgtatacctgagggactgtggtgaaacggtgaaatattgaatccttcagctactcgtagacccatccttttattgatgcggaattcagatagacaacctctttgtaatcaggggcggatccagcatggggggcggggtctcgagcccccactactggcgtgaagactatgagagactctacgaaaacctcactaaattttttgttaccatatttagatgggaggggagactgtaactctatttagtttgctcagaccctattgctatttctttctggatccgccactatttgtaagggtgaaatccaaggaattcaagatggtcaccatcattaagactgttgccttgattgtctacaatgttattatcatcatcagaataccattcgaaattatttccagccggtgattcaccattctgaagaatgaaaattagcgggatcatattcccaattgtataaatcccactcccctagaaacttttggctataaagataatagttaatatcccctaaaatccacggtccataaacttgtttgctatggttcagacaaagcatagggcttaaggttgttttggtgcttcaatacccacttaaactcgccacacgattcattaaggacccaaattgaaaggcaatagtcagttttaagtgatgcaaggtacatccctttctctgattttccaatgtaaatatatggtctgctcttgtaaatcccagtaggatttttgattacttggtagatcccattagatatactaggtgattccccgcgttttgctataggaattactaattaattttcaatattatttttcgttacaattgagctagtagcaaaaaagaaaaaaaacaaatcttaaggcttatcagtatttatcatgaaaaaaatgaaatttactctttaatgtataacatattgtaagtatgcttgcatgaattattgctagtggatgatgtggcatggttgtatgtcaagctttagagttagtgggttataactttatagaaagtatagatatggatatcctacgaaggaaaaacacaaagatctattatatagtaaaagttcattaaacttcctacaaacgctcctaagctactacatagtaccttaaaaacactcttaagccgccacatggcatttcaacaaattctaaaaaagacaaaatatctaaccgtcgattttcatttaatctgatggacccattattttcaaccattagatctatcttaaattaaaaaaatatcaattaaatttatcttcatcaatcctacgtacacatgcatgtaagcacaacacgtacgagaatgatacctagcgatcgatcgctaggggtcgctagggggcaatcagattctgattccctctctccacctggtttctttttagataccatattacttttctattttagtaaatttatgcaccctaaagtttgtacacctcaagtttacacattttcacaagcattttgtttattagaaaaatttatgtatagaaatactatatataaaaaatttgaatttaaattcaaatttaaatcaggtatgtaaacttttgacttataaactttgggtctataaactttagatgtatagaaatactatatatagaaaatatttgaattcaaatttaaatttgaatcagatataattcaaattcaaatttgaagcgggtctataaactttaggtttataaaatttaaatgcaaatttaaatcgggtatgtaaacttttgacttataaactttgggtctataatgtatagaaatactatatatagaaaatatttgaattcaaatttaaatttgaatcagatataattcaaattcaaatttaaaacgggtctataaactttagatttataaactttaggtgtataaactttaggtgtatagaaatactatatataaaaatatttgaattcaaattcaaatttgaatcggatatataaagttttgacttataaacttttggtctctaaactttagatgtgtaaacttgaggtatataaactttaggtgcataaatttactaaaatagaaaagtaatacggtgccaaaaaagtaaacaggtggaggaaaggagggggatcgatcgctacccctgtcgccgggcgatcgatagcccattaggcgtaccccaacaggtacgtatgtacgtaactagctggcctcatgtccctctttttctttcctttttctttctgaaataaaaaaataaatacaccgttaaaaaaccattagatctatcatgaaaaaacaattaaatttaagtctacaaatccctaaatacacgtgcacataaaaaccgtatgtaagtacgtaagcacaagcactttggcctcacaaccctctatttctttctttttatttctgaaatccaaacaaacataaatacaccataaaaaaattggattcagctcaaagctatatttaggatctaaaattaaaattctaggctcctttggattataggatgtaaaaacagtatgcaatttggattcctattgattcatcgctatattatcctttggtttccacaaatattagtaggaattacacgaatatgtcataacaattctgaaggaaaacaaatccatttcccaccgataccatgcaagaaacacacaaaaatttaagcccattaaacatcatcaaaacgctcctaaattatcatatgacatcctacgaacactcctaagccgctacatggaactttaataaattataaaaaaatcatataaaaattataataaaaaatgcttagttatctgttataacttaaatcggttgacccattattttcaactgttagatcaatcgttcaaaaacacaaaccccttccacctcacacctcccttatgtacataatcactcgtccctccccaacatccatatgtacaaagcatatatcttacgtacaacagtcaatgaaccctgagttctacaagacacttaaggtagttttttggtccgatctttcggtgagttgtggataactacaatttgagagaaatgttgacgatccgactacaaccgtacaagacgttgtgttgcgcctttgcgatcgatacacctctccgtgggttactgatcttgccggtacagatcaaccttattcctacaagcaaatcgaagaaacaagcaagaacaagataaagcaatctgaattgcagacaggaatgaatacacacgataagttggggtttcgaatacaagca

SEQ ID NO: 42835 - DNA, 1754 bp, Oryza sativa
cccttttttgatttgagattatttagggttcaaatattcaattgttgcatgtggttctacgtatgaaaaccgcctttaaaaatgagagtagtactagtactaaaatataaaagaaaatcataactttcaaatgaagtcggatgatgacatactttgtatgaaaactgtagcccttgatttgatctacaactttgtagatgaaagtttgtttatttcagatcgtttagggggttcgaatgtttgtttttctatctcatatttatttttatagttaaaatgttctattcgttttttattcccagatctattgttgaattgctttcttttaatttttttaaacgaccttgtatagagacatattctatattaaaattgtagagctcaacgacatctacgactttatgtttgatctttttttttcattggagatcgtttaggggagaaaatattcgttagaaactatatgatacctttacttattataaaaattaaagatgtttttgccagaattttggtacgtcatctgtgtttgattaggttttgagtttgtcctatttctctttcgtatgttttttgtcagacactagcgctaggtcgcagcctcacacgggatcggctccgtttccacgcgaatccgccccgcacaggaatacacaatcactccatcatcctggacaagattgtggtggtttcggcatgggaccaaatcggactgatcaaagtagtaaaagctaatccagcccgtttaagttctggccgagtcatcttcgagacaaatcatcacgcacgagcgaggagtacgcatatcgatcacaggtgaacatatggctgctctttgattagttgaggaaattatctgaatagcatatattattcttagtgataaacatgtcggtgaagtatgccttgcaaaagtgtacgtacaacatcttgaatcttgatgattgtataactaattaaaattgatctctatatctatatctctatctcttctctacttctctatcccatctcttctctatctctactattataaaaatcgaagatatttttaccggttttttggtacgtcatctttatttgagtcggtttttaattaagtttgttcgcttttagaaatatagatctgtgtatgagtcggattctaagttcgtttgctttcggaaatacaaaagaagtcgtataagaaatttctttaaaaaaacatgcataataatttgagataaaaatcgggctcctaattgcagctcatgattttcttaaaaaaatattcaagcgaattcacatagtgtatttcatcccagctaaaccgtataacaataataagattaaaatagtattctcccgttgcaacgcacatgcattttgtctagtatatttaataaagcaacatttttttttcaaatgagcttgattggagatatgctttatatcaaagttgtagagctcggcgcggtttacaaatttttagttgatgacttttttatttgatattatttagagtgtaaaatatgtcttgcaagttttatgagaagtggagtaaataaagaatagcatccaactcatattcacgaagtgcttcatatgtgagatggcaaggggactacgggtctgtttggttgctactttgatggagatttgcctggcctgtagcaagcctgagcaacatacagctatgtttggttgtctccctgaagacttgcctgacttaggccaccgaaaatgaatgcctgacttaggcacggtgcatgcct

SEQ ID NO: 42836 - DNA, 1070 bp, Oryza sativa
caataatatgtactaactaagaactaatttaaccgtacaattacttaaatacctctaccaacatttagcaataacaaatatgtgctaaccatacatactaacatcgaacaatgcgaaacaattaacaactcttaaaccaattttttattaaactttcatatgcattgtacttagggattactaatgtataccttaacttcactgctggagggcgtcgccaaccctttcctcccggccggcgcctcctctccggcctgctatcccctcccctcgctccctccggcgctcacggcgacgatgtggcgactctcgacggcggctggcgatgtggtcctcaaataaatcgaacaagcatcgcgggctggggagacggggctttaaaccggcctgtcgaacgcccattgttcgacagggtcggtggagggacctgtcgaacgcccccggttcgacaggcctggcggcgcggggtggtgggccctgtcgaactccctccgttcgacgggcgagcgtgtcgaacgccagccgttcgacagggctctgtcgactgcccgtcgttcgataggtgccctatcgaattgcacccgttcgacagggacctactttcgcgattttccccggttggccactacttttgcgattttccataaaaataatattaatcctcaaaaaaattcgccaataacctatttacataggtgttttcagacgcgcaggtagataatggcctgtagatatcgcatgatttgtgcgggcggaataccgaccatccttgggaattaatttccacaggctactctacccacccttgaaaatgaatttttagttttttgagatatatatatatatatatatatatatatatatatatatatatatatatatatatactcaaaaaatatctcgtattttggcagacatctctcttaagtcacaagtcacacgcgaataggattcgaacctaggacctatcgtttagtgtgtagggtcagtttggttgatgacttgagttatgtgcctgaaaaaaaaggtgcctgtgtggaaagaaaatttgtgttgagttctacctggcc

SEQ ID NO: 42837 - DNA, 694 bp, Oryza sativa
gtattcctcgttttccacttccatctgatccactaccgcctcattctcctccgctgcatcaacacgcataggcgaatccggttcttcatcgtccgagtcgttggcctcacgattagtaccacgaacaatgacctctccttgtgtattaccctctactacttcttcccctcgaccttgctcagtccgccaaacattttcagcttgtccaccttccaacggagtttcttccaccacggcatgacttgactcccccgatcgatcaacacattttgtcttctgcaccactattgccaggctatagcctttctcccttactttactaacaaacttcctccaactcccagttgacgcaacctccactactctccactgccatccatgttgacccctcactagccacacggcatttatgataaatttatcgtgcactggatctaccccaaacatattatacaaccaccctaacacgtcgttcaaacccatatgctccggtgcattcagactagtatcatggaaggcatatacagtcaaatccaccccgctatcacatatttgtataggagcatcgccataatacagacgaatgggcatatcacctgacatcctgataaaacatgacaaatagtctcacgtttaatcatttaatcattcgataattaccctattacaacttatactacattgccgtgtacta

SEQ ID NO: 42838 - DNA, 621 bp, Oryza sativa
atagggctccatatgtcactgccaattctaatgctttcccccaagaaaacagaaggggttctgatgctccaatgtcccctaggtcccagcatggtcctaacagtttctctcatgatactgctggaggttcaaatgtttctagaccttactcccaatatggtgcaacagttccagatacaggtgaaggtcatataatctgaacattaccaattttttagtgctttcttgttcattcctagtttaaatgttattttcagatacagcgtccaggagggaagagttcaatcactctagggagagaaaatcttcagttagtggttccaattggaatatagaattcaaggatgcaacatctgcagcacaagcagcagcagagtccgcagagatggctagtattgctgctagggctgctgcccaacttgctagtcgtggaaacctttctgcggagcaaaatactggagcttttgagtcacctgcttatacccatgaaactacacccaggaagcaacaagctgaacatttaatgaaggatgggcagaggagttctaatgagcagagttcaggggcttatgatccaagactcatctcaagtaatgatgctaggaaggatggggggagaac

SEQ ID NO: 42839 - DNA, 653 bp, Oryza sativa
caaaggaaagtcacaagaagctgatctgaatacagtttctgtcacaggaaaggaggaaaacacagaaagcccagcagaaactccgaaagaaagcacctcaaaaactgctccgtcgcatgttcaccccaagcttccgacagactatgattcgtttgctgcacattttatgtctcttcggaccaatcgccgctagttttatgatcgcataccagttgagttttacatgtgaagaagtcgtatttacaaacacagggatacatacattctatagcttcgagttgacatttgtacagtatatcaactcatagcactcggtcttatatgttggtctttttggcgagctattattctttcgttctattttggcctcatgttcatcacatcttaggtattgtcattatgaaaggattgttagcgtgtaataagcacattatgcagtcagatgtacagacgtttacagaacttaagaggtttaccttttttcatatattctgtttgaaaaaggaacctgtttccatatattccataccatcccagctagttgctagtacttactacatttgttcaacatgagttttgattaacatatccagctttatctgtccagctagtttttgttgatttatgcaagccttggagggggctgcaggaat

SEQ ID NO: 42840 - DNA, 610 bp, Oryza sativa
tgagaaattgtctgtattattgttgagaatggcagtcgggcacgacgggcacgagtagtgactacccatacccatgcccacgaggtaatttatgctcgcgggcatacccgttactacatgatgagcaaggaacactactcatgcccgttacccgcgggtgctatgtgcccgcgggtatgcccgtttacccgtcacaaactcacagttcaacatttcaaccacaaatctccacaagcagagagacattatcgcaatttaaagaaagggtacagttgtatcaagttcaacaatacaagcattacaagttcatcaatactagatggtggcatttatactaatttgaccgagggaccacatatcagttggtttttgcgggtaaatgggcgaagcgggccagtgcccgtatgcccattgggtataggttttgacccaataaaaaacccactggtactaaatggagaacaaacccaactttattagggtttttacccacgggtaaacgggcaaacggtttaaattgtcatccctacttgagagaacttgtgcagagtagaagtgaattggatggaatcggtaaaaaaaaaattaattgaacaggctgttgggcagt

SEQ ID NO: 42841 - DNA, 563 bp, Oryza sativa
ttgctctgagctagcttgctgtgctccgtactcgactgatgagatgttttgttttgaagctttggctgtgtcgaaacgtagagaggcgtgtgggttatatactgcatgccatggactaaatgtgaggacatgtagatggaaattaaacttgattttggattaagatcacattttattttttgttattcgattctgacaatatataatgattagcccggcgaaagaaatgatagcatgtaacgattgatctgcatggcacttttaagagaagaaatcacatgctcatgatccgcttggtgattagttaagaatttgtagactataaagtatattcaggatgaagatatatatgcagatttgccagaacgtgctgcccgtgtctgtacctaacggcactgcaataccatgttgggcagatgatttttttgccgatagggctacccctactacgaaagtgatttttgcacacggcccaaaagagattttcgtgtgcagtagggtagcccgctcgcactaaaagatctacgaaaatagctatttttgcgtgcaggagtttgagagaa

SEQ ID NO: 42842 - DNA, 1220 bp, Oryza sativa
aacaaaagcaaaaccctatccacttttttctttgttccgtaactaccctttcccacccccaccaccctcggcatcgacaacaccacaacgcatcatcctaccgcatcaccgtgccgctccccacgctatcctgtcgcgcatcctaccactcttctgtactgctacgttgtgtcgtgccgccctgcttctccgcaacgatgcctcctcaagtggagatctagcggcactcatgatatggagatctagcggcaataatcgtgatagaggaaagcgcaggtgtaggaaaaaggtgaaggagagaaacatgcggacgccggcgaaaagcaaatgttttttttgttttacagtactgcgattttttggtttgaaattattgatgactattgttattcttttgcttctcaaaatttgttgattatcttcagtcatgacagatacggaggccgcattgctcggtgttggccactttttgaatgcatgtagaccaaggaaactttgatgtggttttcttgatctactcatttgacaatggctagaaagtatgtgattttcattgtacttgtgtaactcagtaaattatttattatataaacacatacaatgtaggagactctccttaaaaaagttttctagatcgaaaatcacaccaagtttattttgcagcaaactaataaaatcagaacaaatttaccacaaatatcacacaagagcaacaataattaaaacagaaacacaaaagaaacattatccacaatccaaattgagaattcagtgcctcccatattaacgaaaagcgcacgtgtaaacgccacagacgtaggcacatgcacggggcgcctcttaatgcttgggagggcagatcgctggccggaaggcgagcgggccagcggcatacatgacgttatcgtagccctcgccagtccaccgtttgccctcatcacggagcgacgcgccctcgatgctggagtaattgatgtttgtggggttgttgcacttgaactccggcgacgcctgaagtcgcacgtggcatgccttgctcggatcgcccatgaagaagtcagagactttggtcacgccgagctccgtctggaagtagccgctctcgtcggcgatggcccgcttgcactccatgacatgattcttgacgtcgtggcaggtaacggacacctccgccttgggcagcggcatcgcgccgttgaggctatgcgtgttccggtacg

SEQ ID NO: 42843 - DNA, 840 bp, Oryza sativa
tttagagacccaaagtttataagtcaaaagtttatatatccgattcaaatttgaatttgaattcaaatattttttatatatagtatttctatacatctaaagtttatacacctaaagttagtttatagacctaaagtttatacacctcaagtttacacatctaaagtttagatacatgtttcaaatttatatttgaattatatctgattcaaatttacttgtttcatatttgaatttgaattatatccgattcaaatttgaatttgaattcaaatattttctatatatagtatttctatgcatctaaagtttatacacctaaagtttatagaaccaaagtttataaacccaaagtttataagtcaaaagtttacatacccgattcaaatttgaatttgaattatatctgattcaaatttgaatttgaattcaaattttttctatatatagtatttctatacatctaaagtttatacacctaaaatttatagacccaaagtttataagtcaaaaagtttacatacccgattcaaatttgaatttaaatttaaattttttatatatatagtatttctatacataaatttttctaactttttgttttttaaaaaaaatttgtgtggtgtactgtagtaggggaggagggaggagtgtatctagtagtatagggagggggcgggcgggtgatcgctgggcgggcgggggagcgatcacccgcccattagcatttccgagattgcatgcattagcaaacattgatgtgtgggtcctgttgacagaaaacacgaggcctgggagatctgcttaacttcagtgcaggtccaaaactcgccttcgggt

SEQ ID NO: 42844 - DNA, 671 bp, Oryza sativa
caaccatataattgcgtcagggctgttctccaatttgagaattgagtatcaataacttagctatagcacgtattactattttttttccctaaacgcatgtaaaatggctgtagaaatatcaaaatgatcaaactaagcctccatacacaactttatacaccggataattacaagtcaggataggcagcagacaccagatgctcgtaatctataattcataggctcatagcgaacgacgagcagatgtgcgtgttcaatgggattgggagggcagcatgacgctccatgttgaaacttgggacgctcaaacgccagcaggatgatgtcgtggtgggagtctaaccatttcctcgccagcaggatatctcgtgtccaaatccgctgatctgtccctccacgtgccaatcacgtcctgctcgcacaaaatcacataaaccatgcattgctttattaataaacatatgatgcagcgtgcgaattgccacctatggtctatgctatctactggtaaacactggcacaggtgactattatgcttcctctatttcaggttataaaacattttgactttagtcaaaatcaaactgcttaaaatttgattaagtttgtaaaaaaagtagtaatattttaaacacaagacaaatttattatgaaaatatattcaattattg

SEQ ID NO: 42845 - DNA, 596 bp, Oryza sativa
atgagaatacgattatttcctcgcaatctcgcatcgcgcacgcgcgcgcgccatgtgttcggctccggccgtttcgccggctcacggcgtacctaaccgcgcgcgcgcggccaccatcgatcgatcgcgactttgcggatcgcgcgagcccccgtgcctgcgttgcgtgcggctcgatcgatcggcaggtgcgtggcatgcggtacgtgtggctctcctgtgacctcaagctcaacggtttgactaatcgatccaagactctaatttatgtacggacggatttttccatcgatctgcttgaaaaaagttctggaatgcatgcattgtacgtcaagagggagattgtcaaggatatgatctgacgtgtgttcttgctgtggtgttacgtgttaacgttcgttgagctgaatatatgtatgcatgaaaactgaatcgagaggacagcaacacgaaaatatttgggttgtggtcgggacaaagacgtacacaccagctggatatcagagtatccacgcacatcatttcatagtatttcaatagatatactagctcttcgctgatacgcacacagtttattattcaagttcatggggtca

SEQ ID NO: 42846 - DNA, 1104 bp, Oryza sativa
aattagatctatcattgagcatgtgatatcaatataaataagagtatgaaattcctatagagtttttattggacaattatatttcatttgaagaaaaaaaatcatgtaatatattttctacagaaaaattttaggcttcgaataacataagattgtgaacaggtgatgatagccaatcatctagcaaaaccggtatgtgtaataagtccaaatactccctccgttctcgaataattgacattggcactattcaaatttcaactttgatcagttgtattttttgtgttaaatttatataacacttgaaaacatattatattatcgaagtgtgtagcatcataaatataaccatacatttctatttttatcataatataatcacctaaaagtaatccatggtcaaagtgagacggatgtaatcagcagtctcaattatttgaggacggaaggagaacagagggggtatttaaacagacttagcacagcagattagcaatccaaacagtactgatcagattcttgggcacttttgcttgtcttgtttaggcaaatcacccatacagatcaagagccgagacacagcaccatattagtaactcaacggctcggtgctcacccatctccagaaccagaaaagactcacaaccaatccatttcctaacaggtgtaagtctgacacagaacaccatcgagaatagcaggtttaccgagtgggtgaaacttgaaaaaggtgtaccatttctaacctagaataaaccatcagaaataagatggtcaataaaatagcctagaaccttttttgtcctcttgtttcaaggcggaaattagatagtctccaagttgcagttgttaaatctaagtaaaccaaagctacatatgcttccacaaattacgagagcacggaagtaacgaatcccccaactcctccgggatctctttttttctccccaaaaaaggagtagacccctctcccgaatctaatcaaatataggtactattcgcagtccacctccacccacaggaataaaagaaaagggaaagatcttagtagaaaacatccaagagcataacaataataagctactaataaaaggaatagtaaca

SEQ ID NO: 42847 - DNA, 1636 bp, Oryza sativa
tctcaatgatatataggacccacatgagtcaatgacatgtgggtcaggatagtatatcttaaattttgtaaaatttataatggcatggttccaattttcccaaatttaatttaaaagctaaggtaaggagtaggcatcgtgagagatatggtacgtaggcccatctggcctttctaccaaatcgccaaccacgcaccttgattccgtatcacgcgacctccagcggttgacacctgtgccgcttctctgtcgcaggatcactggtcagatcggattcgacgacggggaaggagacactcgtcgcgggcagcagcacccgacagaagcacgcggggacgtctccccgtcggcgccagctgccttgcaaagccaaaactaaatgggggcatttgcaaatttgccaccgattttttcaatattgcaaggatgccactcgaatgatagttttaatggtatttttgtaattttctagtgacagttttataataacgattcaagatagtgataaatttacaattgccccaaactaaattaccccaccaacccgtaaaacggagcaatcactagtatatgattaactaaatattaattttttaaaaaaagtaaattaatatgattttttaaaaaactttctataatattttaaaaatacaccccgttcagccgtttgaaaaatgtgtgtgaaaaatgaataagatgagttgagaagtaagagtggtaagttgggaaaggagaaagatcggtgaataactccactattccatcttttcaaaaaatacattagattgaaaacccaatgtacatagccatagtgctcgactattccacgcagttagacgtaaaatgtgtcaatttcctgttcttgttcatattaaatgcctttaaacttagcatttctttcttaagaaaaaaaacttggcatttctttcatgttagaaactagcagcatttactaaggggtaaactcgtctaaaatgtccagcactatatggaacgatatacattttcgtccattctgtaaaacgctacaacaataggaaatatgattaatgaaatattcctggaaaaatcctttgtcttgacgaaataaagtgtgcattatatttttgttcatagattcatgtcaccgcttgtgtcgggaatactatgtgtatcactcaagtaaaacaaatgttttgtaggaaacatgaatcaaccgcatgtgttgggaatacatattttttcaaagaagatgaatggtcaatcatatcccgttatatattaaaaagttggagggagcaactattataaagttaaaaatatattttttttgatttttttaaacttgaatataacctttttcatatatcgtttagtagttaaaatatgctcacaataaatgaggaagtagcccaatgcaacagctcttcaagctctgttcgatgcggcgattggatttagttagttattagaacatgattaattaagtgtaaacaattatattttaaaacataaatatatttatgtttttctttagaaaatttatatagaaagtttttacgtgaaatacgcactgttagctgtgagcttacggtaaacaagagatgaatcgaacctaatctcagtttataacacgatcttaagtatcctaaggaag

SEQ ID NO: 42848 - DNA, 619 bp, Oryza sativa
gcgcgccacactagcgttttcgcttttcgtaaacctgctgcgcgaaattgggttaggcatttgaaataaataaaaagtatactttgactcccttaactattatttgagcatgattcacgtccttgtcgacgtttgatatcgtgactacggaatttgcatagtatggagattgttagtaccagggtatatgcgagattgaggtaaaagagatggagatagggattttatacaggttcgggccccttatctgacaggtaatagccctactcctgttgaccgaagccggtgttgctcttattcatcataatcacatcagtacaataattaggataacttatgtagccgtcgttgacttagcggcatggataaccaacacgtagtcgatgacagggtagtcatccctcaagtccgcactcagcgagatcggagatagcactagtccctcttgttggcctctgcagataccatattgggtttgtctaggctatatctcatgatatctgatatccggcgagcttgttcatggcacatgttagcttgtgaatcgtgtgtcgatatgttgttcttgttgcttgtcccatctcctcctagcgggcttgtatttatacccataggtgtc

SEQ ID NO: 42849 - DNA, 618 bp, Oryza sativa
atttcaacgaaatctctatctctatctctactacttaaaaaataagatgtgcttccatcgtccgtaaaaaaaaaccagacgaaaaaatccatccgatccaaaacaaacgggctaaaaaaaccggacaaaaaacgggcaaaaaagaaaagaaaaaccaaatctgtcccatcaaaaaagggcaaaaaaaagaaaggaaaaacgaatccgattccgtggtaaaaaaaagggagaaaagaaataaaaaaggaatctgtccgattccttaaaaaaggggcgcaaaaaaaaccaggtgaaaaaaagaccggccaaaaaaaacgaatccgcgtggatgcggtaaaaaaaagagaaaaaaaaaacaaatctaaaaaaaaagaattatatgtggtgcagtaaaaaaatcgaatcctattatatttgacatggtactatatctctattttctctatctctactacttaaaaaaattaaaaacgtttccgttgtccgtaataacgaaagaagggcgaaaaaaacattaaaacagaaaaagaaagttcgattcaatttacttccattgtccgtaaaaatcttatcttatcttaatctcaatctttccaaggggacgagcagcaccctcca

SEQ ID NO: 42850 - DNA, 515 bp, Oryza sativa
cttgatcgtatactatcctgaatttgttgagagcaaactttaagctaggagtatactactactcctactttcttgcaaaaaaaatggtgttcaaaatgcatgcttcagatcgacctagcttagctagggttcgaaattttgaccaggtcgagaaccattcaatatcaccatctggttccaaaacaaaaaataaaaataaaaaataatattcaacgccaccaaatcgtgagcttgaattcagaccagtgaaagtgaccataagacagttctggtgttgcacatgtttcagaggttgaaaaaagggaacaagagtttttcagaaacatggttctaccgatcaaaagatacaaactagaataggatagtaccatattacagaatgcaaaagagaaaaaaatgaaaaaaaaacacttggtagaattaaacacaaaacattggataatctcactgacctttggtttattccgagcttgctcttgcaactctcctctagcttcttgcccccacagatgtta

SEQ ID NO: 42851 - DNA, 715 bp, Oryza sativa
aaccgagactaaaaatgatctactaaagatcaaaaagtacccctcaacttttaaactggaactaaagatactttttaatcccaggttttattagaaccagaactattgtggaatttgaccgatcgagcaaagatggtttctctaccagagtcatctggctcacattatccattacccagtgagtgcacaaaatttcttgttttgttagttttctaggaaatgattttttttaaaaaaaacaatgtccatgttacagttgggagctagctaacttagctggaagctaggttgcaccgagtgtcacgctaagatctacttcaccttcaatttatttcctcccctattcctattatgcctcctccataacaaatttatccatccaactccactcatcttgtcatcgcatataaagataaagaaaaattgtattggtttatctgtgcatgtattagaaccgcatgatgctaacaaatatatatctctatatacctaataaaaaaatacataataaaatatacataaggctaataaaaagatacataaggcttctcggtatttttccatccgtattatttcgccgatccccccgcttttttttcatctacttttttcatcgcagttttctcttcacatgtttttttgccattttttcagggtttttttcatccacttttttttacatcgcggtctttttggcacgcttttttttcatccc

SEQ ID NO: 42852 - DNA, 781 bp, Oryza sativa
taactttaatcctaatgcaatacttcaggcactggcaacccactgttcccagatgttgctctactacgtaccaggacacggaggacttaagtgatctcgagggctgtcaccacctcaaacgtactgtgggatacgcatcaattattggataataattacctaaacaccacgtctaagaaattactatctactttagtgtttataactcaccaaagcaatcactatatttttgttgattatagtagacaataatctcgtatgctacttaggaactaaccaagagttaattctcacaagataaatctaaattactcaagaagaatattatattgaattcagagtaataaacataataaaagaattaggagaagattaccgacaactccggaattcttctgactccttatactctactctactctcttcctattctagtatacaatatagtacaatagagcctcttataattcagctcaagcttggaagtgtgtgagtgaagtgagggagtgatgtctttatatacgggtaggtatgacagttagcgaaggggaaatgttcgaagtgccactcaaaatagcacgaaaataacacaaacaaaacagcaacaacaacaacttcctctcttcccttccttttttttttccttctcttcacttatgattttttttttgttttctttctttttttttgtacagcaagctcaaagcttcagccaacaagtcaaaacaagccttagcaaaataaccttttctcaaacattttcgaaatttcacaagcttca

SEQ ID NO: 42853 - DNA, 669 bp, Oryza sativa
aactttttagggattggttcacaaatttctatgatgggttcccaaggaataccagaatttggtttgcatatgaagaattttcaaattttgagctcccagccgattttcggtttaataagagcaactctgaaaagtttgataaatccagtgaagtgttctcaacagccatcactccttgcatactcccagttggcatccatcaaggcagaaacatccaaatatcttatgagttttaccatccaagaagtgcggcaagacaattagggatgggccaactaccgattggtctgttctttgccgataagatccaaagcaggggagaaatcacatcagctctcatgatggatcggctgctgaatataccaagacccactctagggagtattgaaaatattgagctagctgtattatggactgcggcatttgaccgatggtggatagaatggaagaaacatctgttccatcagtcaacttcaatgtacttgaacgatttattccctgaagcggtccttcaagtaagtacttttatctttgtcaatctcattaatcataagccaatgcaccatacttgaccattttactttctggtccgcagacaacagaatcctctcctcctcatcagagtgaaagtggtttggagatccattatgcttcaaggatccttcccaa

SEQ ID NO: 42854 - DNA, 635 bp, Oryza sativa
tacgaagggtgtgtttgatataacatgaactaaagcggtgaattttttatacttatgaatcacgtgatatcataggcatgttttttaagctcttacaataattttgtaaaaactttcttcattagcatttcttaacccatcaactttatcgtctatgttctcgaataattgccataagctcgatttcatcaatcacgcatcatcaagaatgcactctttactggaacccaagtgaccaaaatagatattctctcgaataattatattaacttgaataattatatcaagagacgtactccgtatcaagtagtaatactcaatttgatttataaaaatagttatcactacatttcaaagctaaggccgtgtttagttgcaaaatttttctttaaacttccaacttttccatcccatcaaaactttcctacacacacaagcttccaacttttccgtcacatcattttaatttcaaccaaactacttttgtgaactaaacacgacctaaatagacatagcacagtgtacaaggcatagcaccataaatggagccagtgctcagtgtagaatactactccactaataattgtgtgctgtggagtactactaaattgttgccacttattcggcatcaatgc

SEQ ID NO: 42855 - DNA, 655 bp, Oryza sativa
aattggagctaataatcggctatactattaggcaacatatcctatgcacacgctacctatgatgcactcatgcactcagcctccatagaccctccgatttctatccaacggatacaaatcttaggtgagcatttttgcagaaaaccgcccgcatcctacacctaaatttacaggtaaccccctcgcttgcttttctcctctcttgttcattcttctccccagatcgatccccaatcctcttcgtgctgggcgacggtggcatctccaatcgccctcgcctacatgcgcgtcctcctatcgaggctggtgagcaagcggtggccgtccggcgccctgtccaagcgctgtatctcgcagccacatggttgttctctgctcgtggcctggttttgccagctatataggcgtggtggtggtggtcgtcacaacggcggggctcgcgctgacggcatgcagcgcatttagggtgtttctcttcaggtcattagcacacgatgtttgattgggtcaaggatgatcaattaggatgaatcgatggcttatggttctctttttcttctttgctgttaactgaatgcaaaagattttgttttgatttctccattcaagtcttatacataatttgaggtgcggcgttttgtgttaactggctgcg

SEQ ID NO: 42856 - DNA, 621 bp, Oryza sativa
gaattttttgggttcaaagatgaaaatcgaattcatagacaaactaagggacctgaactgaacttatatctaaaagaaacccatacaaagttttgggttgggcataaattagtaaaaggccgaaatgaaatcaataaaccttacgcaggcccattttgaaaaagaaaaaagcccaccagagcacgtgacctcacaggcccatatactccgataatcccctatactccccaagactgaatggaaaaagttcatctgaggtcccttaacttatgaacgagtccgattttcgtccctcaactgtcaaaatcagtgcaatataagtcccatggcagtttggacggcggttttagctgacgtggctaaatatactcggtcttcatctgatgtggcattgacgtggtaatttgatttggaaaataatacaactatgatcccacatgtcagttaaaaaaaataattaaaatgatgtggcccacatgggccccacatgtcattctcaacacccccagtttgagaaacatacgcgtgaaaaatgagtgagtagaatttgggaaagtggccaggaagaacacagcctatatatgtgccaagatataatgcattggattattaaagaaatat

SEQ ID NO: 42857 - DNA, 552 bp, Oryza sativa
taatcttagtttagaaaatcaccggctgcactactgagattgaatgaagtaaagctatcatactatgatgcatatccctattggtgcgagagaaaaagataactcactttacaaataaacgaagtcagtactgatataggttctatactaactccgttataaaattatgttcatctttcaaccatcccacatataccaatacataagaccctcgtcgactacttatattccctaatgaatgaaaacactacattaccagaatataaagccgtttatagacaaaaattttatatattatgtcgtaacgactgagaagccaacggaacaaggacatcacgtcgaatacatcttcgcataaccttcaaaatcaagctccatagttcacatgctagtgtgttcttggcttatcatgctatctcatggggctctaaaatattcatgcttaccaaatctgaatgatactactttatattctaatcttgtctcaatacattaatacctgactatgatatactatgatgtagtgtgaactccaaaaataaatttattaac

SEQ ID NO: 42858 - DNA, 994 bp, Oryza sativa
cccctagcgatcagccggtcccccctccctccctccacgtggttttcttttttggcaccgtattacttttctattttagtaaatttatacacctaaagtttgtacacctcaagtttacacatctaaagttaagtgacccaaagtttataagtcaaaagtttttatatccgattagaatttgaatttgaatttaaatattttttatatatagtatttctatacatataaagtttatacacctaaagtttatagacccaaagtttataagtcaaaagtttacatacccatttcaatttgaatttgaattcaaatattagtttatagacccaaagtttataagtcaaaagtttacacacccgttcaaatttgaatttgaattcaaatattagtttatagacccaaagtttataagtcaaaagtttacatacccgtttcaaatttgaatttgaattcaaatattttatatatatatatttctaaacataaatttttccaactttatttttttaaaaaaaattatgatgtagtaggaagaaaagagggggaggaggaagggggagagttgggagcgtatagggggaagggggaaggggcgggttgatcgctccccgcgatcacccgcacattagatttaccctgttgcatatactagggtgatcgatcatctgccgaccttcgttagcctcgacactcgagttttggcaaaatttaatttgaagcaaatggcgtgcacaaccacgtgcgtacgtatgcagagctcgctgtgcaaaatgcggctgtccagtaagatttgacgcacgcaaaacacaccatccattgacaattggatggaataaatattatatatactcacgtggtacttatctataattggacgttttcttgtgtgcagatcagtgcatgttagcgtcgaagttaccgtaaggagtgcaggggaaaggttagtttctccacaaaatctggggaagatctaataaaatatgcaaatgaattt

SEQ ID NO: 42859 - DNA, 574 bp, Oryza sativa
tgggttaagtattaacggtgtaatgcatatttatataaactattgtatggataggctaatagagttgttgtagatgacgtgttaattttatagctagaaattggctatactattaaacttattttaagcacatgtggagaatagagacaacgaaaaacaagaaatgtttcacatacaagagcaaatgcattgaatacagaagtgagagaaaaagtgagcaaaaaatcatgagctggctcttgtcaagcttgttaacgtatttatatcacctttataattagtaatttatttgtttacaacatataaacttaataataaacactagtgaagaattcacaaaatacaaatagttttgatgtaactaatggactagtcactactcgctagttaagaaacactaagtatatatgaagatgtggtgatcttttgtagtaatgagcaactcacaagctagttcattaagctcaagagttaaatttctagcttggctcaactcattaagaccatgggtttgagtcaatcagagtcgagctcagtagctcaccatgagccaatccaaaccacgagcttcgag

SEQ ID NO: 42860 - DNA, 702 bp, Oryza sativa
ttgcagtctatggagattttgggtgaatcttataggaagcttactaaagacctaggagtatgacttatacgctccacccaaggggtagtctacagtcggtctaggaccagataagactctgagtgaaacttgcttgcacaagacttgcaattcaaggcgtagtccattgttcaagttgtgagtaagtgtagcttggagttctaaggggatgttcaaccttaatcggtctccatcgaacagctggtatataaacagtacattggaaaaggcaaatctacgagggattttgagatttggtgggggattgttggaattaatagatgggctaaggcccattcgaagattaattctttggaaaatcacaaaaacccacctcatgggatggcatgcatgtggagtttagtacaaccttgcttattctaggagagggggacctccttaaaagggaggatgccctcctagccacttgaagcatgtgtggtggagagaagaggggaaacacgcgcgcgctcactcgcctcgcctcgcctcgcctggcctggcctggcagggtagggcaagcggcgcgtgtgcacgacgtacgcgtcgaatggtccgcaaaattggctcctcacccttgcgcagatgcagcctccttttgcagttttgttttgctacgggaaattcggatttgttttgttttggaaacatttcaaaaaatcc

SEQ ID NO: 42861 - DNA, 733 bp, Oryza sativa
taaattactttttagacatataaaagtaaatttaataaattctaaaagtaatgaagtaacttgagacaaaaaggaagtaactttgtcgtcacattagaaattaatccgttgtagggataaaaacataattctatctagaaactaaattaatcagcacaaattaacgaattgactaaaaacaataataaaagtaatcacttcatagcattatgaatgtataggaagtaatttaatcaaatctaaaagtaatttatatatatgataaaagtaacttagtatataataaaagtaattttcaaacatttttttcatcataatataatcatgtaagatcatgttgtacagatttaattgcaacaaacacaacgatgtaatcggatcgtatatcaaataagtaatttaagagaaatttttatttgaaatttagatgggtaatgaggatgcaaatggcaggtactactacttttaggtgctactacttttagtaagggcatccacaatgtagaaataagaggggtctttaagcctccaaagaagtctatatacattgtggaagtggtctatatagaagacatttggatgagctatccttagctataaagaccggccacaaggattaaaaaattggtacatcctctccaattctggtacttgccgctatgagaagaaagaggaaggcgggaggagcaccttgcagccgctgccattgaagccatccgtgagcgtagacgtg

SEQ ID NO: 42862 - DNA, 1044 bp, Oryza sativa
attcgactccagttctgattcggagttcgcagatcgcacccgccgaaataccacagaagaggtgaacccgcgcgactgagattcggattgcagactaatgggccgggctttccaattcgtggcgctgtggaatcaggctcattttcgtacaggcctctcctttgagaggccgtagtttagcccagcccgtgctcggccacatttcgccacagcagcggcagagtcgcggcgcgagagctaattcgctcctccccacgccacgccttttttggcctttttttttttttttgctttttttccctttttttctgattacgtttcttaatctttagcacacatgttttttaaaaatattttgatttgaaagttttaaatcttgacttaaaattttttcaaatcttaacttaaaaatttttaaatctcgagttgaaaagtttttaaatctgagttgaaagttttcaaatctcgagttgaatgttttcaaatctgggttgaaagttttcaaatatcgagatgaaaatttttcaaatctgagtgaaagttttcaaatatgggttgaaagtatttcaaatttgagatgaaaagttaaaagtttttaaaatttgacttaaaattttaaatttcgagttaaaaggtttcaaatatgggtttaaaattttaaaaattcaacttcagttataaatttcttttcaatttgttattaaaaaaaattgcgaaaaagaaaatcctaactactaccgttattaccttttaaactgtaattatagtcttgtagaactagccaatagttattttgagagttattttttttagcacaaggaaatagccattcaataaaatagctctaaattgtttggatccaagtgttatttttcagagctatttggcctttaatacactttcctattaagtgagaactgagaaagagaaaaatactttttcagtgagccccaccccagatagcaccaattagcaccctttaaagggatagtttttttagtaggttatttctaaatagacttgaaatagctcatctgtttaaaa

SEQ ID NO: 42863 - DNA, 703 bp, Oryza sativa
catcatcgtgccatattcgacaaagccatcgaagcttcctcaaccagaaccgctagagctcctcccctcaaagccgccgccgccgccaaatccagctccgcttgaagccatcgaagtcgaatccggctcctaccaaagctaccacttgctctccttcatccgaatccagatgtgacgacgagagagggttgtcactgctgacgcccggatcttcctcctagtcgccgctgtcaccgccaccatcgccactgccttcgtctacagctgctgcatcgggccctcttcctctcccttctttcgtcagatccagagcccaggagctcgatctagtggcctcaggcttctggttgccggatccggacgcttcctctcccttcttccatcagatccagagcccaggagctcgatctggtggcctcaggcttccggatccgaatgcttcctctcccttcttccgtcagatccagagcccaggagctcgatctggtggcctcaggcttctgattgccggatccggacgcactgatggcggcgaatcgtcaggatcccgctactgccggatctacgccctgccaccgcggcgtagttggctgtctcggcgacgaggccacagtcacctgccctctttttccttttatttatttgctgttttttctcaccgcttggatgaattaattgaacataacaaagttgatgcaatact

SEQ ID NO: 42864 - DNA, 563 bp, Oryza sativa
gaagttatatggaggtgccaatgtgaaaggcactctgaaagggaagaaaggaatctcctgcaggctttggtaccttcctgcctgtagacaagtccaacagaaaatgtggattagtgatgctgaaataacgtttagttgatgtcttttgtcacaattcacgcatcatattggtaacgtgccgtttaatgttgacgtgtgctttttgaatccactgcaagatgcttattctttatctttgcttaaagtaaacatatcacatttatggcatggctactctagttcttcactccttcagatcagacatgcatgcatgatttgattaataaagcgtgtatatttattagaaaatcaacatttgtaacttttttcattaataatgaaactaacaatacaaatattttagtgctaatataagtggtactactgtattcatatttgaaaatatttttgtatgatgttaatttcagtagttgttaatgatgtataattatattataaaataaaataataatcaaagcaaaatgttggagaacaagccaaaaactaataagccttactactat

SEQ ID NO: 42865 - DNA, 630 bp, Oryza sativa
tttataatgtttgatagtctaattaggacggctatagattattgacgtctatttatttttaagtagtcattagatttttgtttattttaagaagcacatcaagatacacgtacagtcattagtcaaactcttgttgaacagtatggaaatgtccctcaggttctcatgcaaagattgccaactaagcacgcccacatttctctcccaatttccataaaaaatactttttttctcccaagcttctttgacattaatttattatactgtaaattataatatccaatgaatggtttgtgcttgacataatgaaaggtcagaatccgagcaaatatttttccttatctactgacccgttgtgataagaaaagaatttgaggatatctaatggccggaatttgttctttgtcaataaaagaagcacgttcagaaatgagcttctttcagtcagaaaaatggtactactaactgctagctagtactagcgtgcgtgtcaaatatgaattcacgctccgatcttccaatcctaatcagtaatttgtcacgcaatcttgcttcaaaacaaccggccgtaccgttcaatacggtgcatgcttgcaacattgacatctgaattaaggaaatgttcgccca

SEQ ID NO: 42866 - DNA, 548 bp, Oryza sativa
taacttcccattcatttcttctgtaatattttgtgcataaaagcttaataaattctcaggattaagtctgtcatccttcaaatatagctgctgaaaaaaattgtgtgccaactcttccatttcacctatttcacatgtggccatgccatcgtttctctttagctttcttactctgttcttcctggatcgccatgaggcctttaagtggaagtatctggtgttacgatcaccttccttcagccacatgatacgtgatcgttgcttccaccagatttcctctctatgcaggagctcttctaattctttttttatttgtcggacttggacatcggaatcaagggatcccatgctcctgcactctcttaacttgtctcgtaaggcagcaatcttctttcttacattccctatcttctctttactccatctagataacttgcacattgtatttttcatcttcgcactaatgtcgcctaaatttgtgatagcgttgccatcactccatgcactttgtatgacctctgggagggatgactctctctcccagactt

SEQ ID NO: 42867 - DNA, 687 bp, Oryza sativa
catcattcaccttaacttctcataatggacgaattacccccctgagtctctttagagcggttttcgtcttatgtgacacacacgtagcagtccaatcagcattaaaaatttaaaaatagtgggcccacatatcatacgtgagcaatggaggatgaggggagatatgacatgtgggcccactatatttttaaatttttatgctgattggactgccacatatgcgtcatgtggaacgaaaactgtctagagagactagggggtaattcgtccgatataaaaagttgagaatgaaggatatctagttttgtgattcaggaggtaatttgtattgttgcaaatagttcaggaggtaattcagacttttctctttaagaaataaacttaacttgtactaacttataacatgtggtctaaacaatatcgagaatttttcttataagaaaacgtactggctccatattttcatattttttttatagatgaggtcactgatttttaaacatatgtttcactattcatctggtcaaatgaatggtcaaacatctattaaaaattaatggtgtcatctataaaataatagaagaaatgtattttgtagatacatagagtaaataatcaggtgaaagaacggaaccggaacaatcaaactgggacctcaaatatgctaaagatgaagattaagtacgg

SEQ ID NO: 42868 - DNA, 960 bp, Oryza sativa
gattgttttatggttgcaacttataattgatttcactgaggctttctttacaaactgtattaaaatatagctgttgatttattaaaagctgatctcccatcttcaataagaggtttcatgctaaaaaatgctggtatcgagcgcttcattgagcctcctgacatgaaagctagcttgtaggccaatttaggctcgacctgagcttctatccagctcaagcttgcttggttgatagccctaacttcagacatactaataacaaacacttgcaaaaacattcagtaaatagttactgcaaattctaatctcctccaatacttgtccttgctaggtataaaaacaccctccaactatctagagggaaatggagtatactcagaacaaattcagatgcatatggttttatagtgtagggtgctagacagacgttcactcaaagtttaggatatatggagtctaaagaatagtatatagcactgtatcaatatttacactatgcgtttgtcgtacttacatagtagtaaaatttgaacacatcaaagaatggtgtatagggtaccctattgtataacactattgcaagcctaaaccagaaggatgagtacgaacaaattgtctatgacacattgtaaagacaggaatagaatgtgcttcccaatcaatattcactatatgttgaatttactgccatttgccatggccttggaccttctatgtacctcctaacagcatacaacttaaatcaatctttaccactcacagacatattcccttggcagttttgagccccgcaaaaacattctatttcaagaccataatgttgctcgaatctacaaaacagaacccacaatactgtggtcatcaactgcatcatgcatatcctttttcaagcaaatagaggatctctttgtgattctgttcaacaccttttgaaccaaagtaatatgacaactgtttttt

SEQ ID NO: 42869 - DNA, 656 bp, Oryza sativa
ttggcaggtacgaaaggtagaactattgttctgcaataaacaaaagtaagcagagctaaaaagttttcaggcaagttccttcagtactgccctatgaaagtaatttaacaggtttaacatatgtaaaatcctttgataaaatagtccacaaaagcataagtaagaagaagcagtgatctgaataaattacaataaaatgtctaagcaaaccaaataatgaatatcttataccttctccaacaaattctatgacaaaatcatctttctcaatggcttccagtgctctagatccccatccacaatattgtgtctgcagaagtattccactaataagtaggttgtcaaagagaaacaatagtgacagaaaataatttcaaaatcagatctccaaagcacaatcaagcacagcataagaacacataaagaaaagggcagcattagtactttaggaaaagatccttacatgtatcaatatcaccaagacaactatggaacttaactgccctccaaaaactcagcagtccatgacaagccttaccttaacgatctcaatctttttctgtcggcgaaatggtttgttagtgcactcatctgagcagtgacaagcccgagagcagctaaccaatagagacctgtaggaattatcttaattttct

SEQ ID NO: 42870 - DNA, 650 bp, Oryza sativa
actcaacgctaagacaagtgggtggctccgagaatacaactaatatttgggaggacacaaaccaagttttcagtttatgtgattcatgatcactgaggaccaacatagactattataactagaacactacagtttataaagtggatgggggaacaatcttgaacatggaacattatctattcgtaacatatggataatcgattaaaagttttggaaaggggacaaaaagcaaaaaaaaaaacaagataatcacagacacatggctcaccgcattaaaagatgcattctcttcatctgctgtcctatcccatggaggtcgataccattcctcgatccgatctttcacaggcactctaaacatggatgctcctgcaggcattgccatcggtcctcctaaccaaagctcaccatgaggcgaagggaatgtgtcaccgcggaccggctggaagctgacggacaatcgcgagggcacatcacagagcaatccagtatcgcgctggaccttggcctccgagttctctctgctcagcaatttcagcagcaatgacctcctgacgaatgccctcctcccagagctcccggcggagcgcgtccatcgtcacctgcactgaaactccccaaccccaccgctgtttagtttctgcgcatga

SEQ ID NO: 42871 - DNA, 673 bp, Oryza sativa
tttttggcggtattccgacttccgaagggatcggagatcggcggtgcgaactccgaatcagaatgggagtcgaattgattcgcgaggatataaggcgcgcgcgcgtggatgacgcagcccatcaattcgacgtgcgattccagcgcgcgctctcgtctccggttaattgcttcgatcgcttcgcgtcgcggcacgtacaactatctccctcttcgtgacatttcgagcagctagccatggcggcagcggttctcccttcgctgctcccgacgccgcccgcgagcaagttgccggcgctgctcccgaccccgctgaggagccagatgctgccgctgctcccgacgccgtgcctcatcatcctccccgcctccttccgcgcgccgccggtctccgatcccaagcccggccgcgccgacgccgtcgagaggtgggacgcgcgcaagaaagccggcggttcggcagcgtcgtcgtcgtcgtctagctccggcagcgcgatcccctgccgcgccgacgcttgcgaacgctgggacgcgcacaagaacaagaaagccggcggctcggcagcctcgtcgtcgacgtcgtcgagagccagcggcggtagccccgggcgcgccgactcctgcgaacgctgggacgcgcacaagacacccggcagccctgcgtcgtcgaccgg

SEQ ID NO: 42872 - DNA, 695 bp, Oryza sativa
agctccaccggtgggctaacggccgtgccactcatgtccctcgcattcactgccgctatatgggctgcggcggccggtctcgccggccacgacgacgacgagcttcctgatcaggcggctgcggaaaccacgccgctcctcctgctgatcctgtctatcacttacttcctagcggtcgccgtgatgtaccgcgagctggccggcggcggcggcgtcaccgtcaccgatcagaagcaggacacggtggtaagacgagacgcttgctagctctcggttgctccttagtacgtgagtgtgtgcacgccggccgatcgacgtcgcggcgacgcgtatagctatatatgtgtactgacgcgtataggtatgtatgtttgattgtatatgctagagtgagatttcgcgcgcggtagaggttacttcgtttttcttttattttcgtggcttgtctgaatgtgaatcggttgtgagacgatgatgtattcgcccgtttgtatatgtttggcccaattgcgcgtttgagtgtgtgcaactgaaatattattttcgttttcatgggttgattgtgaaccgtgatgctttattttgtattccatccatccacaaaagttacacatatttcacatttaagtttttccaaataagttgtttctatttataatctttatgcattcaagacttagatgaagagataaatt

SEQ ID NO: 42873 - DNA, 519 bp, Oryza sativa
aaatttacatactagttacaccccacttacaaatcacttatatatgtaattttgagatttacatatgtaattttaagacttacatatgtaattatatgtaattttaggacttacattgtaaatatactaaaattacatatgtaatttagagatttacaatgtaaatacataccgaatattttttgataaaaaatatggtgtcataaatatagctagtcccttaatattatccctcttgctgtccaaatcaagcttaattagctcggacaagagtcccgcggttaccagtagctttcgtgattattattcttattccatccagctcgacgttacatcatttttctaactgaattggttgcgttggtaaattacccgatactgactaattgactacgaacacttgttcttttgctatctaacgtgtactacaatctgctgtgaggttaagttagcaaccaaataccaagggggggtgcgcactgcgcagtgatgctggcccgttttgacagatcgggccaa

SEQ ID NO: 42874 - DNA, 690 bp, Oryza sativa
tctagtattatatctctataatttgtatttgacttttatctctaaccaacgcatctgtacttgtaacgtgaagtactaatgatagttccaacttccatgcatgtacttattcattagttagccaattagattccgttgccgaggggagcaatggaattcagaatcagtggcgttttgattcgtttgtcagggatacagagctgccgaacctggcccagggtatctcatgaaaaaaagaagggaataaaagccgttcattcaaaaaagaacgggaaggaaaaaaatcatattaccaaatgacatgtcgaccccgaaaagtgctgggcccacatgccagtgagacacggtccgtagtcgcgtgaagcaacaggtcaggtcaaaggtcagaagcgggtacactgggcgctactggccgtaggagttgtctgcctctccgagtccgggcagttgtacaattgtactataagccaatgtgctagtataccactagtctactctagatcagtacaggcagcgcagctcacacacacatatagaacgcacatacatggaaaatgcattgctgatccagatacattctccggttgcgaaacacatggtgtactacgctacgcgaacgtgatgatctctttttcacgtagtactacacatacacccctctctgacaaagccaaagatgcaaaagatgac

SEQ ID NO: 42875 - DNA, 1418 bp, Oryza sativa
ttttctcttgttgtcaacgaaatccatgccacctggagtagttttgatttgacgaacaacgaccaaaccattagttctgcatatgggccgccaagaagcaagcagtgggccgagcttcaacttgacgggaaaaggtataccggaggtccctcatcttaccgccgagttacaaaatcgttcataaaccgaaaaaaacagatatatatatatatatgcatctcttaacttacaaaaccagatcactctaagtcgttagacggttttatccttggttttacctgacgtggcagttgagtcagcgtgtgacccacgtggaccccttcccctcctctcttcacctatctaactactgggtcccacaccattgttcacgctcagttgccacattcacatgccacgtgggcaaaagtagaaaccatctctttagagtggtaaaaaagagagcaaatctaaagggacatttggataactgccaaacttattagtgatgaaaattaaatttcctgtaaaaattagtcgccaacagctcatacacactaaaatgttactattccccaagaaaaaaggttatcgtcgaacacaaattgtgaatcaataataaaaagtttttataacatggccctggcataacccacaagttttttactccctccgtctcataatataagggattttgaatttttgtttgcactgtttgaccaatcgtcttatttaaaaaattttgaaattattattattattattttgacttactttattattcaaattattttaagcacaactttttatttttatatttgcataatttttttaaataagacgaggatggagggagtataacatggcattcatgaaaggaatttttttggcggggcatgaaaggacttcaatcttgacttacaaggacaatcttaaaaattgtagtaggtggtacgttcagaagaggtagatctctggtctctgacacgtaggtggtacttaaaaattgacgggatataaagaaacacgtatgaaacacgtatggatgagtcgatgcatgagcagagtattataaattgagataatttattgtatcggttttaccccgttatataatagacaaaatttaccacaggacacgtaaaaaaacgtgtaattggctgagagacaccgcgaaaatataatacggctgatggacactaaaaaagtataattagccataggacatcggtcgtattattttattatttccaggtcaaaagaggtgagatattttttaaatgcccatattgccccttctctttccttcttttcaccttcccgttgacttcgccgggaacgacacaacagccacagagagcgcggtggggtgaggtcagcacgacgagttgcgacgacattggcggccagggcggttgatggcatggcgccaccttgga

SEQ ID NO: 42876 - DNA, 1752 bp, Oryza sativa
caaaatatacctaaaacatccttagaaatatagaaggctaacaattaatttatcctacaagaacttaaaaaaatgatatttttaaggcctccttgcacaacataaggatttgtatttgtttgtaagtttcaatatttttacaactataacttatcttttataatctacatacaatactttgtgctcattttttttaatgtaaatcatcatacatgtgctatacgcaatatttgcatggtactatcttttgagtaaacaattcctcgttcatatgtcacacacaaataactttaaaaaataaaacatgaaaacaaatcttaacccatatgctaaaaattctatgcaagaaggctaaaaaattcatatttttaaaaaacttctaacgggattaatcaatctacaatcttctatagtgcattttggccatgtttgagaaagtatccaatcagacgatacattgtagaaacaattaataaacttgatcaatggcatattataaagaaggcaaagttgatggtaaattattaaaccaatacaatgtcagtaatatcctacttcacttcttcttacagtttcttaggacacagtggctcgcaactggctccaaatgttggagatacataaaactttttaagagatagctaccacctactaattcttcatatccttcagcacgaaatttggatctatttgttgtcgctacgttggagtattataatgtcactatactgcaaagcacaaccatgcctacaagcaacttaggcgaagaaaacaaagagctataatctagcttaccttgttaaccacgatcaactggtcagtcgagttactaattgctatcttcccggagtatcttccatgcttagaatttaaggtgtttaggagggagtaggatggcacaatgaataacatattgcacaaaatttccaatgtttgcattttggttctccacatttcaagaatgcatgggatcggaccttcaccaaattagtcaattttatcacagattcagtgttaatcagaaaaatatatggtgaaaccacatgtagggtgaaaattttgaactttcttataaagttttcaaaagaatcacacatatgtcggaaatatgtaaatagacaaccatgcaaaattgcagcaacaaactcaacttcatcagctatataatactagaattatcttagataaatgtgataatttttttaggcgtcactacaaattagaccatcatgggtgtacgaggtacagtagtatttaataattggtgctaaccaaagaatttctttttaaaaaagagtcagttttttaggctccaccccaaatgtacaacaaatatacacacggtctccaacccaaataatcaatacttgattttttttatatataaacatcttgtattatattatgatgaagatattttctacgaaaaatctattcattttcataaaaaataaatacccttaatttatatactgttggcatatataattaaatatataattaaggaagaaagttccactgaaaccgtacatttccaaacaagtaaattgcattagcggtaaacgaatttgttaggagggtgcaatctagcgcatgtcttgaaaaacgcttgttttaatgcacaaacttgtttggtgcgtgcgaaccaaggccaaaatcacacgacaaggtttgatcttgctgatttttttatttgaatgctatgtaaacatgtatcttagaaggattcaaggatatcatgtagacaaagat

SEQ ID NO: 42877 - DNA, 708 bp, Oryza sativa
agacatttgaataacagcggcaagcaatgcctccaaacctccatctattcagactctaataatatgagcttcttctaccagttattagttaaataatcgcatagtcatcaatttctatacaggttactgaataattactgtatggagaacatttgagcaacatataatatacatcagggtttctcatgggagagggagacatccatacaaatatctgacctcttcagcaaaaattcagtttcttcaggttgcatgcatatagatcgacatcccattcccatatgcgattatgcgcagtagttgaggactacagttcaagccccatccctgccttaattaagaaaatgtttactcctatacatccagctctttttcttgcatagagcttaactcttccatattttctcttcagatattacttgctttccacgatcagttcagtccatattcatatatgtacagaaagtgacctatcatttgtaccatttctacaaatcgttatctgttgtttacaaactttgaattccatcaccattcaccatttaacttggtttctcattatgcttttaataaccagctacccaaaatttaatgaaactagctttcttggaaatacagttggtgtccttagtccaactgtcctaacacaaaatgaatttccattccacttacatttcctactgtaatgggaatgtttttcctgtaact

SEQ ID NO: 42878 - DNA, 519 bp, Oryza sativa
acacattataggctgctagaaaatatacaaaaatcctctaagccttaattgacttttaactttgcacattttaattgttggaggctttcacacggtttttaattattctaggcataatttagaggatgtattttagagtcgttttgggacgtgacattgtgtaggtctatttcatcaagattgaagcaatggggaaactacccttaaccctaaagattgaaatagaccgatttgagagcaatgcacaagagggagagggatttaccggttgaaggagttgaatcacaccaagaaactaccctctattggtgcaaatcgatgaacacctcttccttcacctagggttccatgccatggatcacaaactcaataaaaactcaaatcaatccatggaatagagagaggaagaggaggggattcacttacggagtaaccggagtgattttgacggttgaaccggacggatttggtggagggaggtggctagggtttgggagaggagagagcagaagaaatttc

SEQ ID NO: 42879 - DNA, 691 bp, Oryza sativa
gctctatctgtagggccgtcacaggtgacctcacctgtgacggcccagagtgttgggcccgtcacaggtggtcttacctgtgacggctccacggttggcgcccgtcacaggtgaggccacctgtgacggccacatagttggagcccgtcacaggtgagtttgactagggttgacctagggttggacatcttctagatcgatccagatccggcgcccactctcactcactcactctctcgaccgccgcctcgcctctctcgacctctctgccgccctctacgcgccctcctctccaccaccgccctcgccgccgccaaatccgccgccctctccgccctctccgccaccctctacgccctcctctccaccgcctcgacctcgacctctccgccaccatctctgccgccgccctctctaccgccatctccgccctctacgccgccctccccaccgccgctcgacctccccaccgctgccgcctcactcactctctcgacggccgccgggacctcctctcagtcgccacgccaggaccgtcgtcgccgccaccgggatctcctctccgccgcctcctcctctcgaccgggacctccacggtgagcccactccccccgcctcccctcgtttactattggtcgcccgattaaccccctcttctcctcctcagcgccgccgtgccaagaagccgccg

SEQ ID NO: 42880 - DNA, 3359 bp, Oryza sativa
gcaagcttcctttgcttcctccactcaaatctagagcctatcttgtgagattgagagattagattagagtataggagtgttttggagatggcttaaagattatgtttgtttgagcactttggataccttgtgggctgtcacttgggcttattactcttggagatcttctcctagacggttaggtgtcgcccgtgagcttccaaagatcttgtgaatgtcccgggaaagtttgtgaaggttttcctcacctccacaaggaaacgaggtaagtgagtaaagattcttgtgctgagttttcagaggttgtcctaggtagagcaacttgcacttgtggtcttttctagaaggaattgtgagttggatcttggcggtcactcaattctagaaaatgacctagaagtgttgagttgaaggctgtggacttcttctgggatctttgcataagtgaggcaaggggttaatcgagacccggctctttgagcacttcaatggagagtaggacccgtgtgatccgaacttcggaaaaaaatcgcctttgtctctcttgtgcatgatctatgtttgaatctgctggtatcttgtgatttacatcttgtgcaaccttgtgcctgattgtctatagctaggacctgttttgcttccccaaattttgattttctctattgcccggaagttcctggctcaagaactccgaaagttccgggctgctcatctctgccaggaagttccggtgtttttcaccaggaggttccgggcactgttaatcttaaccgctgcgattgttgagaaaatttcaggaaagcctattcacccccccccccccgctctaggctacatctctgcgcgttcagattgaggggtttcgatccttatctcctcatttttccccttctcaagaattagagcaaaatcgcgtcgtatctatcttggaattgagccctatagcaaaccctagagttcacctcagagtccgtttcgcctaaaaaaatcgcgtctacatgcagatgatgataacggacgaaaatagtgctggaatccttatgtattttttaattaggtacatatattaaactagttttaatgaaactaatttgatacttcttatctttttataaacttaattagatttttcaataaatgttaaatgaattatcatatacaagggcagggtggctatactctgttttttttttttttttgcataagtaaacctgaaaagcaccacaaattatggccttttgttccccgaatccatcctaaatgtattggcatcaggaatgaatcaaaaatgatttggactaacctatttttttcaatccaaaaaggatgagtttttatttaacgtgtcacatatttattgccgtaaagacacgaattttatttgaggcattattttattccttttgaaacttatgatcaatcataaaaaatgtttgaaattgctttgaaccttgtgtatatttcttacgagctctctaaaaaatctaaatatgttttttcacccttcctctaataagaagcatttaggtaattttttttctctgctaattgctcctttggtaggatttaagatatttttggacagagcaagtaatatcccttgtttgactttcgttcaaaacgacgtgcatgtttccacgacccaagatagtaatatatatattctctccttttcaaatttaggacgatgttaacttttactccctctatcctaaactataagcatttttagcatagagataagtcaaacattgtcaactttgaatatttatttgttaaaaaatctaagaatatcaatcatgtcaaattgatgttactagaattatcattaaacaaactatcataactatcatagaatggactccctccgtttcataatgtaagtgattgtagcattttgcatattcatattgatgttaagtaatctagacatatatatctatctagattcattaacatcaacatgaatatgggaaatgctagaatgacttacattgtgaaacggaggaagtaactctttttatttaaaacatattacttttatctatattgttggtcaaattaatatatcggagaccgtgtcagagtctaaaaatgcttatattttgggacggagggagtatatataatatgctttgatagagtaaatttcaaaatccccatgttttatgatcaaaattatataaaaccacatatattatgacttgtgaaacataacccaatgtattatggttctaaagttttataaaacatatattatgatttatgcatgttgagtacaaatttacttaaaataataaaacatatagtgtatataaaaattttaattattaagttcttaactaatgttgatagtttatctcttctgtactttgaaaaattgtttcaaatatgctataattaataaagattttaataaaggtgtgattttacgaaacatatatatatatatatatatatatatatatatatatatatatatacaccaaaatatcaatatcaatagttatgtgccacgcgtcataatatctgtatttttttttacaattttgaccataatgaggttctctaaaatttactctaatatataatgttttttcattccacttattcaacatattttagtgaaatcatataagtcatgcgtaaatgcctttaatgaaaatttttttaaaaaaataaaataagatgaatagtaaaatattacgtccaaaattcatacaatacaaaaacaggggcagtatttcacaaatgctttacaaagatttaataagcacacgaagatcagttctcaagcggccatctgtttccttgagttggtcgtcttctccgctggcacgaggtacttgtggaatatcctctccttgagctcggcgacatgggcagtttcacgctataggggcaggcgccggtgacccgcctccatggcagccgcaagagccgcctccgtccaatgcgcacgacgaccgaggcgctcgatgagggacaccacacgtcacggcggtgtgtggtgtcatttaaattgggaacttagcccctcaaacaactcaatgtgaaattcgctctcatgaagatttcaacatatgaccttgaggtgctattcgattagatcactacaaaccactaaactacatgtactttcgtataaattaccgagcatattgtattttggatatgatattgataccattagtaaagcactgacaaaatataggagccttgttgtttcactaattcatatgcttatccgattcgattataagcagaagcataagcactataagatcctgcagaaaggactagcttaatttgaaattacgatattataattatatgcattcacaactattagcacattc

SEQ ID NO: 42881 - DNA, 607 bp, Oryza sativa
accgacctagtcaccaaaatttttcatgcatattgttttctgtcattctttaataattaaggaactttattaggtttagggtttgaaatttagttcaaatggaagaattgattgattggccgcagatttaatgttgttccgaggttatcaaaccatcacagaatacaaaatgcatggggaattttggtggattggtcagtgtagtccatggacggaaccgacctagacaccaaaattctccatgcattttgttttctgtcattctttgatgattaaggaactttgcagattatctaaacttgtggatttatataccctttttgtctatgaataggtgaattgcatgaattgttctttatatacatgatttatatacccttgatgctgctgccacataaatgattgtgggctgttttattatctacacttgattgaattgaatggatgaattgctgtttacatgaagttagtagtactgtctcattttttttgatgaaatatatgcatatttgagatgtgaaatatatgaggtgatgaatttggactatttgtggatgaaatatatgcagtattagatgaattagtctttttgtattagatgatttta

SEQ ID NO: 42882 - DNA, 3054 bp, Oryza sativa
gtgacactatagaatactcaagcttgggctgctcccatgtcgctctcgctgcatgtgaatgatttcctctcatccgctcgcgatttccaccggatttcccattaaccaaaagccatcgtcctcgcggcgagctcggtgcaaccactgcttccacctaccacttctactactcatacacgcagtgccattggtgtccacctcgatcgatctctcccctcacaatcctctctcacgtacgcaagctagctagctatctagccatgtcgatcagtccacgcttcttggccgtcgccgccgtcctcgccggcgcgatgtactccgccgcgacggtggccgcggacacgccgggcggcagctgcccgtacccgtgcctcccgccgccgatcgccggtggcgcggtgaacagctaccctccgccgccgcccgcggggagtagtagcagcagcagctcaggtggaggcgatggcggcgccggcgggttgtttggcgggacctacccgccgccgccgcccggggtgatgcctggggccttcgctccgccgttcggcggcgggttcccgtacgggccagcgccgccgccgcccaacccgatcctgccgtggttcccgtggtactaccagcacaacaaccccatcaccgggtcgacgacgtcggcggcggcggtgggccggacgccggcgagcatggtcacgacggtggtgttgctcccgctgttcttggttgctcttcttcgtgtgctgtagagtgcttaataaattctaatttgtcgctaggagtgttttgctaggtaattagtaagatgttttatgtacaacctggtttttgttaactgagatgatctatggagttacttttacgaaattattattatgatgatcatgatgatgtgagtatcgagaaatgcttgtcctttttttttttttgttcattataggtttcacaagttcatgaaatatggggtgaattatggataaacttcaccttggtgatttaaagttttttttgttaaaaaaaagtacctttcaaagattaattgtaaaagaaagttccaacttttttggagttcgaacaaacaaaaaaaaaggataatattgacagaacacagtcacacaatttgatcacctagccagtatgcctcctttctgaatcaaccgtgttctactttttgttcttatcgtcaaagtttcgaggtgaaaaggcgtttttcccactcacctttcaggcattcagctgtcaatcatagagaggctactgaagcttctagctagcattgtattgatgccatctctgtttgttcagatgtcaaagtctagcaattaaatcagtaggaaagcatcagcttgtaaattcatatctaggcccacatttgcccgtttttccgtgcctgtaccacacctttcttgactggattttctggaacatatatataacttgccacagaaccttctaatttaaacagtgccaaacatgaattaatacatttgcgattgtgctcacaaccttaatttgaactaaacatttcctcgataatccgttttatattctagaactggtcattgcccagaagactagaaccggaagatgacaagaacgaagaacacgttgccccctttacctggaaatctggacgtttctttctcgcgtcacaaattgccagttggtagtgagagtccagctaatggcgacgacggtttctgggagatatggtgacgtgagggctatcctgtttcccttttcggttttgatatagaggtactacaagaatgaaactgttggcttattgaaaggaaaaagggaatggaattatgcaagtgcccaagaagttatcatcggccaattcgtcccatacatgcatatataattgcatacacggatacaccaaccgaaaaaaaaggttcttttttctctttggggcctagctagcctgctaaagtcaggtactgcagagtacgtactctaccaaactctcgaggagctgattcattttatcatcagaaaatggatggccaaccagaacaaacaagtccttagcccagaaattgaaatttcggattttcttttttttaagtcagttaaaattattaaatgttaataattttgtactccatgcatattatgctcccatttattataataattactaataacataaaaaaccacatgagaaggacgtattaatattaattcagatctattcaatagtttattctctatacaattgagtggacaaggatcattaaattatatatagatccaagtatttaaagaagagtaaaatgcaccaacggtccttaaatttgtcaggaggtttcacttaggtccacaaacttgcaaagcgcacatcgaggtccctaaacttggtttattgtatcatcctggtccaaaaccgcgtttgaccgtggtcttggctacgtggcatgccacgtggatgatgacatggaatttttttatattttttgcttccttctttttttttctcccttcttcctttttttctctcctgtgcctccgccggtcgacacgggagcgggggcgaagagggggggcggcggcaggtacaagggcaggcgtcggcgagctcggcgcgcgcggggggaggtgttgccgaccggggttggcgagctcggcgtgagcggggcagacacgagctcgacggcggcagggtgagctcgacttgagcagcgacgactgggagaggaggacggcggcgctgtgtgcgtgcggggggtggtgttgccggccgcggcccgaggggaggtgtcgccgaccgcagctgcgcgtgaggggggaggcatcggcgagcaaggcgcgagctcaacggcgacagcggggcggcagggcgagcttgagctctctccccccccctccatcggcgagcttgaggtctctcccctcccctctcggaccgcgacggcgacgaggacagcgcgtcgatgcgagcgagcgaggggggcggagatggtggatacgaggaggagcgcggcggccaagcgcccggtggcggaggaggaccagggaggaggagaaggcggcggcgccggctgctgttgtggc

SEQ ID NO: 42883 - DNA, 991 bp, Oryza sativa
ctcgataccatagcattgaaaaagtccatttttatacattcctcaatgatggattgagttccattcgtatctcttagtcgtaaaatcaattatagagcgtccccggccccaactatcaaatccagtgcaaattaagattctcagcggtttcattctacgtctcataacaatcagcatattgacatggttttccgttttcatagactcccggctggctcaaatgaggatgtcgatggggtcaacaaacgacgaggcacatcgagctgagatcgaagtactcctggttgacatcgatgatgatgacctcgccatcgtctgggatggcgagcatagagcaggcaatgaaacacatcagcctgccttctccatgcttgagctctactgcccgctggactaccactgctgacaatagagtggaaagggaagcaaagggtgagctggaggaagtgagaccccatatcagcctcatctctttgcttatacttatgcttatcattcaaaatttaaattttaaatcttaaatttaaagttgattttgggtttttcatcgaaatttattttttagcatttatttttagatcactaagaacatatatataaaagttttattcacaaattatttttcgtttggaaatatgttgtttcgcttattcctcgaatatgaaacgatgggggtcgtatgtatggtatttttttcttcatgtatctgacatgtggactacatagattttttttctaaagtgacactgacattggtcacattgagtttttttttatcgcaactagcatggtggcccgtgcagattgcgcggctagcatcattatattttctctcatataatagcatatatgttttctcattatattattaaaatatattacaatgacaacataattttaaattttgcaataacttttcaaaactactaatgtgtaataactactctagtcttctcttctaatattacttattttttaattatgaatttca

SEQ ID NO: 42884 - DNA, 1596 bp, Oryza sativa
cattctctgacaaaaatactctagaattttgtcaaagcaccagtattacatgttaacctgtccaaaagctcagtaacaccaatcaactcccaaaatattgatgtggttgttgttttagaaaatttcacatggcaacgagaaaccctcccatttatctacctactctagggtgcctcaggcgtgtacacttgcagccaatagaaaacaataccgaggctcacctgcccggctagaacaaaatgcttccacatgaaggtgtcatgtcctggtgaattcagtgcttagctccaccccaacatacgtactcattgtcttaaagcctcccaaacaattctacacggagatcgataaggtgaaaggatgattcctatatgccgctatgaagaactacacgagggcaaatgtacggtcgattggacaaaggtttgttacaaaaaccaacctcgatagctcatcggtaaccaaacatggaagaaacactataaaagatccaaatacgatgataacaccaaggcacgatatttgctaacgtggttcagccaaaccctacatcctggggcactgattacgtgcactccatctcgatccaacacaattaaagtgtatcagagttacaatgatcctcggcggatgctgccggcaaccattccctcttgcctatgctaagtcgccatgcgattacaacatgtgtgcctctctatttaagagagagcctaggatgtccaactccaagtccaaaactataactgactttgtacacatattcaacacaaaactctaacaaggttttgctccctactcaaatttggagggtaaggggttccaaacctagaaaattcgctagtatgcttcgtcaaaggtggctctggtatgaaaggaatgtgccaaacaaaccatggatttgaacacctatgccttgcgatgacaaggataggcattgttttcgacgtccactgtagtcatcttaggagatatcaaaaacacgagcttatagctagatcgaagggtagcaattaaggagcattgcactaaacccatataatcaatgccgacagaagcagagaacagtacaagagccattatgcaatcagcaatggctcaaagacatacgacacaacatgacattggctctgttcgaggaatacttttccatttggtgtatattggagtgagcaaacccatagctaatagaaggcatcaaagacacaataaggtggaagaggtcagcaaccagagaatacagtacaaagtcagcaaaggcgacgtcatgtatccaagtttggaaaacatgggcccccgccaaatgtaaggttttttccaggttgctgctgcaagactgactttggactgttgacagattgcagcaaagaggatggccgaattgctgtttctgttagctatgcatgaggaatttggaatgtgctcaccacttgattttggaatgctcgttcactcgtgcgtatggaatgaaaccttcaccaagttgcatcagcctcaacaaatgacaaacatgaccacaatagccttctttcatattggattggcagaatgcgcaaccatgaccgttccacgagggattaaaattctgccctagtc

SEQ ID NO: 42885 - DNA, 4571 bp, Oryza sativa
ataattcgccgcgacaaaagcacaaatctctctcaaagcgtttaacgtgtcgttagctttgccctttgattagtgcacgtactctacgcagtacgcacgcgtgaagctttgtgcgcgccgtgccgggcgcgcgcccgcgcccaccgcgctcccgcaaccgggcagcttagccagcgagccatccttggaatccgacgtgattgccaaccggcaaccgcgcctgcggccgcaatcggccgcgggggtagcgcgcggtgcggggagacgacaccacggctcacgacaaggcgaggctttttttccgcgcaggttttcgccgggcgcgcaccgcgaaatgtcaggccatatgcagcgatacaggcgggggctgatggcccagcggcagcgagcgaggcgtggaccatggaccacgccgcgggagcaatctcggtcgacttgagccgagcttagttctaaatttttttttaaaactttcaactttttcatcacatcaaaatttttctacacacataaacttttaacttttccgtcacatcatttcaattctaaccaaactttcaattttttttctttctcgagtactagctacttagctagctcacaccatctcaataattctagccagctccgagtattacacttacatggcgaatgatggcggcgagagtatacatttccgttggaaccaaaggtagacaatggctgtgtttagattcaaagtttggatctaaacttcagtcctttttcatcacatcaatctgtcatacacatacaacttttcagtcacatcatctttaatttcaatcaaaatctaaactttgcgttgaactaaacacagccaaagtgcagtttagtgagtacagaagcagactagcagtatatactcgaagacgacaacatcagctattcagctgcctttgctgaaacgctgccgttcatgatgctgctagagacgttgatgacactactaccatccaaaatttaccgttacgcttaacctcaccgtatagtatactcctactgctactctgtgttatcaacgtcaagaagaaaacacgcgcgactttcgcgtgctgctgatactggctcacgtacttgcaccgttgtcccctccctttcatggacagcttcggcaccggcctcatcacagtgatattcaatgtgcattcgtacataagtaacgaaaaggaactatagacctctcctaattccgtcgacttgttcgatcgaaatgaaacaccatcaacacaaaggaacggtcgacggggccaggtgtcaccagattaggcgatccgagggctgcaaacggtggggccttgcttagtgcttacactgatcgtgctacctggcccgcaggaagataaaaaggtcacaggctttttcttccaaaaaaagggacgccatcatttagccagagtggtacactcgatcggggcgtaattatgcaggttttctcagcttctgtttaagcttggggtctctgaactactaatacacacaggatacaacaatttgtcacctgtttactgacagctcggaacaaattagagatttgagaacggtttgtgttagattaaagaaggggctgtggtacgatactgcgggttgcgtgctagctaatatttggctcttttctgccaagattcggaaagaacaaaaacacaagcgtatcaataggttaatgccatcacgtggggatctggaataggaacaaatcgaggagatgcgatttgcaattcgtcaagagtaattcgtcgtacgaatgtcattaagggcattcccaacccaatgacataaataagctgccacctaggataaaaaataatgtggcaaatgaataaatgaggaaagagaagaaaaccatgtcttatacgagacatggtataagacatggtttctacacaacatccaagacattatgtgagataagtagcattaaatttaaatatggaatagtagtgtttgtattggaagagtagtgtctagtttcttgatgatgtggagtttataaaaactatgtttagtgtcttgggttcggaatgcccaacagaagagatcatgagccgagatgagaccaaatgcaggctgctgttgctgcggctctgttccaacatccaaccaatccaacatttgctattgatacttgataggtgatgctagctcctgacgatggatacagacatagtacagatacagtacacatagtagtagtgatactagtgtagtactagcacgttcctcggcattttcatagtcaaacaaatgtcccagaaagtaccgctgtgtctacattcatctgcagtagtagtggctagtaattgtacttaggtacgaacacatccataattttacctgtgcccatttctggaaccatacgagacccagtcgttggcgccgtaaccacgaagttaactgcagtgccagtatcgtagaagacggttcatcattaactgccacactgcaattaagttctcgggtacttcaacaaacataaattcggctctaaattcgctaattaactagatatggatcgactcacaacagcttcgatcttactctacgtgattacatctgacccctgtctcaaagtcatcacctcatcggcgccattgctccgccggttaactcgtcctcgccattgtcggcgcgcgcgtcgccggcgggcgtcgtcctccggccggtgtcagcgtcgccaccatcgccggctgcatgcacgtaccgatcgatttctagctgggccaagtgttgcaggtcacgtgaacaaagggctcatctccatctccatatgctgtcgatccaagctggccctgggaaaggggagagggcgacagaggcggccggatcggacggattgcttgcggtctccgcgatcgccatgtgcctgcgtgcatgccgccttctcctctcatcaccacctcccaatcctattcctgccttattagacttattaccttgctcgctctttcctttgccgcagcggccgtaccaattatgtggcgtacgtgcacgcgtgcgtgccagtatatatttcctacccgtttcacttttttttctctcttcacttctcgcagctctttccgcgtagaaagatgtccgagtacgtgtgtagcaattccgagatgaggaaagcgtctcaattgtccggggaaatctttacaaacgcagccaagcatccgaacaggtcacactgttggtcgacgcgcttccttgtccagtgaacagtcacagccgttggcgccactcgcgtgtattttgggcgcaccaacgactggtgatgtttcgtaccacgtcgacgtggtcacagtcgaatcgctcgaacacggctatacgagtgaaacgagcgacagccgccgaagtgggtcagcgacgtgcatgtgtgtatcgatccggcgacgaaagctggaaagcgaaagccaaccccgcgggccgggcgagcgagcggagcaccacgcccgcggcatcattcggctgcttcgtgggccccggcggccgcgtcgtcgaccgctgcgtgctggcccacctgggcgcctgggcccaaggcgggagaaaaggaaggaaggctccttggcccatccgcgagtcgtacggcgacgcagcttcgcgaacgttgatgtctctggccgcgtgggacccatcgtacggtcggtccacatgtcagtggcggctagcgtatggggggacgggtagccagcttccaccgcgtcgcgacgctccgcccgcacgggcgaaccggagggtgactcactcggttagccatttactagtacgggacgggtactttacgttaatttgtaggagtactttatattcacataaatctccaatgaaaagcaggagtaattaattacagatcgtatactcgccacaacgttgcacaccaagaacaaaagtggaatgctcatgtgatcatggaacaatgaaagggttatatgcacaagcgatggatacttaaccaagcccctgtttagtttgtgtgcaaatttttttttaaatatacggtcacatatttgaagaattaaacgtaaactaataacaaaacaaattacatattccacctgtcaattgcgagacgaatttattaagctgatacataatattgttaaatcatatcgtaattaggctcaaaagattcgtctcataagttatatgcaagctgtgcaattagtatttttttatttaaatatttgatatgacagaatctttagaagttcgaagagaataaacactgcccaactcgaacggattcaccgtgacacaacggtgcgtaacaaagttaaatccggttgagtcgatgagttcccgtctcgtatataacacggcaccgcaaaccagtacaagagcgagcagcgcgcggattgccagtttcccaccggcgaggggagagcccccgactcgaccgcccacgcatcgccatcaccgacgccaccgccaccgccgcaattccgtttcccccgcaccaccgcacgcttcccatccgaacgcaatctgaagcgccatccccaagaccccaaccgaattcacttgcagctgctgctcgtgtcagctgcggcggtggctggaccccccccccc

SEQ ID NO: 42886 - DNA, 1264 bp, Oryza sativa
attccgcttgcaatttgaactttgcgatgatgagttttgctctctcttcctcacctctcttctagtttcgggaattcattttctcttcctcctctagtttcgggaattccttctgtcttctttttctctcttcttttctagatccggcttctctaatagccgcggttctagtaaggattttgagaaatccggcttgatgagtattttcgggggcaagatttgaattgctatattcacccccccccccctctatagctgttcttggtctttcacttcgtcacagcccatggatttccatggaagaggtgtagcatcttttttttttctttttttttgtgtgttttggtggagaaagaggcaaagaagaatggattatgcggacttgtcaaggaggaaggagataagaatcacagactcgtggtagaggagagagaaccaattagaaagatatggataaactatcgatcttgtttactgtgacactagctatttattgtataactcacctacaaacttgctctcattgacatgtctctaattaacggcagtgactctcgctctcccgttggctaattaggaagcatatggattggacttttatcctatcgatcgtgaggtcaccggagaagttgctgacgtcgtgctcaccagagaggggcgtagcagtgcaggagctgaacacggatcctctaacttaagtcattaacatgtgggtctactttgctatgaacccatacgccagttactctaaattcatattacctgtcataggatctcattctgcaggtgcttaggtaagatagggtttttttatgagaccctcgccattagatgcaatctagacgtctcatatcaagcaaagaaacaaagttgcaagagcaaataattattcggatttgctatataacttttgacaaaaaaatagaggggaaacgagtaccctttttacccatcgaatgcatgctaagatttgtgctaggcaagagaaacaaatacgacatgtgtattacggacttggacatactagtggagaaaccatctttgctcggtcgaccaaaaaccacaatagtctcggatgcagtaaaaaccgggactaaagatggtttttagttccggtttataagtagaatgagactacgtgatctttagtcccggttgatgttaccaaccgttcacatgctgtcagatgttgtcaggcccctacaggatctttagttgcggttggagttatgaaccgggagtaaagatcggatctttaatcccg

SEQ ID NO: 42887 - DNA, 1522 bp, Oryza sativa
cattgtgaaacggaggaagtaactagcaccacggtggtgtgctagtcgacgggattcgaactcaggccgtgtttactttcatgcccaaaattattttcacgtatatggatacacatttgaagtattaaacgtagtctaataacaaaacaaattacataatcagcctgtaaactgcaagaagaaattattaagcctaattaatccatcattagcaaatgtttattatagcaccacattgtcaaatcatggcgtaattaggctcaaaatattcgtctcgcaatttacatgcaaactgtgcaattagtttttttttgtccacatttaatgatctatatatgtgttcaaacatttaatgggatgaaatttttggaagtttgaagggaactacaggcaacctcactcttcttaaaaaattctaatatgagagtcccttcttatgtatttattgttattgttttcttattacagcgagggaacgagggatctggcatccaatcaagggaacacaatggaaaggataggttccctctgttggtgtgggatggatgctccggacctctagccgatgggcaggaactaggggtgaaaacgagccgagccgaggctcgtgaaagcttggtgcaagggaagctcggcttggcttggctcgctacaaacacgaagggatggatcgatctaagtgcaacactgaggaaaggaaagtgtcacatttacatatgatgtctaatatttatgggattgtctatctaacattagtgtaaatataatataattagcatgtaattacaatataactctaatgtaagtggtatgtaagtcggtgcgagagaggggcaaccgcaatccacaagtcacgtgtcactagtggagaaatcgtttttagtcactagtggagaaatcatttttagtcccggtttgtaacccccaatagtcccggttttcaaaccgggactacgaatccgggactaaagatcgatctttagtcccggttggtgttaccaaccgggactaaagatgggagtgggcaatagttttttttcattcacgcgctatttaatctctaatttattttctcccaaattaggtgggatgcgtaccatcccaaatacataaatcaatcatatacactacagattatacatcccaaatcaaaccccaaatcaaagaaacatcccaaatatacaaatcatacacaaatcatgtacatctcatatccatacaatgagattccaaaaaaaaaattatacatctcaatccatacaatgaaccacagattcttcatctcaatctacacatggatcacaaattctttaaaaaaaagaaaaaaaatgaagcaaagccgccggccggctgagccggctgccgcctcccctcctccccagccgccgccgcactgccctccgccggccgggccacccaccccctcctgctgcgcacactggatcgagttgggaaggggagttgggaagggataagaagaaaaagagataatgaggaagggaagagataagattagagatgg

SEQ ID NO: 42888 - DNA, 755 bp, Oryza sativa
gccaccaccgcctgcatggtcgtcactcacctccgcctcgcgctctctcgctcgctcgctgtctctgcggcaacgcctgtgtgtgaagaggaagagaggatttggaggcgagaggagggaagaggaggagaggagagctcgcgggatgctaaataaagcaggcggcggcggaggatatgggggcgcgagagccgtccgatggtgccgcgtggatggcttcgcgaccgtcgctttgggattttgaccggatccgcgtcgatgtcggcctcctgaccaagccttgcccctgcgggttacacgtacagccgtttctgactttcgattagggtgagcgggtgaggagtggatgcagcgccacagatgataatgataaaatactagtattagtttagttaatattgatattctctccgattcatttcataattgacagccgtaactatttactttttaagcatttatcaaatcaatggtattcttttaatatttacaaatacaagaaaataataacattattaaagtgtgatatgctttaaatattttagctttcctctaacaattcaaagcaactaattgtcaaagcttaaataggaaagttgaaattgacatatattaagaaacggaatgaatagcatggagaatatataaaactcaaatgaaaactcttgaaaatataaacgatggtaaaaattataaaaaattaatatatgtataagctaataaaaaatatttttttaataaattaggtcttgttt

SEQ ID NO: 42889 - DNA, 725 bp, Oryza sativa
tttaattcggaatttcagttatttcatattttgtatttctatatgaactctagtctcctgttctaatattccttatttttaattcggaatttcaactatttctaaattgtatttctatatggactctagtcaactcttctaatattccttattttttaattccgaatttcagctatttctaaattgtatttctatatgaactctgttttttctttttgtccgattaatgtgagaatttctagaccatgagagcgaatgtggaggctcctttttcaattcctttaataatataactagcacggtggcccacgcagattgcgcggctagcatcattatattttttttctcatgtaatagcatatatgttttctcaatgtattattcaaatatattaaaaatgatattctaattttaaattttatactaactttacgaaactactaatgtgtaatatttatattttattatatatacgtgttagttattaattatttttaatatcaaattttagtatttgtaaattatattcctatatggactctaaactcgtctttcaatatttctttatttttaactctgaatctagactctagaccctagactctagactctagactctacttttaattttattatgtttattccaaattttagttagttttaaattcctatatggactctatactctacttctaatattccttattttttaattccaaatttct

SEQ ID NO: 42890 - DNA, 746 bp, Oryza sativa
gtggcagccacgcgggcggcggggttggacggccccgatctaccgggtagatcggacggcggcgggagcacgtggccggcacgcacgggcggctcaagccggcccggcggccaaggcgcacggcgacgcaaggcggcaaccggcggcgaccggccggcggcggagggcggcggcgtcgcggcgacgcggacagcgacatcggcggcgtcgcggctaggcggcggcgcggcggctaagcggcgtgggaggggtggaaggggaagaggtgtctcaccgacggcgattggcgacggcaagtgacggagggcgatgacggcagcgggacgagctctggaaccacctagcgaacacgaagaaaggggttagagagagagaggaagatggaagagggcgaggacgccggccgaaggtggcggccatggcggagctcaccggcgcgcggtgcgaacggggttcccgcggcgtaaagcggcggcggagaggaggacggcatggccctcgggcttgcaaacccgacggcggcgacggtgcggcggctagcggctaccggagcggcggcggcggatatgagggcgacagcgctagggcgatagagggcacgggagagctcggcgaaatggagaaaaagagagaggggagagcggggatgcttaaataggggagagggggctcggacgtggccgggagcggcccgatttcaccggagtagtggggagggggtgatagggcgtggccggcgggattca

SEQ ID NO: 42891 - DNA, 2377 bp, Oryza sativa
tggttaaaattatttctagagctctgaaaatttcactaaaaatcctgttaatgaatttcgacatgtagaactcaagaaaaattccacatgtcaattccgattattatttgcattaatttattagggttttctctcttgcttttacaccgatattttctctaggtgatttataaatctaatttaggcttggggaaagaacttcaaggtgtgacaggcacccccttgtcgaaacctcccaagcaattggtgcaagctcgctctagattcatatcctctcgtggtggcgctctagcttctgcaagttagccacgtcggagggcctagggggagagcggttccattcttctctctcaccctctttccctcaatcccaaagatttggatagagtgggtattgtattggttgtaagggtcgggttttgggcgatctcggttgcattccgttgttggcctagtggcggtcggtcacgcttagcggcggctgacccggtgctagccttcccctaggtggtggtatacttttttcattttcctggttacgaccaatagggttgtaatcttgtaattttttcctgctttataaacaaaacttcgcactatcgggtgtgattcgttcaaaaaaaataattataaattttgaaatcatttaatcaaaaaaaacatataattgagaaaccaaaccgaggacaactctatattcattaattgtaaattttagaactattaaaccatgaaaactataattcaaaatttgaactgagtacaacttaatatttattaattacaaatttaggatatattatatcatgaaacatataatccagactacaaaacagtaaaaatcaatatttattaattacgattcaggaattattgtatcattaaaggatataattcagactacaaaaccgagtacaactcgacacttataatttccaaatttctaaactaaactatgtagtataacatactaaattgagagtacaacatgcagcatgagtccaaagtagtaatatttagtaattttgattttgaaaaaaaaaataatttaatgcgatagaaagtaatggaagaaatattaggacagattatataaattaattactaattattttttaagtataaataaaataaaatcgttcggctattaaacctttaatagagttacgtattgaacaaatatttgaaatttttaatatttataatatcagtaataataactactcgtatgaaaggatccctttaggcacacacgtacctcctctcaattactttttctccttttttcttcctatggaaatatttgcaacaatagcttttaaataaccataacttctaaattatatattatttgtaacaatatattttaaatcatcattttttttaccttttaaatcatgcaaatggacatcaaaacttttgaaaaaagtgataactagattgtatcgattattatgtatcactttacaaacattcgtagctaaactagatataagatgtcaagaatgtaaagcttgcactagtattctttatgattaattagcagtttgacaccagtttacttcctttaaatttaaaaaagaaactgtcttggttcatattttaactcttcaagtcatttaaagccagctccagtgatcttttgactctcaaagaaatcatttgagatataaatcaaaagataaacttttttttaaaaaataaaccaaaccaacacctagaaaatgcactaagtgaagcacaaagaagcaaccaataccctgacagtgataaatttgccatgtaaagctcgatgatgatttatggcttagccacatcatggtgaagcactgcgtggcagcaggagcacaaccatggatgtacattgtggccaaagctaagggtgctcatcactagcaacttgtcgaacaaggaaaagagcaatatgatcgactaaaattagctttaatattagaagctataagatgatataagaggatacgggagatgacatatatatatatatatgtatatatatatatgtatatctatgtatatatatgtatatctatgtatatatatatgtatatatctatgtatatatatatatatatatatatgtatatatatatatatatatagtgccagggtactatatataggggtttgtttttcggtggttgacaacggagtccgtcagaggattgtatttggcagaggcagcagcatagtttaattgtgtgagagagaaagtgttttattgactttggttatgagagatgagtcctcctccactgaggaagatgtatggtgatttggattatatcactggtgcgagaaaccatctttgatcggtcgacccaaatctacaatagtcccggttccatttaaaaccggg

SEQ ID NO: 42892 - DNA, 590 bp, Oryza sativa
gcatatggtattttcttgtgcatgctaacaaaactttgaaggtttatttgtctctagcatagcttgtatgtattctagtcttttcatgagatttatattttacttttaagggagatgatacatgacacttaaattctacttgaattaagtaaatatgcaatgttgatgctatcatatggtttgatttataaatgctctatatatatgctttattgaattgttattcctcaaatagctttaattgctcattgtgaaaaagagaataaaaaatatgaaaaaaatgaataccgaatccttggaaatagtcttgatgacaaggacgtattcgatgtgagcaaaataatgggtgccaaatccttggaaacagtcttgacgacagggacgtacccggaataaaagagaaaaatatgagcaaaaaggctcaagaaaagaaaaggttcaaaaaaaattctcttggttattttgtgctaaaggttatttgagaaagagtgataaatgcaatagatatatgtgtttagtgtttattcttcaacctatgtgcttgttaagatgttgcattataaatcgtatgaaatcatgaattttgattg

SEQ ID NO: 42893 - DNA, 1187 bp, Oryza sativa
actatagggcgaattcgagctcggtacccctgtcttctcctgtaagcttgtttacgccacaagttttctttcgtgataagttatcttttggtataaactttcttctaatgcaagcttctttctatgctgacttttcactcttgtcttaattcatccacataaaaaacatatttcataacaatattgtgacatttatctgaatatattttggagtggcattttaaaaactagttaaaaccatatgatttgccgcggatacatggataattgcacggtactacctctgtctcaaaatataaaggattttgactagatatgacacataatacgaatctagacaaggagtttgtccatattcatagtattaggatgtgtcacatccgaccaaaatcccttatattttgggagatggaatatatattatagaaaggaagtgtcagggttatggataccacatacccaatagtaatcgactaagctcggcagggcccaccatatacgaagtcttataaggaatcatacctcgtatatagaaggagttctggataaggaaggacaataagagttctacatggaaacgacaaggactactcggattgtatccatattggtctccctagttctacttcgagaaggggacatctatgggtataaatacaagccccctaggaagagaggggacacgccacgagggcacaagatacacaagccaatgcaaaccaatatgtcaccagataccgacatcagagattagcctagacaaacccaatccggtgcctacggaggccgacaagagggattagcgctatctctgatctcgacgagttcatatttgaggaggaagacaactctgccgtcgactacgtgttggttatccatgccgccaaatcgacgaaagctagataggttatccaaatattgtacttgtgtgattcagatgaataagagcaacaccggcttcggccaacatgatgtagggctattacctgtcagataaggggcccaaacatgtataaaatccttgtctccatctcttttacctcaatctcacatataccctggtaccgacgatctccatactatccaaataccgtagtcgcgatctcaaacatcgacagtgtaagggtatacctgagaggctatacccgcctacagtatttgtatagtatgagaatcgttggtgcaag

SEQ ID NO: 42894 - DNA, 522 bp, Oryza sativa
ttgggtgccgcttgttataaataatcgacacatataagcccagccacgtggcatgatggtccagaatcggtaccaataaattggtataggtgtcggttcttgatacaaaaccggcacttacatatattataggtgcagattttacgaccggtgccgatatccgaagtcatccatgccgttatctgggtgttggttcgaaaaaccatcagctaagtgatttctcgttacctatggtgtagttgaatgtgcacccagtccacctggtcatcttgtatgagcacatacactaattaaaatctttgtgattagctggctggtttgcaatcccattggatgagtttctagaagaaaaaaaaactatcgatttttttttcataataactccgtaataaaaaaaagttctaaaactactggattgacgaaaaccaagcagctttcacggtttttttaatcggtaatgaccccgacgtctttttttttttgctccacccctgacggcagtatagatctaatctaacggta

SEQ ID NO: 42895 - DNA, 873 bp, Oryza sativa
aaaaaattcattgtcctattaaaattttaaatagaaaaaataatttattacatttgttttattttcaaaatttatggcaaaattttatgctctaattatttagtctcattggtttcataaaatgcatatatcgtgtactcaaacaaaattttcaatcgtttttcaagtttatattcaaacatacatcatccaggtcgatctaaaagatcccctttgcaaccaaacttaacagtgaaacgaaggaaaatgtaactgcagaggcatggaagaggatcaagttaaaatttcaggggtatcgaatggataaggtaaatttcaagggtatgaaagggattgtgtttgttttcaagggtatatagagaatttagtctaagaaaatctaacctggtttatattttagcttacttattttattttaaattatctattcaccctcatcaatgtctaagtgaccctttcaaaggtagatcgacgtctacccatagccattataccttgacacctttgatatcttggtatcatggtaccgatatcatttctggtatcgacagtatcatgtgcggtataaatagttatcaaccagaaatagctgctaagagcaggtataatagcagactataagccagctataaacatattttaagaagataaaaaaggagagaaaagacagcgggctacagatttgtagtcagctgcagtacagactctaagacgcatgtgtatataataggtgggaccagatattgattgtgtagtaataggtgggaccagatattgattgtgtagtatatgtttatatgtaactattgtagaattggctattaagttatagatgatttatggccagcagttagctctactattaaacttggg

SEQ ID NO: 42896 - DNA, 528 bp, Oryza sativa
aattggaagggaagatgactcgacgagtaaaaaaaaccaaggagcagtttctcacggagcaaacgcgtacgctaacgctagatggccttttcttctttttttttttcgatcgtcgtggtacaatgcgtgcacgtgaacatgtacaacaaccatcgtcaaagaggataggaagaacgacatactactgcagtactagtgcagtagtgctacgcatttccgcactttttactcttcgtgggatccgtccgggcagttggatccttccagatccatccgcgttcgttcacattgactctggccttggccttactgcgtctcacacactctcatgtgcgctcctgctggcaggcagcaacgaaacacacacacgacgggcacccgcaccagcacgtgtcggccccgttccgccgccccatcggacgtcctaccaccaccaccggttggattcttgtgcagcggcgcggcgcgcgtacaagcggccgtgcacggtgaacgagacgggagcacgcagcggcggcaggggggtca

SEQ ID NO: 42897 - DNA, 678 bp, Oryza sativa
tactaggcattagatgatctcagccctttccctgctgaagctggacaaatggtaaatcccttgatcggtctatcccagcctcccaggctcgccgctaaacaactttaattaatttatctaaaataaagaggaagcatatcatcaactgctatcctcgtcacctctcccctcccgagttgacttcccctctcacgcgtattcaggttggttcgccatgccggcgcgaatgtccatcacatcggcgtcgcgtcgtctccgatgagtaaagctagtcggcggctgaaacaggaagggcgccttaacgtacgagaggacacaggtacaaattgttgtgcttttcaaatttgggcctagtttagtttctaactttttcttcaaacttttaacttttccatcacattaaaatttttctacacacgtaaacttctaactttttcatcgtatcgtttcaatttcaatcaaacttccaattttaacgtgaattaaacataccctggttcaactcgtcagcatggcaggggtttactctttgaaatccggatatctccctcgctttcatttcttctcgcttacgttttcttgccctttggtatgggtatttcatatcatctgaaattgactttcgagattttgaagaaaacaggatgatcaaacatatatgcaagaccataaccatat

SEQ ID NO: 42898 - DNA, 608 bp, Oryza sativa
ccttctttgtgatagcacttattactacaagcacaataaaaaatgattccagcgctacagacccatggatgatgcacggcctaaagaacatatgcaaattaaactttaaatggccgttgcatattttttaagataactaggtagcccacacaattacaacgcgcgggaacctctattttttctaagggtgtgtttggttcccggtcaagattggataggatatggcggtccatattttgttggatatggcggtccagtttttttgtttggttgtgtgaatatggcgatccagtttcttttttggatgtagggacgaaggtggatttggtgatccaattttttttgggttggagggagtatgatggatttgtaggtgtggtcacctctccacttgagatggtgaatatacccccatcaaattaatacatgatacaattttacaccactatttccattataaatacacatagaaaaaagaaaaaagaaaaaaaaacacggctggatctggggcacgtcgccgccgcctttttccgccagccgccttcttctgccgggcgccgctcgccttcttccgccggcgttttctcccaccaaccggcttcttccgc

SEQ ID NO: 42899 - DNA, 1589 bp, Oryza sativa
  unsure (1)..(1589): unsure at all n locations
attggcattgtgcatagatcatctgctaattctctgaatagttgcaagcatgtactgaaaatttgaaacactgggtacaactgatgattatgcacgtattaatgttggtccttttggatgttctcacattttacatgataggtttgatgaatgctccctgtctcccttgacactaannnnnnnnnnnnnnnnnnnnnnnnnnnggatgactgcagtgcaggaggccactcttcctattatacttaaaggttgatcttagtagttcttctttgttatgtgctcaacattgtagttttatctatagtatttcacattttcttttgcaaacttgtctcaagagtttataaatctatcagactcgtattcactaacttccttcacatttttaatttcgaatctgctatcttcacatatttattgaacttcaaattcatgtttatgtttgttaatttacaaacatcatgtgtgaagacaacgtattagttcccatcctgtgcatttgcaccacagtaccacacaagcagatcacacaaacttgacctactgagctggcatagaaaaggaaaccactgctacattgtgtctatctctaagcaaaaaagaaatgcataaccaatagatttaatttcaaagttgttggaagaggtgtagccatgtaggccccatttgcaaatgaagaatcttgtaggaatttcatagtaaactgttcagcatcctgtactgcaccccaaataggccattgatgaaaaatgaaactgcagtgatcgagctgttgaaatccaattcatgcagggtattgtattgtcaacatagtttctttctgaacaacctttgcaaatgcttgacaaatgtgattatactaacaaaggtggattgaattgcattattgcaatatggtctttagtgcttccatgctaatagtgttgaggacttgaattattacaaccatttatcagattaagtttttttttttttgggggaactaaataatgcatgaaactcttaaggtaccacagccaaggtgcctttagtttgggacctggctaaagcaagttaagaaacaacaattgtggcccactttgaatctgcattttctatttgtatgcttggtggtggggcctatacattagggaagaattttgcctacctttggtcattgatatgattttttgggtgaactggttggtgcatggaactaaataagtaattatgagcttttgattggctcctactagtgtgaatcatgtaatttacgtagatcccttaatttctaacgcagtttatgagtctccttggtaatagataatcttgattgatgtagtttggtaggtgttaaaaaatggaagagttaagttttttttattgaggaaactgagcatatggtctgtaaaccttggtaccacttaaaccctaaaaagtcatattgccaggtccaggaattgatttggtgtgagttaccaatgggtttgaagaaataaatttggtgagttggggttcgaaataaagttctcgattagcctcgtgtaaatcctcttcttctatgacataacaaaactcatcactacaactcctattgtgtttcatacaat

SEQ ID NO: 42900 - DNA, 731 bp, Oryza sativa
cagggtggtatgtacgtagtcgaaggcgaggtgacataaatataggaaacggcgttgaggtacggtagaaggagggaggagagccagagtgtgtgggcccaccatctatggtttgcccatgcatgcatactttgctgcctgctgggcacgattgattcgatcgatccgtcaaataaggagcctttcctcatctaaaccttgccgcaaatacagaaatcgtcaacaataccagttgaaaaggcatatcagtgccggtttcctaaccgacactacagctaattaggcactgatgaaggggttgtcggtacccattttaaaaccgacattgatgtgttccctcgaataaataaaaacatagaggatggcttgaatcaagtcgatgcttcaagcggctctctaaaattcacagcccagcacatcgatgccctcctattccgcatccacaatacaaatcaacaacaagaacacaagagcatccgtgtatattccattatctaaaaaaaaaaagagcaaccgcacacatgcatcaaggcatcattgcaatattcagactggaatatatgaggaaaccccccgttgatgatgttcgccatatcatagaagaagtggaagaagtgctcaaacagttagaaagcaatgtacacacatggagactatggtgcagcaacaatcatcgtggaggcagtggcatcctgtgaccggtggatttggcattgtttgttcggtgtagc

SEQ ID NO: 42901 - DNA, 618 bp, Oryza sativa
  unsure (1)..(618): unsure at all n locations
taatttacaaactttgctcaatacaactatggatatatggcaaacttttttcactggattataaatacaaagttaaattagctacaaccactaaatatataattaccatgccaaataaattctatggacgtagttgcatttcaatgttaaaactctaatggatatatgcaagaccacctactttttttttgtatttttctcattttctctcttttttccctatgatatgtgtaagggcaaattgggcatttcatcatatatttgcatcgaaagatgacatggcatgcccacatggtaattttcgatgagccaaggactgtatatgtccacatgataaaatctaagggcttgcttggacaatttgaaaggtcagggactaaaatgatctcatagcgaaacttcagcgaccgtaatggatattctcccatactaaaaacctatacatgctgcactcctataaactttttgcaaaattgatttattttgtgctttagtggaattgtaaggaagacaacccaagcactcatgccattaatagcacacataggtccatccccctaattgggcaatggcaggagcaaaacctttacgtgactttntggcccactctgtataatg

SEQ ID NO: 42902 - DNA, 1030 bp, Oryza sativa
tccctgtcacagacttgtggattttggtaaaattcaacgtgtcatttctgagttcttggcccattcatctgatttccgacatcatctgattgattgatcgtctgttttgattttgattctcctctattttatgtttattctctgcaagaggttagtaatcctagtgctaatggaatatttattattctaacactatttctcctttattttggtagtattgactgttgaaactgatcgttaacgactgtcaatagtcatttctatataaatttgatggtcaactgaggggaagggtatggaaagcatcaaaatcaaatttcaagggcatacaaggaagtaagcaaaattcaagagcatataaggaattagctaaaattttaggggtatacaagggattaacgaaaatcccttatgtacctataaattctcacgtaatcccttatgtgcccctaaattatgccttatcctctatgtacccttgggttttcatctttatcccctatgcgtattacatgagttgactaatttttcaaaaaatgtttatatcacccttgtgtctacttattgcttagagttgattgaagaaaaacacccttctcaacataaaagttgattcatttataaaaacaaacatgacataattactttatcataaatttgataactaaaatttagatttcttttaaataagtttcaaattagatttgatgaaatttgttcaaaatttttactgaaatttaaacccaaataagaaacaattttggtttttcaaattccgaataaaacttcttgtgtatttcatttttttttaaaaaaagcttgaaaatttatattttggtttggaaatccggtgtcaaatatgtcccttttgatttttatcatagattaagattatttttataacaggacttgtttttaaagtaggtaccataaagtacgggtaatatagtcattttgggataaatctaatggtcaattcatagtcaactcacgacaagggtatagaaggataaaaaaatctggagcgtac

SEQ ID NO: 42903 - DNA, 586 bp, Oryza sativa
aactcggaaatagaaggatggaacaataaagaatatagagggaaaagatggtgaggccataaaaataaaaaaaatatttatgttacagtaagcatatgattctctattatatatcttagctataatgtttactgcagatgatgtgcccacctattacagccggcaattggctttgttattgatcttgctctaagagagatgggtgctatctctaatcttgaccgtatcatcgactcataaatataaatgcaacatgtacactactccaatatttatttgccagtctactcttactctcttttcttttgtcttgaatttggtgtagaggttgtctagggtgacttattatctctattctctctcatctttttctctcttccacctcactatgtaaacttatgtggcatccaaaagattgtggttggatgcttataatacttgccctaagctcttatcaagaagtccaattaaagattgcaaaaaaaaagaagtccaaataaaacaaatggaacttggtgacattgtattcccttccttccaaaataaataaatttaaaatataataaggtatttcacattacactga

SEQ ID NO: 42904 - DNA, 519 bp, Oryza sativa
tacgcaactggaaaatcatgcataataggcagaagcagaattcaaaagtgatcataattgataaacgcgcttctcttgaagaaaaatgataatagtgctgggctgggctttgatgcacctccattctcttccggaaaaagtacaccgaaggtccctaaacttgtcatcgagttataaaaagttaaaaacatcctcaaactgcaaaaccagatatccgacgtcccttaattaattaaaaccgatcacaataggtcctttgatggttttgatcccggttttgtcctacgtagcggctgagtcagcgtgggacccacgtggccccatatgtcagggtccacgtcatctctctctctctctctcttctccttgctcactcgctgcaggagggtggctggcagacgcacacggcggcggcctactgctgctgctggccaacgccgccggcgacgttattcctgggtcgcttcctccggggcgcggaggcggaggagttgtcgttctcgggcgaggaggaggagc

SEQ ID NO: 42905 - DNA, 538 bp, Oryza sativa
tcccgctactgcagctaccaagccacttgctgttgtgccgtgtcgtcgctgctgtgccgtgttgtagccgtgtgacgcttaaacctagccgccgctttagcccgttgctcggtagtcgagttatctagctataggtgcaaccctaggttcctaccggcctatcgtttgccgtaccagggctttaccgttaatcgtgtctagctcactagtttagccgcagctgttgttgagtcgttcgcttgtttgttcgaacgaggtgttccccgtgcttcgttcgttcgtccgtgtggagtcgtcctttagtttagagccgttcagagccgtcgttccgttcgccggtttcggttgatcgtttgggtgatcccgtgtcacgtagaatttactccttgagtcggtatcttgcgtggctcgcttgccagatcaatccaagccatctgatcttggtcgactcggtcaaaattaatctcagccgtccaaaatcaatataaatcctggtatcccttttcaatggcatattagttctttttactataagtcg

SEQ ID NO: 42906 - DNA, 697 bp, Oryza sativa
ttggtaataatttgcttagctcctggtttggaatggaacattcctatttggagatagagctgtacaatcgggtatggttgtccaggtttggttgggcttgtgcagcatgtgtgtcatgttcagtgttgattaatagtgatgattaattactttactgttttacaattcttaaatgtttattaaatgctgcttttgcaaatgagcctatattataccatcctttggtatccttgtgcacttgtatatttgctatgtggcttgcggagtattccatgtactcaccttgtaataatcaatcaaacctcagttgaagaaaagttgcgaagaagaagacgtttggcttataccccagttgagctgcctgtgggagtggagccggagcttcgctagaccgtaattccaatgttgtttacttttcttttgtaagtatgtaatgttattattttgatgaatctgtatattaaattgtcagtttgtgtatcttggctgattcctggacgaggattttatcaaacaagttagttcagaaattactagtgaattcctgggcgtggcaataatagagagatccatactaataatttaaatattacttgtaataaccaaagtctaggcatggattaatataattcgagggtagagtgacactaagcagaagtatttatactcattcgggtaccgagctcgaattcgccct

SEQ ID NO: 42907 - DNA, 1084 bp, Oryza sativa
ttgtccaaacatccaaatagaagctacaatagttggcaacatagtattaaacatttacaataaaagagcatcgaaacctccaaatagaagatacaataattggcaagtgcaactacaaggcgatgcttctatattttgtgtgtgtgtgtttttgtgttatccatatggagcacaatgacagaagaccatcacaaggataataaaatagatcatgtacacatatatatagtccactcatgagtgggtaggccacgatagtgaatcaaaaggaagtgcaacttcctgaatccacaggttctcttcacaaattttattgcattcagatttaatgtgacgaattagggatacggctattcgacatctttagggaccatctaaggtgcaactattctgatgaagtcttaaaaagacctaattgaaacatcttaagttggccaatagcaatatagcatccaagaagaccatgacagcaatatgtgtgtttgatcaaagtagtatcaagtaaatcatcatacacattcatcaagatataaaaagtacaatagaactggcatgtttaatattatgggatccacaatggtttagtaatcctatcttctaggttacaaaattgtgaagagaaaaaaacaaaaacaaatgctccttgcacctacctccaagggaaaagagagaagagggacatggaggatggggagcaagggagtttaggactaacctgtggcggggaagagtggggttgcggatcgacggcggcaagcaccaccggtggcttgtgccgacgcctggcacacagtcaaggcagtttggacggaggcggcggcatcgggatcggcatcggaggagaggacagcgatggcggcggcggcggcggtgactgagagcgtgagagggcagggcggggcgagcccacgttgaaggtgtaaagaagtgaggagaagagggcgaggagagctagagagaggagaggaacagagcggaggaggccaaggcgaaggagccaccacttttgtcatgtggcatcgggagcaagggcggcggccgcagagggacacggcggcggccggagcagcacggtagaggagaa

SEQ ID NO: 42908 - DNA, 576 bp, Oryza sativa
gccatctcggtaggtgttcgacatgttgcgcatatttgatctgttcatgttttactgcttagtttacatgtgtagatctaatgatgcgttcaatctagtttacatctgcaatgtcatgattaatttatggaataaattaaattattatgtgcttataatttcaacattgcttcctcttatttttgtgacctggctaagccctctctgttcagcttcacgtgatctgatctgagaatactacaaaactgccccctttttttttttagaactgtacaaaactgactgcagaaattgattcaacccagtaaggccagggaggcaggggcagatgcacgtgttcacgcccagcggcgtggagaggactgtggagtccatcgcttggattattccacattgcatatttacaaataaaaaataatttataaataaaacttttatatatgtgctattaacgatctgaaaaataaactacgatgaaaaaaactttaaaatcaacttaaatttaaggttaaaagttttagatttttgtttattagtactcctccgttctagtaacaatctattgtaagcataaaa

SEQ ID NO: 42909 - DNA, 644 bp, Oryza sativa
gttgatctgatctagctagatgctactatatattgaggtagtcttaaataagacattattaattaattaacatatatcttaattaatctaggcacacaaggattgggaagaggcaagcaaaactatggataagggttagtgataccatggagattatatatggtggagatggaggtcctacttcatagaagttcatcaaagccctggtggaaagggagaaagtgtagtataattttttttaaaaaaaacactggaggggaggcctccgctgttaaattaaactttcttgagaaagaaaagaaaaacaaactagtctaaatatacaaaattacattaaccgaatccaagtcttgactacatcctaagcaacaaaagagagaagtctcccctaaagaagctgcctccaagaaagtaaagagggtgacttgttattaagaaaaataaaaccatttctttgcttacatatgttccaagcccctacaagaattttttccataaagcatcgaccttgatagttgtttctggcctccatcatcatattgtccatgttcaaaaaggaatcccaaaatataccgactctgattgatagcatagaacacgtgtcaagtgtatttcaatcctccccaaataaaaatccatttatc

SEQ ID NO: 42910 - DNA, 1513 bp, Oryza sativa
agggtttgtaccggttcgcgaaatccaggccgtccgtccacaatccgacgatcacacgggcgtggaaggcccggcacagcgggacacgtggacggccagatcgaccctacggcgagatcggacggtggacagcagcggggaccagtccataattaaccgaaaggggaagggtttttttgcaaaaatcgctgacgtggcgcccctaatcttccggcgttcccacgatgtttaagtaaacctatatttgatgccgctgatgccaattgtagccatagaaaggtctgtccgtctgtgtttggtacaatggaaaagtgttttaaatttctgcggggatgtcccattatttttttcaagagaaaaaaaacaccatataaatagttaccaaaaattctcaaacaaaacaacattcataccatatacataaaataaactattttaaacaatcaagtcaaaacttaactcacacattgagaaataaaaaaaaacagcatatgaatggtattggtactattcactcctggatgtcttctttgtttctcaatatatagataaaatttgaatataatttttgatgaagaggtagatgctaccatactatattgccaaattgttttagaatttttcataatcacctctattgaatttgagagaaaaagttaggcgagaggatagaggtattagaatcctctcccagattaccaaacgcagcagtgaaatggtttactcagggcaagtactataatgcttcatatgttgcccctacaagtgccacattagattgagtgatgaggtggaggagaaaagtgaagagagagatgatgagccacccctaaatcaagaggcaacctccacacaaatttcaaaaaggatgtgagagtattagatatattggtatttgtgaactcgaggtgatatattgtatgggttgcctcttgcttcataagtgaataaaatagataaatttggaggtagtagtcacatctaccatagcactttccctcgtacaacagttgcatcagcaaaaaagttgtatttgatacaaaccccaagggcaatcatgcgacggtaggattatttgatacaggaactgcccggggctaaaataaggacataactaatggattaatctagaagaaacagtgtgaagaacaaatctcaaaccgttgactaatccataactacaaagtattatacaacatctccattaaaataggagcagcctccttggcaaacttgaagaccctgtccaccaacctcaactttaaagcagcgaaaactatgcgactccagctctgcaatgactttctccagaactaagttggatagcactgatattcatgttaaggaaacatcatgcatcactaaaagataggcataaatcccaacagaagaggagtcacatagcttagtgtcagtatgtggactctgtgacgaagctagaagtacaataaagatctaataagcattcttaaaccagaacaagggcattgaacgtagtaaaaatgcatatcta

SEQ ID NO: 42911 - DNA, 639 bp, Oryza sativa
tttttaataaatgatttaagtgaaaaccaatgatttattttgttcataaaatttcaaattattattttgctaattattaagatgtaacacatagcgacttaaaatttttccttcaattcttccttctaatttttaagatgtaatacctaattagaaaaataattacccctcttttgagatgagttaggccgggaatattacttcttttgttctttgctttaacttcccaacttattcctctttttttttttctagggcacacttttcaaattgctaaacggtatgtttttttttaaaaaattctatacgaaagttgctttataaaaatcatattaatcattttttttaaaaaatagctaatattaaattaattatgcgctaatgagtcgcttcttctggtgctctagagattaggtcgtaacccatggaatgaacacagcctagttatgttcattttactcttagaaatgtagatctaaattaattatcgtgaagttatgtaggatgataaatatttattattattggtttttatatttcttctaatagtttgaaatgcatgcaaaagttaaaaaatatagcccaaaagtaacatatttattttcatattttagtaataggggaatttggtctttaacc

SEQ ID NO: 42912 - DNA, 605 bp, Oryza sativa
ggtatgattgggctcccactactcttttttcagtaagttttaatgtaactggtatatgtgaatatatttgtttggtatgcgataatgatgatgataataataataataataataatattttgttaatgaaagataggtaatatttattaattatcctatataaagttacaacccactaaaatctaaaactcaacatgcaaaaagaaggtcacatcatcttccactagcaactattacatttgaacatctgtacagaatgttatattacttattttataattattaaattttagagctttaaaatgtaagcatgttaaatcatcatgtcacataaatcacataatattttaaatctctccatcattttttataatatcctatatatctatatagttcatcctcacttagttcatgttatttatctcttctctcattaagccatatcacaattatttttagtttttgaatgattaatctatggtccaaattatcttcctcgttttcttctctcattaaaccatataaccttaattatttttagccctttgatcgtaaatgtatagtccaaattatctgcctccttttcttctgttatagagctacat

SEQ ID NO: 42913 - DNA, 603 bp, Oryza sativa
atttaattcaaattccaatctttagaagcctatatatcctaaaccgtagatccgatctcagtgaaacctagacctaaattcatctaaattcaaatgcttcattttgatgcctaatttgttattttataattttatttgaatttattcaaatatcaattgaatttatatttgcctttttcaaatattttcttttaccccaaaataccctttagccactaaaaagccgccggttggaactttacgccttccatggggacgtttgcggtctattggccccgacgtcgaaccgttggttgtaaagcccggcaaaaccaaacccaaggtcgaagtgctgctcctggcaccccacgccttgatgcgtacaacggtcggagcttcactattccctcgacctcgcacagttagctcttgagctctgtgtgatcctagccgctcccccgccacttatggttgttggagtaacacttccgcctcgctaaacctgcacaaaccttccattcctttagacgtttattggctatcgcaccggctagagaagatccaaacctaatcgttatgctttaacgacgactagcgaacaccccaacccctaattgatattta

SEQ ID NO: 42914 - DNA, 1078 bp, Oryza sativa
tttaatcgtttttgatacctctgagaaatggagacgtggttatcagctttgcttctggtttgatcactgtaaaattattaaagcacattctgcaccgatcagtgaaggcaagtcagtgagatttgatcatttctaatagagattttttttacttgagtacgtacaaatcgtccatgtagtttatagttgcacgcaaatcggggaggtagttgtgccagttgatcaataattttcagttacgattgtaacctgtgttttcatattactccatttgtcgcaaattataggacatcctttaaaggaaaatcagactcgataactttacacttaaccaatatcactagatttatatttatattttaaagtattttcatgtgatgctaatttcatttttgttggaaacataatatgagataaattaatggttaaagtatgtcattaaaaaccgtgtaaaaaaatatagactttataatttgggacagcgagagtacatcacagcctatatatagggtgagtttgaggagaggaggatagagaagattgagaagataacgaggtgagccattagcgcatgattaattgattattaactattttaaatttcaaaaatggattaatatgattttttaaagcaaatttcctatagaaaatttttacaaaaaatgcactgtttagtagtttaggaagcgtgcgcacggaatacgatgtccctttctcacccaatcccccagaacgaacgcacccataatgtacaaacaagtttgcctccaaacaaagttttttttttattttttagacttttttatttttttttattaatagatcatcccaacaagcatttccaaatctgaaccttggaaatgttttttttgtaaaagtctattaataaaattaaaaataaaaaagttcccaaacaaacatgtggcagttctccaatgtttcgtgtgggtaaaaactgaaaacaaaattgacatttcctttcttctttcacaaccattccttacacagcccaaaatgccgccccgactaaacagaagacggttgcagatcgcaatcataatgcatgggtaccgagctc

SEQ ID NO: 42915 - DNA, 602 bp, Oryza sativa
cattggtaatacctaatctagatttggcatcatctagaatattcttcactataattttcacattttggctctaggttggtagcaaaccaaatatgatcaaaaacaatattaccttaccaaaaatttggtagtgccaaaacttgcctgtattttggcactacaaaaaaattggtaggtaaccgtccaaataggcccaaaattttacatagttctaaaaaaaaacacgcatgaatcaacagatctgtgtaaaatttgtgagaattatgtaaaagaaaacacatgaatcagagtattgagcagagctctctaaacacaaatgaatcaccaacgcaattttacatagttctacaaaaacacacacacacaattttacatgttattacgtaatacttcaatcatcaaatccatccaacgctctatatttatctacatcggatcaaacgatcctggtcgactcgacctcacgtgcctcgtcgcgtcgtctcgctggtctcctcccccagctccccccgccccgaccagtgtttctacttttttttttaattcaaattcaaatttaaatgggtatataaacatttgagttataaactttggttctataa

SEQ ID NO: 42916 - DNA, 1030 bp, Oryza sativa
ttacttttaacttttaccactcgtccttttttttcaaaaaaaaatgtagtataaacttggaaccatagcctcgttaataacaaattaaatatgtaaaagttattacattgattaaagttgaaacattgatgcttaatagtgacagaaaaatgagtacggatggagtacgctcatgtaatatttttacaaagttagtttaatttcttttaaaaatattttagaattcttcaagttgatcaagtttatagtcctaaatgtggtcaaacttgttcagaacttttagaatcctatctcaaacttctttcaggtcaaacaagtttgtagaagaacaaatttcattaaatccattgtatatttgttttgtcaaaaatgtcattattaccttcatctcagaataagtttatttttggttcctcccgtttgttcaaaaataagttagccaaatcttataattttatttagtatgtaactgaggaagtatggtaattaattagacagatatatagttatatatgcatgtctataacaatagtagtggtaatatggtaatatagtaatcggttctgtatctacctataccattattatctaaaaaagaaatctacctataccattaaaaaaaataaagaaaataaatccacgagtgatccacgggagcatggtatatccgtatatctggagatgcgccggccacgggcagcaacttgctccgatcccacttggccacttgagcgtctcaccttgccaacttggcaacttgcaaagggaggcgcgcccctcctgtcgatatctttcgtgcagccgaaagccatgtcaggcccataaatccgggcccacatagcgcggtgtctgcccgcagcccaggcccacgtacgggcgtgggcccgatcggccctgtgaaatgtactgtgcataataattaacttgatcgatcatattaaatggaacatttttttttcttgttgttattattaacacattggcaatactacaagtaaatttgttcattataggggatcctctagagtcg

SEQ ID NO: 42917 - DNA, 944 bp, Oryza sativa
ttcgtctcctgtaagaactggtctgtggaaggaggagagcaagttgcagctgcagccgccgccgcgctcaccgctgctgctgctgtccaaattccaactgctagtgagtagtgaccgctcgataggctggagtgtctcgcgctcatcagaacgggctgggctggcaagtttagctgcggcacattacggcccaggcccatactgcgacgagatgcagcggggtgtgcacggagcccttggagtggttggtgaactggtgatcgggccgtgcggccacctacctggactggacagactatcagagtctccagctcctcaattgccgatggccgctgttagctttcctttctcttttcctgcataataaaaaagttgtgtaacaagtcaccattttcagcaacactcagcaaattaccactaaaatttccaaagagctttattctcaccagaaattcagaaacaacaccatctcccgagtggccaaaatagttggagaaggttaagatagtgagtaatgtggatatatcgacagcgccccttctgcgaattatatatgtgctagactgttgagaacgtcaattccaaatctagtttcaagaagatacattgcaaagacaagccatgaatcacccttcaaggtcgcttcaacagatctgcttcaacagatctggcatcttctccctttcatggtcttcttcccttctgttggaggcgtgaaattggaatcgatggattggattttaggctgtggagagaagtgcaaaagctatacgcatggaggcggcagtggatctcagggtggagagatgatggtgcccccgccggcggctgtgcgacgggaacaggatggctcgatgtatccctagacagggggggggggtcagcggctccccaagttttcggcttggtttgttgttttgagtctttcaacacatcggctcaac

SEQ ID NO: 42918 - DNA, 1102 bp, Oryza sativa
aaaaaccttcttttttagaagagtgttttttttactcggcctctatacccaaccggatactcaggctacatgccctttcgctcacgcctaaaaacctatttagggatcgtaaaagcataattttaggaatatattttttgggttttttttgtaacatacacatttacttctcttagccaaggctcaaatttgaacatatgaatgaatttagcagaaatttagaggaaatttactccagaataattagggactgaatttcaaatggaaattgactaattaatattaagctcttgattgtcaaaaggataaaaaaaagagtgtcctgaaatatttcagattttcacaatgtgtggcctaaactttttttttttgagggtaatgtatagcctaaactgataaggcagaaatctaattttatccacgagactatagtgagcctactcttcaagctgggcttcaatttatgtgggccaagtgttaacgaagagacattttgggccatcatattcggcttgtatgggccatcagatgtaacacctacgcttctctttacggcccaaaaacacctacgcttccgtagttctcgaggcttctgtttcctcgtctctcgtcgtcgtcggcggcggcggcggccatggaggacgacgacgagtgccctcccctcgccgtcgagctctcgccggagaagccgtacagtcctccgccgctcggtccctccgcggcgtcgccggtcggagtcaccgtcatcactggctacctcggcgccggcaagtccacggtgagcttttctccgcaggctgtgccctccccgcctccccgccccatgctctccctgcaaagtgcttggaggattgggggcgtcagattactggaactatgtaggatccgagattggtctacggaagattcctggaggactggagttgtggctggtagtttgatccgatcgagttgcatacttgcctgtcgccatagctcttgctgttttcttaggtttaggtagttctcaacatgctgggttggttggagcagtgtccttttctatttggtgagctgtcatgtgactcgaactcgcttcgagggcttcgtttctcataggagc

SEQ ID NO: 42919 - DNA, 655 bp, Oryza sativa
tcaaaactttcctggaccaggatgttgtgatattgaacaaaattgacctagtagaaggcagtcttgaggatttggaaaggcagattcatgaagtcaacgctcttgttacagtggtgcagtctgtccgctgccaggttgacttaaataaaatatttgatcagcaagcatatggtgccaaggtcaatacctagctcgaaacttgcattttgttatttctttgtattcaatgcagaggaatctgtctttgattttgtttttggacaaaaaaaagactaactttgattagttaattgattaagtatgacatcaattagtcatgtcaacatatgggcactaaatctagtcatgccaagacatggaaactaagttattctcaggtcattaaactctatggcacttcttaacaaaagctcgaatcattcagcacgaaaaatcagtgttggtgagacgttttttcagcatctgcttgctcatgctaactagcaatacagaaatttgcttacttgcttttggtacttattttgtagttattgcttttgctggcgatggcaccttgtgctcaacaaaatctgaacaccttattcagggatttgattctgacatgtttttaatttattttccatagaattcatcgcagctgcaagaacttctggag

SEQ ID NO: 42920 - DNA, 530 bp, Oryza sativa
aatgccaatatcacttttcatggttggatatctagaatgactaatgttcaacagtagattgtgtatgtcaaactgttacatgcttaagccttttgtattcaactcatgaatatatgtggcttgctccatatgtgataactgatattactcctagtagctccaaaagaattaactaacatttgttggaaactatactatagttactttcatgtctgaaaagcttggttgatgatctgggaatatagaagttggttgtttatggtctgtttaagggttgggttatggggcgctgatagcctgatactgcttttgatgttgcctccctgtgtagagaacgggtcctgaactggttagctggaatccccatcctttttttacctgttttcagtagctagttgtccctgttgtttagttttcgtttcttttgtataagaccttgttatgttttggctttcttcaaagggccaggtaatgaaatttgcctattgtctaaaaaaaagcttggtagacattactaattatacttattc

SEQ ID NO: 42921 - DNA, 735 bp, Oryza sativa
ctgttctctcctttatcattgatgcctcatccctgcttcccctaattgtaaccgagacaccaatctcctgtcatgtcctatatgttcacagcacgtaatgtggtgtttatttagcttaattggactgtcaaaaatataaaactggtgctcatcacatgcatttcattttcctgtctgttcctgctgcattacttttgagaattaaggcatgctggttcattgccatacatagccttgccatttttttcggtaatggcaaacattggtcattgcaaaaataaaaagaaaaattggctaggtcttcattcgttttgcaaccaaagtcgtattcccattcgtttgagcaactcgggtcagattagaaaatgtcattagcgaatgattaattaattattaatcattataaaatttgaaaaatgaatttactttacttttaaaataaaattcttacttataatttggctcggttgggtttgctgtctttggaacacccattctgtcctttagagtttgaaacgttttctttccttttttacttcgttcaccacaaattaccagggattcaaacattcaaaattttgtatgaactactttgtattatctcctctatttcccgaacccaaacgcagctttggacgcgagattcctaatgggcgatcgatcgccccgagcgatcacccctcctcatggttttctttttttggcaccgcattattttcctattttagtaaattt

SEQ ID NO: 42922 - DNA, 1294 bp, Oryza sativa
ttcggccggccggcatgaccggcgaattagaagagaagagaagagaagagagagagagagaggaggggaaagagatgacgtgtcatcctgtcatgtggggcccacgtgggtcctacgctgactcaggcgccacgtaggataaaaccggtgtcaaaaccaccgaaggacatattgtaaccggttttgattagttaagcgacgtcgaatatctggttttgcagttgagggatgattttgtagctcgatgacaagtcgagggaccttcggtgtactttttcctcaatttgcggttgtgcaaattttcttaaatttgggaaatggtttacgcggtgacaaaataatttctccgctgtttgtttgttactccagcttatctccgctgcatccgaactttaaatttcgaaaaattttagagtttatttttttcacattagcaattaagttgctaagaacatcaccaagtttttttttaacgacttgcacaagacggtgcaaaattttattgatagaacaggaaaaaattacaaagattacaaccatgtaaggtcgtaactaggaaaaacgaaaaaatataccaccacccacacaccggtagcgccaaactacaagtcttggagaagactagcatcggaccgaccgccgctaagctaacaacggaaacaaccaagatcgcccaaaaccttatctttacaaacaacataaagcccaattcatccacgtcttcaggatctagggagaaagggtgggagagaagatggaacacctctccccttaggccctccgccgtggccaacttgttgaaactaggacaagttttttttttttggttgctacattgatttctccacttatttatcagccatagagcaaacgatgagaggctattaaatgctaatttgttttatttttgtaggtcatggttaatttgagtttataatccaaaggagataatttgaattaggatgtatgatttgctagtataattcctgtcacagtgaaaaatctcacagaacattgctgaaaggggaaaatccaaataccccccccctacaagtcactgctctttctactctccccccacaactcaatattgttcaaaacactacacataaattaatttctcttccaattttccactcctattcagtttttacgctttctcgtgatgcgctcaatttctcgttatcgtgggccttcagcgcagcccacgggtggagttgtctcgtgccacattggcggcaaaagcgcgcacaccttcttccactttccatctttccctgctttaatttcacga

SEQ ID NO: 42923 - DNA, 766 bp, Oryza sativa
agagatgatggtgcccccgccggcggctgtgcgacgggaagaggatggctcgatgtatccctagacagggggggggggtcagcggctccccaagttttcggcttggtttgttgttttgagtctttcaacacatcggctcaactctaaagaaggcttggatgcatgcgtcagctgtctacgcggtgtcgcacatgaggcatggtgcgacactgctgcaagaatttttttcctcgtccaagtctgctttgtcgacgaggacaagatctgctgccgcctgccagtgcaaagcctcctaccgccccccccccccccccgcatcgccgacatcgaaaaccagtcagggaagagtggatgacttctggttcaacatcaacacagtggcctacttcgaggcggtgaggattgtttgcatgaagaaatccttttataagcccaaggtatacatcctttatataagttgttgggtttgtaataagtgaaatattaatcacgttaacaaatcgttgttgaatactgagttaaataaacaaaaaatgaacaatgaatctctttaatttatggtcttgttatacaaaaatattccaataaacaaacaaaatctgtcaacctttaggttgagatgacatgaaacagttgggttgatcttattttggattctgtttggttagagaaactagaggccaaatcatataaggctagaagtcagaccggtcaatgcaaaaccaagcaacaacaatacatttttctcgggggatcctctaaagtc

SEQ ID NO: 42924 - DNA, 679 bp, Oryza sativa
cccaaataatgagattaatgattgtcccattgcagtgtgaacaaattagatgtacaccgaaatgcttaaaagaaaaatgatatttcatcgattaaaatcagaagatgaataaccatctaagaaaagatgtgcgttggatcgcaaaatcagttggcataattgccaaggaatactcgcaacaaggattataatttactgttacaattaaacagtttctttatataggaatctttgtagtgagttatgcaacaaggagcaatgatattggtagagtcagtgatttacattacagattgaaaccatcattatgtattgttttccatcgatcatggaaactggcttgagtactgctcctgaaactattatagtgctaagctgaataaagcccgcacaatcgattcaaaaaaaaaataaagcccgcacaacgaagattgttacatgacttgtctctatcagtctgttgcatgaaatttaacgagcgcgcttgggagttggactgtggttgggtagatcacggtgaaatttaaatgatgcgtgattggaggaaaaaatagtactctagaattatacttacgtttttcaagttatgaatctgttaacaggaaaattggtaagatagactcgaatttggagttagatatagacgcggaattgaaggagattgaatcttactaaatac

SEQ ID NO: 42925 - DNA, 554 bp, Oryza sativa
cccgccggcctcatcggaggttggcgtgaactgaagcagaattggccgcgtcagcagctgcacggagccaaagatttcttgatccgaaaatcgaggcgatcaatggggaactgtacagattcaattcattccattcattccaatctcgagctccaagctttccaagatcattgaggaaaaaaaaatcgacaagtgatcagagttttctcaggttattccaaagttttcttcatttttgtttcttcttcttcttttttttttaacatttcctttatttagttttctctcctttgaacttctttgaaggggctaaatcacaataagcctatgatgataagagctcacagcatctgaactgattcagttattaatagcttaagattagctcaaagcaactgtttttaactctgttatctgcttgcttttagcaactatccctgtgtcagtatactaactgaatcccccgtgaatttctgggtcaatgctaacctttgctctgctcctacttttgctgcactaatccgagatctgccttgggggaggcaggcagcagc

SEQ ID NO: 42926 - DNA, 1714 bp, Oryza sativa
cagtaaactgtgctgctggaaaacaattttttgtaggtccatatgtgttgtggtgttggttatcatgtagctcttgtcgaaaattgaggtgtctgaatataatgccaaaaggcaagcaaaactgcaacgcttgatagttaagaattttgggccggcagaggctaaatagggtgtgtgatatcaatgacaatcagatgtggaccattcttgtgctgttcttctgcggccccatccttatttggtggagctctcgatgtatgttggcgatccacttgtcaggcaaagtctctttgtttcttttgtggtgctaactttggatgttggcctgaattgaccacaataatctactagcatgtctgatcagtgatcagttcgtggtttgatggtaattaagaagctcaaatgtgcacaacatagttgaactgaattatggctgatctggtactgttctactgaactcaattctcagtttagtcagtgattaggcacaatttgtcctgatgtcagatatgagtagcttccattttgcttttacgaagcacataaattgtgccatagtcttacacacactcatcactaactaaatttaaagttattgccagtgacacatccatttgcagtttttgcattgacttgaactgaaggccccaatcaaacaaaaccttttgtttttcctcaacctccatccctgaatgagttagtttacaattccaatttcgatccaaacaaaacagcacgatccttgtagaggatcccccaagtccctagaataataatgccactgtttttcttttaagtctcagaacgagcatgcagtccatcacccccttggaagatcagacacaacaggccaaaatctagaaaagaaatgagctgtcacaaagcttcttctgcatctaatctagccaaagcatcaggtcatcacattccacaacttgtgagaaagatatacacctgcagagaagaaacaaagatctcccggattaatgaccatcattgcaagaaaaacaatgaaaagatactgcatcaataaagccatgagaggtcaggtgatgtgcaggccacacctctatctgtgggctgtggctcccacaaaagtttgcagcttaaccagcagaagccattgctctcctgcatgcctgcattgcattgcaacaatgcagccacttaaccaacctttctttggtctcaaaaaaaaggaagaaaataaaagagaaaagaaatcttttattagcagtcagcacagatccagatctgcctgcctgcctgcttaggtgatcagtacaatgttgctaaaattagccaagtgaatgctccgaaagataagagctctaattggctgtatgtgaccaggtaagtaagcagccaccaacttaacctgacattaattgtagctaaccattttagcttgtttgtgttttttatttgtggcctaaattaaagtcgttaataattcggtacattatttgatgatatactggtctaccagaaacaaaggtagactctatttgtgaattcaagaatgtaataattgggaaggccgattaattagttagtataatgaccaagatcacaccagccaagcttggtggttactctttcacagaaaagctgaagctttttacatgccctgaaatatgtgacaaatcatagctctatctagcaatcagcaaatgctgctttaatcagctaccatctcatgccatgctacttg

SEQ ID NO: 42927 - DNA, 1011 bp, Oryza sativa
caggaaatatttttttgggaatacacgagacacacattttttattaagaggaataaatgtatttacagagcgggcctgaaaaccaaaaagaaggggacagggtacaggagaggggaaaagaaaagcataagcctaatctcccgaatgatttggcgacccaagaacaaacgaatggactgtcatggttggtatggctgatctagccatccgccagaggtccacttccccatcatagccctagctatcttcatccaaggtctgctcttctggttgaagacccgattgttcttttccttccagattgtccacgctaccagtgttgcaattgtgtcgaaccctcggcgatgatccttaatcatccttttgcgactgtcacacagccaggcatgaaaggactgctcgttgagaggtagacattcggaatgaccgatagcactaagagcaatccaccaaagctgtcgggactccgggcatgcgaccaggagatgatcaatcgtttcgtcgcgttgatcgcagaggggggcaatgatccgggaaatatgaggagagtctatatgatagcaccataggaaacaaacaaagcataggaaagtttccaagaggttggacctcttgcttatttcctatgaaattgagctataggaatgcaatcatatgaaaaatttcctatacttttatgtgaatcaatgggtttcataggaaaaattccttaggaaattgaatactccaaaattcctatggcaatcctccaatttaagggtcctaaaagttttcaaattcttagatatttttgaacaccaggatgtgtatctcttgttttgacgacacgtgtgtcgtactacctccattttcatttactcatcacttttgattgtgaatatatgtcactacgcacttaaatatgtgattcctcttttgcccttggtgagcctaattaaggtcatatatgtgcggcatatgtatttataaacctctagattctatatcccactaagttaggggtattttgat

SEQ ID NO: 42928 - DNA, 652 bp, Oryza sativa
gtgtgagtcttccttcaaggctggtaccgatggtgatggagggaaaggctgactaaggtgctagatctagagcttcgattggcagcttgtgctgtttgccaatccatcgtgctgctcgtcaatattgtgtgtaggtacactgtgcagcgtgtaattctcgcttgataccgataggtgccaagtctgatactcgtggtatcatggctggtatgcacagatatcaggcatggtacctcgggcaccgataccatcttataaccattggtgcctgatcagtaggacactcgccatcgctgcttggctggctggcgaaccgtttcccactaatgtcttttctccattcaacgcctctccttggctctggtctttccttccctagtgttgctgtggctagcgttgccatgtgtgtcgacacctcctagcatcctaggcattggcgccgatgcattcgcctcaccatgctcctccgtcgaccaatggttctgctcaaggtgtgagccatgagcacgtggcgtggggtgggacggagtcgtagacttgcgaggataaagcggaggtgcggatgacatcaccttcgtaaagtatcatgtcgaatgggcggaatgccgtcccctagcaatcatcatttattaaggcataacaaacaaggcaa

SEQ ID NO: 42929 - DNA, 610 bp, Oryza sativa
tgtttttaagtttctggatatcccgtcaattaccaccacctactcttttatggtccggccgctgtcctcctttcttatgttatttttcacctcctcagctcgctcttatgttatttatcggtcatccacttgtctgcatgctccatcatttagtttttttctcgacatcttattcttcccccgtcccattttaaatgcagttatgggtttctatgtccaacgtttgatcatccgtcttgtttaatttttcttataattagtatttttattgttattaaatgataaaatatgaatatcactttatgcatgacttattatttttatttttttcataaaattttcaagtaagacagaacagatacacttaaaatgggacggagggagcactattgaacaaggtaatgttgtaaaagctatgaagttggtggtgggaactaaccccttgcgcatgcaagacgaagcgattcattagcacatgattaattaagtattagttatttttttaaaaaaagtggattagtatgaattttgaaagaaagattttttttgttcacaatacacgcgagagtagaggttgggaaagttgagtgaagaacgtagcttagtcatg

SEQ ID NO: 42930 - DNA, 866 bp, Oryza sativa
tgcctgcaggtcgactctagaggatcccctgcagcacatctcccgtactttgtcaattaaggatcaaaaataaaactttgagtaatcaagcaggcccaacgaaacatatactccctacaatcataaatgtttgatatttaacatagatttgactaaactttaccgggtttaatattaaatttagatttcaatattggcatgcatgactaataacgcataatttttcatcgactcaacatatagaacacattaatacttatacacatacaatttaaagtttatgttttagttttcaaatttaaatctaaattgttctcacatgtatgccatatgtagtagcggtttaaaagcagtatattcatatcttttcttacaactggaaaagctaagcattaatttgtcagcattggctgtacgatgtatagctaatatatatgctactctcttttttattttttttggaaagataatatatacttcatctatcttatctcgtacgagtttggtttactttgcgacgtaggaattatatgcatgtagtactctgtccttgtcatgcacgattcacttacttcccactaccctcatatcatgtggccacacaagtacccacaaggacaccgtccgttctaggtttctatagcattcaccaaccaaatttcttgggtctcaatttttcccaactaattaatcaaaccatgcatacacaatcaaagataaggggagatcacacactgagtcactgactgattaaatcgaaacaagtcaaacaaccaaaaaggggtgcagatcacctacgtacctaccagtaattaatcagcaggctcactgtaatcaaatataatcatgcattagtagcttaactg

SEQ ID NO: 42931 - DNA, 589 bp, Oryza sativa
cttccagaaggatcattaacaagaactccagaaggtgactttctgttccttcctgaagaaaataaagggagaagtatcattgacaacgcatagaggctacactgatcaacctgaaaagaaaaaaaaagaaaattcagaaatctagcactagttgagtagtccttggcatggttggcaattggcaactttattaaattctttcatgatcttactactgggataagaggtatgaaatctagaactaacaattttttattagtatgctacttgtgtatgttgagctattatctaaaagaaaaaccttgtgtgtgagctattgagcaaagaagtgtcaaattgtacttataccgtttttagtgagtttagtcagtgcgtacttaaactgttgaccagcagtgctgggtaatgattttcccggatgggtgatgctgtcatagtgaagaacaagtggggacaagtgtgcctacatctgtgagacattcaagaacaggactagtactactagattaactaatgagctgcattcatgaagaaacacaaatgcacaatgcagttgcattggcagattgagtagcaaatgacaaataca

SEQ ID NO: 42932 - DNA, 732 bp, Oryza sativa
ttcgtcgcttgctcatagtgattcctggtgtactgtatctatccattgctgaatctattcagaggtacacgctgttttcgttcagggcacggcttcggtatgctatgtaaatattggatccgcattttggtttcttggtttgcaactatagtagcatgagagtccatgttggagtgattgccaatctctagcttcgatatggcagcgtagtaactactctagtaaatatgttcttgtgcttgatatcacaggataatgtcatcttaattgagttccccaaattttctgtcagtagggcttatccgttgctttctttgcagatgtctagtagctccaatggcaatgggcattatcctgttaatggtgcaaaggttctgcaaaaaagagagaacaatcaagaggtacctgacatgtgtttcgtgatttattcgttgtaaaacttaattttttgggagcactggtattttttagtgttgtgagaaaccagtaatctgacattctttttgttcaatggtaactctgatattggcacttggaagattttctcccttaccctgcaaattaatgattgatacaaaaaaaaagagagatttttctcaagtttccagaacactttcttctcagcctatttgtctactcacttggtcacatgtgtaatgccaaattacctaaccatttcttgatatgcattgaggattaggttgttatttacactcaggtgtcagttcatat

SEQ ID NO: 42933 - DNA, 1092 bp, Oryza sativa
aataagttagatgtgtaaatgtagctagaaaaacgtaagtatagactacgtgaaatggttgccccatgatttaaaaaaccaagtatgttttagtatataaatataagtgaatttgacttgtacctttgttttgatatatctgtggcttatctagtttactttttattttttattcctgatgcactaagcaggtttccaaagagcagagaaaattgagtggagccctgaggaaactgcaggaatcacatgaactagctcagaagcaatctatggagataaagaaattgaaggattctttaggggtatgtgcttgccagggcgatagtggcctagtgctccatcatgttttcttagtctttacattattcgactctagatgctcccatcagcttcatggtatactgatatgtacgcgtccattccagaggtttaactctgcgttgaaccatgggacagtttgcagatcttgctcctgcgggttctgcgcaatgttgttagagctgtctaactgctctatcgaaggactagttgatgttagatcttccaatgagaagccacagaaccaagctctactagaatggcgtcctgatgaagatgcggatggtgaagccggctagaacataggagtgctagatgatcacttttgcactcatgcgtgcagttgttgtagataattctttgtaccaacattgttatatgtaaatggggttaaatgcacatgtatttgtaaatcttagttagctgttttgttttccagattgctttttctagctttctctgggtgttgatttgctttttctagctttctctggtgttgagctccaattagtagtgaaaaatgtatgttaaacttcatgtttttttcccaagaaattttgggtgtgccatttgtgcagcaagttgaatgctgcatcttttccttagataatgctagaagaacatgcatcttaagcagtcggaccaccttggtgatgctgtgtgtgttttcagcaaggggaaaatccaaatacccccctacaagtcactgctctttctactcttccctctacaactcaatattggtcaaaacactacacataaagtaatttctct

SEQ ID NO: 42934 - DNA, 999 bp, Oryza sativa
ataagaaatgctcatgaaaaagttttagtaacaatcataacatttagaagattgggatgtgtgcagtgataatccgggacactattttaacagctcgagtggacgtccaccagtttattgcatgtcatctaaatggttataaaaaaaattaaaaaaatatgaccaagataggttaatatgtaatatatcaatccacaaacatgcaagttaaaattcaacttctacaaattgtaccaaaaataataaacaaaaattaaattactatatgtatatttacaactaaatttgttatttttgttacaacttatagaagttgaatttgaacttgcatgtttgtaaagtgatatattatatattgatctatcttgtcaatttttttgaaattttttcataaccatccagttgacatgcaataaacgatcgaacatccactcgagttattagaatacatctcggtgataatccatcaaccataaaagtctcatacgaatggagcaacattttctatcaatatggcactttagttttacttgtctggctgtctgagaacgtgcatatactgactttaacaaccaaaggacattggtgagtaacacaactttggtgtgcaactcaaattgaagattcaggtgagaaaaaataatattcaggctaggctaactgaggtgtaaataggttctccttatgaacctaggcataaggaagatagaatgacacagttaattacaagattgtaaactgtttattaaaaaaatgtttcttcccccccaaaaaaagaaattgtttctgtttggaacaagcaacaaatttatatgggaacttatctagtcatgggaaacactgagtccactaaatggaactacaggacagcaagctgaataaactagtgcttcatgttgacatttttttgggcatcaaaaacaaacctaatcaagcttttgccaatagctgtgcagctcttcaaaagggagtacaatacgcaaagctagtactacgtaa

SEQ ID NO: 42935 - DNA, 600 bp, Oryza sativa
tgtactctattcgatctggtgctattgtcgatggtcagaagctgcatgacgtcttgtgtgatgtatagcatagcggcaaggtactacaatgcggatttcttatgagttcaaattatgaatttgggttgtatggtattatttgggtttcatattggatttaatgaaactaagctgaacaacgttctcaaggaaattaatggagcattgcacaagccaatcatgatctacaacttacgaactgcgtctcttattttgcacgttattttgcacggagccttctttttaagtaaacaatattatcttcagtaaatcatgatgcatttacacgatgagcggtctattattaccttcagtaaacaatattgctctccaatgcaatgtgctagtactaattcgtttgaagtaactatagcaattccaaaaaaacaaacatcaagagtatacataattgacatggcatgcagtataggaataaataacacgagagccgtaaaaaaggctggaactgagagataagttgagcaaacatccattgattgtaaaacatggtgctttgagcaggcaaaaaaaaaaatctattaggacccttattctgaaatc

SEQ ID NO: 42936 - DNA, 4301 bp, Oryza sativa
atcctgataacatttgcatatgaaagtttcttatcaaaaccgttactcactagcgaaacttacaatgacctaaatgtattaaaaaattcagtgtatgaagcaactcagtgtagtggtggaatggggaataaaatgattacgacttgtttgaaaactcgagggaagatgattggtagtttcaacgagtaaattgatggtgagattaacatggaaatttgatttttagtcccaatcttttgtttggtagaggtggtgggaattgatagatgattggtagtttagttgaagattagaagttagaaaaaaaacaggtggttgagatttttttttagataaagtataggagaaatttcctctcaattaccaccactatccagatattagaaaggagagagttcctttatcaattcccatccctatcccaccacaactccaatatctcccaaccaaatagcatcgtctctcaaaactcccaactctatatagttggtacctactaagatcattaacacctataaagcagccctcacatgaagccacgtcaccacaaattccagaaccgttagatttgatctcaacgtttgcaaactccctcagctctccgttacatagctcggttgcagcagctgaggcccaacccagcttaagcgattgatccagcccatccagtctcctcacttccttctcctcttgcggcatgcgagtggtcgatgtgaactccgatcaccacgagtaaccatcgacggcggcaagaacaattacttctgaaaaccgatgccaccatgataggcagacagatggtcattcttaatggctctaatgccttttgttctcttcttatcccctctttccatttacttataaattcataaaatcataatcattatcaagcgggatagttaatctatcaggccgatggtgtttcgctcaagttgctggagcttgctcgctggaaaaatatgcatcactgcaccatcctcttcaattttctccaacgatctagcacaggttaccaacttcctcttgccctttggttgattcatctaatttgtttccccaaaataggaccagcattctaatttgaacctgtatgtgttcagtgtttatgcaagcatggcccaatacatattagcattattttcccatttttgttatcaaacagttttcccatgcatttcaattccttccgtttcctgtcccaggatccagatacttgatactgagtcaattcttttttttatttgtcctgaactgcagatcaattttcattattccagttgaaggatacggccaacaatatcacgtagatcaattggttgatttgtcatctacatattcagatctaagaagaatataactcaccaagtttgcaagttgagtaacactttcaaattggatgggtatgttcacccaattatgttttctaatttgtatttcagttctgatctttacctggtgaggatatcttcaatcttagaaatagattggattggcttctgtctcaaatatatatgtcaattcatttcgctgtcagagcatcgagctgctcccattaaggccgtgtgaaatatgtgaatggatatgaaatatgtgatcaaaatgaatgttatgtgaatatggttgtgttaaatatattgatggttgtgtatatgaatgggggtgttggggtgtgacatcctggcctagggcttaataggattaatagaatactcataccaacaagttccaacaacttgtcccttaatctaatgcttttagctggctgagggaattaataccagacatatcacacgcatgtttttagttttgttgcatacatatacaagatatcatatggtagatatcaaatggatctgatctaaacatttcacattaagtaggcgtggatgtaactgggaaaactaaagacatcttaaaagatttggaacatgatgatgcaagttgcagtacatgaaatatatagcgctgataggacaatattaaaatatggacatgtattgggccatgataagttattaacgaccggttgataggcgtaccgacaagagctgattaaggtcacaccactattccatgattgaggtcacaccactgttccatgatggagcctaccggcgagctgattaagtaattgagataaaaaaaaagagaaacaatcaatcaataggacatatcgtcttcaatgacaaggcacatctgtgacagtaccatacacagttgtatcttgtggctggataggttattaggatatgtaactgccacctactcatgttctacagacgtggctgtgattaaacacacattatataaggccactgttccatgattgaggcaaccgatgagctgattaagtaatcgagattaaaaaagagaaacaagtaatcaatagcacatatcgacttcaatgacatggcacaaacgtgacagtaccatacgcaggtgcatcgtatggccggataggttaaaggacatgtaccatccatctacacatgcttaagagtcgtggctgctggttaagcatgcaatctataaggcttcacgatatgttataagcgaccagctgattgatgaatctatcggcaagagctgaataattgtggctgcatcactgttctataacggttggtgtacttgctcgtagaatatttattggggatttgagtgagttaggctaccggttatttatttttatgatgactagttctgcccatttttatgtaagtataatcattcagaaaataattgggggttggaattaggcctgccacatagaaatatgtgggtccacatatagaaatcgaccaaaatttgtataaatttgttttccatataataaatcatccctctaaattttagtcaaattttttgaagttatttaatgtgaacgcgagtttctgctaggagggttgttcccactatgaatactttcatatagcttagtaccttggcacttttggatcacagtataaaccctcgagtgggaacaactcactgagatccaagagtgatcataggacttttggttcacagtggcaactcggcagttattgtattatatatctatgcagaaaactaaatgccctctgcagtctccaattgagacactagtcctatgtagaagaaaaacacggtcaatagatccaaagcaactaagacaactggcagcgactaagaagtgcattatagatatctgttctaatattaatgtgattgtatgattgaaaataaaaaatatcctggaagaaacataacctagatatatatcccttatttaattagtgtccttgggagttggacagtggttggagagatgagggagaaatttaaatgatgagtgattggaggaaaaaatagtactctagaattggacttactttttacttgtttttaatcatatggaattacagttaatttattattataggagcgagggagtaaataattgttagatgaaatatgtttgtaccatatttttttaaaaaaatcttcactgtaggtcctcactgatgagcatgttttaagcccccagcaaagcatggtgtggatgttccactgccaaagcgtgtttacctggttcaatcattccatgtggttgttaggtgcaagcatagtacgcaatagtgatgttgttgcttgtgtattttcttagctctccaaacaactacttaaaaagagttatggtacagtgcccaaataatgagattaatgattgtcccattgcagtgtgaacaaattagatgtacaccgaaatgcttaaaagaaaaatgatatttcatcgattaaaatcagaagatgaataaccatctaagaaaagatgtgcgttggatcgcaaaatcagttggcataattgccaaggaatactcgcaacaaggattataatttactgttacaattaaacagtttctttatataggaatctttgtagtgagttatgcaacaaggagcaatgatattggtagagtcagtgatttacattacagattgaaaccatcattatgtattgttttccatcgatcatggaaactggcttgagtactgctcctgaaactattatagtgctaagctgaataaagcccgcacaatcgattcaaaaaaaaaataaagcccgcacaacgaagattgttacatgacttgtctctatcagtctgttgcatgaaatttaacgagcgcgcttgggagttggactgtggttgggtagatcacggtgaaatttaaatgatgcgtgattggaggaaaaaatagtactctagaattatacttacgtttttcaagttatgaatctgttaacaggaaatttggta

SEQ ID NO: 42937 - DNA, 5082 bp, Oryza sativa
attatctaagtaaatagaactaactaaaatatgaatagcaaatccaatgcccatagttagagaaaacaaagtccaattatttcgtgaattttcttaaatgtgctgaaataatgcaagccagctaaatgatctttcgtgtatttgctctaaactatgttaccatcaaattaacattgtgtgtggttgtggctttctacaccttcctggtaattctgtttattttctttgtgcatagaccattcaaaaggtaaatcaactatatgagcattaataatctatgaatatacacttgaagcattaactttggagtccatttagattttaatgtgagaaaatcgtacggtaggggaaaaaggaacaatgagtttagctaggtcttactttttcactaaccccaaaaactaatgaaaataaaaaccaccttgattttaatatacaattaatttgttgaacatgttctaaacaaactaagtctactattttttatatagtgataaagattatagataattggttatactgataaattaaatattatatagtatatgacttagaggaattatcaaagtgatgttgacgaagaatatttatcgaggaaacgtacttccgaaagatggtagaggctatctggttaatatgatccgttctcaacgcagcccacaatacatgccagcgcgcgtgcttgggctaccttcctagttttttaccaaaacgaagaaagctattttccaacaaaaaaaagaatacagaagtacgcaaaaagtcaacgtagcaaagggatacctatgaaaatagttttttaagtagttcaattgcacattacacaccccagcgtatagagaggacatatagatcgatatgtaagttccctgcttcaaaattattatgaaacaactcattctttggtgaactagtagatttttactgtcagtcgaccatgataaaacaactccatcgatacgccaaagatcgtaataatttcaaacaaaattgaaaatatgttccagaaattatatgtacagtaacatcaccaaagggaatatataacctgtattttaatttcttgccatgattgcactgttgttgacagtacgttccatcatcccacatgcatgtagccttgttcctcgtctactcagttgtttatttttattctgaattaaaataaattgaaaagttgttagtaccatcgatgaagccccggccaggagctgtcgaacctgaaaatcatgatcaatatggtggggctgaccgtcttggcggacgattccgtcgaatggtcgctcctcacgacgctgtcgcggttgcgtatcgtgctgcccaatccgccattaattccaatcagcatcagctaggctgctacgtacatacgtggttagcacatcccgatccgttgatataacttgagataggataggatacgtacagatataggtggactctctatacacgttaggttcacttaaaaatgccaatgataacacatagattacaatgtacggtcaagattttataatccatagatttagatttttctagttaacatgcgagctaaaaaaatgtccagttagtatgggtatacatagatggttggaacaccaggatttgatttgtgttcatagataaaggtatatgtatataggtagtattgattggatctgttgattcaatcaattttaattttagggttaaatattcttaatgacatacatttttatccagactacccattgttgacattctaatttttcagcaagtttataatcttctaaaagtttcaaatttcactaatggtaatgataaaatgtactacaccaatgttaatgcaaaatgaattgtccatggcagtttcaacagtttcttaggatgttagcttgaggagttgattttgtttactgaaatagagtagtttaaaccttaaatcagtgattttagtccagccattcactttatttgaagatatagtcattgatacagctggagtaaacattaaattactacctcggctgccttaatatgctgtggctgtgaagcagaacatatgcatgttctttggagtagtatatgacaagaattggggaaagaaacttattagtttttctttactactactctcacataggcataacaaaatagtgatattagctgttgttttaacgcaaacttccaaagcaggccgctttactaaatgttattactttgtgataccattactttcaagtttcaactatatatttatatatttattatatactccctccatctcaaaatataaaaagttttagggttagacacggttattaataaagtacgtagaagtgagtggtggagggttgtgattggatgagtagtggaggtatgtgggaaaagtgaatggtggagggttatgattggttaggaagagaatgttggtagagaagctgttatattttgggataaatcctaagagctaaaagttattatattttgagacgggtgagtatttattattcgaatgtgaaatgaaccgtacagaataacagtggggctcttaccgctgtggaaaatgcccacggcatgattgatatgggagggtatagctgatcgcatccattcagataacatatttgtttgcggattcagtcaaggtatggaaaactaagttttccagagctgtgggaagttgtaccatcaattaagtattgaacatattgtcttgcatgtgctctcacgttagtaattgtttactctatgccaagatgctacgtggtgagtcacataggtgtttggataggacttaaaacttttaaaactttttagtccctatcacaacggatgtttggacactaattagacgtattaaacgtagactaatgacaaaacctattccataaccctgaactaattcgcgagacgaatctattgagcctgattaatccatgattagcctatgtgatgctatagtaaacattctctaattatggattaattaggcttaaaaaaattttctcgcgaattagttctcatttatgtaattagttttcgatgtagtctatgtttaatactttaaatcattatccaaacatccgatgtgacatggacaaaagttttatccctagatccaaacaccaccaagacttcacaataatcaaggaaggtatgcaactctgtcgatccctttattcatctagtttagtttattgttcatatggtgtaaccgtgcaaccttaagagttggaactacgttactattcgaaaaacaacgaaacaacaaataaaattaacccaggataaatttattaggattgaaatgtattattatcttatatgaactaatttaccaagaatatttttatatggaatctgcacatcttatgtagtcagcttaatgtctttatctgaaaaaaaaagctgaaatgaattctgaagattttcaatgaatatattttaggcaaaatcgtatgaaattaagcaaagtttgaaactggcagcacatatcgagggtatcaaagttagcgagatgatgagggcatgtttttcaatcctgtatcaccttggtgcttgcaaatattcaactgtatttaccttttcttttctttcagtgaacttgataacatcaagagcagtaaactcaattactgatttatttatttattttgcatgtataacatctaaaaaaaagattggaaactactctgaatgaagcaaggtatgaaaagcacatgcagtcagccttatttggttaatgaaaaataaaataaaattaagggaaagctatcattacagacggtttggcttacatgaaagtacatgaatttgaacctaaatcgtattctatcatggaatttgacttgctgtttgtgctcatataaagctaaattagttggaagtgtaggatcgaatcataataactaagccaaccagagagggggtgaatggttggtagagaactcttttttctgcccctgcaaagctaattatttgtaattattttggttcataacttgtatatgtatcaatggtttaggcaatgaacacaacaaggcagagcggattacagagggaacggttggcttgagagttaatcatgtgaagtatgacggtggtaagaatgggcatcaaagaatgacaagatatagtgtgactgtttaggaaatatagtagtgatagtctttacgaccccttctttttagcaagaaacataattacaatgaaggatcacatcaaaacaagtcacctcctatattaattcttttctaccttcaacaaatgattttactcattcatcatgtgacacatccaacgatcgaaaattatctgatgacgtcgatcaaacggctccccacctccctcccgattcgatccagatcacatcgcttcgcctcaccccagcaaaatcaccgcgccctccctcctcctctttctatctttcacgcgctcctgcccatccgcctcgccttccactgccctccatctcaccgcactcctcagctcgcttcttcgtcaatccgccttgcatttcgccaccctctatctcgccgccgccaccccccatccacccgccggcccctcctcctatcgcatcggtctgcgcctccgggacagttaccggccagttcgctattgccggagtcaccatcccgcacccgccgcatcctccctcccgcacctccctctctcccacacccgtcgccaccgatccagctctctactggtagtagaaaataatctagaccgttgatctcaattcattaaaaggttgagatttatttctattaccacctcacttaatggtagtagaattgtggaaaaaatatctgtgcagggtataatcattctttacactcgctaactgctctctctctctctcgttcattccttagtccccgaaatcccccaaatcgcatccgagccgacccctgcgagcaacaaaagtttgtatttgtgtatagaatgtttgtatatagtatattgtgtacgtacgtatttaaaaaaccgaaaaaaacagggaaaaaccagggaaaatactgaaaatatacgcccaaaaatttgtatatgtgtataaaaaatttgtatttgtgtatcaaaagtttgtatatacgt

SEQ ID NO: 42938 - DNA, 543 bp, Oryza sativa
tttttggatagtatgcgagacacacccccccttacctagattgacgagtagcttgatggttagttcgatgcatcttttggatgaaccttatttggactgcgtatgtgtgcagtcgattgcatcatgatttatgtactatttggggaactctatgatgttatttatgatattattggtgttgggttataaatgagtttattccaccatgcttgcaaaacaaagttcacatcgaaacaactcccttaatgggataaaaccataagagctagttagaaaattaggatacttacttaatcggcctacacagatggcaagccgacgtcgggcgtcaaccagcaatgaagaaacttcgacacctgacctaaccaccctggccagagttatggccactgaaacccaacttctacaagccattgcgaataaccaaggcaaccgcggcggatcgagctttggagagtttatgaggaccaagccacccacgttcgctacggtagacgagcctatggaggcagaagattggctacgtatcatagagaataaact

SEQ ID NO: 42939 - DNA, 695 bp, Oryza sativa
cctgtggagtggtgttcccgctgcagttttagtcaaggcttagctccggttgtctttcttttcttccgctgcatttatgtaagacttttatgatgtttgtaagacgtggatctgaatgtcaatattgtcgtttgtgtaccccggtcggtcctggacggggatgttaatgcacattctgcttgaaattctattcgggaatttctgggcgtgacaattacccctctgttctttgttaaccaatccatacccaatatgacatctgtcacaccccgaagttctcctcccaagcctaaaatttaatttttaaaacgaccccaagaaaatgcaggtgaaatcaagagaaaaccctaagaaagtaatgcaaataataatcggatttgacatgtggaatttttcttgagatctacatgtcgaaattcattaacaggatttccagtggaattttcagagctctagaaataattttaaccaattaaaattgagtaagcaatattttaattccagggaaaatcctttttcctttttctttttctttttcctctctttttcctcctttttttcgaatgggccgtcggcccattccctccttcctccccctcctccttgctgggccggccgcaggccgaggcccagtcaggccgccccgccgcctcctctctcggggtcgccgacaggtggggcccacctgtcgggtc

SEQ ID NO: 42940 - DNA, 669 bp, Oryza sativa
caatagataacttgctaagcaaagtcagtttagatgatgatcttcctaaatgtacaattcagtgcactgaagatgttgtgaagacacgtgtctcttttagagttcctccacacaaaaaaggtctaaattctaaaagatcaaaaagtgtacttgatagaggaagaaatacttcaaataagaaaacaagaaagaaaagtaggttctctaaactaaattatgccttctcttctattttgttgttaacttatacttttgttctctattttaatctcataggaaaagatgttacggcattagaaaatacacaaacagatggaccttcacaatccaccttaagatcaacaaagccagtggcggatccaaaaaatcaattcgttggtgtcataacgtgtctattagtgtcataatatgctaattatatttagattatggtgttatattatatggataagcaatttcgctatagtttttgctaaaaatcatcggtgtcgcctgacaccggtcattacactgtagatcctcacctgaacaaagcaagtttctcattatcttcctataatatatatatgtgtgctcacatatcttaaattttctgcacacctttgattcaggaacaactccaatcaaatgcatatgaagataactcaatgcaagtgaggacaaatggca

SEQ ID NO: 42941 - DNA, 646 bp, Oryza sativa
cactaaattttctctggatataagggttccattagtaagctgcaaataataatattattgtagtataaaaacatgaattaattggaagagattaatgaaggttggatagcatatttcatgattgtaatttcatcagtaaaacaaaatacaatctatttgcacttatgctaattaaaactttctatgaactctcacattagctagaaattgatttgatgcatcggattattgtgaatgtagttcatgctgagagtcatgttaaataaacaaatgacacaaatgaaaatagcacagactctaatttagtaataaaattcataattaaaaatatcatatcgtatccatcttatactctgaatttagtatttattaattaaaatctagaattcaaaattcataagtagtaacttgtaactaacgtggaccctaattttagtatgagcagatcaatatcaactcacaaccaacacatgcaatgtaataatataattttaatattaaagagtagcctatgtaatgcatgggttagcgactagtggttataatttctaatttccgtagaaacttttatgagattgtatgtgtacttttcatgacatatgtacaacacaccatatgttttcaaactaagtattattactttttt

SEQ ID NO: 42942 - DNA, 641 bp, Oryza sativa
tttccacatcaacctttgaaggctatggcagagctacatttgcagcgcagcctctctgcatgatttcttactagataggattaagtttcaagagttaatttcttgtactcttgggcgatccatgctgtcaaatcagcaactaacgaggcataatctcgatcactagctctgatctgatcttcagctagcgccggcgagctgcagaggtctccatccatggcgccggcggtcagtgcatcgcagggtgtcatcatgcggtccctgacgagcaagctcgactcgctgctgctgcagccgccggagccgccgccgcctgcgcaaccgtcgtcgctgcggaagggggagaggaagaagatcctcctcctcagaggcgatctccgacacctgctagatgactactacctcctcgtggagccgccgtcagacaccgcgccaccgccagactcgacggcggcgtgctgggctaaggaggttcgcgagctctcctacgacgtcgacgacttcctcgacgagctaacgacccagctcctccaccaccgcggcggcggcgatggcagtagcactgctggtgccaagaagatgatcagcagcatgatcgcccggcttcgaggggagcttaaccggcggcggtggatcgccga

SEQ ID NO: 42943 - DNA, 720 bp, Oryza sativa
  unsure (1)..(720): unsure at all n locations
tacccatgaattcagaaccccatagtccgcacatcctcaaatacaaagcacttccctagttagatgtaggttagacttcccgttcgagaaactctaccttctacctgccctcaatttatgcacgattaatgaatgccacctgggtggaagcgagaggtggaaatggaaggtcttagttcggaggtgggatctctacctgatagttgcattgccattcatgatgatcccctggcattcgtccattcagccattcaccattcacccattcaactggaattttggttgaatgccggaattgtgtccacaaattgtggatggatagtnggnagctggctggatggctggctggatggctggctggatggatggtgaatggctggcggcggttcggttgctttgaagcatttgttgctatctaaattccatttaaggtcgtaccttatcgcccagcatcatcttattctctatttgtattccctccatctttcagatacggatgtagccttggatgtgcccgtgcccaatgaagaggaagagcgcaacatgaaacgtaagtacaaaagtaccggacacccacccagatcccaatagaatccgccaaatcctgcgggaaattgtaatcccattcaccagctcctacatttaattaacaagagaactattgtatttatctaacacctggattatctccacctttcatttgatccctatttatagatt

SEQ ID NO: 42944 - DNA, 2996 bp, Oryza sativa
aaaagaataaagttgtttctctgaaaataccttgaagtgaatgagtaacagcacacgttgcgtcggggcaacctggatggacggtcgacggcgaggtggtggtgccttggacggacggccggcgacgctgcccctggatggacggctggcaggccggcaatcccccggataagcggccggcggagccctggacggacggccggcggtgacctggacggccggccggcggtgacctggacggccggccggcggtgacctggacggccggctggcggtgacctggataggcagccgacggcgatcgggacggagctagcgcgaggagctcccataaccctagcctggcggcgtgggcgctgtttctcgcgagaaagaaaacgacgcgaggaaggagcgagaagaaaaaggaggcgggcggaaaaaaaatggcgcggacggtaaaaaaaatgggcgcgattggtgggattgggagggcgtacagcttcccaaattctgatgagattggcaccgattttaggagtgggtaaattttagaaccgtgattgacaatctgttagaggcctagttttaaccaaaatcctaaaaaataatttttaggaacctatttggccctctgttggagatgccctaagccaataggactttttttttgcaatgtttcatcgaggctgtagccaatgagttatcattattttaagatttagttatcagatgtatcggttatttaatcgatatacactcaaatctacctgcattggacttccagtcgatgtacgttttaaccattggatcgatgcagatctgtatcggttgattggttcaattctttctgtcatccttattagttgcaagattaaattaactagcacatccgaacctcatcaagatttagaacctgcactgaaattaagtagacctcccatgccttcgtgtgtcgcggcgccagatttcacatcacttactcagcatgtcacatcagctaaaactgggcataatattgtgtaggaccttgagtgatccggttttgtaaattaatagtattttaggttagggatgaatttcatacttagcaatatattaaaggacctaaagtgaacttattgcactttattcacggtgaatggcccaaacctcctggatatgcagcaacggatagggataatgagacaatgggcttgaaatctacccctcgcctatgatgggccatgccaaaaggaattgctaccgtgcatgtgccccgtgcgctaggtcacgctcacgttgcacgcgaatcgatcgctaggacggatccccctccctcccgacacctgttttttttttttcaccgtattactttcctattttagtaaatttatgcacttaaaagtttatacacctcaagtttacacatctaaagtttatacacaaagtttagagatctaaagtttacaatcaaaagtttatatatccgattcaaatttgaatttgaattcaattattttttaatatatagtatttctatacatctaaagtttatagagccaaagtttataagtcaaaagtttacatacccgattcaaatttgaatttgaattatatccgattcaaatttgaatttgaattcaaatatttttttatatagtatttctatacaactaaagtttatataccaaaagtttataagtcaaaagtttacatacccgattcaaatttgaatttgaattcaaatattagtttatagactcaaagtttataagtcaaaagtttacataccggtttaaaatttaaatttaaattcaaaaaaaattatatagtatttctatacataatcgtttttccaactttgtttttttattttttaaaaaaattatggtgtagtagaaaaagaagaaaaggaggagaaatgggggagagagcgtatagggggatgggatcgatcacccattaaccacaccctaccctttgttcctttactttttgttccatgggtaggaacagactccatccacttcgttgtttccaatatattgtcagaatcctgaatcatgtcatcaatcacaattacaattatatgatgggtctacaacataatagtcgtccttactccctccgtcccaaacgaaatgaatctagctaggactgaatgtgacatattctaatataataaatatggataaagatatgtccagattcgtagtactagaatgtgtcacatccaataggttagtttttatgggacggagagagtactctctaacacatgtgacatgattgtattatatatgagattagttccgatataatcctgtgggtcaacagcttacataacccataatgtaacaaacaatgttattccatcgtgtgttgtaccagggataaatcatgtacgtacatgtaaattcgttcaaacagtgtatctcgattaattgttgtttaataattttctactataaaacaataaataaatagtcttttctcctataaagtttagttactatcgtacaattttgtaaagttttaaaacatgagttgaaaagtttcaaaagtgtaaagttacattttgaatcctataaagttaattataaagttattcatcactgagtatagttaatgataattatcgtttctctcataaagccacacatcactttaattattttcaaccctttgatcattcatttatggtgcaaatcgttcccttcgtctctagcatgaatccacgtacaacatctcaattgtttttgttttttttatcaaactacctgtattgtttttaacatttgaatcattggtatttttccataatggcaagatgtgattgtgtaaagtacgtgaaggcaaaaagtttaactacaaagcaaatttactttgtacctcacgtttagttactatcgtataatttttccttagcaatgcccagactttcatctacatctattttaaagacaaattatacataaatctttttatttgcgtggaaaaagaaaattttccctcctgttattatagctaggagg

SEQ ID NO: 42945 - DNA, 1663 bp, Oryza sativa
ccacgtgtccagcttattggctaacagtatgctccgtatcagtgtggtggtgttcttttctcccgaagataaagatgaaaataaaaattaagttttttatgcaaaacgaggtgttattaacgtatgattgattgagttttaattattataaacttgaaaaaatagattaatatgatattttagaacaactttcatatagaaagtttttgtacgaaacacaccatttagcagtttgaaaaacgtgccacacgaaaatcttaatcttcatccaactcttgttggagaaaagaacggggtctatatgtaatattgtaaactactcccttgttactccctctcccatttcaaacacaactatgagtttacgtgtccaactttaatcatttatcttgtttgaaattttttttaaaaaaataataagtcatacataaagtattattcatgttttatcatctaataacaataaaaatactaatcataaaaaaattgaaataagacggataattaaagttggacacgaaaactcataggtacacttaaaatgagacgaagggagtattttcaatgacaagtcaaatcaccggtcaattatttgcccctagaactctgaacaattataaaagctaaattagtcagcatttgtactgttctaataaaaaggtggcactcgtaccacagtgctacttgcaatgctgttcaagttgaccggttgtagtatgttaattaacctgaaagtcctgagcgaagactgcttatcactattgttatgaaataacaaatcattgtttcggagttttgcagaaaaacgagctcagtttttcaactgaaaagttcagaagatagctccgcgtgtcattttcttcagaagttttgaaagaaaaaagggggctcatcagctcatgccatcaggtttgcataagtacagttgacctatatatagcacattaataaaacacaaaattcaagccgaaaataaattcaggtcaaataagcatttaagtttgactctgatggatgctccaataaaaaaaaacggtactacgtgtaggttgcgtattctccacaactgcacctactagccataaaaaaaacaagtggaaatcgtcgcacagcaagcacaagccaaggatcgagtccatgcatgcatgcatgaggacggtactgggcttttcatctaaaaaatatagtacacatattatcaattttcaatggcaatgagatcgatctgaagacactgatgaagactggtccagtttctttcagaagcagggaagccacaataatgaacaattgtataatgtgtaacactatgcagatagagttgtgcctcttgtagactttgcttgctgaaaaaccaaacgtggatatataaataagtagcatatgcagaggagaacggctaatatataagcaaattattaggtatcaatggaggcttcccagcggcgccagtattcctggggcctaaatatattttaaagtgtcaatatgtatgtaaacaatagtattatacttccttcgtttcaaaatgtttaacaccattgactttttagtatgtgtttgaccattcgtcttattcaaaaaatttatgtaattatttattcttttcatatcatttgattcattgataaatatactttcatgtatacatatagttttacat

SEQ ID NO: 42946 - DNA, 731 bp, Oryza sativa
tcctgcagcccttattccttctccatatattgggccagatgactaaatgggccggacacagactttctttctgctgctctccctgtggtctactggtctcgtcgcagagcagcagcatggcagttggcctgaatgcaacgcagaatgcttactgtactacttgcttattgcagcatattcattcagggtttcagaaattcagtctcagaatgcaaacagttggattctctagaaatttcaggaccaacacatgtaatcatcgatatgaagcataaatcgcattgggttaaagttcaaagtcaaggatcacaaatttgacaacaaatcacggaaactatcaccagttgttcgagcgtagccagtttgcagtgccatatatactgccatctcttgtttccatcagaacctacaagctaggaggagtaccgattaaacttgctttgtaattgcatcccaccaagatatagttatgaattcatgacgaggagcagcacaaggcttgcattgcatggctgcatcatagcttaccatactccataactgttactcctagcccatccatcatgatgcatatgccttgccatgctctcttcagacttcagatcatggattgattcatcgatcgtttcgtcagaaaccttagttccccaaaaaattttcctaaaaacatcacatcgaatttttgacacatgcatagagtattaaatatagatttaaaaaactaattacgc

SEQ ID NO: 42947 - DNA, 608 bp, Oryza sativa
ttttttatctgactttttgtttcttcgagcacttgggttcagaaccgcatggtttttgtttttcgtttcgagaaaaagtggagctctgttccttgcttttcaagtgaacttctgcaatttccatcctgttctgcttcagaattttatttgtacatacatgaatgtgaaagatatcaaatgtgtacacatgtttgtagtcttgtagagagtatgatcaatgatatcaactagctgctgcattactagaaccacatgcagataaggtcgaactaaaccaaatcaatgataaaattttgagttattaaaactaagtactttggctggtgcaatgatatcgacggctccaatacacgacgacataatacaggcataaaaatactctggcaattagtttaccaaccggcaatgcaaattatacgacagtggttaggagatccctatcaattaatcatcggcagcgactgtattattctgacgcttgaccaaaatgggggctggcctgaacattaatcattttcaggaaaatgtacttatctgaaatctacaaaatatcaatgtgtttggttaaatttaaccctttctataacatggattagttggagtacatt

SEQ ID NO: 42948 - DNA, 680 bp, Oryza sativa
gttgtttgttataggttttctgaattgtgagttcatttcctgatgtcatgcgtgagtctttttttcatggcttgccttgagtgaacagtgatgctcttttattttgccgacgaactttcactttgtaagtattttcagtgaataaaaacaaaagagcaactaagttctgtcttgtaaacccccgtaaaataaacttgtcgttgtatcatcaacgccctcacacttcagtggcttgggtttcatacgtggaataaatatggattgtgttttttgtgggttgtggtttttttaaattttaattgtgccatctattattaaagttcccagagtactaaacctcgccaaagaaagttgttggaacgaagccaaagatgctatccaggtgacaacccttgtgaaatgttgttaactttggcagtgcattttcttttggtgctgcaactttcccggtgaccaatcaaagtcttcttgtggaagaggcaggaggaggttaatgagggcattgtttggtagttggtacctctccctatcctacagtaatattatatgtttttcctcccatctatcataaaattagttcattttcaagcaaccattgcatccgagtttgtataaaagtagaagataaaatacattgaaagtggataaaaaataaggtattttagttacattgagagtgg

SEQ ID NO: 42949 - DNA, 787 bp, Oryza sativa
gcccttacgttgtgcacatgtaccctaaagcttaaattaaaaaaaaaaagttcaaaaaaaaacaaacaaactcctgagtacagtttttgtgctgagctcacaaagagattacagaatgaacaaatcaagattcttctataagactgaagtgctggttaccaactttcctggttaacattcagcaaagcattttctctctaagtcctcgaactaggatcaggatattttcttttgtaaaattcacttgttactttcagaccaaagttgtgttttacataaatcatgcgatcttggcactcctgattgcttggttgaaaaaatatttctgaataaaaaatattttaaatttgccattttaaaataattgtcttctttgtacccaaatgttgttttctactatttgtgattctggaaatatttgatccaggtccatcacggtggcacatatgcaactgtttgtcagtggcttctgccctcgggtctacaagaaacatccccccatgttgaacagtttttccaaaacggtttccttaaaactaacttagaagtcattcttacaaaacacatatgacacatatgaaatgtgaccacttctcactacctctgtcaatactgcctgaagtcaagccaccaacatctcataacctcctgatttccctgtctttcttcctcgtcagggctgctgggacaatttatcttatttatttatttatgagaaggagtcttgctctgttgcccaggctggaatgcggtggcgtgatctcggctcactgcaagcggccaaggg

SEQ ID NO: 42950 - DNA, 2084 bp, Oryza sativa
gtaaaaatatatgtgtacatgaaagtatatttaacaatgaatcaaatgatatgaaaagaataactaattacttaaattttttgaaaataagacgaatggtcaaacacgtactaaaaagtcaacggtgtcaaacattttaaaacggagggagtataaattaaaatccattgtaagttcatttttactttcattcctataataactgaatctgccctaacatgatagttttcagattaatggtgtggccaagtatattgtgtacaaggtgaaagaaaatggtacttccacatcttggactaacacaaatgttgctaattggccacggttcccaaagaatgtacctcaacaaagagacaggtgcaacatcatcaaccatatttcacacaataacttaattgttaactgattatatgctttgaagttcatagaaacttggaatggaaaatagttatccaacgaatacttcactatggtatattctgaaactactgacctatattaacactttcattttactgcatataacattaatttccttttgcttataggaatccaacgaagttttcagatttaaacatagttatttcagtccatgaagacataagacgtctagagtccgaacattctgaacttcatgcatcatttagtacatctgaagttaccaacgatatttaataaagaaataaatgcaacaacatatctgcatctaaatgtattgaaaactttcttttgagacatgtcattgaagctattcaattccgattgccccaactgtgtgaataatgtttcgctaatttcaatccatcctcagccatatattggggcataaaaatactaaccacccaatgaaggggagaactgtgcatgcatcgtacctattattcctcctaaaataatcgaattgtgtacttaattctatctgtagcaggagcaaaacattgaaaaaaaaacccacaaattgcaaggtaaaaaaccgaaaccttatgcatcagcaccgccctcgctctccatgctgcagcaacgccataaccttatgcggcaggtggcgttgaccaccaaacatcgactggccatggatttgtgtcaccgacctcccaacgaatcgccgacgtaaccatcgccaagctcccgacgttgaccaccaaacattgacttgccatagatttgggtcaccgagttcccgatgaggtaccgctgcaaccatcgccgagctcccggcgttgaccttcacccatcgaatggaatttgcgctgcaactaggatctaggcctaaccatgcgatggagatttacggttcgtttcgtattgccccttctctcactgcaatgccgcgtgcggtgagaaggaaaagaacgcaaaagagatgagagcgaaagagatgccgcgtgcgtaatgtggaagagaatgcgaaagtacaaaacaaccctcccacctaccgtaccgtctcaatcaggatctacggtcccacgtggtacagactattttcaactgttggatgttgccaaatcgacggtcccgatttagtactgcacaccctgaagtacagtaaaaaatctcttgatataaagtttgtctttatctatattaaaaatcatcggttcttttttttttttgaaaaaactacaggtattgggtacttaatggactggacggtccagtcgtttcggtataactgttttgttgtttattatcaacatgtgtctgtcagtaccggttcattaacatgaactagttttgagtatgactactgattcatgttaagaactggcagctgatacatatttcactctctgttctcaacaagaaccgatatggaacctaagtaatcttactgctggttcgtaatatgaattggcggtgatcggtgatgaattattgtgattcaaagtagtatcactgctctgatgaggcggtttctattatgctaattgtgtgtcctgcatggtgtttggttgtattctccttttcatatattaataggatttctatactcatacacacaaaaaaattgtaaaattgattaatatgctcctgagaaagcccggaaaaaggcttttatttgataagtatatatgtgactaaac

SEQ ID NO: 42951 - DNA, 623 bp, Oryza sativa
ctctggatcgagaggtaaaaggcaggtgatagatttgcatggtgaaggtgaaggtgaaggtgaaggagttggaggaaggcaggttgcagaacaaattgaggacaagcagctagtaaagaagatgaatgttttgatagaaattggtagtgaaatttttctgctactgaaatgttttgtagcttgctgtgtatgtattttggccatcaatatatatgctttgtttaggaacggctgaatctgtgttgagaaatgtagtggcatggattaaatgtaatggcataatttgtgcaatgatatgatatggctatggcctttgctgaatggaatgaaatggcctttgctgctatattgttctcatgagaaaatttaacctgatttcacatgaatctcaaaaaatttagctaactgaatcccagaaaaatgagctaattgaatcccatcacaattctaagattactactggagacaggacatacattactagataaattgcagtgccattactagataaattgcagtgcatcacaattatattccaaatcactactggagcttaaaaccactgtgaattgcatgtaccatctcactaaacaaaatattagattacttctaccatcccagga

SEQ ID NO: 42952 - DNA, 2096 bp, Oryza sativa
cccccctgctgcattagcactggtcagacttcctccgcccattttaaacacaacctcaagttttttttaactttaattgtttatcttatttagattatcttttttaaaaacaataaacttaagttacgtataaagtatttttagtgtttaccatttcataacaataaaaatatttatcataaaaaaattaaataagatagataattaaagttagacaagaaaaaggagagggggaaggagtattactattcatctcggattctcggaggcaagagcaacgcacgcagatgcagccgtccgtctctcatctcctttcctccctccctcctgtgagcgtcatcatcctgaccagccaacatcaccgtagcagcagtaatgatcaaacgagcatctcgcgcacccaatttattactcctcctcctctctctcacacttgtgccttgcagtaaaagccaaagcctcttctgaccccctattcccccctacctattctcagactcatcagtgcctcccagctcaaaacgtggcctgctacactgtacacttgtaccctctccccctctcgccttgtcacgtctcgctgcttccgttttttttctctttctttctttcgttcaggtttactgttcccgtttgaatacagtgaagatgaagataaatttacaatccacaaagaaaaatcattagcacgtaattaattacttttaattattataaattttaaaaaataaatttatttgatattttaacttatatatacaaattttttatgaaatatatcgtttaacagttaaacataaatcaaggaaaagtctaattccttcatcccattttaagtgtatttatcgttttcgtgttcaacgtttaattgtccgttttattttaaattattttattagtactatttttattgttattaaaaatttataatttttaaataaaatagacgatagaaaccataaataatgggggcgaagtataatgttaagggcccctttgattcgcaggataggaaaaacatatgaataggaaaaatgcaggaattaaagtactctctccgtcccaaaatatagctatttctagtagtgtcttgtcccaaaatgaagctatttcttcacctacctcctcctctcaaccaatcacaaccattcttcttcacttactttctcttttcaactaatcacacacttcctccaatcattctcatatactttcttaataccgtgccaaccttaaaaatggtttcattttaggacggaggaagtagtaggtttctcaaatactacatgaatcagcaaacacaggaaagacaatagaagtcctttgatagtgccatgggaaatacaaaggaaagttcacaaggaggtcacgtctcttgctatttttcctaatacgaagcataggaatacaatcctatagaaagtttcccttaattcctatgaatcaaagggacatatagaaaagaatccataggaatttaaatcctatgaaaatcatttgctaatcctatgaatcaaaggggcctaaaagatggtacagctatcttaacattgggcttgtttggatgcttcgggctattaaatatcccttcgaaatcttgctatttaggagtattaaacgtagattactaacaaaaccaattccataacccctaggctattttgcgagacaaatctaacgaggtatattaatccataattagcagatgattactatagcatcactgtagcaaatcatagattaatatatctcgttagattcgtctcacaaaatagcctaggggttataaaatggattttgtcagtaataaacgtttaatacttctaaataataagattccggagggctattaaatagccctccggatccaaacaggcccattatttatctcactctctttctagctcggtttattcttatctcctcgcctccacctcctcacctgtagttttcctctcctcctccttctccttgtccttctcccatggatgataaaacccgcgcggtgagctgagttgatctctctctcaagaaccgagcgtgctctggcgatggaggccgtcgtctgcgtcaagtacaggccggtggtgttcccc

SEQ ID NO: 42953 - DNA, 3284 bp, Oryza sativa
tttccccctagatggtgcttgtcaccgtatatgaaaatatccaagttggcaaagcaagatcaaatagagtttatatttctctaggatacgaaaaattgacaataggttgtcttcgggaataattgcacatgttggaaaggtgtgccataccaaaaagggaaaaaaaatgtcaacagactaaagtctggacttagaaagtcaaaagtttcatgcgtataaactgtgtcttaatgagcagaaatactgttcttttatgcagccattcgcaaatgatattcttcctgtgggaactccatgcttgaccgcgtagtttaacataaacattttaaagttccgctattttgataatccttgtcataattcgacttttgaaaaagaaaatctgaatcataattcaaaataccaggttcgtgcgctagctaggagccagacgcataaagcaagcgaatcctcatatctcctcaataaccgtaaaatcactttcgaagaatatatcaaacacaatgatatggtcaagtacatttgcttagcaatcatttagattagtctacagagggatccaagattgatagtacaagaatctgtttaatgcaagattgatattacaagaatctgcttagcaatcatttagaatatatatatagtctgtttggcacagctccagctccagcttcacctctcgtggaactggagctcagccaaacagtttcagtttcaccaaaaataggagtggagctaggtaaagctctctcacaaaatgaactagagttgtgtaactgggtttaggcagttccacaactccactccagacttaattcctgaagctaaatttaagagttggagctgtaccaaataggccctgtcttacagtgaccgaacgcataatcagcatccacattcgactgattttactggggaaagaaaaaaaaatgctctgatgagatatggctggcatcggcacaaaatcagaagcatgatttccactcaattgtgtgtgcacctgacattgccatcgagtaaaaaaaaaaagcaataatctttcgatgaaagttggagccgagggagaaaatccatatgcctcttgtgcagacaattatgtgcaaacaaacttccaaacagtccacattcccgggcaccaagtggagcacaaacatcattgatacttgtgtgtgtgcgtgtgtgcgcaattgacagcatgggtggcactcaatatctcctctctttagcaataatagctttaatgccatgtcctccacaaagattccctgtggataattgaaaagctgatcgcctaattctgacagtgattctcatggcttttgtagaccatgtccatttgttaaaccttgtgatccagagaggatgttgcatatattgatccctgttcactttgccgaacttgcataatcttttatggtatttcttgttgaaccatagttaagcttaaatagcagggtacacacaggtagcaacatgtctccttcagtggggcgtggctagcttaagctttaggttgcgttctttctcatgggttgggaacccaaccctccgcaatctgaattttttaagcaacttttgtatagaaactttttgcaaaaatcgcaccgtttagcagtttgaaaagcgtatgcgtggaaaacgaggaagataggttgggaaccttgagtatagaacacagccttagtagtgctagtatcataaaaaagaactagatataagggagaaaatatcacgaaaacattgcactaaagatcgagaaaaggcatctgatagccggctcatacccatatgaggacccgtaacccaaacgccggttcttaactcacattttttataacacatacctactaaggagcttttatttttaagccagagttcgagtcttggccggtagcctcacaacccaatacttcactatcatacttcactatcgctattatcatcttttctgaaaccatgcgcacgcttacactcctagtagcctgggaatatagaatgaaaggaaccgtagaacatttcagcaaaagaagctctcgacaggaaaccttttggctaaaatcaaggaggaggccaagtcgtcaatactacttcctctatttcataatgaaagattttctagcattgctcatatttatatagatgttaataaatttaggcacatacatatgtatgcaggtaatgctacattgtaaaacggagggagtagtatcttaacctgaagtgtttttggatttttaaagtttgacttcttagatcttttatccatcgtcttagcaaccatgaaaagagacttgggcatcgaaagtgacgaataaaaccaattatttctaacctcaaattctaaaatgcaaaattataatccaaagcattgtcaaccaagtcttaaaaagtgcctcctcaaggaaaattggcaaagtagctgttatgcccatcttgtattccggataatcttgatacatacaccgggtccatggtagaccaaagatgatgcatctcataatcgagaaaggtataatgtgtgagcgaaacattaggtgatggccattgagatgaggatcttatctctgaaaacccaatcaaagatagccgaaagtgtcatcaggttgtaacttttccatcattttctctctttattccgagatatgataactaaaccattattaacaagttggtaatagaccggtcaagaaatagtagcagtggtgggcaaaagaaatgacaggttgcgttggcatacgttactctcaattaattatctttggtctttgcatattggtcagtgggggttggcatttccaatttagatttttgtggacatggattagtgacacagatcgatcggtttgcttggcttatcaacagctaactaatcatgcatgctgctgtttgcaagtcatccaagagtggcattactgattgggatcacaaagattagattagagactatggctctatctgcattgacatttctttagagaacatgtacattggcctaattggtgtaaactatttcggataacttcgaatagtttggcctaagcgtgaataaccctttagctcatgtttcatgttttatttttcaattttattgtagtaaaaccatttctccatccatttcatattataatccatttaataagtttgagtaagtttgtaaaaaaaatattagtacttttaatataaaacaagcatgttattaaaatatattcaatgctaaatttaataaaactaatttggtattgtgaatgttgctaatttattctataaacttgatcaaatataaa

SEQ ID NO: 42954 - DNA, 692 bp, Oryza sativa
agtagttggtgtttgtttgcttcttctagagatgagtgagtcagtgagagcagatgccgttggacagttattgtctaaggagtatggtgtccggtcttttttcacataatactataatttcagattatataattttcacaaatatcaatttctactttttaaggagtacatgccaagttgccaatttgattttagtgtttgggtattagcggaacagcttattaacgattaaataattagttatattttcttagtgatacaaaagcaaatacttaaaaataaacatgagaaaaaacctaaaattaactctaagtttaaatttaattttaaagtttagcttatgttggtaatgtaaaggctaaacggtggggctgaacagggttttagaagtaaagaattaaaggttttctttccccgaaaaagataaaggggttttaaaattcggttcttgattgagtttagatttcttggaatataaaagatatatgcaggacaatgtgaagaggactttgacgtttgaaacctcgcacggacgacttgtggagctcaaatgcgacggcgacaagcggcaaagaaaaaaaaaacacaccagcttggaaagttggtttggtaagcaggacaatgacaccccagtaaattacaaatggagagaaaaaaattacagtttaggccgagtttagttccaaattttt

SEQ ID NO: 42955 - DNA, 573 bp, Oryza sativa
catctgcattttttttccaacaactatactagtccgcatgccctttttgaatgatctccaactattttaaacattataaattcctgcccatagtttgtgaatctatagttgtacaacctagagaataatttgagagtcaaaagctcaaaaacacaactttatcatatgagaaaatccagaaaataccaccgataaacatccaaattcaagaaatgccatcgatgaacatatattcctaaaaatgtcattgtacaatcgtctttgttccataaatatcatcgtcattagattttcattaacagcactccgttcagtgctataaaaagatcattttaaccctacgaattgttgaaagctgattaaaacttttgttcttttccattgggttgcacaggccatccctgggccaggccaggttctgacattgcccacaagcagcccattagctgtctcggcccagatcttccaacgcctgaactgcatggacagttgggtacacaggtcagcgctccgaagaagaaaatactttccttcacgttggcgcccaaaggtcgtcatcatcatcgatccaaa

SEQ ID NO: 42956 - DNA, 541 bp, Oryza sativa
tcttctgaatccatgcctacctttattgagaccttttttcttgattacaatcttttgtttcaatatatcttcagcaaatcatgaattgcttacggttgggagagacaacagcgcttcttcaaaggtgcattattgattcccgtttgctgttctacttcttacacatgaatgcacctgctgtataagtttttaaagtgtcgtgctgcttcacatggcaaaattgcaaaatactgaatacctgagtaacttacatgtcatcactagtcataagtcactactgtataaacgagctcttataccttttctgttgccattgctctggtatttcggacaaacagtttttcttgtgtttgctcatgaaatgacgttattgaatgttcctttcagtcatcttttctcggtcgaacagccagtggttcattggcatcttcccacagatcggcctatagaacctatgtatttggtcgtgacgacagcaatagtagcaacaagagctgcttgtctacttccgtagagtaatgcagatacggcaagtttgaag

SEQ ID NO: 42957 - DNA, 2453 bp, Oryza sativa
agtcggtgtgcttgtggattggaaagacaagcttccgctgttctattatttatttggtcggtcggccaatgtaactaaagtagatgtagtttataatcactttcatcttatttgtgtttgctatgtataatcatgcttgagatgaaagtgtgaatctagtgcacatcctgggaattagattcacatgagtatgagttaagaatatttgagatgttgtagatcttaagccatttttgtcaagtctcctaaatgtgtaacatatctggtcaccgccttcgagtggtttaacgggcacatctcaggctgaagttgactggcaggctaaaggcccaacaatatctccaatattactctctcgaggcgtcggatatttcattatgcttgtttgatgacttgaattatttatttcatctcttaattataatggaagattcggagagcctacgacagataaaaagaattattgcaattatatgcacgcataatcggataaaaagaattattgcaattatatgcacgcataatctctatccttcaacgctctcttcctctactcactcatttaattcctttatctcctaatttttaactaagtaaagaaatatcaataattagaaagctaaatgattataattcttaaattaaatcataattttaacttatttgaatttttgtttttttacaattaaataaaatatttaagatccatattacccatatttcactctataaaaaatgaaaatatgtcatttaagcatagacactgttcctttgcatggtaaccaaatagaaaaaacacggaccataatacaaaatgaaaataagtattatattaccgtaaatcactggacatcctctgagcacactcaaggcgtcatgtgttacgccttaaataaaaatataactttacaaattggaagaaaaaccatcttagcatcagtttccacttaaataggtagatccattattttcaaccaatagatattcttttaagaaaatcttaagcaaccatgtgttacgtcttaagaattagaaaaaaataacataaaatgtgagaaaaaaatatatcattggtttcacttaaatcatttagataaaatagaaaaaaaatacccctccacttcgccatcccccacacatacgcacaacacggcactattcgccccatcccttctcgtcttgagctctccactctaccccttcctgtttatatagccgaaaataatcaaaaattttaaaacttgcataaatttcaagctacacatccgatttctaatttagatattgttgtatttataattaaaacattgatttaaagatcaccacagcaatgatgcacatgacagaggaattcaaaggatggctatggttcttttgcgcaaagcaagttttgtaattcttttcacaagcctaagacctagcatagactgatcaagttttaataccagtgttcatattaaacaatgacggttctgtccaccatccattgtgatcccaaggatagcttcccgccattgagtcgttatggttttctgaggacgtccacgttcccgcctctcaggaagtggctccatcagcataaaaatcatcatgcaatatcccatcccacacaagttaaagaatttagagtctagccaagtgtaatacatgtcccggtgctcaataaccgtgagcacggctattcgaatagatttggtttactcacattgcagtggatgtacactttacccgcactccgcgactgcccaacacatgagcctcgtcccaacacatgagacacgtcacggcaaagcttttcgataacctcgcattggcagtacccgctccatgaacttaaatcctcatgcactctaggcgtccatgtttctagcagtgagaggagttctggcgctcccgggaaagagaagtctcacacacatattaaattagggttcaagttaagttctctctctcacatactcatggcagtcctaccaatggcgacaccgatgtagggcacgcctctcgaccctacctcaacggctgtcccaccgtagcgcacctgcctcactcaggggtgaaccatctatgcagggatactgcctccgctcggctatctaatccgctaggtctatacccatacgagaagtgcggttgtacgggggtcgtttcatgcttaacttcatggctcggtccttaattgaccggggacggtactagccttttccagataccacccaaatcctccgtccaccccagtcgaaaacagttgtttaattttatttctcctttcacaaatcatgtcctcaacatcatggcaatgtggcgctcatgtctccacatgccgcatctcaattaccttcccaaaggtaattgcccaagcatatagcatttgataaatatgagtatgcatgattctagaatagcatttctaagcaattgtcatagttgactagggactcatacgtaaacat

SEQ ID NO: 42958 - DNA, 651 bp, Oryza sativa
gtacaacagaaattattactgatcactcatgtatcagtagagatatgtaggcagttggtcaaagagccagtgttcatagaagaatcttccaaaaaaatgaaaacaaaaacagagtcgttgcattctctgtcaagtgtcaaccagttctaggtttgatttggggaaggaaatgcaggaactgcacattgacccttgaccaaagatttcattcctatcgcgatattcagatcttattctctgatcatccacttgacataatttgataaattggtcaaataactctgattcgttcattcgtttttgttaatccatgtagaaaaaaaatgtagcatcaagaaatgccattttgactgtctaactgtagtaggattaagtcaaagttatcatttacctgaccaattttactatttcatataaatatttgttcatgttgaccttctgaatcttatataatattctgaaccgatgattgctgagtcttctggtctccatactatccagagagatcaccactgcattctacgaaagagtttgacaatgttcaagtgaactctaaaatatgtgttaaatcaagcttatccttgtaaaaatgtgcatatgcattcagaatgtgaagttgactttgaacaagaagatgatgggcttgacctt

SEQ ID NO: 42959 - DNA, 772 bp, Oryza sativa
atagggggagtgtgcgcccaaaccgacttaaggacttcactcaatgtcagttcattccgtatacagtacaaccacatatgctagtatgggatagcccaagcttagtaagttgtttatggtttagccttacattctggtaggccggtgtgtatgagttcatataattcagaggagcttcctatttaccccgacgtggtagtttaggtgactaagtgtgtccaatacaacggtattgtgccacgtggtgggttcccgttgtgtccgtcaccacggcgttaagtttaaggcgtgggcccaccacttaacggttctaggccatatatcgagtatggcttaggatggagtaacacgtatcgtgctggtgtaaggctaaatcatgaattttggaaaagctttgttgcgggtaataaatcgggtacttatgtatcgcgtgccatgcttttgcatgattattatttcgtatcatgtgggtaaagtgtacaaactctgcaaagttaaaactaatcgattagccgtgctcacggtcatgagcggcgtgtggatatgtattgagtatagacttgtgtttattctcctgaatgctgaaatttaccttcaaattgtgatgagatttgagaatgatctccttgctgccatggatggcaatgaggtggatatttatacatgattaatgcctactttgatgcccatatgttaagtactagcttgctgaaattttatttgaaagcaaatccgttttgaatgcgttttatgcaaataaaacttgctttat

SEQ ID NO: 42960 - DNA, 675 bp, Oryza sativa
gtgcttaaacgtagagttatagatgctggtgaagataagacacaatatgtgactgaaggtggcattcgtgtataatatgaacccattgtagattaaaatggagaacagtataatcagcatgtggcaaacaaacccatatatatccagtctgagacattcatgcaataggatacatgcatatatacttatacaagagcatgttttgcaaacaatcaaagcaagtagtgcagacttggatggaattatgatctgtatcatagaaatccactttttatcacacttagggccccttggaagacccaaaaccccagcccatcccatggacgtgcccaggattcagcccccgaaaaacacctctaggaaacatttcattccggttcaaacatgcgttctgatatttgttcaacatcaagttaacaaacattctaggaggaaacagtcataaggaatttagaatggcatttgcaacaggggttacgacacatacccatcaggcccgactgtggagttgtccatctgcttatcctgtactgcctcatcaagtgacaactgatgctctgtggctccagcagagtatggcgccacacaagacgtgctgaaatcccgaagccatggttcaaccgagaagctcaacttgtaacttggcccaatcgcatcggtccaaaatgctctgct

SEQ ID NO: 42961 - DNA, 1014 bp, Oryza sativa
aaagctggaatcgaattccatccatgcataacagtccgtcgcacctttaatttcaagaatatctttagacaaaatctttgaagaatatgatactttatgtctgtatttcctcatatatcaaaattaattgcctttttgtttgttagcttatctcgaagtgcttatcttatgcttccaggagtgagaattggcagcttctagaatgctgcaatcatacatttgctcgtgaaaagaattcaacttttcttcacctattgagggtctgtttagatccttgacaaaatttttcaccatctcacattgaatgtttggacatatgcatggagtatttaatataggaaaaaaataattatgtagattgcgtgtaaattgcgagacgaatattttaagcctaattgttacatgatctgacaatgtgatactatagtaaacatttgctaatgataattaggctttataaatttatgtcgcagtttacaagcggaatctgtaatttattttgttattagtctatatttaatattttaaatgtacccgtatatctgagatgacacatcaaaactttttacccctggtctaaacacagtctgagttgtatgcaagtgccaagagcttaaaccggcctatcgattttacagttgaagatacgctagcacatccaactcataactggtatacaaaagcaaattcgatctattcatctagacaagagttatgtcagacaccactgaagtgcatggttatgctatgtcagacaaacgatgaaacaagacaagctaaatggacacatgcaaataggttagtggacgttaccagtagcactccatgattggcttcaaggtttgagctttgctaagttaaatcattgtccatctctgattctctgtcagctcaacaccatgaatccatgattgagggcaatgttgcagataagtaatgttgctgtttactgcaactgaagaaatactactgctattgagctggggttaaaaaaaaatcttccaaaacaaagcc

SEQ ID NO: 42962 - DNA, 633 bp, Oryza sativa
ttacctttttggcatgatataatccctaccccgacattaatggaacaacgtagacgtgtctagattcgggccacattcagttgtctcctagctagtccagggccaaatcccgggtcctgttgctaacaaggggtctacctgttgtttgatctttggattagagctgaattgaaccagcccattttaaatcaaatagattaatatgaaactagtttataatgtttttatgccaacgctagcttatggtttcatttcggccccgatgctcccgcgggcatggggggagatggatgaggaagacgggagaggagagaaataattagtttaaatcatatccctccatcgtaataccgaaaatcttaatcccaacctaagttagatctcatagcagtatggagagctatttttgctgatgtggcatattagtcaaaaatatttttagaaaacttgtgaagcccacatgtcactagccacaccacagcacaccttcttcctctgttccaatctcctttcttctgtggaataagttcatcggaggtccctcaacttaacagcgatatttttttagtcccttaaccacaaaaccagaaatcttcaccctaaactataaaaaaaaccgtttaattggggtcc

SEQ ID NO: 42963 - DNA, 789 bp, Oryza sativa
cgcggtggttttgctctacactagtggatcccccctttcgatcggcacctcttcttttggggggataatttgatcgataaccaccttagaaacaaaagttcagtcctttttccttgttcattctcggagatctcaacattttctttccaatcaagcataattaggattaccatgcatgcgtgcaaacattcatttctgaagccgaagccggagagcagagctctggtcatatccaaagggggtcggagttttgaactccgatccccttcgacctctttctttctcacgctcctgtgatctagaagcttaaaatgcagcatgttggtaatgcctgcgcctgtgctttactgcttttcttctgaaagaggaatatatgaatcagttttcagtttgccgacagaaaacataacaatgacaccgccaacaaaaggaaaaacaatagtttcagacttttaagtgctagtagaaaggataaaaggaacatttgtatgaattttatataacattcttatgatttatttattcctttatggcagtagaacccagcatacaaaaaagaaaaagtaaacttcagagaggggttcggagagttaaatttcggtgcatgtctctcgctcagccacacccacacacctctctctgtctcttctcctttgtcgtgcatgctttgatgcacacacggtgaactactcgatcgatcaacagttgagcttcaggaccttaagaagaaaaatgcagtccttgattccctgaaatgtcaacatttttctgccgacgaagcgtaaaaaa

SEQ ID NO: 42964 - DNA, 676 bp, Oryza sativa
tagagttttcaagtcttctcattgtaagagtaaaccctgaactatttgatcgccttcgttcttcaatcttgacgtcttgtggttgtggtgtagaggattgaaagcagcatgtgttgataggcctgagcctgcacctctcttctggaagagggatacgcaattggtttcagtttcctgtcagaaaaatagaatagcaatagcgccaacaaaaaagaaaagaaaagaggttccagtgctgctgatagaaaataaaaaagaaacattccatggattccatgcacgtgcttacgatttatggtagattccaaaacacaaaaaatattatgaataaactcatccttgatctatactactactcgtacaaacataagatgaatacattctctcctctttttttctctgcggatttgctactgaacctgatgaaatttgaagttctggactggtctgaactatgaaggcttaaaccccacagaaacgaaaaaaaaagaaaatacagtaataaactcttcagttctcaagtcttctcattgaaagagtaaaccctgaagtctgaactgaacatgcaatttccttctagttagttgatcctgacaggtcaagtctgaaccgaagcttcagtttctatcatcctcttcttccccaggttgatgatcctgtcaagcaacggcacgag

SEQ ID NO: 42965 - DNA, 537 bp, Oryza sativa
ggatccccggtgttgatttcttcttcccttactttcagggtgagaaatggttgtggtcttatccgaacaggaagtatgacggaaaattcttgcatacactacctccgttttttaatatattatgtcattaatttttttataaatatttaactatttatcttatttaattttttaatataaaaaataagtcaggcttaaaaaatatttaataatatatcatgtcataataaaataaataataattatatattttttaataagatgaatggtcaaacttatctgaaaatcaagagggtagtagtcatttctatgagtaaaaaatgcttgtacaaagtgaaaaaaaactaactattaatctttcgatagatttatatcttcaaatcttgcagaacttttaaccaatagatataacccatttaaaataaaaaaaacatgtcaaaaattgtaaatctagagagaattgtaaggatctaattttgacgcaagttgaatatataagaacacaaataatgatgcaaaatccaacggacgaaaaag

SEQ ID NO: 42966 - DNA, 721 bp, Oryza sativa
ggattttaattattaattaatccctaatcaggaataactaaatactaataattaattgattgttaatcaaataattaattactaatcaaaaggagcccattggacagtgtcgctgattgcttgaacggtctcgctctttcagtccgcgaaaccgcgcgggctcgcggtattgccgcgggagaccacccgcgacgtcattcctgcgtcattttcgcgcaatggttgtgcgacaccgacggtatatttctatacaagtttttgcatcccgaatattcttgagaaaaaattgaatgaacagtatattttcaaatttaattctctctcaagtgatctagctgatgcatgcaacttaatatggcctagttagtacctcttccatcctcaaatatactagcaacttttagttacatgtctaaataactaaattgttaaaagttgttaatatcctggggaccgagggagtaggacaaattaaacgctcactttacttatatctcaatttcgagagcagtgttaagaataaacgtgaatcgttcattcctttttatcatattaaattctccgaacaaataaattagttggtgtatacaactcaatggtagataaatcagttgggtgtacaacacacgatagtggtcacggcgccgatggagtcgttggtccaatcagtctcaggttctataggtaggcgcctgtacactaaacatgtggaagtgcggcg

SEQ ID NO: 42967 - DNA, 663 bp, Oryza sativa
tttatgctctcctaacttctagttgttattcgcagcgaccaaatggcggccgacggcggagcgggagctgcggcgcgctgggaagaagcgggagagggggagaggaggcggccggcgccagagaaggggagagaggcgcccggcccgatcgcccatgaggccgcaacggcaggagcggcggccggcgccgcctctccccattcggaggcgggagcgggtggagcaggcgggcggcgcgcgggcggagcaggcggagcatcggcgtcagcgcgcggcgttagcgggcgagcgcggccgcggcggtgggcgagcaacggctctgggcgcaggcggcgcgcggccggagtaggcggagcggcggcgtcagcggtcaagcgcggctgcagcggcgagcgagcaccgactccgggcgcggccggagcagtgcggcgggcgagcggccgacgaggtagtcggtgacggagaagaatacttcaataagcttcactagccgccgcctccggagacggagagctcctcgtcggagttctaatccaacgtagctactgcctcacaatttcaagcatatatataactacttgtctaaacgattgattatgttgtgtttgagaattaagatggcggatccagtgagtagcatgaagcatatcacggagatggctc

SEQ ID NO: 42968 - DNA, 505 bp, Oryza sativa
cagctcaaggacacttgttaaatgattcctttcgttttgcaatcgatgaccttcgtttgcacaaacaaatctacatgatgtaacactaccatctgacggccatctgtttgtataccttttcctgacctcaaaacctttctgtccacagtagctaagccaaaatgcccaagccacatctgaatttgtaaattccatgccaacttgaggtaccaaactaggcatcaagttatttctgtattgaaaaaaaaaaacactactgagtatgaaactagtgcatagatatgctaacaaaaaaatcgccaaaaccatgctgtaaacattgattacatattggcacacatattcttagagaacattcatggccttgtagttgtattacacacctatgtgcttccatcgctggactatttgacatagtttgatggcaagcctcaattgcttcttccatgagaaaaggggaaacttgatcgatttcaaagcaacctaatggtggaagtttgattca

SEQ ID NO: 42969 - DNA, 582 bp, Oryza sativa
taaataaaattgttatggtggtaatgtagtcagagtgtccaagcatttcaagtttgtcatctttcgaattacaagcttctaattatgtacctaatacatttgatattaccttttcaaatcaaatgaacgaagggaaacactcgatcaataaaaactatttggaattaaaattttgcttaaaccgtatttgttttgtatgcacagctgagcacagcattatgccgcgcatccccttctagtcggtattaatctagattcttcaactgttcataaacatcatctggcttactggagctgtactgataggcgagagcttatgagagaaacaatgtccacattatactaaacttctttcgaggccgggctgcggacggcagagttcgagaagagtttacccacgccgtgctcaccaacgaccgacgtccttgactcgccgtcagttccagccattgctgcccaggtgctttatttgctttaagacaatatatcatgctgtccatgtgaaatttggggatcatcttgcatagtagtaatcagtaatcttggtggttaaaatacaagtcttgtctgagctttcaagtc

SEQ ID NO: 42970 - DNA, 593 bp, Oryza sativa
  unsure (1)..(593): unsure at all n locations
atgcaacctatatgncgaagaaatgttaacgatgccgtctgataattagggggcttttaactatttgccactctaacgaatggtgcttaacgatttgccactaggcccacatgtcatagacacatgagggcccatgtgtcattgacagagcatggcaaaatcgttaattgccaagtcacaagagtggcaaatagttaaatttcccgataattagtggcccctactccccagcctgactgttgagcgcgcacgagaaaatgtatcaaggcttcacaatttacacatgctctcttcaaataatttcacaattcaagttcagactttcagtaccagaaaatggttctcaataatgcagctttatttattatgctagaacatcacaacaaacagagagaaaactccaagaaaggcaagtaaaccacacacaaacatagcacaaaccacgtcagcacacatatgtatatagttttggtaggaggataaatttaatttcctcagtggtaatattccagcctgggttgttagtgcgccctcctaccatcattctccaatgccatcacattaccgtggtgacgaacctcttgatgcatgtg

SEQ ID NO: 42971 - DNA, 619 bp, Oryza sativa
tgctgattgtataacatgttaaataaactagaaaggtagcccgcgcattcgcgcggggatgtattgtacacagggttaaacttttcggtttagcccatttgattgggcatcagtgcatctcccaaatacagaaatttctgaaattttgtaaacatagtttagttgaatttgaccaaatattaccacaattcataaaaagttaaaaaaattcggccaaaataatatcacatctgaggggtccaaaatgatagatatttctataatttccaacctttatttgtacatagcgtttgtatatatatatatatatatatatatatatatatatatatatatatatatatatatatatatatatatatataaacagaatatcaattggttgacacctcccatgtttaaaagtacttttttatttttttatttgaataagacacatcaggtgaggcctccgctgttcttcaatattttgctttgataatttttccaagatatttgttaggttctaaaatatatcaaatttgatacatctatataaataattatctacaatctctttattatatataaggaagttcgatttagtttgtttggaaaacgtgtctaacaaatcaactgt

SEQ ID NO: 42972 - DNA, 1891 bp, Oryza sativa
cctcccctccatccccaagcctctccacacccatccccatctttcccctccttctttttcttctccacgcgccgccgtcgttgtgccgccgcgccgctgttgccatgccatcgcgccgccgcctttgaagccgccgcgccgtcgcctcggagccgccgcgccgtgcgccgccgtcgctgtcgtcgccgccgaccgtcgctgtcggtaagccgccgccccccccccccctgcgtccatcgtcatcgccgcccgggaggaagaagccgagagagagagagaaaagaagagaggaagagagaaggaagccgggaggagaaaggaaaggagagagaaaaagaaaagaaagaaaagagagaagagagaaaaagagaaaaagaaaagaaaaagaaagggaagaaaagaaaaaggaaaaaaagaagtaaatagggaattagagggagattgggaagtttagaaaatttaaaataattagagtatgattatagattagttatagtcgtagaattgcaaaatttaattatagattattcttagtaatctctataagaaatcaattcgcggtagtaatttagatgtaattaataactaaacaaatgtatgaattctcgtaaattattatggattatttttgggtaatctctataagtaatcgattaacggtagcaattcgtatttaattactagggattttagccgtgtattatatttaatcatagactaaattaagtcgtataatatttctaggatttcgtccgatgtttagctcgcaatagaaatttctagcctattatattggtatattgatcgggttgattaaattaaaaacttatgacaacaaaatatttatacacgcaaaatagtttaaatcaaaatggggttcgccctaattcgcgaatagtaaagataatataagagaattgattttcgcattcgacttccatttggatttacttggatttttatttgaattctaatcgaattcaaattgttcttacgcacgtaactacagagaccgagggagccgcggatccgggcgaaggtcaagacccacaagacctcgagcaaggcaagtcatcactattccttgatcacgttgatcccaattgcgaaattaattttgtttacaaacaagattgcatgcaatgatcaacatcccacttgtggttatgccatgccttgttattgttttccttcaaatccttgtaaccataattacgtatgagtccctagtcaattatgacacttgcttagaaaatgctattctagaatcttgcatgttcatatttatcaaatgctatatgcttgggcaattacctttgggaaggtaattgagatgcggcatgtggaggcatgagcaccacattgccatgataatggtgacatgaaaggaattaaaaacctatgttttagaccggggcggatggtggatttgggtggtatccgggaaaggctagtaccgtccctggtcaattaaggaccgagccatgaagttaagcatgaaacgaccccggatttctcgaatggggatagacctagcggagttaatagccgagcggaagcagtatccatgcatagtggtttctcatgtgtaaggcaggggctctacaatggtgtcgccattgttaggactgtcgtgtgttgagttgaacttagttataacttaattgcatgggtgtaaaacttcccttcctgggtgcgccagaactcctctcactgctagaaaccgtgtacgcctagagtgcatgaggatgaaaagttcatggagcgggtactgccaatgcgaggttatcgaaaggctttgccgtgacgcgtctcatgtgttgagacaaggctcatgtgttgggcagtcgcagaatgtgggtaaagtgtacatccactgcagtgtgagtgt

SEQ ID NO: 42973 - DNA, 1075 bp, Oryza sativa
gactccggcaaccctagctccgtgtcgcagcccgccaaagaagtgcgcagtgggcgggggccagctgccgtctccgccccactcgccggccggcgcctttttccctctccgtgcgcgctcgccggccggcgaggatggatgccgggagggagagacaagaggcgtcggtcgctccctctcccagtctcccgtcgtccaatcgtttgtggatagagaggatggtaggacccactgacaggtgggtccactcttttttccttttgtctaactgatatgtggacctcatatttttgtttttgtttttaatttttatattttccttccagtgccacgtcaccgccacgtaggacgcaaacaggacacgtaaatgccacatcggccaaaaccactatcaaaaccgctgagggacctgctttgcaccggttttgatagttgagggacccgttgtatctggtttttcggttgaaggacgaaaatcggatttgttgataagttaagggatctcaagtgtacttattccgagctgataatgaaacacaacatagtctgattaaacagagcccaaaccatctcacacacagccaccagtcaccgcgtgatggtgaggcccatctaattcatttgtggtccagctcgacattgagggattttttagggtttcctttggattagtggggtgtcctagtctgagggacggcggcggctgctatctttgccctcaccatcgacggcaggtggggccctaacgcacggcgcacgtgatgcggcaccggggaaccttggcacaacggtcggttcgagagatggattggcgcgcgaattgacgtgccctggcgcgacgctcgtttcgggagatggctccgtcttttccggcgtgcgttgagagccccggcaccaccgatggtgcgcgtcaaccgcgtgcctggacgagacacatatgcatcgaggacaccactataaaataaaggagttaatttagattttgtgaagaaaatattgatggtttgctaatgttaatttagagattttataagacgattgattttatgaagtgtgcagtttcggttgaccttgg

SEQ ID NO: 42974 - DNA, 844 bp, Oryza sativa
agcatgttacatgcgtcatcctttaaagggtatcgaaggcatattttttggcctaggcctaatatgtctgcagcccatattttcaggtgtggcctgtcacgttcttttagggacttaggcactttttgcttaggccaaagtgcgcgtgatcaagtgcccaataccttaaaatccttttataccgcagttactcaactttttaggagttggtacaatgcatcttaaaaggtgtcaaacagtaaagctttatatagctggcccgctgacttttttatatagtcatggtgctgtttgggtttttaagcaattgattggatacaatatcattgctttttgccacgtaagtgtgcatttttattgaccaatattatggcttaggctgattatatattgtggtcatttttcaggcggttggtaaatcctttatgagtttatttactcggattttataccacatatgccatatatttccaggtgtggtagaaccatgtgtcttctagggacttaagcacatctgttaaagcagtgtgcgcatggcgtatgctcaatactttggaaatttctttattcacaacatacaagcttctttatagctgttttgctatgtgaattttcaatgatgtagccaactttaggttacactcatcatattttacaaagcagtcggtatattacttggatcatattattcagggattcacaccgcatatgctacatattaatattaagtcgcttggttgaatacaattatcgaaaccactcggtgcatctagtcgatgcacctgactttattttttcaggccctccacagtcttctgatttggaaaaagtactcgggagatca

SEQ ID NO: 42975 - DNA, 606 bp, Oryza sativa
ttaagaggtctcaaagttttattgctcgtaaatttatttattttaccatcctgatagccctcctttttaattgatcaaatatatatctaatatagtgcctcttttaatatgtgagaccgtacggtattttaaagaaaagacatagtcaacatgaatcataaattaataattcattggaaaagttaacttttaatcatattattaaaagaaagaggctattgattttgtattgccaccttataggcttataaatgcaggttgtagagaaaaccatggagctactttaattcattgctttatcattgacctttgcctcttggtgtgtttaatatgacttatgcagagaaatataaaaattttgaaagaataaaatatcattatgaggttaaatgagctatgcttttccataacgaaaggagtatttattcaatactatcttacaggtttagtgcttcactaaagtagttttatgtgtaaaaacttcaacgctatattgcgggtgaagcattctagtaaaatagttctgtataaaaggattataaaagttattttcaaagatgatccatgagtttgagacaagaggctcactgcataggagggtgcaca

SEQ ID NO: 42976 - DNA, 4417 bp, Oryza sativa
cacaaccatgcactatacatgctggaaactttacatttaatggtgtcactaagaaaaatttcagatttacaagcttttcaaattgaaatggcagatcataccaagttggcgtatcactcaatcttagctacacgctccgagaccacaagaactatttgcggaccaagtggcagcaggagatggcatatggccaagcaagtagcatgcttaagtattttcaagacaaaattgccgattgcccatcattccaatatgcattgcaaatggatggtgaagaactaatagctaacatattatgggttgatgctaaaatgatcgcagattacgcacgttttggtgatgttgttagttttgatactacttttggaacaagcaatgagagtaggccgtttggtgtctttgtgggattcaatcactttagagaaactgtaatttttaattttttggtgctgctctcatgtatgatgagacatttcagtccttcaaacggttgtttgagacttttctaaaaggtcataatggacattcccattatgtagaatgctatcaaacatttaggtggagagaagaatgaggagaacaatgaagacacaagtattttgtcagattttaatgcatgcatgtatgagtacgaagacatggtagaatttgaacaaaaatttgacatcatgattcagcggcgtgctgctgcatggtgcggcgcgtcagcctgcctggctcggcatgccactcagcctggctcgacatttcgtcgagcaggtggtgtgcatgtgcagccggctggggaaaagaaggaggggaaacagacttgggtcacaagggggagagggtgtagaaatagacttctgatatgctgggctgagagggaaaagaaaagcccagttgtaataggaatattctgtagaactgcaaatggaatttgtgaaggggatttgtaatttggaaactgtagatggactgtaggtacttcatgtaataggattgcataactgtaaaaggactgtatattcggacatttgactttgggctgaaatttgtaaatgggagttggaactataaatgggctgtttaatttgggtaattggattggattcaatttggccgctcagtcgcccaagtatttaacttaggatgtccttgcggctgcttgaatgtaaagacgatgatatcgatggattttagaaacgacgtttggcataagaatctatgcgatgcggtaatgtttcaacggtagggatgatatagacgataggtctaggtgcggcgtatggcatacaaatccatttgtcgcggtggggttcaaaggtagaattagagtcgagaatatacgagtcgacgcacgacagttaaattcgtcgagcgattttagagtttcaagcgaatggccgaactctgggattttaagtagaaggaatatgggagaatggaatccggggagagccgagtcgaatagacgggacaactcaggctcaactctagtgttcaatcggtctgaggaaggaagcgatgttatgacaaaggaaagggtttcggggctttgattagcttcaccgaaacgcttagcaaattagtcggagaggaaagagggcaaggaaggatgtcgactggagaacatcctttaggtggatcgatttaatcgcggtattccaacaattcaaggaaacgacggggtattacaataacttgggagggttgaaaggacagtgaatggatattactctgagaggtggttctgggggaaatactgagttcgagcaattccagacaccagaacaaattggttcgggaggggttcgattgagaagaaggattgaactacggaatatgattccggaggaaatacgacaaggattggattcacaaggatggattaaccgagatccttggcacaaacatacaaatgcaaacaaataatacaaatcccattatgcgggtaagctaggcctttcaaggaggaaaactatacttttccgtgaattcttttgaaataactcatttaagattttagttcgtaaatagagttttgctagtaaattccttctagtctttatttgtaaaaataattcccaaacacttataatttcaaaatagggtttttagaagttaactaatattagccctcatttgtaaaaatagtttcctcggggaaatatctctcaaagtatgttttctaaatatttagtatttatttttttattcataatacaaatacctcaagtaggttctatttcaaagaaatggttcacagaaagacaaatggcatttacaaatattttcttaattaatatatttcataatcatggttcttttaacaaaatagtatttgaatcaaaaatatattttgtttctagatttccgtcctcgtggtccaagcgcaaccgaaaaaggggagatagaatccaataaaagccaacatgatggattttggaaaagatttttgattaacacgaaattttaatttcgcaaatcaggacagaaattttcatggtgttacactttaggtgtataaactttagatgtgtagaaatattatatataaaaaatatttgaattcaaattcaaatttgatttgggtatgtaaacttttgacttataaactttgggtctataaactttaggtgtataaactttagatgtatagaaatactatatataaaaaatatttgaattcaaattcaaatttgaatcggatataattcaaattcaaatttgaatcgggtatataaacttttgacttataaactttgggtctataaactttaggtgtataaactttagatgtatagaaatactatatataaaaaatatttgaattcaaattcaaatttgaattggatatataaacttttgatttataaactttgggtctctctaaactttagatgtgtaaacttgaggcgtacaaactttaggtgcataaatttactaaaataggaaagtaatgcggtgacaacaaaaagaaaaccaggtggagggaggggagatccgaactgatcactaggggcgatcgatcgccccggcccttagcaatctcgcaaacaaggccctatcatacccggatcggattacaaaatccttttccttaaatcggcatgatttcttctctatttatatctttatccatacgttgggatacctttacatatacaaaaatgtaagcagtattctcaatgagagtagtaaataaagatacgtagtatgggaatatatctttgttcacacaaaatttccgtgtacatatcgtgcacaacaactaataaatttcacaaaaaattctaaagaaaattatatatacttccaataatattacaatacgtgtagattcttaatttctaattcattatattttagctataactaaaaaataaaaattttgacagttttaagagtataaatctatgagaactctatctcctttttcactaaacataattaagaaacataattaagagtaaattgcattggtggtacacaaacttgttaggtgggtgtaatttagtatataaacttgtaaaatgctcgtttcggtacacgaacttgtctagtttgtgcaaatgagatcaaaatagcttggcaatgttaattttatgaagctgatgttgattaggacgtgccatgctgacgtgtagtgagtatacataagatatgcaatatttttaaatttggtctctactttgtccttcgtcatggaaatgatgaatttcatatatttctaacccttatatcattgctcgttttgttttctatgatcactatatccattctatttttattgaagaggtgtatgtctaatagagaccttctcagatatatgtttatatagtaatcctaatcagcctctaaatcaataagattagctatgtagtgttctttttgtctttctccgcacgccctagacaagtttatgcaaaaaacaagcattttacaagttcgtgcactagattgcacccacctgataagttcgtgtaccagtgatgcaatttactctataattaatttcaagatgagacattacacaatagacgtaatagtactaaaagtatatatacaaatctttcactactaagaaaacgttataggtgccggcacttttgagatgcacactagccaaaaatagttggctcgattcattgagccatcaagccgatcccaaataatacccaaatcccaagatttcctcaaatccatgaacacgagctacaatcaataatccttagaaaaacaacacatctagatcaaataaaatcacaaatagggagggagtgggagggatggatctgtcggccgccgatgccgtcgcacctctagccggcagacccacctctccgccggttgacgtcgccgcgccacaccttcagccggtggccgcactgccagatccctgcagccaatgggcgagcgccgtcacgctgtcaga

SEQ ID NO: 42977 - DNA, 534 bp, Oryza sativa
tgcctgcaggtcgactctagaggatcccctttcactagagttttccttctcaactattttataaaaccttgtttagcaaatgaactaaatttctatatattctttcttccccacacacattttctctctcatcaacttacaactaaattttggagacaaaaaaagtgtgcaaaacataggtgcaaatgtagtatgacaaaaaaaaacattggaggatgaagttgcaaaccttttaggcacctccgatttgtatgtaatcaccaaaataaattcaatagaaattttggcataacctcccctcttttttgaagaaattttgaagcttgctcgggcagctggaggaggaagaagacatatatataggggtgggactttagtcccggttggtagcaccaaccggggctaaagatcaccgggatctttagccccggttggtgctaccaaccgggactaatgtcccacccctatatatatgtcttcttcctcctcccgctgcccgagcaagcttcaaaatttcttcaaaaaagaggggag

SEQ ID NO: 42978 - DNA, 601 bp, Oryza sativa
gggggggtgactggcacctgtgatgtttctgtttttcagagggcatggctagcaattcctgaggctagccaatatttagcatttattttttttctggaattaactcatcagtgacggttcggaagaaacatccgtcacaggtaacctcacctgtgacggactcgcaaacgtcggaccgtcacaggtgacccacctgggacgggcctttactttcgggcccgtcacaggggggtcaccctgggacggcttactatataccggagatcatcacctctgacgggcctttatttaggggctcgtcagagatgagacacctgtgacgggtcctaacaagccctagtctagcttagaccaacacctctgacggccttctattaacttgcccgtcagaggtggatgtcaccactgacggacggccacccgtcaaaggtgactggacttaccagtgaccactgatcattgaccaagcccaaaaccatttaaggtgaaggtttgggcccgtcacaggtgaccttgaccagtgtattggtaataaccattgggactctatgtttcacgtggctgggtggggttgcaattactattttttaaatgttacatt

SEQ ID NO: 42979 - DNA, 2732 bp, Oryza sativa
cgacatgatctctccaagcggttaagcctaattaggagattaggctctgataccaattgaaagtgtcaattaggcttagagggggggtgaataggctaattcaaaaattcaattaaaagcggaagcagtaatttttggatatttccgaaattttcggatatatccgaaaattttcggagtcagcacaaacacaaagtaaatcctagatctagttgcctacaacaagaatatgttagcacaaacagcaactagacctatagcgactcaaacaagcaaagctagtggagagggaggaagtaaagtcaccaaagatgaagctcacgaagttgttcccgaagttcgaatccttgaggggattctactctcagttgaggagctcactaagagctaggtcttagctaaccctttcctcaagaggttgcactaagcaccctctttccactaagggtatctcttccctttcggaggtgagatccgaccttcacaaacttctcccggccaaccacaagtagatcggtggctcgggagcgacacctagccgcctagaagtcctcaacctccaagagtaacaaatggtgcaatgaactcccggagatgatgcaagtgctcacaaatcttcacgaagtcaacaacaagcactcacacaaactcgaatccacaactcacacacacaccaaatccgaatcgaacacgggtgagaggggaaacaagaaagcaaggctcaaaagtgaatctcaacaagagcaagccaagggcacaagaatatccaatgtgaccagcagccctcacaagtgaggggagggtgctatttatagccacagcccaaaatctgctcgttatgcacaataattgagattttcggatatttcgaaagattttcggacatgtccgaaaattccagctcagcactaacaataaagtcaacgaaagatttttcggacattccgaaaacttttcggacaaatccgaaaatttccagaaccaaaaaccaccttctggatgtttcggaaagtccgaaaatccctttcggacaagtccgaaaatacacagaagcgattttgggacaactgatgattttcggaaactctaaaaatcaatttcggaaaagtccgaaaatatacataaccatatttgccttcatagtcattttcggaaagtccgaaaatccttttcggacatatccaaaaatttctagaagcgcccaacaggttctgtgtattttttggaaggtccgaaaatgagtttcggacaactccgaaaaaatccagaacacttcaaactgaggagagacactttcaaaaatagattttgagcactttgatcactcctcatatgtcaatgcaccatccctcttaatagtgtggcattcctattgactcaaaggaaaagaaaaggtacaatataccatttgctcatttgctgcatcacatcatgtcaacgtatttggcgggatatgcattacgctaactcattgaggacataacaaccttgacatttgcttaaataaaaatgttagtcctctctaatcgcattgtaattaatcaccaaaatcattaggggcctagatgcactttcatgaaccatcctttatattgttacctttattatatccatgttgcctgagtctattatttatgcatggtcaattattgacattgcttaatattgcttatgatatacactccatagtagttggatatggatgtgttggtggcggtcactcgtcaagagtgattgccagaaggcgggtggagacatgagcgccacccgcagcacaaaaagctttgcgaaaaccaaaaacctaatgaaacaaaatgttttcgactggggcggcatggatagaatatgggtggttctagaaacggctagtcgccgaccctagtcagttaaagaccgagtcaagaagctatgcaagaaacaatcagagtacgaacgcacttctcgagtgggtatagacccggtggactaagaaatcctcgtggggcggcacccctgtcatggtggttctgatgtgagatgttgtgatgttgtgaagggatatggattggttaatgatgccaaaaatctaaaatgcacctaacctatatgtaatataacccattgtgatcctgggagtgccaggactctcctcactgccggctcgaggtggtgtgttgtgccgggagtgcaatggggatccatagtccttggagcgggtgccgaaatgcaagggtgattgaaaaaccgggccgtggcaagtctcgtgggttgggactaggctcatgtgttgggcaagccgcggagtgcgggattaaaagcatacatccactgcagtgtgagtaaatcaaatatattcgaatagccgtgctcgcggttattgagcgccgggacttgtactacacttgactagcctcatagattttaaatcttgcttagttcaggaaagtggtgtgaccttgcccgatgggcgggaaggtcatgatgatgttgggaatgtggaaaactggatgcgagggtaaaccgaaccaaggtggatgaaccctcgcggattaatgacaaattcaacttaacgttgttttcagttaaagctgctaggtcataggtttgcgaaatgatttgtgaaatctagctttatgcgaataaaccaaccacccttgaacccctgtgtgcactaaatgcattatgtagtggtggcttgctgagtacggttagtactcacccttgcttaactaaatcttttagagaggagttgg

SEQ ID NO: 42980 - DNA, 1374 bp, Oryza sativa
gagggtgggttgtgaggggagcgttttaactattacgtatcctgggtgaataacagttctataccccctcctcctcaagagcccaacacgcctcccccttcttttgttgggctcaaaacccacctcccaccccagttaaagcgtggtcaaaggacggtcaaatcgctgcctgttgatggtcattattgatcagtttcgactctcaatattactaaaataaaggaaaactagtgatacttgcaatgcatatatctgttagaacaataatattccactagtattaggtctactaacatttttgcagagaatgacaataaagtggaggagaatcgacatcaacatagacgataaatcaatcggacgatgttgagagttagacttatgcatgaatgggccaagaactcagaattgacacgacatactgggccaaatttcacaagtctacggaggagaacaacagaggaggccacctgccgaatatgggccaggttgggccggcccctggttcggccgaacctcccccggtgccgttggatccaggttttggctggaaggcgtggatcactccccaatgaaggttggagggcaattccgaccattccaactgccacaaccgtcattggcagcctatttaaggagctgctctcctcacttcactcatacacctcaagcaatagctctctcatttctctcaagtttagtttagtagtatctagctggtggaataggaatagagtagaaatcaggagtccggaagccttcggaagagttcgggtatagctctagcagatttcctttcctcttttgtaagctttgtacttttattagaatactcttctaaatacatttatggtattgaaatacttttcaagtatatgaatacctactttacattatgttcatgttatactgaatatacggctagcttatctgggagatcctttggggcgggtataatgtttgcttatgcaattactctatgtcatgacgatgatattagagtagtatctggtagtttaggcgtggtgtctagattacaggatatcattatttggggttatatattacggatgagaggtgggccgctgatggtgacagctcagtacgggtattccttcgcgccggtatataatcctaagttaattccctgggagggtattactccgtatttagccccggttgtatggtcatgacgggctgtcgtaaggaactcggcagtcaggggtggcttctcgaagtactaggcgggcatcggatagagggtattagctagtatattagttaactagaatgtatgtatactattagaagtataggaatagattttctttctcttttctctccacttagcttagatgatatattatgagaatg

SEQ ID NO: 42981 - DNA, 710 bp, Oryza sativa
atctaaacataaagccataaggtaatgatgggataaacccccaattcacttaaaaaagttcaactgaaaaaacattttaaaatcacatagattttatagcacatcatctggtaggtaattcaacgttgcctgcttgtgtttgtgtgctagaaacatattagcagtccaactagtgatcatctctgccttgtgcgtatcgaatattccgtatcgaaccgagactgatcaggttgacttgaatcaggcactgaggcatacagtactatgttgcacattcacattactgtttcttgtcaaaaaaaaattagtcattagtcagtgttgcactctggtggaatctaaacaaaagtccaaagacttgactatccggagactaattgtgccttaatcactctctcttacatttttttttcgttctatatatatggctatgaaacatgcacaaaattaataagcccagcaactaaattaaacccatgagactacaaattctcatttcggattaacccggtatttgaagtgtcacagaattttaaatctaagttcactctgcaagaatataaatatctaaaaatgtattatggatgaaacttaattaacttgcttgacttaatgcaatatatgtgatgggacttattttagtagagcaggtattcctttgctgcgcttgcttgtgtgtttgtgctaggaacatactttttccatccaaa

SEQ ID NO: 42982 - DNA, 1891 bp, Oryza sativa
tgtctctactagctgtgtacgttgtcctactatacggccagtccatgaatatatcctgctttcagatttgatagatacttccccgcaaaaaaaaaaagatactgtatagctatgcatgtcatgaccggattgtgaatattgaacatatatcatgcaatacgttttattattttgatctatcactcgaagagctttcgtacgtgttatcgtgtctgaaagtctctgcggcaacatttaattaattggcattttaaatttcgccgtaacatatctctggcggcggcagcagccccatcttccccaaccatggcagcagcccccacgccctgaacctgccaaagtgtccactcccatcgtccacgacttggtttgtcctctgatcgatctctggatgatggggatgagtcgttcatctgtctgaagcaatttgcccatcagcgattcattcaacgatgcagaggaataatcccaatctttgctcttgcagtattcctcaaaattgggccatgtttccttcttttttttattagaggagtttcaatccgtggtggtgggttgtcgcttgtgattttttttttgacagattgcctttgctgcccttgatgcaaaactgctgaagattaaggcatctctttaatctgctgctgcaagctcgttatggtgttgcggttctatactgtcttcgttatggtgtcgcgcttctatactgtcttttttttttttctgaattctgcagctgttactgaggctgtgtttagatctaaagtttggatccaaacttcagtctttttctatcacatcaacctgtcatacaaatacaacttttcagtcacatcatctctaatttcaaccaaaatacaaactttacgctaaactaaacacagcctgaataatggtgctggcgctgaaagttgttgttgctgttgttcatgatgatgtgctgctcttgatgctgcagacctgctgctagttttggggtctgctgttgattgcttgttgcttgccatgcttatatcaaaggggatcacctatacatttgttgataaattttctccgaaaaatttaacagatgtaattatagtaccatcgtactgtaattacactgtaacttatatgtaattacactgtaacttgcatgtaactacagtataacttgtatgtaactttcacgtaattttgaatcattagatctattacaagatttgttctagtgatgaacaaaaagatcacagcacacacatatatgaaatgatttattctcacgacctcgattttaccgaaataacatgttacggagagatttttgaaagttacatacaagttatattatggttacagtgtaattacatgcgagttacaatgtaattacactgcgattatactgtaattacatctgtcaaatttttgggagaaaatttgtcgacaaatatatagcaaaattgtatctggttttgcggtttggaggcgattttgtatctcgatgataagttgagggaccttcggtgtactttttccgagagattgattcctctacaaaagtctatagaatatccttcagagctcatccccagcctcattcctctacctaaagtctgtattgtgtccctctacaacccagagccctctatggaagtccaaaatcacgtccttcccgagacaccctcctcatcggtttataaattctcccaaacttcagaaattgatatctttcgaaccgtagccccgattgactccattcaacttccagaattcctctaaaatcaggatctatcaaatggcacaattagttcatgatgattcgtactttatttggaggattttatatggttttctattattgaccgcgatattctggatatttatcgcatgtgggtattctaattatttaact

SEQ ID NO: 42983 - DNA, 967 bp, Oryza sativa
gttacgaaccgggactacaaagggtttctctaccagtgttgacttcgaattttgataaggttacattcaaattcatagttaggagtttgatttatttcggaacggaggcctaatttcaactagctagtagggatcatgtttgcctagctcgtgcctgtgaagaaatttcatatattccgtatcaaaccgatagatacggagtacttactaaagtcaggcattgtgaggcacacacaagctgtttcactttcctactgtacgttactgtttcgagtcaagaaaaattaagtcatatcagttgatgttgcatttcctggtggaatctaaactaaagtccaaagactacttgactagtatatccggagactaattatttgctgatcactctcatgcaggagggatgctgccagcgctgtgcctaactatagctcatctcttgggttatatggctataaaactgcacaaaattaagcaacccagcaactaattaaaactgcataaaaccacgtagattttaacacatgacacataacccaaagtagtatgatcgtaaagttttacaaaaccacaatattaaccatttcaacatactgatatatcaaatttaaaaaagcggatataacaaactcaaagaaacagatgtaacatttatatgttggataaaatcctcaaaaatttgagatgtgattgtgtcactcaaaagtatggtagatcaaagtccaaatgattgatagagtggttttatgaaattttaaaatcataatacctgggtttatgcgccactttccaaaatacatgattttggacaacttagaccataatatgtgggttttataaaatttactaaaaatagagagtaatctgaggtcaaattaatagaaaaaggaagtagtgtgtactaaagctaatgtattgatcgtgttgtcactaattgattaatatgtgtggcatggataaaattagagct

SEQ ID NO: 42984 - DNA, 1878 bp, Oryza sativa
gcatggataaaattagagctatcaatcatttcttaaagataaagaaaagctttttgttgaaatcaagacaattacatcaaaatgatacaaaagatcttgaaatcagttatgacctctacataactaatatacacaaaagaaaaagttttaagttgataaagacacgctaacatctatcatacttagactacatcatcacccatggtccagagtaaactactccttaaccacctgcttcaaatgttgaaacgtacatatatctgcaaataaaagttgtcaagccacagctagtgcataattaagtacataacctacaaagatatcaaccacacttgagcgatattttaagtactcgagaggtataaggtggtaccaaaattttttaatgtaaattttcgtacctcctactaacggaggtactatgagagctattaaattttatagtagaaaacgtggtatctcccggtaccttctcagagactgtaaaatcactcatcacttcaagtatattatgtgctcgtccatgaattcatggaaccgaggaaaatttatcttcaagtatattatatgctcgttcacgaattcatggaaccgaggaaaatttatcacctgtacttgggaagaaaaataaaaatgtcggtattaattgcttgtgtttcctgagtattattctttcatcttccgattcatatttgtaataagctcccaactatatatgaattacctacctagttcaaaattccttattcatccttgagttcccgttagattaattaattcctttcatacccggcgccccgagttaatttcactgtctgtgcctagctagtcttgcattttctggtggaataatctaagctaaattccaaagactacttgactatccggagactaattaattggctgatcactctcatgaaggagatgcgctgctggtgccttactactccagctaccgttctctatttatggcgtccaaaatcaattaaacagctcaccatcagcaactaattaaaacccatgagcctgccaattcgttcagattaacccagcatcacatatcccatcgatcgttgagtcatcacatatcgttgagcttcggtcgtcgatcaatcggccggcatcaatggcagtgctcaggaacgtcatcaccggcgttggccggcgtctggtgctcctcgtcctgacgctgttggtgttggcggcgctggatgatcaggcgccgcccatgatcatggcctccgctgccagggttttgctacaacaatatccaccgacttatgggcctccgcgctgttatccgccgtactgtgcaccgcgtcacgctcgccgatgatgtagttagttatatctgtcttaaaaaaattaacttccctgaatgaatctggataaaatatttgtctgatccattcctttttcttggacggaaggattatgcgtaagagttgtgatgagtactcctatttatttgattagtaatgtttgtgttaatttcttccataaactacaatatattgtacacctagagaaggcttctgctcctgttgctcctcctgcctggacagagctgtataatattgcttgccatttggatgcatgccttgcgatctactccgagctagagccgcgtatgaactgtctctactagctgtgtacgttgtcctactatacggccagtccatgaatatatcctgctttcagatttgatagatacttccccgcaaaaaaaaaaagatactgtatagctatgcatgtcatgaccggattgtgaatattgaacatatatcatgcaatacgttttattattttgatctatcactcgaagagctttcgtacgtgttatcgtgtctgaaagtctctgcggcaacatttaattaa

SEQ ID NO: 42985 - DNA, 571 bp, Oryza sativa
ttttttttttaacggaaaacagcgctagtgtgctttttcattgaatagagcttgagaaaatacaacccctaatgataaaaaaaaaagtcacggtaagctacacacgaacgcggaataaactgcaagggcctagagactagcctcctctttgatcttcgttaaaagaaaactcattgccatctttttgtggtcgaaaatctgtcggtttctctccttccagatctcccagacaactagcaggatcagagatcgaagtcctttttttgggacagcgaacgtgtttgctaggttcttccccgcacgctctcttttccattttttccgcattttttttatttagccgcccccttccttagcgcatttttcttttttcgtctcttttcccattttttaaatctttaatacatgtgttttaaaatttttgagttgaaagtttttaaatcttgagttgaaagttttcggatcttgacttgaaagttttctaatatgaataaaaagtttcaaatctggagttgaaagttttcaaattttgagttaaaagctttttaatctaagttgaaagtttcaaatt

SEQ ID NO: 42986 - DNA, 819 bp, Oryza sativa
agaacatagtctatgactagcagaggcatgagatggtaagcaactctcattatggaggacaatatgttggaagatgactgggtttattttgttctcaactctatggtacacatgaataaatacatctacttatctactcgatctatctagttattcccaacatccgttttagtcaaacctttgaaacctcatgatttttttaaagacttgaaacgcgtttgaaaatgatgtgtatatatttgtgttgaaaaatatatattttctacgatatcataattctattggatttataaatataatctatctatctatttatctatctttatacctctatactattgagcacattttttttactctcacgttaaccagaaaaatctgatgactactgattagattactcttattatgatgaccctagattaaatatctcacctaacgggtcaactttgaaggcccaatcaattcatataccaactcaacctctatgaataagggtcagtcctgagatttcggtggtctagggtcggtcctgagaagtgatatccatataaaaaaaatcaaacatattggccatttgtaggtgtgaaatcattgatgataagtatcactatcatctgtatttcttgaagtatctattttactccttaaattttaatttatccattgctcaattagcccaattactcgttctttttttaatgtatactttctcgaccacattatatccatacgggcaaattagtgaaagggaacattttaaagttgaactcatagcttaaggctatagaagtactgtattaattcagaaaaatataa

SEQ ID NO: 42987 - DNA, 686 bp, Oryza sativa
gctcgtgtaccccgtctgtatatatagggcgagcgatgcaagtggccgaggcattcggtctctatttcgtcttcctatattacaccagtagaacgtcgtcaaagccggagctctttggacttttcaaacttagcgaactgaaacattgagtagctagaaaggaaggaaaatcaaccgagagcccgttagtagcggcaagcgagagcggaacaagggtttttatcaaaagaaatccataaaaaagaaaggaacataagaaatgtcatctatctatcttctattatatactaaaattccatcaaacctcctataaacactctcaaaccgtcgtgtggcttcctacaaacgctcataggttgacacgtggcattctataatctcaccatcgattttcttttaaatcgctggacccgttaattttaaggacgcgactacacagctagtggtagctgatttgtctaaatcagctatcactccatatatgagagacactatccacctatagttcaaatacaattttctcttaaactactcatccgatctacgatccgattacaccgttgtgttcgtaacaattaaatctttataacaaaatctcatatgattatattttgatgaaaaattataaattacttttataatatatctaaattacttttagatatcactaagttacttgttacaca

SEQ ID NO: 42988 - DNA, 556 bp, Oryza sativa
tttggggacggtgtggcaactactaaacaaaaacgtaaaacaacaggtaattactttgtttgatagaaaaaaggaaaaactacaatattctgaaaactcttgagacaaatatatcaatattatctttgtgcgaagaataggaatccttaaatatattatggtgaaacttaacttgctagacttaatgcaagtacaatattatggtgaaaactctttttgtgatggcactcgtttctagtagagtaggtactcctttgctgcctgcttgtgtggtttttaataattaatagaaatggtttacatatttagtaagtggcggagccacgttcagtttagatggtgcacaggaacccccctaaagccaagatttctcactttaaaaacactggaacgtacagcgtttatattgaagttttttaggttttcaatagttgtgcactaccaccttagttgttttggtgctagctccgcctctgtctttactctatgttgtaaaaactcacatcaataagctttggtatctaaacataaagccataaggtaatgatgggataaa

SEQ ID NO: 42989 - DNA, 672 bp, Oryza sativa
ctatagggcgaattcgagctcggtacccccatcagagaatcgtacctccttggtcccacttctttggaaaatggagatactgagggcctattttaggcgtaaattacacagattacatgtaagttggaagacgaatcttttaagcctaattactccaataattttacaatgtgatgctacagtaagcatttgctaatgatggattaattaggcttaataaatttgtctcgcagtttataggcgaaatctgtaatttgttttgttattagtctacgtttaatacttcaaatgtgtgtccgtatatccgatgcatgtgacacgtggaaacttttcacctctggaacttaatggggcctaaatcaataagggacaattcatggagttggatggaaatttcccgcccaagcagccaaaaacggacaatgcatgcgatgctccatatccctactggtcgaggaaccaaatcaggagcgaaagttccgataccagttcttcccataggccgttagtgatatgactctactggaccatcctttctgttactagacggtctggacagttaacttccctatcggcccatatatgaattctgtagtgattctgttacaaaatagatagggctctagatccagcccccaacctgagcatatagcaatcattctcaggcaaaag

SEQ ID NO: 42990 - DNA, 707 bp, Oryza sativa
gtgtgggacatgctattaaaaaatgtagcaaacaacaactatgatagcgaactaaacacatgcctaacaaactgtgactgctaaaactatggcgtggtaaagctagtgtggccatgatccaaacaactcctaattttttcctactgaattaagtcattgtatttcttcttctcacttgtccctagcctatatattttctacacgactacacataaattttatacaggactaatagtttttctacacaaacttcgtatgtgaataataaattgcctgccctgcatgcatgcttacatacatacgtacatatatatagagagagagacttttcgtacaaattctctactcataaacattctacataaacagaaaaatctactcagagacatgctactcgaccaaaattaagaaaatttgtccgaaattgtaattgttttaaaaaaataattcagaaactaaattaatcataggatgtcaaggacagttcacatggtccatggacggtcgtcgtctgcttggtagtagagtgagcaccaacctctccgttcatggttttccaaaaaaaaaaaaaaaaaaaaaaaaaaaaaaaaaagaaaaacctctctgttcatcgacggtccgaacatgtgaggctttagattctacgataaatttgaacaaaattaaatatctatgattcaaggctattttaaaatccacataatgaa

SEQ ID NO: 42991 - DNA, 726 bp, Oryza sativa
ttgactattttaatttttaaatattagagaaagtctacatttgattcttattgaattttataaaattggagcatttttttatccttattgaattcttttaaaatctgagcatctttattcccattcttttcaaatttatattctaaaaaataaatatatttgattttaaaagtatttcaaactcctaaaaaccattatttttaaattatttttaaaattcaaagaccctcaaacatttctttttagattttatttcccttttaaaatctatttaaatccctcgttagtttctatttcctagatatctttcttgtcaagttcaaaaagcctcaagcaagttctcttcattttattttcccttcaaaatcatatcccattgtccaaagttcaaaagtccacacgcatccattcatcctttagatttcatctcctttgaattccattcaaaaccctctacacaaaaattcctaagagtccctattcaatcgggctgaaacttctttctttcagcccatctagctcacggcccagccggcccaggaggactgagctgccgcctctctttccgtgggcccaccgccgtcgaacaccttgtggacgccgacgccgctcgccccttcccgatgcgccgccgctctaccgcaccacctgtgccgccccaggcactccctactgccacactaccaccgcgcctcggccacaaaaccggggccatccggtggcgcc

SEQ ID NO: 42992 - DNA, 845 bp, Oryza sativa
atcagggcaaagctccatggcaaagactatgcggcgaagacggcaaaggatgaagcctcatggcgaagaccgtgcatcctgggcgaaggtcaaagggcgaagggtatacgccgaaggaggatgacttcgccatatcgaggccagcaccgggaaggcccaaggtgtcatccaagccgcttcggcccattggccattaggccagcgatcgccgatttggcccattagaggcccatgcacctcaattacactgtatgcccatgtaaatgtccctttcataagagcaaccatgtaaattcccctgtaaaacctaaacccaaatagggggggcttgtaatagggttataaatagacccctagggccatgtaaatgggggattttggaagaaaaattctcagtttaatacatttttactgctttccaaccactgttgaggtaccacgtccttcgacgtatgcagttgtcatttcgacaatagctggcgccgacgttggggacctccgagcgaaaccactgagagtaaatggcaccgaagagggtcgtgaaggagaaggttgcaaagcgaatggggagtgaagcaggagaggagatggccgccgaagagggagccgagccttcggcgccatcgttgaaactgggggagcaccgtcggcttcggcacctgcgccgcaaccgccaccttcagctcttgccacttcgtcagggctggtgccaaacacggtcgacgcggcgaaggcagctacggcagcaagggcgctccagatcagggcagagatcctttcgacgagccagctgctggtgccccaagccgcttcgtcacagctggggtaccgagctcgaattcgcc

SEQ ID NO: 42993 - DNA, 1005 bp, Oryza sativa
ttcaatagtgcaaaattaattaagtattaaatattacaaactcaaaagtaaatttatttgatttttataaaacttttatatggaaaatatttttcaaatacggaccatttagcaattcggtaaacatagtcacgataactaagtgagtagccaatcaaataagcattttagaacttaaccataaatttattacttatgtacgaaaacacttaatatatagtataaaatatataatttgttaatcaagattatcctaatagatcaaccgaatgtctccactaattaatccctatgtatataggttctatatacagatcactatccaccaattgctaagccatattgcttacatgacatccatgcacagtgtgtcctgacattcaatcaacatgtttgtcatgaagcacggaagataaaggacgatactaattaggcaacaatcaataaatgatatgtagtaaatagaggataccaccaagccaaatcaaataaatagctgactacaagtaaactgtgagtatgaataatagcattcctatactcctacaaacactcctaagatgctatgaaatgctcaaataaagaagagaataatccaataaaaagaaaaaaacatgaagtcatcaatttacacttaaactgatcaatccatgattttcaaccattagattagatctattataatcacttgctcctaaaaatcagctaatctatccctatatatgtatgcacacaagagatatcaaaaagaagaaaaaaaagaagaatgtgtacgatccatcccatcttgatagttttctatttctttctttgtagcccaaacgttttgttttaaattgtacatatatgtagcaaacactcctggcgacgttgtcaaagaagcaatgccgccatggcgccgcttcaagccctcccaccaattttcttgaaagtatttttttattaataatgtaaaaggcaatcataggcgctcatataaacatgtacatacctacgccattaata

SEQ ID NO: 42994 - DNA, 1493 bp, Oryza sativa
  unsure (1)..(1493): unsure at all n locations
acgtatatacacgccttcctcgccagctactccaggactctgcctccagtactgctcctgctaccctcgcctcctacgcctgccgttgccaccatagactagcgtcgaagcgtagcaagaggattgcggccaagcttgcgctcgccggcccgagtgacatgaccttatgtgcgcagcacaatttgatgcgcaagcttgggttggtgcctgagaagggtcatgtgttggccgaggctgttacggcttacaacgccctcttctcccagcccctccctctggatcacgccatagccctatcttcactcttccccagctccttgcctcaaacgcaggctggagtgtagtgggatccccaaccccaccatgcattgggataggagatttttcttttttagtagcttatcttctttgtatttgttttctttttcttttttcactactagaggacccctcttctatcccagttggcaacctcctttacttccgggtaacgaaccaggagaaagaatccaggactaaagaagcccagtatacatggactatatataaatgaacaaaacctctatctcatctttcaatcctgccgctccaaccactcatgcatctcaccactagcgtgcgccgctcattcatccctagcccctcatcccgccctccacctgcttccgcacctnctcctcaacctccatacaggacagcgcctggcattgtaccagccattgaacgcggtagggctcattcaataattgtgtcctggcttgttggcatgtggatgatccagccaggcccctgtcttccatgcgttgctgccccccagaagagcaaaacgtcatgccgtagttccgccattgtccctctaagcatcgtctctacttctctaaccaatggagccctgggcggggcttagtgacccactagggacggtggtgttctagctgacatgttatgaccgccatctcgttgctaaccctaccaggtaagccctcttctttttgttttttattcacaatctacctcagtgatcaagaaggagagagatcagaaaagagataccacaagcaggtaactgattcacaatggtgtcggtctggggacaatggcgacaggagggtccatgtgaggaacccccaccccaacaggtgtatttttctagggaatttccttattctactccctccatcccaatttgatcataacctaagcaaagggcaccaagaccaagaacaccaaaacatccatctttctgaaattaatcctcatcaatcaaggtgctccgttgcttcgtgtccaacaaaattttaaaggttgtatgtgttgaaccaatataaattaaacttgattggttgcatacatgcatgcaaggcattccacaatgcacatttactattagcataaataaacaaagagccactttgttagatgataatcatttttgaaaacgcaaaatctaaaccgagagcgctctcgatttagtcttaaatagcgacacactt

SEQ ID NO: 42995 - DNA, 1124 bp, Oryza sativa
atgtaagttattttaacattgtccacattcatatagatgttaatgaatctagatatagttttaaattaaagtaactttcccttttgttataagttacttctataatatatgtaaattacttttaagctttactgaatttacttttatatgtctaagaagtaacttagtgaaatctagaagtattttagaaatatcataaaagtaatttatgatttttcatcaaaatataatcatgtgagatcttgttgtaaagatttaattgttacgaacacaacgttgtaatcggattataaatcagacgagtaatttaagagaaacttctctaagaagaaaaaaaataaatagatattgagtgtactagtagctttttttttggaaagaagggtgtctctctttagcactatccaggtagcactctcggtgtagttgtgtcctttttgaaaaacctcaaaaatcttaggtgatgatcaaattaggatggagggagtatattcctttaaaagagatagtagttgagtagtgaatctgtcaccctacctacttccattgtaaattttataaattacctgttgaacttcttaaatattaatattaagagtcaatcaaatctgaatgaatagtcacatataaaatcaaaataaggtgaacattccctatagaaaaaagatgtataatccacacaaatatagtaaattatcactgggcaatataaattcttcttgtttgatgatgcctcgcctcatcttctaatagcatgaagccatcttttgccgccattcttcaatttgagattcaaaagcctagtgaccacctttccacaacccccccacccgtctaatctgttggcatgatattgtgttgattaagctcgataagagagtccatattagagaactagagttttggctatatcaaccaaaactgtttcccaacggagttaccaaaaggtgtattaacacagaaatacatatcgagcatcttgtgtgtaattcacaatggacctagatacatacggatacaaggggtagaatggtagatgttgctgaacaatcactcgggtgggcgtgggagggtggcgtgggggatgataaaacccatgagggcaagcgcttgtcagtttgtgg

SEQ ID NO: 42996 - DNA, 637 bp, Oryza sativa
ccactcatctctgacgggtctttaactaacacacgtcacagataacgttatctctgacgggtggtagttatgacccgtcagtgatgagtgaaaattcaaatttttaaattttgcaaaaaaacctcggattgaaacatgtcctatataaaagttgtagctctcaatgatatccacaactttataactaacaacatttctattagagatcgtttacatccccgaacatgcattacaagtgatcagatctacttttaaaaacaaaattttgagttttttttcaaatgacatggatggatacatgccccgtatcaaagtcatagaactcaatcagatctacaacattataattgaaaatattttcatttcacaaaatttacatgttataaagtgagatatattttgaaaaatgaaattttgaattcttcaaacaacatcggatgaagatattttctatgtaaaagttataaaacacgatgagatctataactatttagttgataatattttcatttgaagtcatttacggtgttaaatatatgttaaatgattcagacaagcaataacaaaataataacattgggttagtagtcaatatgtgttgagtaggtgagttggtaagggagctctatatggaggg

SEQ ID NO: 42997 - DNA, 683 bp, Oryza sativa
tggcaaatgggaacttaaaccaaaatttcaaatcaaatttaaaataatacaaattatagaaatttgaaaggagcatatacttctttcatattagcactcaaaatcaaattcaaaataaaataaatttacaaacgaaacagtcattttgtaaagaataagagtgagtagtcaagagaaaagaaacttattatgtcttactctcctaatattatgtagatttttatagatagtaatctaaataatatatattttaagttttcaaatctgcgatgtaaattgaaaataaaaataaatttacaagtagaacattttaatttgaaaagaatggtaggaaagtaagctaggaggaagagaaaaggaaaaaaaaggagggatagcaggattcaaacctagcaccctagggctcactgctgaagacatcaaccaccaagctatcacagtttctgttgcaacataatgcttgcgcatctatttaatctcattgggacctcagcaacataatgactcagcaaattcatgccacctcggattagagctcagcgcctaagttattggcgctaggacattatagctcagcgccaaggtccatgatactaagtttacggactatttttggttgaagttttttatagggactagtttcaaaataagtttttgaaaaggacaaatttgtcaaaaaaagg

SEQ ID NO: 42998 - DNA, 1548 bp, Oryza sativa
actgagaccactctcggtttagccttgacgagagacacccatacgtgagagcactctaggttgctactagtacacctaatagtgcatatctttctttcttcttatagaattttctcttaaactatttatccaatctacaatctgactgcaccatggtgttcgttgcaattaaatctttataacaagatcttacaatattatattatgatggataaaatatttatgttataaattacttttattatatatgtaagttacttttatcatatatataaattacttttataattgattaaattacttgttagacattcagtgaacagattactttattggttagttctataatatgttaattaaatataatttctagatagacgtatgtttttaccccataatagatttactcttattgtcatgacaagttacttcctttttcttttaagttacttctataatatatgtaaattacctttgagctttattgaatttacttttgtatgtctaagaagtaatttaatgaaatctaaaagtaatttagatataatataaaattaatttattatttttaccaaaatgtaatcatgtgagatcttgttataaagatttaattgttacaaacacaacggtgtaatcgtatcgtaaatcgaatgagtaaatcaaaacaaaaattctataagaagaaaacaaagagaagcactcttaggtgtactaatagcaaccgtacttgagagtgaggtagctagttatgacaatccagctaccgtctcgtcgtaatcacgtcctttgtgtaagtaccttaaacaaggattagatagaacttttaataaaactagaaaggaagcccgcgcaaatacgcgagaaatttatttattgtttataaaaagaatactaaaagaaatcatatatgactgtattcaatataagaaccctagattaacatataatcgtaaaagaaaaaatatttatactgttaaatagaccatagactttatatactgaatggaaatcgctatcatattcaaacagaaatcactttgtctcagttatatgcaaacttgcatatcacatctttcgcaaacataatatgggctttgatttttttttcttttattatatatctcattcacctatgcatttttatgggtaatatatgaaggaataatttatattatcgaaattatttgcactaattgttagcgctatttacatgagaacggcataataaaaaaggatataatgtggtttcgtatgatatttccgtttgtatgtatgtatgttttttttctagtgaatagtagtctctcgtacgcgcttacttttttttgtggacaaatatttttctctcatatggggtaggttgtgcatatatgtattaatggcgtaggtatgtacatgtttatatgagcgcctatgattgccttttacattattaataaaaaaatactttcaagaaaattggtgggagggcttgaagcggcgccatggcggcattgcttctttgacaacgtcgccaggagtgtttgctacatatatgtacaatttaaa

SEQ ID NO: 42999 - DNA, 645 bp, Oryza sativa
tatattttggaacgagtatagtataattttacacctcaaagcataatactcaacttatatgtgtattattatttattatggttttagcataattttgttgtttcgttgttatttggttgtcatgcaaatggcaaaagacagtgtttagaagagtgttttcttatatttggatttaataggttcattggtttaatattatggatctaccgatttaaattgacattaattaaggattactttttttttctttataatatttttttctaaatttaaattattagctagaaaataggaaggtgagagagaggattattggaggatggaggaagtgtacgtacatgcctatgtgcgtgcacggggtgttcggaggatcagtctgcttttcatctaatctaaataggaaagagaaaaagaaaaaaaaatagatgtgcaaccgggagtacgtacgtacgtttggttttttttaatacctatccacgtacttaatgggaaatttttacataaatctaatggttgaaaataatgggttcaccagattaaatgaaatcgatggttagatgctttacttttttttcttagaatttctataatttattagagtgcaacatggcggtgtaagagcgtttctagatatgccacgtggca

SEQ ID NO: 43000 - DNA, 1167 bp, Oryza sativa
acagttgtcttccattaaccatgatatgtaattcttgctgaacggagctgctatgctgctcttggagaagcatcgccggctcctgctcccagcttcactgccttgagcatccgcccagtttagtgttatcaaagcaacaaatatatgtggcttgaggaatacatcccaactgaagctcaatacataaagaacatagtaaaaatggtgtaaaccatatatatacattatttctgcacacggtccatcacttattctgcttttcctaatgcctgttcagttttaagcaattaaaaactgatatggcaaaccagaacatgtcgttcttcagttgaacaggggcagatagcggagttggtgctgccctcgacctccttcagatttattgacgcctctcggaaccgggttggtgacgcgtggggatgaacatcgcctgaaagcggtctccgaagtggccaccgccgtcataatcgggcacacaccggaggaatggatcagagggcgctagcggagctcttgcccgcgcgcgcacggcggcgaaacggggtgacaaatgatggacaagaagttggggaaaagaaccgctatgagagcggccgccggaggccggagcagattgctgcgtgcgctaggatgcaccgtcgagtaggagagcgatacaacctgatgattaatggatactcttctttactctttttcatttacgaagtagtactgataaaatcatactccctccattccaaattgatctacatatttcataggtataccaagaccaagaaaaactaataactctctcatactatatttactctagcaacaaactcgatgcatgcactatccctaatatttcctagccaatagcaaatcaagatattgcatgtgggttataaatacttgtgtgcatagatgtatgcatcaatgtccatttactctaatgcataaataacgagacttaatggattaacacaaatatgtagatcatttaggaataacctcaaaaaaactatatgtagatcaatttggaatggagggagtaaataccagcattaccatgatgattattattaaagtacttatatgtccttacgaaccaatggtctaaattgattctactgatagtataatactactagtagagagcttcctttattcatgggcttccgatgg

SEQ ID NO: 43001 - DNA, 1231 bp, Oryza sativa
tttctcttgactactcactcttattctttacaaaatgactgtttcgtttgtaaatttattttattttgaatttgattttgagtgctaatatgaaagaagtatatgctcctttcaaatttctataatttgtattattttaaatttgatttgaaattttggtttaagttcccatttgccatataatataccactttaatattttttacaaattcaaaaaaacagttgcaaataaagcatatcttttgaagataatattacgagacaaacagaaaaggaaaaatatagataaagagatagaaaagaaaatgagagaaccgaaaagagaaaaacatataaataaagagagaaaagagaaaggagaaaaatatagataaagagagagaaaagaaaacgagagaaccgaaaaggaaaaaaaacatataaataaagtgagagaccagagaaaggggaaactggaaagaaaaaaaaagaaaagagaaaggggaaaaatatagataaagagagagaaaagaaaacaagtgaactgaaaagaaaaaacatataaataaagagagagaaaagagaaaggggaaaactgtaatgaaaaaaaatataaagagagagaaaagagaaaggggaaaactgaaaagaaaaaaaaattgggagaaatgggaatcgaacccggctgaaacttgctattattgtgctataggtggttcattgaaaatgaatacctccacattaatttaaatcgctagggacttcatcgccaaataacttagctctgagttaggatgacccagcaaatccatgccatctcggattagagcttagcaccaatatcgttggtgctgacacgttatagagcagcgccaagatccgtggcactgagtcgacggtctatttttggttgaagttttttttaaggactagtttcaaaataagtttttgagaaggattaatttgtcaaaaaaaggtagtttatatggaactttggctagctagcaaggagccaaggatgcgtatcgacacaagtattttagtcaaacaatatactagctcgtgggcagcaccagatccaagggataggtgggtatgcatgcactgggttagagaagataagtccacaggaaaataccaacattgctcgtagtttgatctagtcaatacttctacttttcgctgccagtgcgatgtatgtgtacgtagtgaacgcactttcttttccatttcctccgtaccaaacaaagag

SEQ ID NO: 43002 - DNA, 1296 bp, Oryza sativa
atgggaatttctacaggaacggaattggtggtagattgataaactctaaaggatgggtatgttgactcaaagagggattgaaaaggatattttatggactctggggatatttaggtggagatccaaaggaaacgtatcaatatttcatgtactctagagatattcgggtagagttcaaagggagagtattaactctgaggaaattggaaattgtcattttatgactaaagatggttaaaaaaggtaacgggcatatttgatctttagtcccggttggtaacaccaacctgatctttagtcatggttcaaatgctgtcagggcttgtcagccccccgggatctttagtcgtagtttgatctagtcaatacttctacttttcgctgccagtgcgatgtatgtgtacgtagtgaacgcactttcttttccatttcctccgtaccaaacaaagagtccgttcatttgggatgaaggggaagatttccgtttgttttcgttagcatattcaaacggctcaacacttcaacagtatattttgtgtgaaaaaattctatataaaaattgctcgaaaaaatcaaataaattcatttacaattttatagtaattaaaatttaattaatcataccctaatatcttatctcattttgcatctgctgaaaacctccatccaaacatcggtttcaaactaagcctaactctagtaaaagcattactcctttggttttagcggttacgcctcacatgtacggctcatctaatatacatttcccactcttccaagcatccatgtggggctaaaattataacatgtaactattgatcagtgtcagtttattaaaaagccataaaaaaagtaccagtgttcgtttataaaaaaaatatctgggacatcggtgttggtttatttagaaaggatctatctaaaaatatgacaatagatttttaagtaaaaaaatatatcaaatataattatagtataaatctagtgtaaaataaccgtcctaccattcatcttcctcctcctccctctcacatagagacacctttcttcaacttctctttgacacaacgagttggcgacaatgcaccaccaacaatgattcaaggtcatagaggaaggatgaagatgaatagggcagagcgacgtagggatgatctccgggcttcctgaatggctacagaggagatagatgacctcgagcgtctccatcgctgggtcatacatcctaggattctttgccccacatcaaaggagatccaaccttgtcaccgtcttgcaatatgtcgctagggtacc

SEQ ID NO: 43003 - DNA, 2133 bp, Oryza sativa
atcaatatttcatgtactctagatgcctgcaggtcgactccaaagggtcccgagtattaactctgaggaaattggaaattgtcattttatgcactctagggaggttagagaatgatatttcatgtattctgtagatagttgagtggagatcaaaaggaaagtattagttctggggaaaataagaattggtatttcatgtgctctagagatggttgagcgagaattgaaagggtatttgttggagatgtttgggaatggattcaaaggaaatatagtttagagacaaagttagagattaaaaaataaatagaagggttttgtaaaatttgaaataaataaacaaaatagagaataaattatggattttatgaaattcagaagagagcatttaactttgcaaataaaatttaaatccaaagtaaaagagattaagagaaagcaagattattccaatggaagaatcgagaagaatgcaactaaaattttttgcaaaaaaatttcccgaaatttagagtctgttacaggattgcagtgtagttgttggaaagcgcgcataaaacctaaaatatatatgtagtaaatatttcctaatcccgggagcgccaggactcccctcactttccggcagtaggtaggttggtgtgccggtgtgcaatgggggctcatagtccttggagcgggtgctgaaaagcaagaacgactgaaaagtcgggctgtggcgcatctcatgtgttgggactgggctcttgtgttgggcaagtcacggagtgcgggattaaaagcgtacatccactgcagtgagtaaaccaatatatttgaatagccatgctcgtggttaataagcgtctggacttgtactactcttgactagactcatagattttgatactgcttagtttagatatgagaaggcatgagtaaccttgcctgatgtgcgggaaggttagtatgatagagttggtgtaaaatggaatgcaagggtaaaccgaaccaagcgaggcttgggaaggtggatgaaccctcgattaatgataacttcaacattaacattaaaactgctaagtcataggattgtgaaatgaattgtgaaaactagctttatgcaaataaaccaagccattctttaaccccctgtgagcaccagatgcattttgtagtggtggcttgctgagtacgtatgtactcacccttgcttaatttaaatctttgagaaaggagttggagtcgattatatttatgcaacgctgccaagtgcatgtcgaaaacgatggattagggaccctaggttcactagtcattgcctgtggagttcgatggaccgccactgcttcgcttccactaccctagctatttcttttggtatcttgtaatgtatatgaccatggttggtctattttgggacccgtttgggctatcctgtattgttaatgtagaaacacctgtaaatgatgtcagcttgtgatattcaactgtgctatgtgtgtaccacctactgatccaagtagtgatattgtaagacacatgaggtttccggtgtattaaacctagggtccccacaataccggccaccaaaatggcgagcagatatcgctcctttagggtcttaagatatgctacaacatctttgagcttatccgtgaacaccagctcttgctccagctcctgctgatctgcccaccgacaagcccaaggaccatgaagcatatcttaaggccttaaaggagcaatatcttctcacccacttggtggccggtatgttccttctttgatctacttcacttatttgatgttcatccttgttggatcaaaatgcttgtttattttgtttcgtttgattgatcgatcgtgcgatgcgatgccatgtctatcttattagtcccacgctaattaattgtttgttacctgattaattaattagctaatgaagtgatgttactcaattttgtgattattgtttttgcttaatgttgctgattgatgcatccatcatcaatatactactagtgtcatgtttcttagcactactgtggtaatcagtctgaagttatatgtctgtccgttgtttgatactcataatttattattctcatgtctttaaataaatgtgctgtactatatataaattagtaatta

SEQ ID NO: 43004 - DNA, 1252 bp, Oryza sativa
ttacctgattaattaattagctaatgaagtgatgttactcaattttgtgattattgtttttgcttaatgttgctgattgatgcatccatcatcaatatactactagtgtcatgtttcttagcactactgtggtaatcagtctgaagttatatgtctgtccgttgtttgatactcataatttattattctcatgtctttaaataaatgtgctgtactatatataaattagtaattactatatactaactacaagcagtttgtactcagtgatggtagtaactttcgaataaaatgatggtagtaattcattgtgcaagacagctggtggatgacaagtagagttgtggagtacgtcgacaatactctatactgtcactaaataaactcaatcaccacctgcggaagctcctcaccaagcactcacttatgggagtggggtttgcacgtgcagacatagccagagccagagctggacctaatgtcgacgaccttatcttccggtagaagcactaagcccaacatgagattcaactagttgaccgcgtaaaactggagtggtaagaaataacctaatagtcaagtttgtgttatttgtcgtttgttacttaatccttagtttgtcttacttttacttgttgctatagattaatatttattcattgaagtacagtggagtaactattcgcctctgcttgcttaattgctactatccaccaccgaacagcagctattgacattagcattatgtgtttcaacttagacataggagtatgttcgatcccattggaatcttgattccactatatagcaagtagtattcaccatctaattgactgaccgaccattcttagctataaccatctaaattatgctgaccattcttcctatctattctcatctcaattataaccaaattaatctcaattataaccaaattaaggaagaaaataaatgtaaattctctcccccacagttatgtttatttgacataactagcattcccaagtctaaacatcaattatcttattaaacattatcagagggagcggggaaaaccatatatccctatacaaaacacacacacatcgactaatgtcacttcatttcaattctggtctatatgcaaaacacgcctaacattacaaaaaatgctgcctgaaaaccggacctatcaaactatatatctcggtgtaggacctatcaaactatctatctcggtgtcaatggaagcattaatttcatgggtttttag

SEQ ID NO: 43005 - DNA, 602 bp, Oryza sativa
gggcgaattcgagctcggtacccctataaccacatgtaacaatgctcaaaagcattaataattatcacaatgttattctgaagtataacatttacccatgagatgtaaagaaaaaagatattatgcatcaaattaaatatgaagattattttaagttttctatatgatcaaaattttagttatgtcttgccttgcgcctcgagatttcccgcggcttaagcgtagccatctgggtccacgtcagctccttggatgtcgatagagcttgctctacggtctaacgtacgagtacgaaaaagatagcaaataaagcctataagcaaattgctacaaagaaacgataaaaccaaggaataaataaaattggagcaaggcaaggggaaaaataatggtttaaaataaattttgatttggaaaataaaagaggggttttggtttctaaaggttggaattgaaggaaaggataaaatggataggtgtggttgatttggtggatttggttttctagtcggtgctagagtaaggcagcacgacggctagatatttggagttggttagctgatgctaaggatggggggatcctctagagtcgacctgcaggc

SEQ ID NO: 43006 - DNA, 640 bp, Oryza sativa
aaggcactggtcgcgatcgcgtcggccaaggtggcaaagcggggtccggtcaagaagacctccaaaaggatagggctcgtcgaggtcggtcgcgcttttagcgatgacgagtcctccgatgaaacccctacttcgcctactggccggagcttggggctttcgactgctccttgttaggcaagaaaagattaaagctaatcttcttcgtttaatccctcccacgagagaatagagagggatttggagggtgatttaatgcactctattgtggtgcagaactattccctctcaaaaatccccttcaatccctctttcttatagattaacagaacaaggtattagtgttttttttattgttacgagacttggaatctaaatataccctttggctacgtataatgacatcggatttatcaccattttttttaaaaaaaaactaaagcctcagtcaaccgctgactacgaaaccgtttgttcaaaacttatcgactgaaatgggccgtgtcatatggacctatgttttcaatctttcttttctttatttttgaaaagagttttcaatcaaattaatacgacatatgaacggttggctggataaactgccaccactaatttttaaaaccagctagctagatagaat

SEQ ID NO: 43007 - DNA, 868 bp, Oryza sativa
aaaaaaaaatattagaaaaagattcagtcttcaattttttttcatttttttatttttttctttagagctccattccatcaagcttcccttaaatgtgtttgatctctgcaatttggaatggaaatataagtgggttatggccatacaacttggcatctcttaaatgttttcaatttgttgtctatgacaaatagatcctagacgggtacatgttatgacgttaaaaaatggtataatcaaaagctttttctctaatctattagtggcatcagatatcatatgtacaatttagatgttatgatcatcttagaaatgtttatttatttctaaaaagatcatttattcttaaaagcgcatctaagatcaagtataagtaaatagcccctatatgcatgttaatagaaattaactacttccattgttgaggaaaaatatatcaatatttacaacaacaaattatttatattgaatttgaaattgaataggtttttataatataattgttttgtgttaaaatgttactatgttttttataaactaatgcaaataacttgacatagaagataattagatgtctagcattctataaataatgggttgactgtttattaaaaacataagatgcgatattttaatttttaatgataaattttaatattttattttatttataggaggcttcaaggtgaatagatgtggtcacgatactcatattaaattatttatttaactaaaaattacaatagtttagaaatatcataaattgaatatacgatttaaaaattcatgattattttaaactctaattcatgttgtttctatcagtgctagcttgtggagaaaaagagaataaaagcacatgatagag

SEQ ID NO: 43008 - DNA, 1003 bp, Oryza sativa
ttatagtcctgtcgggtttcgccactatccaactctattgaccgtcgatccagcgggatggcaaaggtggaatatgcgaggagaggcagaagagtcggctagaggcaggtacctacttgctactcccctgctgcagcagagatgaaggttagggaccgctagcccatgtagctcgggagaaaaaagcttgggggcaagagccgacggagctccggtggtggaggtcggggaggatgggaagaagcggcaggggatgggcgacaaccagatttgcccttctcggccataatgttcttctcccctcttgatctattcttctttcttttgcctcattaggcggcgtctaacgcagatggatgtgtacctttgagcaatgacaactaatgagcagcttgagctcaaggcggcgtcaacagccggtagagctcaggcaaccaagattagtggcatgagtggacggagctccagcgatagaggttgaggaggacgggatagaaacggcacaacatctagccatcattcctcctctcggcgccccatccctatagcagtcatcaaggaagaagaggagcagtgccctccaaatctgacattaacactacccgtagcccgttggaggtgaggggagcgcaaccatgtagatggatctggagaagagaggtcgggtggaggcaggaggtgtggaagacgatgagtggtgaagatagtggccgtcatgtggtggaggtaggaggcatggtggaggtgtgtagaagactataagtggcgaagtatgactgtcacgcgggtcccattgactataaccagattttatcgccatgtcaaatgccatgtaagtttaaaataggcttgtagttggatatgggggtaaatagattggttcgaagagttgagaggggagaaagtgctggattattaattaaggggaataaatcggactcacacgatagtgggaaatcagacttttccttttttatgagctaaatgtatggatctttcttgg

SEQ ID NO: 43009 - DNA, 3038 bp, Oryza sativa
aaaaaaggaaaaaaaagggacgccgcttggccgcctagcatgcgtgctggccaccgctcgccatggccccgcgggcgccgccgcctgccaatggccgcctgccagcgcacggccgcgccggccgctggccgccggatgggaagaaaggagggggaggaaaggggaaaggaggaggaggaagggtaaggaggagaggggagtggagaaagaggggatcggatctgagaggaggagaggagatgatccgatcttatctaaatactttgtctgggacttaaccgatcagatatgggagtaaatacggttgaagttaccaactgagactaaacataaatctaaatacctacattagtcccggttggtactaccaaccgggagtaaagatcctcagtcccttgacatgcctctgacatgggatgaaccgggactaaaaatgatctttagtcccggttggaaacatcgactgagactaaagatcagaatttttttaatcgggactaaatttagccccgattctttttggaaccgggattattgtagaaatcgcccgaccctcaaaagataacttctccagtagtgtttccttgacccctggcaacagccttattaccatgtgcgttgtgtaatcaaattttactctcatcttctaatatattgacgtacaatcctttttgccgggatcccagcaggcagcagtgccatgattggtgtttatatcagtggcgagatcgattcaagcattcagcccagcacagcggccagcaattgatgcggcaccggcgacaccaaacgtgctcatccagcacgtcgatcgtcgatataagtaagcatgcgggcatgcggctgatgtgctgcgcgcatggcgtcaccaaccagcacggcagtcgtcagatgagatcgatactcgcacgattgcaaaatcatggagcttaattaggaatgccccctcacgtgtctagcggcagaagatcgttaagtagtcacacacctaggaatcgggggcaagagcggtcgccccgctcagggccaggcctatgataaggtcccatctcgattttccaggattgttgctacgaggggacacgagcgttaagctgcggccatgtcgtcgatgttgaggtgcatgtcgacctccttcgagtttgcctgttgaccttcggccagtttctggagtcaagctttgattggtacttttaattttcaattagctggttctttacatgttcgtcatctaaaaagaaattaacttacagactgtacacacagaacctctaatacaagtcggcactatagacgctggaaatagctagtaaaaccgacacctatagtgccgttcccgcccacgcccacaccagcctacttaaaccgtaaaaactagcacatttctcttcaaatagttaggtgcctattacccttgtcagataaaagtgtcggtttctatataaaatccgggaccttttattccccatctcatcaaagtagttggcacggggcccaccctaaaaccagcatctttgtggggaaagagatatgtgttggttttatttatagaaccggcacctttcaccctccacctcctgaactagccgttggggggcccaacttataaaccgacacctctgtactgtcagaaataggtgccagttttatgtctagaaccggcacctatcagtcgaccacatatataggtgctatcccacccgcccagctgattgagcaagaaaagagcggcgtctctcatttttgcctgatcagctagaggagggggggggtggttttgctctatttttttgtttggttgaagattaatgtctagaaagaaaatattcattatttctcactccgttcctctctcatttgatgatttgaattattgtgtgctccatatgcatgcaaaattatgtgttgtttttagggataattcttcttatctttttggtgtccattaatatcattagatctattctcggatgacatgctaaatttgaattaatgttttctattctcattagatctactagtagccttactcatagagtttatctattgtttctaaaagtgacacatgtgattatttgataaggtggagtaaagaagtgggaaagagagaacgaacaataccccacatataaaagataatatctacacaatctctaagaaaagtttaaagtgaaatccaagaaaaatataaagagaatgtgaaatagtatgagagtgaaaaaagttatatattatacatgttatcctttaactagtgaaattgtaacatcccgattgttgacggtcgttatcgattagtttcgaccgtcaatattaccaaaatagaggagaactagtgatgcttgcaatgcatatatctgttagaataataatattccactagtattaggtatactaaccttttgcagagaatgacaataaagtggaggaaaatcgacatcaactcagacgataaatcaatcggaggatatcgagaatcggacttgtgtatgaatgtgccaagaacgcagacttgacacgatgaatcaggccaaaattcacaagtctacgaagtgaagcagcggaggaggccaccatttttcgtcacctcggacaatatctcaacatcaacatttgtggtgctgagatattagttcggcgctgatctcgattgcactaagcaaataacttatttttacaataaatatttacacggttaatttactctttaaaatttaaatttttaagatggtcaaattttcggccaaaacattaggattagctcaggtcagctcggttaggtaaatgaggtaaaacatgggcctggctcagctcgtttcacggctggagccagcttgcgatggctctcgagccttccaatgtgatgcatctctccccaaatataattcgtaaactatggctagtataagaaaatttttcttaaggatttcaatcctccacaaaatctttgaaatttctttcaatccaaaagaagtctaactgtacatgctggttgagctatgtaattaaataaactgacccacaattttctctcataa

SEQ ID NO: 43010 - DNA, 2580 bp, Oryza sativa
tttactctttaaaatttaaatttttaagatggtcaaattttcggccaaaacattaggattagctcaggtcagctcggttaggtaaatgaggtaaaacatgggcctggctcagctcgtttcacggctggagccagcttgcgatggctctcgagccttccaatgtgatgcatctctccccaaatataattcgtaaactatggctagtataagaaaatttttcttaaggatttcaatcctccacaaatcctttgaaatttctttcaatccaaaagaggtctaactgtacatgctggttgagctatgtaattaattaaactgacccacaattttctctcataacattttcaaaacatttaattgtacaagatggtcacggtcgttgatggcgcagactcgtaggcttgtaagtcttctcagtgaacattagtcctctcttttagcagagaggccagatatcctattccgcgcttacgcgccgggaagagaaatcatgtgcacgtggcacgcggttttcgagaggcagatccacgcggtagcataactaaccttgttagatttagataatgacgataattaagttaatattttttttttctctagcatattgaaaaaaattctataagtgaaattggaactttcaaaaaaaattatgactttctattgaaaaactaaaagacataccgaaaagttgaaactctaaacttaaattttaaaaatattcaactcgaaatttaaacattcaacataaaatttgaaaactttagactcaagatttaacgttgaaatcaaattttgaaaactttcaacttgaaatttaaatttgtaagtcaaactttgaaatattttaacttttcatctcaaatttgaaactttcaacttagattaaaaagcttttaactcaaaatttgaaaactttcaactccagatttgaaactttttattcatattagaaaactttcaagtcaagatccgaaaactttcaactcaagatttaaaaactttcaactcaaaaattttaaaacacatgtattaaagaattaaaaaatgggaaaagagacgaaaaaagaaaaatgcgctgagggagggggcgctaaaataaaaaaaatgcggaaaaaatggaaaagagagcgtgcgggggagtgctcctgtttcagattatttgttgttatagcaaatcttgaaaaccgtggcaaaatcaacgtacttgtttaccgtcagtaccagtcctcccagcgacccagtgcttactgctttcgaacaattttgggtttaaaatcaatttccacgagagcaactcttctgtttttggctaggcaaatgaactgtgtagagcaatattcccaattgtttggtgtcatatacgggatgtttttcttttgggtatttaggccttcctatgcattacaggaatatttgggtatttagtcattgtcatgtcattgaataacaagttgaaaagaaattaagtagttggaaagaacatatgtccctggtcggaagacttgtcattatcaacttagttttgacgagccagcatgttttctttttagaattacgctttctccatttagttccatatagtattacgtatatattgagttttttttttggcagcgtgcatggtaaccttaaaaaatatatagactgataaaatagaatattaatttgccaaaaaaaatcaaggaggttcatgtaattttgctattcttgagaagatatatcaggactatatttgtcatagtaaaacttggtatcttcaggtattagatatctcaaggtgtcaaattttttttgcgtaaaatttaggtatattcagatactttctcaagtacgataaaatttctctagatatattagtaaaccaatgtcttgcttttcaagttaataaatgaagattgctatatgtggctaaacatccttaggaacaaatatttagtcaatttccttgagcttctatcgaagaaaactacactaacacataacaattaataaatacatgacaccacccaaaccgatatatacaagacattttctgcccaagctgagccacttggggagcacacttgaaaaccggcagagatgagacttgactacatttgatcacaatcaatattcgtgcatgcatcttccgtatttactgtgggaagactttcaagtcggtcaatatacattattccatctatttaaaaatataagcagcctttgtttccatttaaaaattttaacatattacaaaaaattaatagttgaagtattatatattttggataaaaaaataatattagagaccgtgtataaacctaatacaacttatatgttcaaacggatgtataaatatttatatctttttgaaaatatataagttgtattaggtttatgtttatacttccatttgaaaatataagttgtattaggtttatgcacggccactaatattatatttttgaaatgtgtgtcgacctgaaagcttcagcagcatccgtattgcccgccattaatccactcgatcaacattaactatggtatcatcacaacaaaatttacgaacatcattgatttacgattttttcattaaaaagg

SEQ ID NO: 43011 - DNA, 638 bp, Oryza sativa
aaaaaaaaaatgatatcacaatctacatgcattgcgttccgtaagcctatgtgcaaatacctttttgcgcctatgagtaactgggtagtaggggtggaaatttccctaccggggcgaggccctacccatacgggccaagggcgactgagattcttgccccgtaggtccattggacaggggggggggattttcacctgtgagaaaaccatgcggccttgtaaagtagcaatgttgtagatatagcccatataatttggcccgataagcccagtatacatggactatatataaatgaacaaaacctctatctcatctttcaatcctgccgctccaaccactcatgcatctcaccactagcgtgcgccgctcattcatccctagcccctcatcccgccctccacctccttccgcacctcctcctcaacctccatacaggacagcgcctggcattgtaccagccattgaacgcggtagggctcattcaataattgtgtcctggcttgttggcatgtggatgatccagccaggcccctgtcttccatgcgttgctgccccccagaagagcaaaacgtcatgccgtagttccgccattgtccctctaagcatcgtctctacttctctaaccaatggagccctgg

SEQ ID NO: 43012 - DNA, 587 bp, Oryza sativa
cctcagaacacttacatacatgtggctgggttgtagttcactctctagtttgactgtatagaaattgcggtcggacggcagttcattatcaaatccagttgcccaaactgttatgctcagatcatttgcgtgaaagctcttatctatctccaaacatagcctaaaaatttggtccaatgaaaaatttggttgtcagcaattgttatcctctctggactcaccgcaaagaggaaccaaattgcccacacaggcttaaacccttgtaaacatccccatcagggggcactactataattgcccacgtagaccaaaccctagggttgtaacccaggactacaaacctataaataaaccccaaaaggtgtataatagggatatgatttttgagaaatcaatatacaactactgtttcccgctctactcctcaagtgaagcatgtgcttcagcagaagtatttgtctttcgacagcataagtcatgtatgtttaatgttttgaaccagatttcaaaattttaactatcgattgctaaatctcaaaatttcaaaagcatgaccaatcgttgtcccaaacatcgaatatattttc

SEQ ID NO: 43013 - DNA, 727 bp, Oryza sativa
ctaagaatggccggtgaggaggttgagcaaacaataggcagcggagctgctcctcgagagtgcaatactcaccatcaagatcggcacactagcggcaacccatccaagcagcggcggcgactcatttttcctggcaccatcggcaactttttggggatgcggtcgatgaagaagggtgagggacaggggtgcaaaagcaggatgagacccttgttggccattgcgtcgccgcccccgatgaggtatggctccagttgctactggaggtggagcaggttaaacgatattgaggttgtcgtcgcaggttgtggccatcatccttgagctcgtcttgctaatgaactcccttcgatatgagcatgatgatgaaggagtcatcgacattgggaagccggcaacaatccattcatccaatgccacctccaaggtcttcaattgctacctcggtcgacggtcgcctcctgtgcctaatttgggggttaccatcactcttttttttggttgtgcagtaggatagtttcatgttggaggcacaccatgtggggcttcggttgggcctactgaaacactccctgagaaaatagtccggcaacaaggcaccaaggaacgaaggggattgctgaaaggggttcgtcaaccaacgaagcaagccaaagacaagagtcgaagggccactaggcccaacgaccatagaggcccaagtgcaccacaaggaagggatattggg

SEQ ID NO: 43014 - DNA, 651 bp, Oryza sativa
ccttactcacgcagcgattacaaggagggaacaatagtgaggagaaagtacgtgccgtaattatgctaattataattgactagaggatttttaaaagtttttaacatttaatttactagcattcctatgctaattataattgactagaggatttttaaaagttttaaatcacgcaagtggcaatttcatatgttaattagagtttttaacatttaatttactatcattcatatgctaattataattgactggagaattttaaaaagtattaaatttaatatattcttaaaactatcattcatatattagagtttttcacaatttaatttactatctttcatatgctacttatatatgactactcgaatttttaaaaggtttaaatcatgcatgtggcatttacatatgttaattagagtttttagcatttaatttaatataattcctacgctaagtacatatgatgattacaatttttattaattttaaatcatgcagtatgtacatacatatcttaattagagtttttaccaatataataatatcattcatatatatgctaagtatatatgattattggaattttattaattataagtcatatatttgcttataacgatttatccacttaatttcttacagacaaaaata

SEQ ID NO: 43015 - DNA, 1298 bp, Oryza sativa
aataccgtttagcagtttaaaaagcgtgctcgtgagaagttcccaactctaggtctgggtgccgaactcagcattctagaacaaaatccagaccaggggttggcaaaacaacggccaatgccccctatgctagctggcgagaaggtgagacggccttgcaccttatcaccacgtgtagatacaccaagagaatctggcaccttgtgtctagctgggtgggctaccaatagatggaaccaggtcaatgggaaggcccagtaagtgcaatagtggtgggagaacctagcaaacacgtccgctgtcccagaaaaaggacttcgatctctgatcctgctagttgtctgggagatctggaaggagagaaaccgacagattttcgaccacaaagagatggcaatgagtttccttttaacgaagatcaaagaggaggctagtctctaggcccttgcagtttattccgcgttcgtgtgtagcttaccgtgacttttttttttatcattaggggttgtattttctcaagctctattcaatgaaaaagcacactagcgctgttttccgttaaaaaaaaaaagaacacactccactccccacgcgagctacacgaatggagtagaaaacaactttcgtaccgagcccgaaccctccgagcggcggcggaccacggacgcgggagaagggcgccgagagggactcgtcgtctccacgaaggcgcggcaggtgaggggagaacgagtgggaggtctctcccgcgtgacagatgggagattagctcctgcatttgctgcttgccacaggaagcgaatgagatttgcgggcggcgatctgatatcacctgaactcagcaatcatcttccgcctaaaggctagaggtatgtgagtggtgtggtgcggccgatcgatttgtgctcaggacgccgggttgtagcatccgcctacccaattttgacaagccttaccgtgcaggcaccctgttcgacgttttgcccaggagagccttcagagtttggtcaagttactgtttacgtcggtgccatgctgtgatgatgacaatcatctttttcttgaagggtacattctgattatcgtgaaatttaattggctttttcatgacagtttattgttattctgatcttgtctgttatggtcatacagattttggccaaaagggactgcacaactcggtaaaaactcaaactgcacatcacagcgtggatattgttatatgtttgtcatcacccgcagaaccacaccatataattgggatgagtggcacttcacgtttctggttgggtttcttt

SEQ ID NO: 43016 - DNA, 616 bp, Oryza sativa
agtgattcttctttagaaaccatgtgttaacttaagaaattcggctacagcgcaagtgtgaatcgaaatgacaaaatagcacagaaggcaacatttgtgtcttccgttagacttgagttgggcccacatattggtaaatgataccgtgaaatcaacagatttgttttgtttccttgtggttaaaaagggtctatttctacagacctatagtgtttcctatatgcgtactatagatatcttctgtgcttttaaaactctcactgataaatactgagaactagtagaacctctggtttctttcaataaataaacagtccgcaatgggaggaggtggatcaataatgtgttcagattttgattagttccagaagtactatgctgaattgatctgttgatttttcacatgttgattactgatcagttggtaaactctgaatttatgtgccaaacatgcatgccatttaacttgcacaacaatagagaccacaaacaaagaacaaagtgatataatataatgtagaccacgaacttctctgaatattctcaacctagcattacatgtaggacagttgtcttccattaaccatgatatgtaattcttgctgaacggagctgc

SEQ ID NO: 43017 - DNA, 776 bp, Oryza sativa
agcagggtttcccaaaccgcctaggccggggttaccgcgtcccggcggtaagcacagttaccataaaaaaccgtgaaaaatttatcgaaaatttaaattattttttaaatttatttgaatttaaggatgttaccatggtatttatattactgtaccccgcggtaaacccggtaaccacagtaaccacgtggttaccgacggtaacataaacctgtacggagaccagcatgcctgcagtgaaaaactggagatcgagctcacaattatttttgttcaacaaactttccttgacttggactctcaacaaatttcgggtcaaacttttcttggcatttcttgacatagcctgtcttgacacttgttttattgcactgttagctaggttgcagaggctaagtaagaagtattggatccagaatagcaccgtgctgcacatggcctcatggttctctttacctcgatcgttagaattaatgcattgtgtatgtctgtatgaagcaaattggtgaggtaaccattgtcttccatgagagatgaaataggattgttgtggagttgtgcgcgctatagcctcgattcttccttattctattatcccatatgtacctcaggaaaaaataattaaaacatcatatttcttatgttctgtatataggtaaccaagttaaccgatatttacaataatcactaaatgtttctgatcttttaagttatagagattttttcaaatgttaattttttaagaaaattagccctaatatatatggctcgtttgt

SEQ ID NO: 43018 - DNA, 1487 bp, Oryza sativa
atgagcacagaactagaagcaatcatttgttaatcgctcgggattatactaattgaagcacagtaggatccaagccagcctcctaaaaacatgtggccagggatttttgggcagcaaaacccaattttttttttgtaaggaagatgagaaaaggccaaggtaaggtgagggtgggcccgtgatagcatgcagcagatctttctcttatttttattgtctggaaccctctggagccaagagggcaagaggaggaggagaagggacacgtgtcgtgaggaggagtgacgtgtccgccaaaaagcgtagagtagcaaaagaaagaaatcttgtggctgcgctttgctctcctctctccgatatttcccaagctggaccaacaacgcccacccgtttttgcctgcagctagactatgacaaaagtttatacaagtggataattattactagtactatatctcattttgtgtgcttaatcacgcaattttccctttgtggttttttcatcaaaaagaaaagaaaaatccagtcggttgtttctggtcacaaatatctctctatcgattcactcctggcctctcctgtttgaacggttgtggatattttcagcttattatctgtctgtcttctttttccccaaccccaaatagtaacagttttccgcatgtgcaaaacgccaaagcatatacatacatatatatatatatatatatgtatatgtatatatatatatatatatatatatgtatatatatatatatatatatatatatatatatatatatatatatagactgagaccttttcttttcttcctcccaacatttttttttcttccttccaacatctttgttatgaagtttttttttctctaaaaacatttccccccccccaaccttatcgtggtcatagtactgtgtattcactcatgatattttctttgattaatgccatgcgtgatgccatcaattccattgtctcttgacatgccaagagttcagagggacgcgggagctccttaggtaatcaatcatcctatgatgaggaagatatgaatttctcaataccgtagattaaagaaatgctgaagaacatgggtacagtttagccactcgaatctagaaccagccacgacacaaacagaattcaatctgatagtaattgatactaatataataaatttgtagcaacatcaaaagaggtgttcagatttcagctgctccgtttcttggccaagccaaactaatactaatctagtggtacagattcagtgattcctccttgtataggtctaagccattccaaaaacacatcacgttgatgcatctgccttttgcttcttgtccgtcccatggaatttcctcccggcttcaaccgcctccctgtcaatcagtttaagtaatcaacttcacttgtcgcatggaataacaaacacatacacacatgagttccaaaccaatcataacgacaccctatatatgtctatgtta

SEQ ID NO: 43019 - DNA, 2631 bp, Oryza sativa
actcttaccttgtttttcaatagatacaattatattttgtataaaactgtgtcaattaatctacatcaacacaatataattgttaatgtggtagtttgtaaacctcaagagttatctcgtactataatagggagatactaataacatatagtcagcagaggcagtttaattaattgctgcaagtgcaaccaaaaccattgggagtgcagggcagcatcagtacagtagcagcagggtcccaaggaggaagaattttggtggcattttgcgtggcacaatggtaatggaaagcatgaagtagttgccccatcgccattcacagcgactgccctggacctggacctggaactggatggatgtcaaattaagttgagctacaaaacaaaagctacacattatgtgcacaagacaaccgactgaccatccatatatccatcctattctattcctgcaaccaagcttcaggatatatcacacatctatagagtgtagtatttcacaatctatattgaacaaatctccaagaattttatccgtgtggtgtggtgtggtgtggcgttgctagctccacccggaactgaattaaatttggtatctgcctagcataataatgattaaataaccagaaaggtactggcagcataacgtagcatctgaacaaactgaactcagctgctcggtccatcttaatcagagtttcagctgaagaaagttaatcgatttgttaatcatgttgttagattctaaccaaaaactaaatgctcaagcctgctactgccagccgctttgcttgacctctgcagtatgcttacgcggattacagttaagagggaaaacaacaggttggagaaacgtaagtgaattaggcaggcgatcgatccagacgaaaggtggcctgagattagcacactgacacgacatctcggctgattgcatgcgtcactgagctgcacattttccatcctgatatcgataatgaatgtactactgttgtctctactcatctcacaaatgcagttggattatatcatctcttaaattaatggttagttggagaggctgatggagatatatatcttcttgtgcaagcagcctaggcaccaaaaaaagattccttgctttactctcatcaattcatctatctgatgatttggtttaagaactggcttaataattttcatcttaatttccagagcaaaggttaagtagttatgatttcattcagatgaagcaacacagacccgtcgatcaccacgaatgcgtcataaaagggggggattaatgaaatggaacacaccatatatatatatatatatatatatatatatatatatatatatatatatatatatataaaggacaaaaatatatggatgatgaatactatgttttgcactggtatgaaaatgtccatgcattattgattgaggtactgcttttgaatggcagcagcatatccaggtcactccatcgattgtatttggtcatcttctcctcctggaccagctacaacttaacttgatagctcaatccatatgttccacacatacttggggcttttggtttcgtatccgaccttgatcggcttctttttctttttcaacgcacaaaagtaaagaaaagaaaaaaaaatttgtttgatctgtatatcctgttgcgctgcaattttggtccggccatagaaagaaaaggctgaaagcgagacatgaaacacaagcacttactagagccacaagcttgagattggttgtaatagttccctctatctaatccgtccaagcatcaaaaagggaggagctcctgctgctgcagctagctagatagcaccatcgaacagtctgtgctcctctctattactagcaactaattagcacacgcaattactacgcaattagcagtagtgctctcttcaaatgcgtttgagcttgttcagaaaggaaaagaagatcgagtgtcattaggtgagcactagctgagtcaggctcaggcatgcaagaagcatttaattttttactagtttagtttgctagttgagctcagcatgaaattatatatattcattcattgtgtgtccgttatcaataaatgtaaaaataaataaataaagacgagcgatggtactgctgcctattgtgacaggagtatatatgctatatagacaggagtccgtccttaattccgggtaatcagcaaaatgatgactttgacgaccaaagtaatcgctgcaagtgcaggatgaaatcaatcaacgagatatataagcagataatacatacacatatagtaataatactatagattaatagatgggatgtgaatagagaagtagtatagtaagtaacagcagtagatggttgctgcgagtattatgtggagaaagaggaaacggtagcaatgagtcgcaagcagcatgtgcaacagaaagcgaagccgcaccaaccgcatacaaccggtacagaaagaaatatggaatggcaatgaaagcatgatcaacaagtgcagttgcagttgcagtgtagagcaggcaccggtcgaattcgagcctaataacctgcgcttctcttctcttctctgctgtgctttccatccatccactcccacgaaccgcacctcaccttctttctctttcat

SEQ ID NO: 43020 - DNA, 737 bp, Oryza sativa
gagtgagctagatgatgagatgtgttatatagagagaaagggggagagggagattaatttgatggttggtattaatcaactgttgttgttgacttgttgtatgaaattatttggaaaattaatcgcaaggaagaagaatcaagttgaaaaaaaaatccaacgcatgcaatagcgagtcaacaaaaaacattgaccaccgtacccatgcaagcgtgcatgcggatgagaagggtacagctctgctcatttaatgcacatgcatgtgagtgtgaggcgccgcagacgcagtttcttgaagccgccagggagccagccaagccaaagtaggagtaggagataaaatacaaatactgtagcaagcacgggaaagccagggagaatgaaatggtcaaagttggcagtgccaaattgccaaacttgtgcaaatggagagtcaacccaggcctaccacgcctgtgcagggacagagcaccttattgatctaggacaaataatattcttctgcttgcttattgatcttcttgtcccacaaatatccagttttctattcttatcttgtgcatctactcgctccatccacaaaattaagctttatcatcttcgtttctcttctatgcttaagtagagaccatgcctccaattgtcagttgcaaatgtcccgtattagagcttggctatgccaaaagtttagccgagcgtcgaagcatagaaaacagtcttaatgaaaggcatgatca

SEQ ID NO: 43021 - DNA, 1237 bp, Oryza sativa
ggagcagggggacgccatagatagctggggaagactagagtgatcgatctcttcgagtcgaaggaagaagacgaccaaacaactactagtctcttctctcttgtaacagtgttaactccgattagattagaccaacaagtctaacaacttagttagttggtgactttgttgttggcgagagatatacaactctttatcccgaaattcattcaaatcttcacaattttcactctaaacttctccatttagcatactatctccgtctcaaaataaataaatctattatccgtagtaataaaaaaaatacctgtgcgttgcaacgggtaaaaacattttttatcatgtacattaagctcccttgattttggaccgaatgcttccttgtttttggaccgaacgttcattccttccttccttttcagctgctaccttcactgctcggcatatctctcttcggctcagcccacaagtgaagctgtaggctcagctcaaacagtctcgtgtctggcctacctcttttcagctcaacccacaagtattgttgtaggccctgctcgaacagtctcatgtccgtaccatgacgaagtcgatcctctccatcaaatgcggtcgaatctttctcaatctccaaaattgttgagatattttgatccactcgatcctcttttttgattttttttatcaaaatcgaagtgatcctctttttcgattttttatcaaaatcgaagcaatccataaaactcaggataaaaaatgacgaactgaaaagaaaattctgaactgaaaagaaaattcaaaagaaagtagtggagaatcgatttttgcaattaattggatgaggcaaatcgacgtggcggcggcgctaggcatacatagctgggcaagagtgatcgacacaaatcaaaggaagaagaagaccttctcttctctctctgtaacagtgttaactcccatcaaaggaagagttcaccagcaagtctttgctgttggtgatagacgccactacaactctttaacccgaaatccattcaaatctccaccatttacactctaaacttctccatttagcatattcccttcgtctcttaataaacaaatctaatactatatgagtaatatttgattattttagtacactttggtctaaaatattcgatattcgtgataagattttcaaatttcaaccataaaaaatctttaaatattcagtttaaagggggatcctctagagtcgacc

SEQ ID NO: 43022 - DNA, 808 bp, Oryza sativa
agactgtgcacaagtgcagtgatgatcctggccctggccagtgtaggggggccagctaaaacggtggcaggaaccgcagcggcagcatctttgcttggttattggattcttggtgagtgctcctcctcctcccttactcttgctctgcctgcgcctccgtgtcttgttgtcttgggaatacaattaaagaggtcttctttctcactggtgatggattattaccagtgggaaatgcattttattagccactagtagtagtagcacctccactcttgaaaactggtgtccttttcctgtcagtgttgtctctctttagtttaaataaaatggacaaatgaaaccgaaaatgcaacctgctgtttcttcggctacagctttatttctgaatgagcactactacggctgtgtggatctaaacttcactacttttctatcacatcaacatgtcatacacataacttttcagtcacatcatatctaatttcaaccaaaacccaaactttggatccaactaaacacagcctacatctatttttttttacaaaactcttacaaataataatatcaaccgtttaacttaaatatataaaaattatagataacctgaatgtatttacagcgtgacatgtaaatggcccaagaataatttatattaaaactaatctactaatataatagatttgctgtaagattgttttcgacatgttagcttctccacagtagcataaaaggcggagcgaaccaacaactagggcctgtttggtacagctccaactcctaaatataactctaggagttaagtctggag

SEQ ID NO: 43023 - DNA, 760 bp, Oryza sativa
agaatagtgacgatgatactctagatgctatgatattttttgagatgtcgtattgtaggtttcatgttaatgggtgttctggataacttctgtcttcgacagatcggcttcgatggctatggcctatagcggctcagttactctctaacatcaatttttgttttggtttgatgcctgttctcgacaatgatgtgtgtggaattcgatcgacgcaacgatcaaagttgattttagacattctgatttttcaatatgagaaaaacacaaagactacatacaacttataaagcattgagaagaaaataatagttatgcgtattattgtcaattatagatagtaagtcactatctttaaggtattataagttgttttattggttttaatcaagcagtgatttaaaaaaacctaagtctactgtaaactgtaactaaatggtggtagaacatatatggcctcatcagatggccagatgctttggctgatcagccatttaagcaaaataagctaaccaatatacattgaaatttagctgaattagaggcagttttggctgatcagccaaaacatttggccatccgatgaggaccatattatacacctattataacacaaatcaaacacaatatcgttttgtctaagaaaaaccatattaatgtatactctcatagtagggtatgagtattggaaatatcaaaatcacttacctattcattcattttaaaatataaaaaaattttagttagatatgatgcatattag

SEQ ID NO: 43024 - DNA, 667 bp, Oryza sativa
acaagggtcaacaaagtacttgaggtcgttgcatgcgttgatgagtcgtattaacgatcacttcttctctttatttattgatgaagctgctatcttttgcaggaagccggtcggttatccgccgccgaggatgaagagctgttgaggaggctgcgactgctgcggccattccgccgccactggaaaaaagatggacgacgacgaccatgaccaccacggcaacggcaacacccccttctccttggccttggcgcgctcctgcggtgaagttcatctcatcgggccggcttgcagtttagcccagcccagcaaggcccattggcccactgggagtgggaggaacaggaaaccgacctcctcatcctcgaagacgaagacctctctctctcgctcgcctggcgccgccttcttccaccccactctttcctcttccgccgccgcatcctcaccaacccccaacagccctccctccctcctcgccaaaggtaaaaaaaaaacttagccggatctctcatctggagacttgctcatccttatctatcttttggggatttcttcatctcattctcatgcatggtgtaggccaaagtttattgcgatggatctgatgtttgcttacatcctttcctagtcaatttcctactctgcctaggagtatattagagcg

SEQ ID NO: 43025 - DNA, 1244 bp, Oryza sativa
ctgccgccctgccatgcctactgatcactgatcgatcgatcgatcgatcttaatttggtttgctttctatcttgctagtgctagctatatagatcgatccatatgcaagctgagtactgcaatatatataagctgatgaagctgaggtgagctggtaactcgatctatcgcgcgcgggacatcggggttctgttgaacatttttaggaacagattaacaaataaccaattaagctgtacgttatccatctatctatctatctaaaactaaccagctgcaactcctcgccgatatatgcgtacgtgctcgccctacgtctcaaacgtacgtacgattcatcactagtttcatcgctcgcccaatcttggctggctgctccggcctcgtcctgcaactgatgatatatcaaatcaggatttgatttcatcatatttatgaggagaatgcaattaacatcagctcacgtgattaattgtctctcctaatttgctgcctcatcaatccatttacctagctgcctacaagcggtcgagatccacgattatttaatttacttctcattcattggatagggatatagactatcatttcatttactcctctcgtaatttgttgcccgatcaatcgattaacctagctgttcctgtctctatacaagcgaaatcgacggacgatttgttatttactcgattggatatggattccatcgtttcatttttttaggagtagtttgttgctccaatgcatttaaacatacagatacagatgcacactttaaaacctaaacaaaaaagagaagaactgactgtctccctccagctaacagtacgctcaactgccgtcaaacacgcccaaaattagtccctggttacctgtgttggccatgcctttttttttaaacacacattttttttagagaagggtattttttacccggcctctacatccaaccgaatatatacggcaattgaaatagggaattagccccacaaataacccaatctaaaattcgctccataggagatttgaactcaggaccttggggtactactcaggtcactgtaaccactaggctacatgcacactcacctgaaagaataattagccataaatatgagtacccgtgttaaggactaagaataattaaccgtaaatatgaatacccgtgtcaaggatttgggtgggttggttccaccacaaggaagttaactagttgagctacgtttacttcgcggcaatgcaat

SEQ ID NO: 43026 - DNA, 2012 bp, Oryza sativa
cgatttagcagctgcctgaaggctggaggtaggagaaggaggcggccggcttgcttggctttagcttggaatgagagagagagatggcttgctttggcttggctggccctcccctccctccccaagatcacaacacaattgcaagcaaagccagccagcctctccctccctttacctttgacaccacgaccacttgaaaaccaaaaaaaaaaaaagaatcgtgttttgcgtttttcttttttttaaaaaaaaaacataagagtagtacgcggttgatggggttggagccacgtggttgctgtgctcccatacagtaagtacttcatacatacagcgtccgtctgcttgtcttccctttctttctttcttcaaacaccatcgctcggctggaatggatgtacagcaggcaggcaggcagacaggtggccagccatcctgaacgagtcaactcacctactttagcaccaacctgaactatccttttacaatggcaaacacattaacatgtgtgacattttatatctcccatacttaatcttaaccgattattatgatgtacagttataactccctattatttcagtataacttatctaattagaatgtaattattactgattattcttgtttatttgtttaaaaaatattcttttacctgtttttatctacaatttcctgcagcaatacacgtggttagtactcctacatattaatccttctatatattttggtagataaaaactactctgtagctccagttccattaaattccctcaaagctatcttaaaaccaacccctattttgatatctaatattgaatttaccgtgtttttatattttcatttttgtccctttttttaaaaaaatgaagcaaatgtttaccccttttatttaacagaagatagtggatccagaattgttgtgctaaataagtgtatagacttttaaaatttgttgattgacctttgtacacctggtgattttaccatagccaaatctatgcctaaccacacacactactcgtcctttatttgaccaagtttaattactcctacatacagagaacaacactacgacgtgtgatgtgagtgagtcctgcatgctctttctttcgttgacactttctcctgactaataccggtcaatcaaacttggcttactactataccttggagtacgtatcatatggatggctacctaccaagcatcaccagatcaatcccctctatctccccccccccccccccccaaaaaaaaattaaaaggaaaagatgaagacctagcaaaagcttcggcattaatattaatccttaatcatgacttgtgagcatctgcagctccttccttcttgcagctctagcaagcaggcctgaaatgatgtactactcatatgtactcgtatagcaagagtaagcatgtaggcataaaacaaatgctgctccttggagtgcctattttcttcaaaaagtattgacaagcactagtacttaccttgctgtttgacaaagaatcttcacgcttttgaagctatataagagctggtgctttacatcacatggcacacacatgacaccactgcttttgcactgtcttttctgcattttccttctctccttcctttttcatggagagcaaattatgtcgagtgcatccctccaaaatgtttggtgggtatcattgcatataaccataagatttggaacagtatttctgttggctatacatattttgggttgccctgcaactttctctgctacagccgaaaacgacatgtttctttttccttagttaggtgcagacgcggttactaccgcaccatcatatatatgatgatgatctccttagttgtgctacagatcattggcaacgttggatccctgactaatgatcgatcagcaagaaaataaaacgcagtgcaccagttgttatattcagagcttgtgaccgtccaaagagctgaccagaaagctagtccagagcacgtgcaatcattcaaccttgtatatattct

SEQ ID NO: 43027 - DNA, 728 bp, Oryza sativa
tacagagtccatcacatcgccgcgcgccgtcgccatcgcacgcgcgtcgccgtcgctgtcgcgtcgccatgcgccccgcgccgcgccgcgcgccgccgctgccgctcgcccgtcgcgtcgctcgcgccacgcagccgtcgcgtcgcctcgcgccgcgcgcccccacctcacgccttgcgccgccgtcgcgtctcccctctccccattatctcttcccctctcctatataaaccccactattcccactctttccctccatcctcaccccctctcctctacccactccaccacgccgccgcctccacgccgccgcgtcgtcgcatagagccgccgcgccgcgccgcgccttggccgtgccgtgttccccgccgccatcgcagtcgccgtgcgccgccgccgtcgcagccaccgtgcgccgccgccattgccgttgccgccggtaagccgtgccgccgccgcctttttcctttcctcagccggtcgcggtaggcaggagagaagagaagggaagaaagaaaggagccgggaggagagaagagaaggaaaaaagaaagagaaagagagggagagaaaaaggagagaaaaagaaagagagggagagaaaagagagaaaaagaaaaaagaggagagaaaaagagggaaaatagaaaagaagaaaaggagaaaatagaagggaaattgggggagaaattaggaggatttaggaaataaaaatggtcggggttaat

SEQ ID NO: 43028 - DNA, 1861 bp, Oryza sativa
gtaatagtatttcggtcgaaatcccgagttaattataaaaatatgtttcttgatcagattagattaaaattggtagtaatttagatataattaataactaaacaattagatgaattcttatagattattatagattatttttggtaatcttcataagtcatcggttcacggtagaaattcggatttaattactaggaatcttagccgtgtattatatttaatcgtttagtcatagactaaattaaactgtataatatttctaggatttcgtccgatatttagctcgtaatagaaatttctaacctattatatggatataatgctcgggaagagtaaattaaaaacttatgacaacaaaatatttatacctgcaaaatagtttaagccgaaattgggtttgccgtagttcgcagatagtaaagttaataaaaaggaatcgactttcacattcgactttcatttggatttttatttgaattctaaccgaattcaaatcaatttttgcacgtaactatagagcccgagggagttgcggatccaagcgaaggccaagacccgcaagactctgagcaaggcaagtcatcactattccttgaacatgttgatcccaattgcgaaattgttttgtttacaaataaaattgcatgcaatgatgaacatcctacttgtgattatgccatgccttgattattgtttacccttaaatctttgtaaccatgtttacgtatgagtccctagtcaattatgacaattgcttagaaatgctattctagaatcatgcatactcatatttatcaaatgctatatgcttgggcaattaccttcgggaaggtaattgagatgcggcatgtggagacatgagcgccacattgccatgatgttgatgacatgatttgtgaaaggagaaataaaattaaaacaactgttttcgactggggcagacggaggatttgggtggtatctggaacaggctagtaccgtccccagtcaattaaggaccgagccatgaagttaagcatgaaacgacccccgtacaaccgtacttctcgaatgggtatagacctagcggattagatagccgagcggaggcaatattcctgcatagatggttcacctctgagtgaggcaggtgcgctacgatgggacagccgttgaggtagggccaagaggcgtgccctacatcggtgttgccattggtaggactgccatgagtgtgtgagagagagaacttaacttgaaccataatttaatatgcgtgtgagacttctctttccccgggagcgccagaactcctctcactgctagaaacatggacacctagagtgcatgaggatttaagttcatggagcgggtactgccaatgcgaggttatcgaaaagctttgccgtgacgcgtctcatgtgttgggacgaggctcatgtgttgggcagtcgcggagtgcgggtaaagtgtacatccactgcagtgtgagtaaaccaaatctattcgaatagccgtgctcgcagttattgagcaccgggacatgtattacacttggctagactctaaaattctttaacttgtgtgggatgggatatcgcatgacaatttttatgctgatggagccacttcctgagaggcgggaatgtggacgtcctcagaaaaccataacgactcaatggcgggaagctatccttgggatcacaatggatggtggacagaaccgtcattgtttaatatgaacattggtattaaaacttgaacagtctatgctaggtcttaggcttgtgaaaagaattacaaaacttgctttgtgcaaaagaaccatggccatcctttgaattcctctgtcatgtgcatcattgctgtgatggcttgctga

SEQ ID NO: 43029 - DNA, 934 bp, Oryza sativa
tggggggggcctagttggggcgtgcgcgccccccacgcgcgtttcgggactaaagataggaggtatagttaactaatcaattaattagttttagataattatagcttaagataatgacagtagtagttaggattttctttttttcacaagattttttaactaacaaattgaaaagaaatctatttctgaagtcaaattttcaaaattttaaatccagatttgaaaattttaactcgaaatttgaatttttttttaagtcaaattttaaaaacttttaacttttcatctcacatttgaaaaactttcaactcgagattcgaaaattttcaagtccagatttgaaaattttgaaaactttcaactcgagatttgaaaactttgagctcagatttaaaaactttcaagtccagatttgaaaattttgaaaactttcaactcgagatttgaaaactttgagctcagatttaaaaactttcaagtccagatttgaaaatttttagctcgagatttgaaaactttcaagtccaaatttgaaaatttttaagttaagatttaaaaattactagtaaactaatcagtagtaaaaataggagactaatcattactccctccgtcccacaatataaggggttttgagtttttgcttgcaacatttgaccactcgtattattcaaattttttttgcaaatataaaaaatgaaaagttgtgcttaaaatactgtggataataaagtaagtcacaaataaaataaataataatttttaaaaaaattgaataagacgagtggtcaaacgttgcaagaaaaaacttaaaatctcttatattctaggacggagggagtagtaaactaattacgattttttctcccgtgtggcagaaaaaagaaaaaaaaaaggaaaaaagaagagacggcggtgcgccaaaagaaaaaga

SEQ ID NO: 43030 - DNA, 1238 bp, Oryza sativa
ttatggtgtagtagtttcagaagtagatatctgatatcataatgcactattacagtcagtcttaagcattcatggatgtttaagatgttagtctttcagaaatcagaatcacctggatggagtaccttaatttgcctggcttacaatctagaatagtgtttttgcttgtgaaatggtaggtaattatggagacctaagagatggattccatctgtgtaggagttggaacttggatttcttttttgctataatactgtctatgttgctgctaaaaataatccactgcgtgtaatagctacggagtacaaaagcaagcccaatatttttttcagcttgatcaactaggtacaagatggaaagctagtgcatgtgctgtttgcagctaatgtttaagtaatgtatactccattttacacttgtgaaggtctttttaagtgaaatatctgcggctgtcgtgatgcccgtatatacggtcaaatgtattgaatatcagaaagcgaagggtataaagaaatggaggaaaaaagaaggcaagaaagagatgttgcataaacgctctccattaaataattcagctttcatccgtgacgtttcagatgaaagggcagggaaccaaaaggcaggcaaaggtgtgagtgaggctgactagcatttcgcttgctcttatcatcttaagatgatggccggtaaacgttcctgaccagacaaggccccgtgcgaaaattcgatcaatcaatctatgagtggtaacaggaatctatctgatagtatggtatctgtcaagagattagttacttgttgtgcttgtcagcttcatcctctaggtaaagcctgtggtgcattgcatatgtacaaaacctcagcttgaagcttcagttgggaaaacagaatggtataaaacttcagttcagctgggagtacaaacaggtagcgtataaagtagagtagtacacatatacacacacgcagatggagtggttggatggatggatggatcatgagcagtgatgagagacgtactacgcattagcacttgcagtgtcaacgtaaagttgatggcactggcgccttgcaatttccctgtcctgatggactctctgattctacgcttcaacgactttatgcttgatgtggttatccattattataactaaatgttgttgcaacgcctgtgttaatttgtttgcctgtcatacatacatacatacatacatacatacatacatacatacatacat

SEQ ID NO: 43031 - DNA, 709 bp, Oryza sativa
ttacttataggttaaatagatgataactaatggatttttgtgtcgtgatccggtttatcgcatctagagatgcaagtgggtcaatttatgaactcatttataggttaagttaataggtaaccagtgagtcaaacccgcgggttacccactaattttgcctataagcggatttgctgataagcccgcttgtaaccctagtgagttaaacccgtgggttacccactaattttacctataaacggattcgcggacaaacccgtttgcatccctagagaggaggggatagggaagaaagtagagagagagaggtgggatggcatatgccccctctctatttttcaattcctatgatgattggactgacggcaatgttaaccaatatccccttaatattattttagaagtcatttttattacttttaatagttaaaagagtcattatatctgattttagtaggtaagatctggcctatatttaagagagttaaagtggattttttttcctaattttgtttcaagtttgtgggcataacaaatccctgggtctttctccaacctacattaaaagctaatgctggaaagtagagtatgatgagaaaaaaaaacaactctaaaattaagttagaaataaaaatttggacagaactaatatgctgccagctttgccataccatgaaataccggtgcttggttggtttgcttaagataa

SEQ ID NO: 43032 - DNA, 740 bp, Oryza sativa
gtagcaatgttatgggactattatcacgttagattccccctcttgtatgatgtatcaatcacctttttattgagtagcccaacgacatatagcagttcacatgttcacatttatttcttaaaggatgaaataatatatttgtaaccggacacaaaagaatgggttgtttggttcatgtgctatgagaggacaagcgtatactaatatcctcttctggaaggaggaagaagaagatgacaaggtccttctcctccaagaagctgtagtattattcaggtttaaggtactgatctaatgaagacaatctatcatcaaattgagctttgatctggtattgccaatgccatattattattccgaggactttgtagtttgacctacaatatgctttacaataatccaatgtactactccatttaaaaaaaaaacctaatatagtattcagattcatggtactctagtactatatttgttttcctttcgaatgaagggagtattattatttgcccttatcaaattaccaaaatgcctctatacttatcctaaggccttctttggttaatcccatcgggattaaggtgcggaattaatcctactcaatcccttctaatccctgtctcacgcggaataatagaacagtctagagtgagtaaccaaaggtgcttggacatgaataaaaggatagtaaaaaaaaactatcaactatgaaaataacacacgtgatcttttctgcttattca

SEQ ID NO: 43033 - DNA, 1157 bp, Oryza sativa
ctactgctatattgattatatatcttataactcaccgtcacatgattcctttcccccctagtttgtcaagaagcatggaaacgaagggaaagatacatcgtctaacaccgatacacacaccgctcagctattatctcaggtcaaccatctcagacaggagatacaatctctaggatcaaggcctgttacagttgtcaccaatgctgctagatcaggtaagttcctgctgactagttactatgttttagttacagacttatgcatgggtcacagatcatacaaacataaatttcacatgacactagactttgtgtatgccccgatgtcgacatctcttgctaagaattaatgcgattttagagtgttagatatttctattacctttcgatttttttttcagacttggtctgttgtttttatatctacatgttcgacagagctacaattgcgttgtctgttcatatacagagtataccattttgcgattcagttcacatgttcttttctttttctttccttattattatttgtcatggtcttggctatgcactactgattatcattatattattcgctgcattataaaggttcttggacacgtgatagtttttataattgctaataaactttcatcatgctcttttgcctttaaacatacacaattacatatgtttgcccctctaggttacacacattctttctcaaatgtccttgaacgacattcatgtaaatccttcttctgtaggacctggtacatttactataacagcggtggttgttgctggggctgttggctacgcctacattaagtggaaggtaatgtttgattctttcacctcaatggaagtacagaatgaggaggacataatctttgattattctagttgctatcttgatgtttattgttctgtccgtcattctagatcatggacgcaagtgcatattattacaatcctatctgcttgccatttcttgtttcactgttctagctagtttctaaagttacatagatttgcagggctggaaactttctgatttgatgtttgtcacgaagcgtggcttatctgatgcttgcaatgtagttggcagccaattggacaaggtttcagatgatgtcactgtaagtttttaacttctttcagcaacgctgaactcaa

SEQ ID NO: 43034 - DNA, 709 bp, Oryza sativa
ttgcaagatgctagcgctgctttctcaaaaccagattgtgagctcccatctccatcagctgagccgttgctacctactccagtatcaacactggagtccttgtcatatactagttgcatcataggcaatccatctttctgttgcaagtgattctttggcaccatgacaataccgttcttaggagcatggtagttccctgatgactgagaagtaccctggtcagaagataaacttgtttgttggtacagtattgatgtttgcttcttgtacttatatctggaaaatgcttgacatgagtttagtgcatcattttctttggcatgctccatttcaattctctcgtctggtgaatgctgattacatgcttttctcctctgatttattttcattgaccttgttagattatgttgtgcaaccttgttaatgttttcagtacatccttgttctgaatagctgaatcaaccatacatcctgctctagatgtgttctccacattaagtttttctactttttgccacacagaagttgaactgtattttccactatgcttgttcttattagtgcctattactccattagttgcagtcaaactgtagctagatatttcctttaatcttgttctgctcctcccaggaataactggaagagaagtcttgctgctgcaggcttcactactgcacttgactctttcagtatgattactgctatc

SEQ ID NO: 43035 - DNA, 691 bp, Oryza sativa
ttcatgacaaaagaagaaaaagaacacctacgggacgggattgtgatatgtccagtctgaggctctgagcttcacactgtgtcactgtcgtagagtaaacggcataaattggctgtacctgctaggcagagagagagagaggcccgtccagcctgcaagaaatgagaaatgcatgtgactttctgaattgcagcgctgatgtgttcgattcagtttaggaccactcccggtgcaggccaatagtaggagtattacctttccttaccaatttgaccgataaatgctggaaagaacggccggtatactcctattgacatttcacatggcatttgcagagcttcagtgatgatgggtgaacagcctacagtttacagcacagagcctgtagtttacagtacagagagtacccaataaaacgagacataaatattgcggcttgcagaaaatgcagtttggaccacctccacaaccttctgatctagatatagctgttgctattactgatactgaatggaaaactgaaaacaaacataggttaagggttggtttagttcacgccaaaattagaagtttgattgacattggaacgatgtgacggaaaatttggaagtttatatgtgtagaaaagttttgatgtgatgtaaaagttggaagtttgaagaaaaagtttggaactaaactcggcctaagg

SEQ ID NO: 43036 - DNA, 680 bp, Oryza sativa
gaggaatggaaatggaggggtcttttgttggtgcctttgcaagttggctttcctttaattgcttccttcctttatttagttaggaggggagagatatccccccattggctaggatcacaaggtgggttattttaactgtgaatgctaaataaatggctgcaattaagaggccagggcaaggccaggcacaggtagctagcttctagaaattgtgcagtgcctggaattggtcgcactactgaggaaagttaaaggggatgctaaggttgtgcatccatagttgtgctactaattaatccatgtttggtctcttaatattttttattcatgaagaactgatatatatactttctataaaatatatatgccattactcatctttatatttttctagcaatttttagaattttgtattaatttgcaccaacgttacttcaaagtttcaatcatttgccatgatttatatattagacatatatagagacatactgaaaaaaataatcacatgcctagttcattaatttcacattgaatttttttcctctacttttttttttgcatatatataatactgcatttgtcccaaaatataatgatgtcaaaagttgctatattttggaacaaatgtactatatacaaactgaatactctaatttaatttaatcttactcaaccataaa

SEQ ID NO: 43037 - DNA, 1287 bp, Oryza sativa
atttcttttttagatagtggaaaatttaagaactgcatactagtttgaatgtgactatttgacttgtaaacatgtattcttaaataagaaagcatgtaaataattaaaatagttctaaaattaatcgtgctataactatatgatccaatttatatctagtactataagtatttgattttaaactagttcatgattctttttctattgcgactaattatattttgcaagttgatcaaccaaaattggatcaaaattctggtaagtctctaaactaataagtactagtataatgctaaaacacttgttctaatctaaaatagtatcaattacaacaggtctatattaaatttacagtgtagtaaatatgttattctatcaaaatactactgtaaattatgtaaataagtaaactttattccccacataataaacagtagaagtattgtgatcaccttttttgtttgaatagatgctatccattcgaagcaactctgtattctttgaaatgtttatttcctccaatcgacctgtattttgaaattttgatgtatgataatccaaacaaaattcttaataatgaaaaatgaacaatcaactaaaactatagatttgatgagctaatcttggaaacacaaatatgaattacaatgtttttggcaaacagcgtggtagaagaatgaccagtaattttgttttgaagtgagcaaccttgcacattttaattattttcccaaatgatgataattaacatttttagtaaacacatcagtgttttgtgggttatctggtgagaaatactaacctatagttaacgtttgttttcccatagcattgtatctttctgtgatatgtgaaagtaagtgtattagagctctctagttttaactttaatatgtggaataaactgaaattgtcattttgattcatgcatttgttgtctatggtattcaagttcttatgcatttgatgcatgtgtcttcatacaactattgatttttccctccttgtttctttctttcctgcaaataacgtattgtaattgttaaagttgacttatatgatgcttctatcaaaattatagtgtttttttcctgtaattgtatcacatatgtactgtaattgcataacttttgagtttatacattaggatgaaaatcgaatggtactctattggtgctatatttgaaaaataatatggcagattcctgaaattaaaatttgcattagtaatcagattttgcagatccctgaaactttgttggcaccatcatgtttttgaaataaaaa

SEQ ID NO: 43038 - DNA, 3674 bp, Oryza sativa
atagacattgatatgtgtaacactaagaaagcggaactcacatataagtgaccgtaatggtatagtgatattatggtagaggatcctcacccgatttgttgtcctctttatttccctttttttaagaaagatgacgtgtgtgacttgttagttgtaagatagattcacttgttttaggcgggattatttctcacactacagcaaaagagggggagcaaacacctgattttggtaaccttggtaaagactagaaatgtttctattttctctcaaaatgaaagatagcgaaagtggtgatttggcaaacccaattcaatggcacaagggctttcgccattgtgaaaaggtgagctctcagaagattttggggtgtaggtggatgcatataaatggatgaggttgtttattttgaagttattggctaccatctttgttgctgtagagactaggttttattctattgttaaaaaaaacttgattcaagtgtaatcaactaagagttgagaaggccaatacatatttattccttaccattgtcaatgtacatttactatgcaaaaaaccacatcactaacatttaaaacaagagaaattatatgtttcgttattgacaaactaccgattttaaaagttgccattagaaagctcgagctctagaaaaatatcatcgtacaagtgttttttttctcgttttgtcactgccattaggtttccatccataaacctccattaagtctttagaaaaccaatttgcccctagaatttgataaaaactgtatgaaaaaaatgtttgcacacttaatggagatctttttatgagcagaatggtccttttagaagaatgcaggtctatggatggaaacctagtggcgatgataaaaagggacagaaatgcttgtaccaaggtattttgtatttcgtagaactcacgttcgtcgatgccaatttataggacatgtcgcttgtcaatcgtaaaacgtagaatttctcttacaacaaacaatgcttacttttttcatcacaaatgtagttagtaataaaagttgtaagccttgttattccttgggtttatcccgagaaaactcacaaataaattactaagtctgagttgagctactagctatagtttttttttttggaaaaaaaaaagggttggcttactaactagtgtcaacatcattgagtcacggtgatgagaatgcaatatgttctgcaagctatgctaccttcatatagcatgcctctacccattacatgcctatgtcataattttgcacctatgaagggatgagctagatatacttaagttggcactacttcttaagataactccttatataccatccaaagctaccttatatcccaatagggcaaaaccaatggtagaatttgcttgcacggtaggcattgttaggtctatcaactaaggaaacatttcgcttattggaaggttggttgaagagtaaggacagaggagacaccactacaacataaaagctcatcgtggataggctatcaagaactatttgaaattcctcttatatgaatatagagatgcttggttaccatgtccatctacatttgttgataccaagctaaagattgtctttggtgagaatattcggtacttataaggttcatcatcactatatatagttaatgtaaatctcttcttctctcctgaagccacatcatcctagttatttgtagcctttggatcattcatctacgatgtaaattgtctatgttctctaggtatacacacatctaatttatttctagcatttttaatacaccatctcaattatttgtaccctttgatctcatatgaagatacattatcttaatatttttagcatgatatataatatataaatgatatttacttatatgatgtccaatcatttaaaataaagcaaatctaatttgcatctcatgtttacttatctcatacattttttccgcggcaacacgcatgggggttcccctctagtatacctaataaacacgaccattgtttttgtatatgcatacatgcatgcagatcacgcgaattataacgtagaggatgaagcaatgtgcttacatgcaataatggtgaaaaggtgtcactaatggaccaaaatgggaatgcatcctgctaagtgctagctaaataggcaatagctccgataacaaagttactgcaatgtacacatgcagtaggtagttttttttttcctggcctgtttaaattaaaagcctagctaattaaagccattttcctgtactttgtgccttagttttgctacgtataactacaaatataaacttgcctaactgatgcacagtaaaattagagaaccttgattgtgttttcttttaagataattgaagtgaacactcccgctctacgtataactacaaatataaacttgcctaattatctcttattacataattcactcaaaacaacggagattttaactgaaaaactctgatgtgtccttactcgaaaataatttcttggtaacagttgagatgatgtagacgaaggaaaataaaggatgttgtcaacacgatgaaaatattgaacatttataagtttgtgcatgtttgaaatatcaaacagtattagtgggaaaattaattatgcatatcatagacggtcagatatcgggaaactatccttcagacatactgtcgcagaaatttgtgaattctgaataaacagcactgacaaatttatctccaccggaaaccaaattaatcaggctttcatctgtgcgatgatcaaatttatcttgttcaattacgcttgaaaagagataaatagtattccggcagggggtgtagtgcatgtgcatatgtccaaccaaaacactggaactaacccaaatgaatagatgatgtcaaaggattatttcgatctctgttcttatttttagttaagtactgcattaattagaacaacttgctagctcctgcatgctttttttattaatctctgttgagttaatttctctcaggttagagtttagaaaggttagttctctgttatatatatgaagacgctacaaaactcctaaacaacacaaatgacagagatcggcagaagaagaaatatgtttagttgcagtcatcaaggcataccttcagctccgagttggggtttgcgacgtgctgctgctcctccttagctcgcccatatcgatcaatcactgacttcatgctgcacaaaacgaatggccggcacaactcttactaagattatttttgtaatctgaaagcacatgcatgcgtgtgctagcttttgagtgtaagagtacggcaaaaagggtaaattaacaattatatgaagtgagcagaaatcatacgtataagtgtacagttatcacacaattttattccaagagtgctagatcaattattgcttcactgcaaagcatagttgacatatttattccttcgaaaaatatgcatgacaaaatagtaaacacacaactgacatatggccatacatagggggaccctagctagaagaaggttaaaaacaaagatgaacaactagtagttaatctgagactaacaggaaattgaagaacctgacacatgcattagttcttaaacacttatggccgatgtatatgtatacatatgacagggaataataggtgcaaagatgcaaaaaaaaa

SEQ ID NO: 43039 - DNA, 740 bp, Oryza sativa
ctctactatggctggatgcatgctgtcatcatttttccatgggcaatttaaaacataaagcctactactctctctgtattttaatgtataacgccgttgactctttgatcaacgtttgaccattcgtcttatttaatttttttgtgcaaatataaaaatatttatgtcatgtttaaagaacatttgatgataaatcaagtcataataaaataaatgataattacattttttttaataagacgaaaggtcaaacatttattaaaaagtcaaaggcgtcatacattaaaatacggaagaagtacaatgtaaaattctttacatgtactccatccgtacttgtaaaggaagtcgttttggacagcgacacggtctccaaaacacaactttgacttcttgtttctataaaaatatttattgaaagtgatatatatgtatacttttatgaaattattttttaagacaaatctattcatataatttttatatttttaaactcaacaacttgagagttatttctgatttatatttccaagacttgacttaaacattatcataaacgactttctttatgagtagtgaaggaatacatgcatgttcatccatgcacttttgtacatctaaatgtagaacttcatctccttaattagctggtgaggtcaggcatctctatcatagctaatgaggtggtcacacaaacctcggcatctctccctaattaagctccgtttcgtcttaaacaa

SEQ ID NO: 43040 - DNA, 9782 bp, Oryza sativa
aggtgagagtttagggccgttatagatgatatgatccggcgtagtgtggatccgccgctcagacaaagttagaggggtacaatactaccatctctgtttcacattataagaaacattataagatattttaggttttaaatatattcatgaacgaaactatgtgtgtgtcgatccatgtatgtgttttatatatgatgttttatatatgcgtctaaattcatatgtatgaaggagccaaaacatgaatggaaggaatgggagataagtttcctatgaacatattcacactaaacaaacaagaacgattcgttgtaatacccgatatagtgaattttcgtagcatttatacttctattacattattatcaattgcaaatcacggtaggtcgtgaagccaagattttgagttgatgggctcatggctttcactagtactagtgtcatatttaaggggactctaactcctagcatttatagctcaaaattcttttgtagctagagcagtgtgtaaggtaggattgtttcattttactaaaagtaattttttaaactctttattctacaagacattagggatttttaaaaggtccaaaaatataagagttagaaccatataaattgagcctaacaacaatgcattcttttggacataaaagcaagttacggaagttgtttactgcctcctccatttcaaatgcaactacctatccaagatgtttttcattccattatctaaaaaaatgcaactacctatgcccttatttttttaagagatcggttaagatagagtggtattgaagaagtagttgtattttaagataaatttaagtaatagaaatagctatattttaagatagagtaaatagcttaaaaaaacacagctaacatttagtttgagtagcagaactattggcctaatgcattaattgatacacacaccacatagctaaaatagatcattaacggatcaaaatgttaaattgtggcattggcattagtggtgctgtggtgggttgacagtagcataataaagctaatgaattgcgcttccatagaaagaacctactatggccctgttgagatcccattctaaaatttttttatcctgttacatctaatgtttgaacacttatattaagtagtaaatataggctaaaaaataactaattacatagattgtgactaatttgcgagacgaatcttttaagcctcattgctacatgattttgataatatgttgctacagtaaacatttgctaatgacgaattaattaggcttaataaattcgtctttcggtttattgacaaattctgtaattagtttttttatagtgtccgaacacccatacgacatcctatataatacatgatgtgacgcgccaaaactttacacacctacatctaaacaccccctatattgttttatcttttatcagctctaacatattagctatctgaccggggtcatcgagctttgtctgcggggtcattagctacaaaatactccctccattccaaaatgtttgacgccattgactttttaaaaaatgtttgaccgttcgtcttattcaaaaaatttaagtaattattaattcttttcctatcatttgatttattgttaaatatagttttatgtatatatatagttttacacatttcacaaaagtttttgaataagacgaatggtcagacatgtttaaaaaagtcaacggtgtcaaatatttagggaagaagggagtactaagtgattcatttggttggttgaatgccaccggggtcatctgacccggtgatattattgtggctctgtccataggtctttctagacggactaaagtaaagtgtcgttgccaactcgttgcttgttaatttgctcttgtatctttgtttagcctatgcgatatttagttggctctcgcgtgttttgaagatatggagatgttgcttaggttttaaccttatcacttgtcttgaattattaggatatactccctttgtcacatttaaccgatgtattacagtcatgcagtgagaccaagacgaagggattctctattattagtaattaaagcccatatcatagaagcccaattgtttgctctggtttcttgcatgtgaaacaaaagagaaaggggcatcccatttttatttgagagaatctattatataccactgagtttgttcgagttcaataatttttcattgacattgtctctttctataatacaccggtgactttattaattgttctacaatatgccattggactgaacattctttttaaaaatacccaaaatacccttagagatatataagattaacaattgatttatctcattagaagtttcaaaaaaatatgaaaacttttatgtggcctccttacacaacatgaaaatttgtacagaagtttcaagtattttttacatttctattttttataaaaaaatataacttatctgttatatgctacataaaatactcgtctattgttttttaatataaatcatctttcatacactacataagatatttttgtgctattatctcttttattagcaaattctctcttatataccacataaaattatttttttttcaaaaaactaaatataccagaaaaaacttaaaacttgtatacaaatttccatgttgtgtaaggaggccacataaaaattttcatatttttgtgaatcttctgatgagataaatcaattattaatcttatactccctccgtcccatgatataagggattttcagtttttacttacaacgtttgatcactcgtcttattcaaattttttctgcaaatataaaaaaacgaaaagttgtgcttaaagtactgtagataataaagtaagtcacaaataaaataattaataattttaaaatgttatgaataagacgagtggtcaaacgttgcaagtaaaaactcaaaatctcttatattatgggacagagggaatatgtctctaagggtattttgggtatttttgaaaagaatgttcagtccaatagcgtattgtataacaattgataaagtcgccaatatattatagaaagagacaatgtcaatagcaaatattgaacttgaaccaactaaatgttatagaatagattctctctttttatttaaccagcagcttacacgtgaactgaatggccaacgcctccttgcatacatgtgaattcattaaatcaatatgtaaccaaatagccatgcgttccacataagactaatgcgttgatttcttttaaacacttcatttttcataggcgtcgatcaaacatggacaacagatgaagtatggtagccctagtaattaaaaccttgtagtatatttattgccccacgcataagcataccactactctgtcatatccaaatagtagcactctgggatataatcgggcaccagaccaatgccttcacgttgtcggtgttattattaaagtaaaactagctgggtggtccgcacaattgcgcggctaacacccaaataaaatcatatatttttttaagtatgatttcacttaaaatttattaaataactatcttattgccttaagactttgaaagaccaaatcttatcatcctcgtgtttctaattatataatttttaaaagtcacaccagttgctacctcttatgtcatctccttctttatttgcttactcgatctactattatttctatccattctttttggaacctttaaaaattggaattttatagtttttagagtttattgtcacattgggttttgtttttataatttctagatgtcccgtcaaatgttgtcattatactgctctacggtccgtccactgctcttctctttgttgttattgagattttaaaaatcgaacataattatcatttgggttcatttttactttctagaagtcccaccaaaccaccagcagctttaccattgtactcctctacaactcgcctgctgcctccctttcttattgtcattgagattttaaaatcgtacatgattatcattgatttttttttactttttagaagttacgaacctttaaaaattggacttggagttttattttttttataatttttagaagtcccatcaaacgatgccattatgcccctttacagcctgtccgccggctactcttattggtattgggaatctaaaaattgaacataactatcggtggaattcattttttattttctagaagtcctgtcaaccgtcggcgggtctgcaactatactgttatacaccccgcacgctgcttctccttttttttgtcattgagattttaaaagtcgaaataattatcaatggggtttatttcttttacttttagaagtcccggcaaccgtcttacttttttgcttcatggcatgcctgacgtccctccttttaatcgtcattaggattctatttggtgttttattaacaatttttatatgtcgtatcaaccgccaccactctactcctttataggcatgttacttcatttatctcgtcatgtgttttagatggtcttttcttttaatagtctttatttttatcacaaattttagttatttataaattgtattcctaattaaaatcttatttttctttttctaattttagaattttttaaattttagttaatactgtattgtgttcttttaatatttttatttttgattttcaattttagttgtttcaaaattgtattcctatttgaactctcttttaatttttttttctaatattggatattaatttattttttattctgaattttaattaatctcgtattgggttcttatatggatttttttttcaatatttgcttatttttatttccgaatttcagctaattttaaaatgtattcctacttgaactcttcttttattttcttttgctaatttcagatttatttttatttctatttttttaattaatctcgtattaggttcttatatggactcttcttttaatattccttatttttatttctgaatttcagctaattttaaattgtatttctacttggactctcctttccttttctaattttgaattttattttatttttattcttaattttgattaatcttttattgggttcttatatggaaacttctctctattttccttatttttaattccgaatttcagctatttttatattatatttctacttggactctcttttccttttctaattttggattttattttatttttattccgaattttgaataatctcgtattgggttcttatatagaaactttcctcaattttccttatttttaattccgaattttagctatttttaaattgtacttctacttcgactctccttttctttttttttcttcttcgactctccttttcttttttttctttttctctgattaatgtggaaatttctagctgaattttaattaatctcgtattgggttcttatatggatttttttaatatttgcttatttttatttccgaatttcagctaattttaaattgtattcctacttgaactcttcttttattttcttttgctaattttggatttatttttatttctatttttattttgaattttaattaatctcgtattaggttcttatatggactcttcttttaatattccttatttttatttccgaatttcagctaattttaaattgtatttctacttggactctcctttccttttctaattttggattttattttatttttattcttaattttgattaatcttttattgggttcttatatggaaacttctctcaattttccttatttttaattccgaatttcagctatttttaaattatatttctacttagactctattttccttttctaattttgaattttattttatttttattctgaattttgaataatctcgtattgggttcttatatagaaactttcctcaattttccttatttttaattccgaattttagctatttttaaattgtacttttacttggactctccttttctttttttctttttctccgattaatgtggaaatttctagcctccacagcgaacgtggtgcctcctttcaaagctgttttaataatataatagatagataaactcataacttatacgcccaaaattgtttggttattatcaactctcgtatgattaaaaaagttgagaccatgaaaaatatatgttgaagttttggggaaaaaatgtcagcaacaacgtaaaagaatattaagaccatgaaagatcgatacattcgaaatttcagagagagagagagagagagagcatcatagttcaatcgcgtattgggccgtgacaagatcagaacgatctccatatatctgctgaaagaataggaaggacatcatagctcaattgcataatgggccacgacaagatcaaaacaatcttcatatatctacgaccttactatatctatcctaaaatatacgtatcaaaatatagtaatttcagatgaaataagacacgtttaaatttatagtattaaaatatatcttgtttgatctaatattattatgttttcgaaggaaggagtagttttattctcaccattatctaggttccgctatgcctatgcatgcatgagtaggcggtcacgagcgacaccatatgcatcacattctgcatacatatagtatgtggcaacagtcgatgtcactttggatttgtcccactcctacgtacattctccactgaccaacttccgccataaagcccgttatctttcgctagttgtatatataatatcttttaaattctattatatatttttggaagttttggtagctacagtttctcttaaaataaattttttttcttaactaatttagttttcttttatattttgagaaaccgtaattgtagaattcagaaaataaaataaaaaaacgaaaactagtttttttttcgtttctcaccggctgaacttataatctaaaacttcatagaccttttttttcgaacggccactcctcagacctcaaactggctctataagaactctcatgcagcatcagtatgattgagatgtgcactttataaacaaagataataaaaactaaaagagagtttggtaatcaacaaagggctgtatataatgggaaattgggaatgcatttccccttccgattccactcagaggcccagtggacaacgagcgactaaccagctttggcaagtgctgccaataacatttgacccctgacgatcatttgagagatatgaatctaatcatcgtaccacttggcccagaaccattgcacaaattaatcaggtcctaattaagtgcatgtaaagtactaagcaaactggcacggaaccattgcacaattggtgcccctgctcaatttagcaatcccacggacggattgaccactaaaaccggccgtttggcagttgggtgttgaggcagttggtttaatttgcctgcgtaggttgttggtgcatcatactccaacccacttggcttaatggtcgccagcgagatatccgacgcctgctgcggcatgcatattgcatatgcagacggtttcagttctcggcggcgcgcgcgcattggtggccacaccagcgacgatgacaatgtgcgatgcgatggccggtggtggcagacaggacttctgtgcttaattcgctcttataattgctttggttaaacgatttcgttggctttacttcgtctatccatgggcatgccgcatgcggcgtgtcccgctgtttctccgtgatccgtatatatacatagttccatctcttgacgtggcgtttggcagaaaggaacgaccctaccgattggaattaattgtaaatctaaacggtttagtatcgataaaaaataatttataatttaaatttttgtatgtgtgtttttaactacttaaaatccaatattaaaaaactacgttaaaaatatctttaaataaaaattaagtttaaaaacttaaaatttagtactccttccctcccaaaatataacaacttttagttatcaggatttatcctaaaatataataacttctccaccaaaattctcttcccaactaatcacaaccctccaccattcacttttatcatctatctccactactcatccaatcacaaccctccaccactcacttctacctgcttttcaaccctaaaatttcgtatattttaagatgggggaatggcgacaaatacttatatagggtaaacgatgaggacgtaagattccgatggtgctttttggttcgatgtttcatacttgtcagccggcactgaagttgattaatttggttttggtattttactctctttattagttgccctgcttttcttcatgcacgcacgtaatcacttcccatattgagcatatatggccgtatgcacttgttcgtcagagatcgatgatgtaaacgtcagtttcagcaggtgctgctttacaccgcgagaaaggtgctgctttagtaatatttattagtttattcgcatttcacagatgacgtggtagtgcaaatattgtctgacacaattatatatgtgcaagctgctggattattctaagtacaaatggagcacatataggagtactacatactttacatggttgtattccaccacatgtctaaagaggttgaagctctagacttatatatggtacggtacggggctatgccttgagcgtaagccaagtttgagaaattagatagggttctgtgataaacttgtgaggggtgttgtggctgcaccttgtgaacaatatatttgagcaatcaatatcatattcaatcatcatgccatcaacgatctcttccggtttcgtaagttttacttttatgtttggttttggtattaacttgtgattgttcgttttgctgtgattttgttcaagttaatccatcaaaaacctttctaatatttcatagatcagatctggaaagttccgttgattgtttcttgctagattcgaatttgcttaagttttaggttttgttcagatttgctaaaattctgggacaactgactttttagggtgttttctcttaaaccatttattagtttgtaaatccctccggtggagttgttccttggtttgtctaatttcgtctgtcaagtttgcaactcgatacaatggttggtttaagagaaatcatgttttttttaccaaagctctgttgttatgtttttaggctaacggtcagaccgcgagagaacctacggtcagaccgaccctagtaggtcgaatagatcgtaggacgtgtgttccattggtttttgaggtcgggttgtgttttgatttataaagattcgattatttgacttccgctgatgtaatctatcattcacccctttctggtaggcttggttacttgtgttcgatcctacaataacttatttagatttaagtcttaaacttcagattcaagtactagattttataatgataatcttttcatgtttaatttcacaagatagtatatgtactctctatttataccgaaaatctcatactcgaaatgtagcatcatatactcctctccaatttcttccaatctccttcgcgaacaccgacgcttgcacgcacacctcgtgaagcctgctgcgaagatctctcccacgtggtgtccatccaccgtgtgccatctcgtatccaacttcatcacctggtattccgaacgtctggacctcaactcctccctgagtctagtcccaatccccaccgttgaccgaagatgacctccaagaatattgactctagtcaccttttcacatggtattccgaccgcacaaga

SEQ ID NO: 43041 - DNA, 1856 bp, Oryza sativa
cctcgtgcacctcgccgccctccggcggcggcggcggcggcgtctcccgaggcatctcgtcgcgtcgcgtcccccaccacaccacccccaccaccaccagtgtaccgcctctccactaggtcgcggggctctttcttttggtttttgtactggaaaaccgcgtccgcgatggagaggaaaatggaatggagtacttgtctggaaaagtggatctagcagacaagcactgtgactacacccccaagtgtgtagataaattccttctttttctcaagcatcatggttataaaaatgtccttttcagctagcacaaatactccttattacacgtagagagcatttattgaaatagattttattatactaaaaaactactaagatttttatcttcggagtacaccttccatacacactctatcgccgcacatacacacgcacacgtgtaaatatattatgatgcgcgtctaaataggattacacgtgtcatgtccctttttaaatatatgatgttgatgatttaaccattcgtattattaaaaattatattttatttattttctcatgaattgctttattattgcaagaacataagcgctaaaattaataagacaaataattatacggcatatttaaaagttaataatgtcatatatttaaaattagaaaagtactacttttcaccttttgggatttgatcccgagaaaaaaaatgtatgaatacattcgacaggtagagtttgaatttttagaatatatgttcataatataagatttatcaactcttgttcattttcctttttttaaagaatgaatacatgattaaattttgcagacatagtactagttaacatttctatgttccagcataatgttgctcacataaaaaaagtagacttaatgcaatatgtgttgtggaatattgtatacaggtttgtaaatacatgtcatcgaagtgctatttatatgtaaactttgatcaattgtctttttttcaataaatttactaataatatttaaaaggatatcgtagtaacaaggcgtgttacatcttaaacataaacatgaaactttcattagtcgtagtacgtataatcatagtttgtgtatgatggttattttcaacagatatttgcaagtgcacatctccatccattgtggttgcatgattgtatctatgttctttatgaaatgcgcacgataccctccgtaattattgtaaattacttatataaacaaataggtcacataaacatattataaaggaaaaaaattgcagcatatagcccccttgcaggatttgccgcgtcaattttcttccgaagaaaaaaaaagtaaatatatgctacaaatactaaatgttttgaactcgggaatatatcctacgcataaaagctttccgtgcacaccaacaaatgaatgttacacaaaattctataaaaaaaaagacacatacttcaaatagcattacagctatatgtgaaattttatgttcaaattcattatattttagcctaaaaaagacaaaattctgacatataattatctttaaactgttagatttttcatttgtttatggctaaaatataatgaatttgaatatgagactttggggatacgtgtaatactattacgagtaaatatccaattttttttagaatttttcgtgacatttgctagttggtgtgcacgaatgtgtacgagaaacttgtgtacataggatatgttacatttgaactttgacgctcaaatttttaggatgaattctatgcaatttacaacgatacacttgctcaatctttataagcacgcttcccaaactgttaaatagcgtatagaagtttatttaaaaagatttt

SEQ ID NO: 43042 - DNA, 1935 bp, Oryza sativa
taattagataatgtttactgtagcatcacataggctaatcatggattaattaggctcaatagattcgtctcgcgaattagtccaagattatggatgggttttattaatagtctacatttaatatttataattagtgttcaaacatttgatgtgatagggacttaaaacagttttagtaccatctaaatagggtctaaagctaattttaaccgctccctccaacggctccttagacttcctgaaaagtttctcgccgggcttacccaaaattgctcccacagtgtgctgtgtgcagggaggagggagcaaatacatactgtatttttcttttaggaaaaatgcatatcgtttttgcggtgtactatattggctcaatctggttttaggtgtgtcatcgtcttagagcaattgccataaaaaaagtggttattaatactatgagctactagtggtgatgtgatgtggatgaggcgagaactctgaatctctacatgctatgcagtaagttcagtcaacgaagctaaaaaaaagtttttaagaaaaactagcgccgaatcaaacagttcagctacacgtttgtttcgaattagatggacattccccgaaaaagaaaagaagaattagatggacattaaagaagaattagctgtatgcggggagcgcacgatcacgcgaagaacgcagccaggacgacggcaacggcacgacgttctgtgcaggtctcacccctcttctcgccctgcttgactgaaaggaaccttctcttcttcccaagaagaaactaagattcggattttagcttccacgaaacacacacttgcagatggtcagatatgatttgagacattcgacgagcctatctccatctatctctgcattttttttcttcaattggagtttttctccattgttccgttttaaatgatgagaggaacgcatcaactgcatacctttactccctttaaatggacaggacatcgcaaagccgatgcaatggatagcttccagatactcctacctgctaatgagcctgctaatgaggagatgctcctcaatcgagttagaagtaaattttttttcttcgaagtgacaattaaaggcatgggccataagctgtacctgcgagatagagagagcttcatcaattgcacgagcaagacccgccgagcggcgaccactttgttggaagaggagagtagctgaaaggaaaagatctcaaaacatgtgggctgtttgttttcatgccaattgttacagtggagattgtccgtagtactactaatgcagtaagagtgactgacatgtgggttcgggttcccacataaatcactactattgctttcagcagtactgcagatgatccacatcccaattgttatctacgctgccacacgcacacaaaaaggctaatgaaactatcccagtgtttttttttttttgtggggaaactatcccagtgttcctgttccttgatttgacaaaggtatggtagctacatcaaattttggcagttgtgagtgacgaaattagaaattattaaagcatgaggctaaagtagaactcaactaataggatattaattttctcaaaaaattatataataatttaagataattcatgattatggagacgtggctagggctcaagtccaaactacctacggttgccttcgctccattgctcatgtttggctaaaatcatcagcttgcaaataaatggagtatatatgttgtatttttcttgtcggcggcatttttctttgtgcacctgcacattctgcctgtcaatttttgccaaactaagagtgttcaaggggaggggaaaagagaagatgtgtaaaatgagatgagcgattagtatgtgattaatttagtattaattatttaactataatttgtctgcgaggattttaacttagaaaattgaatttgtatg

SEQ ID NO: 43043 - DNA, 1198 bp, Oryza sativa
gcatttggtcaaattttaaccggccttgaaaattttaccaaattaatggattcttgcttccaattatttaatttaactaatccatgttatcctttagaaataaatgattaaaaattaggtatatctgaagaaaagtaaaacaacagtagaaagcatatgatagaaaatgctctgaagttcatatttgaccataataaacaaaataacaggatgattatgcacatttttatccagacagatcagagaagaaataaaatattacctgtcacaaatgccttctgcagctgtccactgagcccagtcttccatggacctattgtcgccactgatttgttgcggcatagcaaaaacatgcatgctatgccgataaacagcagagcgattgatgaaatcacaatggcatacaaccatctcttagatctttgtggaggaccactggacatgggtggactacttggaggacttagtggtggaggcaccttgatttccttaaatgctgaaaatgatccagttccagtagaaggaacagaagcaacagctggaacaggagcatttgctgaagctgcagcaagattggtatcctccaatagtctgcgccggctaagttgtacagttggatttcttgcagcaaattgtgaagaaagatgagctggtcgaaagatgaaggtatgttatgtactagctaatgtatacagggttctatgaacaaacttgaaaaagataagagcaggttaaattaccagaaagattgttattgtcttttgtgttctcttctgatgaagaatcagactcgaatctacaatggttcacattcacaactgttaccatcaacacgcactgataatttgttttataaaaataaaaaactggtattgaccagaatgtatatcaatctaattcttcttacccattctcagatctttgatacacatcgcccctctcatcatagacgtcaaaatcaatttcctgatcaaaattcctgtaggaattttggatgagaggccattgaaagttattgttggaaagcaacctgcagagcagtagaaaatatatcatggctatattacttgatgttggtcaaattttggcaaagttaatcagtcagacgacctacaagtgcttaattgattgcatttctgctatctcctgcggaacttcaccagtcaaattgttattgcttaaatccagtatttccagc

SEQ ID NO: 43044 - DNA, 956 bp, Oryza sativa
ctcatctagcagcaagaacaaaaaaaagcaggggaagtgtagataaaagactagctaccactaccacataaaaatcagagaagaggaaggtgggagcggaagcaatggaactacctgcggtgaagtagggagaagacggcgtcggtggtgaccggtcggcgtggaaatccgtctgcggcgcgtcggagacctgcggagtagggagacggtgggcgacggtggcgggagagatcggcgtcggcggcgacctatcgacgggagggtttccaacggcggggatcggtggcagcgctggtggtgaggggagggaaaggagcggaagggaaggagcggcagcggggctgaggggccggtggtggcgcgagtagtgggagggaagacgcggcggcagagcgaggaggcgacgcagggaggagggcgaaggacgcggcgtgggggaaggaggagtgggcgtggggaggagatcgatcgagggaagagcaatcgcgtgatggggaggagattgacgccgttggatatgccatcggatggttgagattacgcgtgtctgtcatatatgtttgttgtatcaggaatcaagaccaccactacgactttttaagtagtagagattcatactctttacatacaacacaaagtgagtttttaccgccttctgtactaatttctttctggtattcatacaatgatatgttaattgtttcacgcaatatgcacattctagagcatgatctatatcctagactctatgcagaaacccagggaaactttcaactcaatcattgaaatgattaataggtaatgtcatccatcccattgtcattatggttgattctattgctactatgtgcatcaagcttcattagttgtagtttggaactgcaggcatgattccataaaaacgtccgcggggaattcaaggaaaaactgactgtgaggacgaactttctggtagg

SEQ ID NO: 43045 - DNA, 1216 bp, Oryza sativa
aaatgaaattaaacacttgttttagactggcaccgacggtaagattgggtggtatctgggaaaggctagtaccgtccccggtcaattaaagaccgagccatgaagttaagcatgaaacgaccccatacaatcacacttctcgcatggggatagacctagcggagtaaatagctgagcgaaggcagtatccatgcatagtggtttcttgatgcgtaaggcaagggctctacagtggtgttgccattggtaggactaccatgtgttaatttaaacataattataacttaatgcatgtgtgtgagtcttcccttcccggatacgccagaactcctctcactactagaaactgtgtacgcctagagtgcatgaggatgaaaagttcatggagcgggtactgtcaatgtgaggttatcgaaaagctttgccgtgatacgtctcatgtgttgggacgaggctcatgtgttgggcagtcgcggagtgtgggtaaagtgtacatccactgcagtgtgagtaaaacgaatctattcgaatagccgtgctcgcggttattgagcaccgggacatgtattatacttggctagactctaaattcttaacttgtgtgggaagggttattgcatgatgaattttatgctgttggagccacttcctgagaagggggaaggtggacgttctcagaaaactatgacgactcaatggcgggaagctatccttgggatcacaatggatgatggacagaaccgtcgttgtttaaatataaacactggtactaaaatttgatcagtcaatgctaggtcttaggcttgtgaaaagaattacaaaacttgctttgcgcaaaagaaccatagccatcctttgaaatacccctatcatgtgcattgttgatgtggtggcttgctgagtacggttggtactcacccttgcaaatataaacttaatcagaggccggagatgaagcttcggaggatccctatgcctattaccaggagggtgatgaagacgatgacgctcaataggtcttagttacggtcattgcctatggcaatggcatgccgctgccttaattccgctgccttatctatttctgcttttgggatgtattccggaccgctcggtccgatgatttaagactacgcctgccggcttatgttgtaataatttgcactagactctcgtgtatgtgcgtttggtatctcggctataaactcgtgtgtac

SEQ ID NO: 43046 - DNA, 916 bp, Oryza sativa
cggaaaaggggaaactccaggtgtgataggaggggtatatcgtcatttagtagtgaaaaaaccatttttttccttcttttttgtctcttcggatggaatatgatcgatgtcagtgtaatggattgtaatggatgaccacatattgatatagccgggaaaaaacataaatgccaatgttaccctaatcactttattagtaaatttttgatttacccttaatactattggtagtattataccatcgatagagagcaccagagcatcgttcatttctatatatatgaagtatactatatgtattataatattcgatctatattacttagccataacagtaagtacaagtttcaatcaacctgagataaacttttaacgatctatttgcagcgttcgtgtacataaatagaagtcggcagtattgtttttacctcctgctaccttacttacatggtgtagtgtacatatatatactctctccgtcctaaaatatagtaattttttgagtggataggacgcatctgaacagactatccagattcatactactagtatatgtcacatcctactaaaaattgttatattttgcgacggagcgagtaccttgtaactaacattctgagatatattaatatatatagctctctattcctcctagattaaaaatgtctcgctattgttaattatagacttgtcttctaataatgtaattagttaaaccggttttatgtttttacctttcaaacaatatgggtaggtatatataaagctctcgaacaatggaaaaaaaccttattttttttcataaagttggaatctttttagtgtaaaaaagaaaacagtgcaataactggggaaacgaaggaatacaaacttcatagtagtatatgctatatagtactgctagtaagaaatagct

SEQ ID NO: 43047 - DNA, 4041 bp, Oryza sativa
cgttccctcttccgttggggccattgcaggtagtgacatgatcggagttgtcgatgtagaaaaagaagaacatgacgtagaggatatacctgctcgtgcaggttcttaagtggacgaagttccggagacctgctcgttctcagtacctgtgcacgcaggaacttagaaccggggattgatagaagctgtgtaggaacagagaagaggggggattctaccataggaggagaaccagtggaagctgatcagaagaggggatcttctgtctatcccagaggataagattgaacacctgagaggaacgttacgagattgatagcgcattattctctagtccgttactagagtaacgtgaccattcatacctgtcggttacacctttcctcatagggtctagcccatttaattctaacaatctccacaaaatttcagagctcataggaaacattgtcatttttgcacctatttgttataccagtgtttcggtggagactgttaagttgaattttcacctagaaaagaagctatatttgaccacaaccgaacaatgggcccacgggaattatcaatcctgtactgtcagtctttactcaattacttaactgatactgggctgtcgttagcacctaatttgtttggagcatataagtcgtactaggcttttgcataagtatctagagatcacccaaatctcatggactgtgactagctgtcggagcgtgagctcttcgattaggggtccgtgaggcccccctttgctagttcggccgggggcagcgggtgagattcgaggattcagtggaatgtgtgatgtggagggaatcggacccctcaaggaagacgaaacaaaagggatttatacagtttcgggccgctgtgaagcgtaataccctacttctgtgcttggttgatcttgtgagaaattataagatctccttgttggagtagaaggtgttgatcatgaggagcagaagctgctctagagtctaaaatggctcatcccagagaaagggattcctcctctccctaactaggcctggacctccttttatatctcaagggattaccacatgggcccatctagcctattaagggaggataatcacataaaatgcatgtcttgttgctttccttgtaagtctcttgcatgccttgctatgacatggagtccaccgaatcttaaccagctaacagaagggacgcacctgtcattcaacatttaatgagttaggacttttggatcctcactgcgccgggaaacgggaaccctaccctaaccgggttaggcaagccgtctccggctgtgatgagaggctaagacctctcatcatcatggctgatgggacagggcaggacgcacgccgcctgacacacgcggtagtgctcctggcactctgggtcccatcggtcaatcaaccggtcacaggccggttgagtgcactgcacgctgcattaaatacggcgtggcacagctggtcaggtcgccataaatgcaggtaggtgggcgtgtggagttggccacctaacccaccacatgtggtgtggtgacccacggagggtttcgggggagcccgacccatagtcacgggagggagcggccgccgccctacctcgggcccgatacaccctcgggggagggggggaggggccatgtgacgcctggggcagcctcctccctctagtctcggtcaggacggtcccgacccccaagcgaggagggggcagccgccgccctacctcaggcccgatcccccctcggggcagggccacgtggcgcctggggtagcctcctccctctagtctcaggtggaacgggtgttggtatttcttaacgatattcctagaaatataattcccaacaatggcgcaaaaatactcctggtatattatggttacagagttcatccgcaagcgcacggatataccgttgtagcatttcacccgagagtattacaaggatatcgtatttatttaatcctatgagaagatcatggtagagagaacttaactaataatttatatgttacttgtaataatcatagtctaagcaggggttaagataatccaagagtagagtgacacacaagcagtaagctactcattctcatactaaattatctaagctaagtggaaataaaagagaaagagaatctactcctatacttctagtttacatagtatatatacattctagttatctgatatactagctaatattctctatccgatgccctcctggtacttcgtgaagccacccctaactgtcgagtttcttacgacagcccgtcatgaccatacaaccggggctaaatacagaggaataccttccccaggaaattaacttagaactatatacacgcgcggaggaatatccgtactgagctgtcaccatcagcggcccacctctcatccgcagcatataaccccaaataatgatctaagcaccacgcctaaactaccatatactactctaattgatatcatcgtcatgacatagagtaattgcataagcaaacattatacccgcaccaaagcatctcccagataagctagcagtatattcaatataacatgaacataatataaattggcatccatatactcgaaaagtattttaataccataaatgtataaagaagagtattctaaatctagataggtgaaagcagcaagctgcttgaaagaagaatgagccacgtcctctgaaattgcaagcaccatcggatgagactggtaaaacaaaaggaccgttggatcaatatatgagaatataatccattgggtcaatctggaggcttctagacaaaaggtcaaaaatactccatctttgagaactcacatgtctagggtatttaaaacaccacgtccggctaattgattaactgatcaaataaagaaaaaaatattgaatgtagcctcacccttaattttcaaggtaaaatatttttttatcaaggtaaaaaatattgtagtccttccagtccttcaaggtaaaaaatattttcagtcatgtgaggttaatattttttcaagggtaatagtccttccagttatgtgagcgcatccacaatgtagtctaaaagtggttcataagcaatacaatatttatttcagacacctagcaacattgtggaactagtccatagcaaagaaataataaaagctacccataagcatataggctgcccatagagaataaaatatattatttgtctctacctcttctttcctcctaatactatttgctatctatatacattgtgaatgttacaatagttaaagttcatataagtgggtcccatctatatggactacttttgctatatagattgttgttgctctaaggctacaataccccatcaattttaccttgatcaataaaaaaatatttaatttattcatttactttgttaggtacatcaatcacaacctttcatttttaatttaccttttttcttaaatgtagtccatctcaagaaatatgaaaataggtaatattatcttcgcttttaaatatatgacgccattgaattttttatatgtgtttgataatttggattattcaattaattttgcaaacataaaaaataactcactcttaaaaaacttagataataaatcaaaccgactcaatttattttacaatagaggcagtagtatactcaccaaactgactattgattgcatgcccactactatagacatgttatgccataagttagagttgcgcgaagcgcaactgagtggctagtaaagtacaaagcttacaaaggagaagagaagagctactagagccatacccgaactctcctgaaggcttccggactccgatttctactctattcctattccactagcttaagaatactaaactaacttgaggtgtgtaagtgaagtgagaaggtgagctccttaaataggcaggtaatgacggttatggtggctggaaaggtcggtaataccctccaaccgccatagggaggaaatccacaccgtccatcgccaaccctgcatctagcggctacacggcgggttcggccg

SEQ ID NO: 43048 - DNA, 1750 bp, Oryza sativa
  unsure (1)..(1750): unsure at all n locations
ttccttcccatctctctcattttctactgggaaccttggccaagggcactctccaacttcactctgacgccatcctccgaacccagtgagaaggaaataaacaggcattgagggccggatcggggcagtatcatggctcggcgtgggcgctgtgaagcgcgacgaggcatgggcatagtgctggcgttgcagcggctcgcatgggaagagtggttggtgcagacttaccgtggctgaggagatcagtggacagtgggtgggtaggcatgggctttggtctatccatggcagcagagatgaacatgagagattgggagaagaaaagaaagaagatgagggcaatttggtctaaagtttttgtcaagtgtgttgaaaggtatatagtggtatatttcaaatacttataaagttataatgtcatgacttcaaataggtaaatattaatggtatatttcaaaacatgaaaatttataatggcatgaatccaattcaatttcttatatgaccctcgttctctcttctctgaatgatatatacatgggtctagagcccatatgtgtgtcattgagacaacatggacaaattaagaattatttgaaaatgacaggagcaaattagaatgatcaatatataatatgtttgatttttaatgatttttgatgtcccacttaaccatatttgtttattataataaaatttataaagtataatatatttatgatcagattatggacgtaccttntgagctagaaatatgcatacagtttctatgctatgatcagattatgaaagtaccttttgagctagaaatatgcatacaatttttatgttttcaaatgaagtattttgtaattcataggtatagtcaatatttgaaaagcttgactagatatcgttcaaacttcaaaacatcatatatttatgaccataggagttgcatagatcaaataaaaatatttgaacggttctgatattaaaatattttaagctttacatgaaacgtgatcaaaacaacgtggttttgtgtctggagggacacgtggtaatgtaatgtgggctaattgtggtctgttgctactgcaggactagagacttgtagtacctaaatgctacaaagaatactacagtttcgtgacacaacggaatgctactgtagtacctccgaatatttgacgccattgacttttttaaatatatttgaccattcatcttattcaaaacttttgtgaaatatgtaaaactatatatatatacataaaaatatattttaccattaatcaaatgatagaaaaaaatttattattacttatattttttttaataagacgaacggtcaggatatttaaaaaagtcaactacgtcaaatattttgggacggaaggagtattatggtgtgggtttcagactttttagttgtttctcaagatatgcatcattccatactgcggctatatgcatggtttgagttttagctattccttcaagtattctatttaccctggtcatgtgttaataaggctacatatgttactcacgatttgtaaattaaacaggtttagtccttcctcagtataatatccatgcatattccattgttcttcaaattgcatgcgaatacaatgcaatgcatgctctgagaacatctagaaggacaaaatgctctgagaagaagttctccctgactcccccgggtgaataacgaaatcgtacgccccaacctgctcagtgaaatgcgcgtgagcaaccgcag

SEQ ID NO: 43049 - DNA, 592 bp, Oryza sativa
acggatccgattaaaggtggagattaggggacccgtgatgcgcgcgaagaggatgagcttcgacgccaacttctcgctcaaaatccaacggggaatctaggtgcaagatctcaagggcgtcaaggtggcgagccagatcgtggtgcgagaccggcggatcgaggtgaggataaaatgcttcgagtgtgggcgtgaaggtcaccatcaggcaacgtgccctaaccctcacctctactactcctgtcacaatactggccatatctcttctcactgtccattgcttttgggaaagaagggtattaagctgtgtgggtttgggttccctgggcaaggtttttacagcttgcaagttgagatttctgatatagagttggctagagctcctgtgaaaggtatactaactgtgattcttggtgaagcttctgtgggaaaagtggttgcagagctgaagcatctatttgttgggctaaatggggagtggaaggtgaaacaactaaatgctaaagagtttttaatcaatttcccttctgatgaggtgagaagcaagatatcaacatacagagttttgattttgagacctcactgatcaagg

SEQ ID NO: 43050 - DNA, 908 bp, Oryza sativa
aaaggccccaagactagaaaaaggattattattacttttccaattaaattaatcaatgaaatgatctttgaattgttaaaaataattcctatgctcaaataattccaagaaaaatcttgaacatacttggagacccaaagtatttaacaatattaaaaacagaccatttaatgattaatttaatatgtgggtaattactgaaatgctctttgtatgattaaaagttaagaattgagctccgaaacatctgagaaaatttcagagagtgtaattaatcatggagaatttaatcaaaattaaatccatccatgctttatatttaggaaattttatttcccacatttaacttcacttgtaaattaatgaacatttaatataaattctaataataatttattaaataatttataaatcctgaaacaaaaatcaggatgtgacatttgtgcataaaatcctcgtccagaaatcagctaaggtacacaaactgacaatttaatatacagattcatcaaattaactaaaacgataaatacttacttaagaggcacttagtcctcaccatgaagaaaactgcagcggaaaataaaatctagcgaagctccagctccactcccataggtagctcaactgggtataagccaaacgtcttctccttcgcaacttgtcttcaactgaggtttgattgattattgcaaggtgagcatatgacatactcagcaagccacacagcaaatatgcaagtgccccaggatacccaaaaatggcataatacagggctcatttgcaaaaacagcatttaccaaacatttgagaattgtaaaacaatagagtaattaatcatcaatattaatcaacactgaacagcacacccatgctgcacaggcccaaccatcctgaacaaccatacc

SEQ ID NO: 43051 - DNA, 668 bp, Oryza sativa
tttttaggtttttctttttaataaactttgataattgtttttgttgcttaataattatttccggtgttctgaaaattcaagtaaaatttgagggctcattttagaccaaggagaatttaacaaaaattctccgggccacatttgaatttttcttgtacgtattttagtgtttgccaatttcttttcgaattttaattaattctattattccttttggaaaatgatttttatttcgggatgaatttatcaggacgtgacaaatccaccccccttacaagaatctcatccccgagattcgaggaggctagcatgaagataggttgggcggtattctcttcttgtctgacttcttccgtcgcgtcttttataacaaacttgcctagcaaaacttctccactctaggctgcttggctcgatcccttgttgtagatggaatcttctcttcacctgacttgtccctggttgaacctttagctgacttcgactgggttgcggcacttgaagatggggcttcagttccagaacttcgcatagttcatatctttggagtcaacctcatacaagttacccacttcatgtcatgcgtcgagatcagctcgtcattactaggataccatgcttgtcatcatgagaataccatgcttgtcatttacttctaacttgccacc

SEQ ID NO: 43052 - DNA, 2049 bp, Oryza sativa
ttgacaggtgggcctggcgactttttaatatttcctgtacttagtgttttggccatattgattccatgcaggctgtatgctgcctatgatttctacatagcatgtgagataagtggttactcattcctatttcttgtcccgtgttttataaacctttcgaaattgttacaatatctcccaccagccttatccacgcggtatgggtataacataaagtcaagaaaaaatttctcttttttaaaaaaactgtagcactggctaccaaaactcagccaaatttatgaattttctttctattctttcaaaattctaatttgaaatttaaattctcaaaaaaaagataaaacacaaaaaaattgctgaaagaagtgaaaattcaaaagtggtatttcgcaacctgctagctatgtgctgacaagttagcaatcattctttcatcgctttagcaaagacgatcatccattggcctgtaatgtgacgataatatatactccctccgtcccataatataagggattttttgaccactcgtcttattcaatttttttttgaaattattatttattttatttgtgacttactttattatctacagtactttaagcacaaatttttgttttttatatttgcaaaaaaaaattgaataagacgagtggtcaaacgttacaaagcaaaaactcaaaatccattgtattatgggacggagggagtagcagctagtggatgctaacaaggaaagtagcaagatgcggatacccttgataaaactggtataatagaatactacaaaggttgatgtaacctgcgaacctgcttttaattgcaggcaatgagtcagtcaagcactatgaaaggtcttcttaaaaaaaaaaccactatatggaaggatgcctgtgaagattatggatacatgatacccacattatctatatatgtatccaactgctaatagaaggtgtgctatatttgtacataacttggttgctagggtttccttgccggttaaggcaggaccgtacacttcgattgggtttatctcttgtaatactaaagggaacttaggccgaatccgactgggtttcatacttgtaacctctgcccctaacctatataaggagagccagtaacaccctcgaaggacaacatacaacataagtcaccacaacaagatcgtcagatcaatacaacacccgacggattcaatccctcaacaggagtagggtattacttctcattaaaaggatctgaacctgtctaaacctttgactccacatccatccacttttggacttcgtaccactatgcaggatcaggtcatttctgacagccctaaaccctcacctctgacgggttcaaccttggtcaaagataagtggtcactgatgacgttgagtcacctgtgacgggtaaaggcccgtcagaggtaagagtcacctctaatggtccccaactaaaacccatcacagatgagggtcacctctgactggtcccaacaaaaacctatcatagatgagagtcacctctgatgggtatatattttaacatgtcactgaccgtaattacgatccatcactggtgtgaaaaatgggaaaaaaaagtaataccgtcctcctaggttaccatcacattcatttggacggtcatagatcgcatctggcattcacaaataaaataaatcatcaaaattcctcttgttcccatggcattcatcccaacaaaaccacatgaatgtcaatcaccagaatcaccacatgaattggaatcatcgatcatagtagcaagaatgtgaacaacatgaacaacacaagacaaagtatttgggtgaaagaggactggcaggcaatggatctgaacgcctccacctgccatcatgttcgttgtgcttgtccctgagacaacgcagattggagcttgggcgcggaggagacaacaaaacaatgggcgacacatgtggatggaggtggcggcgacccgagctcgatggtgaaggagacgaaaacacggcagtcggtgcatgtggatggaagccgcggcgaccggacccccatg

SEQ ID NO: 43053 - DNA, 3279 bp, Oryza sativa
  unsure (1)..(3279): unsure at all n locations
acttagcacgtgcgaagtagctagctactgttttggagtggcaaacaaagcaaaagttcgatttaaaaaaacaaagcaaaaacaaagcaaaagttggtgcagaatatatgcctttgttttcttctgaaattattctgatgatttattcctgatggggaacccacctaaaaattatccgtgctctgtggatttttcaacctcacagaatgtcgccagtctgattgctgagtatatatagtttcaaaacttgcgtactagctagataaatttacctattctagaatgctctcttttatacgctttcttctgtttaatcttggatgaactttggattgacttgctttaacccacattcaggtctcaatatataatatgaaaccgggtaatcctaatgggcgggtgatcgctctctcccctccccagcgancacccgcccctccccttactactttacctccccttcttctcttactactacaccataaaaatttgaattaaaattcaaatttgaaacgggtatgtaaactttttacttataaaatttgggtctatagactaatatttgaattcaaattcaaatttgaaacggcaaattcaaatttgaaacgggtatgtaaacttttgacctataaactttgggtctataaactaatatttgaatttaaattcaaatttgaaacgggtatgtaaactttttacttataaactttaggtctataaactattatttgaattcaaattcaaatttgaaatgggtctataaactttaggtctataaactttagatgtatagaaatactatatataaaaatatttgagttcaaatttaaatttgaatcggatatataaacttttgacttataaactttaggtctataaactttaggtgtataaactttagatgtatagaaatactatatatacaaaatatttgtattcaaattcaaatttgaatcggatatataaacttttgacttataaactttgggtctctaaactttatatgtgtaaacttgatgtgtataaactttaggtgcataaatttattaaaataggaaagtaatacggtgtcaaaaaaagaaaaccaggtggagggagggagggagggggaggggggggagtgaattgatcgctgcccccatcgccaggtgagcgatcgcccatttgccatttcgtatgaaaccgaccatgtatcaccgattctatccttttaattttatgagcgatgacgatgctgatgatttatgtcttatatagttaggaagtacaaattttgtaagtataacttatagcgccatctatttatcaatttaccaatttttttcttatttatcaatcactgtttaaacagtagatcaatatgcaaccattcacatttatacatgatttcttgtggtgaagcaaacgatgttctaacctactctagtgcaaattcttactagcatgaaacataaaatatgacttacgtaaacataataatgcatctggattaaccctgaaaataaaaacaaagtaaagtaaaatatgcatttcatttgtgttgaagttgcagtaattttattttgtgcatgtttgggccaagcaggcttgtgcaagtttaggcgatttattgtccaggtgtaggtgactgacagataagaaaatatcaagcgaatgataaataactaaacggataatttcttcatccaatacatgttgaattgtcatcattttttagtgtctcgtgtattatcgtgtgggaagagagctggcctgaaagtaaaaagagccctactcatcttgcataatagtgcatacatagcaccatttcgaagtagggtacgtccatcaaggccaggaagatattgtatatcatttttttttaaaaaaatgtacttaattaaagatggattttttaattccgtttgaatttttatttctattttttaaaagtatgagatcaaaccacaagtacaatcaaaagtcaaaaccatgcatgtatatctttagctgtactgaaatgccagaaattcggtgattttttttcagaatatatgcattatattgttctaaaacttcccaaaataatattctgccctgattttagaaacacctcccaagtcacacaacaaccctagctagtgtgtggcatctgaagactgaaaatagtttttgttttgcactagaaccagagataatgccggttaattttcgtccttattggctgaggccagcgagtgtctgttgaaaatctactactagctagtgtgaaaaaaacaattcgggttcaccaaggtttcaggagaaaaaatgattttccttaccaatgatgacacggaaatttaattaaatcacccgtaaaatccatgcgaatagaccatatatacacgtggtgctaagtttaattatggaacctccatagtcatatcatatcatactctccctccattccaaaataatcatcatattacataggtacatcaaaactttaaaaaaaataataattttctcatactatatttactccaacaataaacccgatgcatacaccatccctatattttttagctaataacaaatcaagatattgtatcttagttataaatactggtgtgtatggatggatgcatcaatatccatttactccaatacataaataacgaatagatttaacgaataaacacaaatatgatgatcatttagtaataacctcaaaaaagttatataatgatcattttgaaacggagggagtatacagcagttcacaaagggaaccacttgtgtgtgtgtggtatatgagtgtagggtgtgttggtgtactcaattacgctctaatccataccccgcagagggcgccaaatttaaaagaaaacgtcatagctaaaaagccaataccccttcagccacaaattggttccactaatataacactactggaaacagatttttgcaaataggtaaaatagatttttctaagcggccatctatcccgcttgcacttaaaaacctgcgaaaaatacatgacatttgtaggcggcgatcaacaccacctacaagaaatcattttcacatacgacatctcaattttcataggcgcaacaaccacccgcctacgaaaatattcttcgcaaacaacaaaaaaaaaacaatccgcccaccacccccatctgccaccggcgtcgctttttgctgtggcggacaccaccaccatcgcccctctgctggatctgggagggagggaggaggggagccgcaccgctgcctccggttagatctgggagggagggagggaggggggaa

SEQ ID NO: 43054 - DNA, 1889 bp, Oryza sativa
agtgccctctctcctccgtcaaatctaggagggagggagggagggaggggaggggccacgccgcctcctccgctactgtctgtggccgtcacccgggaggagccacgccggcacctgctgggaggaaggagtgaagggggagagggggatggagggggaggtctaaggaggagtgaggccttttttgcagccggatgtctttacattccacctgcaaaaattaattttcacatgcgtggtcttaagacgcccgcatataaaaataacccttattttgtaggcataccttttaaaaccatgtatgtgaaaatcgattttcgcagacaggactagttctattcaacctttagctatttttgtaaatggtgatttttgtagtccgtctggaaaaataaaatcatgatgttgggaaaaatagtttttctagtggtgtgattttggtttcacctgtgtggtaaatgcatgattaacatcttctagtcccacaagtcaaaaacccatgcagtgcacgagctagctactcctgaaccattgatctcatttgatcaagtgtttagatctatttatactaccacgctagttagcagtagcagaaacatggaggaacattactttttaaaaaaaggtgcggaggtgtcatgcccagaaattcgctaactcgaatttcaagtagaatgtgtattaaaatccctgtccaggaccagccagagtacacaaatgacaatttaataaacagatccacgtcttacaaaaacaataaaataaatcttacaaacgcaacggaaaaaacaaataaattagacttaatcttcacgaccaaaagcatagcttcctccataaaccacaagcaatcctcgacgttcggaacaagctcaatcctcgaagaactcaccatctaaaccaatctctgcctcggggggggggataaagcaagactatgtaccaatcaccgtactcaacaagtcataccagcaggaaggtatgatgcaagatattctcaaaggaatggctcattggatatttgcaataaaagcagcatttataaatcatattttaaataagtaaaacaatatatataattaagtagtattaaatcatcactgtcgaacgctaaagccacattgtgacaggcccaaccaaatcacctgaactacaccagttttacaagtcatattattatagtgagactaatcacggtgagctagttgaccgcctaataaccgcgggcacggctattcgaatagttttccacaagactcattccacacatgttaccatgcctcgaagtactgccacgatactgcaaagggggaaatcatgacaaaacccttcatataaccctccctaatcgaacatacccacctcaggtttcaccccctccttgtgccaagtcgtgcagtcccctctcatgcctaggtaaatccggaaacaacaaagattaatatccaggcccgaactacaccattgcctctacccttgccatggtatgtcagctaggttaagttatactctagatttagcctaaagcccatgctggttatcatcatataattaaggactaaattataatgaatcccattgtgaactagttgatctaagcatggctaagcattcctaaacatatcatctagtcaattataacccaagttatcaatagcataagatattcaacaggccgagtatgataggcatccatcccacacgacattctaaaacaatgcaatttaatagaaagcaggggattttataaaataggctcaacatgatcaatcctgtatgtatgacttgccttgctcttgtgctgatgaaacctcggcaaccacttcgaaataaactggatcaccgaaactgacagaatctaaacgacaaacaaagcatacaagaaatac

SEQ ID NO: 43055 - DNA, 1185 bp, Oryza sativa
  unsure (1)..(1185): unsure at all n locations
gctcagattatttagttatgaatttcacaatataagctgggttattacaaataaccgaaaacccttaatcatttattacgtattattgcccaaagataaatagatcaatggaaatatatctccggtaagcaagcctcacgaattagcgactccacaagccaatactttgtgacccgggaccatccaaacggtcaaccgaaccggcgaatggaaccagcggctcaaaacgactataaactaaagaacgactgaacgaactaatactttgacaacactacacgcgaacgaacggttagcggcttaacgaacggctgtggcaaaggcggcaactaagcactattagcggcaacgactcggtacagcaaacgataggccggtaggtatgggcagcgagaaaaccacaacgacgacgcgggaccgcggcaacggcacggctaggtggtggcggctcggctcggctcaggggcggcagcgacggtgcacaacggctcggcgcgtggcagggggggggggccccaaaaaaggncgacggcggcgcggttgggcggctgcggctcagcagtgactagggcaacggcgcgcatggcagtggctacacacgacacggcgacacacgaaaaagcttaaccctaaaacgagaagaaaacctcaccggagaacggaacccggagagggatgatgacggcggcggcggcggttccggcggcaacacacgtgatcgacggcgacgctagatgagaaacaactgaatagattaaatagatgaattgatgtttgcggcggaaaacacatcaataaagagggagaatggagtaccggcgacgcaacgacgacgtttaaggaaaggaaaggaaacggtaccggaaacgaaattggacttggctcgtcatgcaaaacgaaaccacggacgaagagaggagtgaatcaggcatgattcacgaccaaaggcaaggagaaaatttattattaattcaaatcttgataatttaaattaacaacatcaattctgttgctctgaatattccgctttaagtcctgttaatgattttggagcaaagagaattcgaaaaaaatctccctaacatttccgattattaaatacattgttaattagggttttctcctagttatccaaagtaatttctatagtcaatttattggtgaattagaatctacggaaaaggg

SEQ ID NO: 43056 - DNA, 1530 bp, Oryza sativa
cgcgcgcccctcccccacgtgcgtactgttgggcccacccacttctccctccctttttccacaaaagatatttcacctaatgtacttccaatgtttcactctttatagatctaatgttgcagtgaattaaaatattcttttgcaaaaaaaaaacccacatattttggaaaatctctattaagggaatttggtttattttttgttccaccaaaaatgtttcacctagtgtactcacaatgtttcactatgtatagatctaatgttgtagtgaatgaaacattccattgcaacaagaaacccacatattttgaaagcccctattaagggaatttggtttatgttttgttccactgaaaaatgtttcacctagtgtactcacaatgtttcactatgtatagattgaggtgtagcgaaaacattagtgtcttctatgcgggtttggatgatgttgtgtgcaatgtgaccgcttctaatcagatcgtgctgccttcactagcgttcctcctcagctttggcacgtgcttcctcttgctccctagtgatgccggtttgctcgtctttctctgtggtgccaccgacaatgaagactttgaagaaaaactaaagctcaaattcggaagtcgttgtagctactgagactatcaatgtcgaagtcgttgtagccatctaaaaaactaaagttgttgacaacttccgtggtgctatgtcgcacccgaaaatcaccctaaaattgcagtgaactgaaacattctttcgctatttgctgaaacattgtttttatataaggtgaaacaacacccgatttaaacgtgtgaaacattttcgatctacttagtgaaacaattccgatatacctagtggaacatcgtgcaacatttaaaaataattcaataataatctaaattttttttgtcagaatatatctatgtgaggtcttgttttgaagatttaattgcaacaaatttaatggtgcaatcatatcatgatttagataagtaatttaagagaaaaattagtttaaagaaatttttcacgtaagtcgatggcgtcagcgtccgattttaccccctcccgatcgggcacccgaccgggagtcgtctcccccttcttgggccattttcggctcaaattcctcccctctccccctcggcttaaattcctcccctccctctctttcccatcctttctcggcccggcccagccgccccctccccggcccagccgagccactgctcctgctgcaggcgacgctgccacgccgcacatgcgatgcacgcgcgcaccgtcatgggtcccgctcgtcaggagcatctcctacctccaagccaggctattcctctctctcccatgaaactcaacactcccgcctcctttgatctccctcccctatcgttccgcctccaaattaattgcaaatctatttcttgtgtagcgggcatcaattcccctaacaaatcccattcaatctcgtattaaatcgcactcaatcgaattctttaactgatggactaaattgggagactcactgcc

SEQ ID NO: 43057 - DNA, 627 bp, Oryza sativa
gttgagaaaagaagcagaatattctccagatgtttaaaagaacagataacagtgtggcaactcgaagtgtaaaatatcacaaaaacaaaaactagaaggcatgaaaaagacaagaatttattcacagaaggtactaacattttgtcattcaaaaatctatttttcaaaaagaaggaaatagaaaatgttaaaaatatcaagcctcaatacatgaagcacggatatgaccctcaatagtcaagcctagcaaataaaagcaagctcgagccaacatgctaatttaactatgtgcatatcacatcaagcatgagtcataaaactttttaaacaaagaaaatgtatagtaaacgtatgcgtgcacaaatgaagtagaatctgaaatagcaagaagaataaatgactgaagtattcggagggcagaaatcgaaagaaacagacttcaaatttagaacataaatgttttacactgacctaaatgaggccatgcattacacaagaaatgcatcacagctcaaatcagttccaaaactccaatacggagagagcctgttgacctcctgcttccagataacacgagtttcataagtctactatttttctagttctagtgcatgaaatgatccaaat

SEQ ID NO: 43058 - DNA, 598 bp, Oryza sativa
attactattctagcgtgtatgacagactagttcctctaaggctggatggattcagtatgttgtttgtctcagtttttgcatgttgggattgtccaacacctatttttattcctactgtactcttggctagatgtgctacaacacagacagacaggagaagtattactcatcttccattgtctaagaaaaaggaacggagggatgcaaaatatagtgggattattcctataaagtacttttgcgcacaaaaacatccgttagaagccagtgttttctcttcttacgctaaagagtgagatgagagagaaaattcctacactatagatcttttggaaaacatgattttaaaatgtaggaacaagaaaaacattttccacgaatatgatggaagtgaatccatgggatagattttgaaaaaaaaaaactcgtcgttcggtagcactataggaaaacatatgaagtttgagagacggagagaaaacattataggtcttgtctcttcgtaatttttcttcaagattcatatgaaatgagcaattccataggaatttcaaaagatcgtgtgaaggtattagtccactttacacccttcaactat

SEQ ID NO: 43059 - DNA, 504 bp, Oryza sativa
tttaaataaaatgaaactaaaagatgctttaggacgtgttgagtatatggaagatgttgtaaaaaacaatgaagtgctttctttccccaaatgtcgtaaaagcaaaggtgtaatggtagattgtgaaaattgtgctaatttggaaaaagaggtttcttatttgaaaaattccttgctaagattttctgatggcgcattttttcttacagttttttcctcgtatgttttttttaaaaaaattaccgacgatggaaataatatttctcgcacgtttttatttttttatggaagatggaaaacctttttgagcatttttttgcactttttctgacttttttctcacgcatttttttgaactgtttttatttttctcgtgtattttctctttttaaatagttagattagattagagatagagaagagatatatactgattagaaatcggaatttgttttgccctttctatttttttctcgcgcgtattttttattttgtatgaactag

SEQ ID NO: 43060 - DNA, 686 bp, Oryza sativa
tgaattcaccctccactgttacgctcgcagaagaatcacaggcgctgctgtcaaaaaaaaaaagagaaaaagtcatagcgctgcgtgcgttgcgtcgacacgggcgcacggcctcgtcgtcgtcttcctcccggcgagacccatttttttttttactgctccccgcggccgcgatggatggagaaggacgagatgctgacgcgggcggcaggtggggcccaccaccgcgtgcagccacgtcgtcctctctgacgggtggggccctgggcccgtccggtccgacgtggcggggggtctccccgtaccctcgtgctcctgacctcggatgcctttttcccgcgcggctctcggccggtgctcgcgtccggagtccggacaccggacagcgcggcgctcgtgcgggatgccgccacgtggaggtgtgtcgtggtgtcgaacgtgtggtgtgtgttcggatctgtggtcatctggagaggttagcgaagcagttggatttgggattttggtgatcatttgatgatgggttcttcaatcttcaacggcgacgtgcggggtgtgagggcttgttccgtattgccctccgtttggagggggacctgcgggcgtgagccggtgacggcgatatgtcatgtgacgtgctcgtgcgctttctagagatataggaggcgtcatctgagattggacct

SEQ ID NO: 43061 - DNA, 687 bp, Oryza sativa
  unsure (1)..(687): unsure at all n locations
agctctctcgnacccttgatacgtaagcatagggaaaactgtgtctagagattagagatctagaaaaatgttttgctaatatattttccttttaagaagcccagtactatttggaaagcattatcagttatttcgtccatgtacataacnatctgtgcaaggcttgccaactatgttatcaatgttatcagtgtgttattttcttattttgtattatcaagcacagttctctttccttcctatgtcatggatttctatgcatcctgagggaatgaagccgtgccaattctgtttttatgtttactgctgtcctagatgttctacctttgtaaccttcctgtgcttcatcattgtcatcagtccattcactattgcaggaatccaaactcaacccttgtgctagggtcttctctccttcgtttgcaagttccagaccagtacttgcagctgcaccctctgttaacccaatctacatctcaaactctgtagctggagttccaaccgggttacctgtatttgaaactaactcagtgccaggcggttcatccctgtccagcaaggctgttcattataataacctggctgctgcaaactatgctatttcacctcaatatactcagtcagtaagttctttgattaattcttttataatatcattgttgcttcaatagttcatcactttcttca

SEQ ID NO: 43062 - DNA, 662 bp, Oryza sativa
atgcttgcttcagtttaccaaatttctatagctaaggtgtggcatgccacaatttatgtggctaagaaattcttggccacaagttaggcaaatgttggcaaatgtatgtgcctatgataagtggggtcacaaaatcaaaaagtgtggcatgacaaagatgtggcaatcaagcaaacactaggctaaattggtcaaagtagcttgccaaagttgtggcaaagtatgatcaccatccaaacaacccctatgtatccgcctctctgcatctcgttggcaccacgacgggtgccatgccaattagggtgagattccgcttatccctactgaacggatacgggtttgacgcataacttcgagcgagccggcagcgactgcaggatcgccaggttcgtcaagaaatctgacctgcaggaacatgcaattcgccggattcggttcactggcaacgacagcttcaagatcgagtgttcgctgaccgtcataagcgagtctcgcgctgaagacgtgagcacgatcccagtcccgccgtcgaacctgcaccagcacctcgccgggatgttgcacggcgtcgagatcgcggatgtggagttcagcgtcggcggcgagccgttccgcgcccacacgtgcgtgcttgcggcgcgggtcgccgtgttcaaggcgga

SEQ ID NO: 43063 - DNA, 628 bp, Oryza sativa
tttctagcattgtccacatacatatagatattaatgaatcaaacacatacatatgtctagattcattaacatctaaatgaatatggggaatgctagaaaatcaaatcttacattgtgaaacagaggaagtacctaaatatcacatcagatatacctgaagaatgtaatcagatattactgaactacacttcttttcagccacaccatgcatgtaaacactagaaaaattatgcgactgtaaaatctgaataactaatgacggatcgacaagctttaaaatgaatcatgtcaacagaacttagtctgagaggctgcagtttgctagtagcatgaaatcaagaactaacttatctgacaagagggagtatcaaattaacaaatcagagaaggatgagcacatgcgtaacagcaacagtttcttaatttactcctacgtactaacagtacatggatagaaaacagttcataaacatctagcatcagttcctctgaaaaccagaaaaagaaggtctctatcacattgttgaactcataataaacgagtacaaaaccataaacctgacagggaaagatctaaacggattaaaagaaataatgaaaaaaacattcttacataaacaaacgagca

SEQ ID NO: 43064 - DNA, 671 bp, Oryza sativa
tgcttccatcgtccgtaaaaaaagtggacgaaaaaaagaaaaaaaccaaacatatccgattaaaaaaaccagaaaaagaaaaaccaaacgtaaaatagggggcaataaaaaaaaccagatcggtccgataaaaaaaccagaaaaagaaaaagaaaaagaaaaaccaaacgtaaaaaaaagggcgataaaaaagaaaaagaccagatcggtccaataaaaaaaaccggaaaaagaaaaagaaaaccaaatgtaaaaaaagggcgataaaaagaaaaaaaaaagatcggtccgataaaaaaatcccgggcgaaaaaaccgggaggaaaaaaatgggcgaaaaaaataatccaattccgtgaaaaacaaggcgaaaaaaataaaaaaaaaagaatcggtccgattctaaaaaaacgaaatcgggcgaaaaaaaacccgtgaaaaaaaatcaggcgaaaaaaagaatccgattttgtgtaaaaaagggcgaaaaaataaaaaaagttggatcattggggtgggggtggtggggggttccctgagagccggttaatgaaatagagaatattggagcattttttttgtcatgtcaaatacctttttcctttttggagagtagcatgttctatgtcaatgagacactggtaaagaagtagatagtaaattggttgttt

SEQ ID NO: 43065 - DNA, 674 bp, Oryza sativa
caaacttttatgatttatactatcaataactttaaaaatatttagtttaaagaaactagaacaatatatatagatttgtcttttaaagtactataataaaagtaaacatgcatttatttattatatatattatgatataaaaataagatcaaagatatatcttgtagaccgtgtcattgtccaaaacgtcaattaaaatgaaaccggagggagtatgttattttcatactgtcgactggaatgccctacgataatcggattgtccggttctatagttgttttctaccggtgttgcattgaccagactgtcctatagctgtaagataatccaactccagtataggctgtgtttagtttctgaaattggggagaagtttagggaaagttggtagtttggaaaaaaagtttagagtttatgtgagtaggaaagttttggatgtgatgtggtgtgatggaaagttgggagtttggagaaagtttgtgtaaactaaacaagaccatagttggactgtccggttagttctaattctgttaaaagttttttgaatttcaggaaacatctattctaccctctaggcgacaacaacaatactcaaggcccttttcgtgaatgtctgcctttttttttttttttttgcaggggaactgatactatagccgtgagctataaaagg

SEQ ID NO: 43066 - DNA, 663 bp, Oryza sativa
tatgcgttttaaccagtgagataacttatacgattgataaaaatcgaaaatagacaaataaaacaacagcaaataaagttagaaaccatgtatagcattgcgggttacacgtgcttcatgcatcatggaacgaacaatcccttatgtacacttttctataatctcacaaatcaatcaagtgtctattacataagttgacgcattttactatacctcgtcaatcaaatgttgaaattttgtttattcattagtaaacattcttttactctagatggaaaggtatttgcaatgtaacaaacttactacatttcacattttaaacaatgataaattcaaaaggaaaatatttatgagaagaggaatttcgaagagaaaaaaaaagaaaagagatgagattggaagtagagggagagggtcaggattagcgagagaaaaagaccgccggtcggagaaggtgcacgtggcgtcgattggagacgcatgggatggtatgggtcggtcgagttagggtgggagagagaaaagttgagctagttgaagtgggttggtttactcaacaaccggtggatttgaacgctataccaaaatcaactgatgatttcgtgttttttcaataactgcataataggtggtccctaaaagtatatactagttattttagac

SEQ ID NO: 43067 - DNA, 651 bp, Oryza sativa
tatgcggtatttcaaactctcgttgctcttaattgaatttggtataaatattagtcgatatagcggaacgataactaatcttcccgatcgcttcagtcattgaccacacaagacatgctaggtgacgacataagaacacacaatatttgttaacaaactttagctaaagtctacatctctagggttctgattatgggcaatcctccacaaccaatatagcacctagccgctacgagttcatggcctcgccgccatcctctccctgtgtgtctacactacattgcagtcctcataattacattatggtacccctctctatttaagagagttgccggttacagagccagagtccgactttaactctacccctaccatctattataactctaagtccaactataaccatatacacctattctaacataatcgatttgatttaaacatgcgcttgtttcatccaataaaagaagtgtcttttgtgctagattagatttgacaaacaaaatagcacaattgcatcctctttttgtcaattcttgcagtggcagacatgttgacttcatcggcttgccgtacggtctcacggagcgtgtgggagggcatcaccgggacgcacgacttcgaggtggtcggctaactcgtgatggacgg

SEQ ID NO: 43068 - DNA, 606 bp, Oryza sativa
cgcggcggcgaagagggtgatgctcttcgcgccgccgccgccgagcccggacctgcccgtcgaggtggccatggagttcctcggctcgccggacatggtggtcgccgctcactaggagggcggatcgtgatgtatttgctgcgatagacctgtagatttggggatctagctctcccttgtttcgatagttttgtggtttatgattttttttttccttgtttggttgtactgatatgtgaaaacaaagacaaaaaagaatacttatgctttgatttgctaaaaaaatacgaaagtgacagaaaagagttgcaatatgactggatgctcttactgtgatctattgaatgctctgtgaattgaagctattttgttcttgatttttctatgggtatagcatgttgtatttttcattgccgtgtgaaagtaaagaggagctggtattacttcagaaattgaaagctatttgtctacagtaagtaaatttgtttggcaactaccctcttatctgacataaatcttagtatgctttcttggttgtaactgctagtaaccaaaatcattagtcagagctgccttcgaattaactttggtcatgtttttctctta

SEQ ID NO: 43069 - DNA, 616 bp, Oryza sativa
  unsure (1)..(616): unsure at all n locations
tcataatgtattcatgctcttggattgggagacaacactagtgatactttaagacacttcttgctcttatggtggaaatcacgtgtctgattcttgattttggtaaagcactgtagtactaatacactacaactagaagcctagatcagtgtagcagcaatattattaatagatttcactgactaaaggtctgtttaggagtttaatattctaagaagtagttagttgatagctagtttctatgaatctggtttctagtttatcttctgaaatctacaactacatatttttatattctagacgaaatgttaaattgcttgggcaaacttttgattctgaaaaaaaagttatagctatcttaaagtcagtatagacgttaacaggtgactgcttgaaactgggcagtcggcgagatctaacatggaatgttccagaacccagcagggagagatgccgatccaccggaacggcgaaggcatacacggctctcgccatccatccgatgtccccatccatatctncccccaaccaagagcagccgtccgttgcaacgcccccttgcccactcactgacgcgccaggttttggccgttgcaaccccgcggcccccttcttt

SEQ ID NO: 43070 - DNA, 648 bp, Oryza sativa
  unsure (1)..(648): unsure at all n locations
agttaaattagcatgttggctcgagcttgcttttatttgctaggcttgactattgagggtcatatccgtgcttcatgtattgaggcttgatatttttaacattttctatttccttctttttgaaaaatagatttttgaatgacaaaatgttagtaccttctgtgaataaattcttgtctttttcatgccttctagtttttgtttttgtgatattttacacttcgagttgccacactgtttatctgttcttttaaacatctggagaatattctgcttcttttctcaacatacattatgataggcttgcaatgtatctctcattttatctgcctctaacttgacatggaatcgattggtggggctgtatttcattctgtattgtgttgtgtattcagcttggttgagattctatgtatacaatacttaaaaaacagtgttctgcttgcccttttccttgattgggtagtcttattagcatttttggccacttaactccattataagtctgttaagtgaaatcttgtctacatgtgtactattagcttggtggtttcgcctccataatcttatcaaactttagcatggttctgatgaacatgttcctggaatgctgagctatcctagntactctattctaaatgtcttcag

SEQ ID NO: 43071 - DNA, 565 bp, Oryza sativa
cggtccgtcatccgtgtttgagtcagttataaaaattaaagatgtttccgtggttcgtcatccatgtttgagtcagctttaattttatgttttggttttaatctatatctctatgtcatccgtatatgagtcgatttttaagttcgtttgcttttgaaaatacatatccgtatttgagttggttttaagatcgttcatttttggtaatacataaggaatcatataagagatctatttaaaaaaaaaactcccatgctaacttgagatgatcgaactcctaactgcagctcatgattttctaaaaaaaatatatatccaagcgaactcccacaacgaatttcattttaactaaaccatataacaataataagattaaaataaacttcacccattgcaacgcacgggcattttttctagtaccataaaaataaaacaaaaaaatacattatcaaaatatattcaatgctagatttaatgaagctaatttgatattttagatgtgtataaaattttatataaacttaatcaaatttaacaaagtttaactagaaaaaaatcaaatgac

SEQ ID NO: 43072 - DNA, 583 bp, Oryza sativa
aatggttaaacatgtactaaaaagtcaacggtgtcaaacattttgaaacggaaggagtatgacacattctaatacatgaatctgtatagagagcccgtctagattcatagtgctaggatatgtcacatctcttatattatagaacggcgggaataagtcttactctcctattgtttcacatatcagtgtctctaatgatattgttattatgggaaaggacccgatatgatcaacgacgttcgctcgttcttcaccgacgcagtttttgtcagccatccatttttttcgacggggacggcggaacgacgccgacaagtcatcagtcatctagttgcagcgtgcaaacgacgtacgcccgccgggctgaactgaaactccggcccgcttacgcaagggttagttgacctgggatgaactggctccatcatccatgcatattcgcgattccgtagcggagttggtcggatgaattgcgtgtatattcagacgattcacgcacaggatgatggaggtgtttcgcccaacgctctcgtaggtcaagtccgttgggagcttttccatttgcgtaacgacagtgaaactg

SEQ ID NO: 43073 - DNA, 615 bp, Oryza sativa
tcctacacagatgcacaacaaataattttccatgtttatggcatgtgactagtcaaagtcctaacatactagcagccacctagcaaagcaaaacatttctagtatgatctccctatagtcaaacaaagcccttggagccactgacagtgggctccacttcacaaatacaaactccctggattaaataagcaccaccttaaatacgtgtccatcaacaatcaaaaccaaccaacacgctgttcaactccagaacctcactaagtttctggcaaggtctaatcttaaaataaattttcttaatgggtcaatttatcaaaattgctgccagaaccttctctattagctctccacaaccacacaaagcttcgcgccacgacgctctctcgcctctctgctgctttagcgttcgcgcgcgcgcgctgcggctggctggctggaccaagctaatagctatggacaccgtcgtggcggccgcgacgacgggatcgagacggtggctgccgtgggcgcggcggcaggcggcggcgtacctggcggcggccggggaaggcgacaacgggtgggcggcgtgcgcggcgtcggcggtgcggatcgtggtgtgcttcgtgtccatga

SEQ ID NO: 43074 - DNA, 669 bp, Oryza sativa
  unsure (1)..(669): unsure at all n locations
gacttggtatatgtggtgctaatgtgcactatgtagagatgtagcaaagtgacagtgtgacacgacaccagtagaaagtgatcggtgtgtgttcctattttaattaatatatttcgatgtgatcttttaatttcacttcgttttttcaaatttcctctttctgttccactgaatcgagtagaaagaattattttctctctgctccaataaatgttcgatgataagatgaactgtattccgtgactatgataagaatgtgttttccaggtaataagaatcatatctcaattttctatttagtgagaaacttaattactacaacaatagctaagcattagattgatactagttttcctaatgtatagttggagggccactagttgtcatgaagattaatcaaagagcagtggtagtgtagagacccattccaatatattaaaaaattatacagtcttggtacattactcccttcgtcttagaatataagcatttttagtatagggatagatcaaacattttcaactctaactattaatagaaaaaaatatcactcatataaaaatgatgttactagatgtatcattaaacaaattattataatatataacctttttatttaaaacatactacttttatagatattggtagntaaaagtacatctcggaaat

SEQ ID NO: 43075 - DNA, 677 bp, Oryza sativa
cgagcagggtactgaacatgtgaatccacaaccgttatctgctggggtacctattaaatcaggtcaacctgtattggcatcatgcaaggaagtcgctggagggaaaactgtcaatgagattcaaacagtctctgaatcttcaaagcacactgaagagtcatcaggtatgttcgttggaggaatgcaatttgatctactttgaataatatattacctctggatagaaataaagcttaaataatagatcacattttttgtgtcattataggggaaaggcatctgcttaatgttccagtaatggatgctataaaggaatctttgggtaagatttagatgttgtatgctcgattcatgtgtgtcacacacaagtagattcagttattttattttggggcatgacaaattcagcacgctcgttgtcaagatagcatctgtacaacactatatatgccccttctgccctcgatgacttattttctatcaagaacaatcactaaatggatttgtatctttaggtcccaaagagcagcctaatgctacaaatagcaagcaacaaacttttatgggaccaccgggtaatacataattccattatttgacatgcttagtattaaccctctatgttaatgctgtgatatgaatatttagaaagcacagaacaagctgtgcagctgaca

SEQ ID NO: 43076 - DNA, 672 bp, Oryza sativa
ctgaagtggattgaggagaactccagtggacaaccaaccaaattttgactccctagacctgattacttcatttttgatgtggaccacttcacttgtttaatctgccttgctgatgagcacagagccggtggctatttataagtgtatgtatgactaaagagtaagctagctagctatctgtctcctgtggactgtggtgtgtgtgtgtgcatatggtcgtccttgcaatgcggttggcatatattggatgaacttggcaacggatgcacctagccgtgatgcagactaagttagaagatggagtgtagtgaggagaatccaatgtgatctttgggctgcactgatctccgaatcgtagaaagcatgcatatgtggagcaaaaaagtgcccagccctgcaaatttcttatcaccagcagagcactgtgtcgtcgcccggtttctgtccacgcacatttctttcacctcaacaaagatggagagaaatcgtcctgaccattgacttgctgcaaatgcgtgcaaattgcaagccccgggaggaaacatgtgtatgtaagaatggatcacgagtaatttgcttaagttgtactaggcttccgagcacgtcattgcgttcgtcggtgcgttgcggtggttcctggtcttttctgatgtaatcggttgcaatatgccc

SEQ ID NO: 43077 - DNA, 642 bp, Oryza sativa
acttcagtcttcagatacacacaaagcctgaaatgaaccaaccgaccggaacaaattctactcctagaaagtagaaaccaatcaaaggaacggaacaaaacgcctcgaccacgcatggcctcatcttctaaagcggcatggcctctcagtggtagcaccaattaaatcagaacccggagaacacgaacaaggaggaggccaaaaccgacacagccgcacccaaacagctccagagacgcacctgcgcgaagccagtggcggccgtcgccgggcggacgacgagcaccggccggctccgggagcagagcgggctatgcgccatctccattgccagcgccaaaacctccctcctctccccctgatcccctcctcctccctccctctccctctccctcctcagagctgactcccttcccttctttttcttttctggtttccaaaaactcgcatcgaaatgcgcagctgtgtgctgtccggagacacacacacgcgcgcacgctcgatcgaaggagaaagaaaggctcccgtgctttcccgtgaaaatttcgcgatctttttcttttttattttctgcggcgagagggaggaattgtgcgggatttgtgtggacggtgtaaggtgcccaggtggttgggcccttaa

SEQ ID NO: 43078 - DNA, 664 bp, Oryza sativa
  unsure (1)..(664): unsure at all n locations
agtatgcctcactttttagattagcagatgaacaaccacatgcttatgccaaagattgaaaatagtgtctgaaagattcaatttcagtatgtatgtgccactgacatacatactaacaaggttcactgtcactgattaattactgcatgacctataacagattcaccatgctttggaacttcatcatcgtcgaactcttcgtgcactatatcaaccgccgaagaaataaattcttcgtcaccatccgatgaaaactcatccaatagcatttgaaggagggtgcttcgacgactcatctcctctttttgtttgccacggggttggagcgtttaccacagggatgaagtgcaatggagggaactgatggcaggaatagaacaataatcaatctgcaaaattaattatcagatcaaacttaatattttccaataatatatatccacatatcaaaatatagacatagagattgactacgacacaagagatcaatgggaattgctaacgattaccctcttgatgacacgaattgctacggcatcttcttggtgtttccgtttttaacaaatcgcagcagtcaggacactggttgacttgcttgtgatgaccgcgctaagtcacggccgcgcaagtcccgggaggaagaagtcnatcggcgcttgtgcgg

SEQ ID NO: 43079 - DNA, 513 bp, Oryza sativa
tgtttttgaatcagtcaaccttctgtgcgatgtaattgaagtaatcaatgacatagtatcaaatgctagggtaaagtcagaacacgataattcaacaaaagtgacagtcaaaatagacggttttccaagattaagctgttctacttcagcagatgcatccattgtacatgaggttctacatggagacaaaatgcacgtcgataggtggataactctgagagaatatattcaagatgtagttcgtggagctatacctgatccgcaggttcttctcaagctactctcttctgctagtcagaagcatcaaaattattctcagaggtaacaaaagaaacatgcacagcttgagcctcctcgaaaggaaaggagacgtggagccacagatgaggatgctgatattattattggcgggattgatgttgagttgtctagggatgagcctgaagagcaagagatgggacttggcaaatgatcatactactattctgtgtgagatatggggtctaaataagc

SEQ ID NO: 43080 - DNA, 639 bp, Oryza sativa
tttatccaattttcaagacttagcagatgggagtgtggaatatgtgaaagaagattttgctagtttttctaaggaaaagctacaccttgctgatagttttgttttaaatcttctgagtaatctatatggccttgtattattagctggtagttttggagctaactactctaataatgatgatcaatcccttgagtcactgtttggccctccgaagctactgcttgagagaatactactgttgttcaaggagaagtttggactctgcatggagaaaaagaactttggactgtttttgccaaatttttacatgttccgtacactggcaaaatttgtatcttctgtcagactcctggaacttgcaaactggatgttctcaacggttgaaaggttcagttccagttcacctgcatatgctcccgctgcattttggtgtctatacactgccgatattggcttcgaaatgctatatgactatttacaacaaaatgatcagagatcaggaccctgtcgattatggggcttggggaatcatattgtgatattgccaccattcagcaagttataatatcattcttcattttgctactaaaatgaatctttgaattgctgatctttgcttgctgagatgtaaatcgtatc

SEQ ID NO: 43081 - DNA, 676 bp, Oryza sativa
ctaaactattgagaatagatcactcgttatttacatctcatctaaatggttataaattttttttaaaaaaaatcaataaaataaattaatatatgatcaatcactccataaacatgcaataccaaaattaacttctacagattgtaatggaaaaaaaacaaaatttaactatgaatatacgttaactatttatagcttaattttttttaacatgtaatggttgaattttaacttgcatgcttatggaatgatctatcacatattaatctatttagttaaatttttttaatttttttcataataatttggatgatatgcaaataacgaaagaatgcctgatcctaagaatttagaatccactctagtgtgtatactgtagtgtagcgcccacttttttctttcttactatgcttctatatttgcaatggtattactaattactccctccattccattttaatcatcccctaaggtttttaggtcttgacattactaattactccttccattccattttaatcatcccctaaggtttttattgaccattgacaccatttaaattcaaagaacgacgagtcaatatttatttccttattaattacaacaagtagtacgggtactaaggaacaacgttacgtcatgggagtctattgacgctattcaatcaaagaacgac

SEQ ID NO: 43082 - DNA, 1036 bp, Oryza sativa
tgaacccatctctatcatgatatcatcctggccctaatgcccacctctaccgtcagacagatctcctcggttccatggcaatgatatcctcttatcccctaggtccctcaatgccaccccctaggaggtgttgagaaaattaaggggagagagactggagggagggagaggaaaaaaggttctactatttttctttatttttgttcgagagacttatacgagggtttcatctaactttttttattgaaaactaaaaaactggatcaatataatattgtcgagtgattttatttgcaccgttttaaaaatttagaggataacatatatatggttttacagttgagagatgtgaattaaattcgaccatagttgaaggatttgaaatacactttttccttaagttcacgaggagtgtcaacgatgacctggctcggcccagctcgatccattcagcagcaattctaggcccactctcttattctctatgctgactgcagtgctctatccttttcgctagtcaggcctcgttcggatgggccacactcccagaccatttatgtatgagagaattccttatatgccactctaaattaaccggttttcttatatgccactttaaattgacttctcccttttatgccatcggttcaagtttctcctcccttttatgctattgccgtcagtccaccgtcagttgaccgttaacttcattgtaaaaagacgcaattgcccttaagaattagtatacaaccaataataggtattttagtactaatataactactggatacaacatatgaaaattgatttttttctgcatcacatgcaattttagccattaccatcacaaataaattttcaatgtaagcatgaatcatgcagttttccaacaatatttttaatataaagagcatttttcactagttctgacaaaattttgttcactcaaaaaagatttaaaataaattagttatgattttttgaagtttacacattttttagttgagagggcatattggtcatttacgaaaaaaaa

SEQ ID NO: 43083 - DNA, 672 bp, Oryza sativa
acaatgtgtgacagtctattagatgcttcaactcctaagccctctctttcaaaacctttggccttgtaacacggcaagaaagccaaccatgcatcaatctctgcaatgttctgatcaaaagcgccagaactcgccacagcagctttaactaaaatatatgctttatcacggatgctcttaacttgcgaatgcaacataatgtcaatcagaggttgcaaatacttgtacatagattctggaactttttctgggcaccaatatccatcagattgacctgaatactcaactaaaagagataaaagggactgctgttcatccatggacagatccaaaggattaggcggcataaccttgaagaagtcaaatgatccatcaaaagagctaggcattaccctctgaaaagaaattgaagttaaaagttagaataccaaaagagtagattgtgaacgaaacttaatatatgcatttgaatatcaaaacattaaaatcataaattgtgaaggaacattatcgatttccttttgctagtcacagaaaacaaaaggagacagagcaggaatggagggattaattaattcgagcaatgaaataagccaatatagatgaagtggagggaatttaactgtcctaccagatagaacctgagaacatcaagcaacttgagtggaaaca

SEQ ID NO: 43084 - DNA, 841 bp, Oryza sativa
attccactttcattctgttagctgaaagactaagagaatgcaacagttctgccatattatttttcttttgtagtgtgaggccgtggaacataaataggtcttcaaattaatgagacaagataagaacatgagtgaagaaatttgatttcaggccaatctgcaaattacacatggcaatattaggccgtctaaagaccttcctgagtcctgacattgactagagaacgataataccctaacagtatagtcacaagacaatcatttgtgggctttctatgagttcttatgagctaaagaccagaacaaaaataaatgcacaaaaaacagtaggcaccattatactataagcattcaatcaccacatcagtattgttcatgggtttaaccacatcaggtggccaaattcgaaagcactaacagactgaaacttgagatttgttcaaggtatcaccatacttgcagacagtaattgcaagcatcatgctaacatgactaattaactaagatgtgatataaactgagaagaaaataatgtcattaattacaaaaggcggataggcattaagcagctcctactagggaaatactcgaaggattgcgacatttgcacttcaacagaaaaacttttagcaattatgccaagatgtaaatgattcaacagcaacacaccatggaaatcaatgtcgaccagaccaattcataaatggatcagtaatatcagttgataatatgtaaaacccccctgcttactaaagcgatcaactataaacttaacaagatgcaaaagaaggaaacccaataaagaagcgaagtagaacgtaccatccgttcttaattgtct

SEQ ID NO: 43085 - DNA, 669 bp, Oryza sativa
acatttgcaaagcctctacagatgaggaagcctgttgagaaatctgtcgctaagtgagagaacctgaacttctgtagaaattctgaagtctggagaagttcaaagaaggcaaaggctagtttagattaagggaacagaacctgcggttgtgatttctctgtactgctccatatggcattggacggttggaattgattgatgtaatcactggtgctgtaatctcttttcttaaatactgaggtgtcagcatttatgtctgaggctttgacgaatcggttgccggatctggagctggatgcactagttgcatttacaagtgtgtatggcaccttgtagaagctttgtagaactgtacttaaaggtaactccatattttgtgaactatgatgttcagtgttcgctccacatgatttgtgttcgctccacatgatgttgcggttgaaaaaaatttcacatgatgtttgtgttcgcttcacatgatgttgcgatggaagaaaatttagtttagtggtcgctccacatgatatgttgcggttgaagaaaatttgtgttcgctcacataatggtgcgggtgaagaaaaattagttgatgttgtgtccgctcacatagttgatggtgtgttcgcttcacatgatgtgcggttgaagaaaatttagttaggtagctcc

SEQ ID NO: 43086 - DNA, 563 bp, Oryza sativa
aataagaaacggaaatgcctagaaagataagtaagcacaaaaattcaagaaagtagggtcagtggttccctcacctcgcatgaatctctcctcgtcggtgaaatcctcgatctcatcctcaaagctcccaatatcccccaagacggccttcgagctcaccaccggagaagcctccatcgtagccggcgctggtgtcctatgaggaggtggtgttggcgcttgagatggcggcgcggggcctctccgcagccgcttgaatcgattcatctctggcggcggcggcgccgggtcggggacaacagtttcgtgccgccgttgctgttgctgttggccgtcggcgaggacgaagtcgtcgtcctcctcctcgacagtcccgagctcgtgacggctgccgccgatgagaacatcgtcttcgtcgtcatcgaacccgagggagaaggagggtgcatcgggcgcctcgtagcgcggagcttggcggcttgcgttggggaggcggggttcgtcgtcgccgtcgccgaagtcgatgccgagggagaaagaggcgcgtcgggcgcctcgtaacg

SEQ ID NO: 43087 - DNA, 633 bp, Oryza sativa
ttggtcttccgccgctcttttggtcaccggtgagttcgccgcgtcgcgctctacccgttggtgccctccgtttgcgtcctcgcgccgccgttcgccggcaagcgtgcgccgtccgagccgccgagccgccgccgccggtggtgacgtcatcgctaatgtcatcgtggccgtctgccgtgagccgccgtggacccgatcgatctcggccgtccgttttggatggatcgatctcagccgtccgttcgcgtgaaccgccgccgtgcgcccggtccaccgcgaaaccctagccactgatgcaataattccctttttccttttcaaaaataattcattattgcgtcataattcaattaaaatcaatataagtgttttaatccgaattaatcttcaaaaattcataactaattcatcttagctcggatttagttggttcaagtctctaaatttttctaaaattgagatctacatgttaaaaatatccacatgtactggtcatgcttggttatgtgctgttttggtgattttgctcttttctgcttagattccgtcgtttcggagagttcgttttcgccggagaagagtttgaagagttctaaggcccagcaggcaagtcacacagatcccaaaccaccc

SEQ ID NO: 43088 - DNA, 649 bp, Oryza sativa
aaaatcagtgtatataccaaacaaattgaagcacacaaattcagtgtatctaagttcagagtatgtatgcgcaaaaaaagtcagtgcacataccaaaaattggcatctacccaaaaatcagtgtatataccaaacaaattgaagcacacgagtttgtgtaaaatcagtatatacactcaactttactagtcttgaaacatgcgtgctcagagtttagtgcttgggaaaaatgtagctagtgtagtatatactgatgtgtccttttagcaagaaatatatctatctttactattataaaaattgaaaatgtttttgctgaattttttgtacatccgtatttgaatcggttttcggttttaattgaatatattttattgtcccatctatttttttcgacggttttttaaatctccgattgggcttctttttttttatccatccggttttttcatcatcgcatgtttccactcaatccgatacgatcgcccctttttaccgctctcagggcccgggcccaaaccctagcaccgccgcgatatcgatttgtctccccgcacgtttcatcgtattattgattgtaaaaatcgattccccactcctaactcattatttttcctatgatttcttcctttaaatctccaattgaaga

SEQ ID NO: 43089 - DNA, 642 bp, Oryza sativa
ctaaaattgagcttaaatttgaatttgagggaattttgcgagggcatttggaaaagattttgaactttaaattgggtttgacctatgtctttggagattgactcaaaagagttaaattggtgatatccggaccaaaacttggacaaacctaggacagagataagcctttcttttcaagagagaagattaagatttactcttgagaagatccgtggataatacaaaaagtcaaatatactccctgtcccataaaaaccaacctagtattgaatgtgccttgattcgttgtattaaaatatatcacatctagttttagattcactttttttttatggagggagtacgtaggtagtgccaagataaagggtttaattttagcatgcataacatgtatgcttgtatcaggaaatcatggtctcattatcaggaattttttcctcgcaggctataccaacaggtgcatggcatcacatggtgtaagttgaacaaaatgctttcaattacccaaaatagatgcacagaacaacccactacgcccccataacagcaacccaaacccccccccaaattctggtacttagccggaaagatgctaccagtaagaaggtaagtttgtgatgggggaaattaagtgaagcttga

SEQ ID NO: 43090 - DNA, 652 bp, Oryza sativa
aatatgagcatatggcaatcagaacatgattaatgccttatttagctgataaggcttaataattaatacgatatacactgcgtccaattggactggtcttccgcgcgaagccgcggttactttctagttcaatatagtacttgtagtaatacattataggcgcattcactatcagcaaatacagtttcatcacatagagtttcatcacatacattataggcgcagtcactgtcagcaaatacagtttcatcacatagagtaacattatcatttactggtctctgggagacgcagtaaatacagtttcatcacatagagtcatcgaaatgaaaactttgacagctttaaaaccgaaactttgtgcagccaatcatgtgattttcagattcgaagacggaatcttcaagttccatcaccttcgtatgaatccgtaactgctaacggactacacaaaccgaggcggcggatggggaggtttgatcacgccggcggcgaagggcagcacggaggtaaggggggcggagtcgggaaagagaactccgaaaccccattattgggccgatcgacgagttcccgaatgggccgcatgtaatggcctgttagaaaagtaaacgtgagatgcacgtaagggaacagtatcatggcccacgtg

SEQ ID NO: 43091 - DNA, 724 bp, Oryza sativa
agtaatattatttacaaaatttatatatctctctcatagtttataaactatataagagatatgtacattttgtgaacaatgttacaattcgctttgtcggatgaaaaaatgacccaaataaaagttatatatcttgatgagttataccacttgttattgatgacttttttaagtggaaatcatgtagtatttgaaaatattgtttgaagttgtcataatttgaaattcaaattcatattgttcaaaccaagtcatatagaaaaatgaccaaaacaaaagttgtaaatattgatgagttgtacaactttgttgttgatgaccttttcatttgaaataatttattatttgaaaatattgtttgaagttgttataatttaaaattcaaattcaaaattttgaaacaaagtcatatagcaaaacgacccaaacaaaagttgtagatctcattaagttatataactttgtttttaacaattttttcacataagtttatttaatatgataaaattcgatttgcagttttaatattttgaaattaattgagaggagggaggaaaaacagacgctgggccggcggcccgaaggagcagctggcgccaaactttcagtgtggcaggatgttgatcaaaatttcaatgtgaaatgaccattttgtccagatattttagtggtaacttcggatgcaccatgggtattttagtaaaatagccaatccaaatcagat

SEQ ID NO: 43092 - DNA, 1037 bp, Oryza sativa
atttcaaaacattaaaactccgagtcgaattttaacttttgtgaaaaagttatcaaaaacaaagatgtataacttaatgagatctatcagattaaatatggtaaattctccatccgagtttgaataacctatataaatttggtatataatatataaaatacttcgtcggatgaatcgatgaccaaaatatatgttatagatattgatgttttaaacaactttgttattcatgtctttttcagttgcaatcatttagtatttgaaactattgttcgaagttgtcataatttgaaattcaaattcaaattattgaaatgaagtcatatagcaaaatgaccaaaaaaaaagttgtagatcttgataagttatacaactttgttgttgacaatttttttcatttcaaattatttactacccgaaaaattatttgatttttcttatattttaaaattcaaattttatataggttaatcaaactcggatggagaaataaccataataaatttgatagatctcattaagttatacaactttgtttttgataactttttcacaaaagttaaaattcgactcggagttttaatgttttgaaattaattaagaggagggaggcaaaatggacttctcggcgagagaggagtaaatgggcaaggccggcagcccgaagaaggaggaggggatggggaagccggcccaaggatcaggagagaggctgcgggctgagggagagggagagtaacacttgggccgaaaaggcacaaggatagggagagggattttaatttgttttctatttattttaataggttaaatgaactttgtggtattaaaactagttattgagctctaaaaattcacagaaaattttagagaataatttagaccacttagaattttacaaaaatatttctggccatgatttttaaaggaaaattttagtaaggtgatggatttaagtggaaataatattaatattcagtccactttggattctatggtaccttctcctaatactattaataatggtaagagggtac

SEQ ID NO: 43093 - DNA, 604 bp, Oryza sativa
ataaattagagaaaacattagaaattcttaaaaaaattcaattaaagcggtgaacccattattctaagtcattagattaaatctattaaaagattgcatcccacctaaccttccaccaaataaaaaaacggttttactatatttctgtcaccggaattctggctccatagcagtcagttttgtggccactggatacgctataagtttcgtgtcaagttaaatccattgtgctcataccatcgctgcccgctgttttgctgcgttcacacttacatgtatgtgactgctggggtagttatttatatatttacaaatttacacagtagttacaccccacttacatatgtattaggatgtaattttgggatttacatatgtaattttaggacttacatatgtaattttggtatttacattgtcaatacactaaaattacatatgtaatttagagacttataatgtaaatacatgtcgagtattttttataaaaaatatgacgccataaatataactactcccataaaaaaatagaagaagaagcagataaggatgagcgagggaaagagagagagcaaattgataagatctccagaacgacgcgact

SEQ ID NO: 43094 - DNA, 581 bp, Oryza sativa
atttcgaatttcaattacttctaaattgtattcctatattgactttaaactcttcttcccatgttttttcttaattttgaattttagttatttataaattgtatttttatacggactctaaactctatttttaattttattatgtttattccaaattttagttgttttaaattcttatatggactctgtactctacttctaatattccttgttttttaattctgaatttctatatttttcttaattgtatttctatctggactctatactctacttctaatattccttatttttaattccgaatttctattatttcctaattgtatttctatacggactatatactctacttctaatattccttatttttagttctgaaattatattatttcctaattgtatttctatatggactctatactctacttctaatattccttatgtttaattctgaatttaagttattttctaattgaatttctgtatttctatatggactctatactctacttctgatattccttatttttaattccgaatttcagttattttctaattgtatttctatatggactctatac

SEQ ID NO: 43095 - DNA, 996 bp, Oryza sativa
gtcaataattacatactaagtctaattacaaataaagtaatcttatattaaaactcaaataatattacatgctaagactaaaatagtcatgtatatgctaagtgtttcgtgcgtatatgctaagtctaattaagactacaatagtcaattgctacttgtcgcaccaattccgtagtcaataattacatactaagtctaattacaaataaagtaatcttatattaaaactcaaataatattacatgctaagactaaaatagtcatctatgctaagtgtttcgtgcgtatatgctaagtctaattaagactacaatagtcaattgctacttgtcgcaccaattccgtagtcaataattatacatactaagtctaattacaaataaagtaatcttatattaaaactcaaataatattagaacactacacaatcttatatgataagtccaattacaggtctaataatcttaattaattgcattacaaatataacaatcatttatattattacgtcacttgcctgctccaattccttctagggctagctcttccactcaggcttgacagacgactccgacaacacgtcttttctgcaagatacaaaaagatgtattaggataaatgcgaagtaacatatatatatatatatatatatatatatattgcatttcacgttaacgttcgtcctcgttcgttcgctcgttcacgttcgttcgctcgttctcattcacgttcgttcgcttgttctcattcacgttcgttccctcgttctcgcttgtcttcgatcgatcattctcgttctcgctctcgttcgttcgatcgttctcgttctcgttcacgttctcgcggcaacgtacgttgacgtgttcgttctcgctctcgttcgttcgatcgttctcgttctcgttcgttaacggtggtgtggcggcatcggggcggtggttggcgcggcggcgtggcggcggcggcggcgtggcgttgcggggccgtggcggcggc

SEQ ID NO: 43096 - DNA, 512 bp, Oryza sativa
ccattgacggagcagcacgtcaccgggctgctgctgatctccatgggcatcgtgctgaagctcctgctggagaacaaggagaacgtcccgcgcaggcaggtgaggaagacggtgcagcattgggacgacaagcagcgggagatcagagaagtagaagaggagaaagctcccttggtatgaccatttttttagttggcccaagcaaaggctgaacgaatcacaatacaccaattgcaggacaggatagaaaatgctcaaaaaagagtaacaacccctctccctctgtctctctcatgtaatgttttgctgttgtgagattgttttgtgggtctatgccaaaggattcgattgacgataattacagattaatttggttggaggtgatatcgcatcactgccagttcttcattgtttctcgacaattttgcactcaagtaacgtcgacaggatacccggaaaaaaaaagagaaaaggaaaaacgagtgacgtcacagaccacaaatgtgtgacgt

SEQ ID NO: 43097 - DNA, 561 bp, Oryza sativa
ctatagggcgaattcgagctcggtacccaatcaagtcataataaaataaattataactacataaatttttttgaataagacgaaaggtcaaacgtttgtcaaaaagtcaacggcatcgcacattaaaatacgaaaggagtatttgttattttaattaaaatataaaattacagtcctatataactaaaattacatttgtaaattccgtcgatatgacatgtaagtgcactgtaattttgataaaaaatattgtgtaagtaaatatgtatttgttattttctttaaaatataaaattacagtcctatatagctaaaattacatttataaattcagttgatatgatatgtaagtacactgtaattttgataaaaataccgtgtaagtaaatatatatttgttattttcttttttagctcgttggatgtaaatctaagggtagaaaaaatttgggtgatttttttgctagaaattacccgacaaatggataggcaatcccgaaaatatttgacgcagagttgcaaacacatatccaccaaaatactaattgaatgttggatgtg

SEQ ID NO: 43098 - DNA, 627 bp, Oryza sativa
tttgaggagtacactgtggagcctccgaaaatgtgcgagacgtggaggtcagagtctggatatgctgagtccgattcctgaggagtcgcctccgcatccttctcgaccactcgtactcgcttgcctttttccaacgccatgtgcttctcgagcgactttttgaaaacaaggcaatcttccaaagaatgtctgtccgtcttgtgtatggggcaccatgctttctttgcgtcgctaccttgtgggtctgggcgcttgggtgggttcgcgtattctgctgcgagaatttccgcttgagctttccttttcccactcttgcgatttttcttcttgcttgactcaggtgcgtccgtggctggtttcttttctccccggttttcagcttgttgttcttgcatctcagcgcatcgtctacgtgggtgcatcgctcaacgatctcgaataatctccgagtagttgtgatgcgtcttgtcgccaactcctgggtagtatagcgatctcggacaccggacttgaaggcgcgaattacagaagcgtcggtgatttcggggattgtatttctgcactcggtaaagcgccggacatattccctccaggatccaccttaggtctgggtcaacgcatgtaggt

SEQ ID NO: 43099 - DNA, 626 bp, Oryza sativa
ttaatgtgtctggggtaagatagaatgatcgctttaaaaaaatgattcctctagatccaggttagcttcatacctcaaaaattgatggaccaatccaacctgtttcatttctctcgttgacatgtgaaccacactcccattcctaaaacattggaagcattccgtcacttatcccaaacaagtagatgaggccattccatcaaaacacaaggaatgaattcaatacattctatcttatccctaaaccaaatgcttaattgataaactaacttcttgtttgcaattcgacaacttagtttaggtgttttgtcgatacaataaacatcttacgtatttactagcttggtggttgctttctcgataaatggcccaattatctcgatataatagggggaatagtggcattgctagcagagaaacaataggacctacttgaaagactttttttcgtctcgtaaatccaaattaggtaggtttcgcgttgtctctgtttaagttttctctgataagttttcatgtgtatacaaacagattaggtagttttcccgttgtctttgatttgaaaaagttgtaatcgtgttaaatccaaatggacaccggcagaaagctgatgccaggaatggaaa

SEQ ID NO: 43100 - DNA, 512 bp, Oryza sativa
catcaactcaagcgtgaggattatatctccaatttggacttgttccggatacattccacatggattcatagtcatgagtctattttctatgctcaaagactggaccaattattattccccgtaagggctatcaaccgaatacttgcgccagtcgggattcaattattatatttatttgggagtatcccataagggataatcattcaaatcagaagctattcatatgagctacacttggtctatattacccggaagatttattactcgggagcatgttacatgcgtcatcctttaaagggtgtcgaaggcatattttttggcctaggcctaatatgtctgcagcccatattttcaggtgtggcctgtcacgttcttttagggacttaggcacttttcgcttaggccaaagtgcgcgtgatcaagtgcccaataccttaaaatccttttataccgcagttactcgactttttaggagttggtacaatgcatcttaaaaggtgtcaaacagtaaa

SEQ ID NO: 43101 - DNA, 575 bp, Oryza sativa
ccggagtgatcaaaccttcccaatccgccgcgtcggtttgtgtagtccgtcagcagtgaggtattcatacgaaggtgatggattttgaagattccgtcttcgaatctgaaaatcacatgattggctgcacaaagtttcggttttaaagctgtcaaagttttcatttcgatgactatatgtgatgaaactgtatttactgtgtctcccagagaccagtaaatgataatgttactctatgtgatgaaactgtatttgctgacagtgactgcgcctataatgtatgtgatgaaactctatgtgatgaaactgtatttgctgatagtgaatgcgcctataatgtattactacaagtactatattgaactagaaagtaaccgcggcttcgcgcggaagaccagtccaattggacgcagtgtatatcgtattaattattaagccttatcagctaaataaggcattaatcatgttctgattgccatatgctcatattgcaaagcctaaaatcccttagttcacctcggaaaaaaaacacactgtcagttccatatttatcattgtgctgttctacagaaatg

SEQ ID NO: 43102 - DNA, 678 bp, Oryza sativa
ctatagggcgaattcgagctcggtacccaacacgatcgattaatgataagaaatgccgtcattgcatatatatatatatatatatatatatatatatatatatatatatatatcagctgtgccagcttgcatgtgttatccgactgaaaaacttcctaaactatttcaatccgggtggtcaaaaactgtcaacacaaactcaagtaacaggtcgagattatgaggtatgcagtgcagcgtcagagatgggccggtgcccgtgccgaagatacgtaggtagtagtaacgtacaaggaacagtccaaaaaaaaaatgtacgcggagaacggcgtaccaactgcctagccagtagccactcgatggtgccaactggtcgatctcatttcagatgagagttgagagaggtccaggctattgaggatgctatacacacaatccaaacagcttgcattgcttgaatccgatcgagccgtgccagagccgccgcgaggaccaccccccaccccagaatccgtcgcgattccccggccgtatacgaaatccaatcattcgggggagaaggcgaccgatgatcaaccagacaaaattccagcgccggatggacaaaaggcgtgcaaaacgccggggccgcgcgcgccgcgcgttgttggatggatggacgccacacagtgaaacaca

SEQ ID NO: 43103 - DNA, 703 bp, Oryza sativa
tatatatatatatatataaaccatgcatatatatgtttcaatacatatatatgcatacatatatatatatatatatgtatatatatatatattatattatattatatgtatatacatgcataatatatatgtatttatacatatatatgtatgcaaatgcatatgtatatagatatatatatgaccaaaatatatttacattatagaaaatgtgtacacatgcatatagaaacatatgtagtcatgtattaattacaatccattatatgtcctagctagctacgatttcgacgtagtagtactcgctgctagctcagaagctaaggaccggtgaattgtgtttccgtcgtagtagaattcacccttgggatcaaggatttcttcgttgatgaatcccatgagttgttcttgaaccgccgtgataaattccttgtgtgtggtcaggttatccctcatgcgaataaactatatgaatgtatgaaattgattagtaattaaacaagaaatcgctacgtaatgaaattttgaatttatttgtacgtacatcgagctctcttgtggtgatgatttggtttgcaaggcagtggcaatactcgcacatgtaatagccgcacaagttagttccctgcttttgctttgcgcactacaaataaatgacaaacaacgagagatctaattaatatacacttgtatgtatttgaat

SEQ ID NO: 43104 - DNA, 688 bp, Oryza sativa
atgcacgtgcagcatgcagttgtgacatgcttgatctgaagtttctgaacttctatctgaaccggccagattttattttagaaaatagattaaaacggggcctctacatataaaacagatgtacacagccaatctaaactaagggtgtgttcgctaacagcagatgggaactttgcacagtgcacacggaaaacggagcagctcattagcacgtaattaattaagtatttgctattttttaaaaaaattagattaatatgtttttttaaataattttcgtatagaaactttttttaaaaaaacataccgtttagcagtttgaaaagcgtgcgtgcgaaaaacgagggagaggggatgggaactttagcatccgaacacaccataaatgaggtgcgagatgccaaaagcgcaagcatatctctccattattcagagttgcagatgaggatgaggtcatgaggaggagaggatcctgaattcctgattcctccagccttggagattgatgcacgagggaggccaccatcgccatcgctatgctttgcttggctgcaggaatgtgcacgacaggaatctccgtcgtcctcctgctcctcccctgcgtcatctacgtcctcttcgttgccgttccggtaggacgcgacagcgcccgagagggcgagaggtcgacccaggagcggcgtctggg

SEQ ID NO: 43105 - DNA, 708 bp, Oryza sativa
cgccagagttcgacttttcatccctgatgatacaggctaaccattcagtggccctgccacgaagtgcttgcatatcttcagtcatcaaggcgtcttgtacccttgtcccgccatgtagttgcgcggcggcgtaccatttgccaacttgcgctaggtcttcaatagcgacttggctcaccttggccctctgacattagactacgtccctgatttaccgagccttttaggtcggggcaatcgccaatgcatttgatgttgaagtttttacaactgcatggcagggagcatgctctaggtgctctaatacacaataacttgagtgtgagatgaagaagacgttttacgagtttttcgctggcgggggcatggctcatgccggtctcggttccggctggacttgcgcgtttgcaaatgactttgatgagatgaaagcgtctgtttacgcagcgaactgggggaaaaaaaatctcgtgggtcaggatgtcgccacgctactttcatcccagcttccggggcatgccgacttagcgtgggcttcgtttccctgtcaggacttatcccttgccggaaatggtgcaggactggatggcgagcgaagtgggacgttttggccgttcatcaacctcatgggccaattgaattttgagggcaggaagcctagtgtcatagcactcgaaaatgtttacggtgccattacgggctgcagga

SEQ ID NO: 43106 - DNA, 788 bp, Oryza sativa
  unsure (1)..(788): unsure at all n locations
gtggactgatggaatgcactaccgcagnaccncatcaagctggactgggctctctccccctgcctacggggaagtatccggtgcaatcacctaattcggtgcaactatgcaattctcatcctacaccggtgggggggggaggggaaatacctgcacagctgcaccttaacatcatcttccatgtttctctgactccatacatggaaatcattctccttcttatcatactctatctcctacagcacacgttatgatctccttgttagctcgtcctttattattgacgcctatgttatatcacatctcagactgacataactacaacactaatcctcggccctactccactctaccgcctatctctatttttttcaccttcatacgtaactcttctcaccacacctttgattagccccttctttcacttctattcctgacttttcaacaacccccgcttaccctgtgcatatctaatcccctctttctccctcttctacatatcttaactttactccgttctcactctcgattattctcactttgctccattgtcctccattgtcttgtttcttccctgaaactcccttatcctactcctatctcctacatctacgcgcttttgttattacgaattcctgacccattttactttatgtcaagccctcctctccacgattgtgtctttttataactgatccctttccagaacagtcataatcccttctcttatcttcacgtgccacaccatctcttcccttacgtctctatcactctccacacgccgttcg

SEQ ID NO: 43107 - DNA, 2887 bp, Oryza sativa
tgtagatcttgccttgaagcctcttcacagttgatagcatcacctgcgaggtatcagccttgcccctcatcattctttgagaatcataaggacccattccggtagtgcgaaaatctgctgcactgtcttcactgccaagctctagtaatagaaaatcaaatcaactatctaatcgagcatcaatcctaggaattttctcctcacggagagagatcagaaagcttggcaccggattccgaagtaccagtaccgaagaaagcaaaagctttcgagcgagcagcgactccaatgtttggtaaagggaatgaccctagatactcagtggctggaaaaacacatccatttgctcgatttaacgaaaaagcgcacaagtcacgctcgcctgttagaagtgattttaggaggaagttggattggtattttctactggatttgtgcctatagaccaaggataaagtctctctcgcatagccggaaaagtaagtacatagtgtagagggaaagaaatagaatctcgtgtcgacttggaaatcaatagtaaatcacaggcagtatgccctattttaaaacatgcaatgagggtacgagcaacactccccaaacttggcatgactcatcgccatcttgtattcatgatcttacctcgccttggtcacaaatgcatagcataggatcgagtggatcggcacccaataggccagattttcctatctttgatggtggaagaagaattgcgataaatattttcttatgttccacactccttacactacttggaaagattactccaccatgtatttcacgggtcaagctaaaatgtggttacaatctgtagaaaataaggtagagagtatgaattgggatgagttctgtgactttgtgtgtcttaggtttggtaaaagatgcagtatcaggcactgatccggcgcttaactcatgtgaagcagactggatcggttcaggactacattgagaatttcaagaccctaatgcaccaaatgctagcacacaacctcaacattgatcctgaaatattcactactacttttgttttgtggatgggttaaaataagaaattaggagagtagtgcttattcaacgccctgccgacttggatactgctggctctcttgcattacgtgatagaaatgaaatgacagcagccctcgctgaataccgttcaatatccgttattagacaaatcaagactttgagtgtatcggtatcgataagttcccgtcccgatatccctgggttccttactattaatggacaagttggtaacattcaattgagaggacaagttggtagacgcatcccactctctttgggaaaagcaggattctagcttgctcccttaagtctaagaaaaaagacaagccctccgaaagtaaaatgagctgactagaccagtaaccatatcttatcggtcatcctattgttgatgaatcaaagcgagatcagattgctcttgatgacgagggttgaagaggctttctattgatccacctactttcaactgaacagtagttagttaaggagtgccgggtttgcttgataagggattcttgttttgactgctacattaagggcaacgcaactacctctcctgctttcaattgctaaggcagtagagatctgtttaagcgagtgctatgatggttgtccaactctagaccttacgacaaagaaagagccagaaaccatgttttctcgacttctaatgagcgctttctagcagaactatctatcaaggcgggagaacgtagtatctgccatttctgtagcgccctgaccttacctcgaaaccagctacctcttatagctacctaacctaatccctagtacaccatctatctctgcatccgggctcgcctccactcttgttccgggttgatgaatccaactcaagaaaccatacctacttcctgctttcgaaagtgcttgctttcccttcgagggtggcctccactcgggctagacctcgttccggtcttaccctccctcgagtccgatctcgggagggcgcttgggcagggcctattcccaggtgcttgatgacctataccactaatcacaactactttacttattcgtcaaaaacctattccccaccaaccaagattattattcacgcacctacgatccctttcttaaagaaaagaattattactaccttcacatggagtgaaagggacgcagttcagaaagcaggcaagaaacgccttcctacatctgcgccccgctaaaagctatcgcaccaggtagaacagagacactcgacaaaagacgagcagcagcccgtgactgctgcctctgttccctctcgtactcgatcttctggcgttctccctggatccagggatgacgggatcgatggaacccggggtgggttcaaaatggcagggacttgcactgcaggagcaaggggtgcatccgcgggttgagcctgatcccctgctggatttggtaaaacattctctccgtcatctaaaaaaacagtctctaaacaaaatttataggtaaacaaaaataaaaaaaaatgaaaatccaattcgttgggggaacgggttccacgatgaatcatccccctattaagaaaccaaagtaataataatgatacgaaaatcaaaaggagaaggaaaaaacagaaaggcaattctaggacgctgggaaaatgaaaaaagattttcccgaaaaaccgtgaaataaatagtacaaaaaggtgattcatcttacaactttacaaattcgcttgatcgggcctgacctggtcgaccagatcaaactatttcacttatgatctggcctggttgacccaatcatgatattgaaggatgggaccttttctcaaaggttggaaagttccattcgtttagtacgagat

SEQ ID NO: 43108 - DNA, 1212 bp, Oryza sativa
agccatcgaggcaagttacctcttgtcaagagaactcgccgaaaagaagaccaaaaaggtggtgatgccccgaaagttgtatattggattgttgtcccttttttacaatgatctgaggtttatatttatacccagagtgcaaacttagtccattatgtacatggttcaaacttgcctaaagataaaatacaaacaagtccatacggcggactcttgccatatgtctaacttaaaccgacataaatatcctaattaataaatgcaattgccttaatcgagctcaatctctaattggcagtgacagttatcccaatctaggcacatatcgagcccaagtcatatcgtatcggccacttgccatatcggctaagtcatgctctgttccaaccgatacaatacccagctgttgacggacaacacgatggattgggagatctgcataactccagtgtaggtccaaggctagcctcgattgtgtcaagggcgtgccagctgatttgatcctgcaatcagcaagaaagataaaagcagagttagtcaaccgatagcatatcgttggcggtctcagccgatgtagttagactaaatcggctatggattgaatagataaaggaacaaaagaccctaaacatgcctcatcggctataatactgtctataatgtttaataaagaagcttaggacaatattatgaaaatagccgatggaacaatattcagagtagggtatatatatagataaagataaagtactaggtaatactctagtacaaacttatataaacaaatcaatctatataaacatatcaaatcgcgattagttagtaattcagatagcacaaccgatactgatctgacttgatacaattatatagggtgatcagtctatataagtggcaaatatacataaaaccagtaaaataacatgtatattaggtaagattggctgaaactccgatactatctgtaacatcctgaaaattcccaacaataaaaatcactaaaatttcgaactttttaaaacttttacatcatgctggttgttatgattcctattgcttgccaaaccataaatgatcactaagaaagtaaagaaaagaactacatttaagcaatagatatgatttacgagaatatatttaatcctacaaataattatgcacaagatattaaaatcaaataaaataaaagttattattaacctattttatcaa

SEQ ID NO: 43109 - DNA, 877 bp, Oryza sativa
attgatgaactgtaaagcctgcaactgctttcgcaaaaatactgtagtctgcacgactgccggaaattgactttgatgctgccgagagttcctgttctttgatcataacaacttcgccttcatatgttcggtaaagatgttccgttgaaaagtgtcataccctgattttcgtcttaggatttataaattatttaataaattattaatagaatttatattaaatgttcattaatttacaagtgaagttaaatgtgggaaataaaatttcctaaatataaagcatggatggatttaatttttattaaattctccatggttaattatactctctggaattttctcggatttttcggagctcaattattaatttttaatcatacaaagagcatttcagtaattatccacatattaaattaatcattaaatggtctaattataattttgttaagtacttttagtgtccaagtattttcaagatttttcttggaattatttgagcattggaagtatttttaacaattgaaagatcatttaagtgattattttaattggaaaaagtttttaaatccttccctaagtcgttgggccgatttcggcccaactctttctctctccgcgcagccaaaccggcccaatcggcccagctgcagccgcccgccccctcctctctctctgtcaaagtctagtttgcctccctgctacagtgtcgtccctaacctccagccggctgcctagctgagcccgagccgcgcgccgcgtcgcctttccgcctccaaatccgctccaatccgaccccgtttcttccggatttttgaggggttttgatcctctcgttctcctctatcttttcccccaagaatcggagcaaatcgttggg

SEQ ID NO: 43110 - DNA, 632 bp, Oryza sativa
accaaattttatttatgtgatataaaattattgcctgaagaaagcatttttgaatacaattataataacaacagttttgtggaagataatatgtgcaataatcgtgggttagatcttgttctaataaaactaggtgggcgacccgcgcatttgcactgctagcatcaatttaaaattatctatttttatacatgattttattttaaattatcattcccgtggttctaataattttatagtttttaaaagccacgccagtcgctatcccttactcctttgtcatctttttatttgcttactcgatctaccactacttctattcatcctctttagaacttaaaaaattaggccttatagtttttagagttcattgtctttgttgggtttcgttttcatatataattctttgaagtatcgtcaaacattaccaatttactactctacagcccgtccgctatcatctctctttattatcattgggattttaataatcgaacataattattgtttgtgttcttttaaatttctataagtctccataatcgttagtggcttcgccactatacttctctgcagtccacccgctgcctcctctccttattgtcattgagatttcaaaaattgaacatgat

SEQ ID NO: 43111 - DNA, 712 bp, Oryza sativa
agtattagatcatagatcgttaccactcgacgcgctgcgcagcggaagaagacgctgagaagtcgaaggaactctcgcgaagtagcgcgcgtcgatgtagaggaagtagtcgatcgcaccggctcgaccttctcctcctcgtgcgttttcctcgccgtactcccacgccgatcagcaccgcaaaccagcgacgcctctaccggtatccacacgtacagggacggaacgccacgcgcagatgtgctagcacccgcgtgcggctagggttttgctcggggagggaagtgacggctagggtttctcacgtgatgcaatacctccgctggtcacacccctcacgaatatataggatccatcactcgggcctccaaggcccctaggactcctatttggatccctatccgaattaagctcatattggatctccatccaatccccttattccggcccattaagcatgcgaccctgtaggttcatgtatactcggctatagcccgaaaactccttttcggtccacgcatcaacagcggtccctagcagaacgtattaacccaccggacatacataaagatcatatcggctgaacctctagtgtatacttgtatgaacccctttgcctcacgatatcgattaagctaaaggctagatatgtgccatcctctaatagctcaatcattcactcgagcctgtggatagattatataatttgtga

SEQ ID NO: 43112 - DNA, 535 bp, Oryza sativa
atcttcaagtgccgcagcccagtcgaagtcagctaaaggttcaaccctggttcgagtcaggtgaaaagaagattccacctgcaacaggagatcgagccaagcagtccagagtggagaagctttgtaggcaagtttgttatagaaagcggagcggaagaagtcagacaagaagagaagaccgcccaacctatcttcatgctagcctcctcgaatctcggggacgagattcttgtaaggggggtggatttgtcacgtcctgataaattcatcccgaaataaaaatcattttccaaaaggaataatagaattaattaaaattcgaaaagaaattggcaaacactaaaatacgtacaagaaaaattcgaatgtggcccggagaatttttggtaaattctccttggtctaaaaggagccctcaaattttagtggaattttcagagcacaaataataattattaagaaataaacaaagttaaaatggtgttataaaaagaaaaagccctaaaaagtcctttttcccccttcccttcttggg

SEQ ID NO: 43113 - DNA, 546 bp, Oryza sativa
gcggcgctccgacagtcggcgggcgaaacgaaggggtggacgaggttggcgaggacgcggcgaagccgaaggaggtgacgccgagtcgggaggaagtccggagcgacgacggcgacgaaccggagctcgtcggcgacggcggagagagaggaagacggtgcgggcacgattccgacggggagagtgagcggcgagtggcggaaacggaggagagaggcacggggaacaattatatagcgccgggagggggagaaagcggccggaggggaaggaaaccggcgcggaggtctcgggcgccattgatggcgccggcgaggtttgcgggagcgattccggacggatccgagggagagagagagggaaaagagggggatcgggagagggaaacgcggggaataattcccccctcattaaggcgcgcggggaaggcgggatgcggcggattcagcggcggcggcggcgctagggcacggcggcgacggacgcggcgggaggaggaagatgacaggtgggccccacccgtcagcgagagtggcgggcgggccc

SEQ ID NO: 43114 - DNA, 527 bp, Oryza sativa
actatagggcgaattcgagctcggtacccaaattttgactgagaaatctgtcgacagatgcgtaataaattcgattttatctaatacaaccctctatattttaagaaaataatcaatgtatttaagcatagaattacattttagcttgcacaacgaaagagttagcaactagctagttttgattaacggacgtatgcaatgcaaccatgagaaataaaaatgtactttcaaaacaaatatttgtttaattaataagaaaagaaataataacaatatcgcacaagattcggtagactacaatctagcagatccatacaatctgcacaagaaatttcttatagtttgtaactatgtaaacatgctaaaaaaattatctaaaaaaaaacatgttagaaaaaatgttgggtgtaaactccatatagacatatccttcgtgaatacgccctagatcagagaaagttaaagttggcatgattgtctcttttttccaatcacaaacgaggttgccagatatgttcttttctcat

SEQ ID NO: 43115 - DNA, 687 bp, Oryza sativa
ttcctgggacggggattaatacactagcgttcgggaaaagcattttccgggtcgcgacaagctggtatcagagcaaagaaccaggtcatttctccagagattgtccacagccgaagcgtaacgtgcgtcatcactccgcccattatgcaagaagaagacaagtcactcgccttgtggtcactggagcaaacgccgtacctgtgaggcctcatgttaattctaacccatagtagaaacaatgtaccgatgttaagcaccttccctttttgtttaagacagtgccttgtattcatgtaatatgggagaaattggtaataaaaacaagttctaagaggattcttttggaagatgcggatatgtgatcatgtgtataattgtttactgacaaaggagacctagggtctcgtgccagaggaactatattctaacctcgagctaataaccaacctgaggatggaaaagaaaaatcaagtgattaaccaaagagacatttgtttggactaagagttacagatgcgtccttttcggatcaaaggcaacgacagttagtatagcttttggcgaaacacttcaaggtttcacggaaaggcagcaagccaaaggacctcatcgtcaccagaagcatccacaactctcggagtgaagagtacttggttgacaaagtttaagaggtgattgatagaagat

SEQ ID NO: 43116 - DNA, 1543 bp, Oryza sativa
ttcggggttgaactcgacgatagatcggggatttgagatctgagatggcacggacactagacaacaagcaaagaaacaaatttcgcaattaggatttttaagagataattttcccgctaggcgccacgacggaacgggcgctacatattctttctttcattgatggcatgaaaaagaaacatgaaattcacaagtacaatatttgcttctcagatcgattctatgcaatatgaaaaagcaccgcaattaagacttcttaattaatacatttgtgtgcatcaagccatcaagctttgatttagctcttcgaaccaagcatacccaggatcaaaatcctgggtccaccactgaatgaaagggatattttggaacataagagggattggtgggggaaggaaagagtaaacatctgaaagacattattgatgagtataatttggattttattggaattcaagaaactatgaaataggatttcaacaataatctcctgaattatataagtggaaagaaattgtttgattggaccttgttacctgctagagggagatctaggggaattctctgttgataagaactagtgcttggtccaaaaagtggaaatcggggattactgtctcaaaatacatttgcttaatcaaaaagacaaatgggaagtggaaataataacagtctatggaactgctcaacctgaacagaagagtgaattccatctggaattggctagattctgtcagaaattgagcaagccagtaattataggtgtggacttcaacattactagctaagaggatggaaaaaacaaaagaggagggacaaacaagtggagcttcatttttaatgcaattattgaacaatccaatttaagagaaatcaacatgggtggtagaaggtttacttggtgctataatcgtgatcatcccacttatgagtaattggacaaaattttcattaacatggagtggtagaatattcacccacttacaagagtcaatgctttagagagatttctttctgatcatgtcccacttatggtagaatgggggaaaacagaacttctaatcttcattttaaatttgaactaagttggttcataagggaagacctgtcaaaagtagtaggacacacttggcttcactctgggaagggaggaactaatgtagaaagatggcaaaatagacttaaagcattgaggagagtcctcgaagggtggaataaaaattgggaaggattatacaggaaaaagaaaaaggaaattttggaaaaaaaaatggacgagattgattagacatctatcaagataaaattggacaacatatccaaaatcacaaaaacaggatgcagaaaagttggtgaagccttttagcattgaagaggtgaaaaaagtggtgtttgaaatggaaaacaataaggctcctaggcctgatgggtttcccattgaattttataaaaaattctggaacctaatcaaggctgatctaatgggacttcttgaagattttcataggggaactggatattgaacgtttaaatcgtggagtga

SEQ ID NO: 43117 - DNA, 2027 bp, Oryza sativa
tttaaaactttttcaatgttaaattatttcttaaatgcaattccatttattaaaaatacttccttagctcaaataaatcccagaaaaatctaggaattatagaattaagcaaagtatttaatgaaatttatctggccactttttagattggaatttattaattaaacttagattttcttttcaaacctttttaaaataaattctagaaattccatttaaacaacaatttatataatttgaatttttagggtgtgacatcctacctgtcggagagagagggagggagaggccgactggggaggcagaacggacttgagggagagagagagccgagcgggccgagggaggaggccggcccgagagggagagaaagggggcgcgcgggccgcgggagagaaaggagggattgggccgaaaggggcccaaagagaggaaggaggattttatttgttttctttttattttaattgatgcaatgatctttgtgctattaaaattatttctcgagctccgaaaattcacggaaaatttcggagagtacattagggcacaaagaatattacaaaatattcccggccaataatttttaaaggaaatttttaattccctcaataattcacttgattaagttgatttaacttttatttaatttctagaaaatgtattattaattgatttttattcccgaacgaaaatcgggacgttacatatcctatacttattctagttacataaactatctcctgtaaccatttggataatcaagccctgcgagtatatggtacccataatatccacacccaacattataattttgtcggcgcatcttcgcactacacaccattgcatgctaatggttattcaacactgcttgctcatgatggttcttctgtgccgcttgcgaaacccacttcatccgcacttactgggaacaatgaccatgtcactgttgatagtgatgatgacaatggtgccgttcggaccagattgaagctaaattggatccaagaggaggatgttagactggtgagattttgatgcaatttgcctatatttgctttgtgaatgtgtgtgcacaataacgctttcttttgttatgtttgtagatgagtgtttggttgaacaattcaatggacccaattaatgggaatgataagaaggctgaaaaatattggggagatggagaagagatggagaagcccaaagcaagccaaggagcgttggcacaaactcaacactcggaaggatgtattccaaggctgttggtggaaggctaaccacacgtataaaaccacacaacatgagatggagaagcccaacgcaagccaaggagcgttggcacaaactcaacactcggaaggatatgttccaaggttgttggtggaaggctaaccgcacatatactcggacggacccattatttccaatcgttagatctatcttatatattataaaaaacaagtgtgtattcatgatacatcgcattctaaaaaatattatcatgcaattatatttcatcgtccaatcgtattcatgctaggctgcatggagcctcccgccactcgacatgaaacatttgctgatggattatccctcaaattttagactacataaacccatgcatttagtggagcctcatgtcccacccaatttatccgttaatatacaatggcaacctatatcaaaaaaaaaagtaaaacaccttacttttattttaaacttaatttgatagacatgttctctaaacaaaataagtctaccatctttaaaataagtctaccatctttttttaagatgatgaagaagattataaataattgtttgtaaggattaattaaatatgatgtagtataaagctaactaataggttagaaaattataaaagcaatgctgacaaaaacaatttacggagaaattgtatgtggcagatattctccggttaatattgtactcttgtatgtgtctcaaacatagtctactatacatacccacaagaatgcgcaggtatctttctagttaattctaac

SEQ ID NO: 43118 - DNA, 1609 bp, Oryza sativa
tggtgtaatcaaaagcctgcagctcgactctattttatcccataaatatattcatgtctataaacagtgagcttgctatgcttatggatgattcatgttgaggatacaatgtaccgatgttaagcaccgtccctttttgtttaaggcagtgcctcgtattcatgtaatgagggagaaatgtgtaatacagacaagttccatgaggattcgtttgaaagatgcggatatgtgatcatgtgcataactgcagactgactaaaggatccccctagggtctcgtgtcagaggaactatgttctaacctcgagttaataaccaacctgtggatggaaaagaaaaacaattaaactgtgatgggctaaaaagccaacgagacagtagttgaggataggagtttggatacgccttttacagatcaagataagggttgttggaggaaacccctaagggtacccgccatgcctctacattgataagatcggatatacctgccaacagttaagaagatctaggagacatcaatatttgagaacataatagtcgatggctggtaattagtttatccggtatcagaaaaaggtcaaaggtgatatggcagaagaacaatttggatgctccccatctcgaggaagcactaaagatgaccatcggcaattaaaccctagtggtatagatacagatagcgggcaatgtatttccctgaaggtagtcagtacagccttttgacgaaccacatcaaggtttcactggaaggcagcaagccaaaggacctcatcgtccccagaagcgtccgcaatccacgttaaagaataccacctgttagagataagccgaaagatgatttataaaaaaaaaaaagattggcaaagatgttctctagcatgaaagaagtaggccgaaaggcgattgataaacagaaacatgctctgcatcgcttaaggaagacccctgatagtaattgccccgcaacagtcaccttgtcattaagtaagcaagatgacctaggtaaaagtgtttctatgaagacaaggagtgaaatcttcaactcggtatcggatgctacacggagtgaaaagtgcaagcaccggttaccaggtaatgccatgtcctgggagatgatccaacgggaaagaactcatcaaggttaaaggtgtaaaggaatacgttgagtgctaactgaggacaacctgaagataataatgggaagtaaactgaatgtaaagaaagtgaatccgagctgcttgttcgtgggaactattcccagttatgaaccaagtgatatgttcgaagatagtctacagaggtcagattaaaatcacctctaacaacgaagcttcagatctggcaggatcacgatcagacaataagaagtccagcagtaaaactatttgggaagacgtcaaagtatatcaagtgggataagctggttctcttgggaagcataattcaaaggcaaagttatcgacccttgcatcaaatagcagaagtagctatcacccggagaccaggaaagctaatatgaggcagtttgggggcgagttagaagcaaatgacaagcatggtatcttataatgacgagctgatctcgacgcatgacatgaagttgata

SEQ ID NO: 43119 - DNA, 839 bp, Oryza sativa
ttccgagatataattgccacgtgagcgccacgtcaatgccacgtgggacgaagaccaagtcaaacaagccacgtaggcgccacatcagccaaaaccgccttcaaccgccgggggaccacgtttacccgtttttcgtaagttgggggacgggtcatacccggttttgcggtcaagggacgaaaatcggactgggcgacaaatagagggacccaaagtaaacttattcccatatataagtagcagcagcacttcgaggaaggggcgaacagatcattggccaagacggcgaacggcggcggcagcgacctggaggcctgttagctccttgttgatcttttctctacctcccttctctactagtctagaaacttctagaatcttttagcctttgtatccttccatcttccacctcaaaagcctccaatattgcaatagaatcaattgctccttgtactggattggtactattatttttgaaactgctattgtttcaagtgagtgaagtgggtctctaacaatctggtatcagagccaccaatccctactgagttcaccaagcaagttgccatggcaagtgaacataagttggatatgattttgaggcgaatggaggagttcgaacggaggcgggtggaggcagagcagacaaggagagctgatttccaatctctcaaggtagcgttagcatcatggattccccatttagaatagcactgaagactcacattttttagttgggaacaagcagtacaagatgacgcccaccatgtgttcgacaaaatgcttcagccccgatgtcgagcccaatctcactgttgatgtggttgttacatgtgcca

SEQ ID NO: 43120 - DNA, 590 bp, Oryza sativa
acgattagtgttagctagtactaggaacaacctcaacgcttttgatgacaaacggcccaaagcaacaggagcatctcttccaaacccaattcccaaagaaatgaatacgtgcaaccaaagtttctccaccgtctgattatctgtccatcattagctggtttaatcagttttcagtttttttcacacacagattgcttgattagatgcagaaagaagcgaggtttattaaacttggcgccaatttagcaattaacagaaaaaccaaccacgcatatggcagcagcagcagcaactctcgccacggaaaatgctagtagtatactaggccatggacctggacctcgccgtgcaagtctcccgccggccagtctccggcgaggacttcgccttcgccacctccgacaccgacgccgccttcctcgtcctcgcccacctccccggtagtaacccatgctccgccgccgccgttgaattgacattggtgtgagatttttgtgtttttgtgtgtgtgtgcagggtatgacacgcaggaggtggaggtggtcgtcgccgatgccgggagggaggtgcgcgtggtcgtcggcgcgagg

SEQ ID NO: 43121 - DNA, 708 bp, Oryza sativa
ctgaaccaagctcgctcctcaaattatttgtttcttggcacactagtaaggatgtctctagcaaaaaaaactcgagacattgatgggctgttgatgttcaaggagtgagacttgctgcttccatccccaaattgcagcagttagcctggtaactttctgaaagcacaagtgctcgttgtttttgatcaatcatacatgaaacaaaatggcactcctatggttatctgtctactcaaaatgtatgttcggctatatatactggcaggagtcgtctaacaaagtagcattcttttgtttttctcagttgaagagggcacgtttatgatgtcatatggttaacaaagtctagagttctagagttataatgaggaggaattctggaacctgaaagcttggtagtttttagccaagatgttattatcatttgctctggtgagggtacatatcaataaggtggatcagtctgattctttttttgaaactttcctcgcatttgatgccatctattgttctccttttatgtttgtctatcgttattcataaattgttgttttccacacttaaccacccccaatggaagctataaaattattcaagctccagaaggggtagtagttggactccaatctgtaggcaacatcaaaatttgcctggcacgtacgaatagtggattaatgttttatcactttatttctttcctttcttctt

SEQ ID NO: 43122 - DNA, 3539 bp, Oryza sativa
actattccagcactagtaaccattgttttctaggaatagaaggccagacgaaagacttcaatacatcagttctgcaatttacatctagacagttcagcaaatgacatgataagaaccagatattacctcaatgggccagccatcaacaacaaaaacatcaagagaatagttgtcaaatgtcgagaaaacatgcgcttccctgatgttcaatccaatgtcagatagcaaagcagacagctggcataacatattgcagttagatgataacgatatactgtgagcaaaaagtcaaacgactagtaagcacatgcttaaattggaacaatgatttagaaaatgccaatgtatcatgaggttaagttagaaggcacataaaattgctgacctgactaaggagctttggcttgtcaacagtggagaaaaccacctcatgaatgtgtgcgtatgatgtgtcctgcctgcacaatatacatagccaacttagcaagcctataaaaggtcaagatatctcaagcttctctctaggctatgtgcatgggcatgtaatagtgtgttcatgcaagtccacaagtggtgttgacttattcaaggagatttaggggatacataacttatgtgggatggtttacttcacaaatacttgaggttagtaccgatattctgtatttatgcatattctctatttttctggtgcagagtgcactgactatagaagtaaatgtatacaaacatacaaacactattgtgttaatctgtatggttcctatgcaataaggacttaagataactataatgaagatatgatgtatatcgaagctacagaactttaggtgcaacatatcagaagcatacaaaggaagcagacaacaatgagtcaggaaggttagtatgtaaattcttgagtgcaccaagctaaatgtttaaccctttcttacttcatttttttctgtaaagaatgtctgattacaatgttcctttcccacacataataatgagtggaagacattttatctacaatgacacatgattttaggaccatcaggatctccaattctctacggtggcacccacttgtcatggagagattatacgggagatggggtatagttttttcaacaagcagtgccaaatgccaatttgatccaagagggcaccacctcatggaccaaaacacccccatgacaagcagactctaccaccacattgtgtcccatctagacgctacataggccaaaaccactattaaacggacagataacaagttttacccggttttcagagttgagtagcaggttttagccagctttggagttgatggacgaaaattaaaccacaccaagagttactggacaagaaaaataatctttccttcctaaaaaacaatggaagcagcatcctagcactgtgcatgattaccttacagagagatcatcaccatcatcagccccatcttcagatgcgtcagagtcatatgtcggatccacttcttcaatctttgatcaaagtttagagtcaatttgacaactccgatttctattggtgatactaaagataaacaatcagtaatgcatggaacaaacatgtagcattggcaagataagaaaacataaaatctaaaagctagagtaacttatccctcccaatttctctatcaagatcatcaaatattgtaatgttatatgtagtatgccacataaaaaccatttaatatcatagctaaaaatgtacttctcacggacagtatagtaggtgtgagcatcatcccacctgtgctatggcatttttcaccaaagacaaccagctgcaatatatcatgtatatactatatgaacaatggtcaagcatgtattgacaaatacaccttgtcattttcttcagtatttaataagacagttcagaaaatcatggcaacactagtgtttgtctttgtacgacggccacggccctgtttacatatcatgtagagaagctcccaatgatagctacacacagttacttctaatgaaagaaataagaaaattgtcagtccactccatatctttttagattgtctacggcaaagcctttatttagtacaaaatcgagtgatatacacattgaactgaattattccttgcttcttgttgtgctcatctgtttcaccataaaataatgtgtactgttcattcagaaacctccttgaaatagtgcaatgacagctgtaccatgaaataatgctctaaagttacatggcaaaattcataatattggtgttacactattcttttcaatctagagttctagactttcctggccataataccattaagtatgaacaatatgcaacccatcatatgtaaacagaatacaactagtagccaccaatccactaaaggtgctatcattatcgcataacacaaattagttgcttctacaatagtccagatcaacataagagttttaccctcaagaaacgaacatggaacgcagggcgcctatcaggatcttttgcttctgccaagaccttctgatggactaagacgtcttcagctttgtcgacattgatatccagttgatagctacatagtgagaaaacaaaacaggaaccaatatttaactttatcattgcacaaagggcagaataatggaatagataatagcctatcaatactaaatccagaaaaaagacgattgcagttacaccaccttcctttttcagttatgacacaccataaaacatactcaggataactacacaggattatccaaacaagcaattacacaggatagctacaaggacaactccacggctgaaccaatcattccatttaaaaaaaatctatgcaagtataggaaaaaaaccattgcctccagaatcagaatgggctattagtcaagccaatggataagaattcggaatcagaaccaaataaaagtactttttggaagtgagtgatcccaccccaaaacaaacataaatgggttaatcactaattcaattccaagcttaactacaatcccagaacataccagtcaaaaatcgaagagatccagctctactcaataaatcacgcactgttccattcatcacagtagaagaaaagcactgaattcaaccatactgaattctaattccttggtcgactcaaacagcattcctaccaaaccaagcaccagataaaacttaactggaatgtcaccgcaactacaatttcacaccagttacacatgcatcacccagaagcttcatgagagcacccaaacccaaaacgattccaccacctacgtgagccgcgacaccgaacagggtttcaacgagaggaagcaaacgaacaggaggagcagaaattaaccaatcaaaccaaatcacctatgtggaagccgcatgaaatgggcctcgagctgtgcgcggaagtccggcgcggccgcctcctcgttcccctccgcgacgagccgctcgtacacctggttgcagatgttaagccctcccgcgccaccgccaccgccaccgccgctcccgcccgacgccgcgggcgccgccgcggggtcacgcggcgggg

SEQ ID NO: 43123 - DNA, 867 bp, Oryza sativa
ttgagtcgctgaccagtgggccccgcatgtgggcgccgcactccccccctgtgctgacgtcagccctggttaatattgcgccataaattatttaaggatttttgttatagtaataaacacagtgaatcttctaaaattcataactaattcatccgagctccgtttaatcccactcaagtctcagtaaatcaagaaaaatgtgtagaatccattaaaaatggttttgttctctgtttcagtagtcttatagcctgtttgcaatgtttgctttgtatgccgctagattccgatccctccgacgctccggtgtacttcgagatagtcgccgaggttcccccagcagcagagcaaggcaagtcatgcttgtcacttgaacatgttgatcctatattgccaatgctctattgtttcctttcaaatattgtattgttttataatattactatgggatggttacctattgttacagccatgctttttggataccatgctcctttgttagcttgggttataacatgattagagtttggactaggaattgcttagccttgcttagttcaactagatcacaatggggaaaatcatattaatgtttagactgttagttctaatggtaatgttggtttaataccaccgctctggtgttggttaaataaaatgaaccacatggtgggctgtgggtgcatggttttgctggtcgcacccatggcagttaaggaccggttcgcgggatgccctggaagaatttatcgtacttaccacaagccagcgtgggcaacggctgggcttgtagtgtagctttcctttagtcgacgcatccaggcaagggtgggcgtgatggagcggggcgggccctgcgacggcctc

SEQ ID NO: 43124 - DNA, 942 bp, Oryza sativa
ggggggggggggggggggggggggggggggggggggggggggggggggggggggggggggggggggggggggaggggggggggggggtgggggggggggggaaaaaaaaagggcaaggcgggtgtgtttgggggggcccgggggggggggggggggggggggggggggggggggggggggggggggggggggggggggggggggggggggggggggggggggggggggcgggggggggggggggggggggggggggggggggcggcggggggggggggggggggggggggggggggggggggggggggggggggggggggggggggggggggggggggggggggggggggggggggggggggggcgggggggggggggggggggggggggggggggggggggggggggggggggggggggggggggggggggggggggggggggggggggggggggggggggggggggggggggggggggggggggggggggggggggggggagggggggggggggggggggggggggggggggggggggggggggggggcggggggggggggggggggaggggggggggaggggggggggggggggggggggggggggggggggggggggggggggggggggggcgggggggggggggggggggggggggggggggggggggggggggggggggggggggggggggggggggggggtgggggggggggggggggggcgggggggggggggggggggggggggggggggggggggggggggggggggggggggggggggggggggggggggggttggggggggggggggggggggggggggggggggggggggggggggggggggccggggcgggggggggggggggggggggggggggggggggccggggggggggggggggggggggggggggggggggggggggggggg

SEQ ID NO: 43125 - DNA, 580 bp, Oryza sativa
tttaattaaaagagaaagggaggagaacagttctacttttccaatatttttagaaggcttctatgggtaaccatttggcataacctaaggtcaagggctctgataccaacttgtcacgcccggaatttctattcaaaattccaaacgcttacatgtgtgtgaaccctcgtccaggaatcagccgaggcacacaataacaaattgattatagagtacaaatattactctaattaataagcgaataaaatgtcattacagaggtagatagttcctcttaatcaataaaaatctaagcggaaaaaaaaaataaacggggcagacggcttcactccacaggcagcttgaccaaggctacacctaatcctccacaccatcagcctcattgtagaactcttcctctgatgaatgattgcaaggtgagtatatgacatactcagcaagccacgcagcaaatatgcacgtgcacaggataacaaaggatggcataataggggttcatttgccaaagcagcatttagcaaacatttgagaatttgataaaacagttagtaatttaacaatataatcccacgctttacaa

SEQ ID NO: 43126 - DNA, 1049 bp, Oryza sativa
gcagtactgaatgaggagaaggctgaggaaaattctcaactatcctgcagaaatcatgaaagcaatcagacatgctatcaaaatggagatcgagaccttgagggcacatctcaatcaggatggatcgccgggctggagccttggagggatgcaacacggaggagcgagatcgaaggcatggctggccggtggagctcgatttttcgcgtcgtcttcggttcaggcgtggattaagctgcgtttgggattttctcgggatgcggtgctagggttttgatgttgggtggcatggcaaactcatcagcgacgccgtggcggcggcggcgcagcgccggagcggaagccgggagcccgaaggagtttaaggcccaccaaaggacacgaatgaacgccgactaaattcctgtcaatgaattcggcctgcatacattcagccctcgaattccactcagcgaattcgtcccacctaattcggaaaaagtacaccgaaggtccctcaatttgtcatcgggataaaaaacgtccttgaaccgtaaaaccagatatgtggggtccctcaactatacaaaaccggtcactcgagatccctcggtggttttcaccccggttttagcctacgtagcagctgtcagcgtgagacccatgtggccccacatgtcaggtgtctacgtcagcctcctctccctctttccctttttctctcccttccttgtctctctctctctctctcacttctgacttctctgcaatgggcggccaccggcgaggaggatggcgcgacgggcggccgcggccgcgtcgggatcctcgtcaacgtcgcggcgaacccgtggctcggcgaggccgcgctccggcgggtcggcacgtcagcggcgatggtggaccggctggtggagatgcccacctggaaccagtggcgaacgcagctttaaaatatagatgggacggagaacggcgatgttaactcgataagagcaatcgaacacaacacatatcgtattaatagttcattcgtataagtgtctcaatttgttagatgtttatacctt

SEQ ID NO: 43127 - DNA, 655 bp, Oryza sativa
ttgtcaaaggttatatgaaaaatcaacaacgccatatgttttggaaagaaaggagtatatatatttacaacattcatcttaaaccactttctaagatcatgaatatgcttttttcttttcttgcatctccactgtccatgttctaagatcatgaatatgcttttttcttttcttgcatctacataataactgtggtcaattgctgatttcttcattctacagggagttttacagtttgtgatactagcattacagtcaatctgtaaacgagcacaggataagaaggctgcgtcacacgcatatatagaagtttgtttaacacacaagtgtgcttcacaattagcatcagtaaatcagtatgaacaaaaaatataggacctctagtaaatactcctgcaaaagctcctcttagtcttctatgcgtatcatgctgtaaattatggtgattttttttcttaatcaagtggctgaaagagaacagggtgaattactacttggtgaattgagtttgctctcacaccagtaattcaggttgcactaatctgcaaagttcaacaagcatggcaaatagcacagtccaccgtatgctggactatataatataatattaatggtattatcaatgttcgtgtcagcatatgctatgacatcatgg

SEQ ID NO: 43128 - DNA, 703 bp, Oryza sativa
ggaccttaaactctgctaaagaacatagaatgatccattataattatggacatagggagtaatcggtgttagattgatgggtagaaggcattgtggttgatgacgtatcgtatttagtaataggaaatagggtgaaggattgcaacattactacctgattggatgtccgctcaatcataactagtgtaagagtcaaagatgattgttgggataggagtaacaccaatggataatctttatcggtatacaagggacacattctaacaacatatgtctttcgagattctttctttgactgcattatccacttgtcataataggatcaatggccatatatatagtggtggaggtaaaaacaaatatacgattgtttcatcggatacaaatgatctttacattttagaaagaaaatgttcttttttacataaaaccaagataatgggtctttcacatatcctccaatatactagcccgctcgcccaccctactacccccgcacacacaccctacccctcaccgcatgcgcagatagaactgtacccctatacatggaaatggctataaatgactatgaactaaatcctaatgcctgcgaatattgtgtacatgtgagtgtgctttcaatatgagttctgtgaggtaagaatatattttccactggcctccatctcgttaagcttgagtattctatagtgtcacctaa

SEQ ID NO: 43129 - DNA, 6976 bp, Oryza sativa
ttgctgaagtgtgagattttaaaaagctcatgtcgactgaaactgtgcaatagcctgctccaagattcaaaaaatactgacaattcaaatagatttacgagcgtgctatcccctgttcccaattcagaaatagtgccaattatgttcccaagttcagaaatagcgccaattcaaacagatttacgatttacgagcgattgacaatgaacaaaagttcagaagagaagaaagagcagatgcaaccaatagcccataatttctcaaagcaacagggaccaagttcaggtattggcttgctgctaactcatttagatcagcactgaaaagttcagaacatgtacaggaattttataaaccaaatagtacagtagaatacaatctgaagaaagcagaacgcatgtaggggtttgggtttaatttaaccaagcaactcagcatactgggaaatcaaaccgtacatctctgaaacgaaatgattcatatgctgcagaaggcaacacaaaacatacttggggttcagttagcatgcatatgtaaaacgaaattcttcagatgcataagaattcagatatatgcagggagttgacagataaatcatctctgaaacgaaatgcttcacatgcagaaaaattcagacttatgcaaggagtttaacagatcagtcaactaatcactgaaagtgaaatgcaacattcagataaagttgcaatgatgcttccctactatattcaaatcacacataaatcaaagcaaaaataatcaactcatgaatctgaccccctccctgaagaaaattcatgcagggatccaaaaaatgatcaactatctgggtgattagaaaaaacccctaaatccacctcgaattaaacctttaactccatcaaatacccctgaatccaacccccaacatgaacacccctgaagaaaaatcgaaccaaaaatacaaaaaccctcgtggattagaaaaaaaaacatagaacaccatcgaatctggtcgtttgcaaacaatggactagtaacaaaacaccctagactgaactgaatcaaactataactaaaaacttagggaatccaaaacctaaacggattccaaaactaaaacaagtgattatgaatcagatccatacgttgggagcaaaaaaaatcgtcatgtattgacccgaatcttctaaacctagccctattgacattgaaaaaaccaaaacacaagctaatgatgccagcaaatcagggaagaaactcaaaaaacactctctctcgagttgtctcccccagcgagcgcgcgcgctctctctctcccgccggggagctgctcgtgctctctctcgccggcgagctctctctctctcgacggagaaaacgagaagagaaaagaaagaggagaaagagatgtagagaaagagcgagaataaagaaagagagcgaggaaacaaccaacggttacggacataatagcgcggaatccaaaatttaacatgggttggcccacattgactcctaggccatctgctcacaggccacacggtctcatccacacagggaaatgcacgaatcatggcgcaaatcctacggatagaaaaacgacaaatattgggggtgaaaatctgttgacaaagatctagcaaaatcgtttgcgttttgattgacgaagatggattagttacgggcctgctgctgcggaggctgaaattttattcggccctggactaatacctatcagcccaagtaaattacctggaaattgggcctacataatactggaagtgggcccttggtgtttgtgctctaggagctgcaggcccatatataatttctcaatccttttaggcaattaatttcctccatttgtagcacataactacatgagaagatatgtcacgtgaactctatatttagcataaacctgaaaactaccactgaaaaaaagtaaacgtttaagttttatttatctaggatttaaaagttttactcatagtgacgtgaatacattttagacgttcatttctgtcttctaatataagggattttgacattctgcttgtactgcttgaccacacgttttatttaaaaaaattgtgcaaatataaaaaacaaaaaaaatatgcttaaagtactttggataataaagtaagtcacaaataaaataaataataatttcaaaattttttgaataagacgaatggttaaacaatgcaaggaaaataccaaaatctcttatattaaggagcggagggagtagtagttttcaagtttgcgggacatatgaagtctgcactacatattttcccttgctacattggtgcatatcctgaacacacatcttctttgtttatggcttattagattaatctgaaaaaaatttggaagggattatttccacgtgtaccattatttttctccaaactctttcaatctcgtcagcaatctctttaggaacgggattaaccgagcaaagctcagtaggatacattctgcctagcctagctattgagattgactatgtccgttttcaccaataagagtgttcgatcctataattgcctaccataatatctttacaaagcttgattaaattaaagagagtgcagtgatgcaaggccataaaacccaaaatgtgacccggcgaaaaataaaacccaaaatgtacataggctgcaaaaccatggaaaggggagggcacccggattaaatttactcaaaaagaaatatctgtcaccataggatgactgtcccataccttttcattccatgatgctaattaagcaactagctagttgctatctcgatatgtcttggtagttggttatccatgcatccaacatcacctctgctagcagaggcaacttttgaacataagactgctttcatcactcatcacaattatacaatgatggcaaaacaaaatgtttacgtagcaaaggtcgtaggagtctagaagacatggacagttctctcatgatctccttggataattttcaccgccaccaacttgtacttttaataagccctagagttgatgccatatctgattatctgatgccccttgagagtgatttactcggaaattaaggccaacccatagcaaacctactctatagaccaatttgcaattatttatagcctgttatcaagatgaaggtgttgacacctcatagttaattaattagcttgtgcagaagatcaacagcacctcaatttttttcagctaagttgctgtttcagaacgttccctgtgctatcagctcttctaaaaataatcatcatttagcattattggcttattgccgcagaacatttttcacgatctcatcctctctgtacgttccacatacactagctactaatcgctgtccacagatcatttagaccataattaaccatcatttgataaaacatgcaacccagcatttctctatcaacgattattatgcatttctaacagacggcacaggagacatgcctgtctggatattgtctgaaaaattatcaccccctgattttgtctgacaattatcaccactgattatcattctcacactccattatttggattgatagatacggatcctaataactacaatctactgagcatattagctgttcctgttggtcaggaaactgcacgtgtaactgcataagctaagtacgtgtgtacgtctgtctgttccaacctgcaaatcagcagcttgctgaattattaactgcaggtgtatctgcataaacaaagtgtacatttatctgattcattaaccgtttcagttgcacgggacgctgcaatgtcgggcaaaacacaggcaaagcagaggtagcaggcttgccggccatcatggtcagagctcggaattctgaagtctgaagataaataagcatgtacgtgtctgcaattaactcttcgagcgtgtgaccatgactttttttttaagtacttgtattttccattcagaagattaactaacctgcctcctgctgaaatgtcaaaggcagcagctagctagatatagattaattactcgctgctttgcttgcgtgctactcatttccaaaccagattaacatacagaatagtatatacaagtaagcaacagatgcgtacgtgctcattataacctgtaattaaccaagcaaattgtgaacttcgaatatcggtatgaagctgtacgtgagagtatgataatctaagcgtgtaagtggtggcagccaactaactcgccgagctctcagctgcgtacgatttgacatgaaaaccacggccacttatgctccaaacaaaccgcagcacacatgcaaaacgagcagcgtgtacaagacactacgatgcatatgctgatcagctgatatgtgtaaaatgtgttcgtatttaaatttggcaatttggtctgaatatttctttttggcaagttggcagtataacttggagatatgttacttcttcagttctgaaaaaacaaagagatgtgtacttcagtgtactgcttcgtatacatcattttttagggtctgtagttgttggtgaccaagttgcacaaaactctgaaacaaaagcaaacaattcttaatgggttatccatgctatggaacaacgctaaaaccagccgagaataagaatgagccatactgattcatataaaattctgcttaatctgaaaggggagaagccgtacatgcgtgtcccacacagaataacttgaggatggaagaactttagccataagtttcacatacataatgcattgccattcttaatttcaaactggtttcagattcgtatggtcgtccagtacagttctctatcgcatggccctggcgaaagcatgaggtatagtttcaaaaaagaaagcatgaggtaagtatgaccgtcagaatgagagataaaaagataagtaaaatcatggactccattgaccactcccatccagtagttcatctactccctccgtcccttaatataaagaatattcactagtattatttctcttaatataaagaatattcactagtattattgtaatgtttgactactcatcatattaaaaaaatagtgcaaatataaaaaacaaaacgttgtgcttaaaatacttttagataataaagtaagtcacaaataaaataaataataattttaattttttttaataagacgaattgtcaaacaatcgagcattacaaaatcttttatatatctttatatcatagagacggagagagtatctcgaacgtgttgcgttgccagtttacgtagcattacaaaaggctgacatgcatttttgttgcaaaattacttgaacaagaagaataaaaaatgctgtcaaatcttacgtcagaaatgatgcataggtgacctcccttaatactacttttcagtagtttttggacggttatgttcaggtcattgatgacataattcacgtatcaatgccattttttttatgaaccagcataagtcgatgttaattttattgaatagagtagaattaaatacaatggcctatacaaaactcagaaaaactatacagggattttaaaggatattttaaaggataagctctgagagacgcttagcgcttgtaagaccgtcgatgatattttgttgtgctcaaaagactatggtttctcttccgccaaatctccaatgatatcatgaggatgattaagcgtgctctagcttggataagccttgacaggtggctagcacttcccaccacattgatgaaatacgcgtaggctacgatagtataaataaaaattttctatcgcgtaaaccaggaaccatgcaagtattagatcatagatcgttaccactcgacgcgctgcgcagcggaagaaggcgctaagaagtcgaatgaactctcacgaagtagcgcgcgtcgatgtagaggaagtagtcgatcgcaccggctcgaccttctcctcctcgtgcattcttctcgccgtattcccacaccgattagcaccgcaaagcagcggcgcctctaccagtatccacacgtacagagacgaaacgccacgcgcagatgtgctagcacccgcgcgcggctagggttttgctcggggaggggagtgacggctagggtttctcacgtaatgcgattccttagccaatcacacccctcacgaatatataggatccatgactcgggcctccaaggtccataggactcctatttggatccctatccgaattaagctcatattggatctccatccaatccccttattccggcccattaaacgtgcgaccctgtagattcatgtacactctgctgtaacccgaaaactaccttttgttccacgagtcaacagcggcccctagcagaacgtattgacccaccgggcatacataaatatcaaatcggttgaacctctagagtatacttgtatgaacccctttgtctcacgatatcgattaagctcaaagctatatatgtgccatcctctaatagctcaatcattcactcgaacctgtgatagttatataacttgtgattgactcctcaatcacctttggtatggccatgcacttccataacctacaatatcgaagggcccagagatatctctccataggaggagcaaatcatatcttgattattcatatcccactacatgttttatagcatacccgaaaactacttttataactacccaattacgaagtagcgtttatctgtccctaagtaagctactacacatattgggaaccataataatctcagatgtaaggattcaacaccaacactaaatgagatcactgatgacacaacacatatggctcttgcagtgtctcatgttgggtctatccaacaacatgtgtccacattattaatttggtatctctatactatgatccatgagacatgatcatcaattaatacatgtgttcatcacttaaatatatttattccacatatgatatttgatcgcggacactttaaaaatagtaacaaacaacataaagagtctcatgaaagagtcatat

SEQ ID NO: 43130 - DNA, 1030 bp, Oryza sativa
aaaatatcacatcgaatatttggacacatgcatggagtattaaatgtggatgaaaaaaaatcagttacacagtttgcatgtaaattacgagacaaatcttttgagcctaattacgtcatgatttgacaatgtgaaattacagtaaatatttactaatgatagattaattaggcttaatagattcatctcgcaatttacatttggaatatgtaatttgttttgttattagtctacgtttaatactttaaatgtgtgtccatatacttaaaaaaaattggtcaagaaactaaacataaccatagtagtagagaaataatacgagttggatttccatttcttcggctcccaattattttgtttgattgctggacaagaaaataatggcatacgtattacgaaagcatacatacattgaaaaaagtatttaagcagcttatctatatcgatttatatgtacaagttcacatatcaggtgactgtagaaatacctgttacttgcacaaacatcatagattatggaatttatttaatttcattccgaaatgagaaatttggttaggtattaattaatctgcacgctgtattctgacatcagctctgacatggctgaattaccattaggtcaagcttgtgaaaaactccgtgtgccttctaaaagaggatgatttcgacagctaaaacgtcctttcaattcaaggtgatgccttgattatatgcagccgtagaatttggctccaccaactcgcgaatttctgtcccccttatccatctttttcatcggctattttagtatttttttatgccttgtgacttgtgagctgtgactttaatttcctagtccagaatgctctagattttttttgctatttgattgtgaagtgcgaagacaatgacgctagttaattagccgctgtccgatggaaatactctcaagttttgtccaattaatgtcccaacaatggaaaaaagttcatttaacagtacgtttctcacctacgtgcagtaaaaggtacagcatggagaaacattt

SEQ ID NO: 43131 - DNA, 521 bp, Oryza sativa
gcgcgcgacgcgcacggcggcgcggaagcagagctacggcggggcggcacaacactgagtggggcgtcgccgggaaaacagagagggggcgcgagaagttacgggaggacgacgacgagctggttagacgagagagaagggccgacgacggcgcgcgactgctcggtggcggacgcagcaccgcgtgtggtacgaggaggaagaaggcggcgatgcggaaacagagcgcacggcgagctacgcgagtgcggggacagcgaaaaaggaagccgaggagctcaccgacgggaggaacggtgtcggcggcgagttggggataggaagggatggaaggcggagggtagcacgcgaccgagcggcggcgcacggcggatgacgcccagccggcgcggcgtcgaggcgtgtgcgccggggaaggagagatggagtgcggcgatggggcggcgcagagctcctcgtgcgactcctcgtgcgcacgtcggcacgcgcgacggcggaggaagggcgacaatggcgcggcg

SEQ ID NO: 43132 - DNA, 654 bp, Oryza sativa
aacaagaaagaaaagagaaagtttgtccaaccaccctgaatgtagttcaaacaaaaaagaaatatgaataaagaattttcatctgcaggtagaaacttttccaaaagccaacatgccttgggaaaatggtaagaattctaccaatccttgtcgacataaagtttcaaactcacaatacctcccttgtgacttcacattatttttcatgacaaacgaatgaaagaacaaacagggaaagcaagcagaccagcacccagcagcaatgttggtaattgccgcacaaatctccacgcatgaccgtgaggaactcgtaacgccctgagatttttttagtattttttaaaactttttaattttttagttttaaaataaactctccaaaaactttttttaaaaatatgatccttttgatcacgccagaccatctgatgtagcaaaacaatattgtcatgtcttgtatgtcatgccaaacaacaacgttgtcacgctaactagaccagcatggccaatgttaccatgctagccagattgtcgtggcaacactgtttcgttacgtaagtctgattgacgtggtcaaaagattaatatttggaaataggttttattagagtttatttttaaataaaaaatttaaaggtttaaaaataaaaatat

SEQ ID NO: 43133 - DNA, 514 bp, Oryza sativa
ttagcgtaaaagaacaatatacatggtgaaaaataaaccacaataaacaagttcttaaaatagttttaaaatttaaattttagctatggagcataagctagagtaatctcctcctaacagctcgataaatggaacaggaaggtccaggtttcagtggacgccatggggataacttcagggcttcaggcccaatgctacgtacgttcgccagggaaattcttcacatccaaacaatgttgccatggcactggcaccactctgcatctgaaaaggaaaaagttcactgcaggtccctcatcttgtcgtcgagtttcaaaatagtctcaaaaccggaataccaaatatatcgcatccctaatccttcaaaaccatgtcacattgaatcctaagacaaaattgagagcggttttcacggccgtggcgactgatcagcgtgggacccacatctcataagaaaatcatcaccgcccctctcttccctccgctcccgacgcggcgcccgtgtccgcgccca

SEQ ID NO: 43134 - DNA, 640 bp, Oryza sativa
caattaggcagcagctcatggatatatacacatctaccacttaaccaaagtaagcaggcaaaaacacaagattggtggaggaactctgattgaaatattgaattaaccaaagtaacgccatagaagcttcagtattgatggtccaggtgagatgcattggcatatggttcaacaagatcccagtttttactgtcgtgtgggtcgctaatagggagaggtcaatcgctgagcccgacgttaacacagctcaaaaaatcacaagaggaggcctaggaggttgcactcctcgtcggcgacgaagagcagcgacgacaccgactcgatggcgccggagcgcgtcccgcttcttgctggcaagcttggacacgacgagcgcggcagacgccatggcggcggcctcggcggcgccgttccaagtgagcatctccaccagccggtccaccaccgccgcttacgtgccgacccgtcggagcgcggcctcgccgagccgcgggtttgtcgcgaccgttccaggcaggggcggatctacccattaggcggggtgggtcgaccgactcagctacgactcgtgttgccccacactttcaagaccaccttattcttttatagtagtcatggactatcaaaattaggtataaca

SEQ ID NO: 43135 - DNA, 570 bp, Oryza sativa
cctgcagccctaaagccagtggttatgccagcttttgattgggccacgtggcgcccctagcttatcaaataaatcaggaatgttgtctaaggaaaaaaatacagaagatcaagcaaaatagaaaactacagtgttatgtgatattctaaaagcaagtagtaccttagcagtttcttttaagaaaaagttgtaccttaacaacacagcatccagaacatctagctgttcccacccggtaaaaaaaaaaatcagcttccagaagcttctaactgtacatcacttcgcaataaacatagagactttctagaaccactcaaatataaatcataatttaagataagtctagttaaagtatctagatccatagacttatacatctagattatagtcctttgcaacaacatcactcctagaggcattcaaatatccgatagaagaaaactcagaattattaaaaaaaaaaagggaaatccaataaaaaatatgagcaacagggtcctcagctatcgtatcaccgtgtagcaccaagtcaattgaccatttcaattcctccttttttcagtttccagt

SEQ ID NO: 43136 - DNA, 583 bp, Oryza sativa
tttttttataaaaatatataaatgacatgcaagaacgaaggatatgctctaagggtattaacttcattgccattatccactgtgtattaggctcatcttaaaacactgtactatttttttttctttaaaaacactgatcacttatttcgcaagcgcatactccagttcggtcctcgtgacagctaggttgaaggtagagcagcatcagctattcgttcaatgtggtagaattcccagggccctgccgtactctacaaggtcatcgagtatgtcgcccatattcgtgtacttgaactcgaacccttccctgatcagcttctccgacgaacagcagactctcggtttctcaggcatcccgtcgaagctgcaaagatacagagacgatcactcgctcgtcagatcgaacacaacaatatttatctattttggatttccaagttggtcaacaattcgatcgtaccggtcggttttgacgttgtactgcgggtacctccggccatgaaacgggcaagcgccaagacggtggtgttgaagctgcagcagatgtacctcgccgacgactctgccgacgacaatgacgaat

SEQ ID NO: 43137 - DNA, 1867 bp, Oryza sativa
tcgttctccatctcgtcgttttgaaggcgtaatacttcggtccactacttatttttcaactttaaactttttctccctcgtttctgttagtatgccttttaaactattaagtgatctgttatttttttaatatatatataagttatttaaaaaattaaataaatcttatttttaaatttataattattaatacttaattaattatgtgctaacgaattttctcgttttacacgctaaaattcttgtggtatactccctccgtctcaaaaagattcaatttctaggtttccgtatataacgtttgaccatccgtcttatttgaaaaaaatatgaaaaattttaaaaaaaataaatcacacataaaatattattcatattttatcatctaacaacaataaaaatactaatcataaaaaaattcatataagacggaaagttaaacgttcgacacaaaaactcaggaattgagtttttttaagatggagggagtacgttttattatttttataaatcttgatcggatgaccccccttatttttataaattttattattcttttaatttttacttttaccctattgactgctgtacttctgttggtccttcggatgggatacaaccacaatgtggcaaaaaaccaggtaacaagcatttatttcaagcctactacccagtagtaagcattgtgggaagaggtagtagttactacctggtatttgtgctattgccggcaacaaccaaataaaatatgaagattctgacaggatccaggtaatggagggttaggatggatggattttttcaggtggaccccaccttgtttaccactacactcatataagcatttgcagcttactacctcctggtcatggggccatcttatttactagttgggtaagatacattgcgcatgccggacctgcaacagcttggcgggatttccgagagagggagggagactgggagagtggtggaaacaaatcccgggttccctgctcggtggcacgcccaaaactccgaactctgaacaaacctttaaaccctagcctcgtgtggcgtcggcttcccccggcgattccaagggagcagtcccctgttccctccattgctggtgagatcgccgtcctgcagttcctatttatttcttttggtgtgtgtgtgtttcgcatcgcgtgatagtactcgagcgatcgagctagttcttccccacttcacccgcaagtttgcttaagcctgttctgccagcgtacatgtagatgtaggcagaaccgcagaagccagtttttagcattaccgatctttgatggtttttttttgtctaaaaaaacttctttttttagtttgagggttttttgttggtttagaatcatctttttctttggtggtttgagtacccttcaccacctgggagcacaaagattatggtgtgatcttacgatgaagggaccaacccgccctaatatagcagggatgcaatctttcaaatgaaacattggttgcagttgtttttttttctcaagaatctatttctctaggctccttatggtttagtattcaaagataaacataataacggttttgaatttcggatcggtgtaccaaagcctgagtgacaacgtttgatggtaagtgggatttatatcaatctgatccgatttgctactgtaagagaagacttgattaggtgttagtggttttatgttttatcaatctgataaggtatttaagcaatggatcattctattgtgtgctgtgcaaagcagtttaggtctgctagagattgccctgctctgtgaacacaaatttggtggcccagtcattgcaatcatgatgagagtccaccaaacttcattgcatcatgaagggg

SEQ ID NO: 43138 - DNA, 2138 bp, Oryza sativa
agaaaaaactctctagtggcgatatatatagggtgtgtttagttcacaccaaaattgaaagtttgattgaaattggaacgatgtaacggaaaattggaagattgtgtgtgtaaaaaagttttgatgtgatggaaaagttagaaatttgaaaaaaaaagttggcaactaaaccaggccatagtgaactgttgcatggtcaatgacactcatatgtgacaacattgttgttattattgtgactgatagcactcttgggaatcatcttatttttgtatgacgtagctatcggataatactttggctgttggctaaaactgcagatggtgtcggtctataatgagaggagtaaatctatctattatatactaaaagtccattaaatttcctacaaacgctcctaaactgccacatggcatcctacaaacactcctagactgccacttggcattattaaatctcaccgtcgatttttacttaaattagtggacccgttattttataccattggattagatctattattaaaaaatttcaactttctctttatataatttaagcgctactactgttgtcatgtacgtacaggtttatacgatgtcttctcctgtacgtacttatgtgcacaaaaacaaaacaatagtttacgtactattcgctggaaagaaaagaaaaaaaccatgcgcatatacataaaaaagacgacaaaaaaatacatcataaaaatcgatgatctttaaataaaatatgattttctaaaatatattacatcacaaatataaatatatatagttaaactaagatctataataataatataaaatatccaaccaatgttccttgaaccatcttctaaattatttttaaattatatatctaatttctgattccgttgttttcctttaattaaattataagttatattgtggtcttaaatatatcacgacacatggggctgatatataatagttagtttttgataatctattatatactaaaaggctattaagcatccttaaaacattctcaaaccgttatatggcattctacaaacactctcatctcaccatgtatcactctagaaaaattatagaaaaaacaaaacatctagccatcgattttcactaatatacggtgcacccgtattttctaccctcggatttccttaaagaaaaaaaaaagaaagacccacaccccactgcttccatccattacgttacgttaggtatatgtacgtagttacgtactccctctgtttcacaatgtaattcattctatcatttctcacattcatattgatgttaatgaatttagacatatatatttatctagattcattaacatcaatatgaatgtgaaaaatgctagaatgacttacattgtgaaacggaggaagtatcatatatccctgccctcaccctaatatataagggcaacatgccctcctattttcaagcattttcttaattaatattggaaaacatactttgtaataaattattttaaacaactatatcatctaaatagctattttttatccgtgcatgggacgagattatttacaataaaatttagaattcaatacctacattaaatatattttaaaagtaaaataaatgtatttctttgggtcatataatgctagagactacctattggtcactcgatatatattaagaaaaatcacatagatttttaaaccatatgagtggcaacattttgcttatattagtaaatacaacacccgacacattttctaataggtctaaaattatatctatattttaaaaatagataactaaagactacgacccgttggaatatgcctcagaaaaaaatttccgtcccttgtcctgctgtacatatacctcctttgatcctctcgccttattatttttaactaacaacctaatatttaaaaaacatagctaaatgacttataatttctaaaattatatttgatatttaattttttttaattattgttttatttacagttaattaaataattcaatatccattatagttgtattttactatatagaaattaaaatactcctatgcagggcaactgaatgaaattgaaaaattataacagaatgaaaacatgtattatttcatattaaacaatctacgcaata

SEQ ID NO: 43139 - DNA, 602 bp, Oryza sativa
gattcaacaccggtcagaccggcggcatccactcggtcagaccggtagatcaatctcggtcagaccgacttccgtcgatttcgagggtaacttttatttccgctaaaaattttcggtttttgggtataacaactattcacccttctctggttggcttagtttttgtgattcgatcctacagcttccttcacatgcttcattccgacgactacagcaaggaagcaaagcagcaggatgaagggatctggcgaaggcagatgattcacatacaaaaatgatggtggcgagatggcggcggcttcgacttctcgggatagctacagcgagaacaacggcagtagcttctcgagacagctgcggcggctgcccgcacggcaacaacgcggcggcggctgctcgcgacggctgcggcgacaacgcctgcagcagctttgtctggcgacggcttcgtgcacgcgtgcagtcgaatggaatcccctcgttcttcctgcgtggaagacggattacagtagcaaactgaaatcgtggatgcgcccggaccttagccgaccaattatctatctatctatcgatctatacttatacttatactaattggacac

SEQ ID NO: 43140 - DNA, 676 bp, Oryza sativa
aggagaagaagggagagaaaaagaagaagggagaaaaaaaattccatgtcatcgtccacgtggcgtgccacgttggtaagaccacggtcaaacgagactttggaccgggatgatacaataaaccaagtttagggatctcgacgtacgttttacaagttcgtggacctaagtgaaacctcacgacaagtttaaggaccgctgctgtattttactctaaatttaatatcaatcatcatatttctaagtcctacatttcttctccagattttagtacttaagggaagggatgatgagccatagtaatttataaaaaaatacaaatcaaaacaattattaaacctatatccagaatatatcccggtagcacacataatacatcaagctgccactcaaatgaacaagagtacatattaacttttgctaaaaataaaccatcccttaattcttacttcaagatcaatcacaagaaaattgcatcaaattaaagcatatcatcataaatcttgagcactactgattaaaagaatggattggcccaagatgttattagaaaatttcagaggttgcagagttggacaaaaaaagatggtttcagcaggggttctcaccaacaaggagtagtgattgaccgtgaaaacgacgaacacatagtgattgatggtaagagaacctcctg

SEQ ID NO: 43141 - DNA, 658 bp, Oryza sativa
ctctcttatttctcctctgcatcgatcttcaaactcggactttgtgtgcgtttgtgtgaaagttgtggatttaagttcgtgtgagtgtttcgtgttgacttcgtgaagatttattgaggacgtattttatcccattgagattcttgctccatcctttacttttggaggttaagaagtgctagaagactagttgttacttttgagctatcaatctacgtatggttagctagcataagtttgtcaaggccgaatcttacctccgaaaagaaagagatatcactagggaaaaaaatagtgaagtttatgaaggtcgaatctcacctccgaaagagaagagataccactaatggaagaaataatgctttgtataagctctcgaggaaaaggtcagtgaagaccaggtttttgtgagctcctcaaagaaaattataaccccctcatggattcaaacttccaaggaacaaatttcagtgatatccttttccctagctttgctattgtttgtgcttgatattttttattgtgactagctagatccaattttctattgcgtttgtcgctgttctgccattttcagaaatatccgaacctccttcagatatattcgaaaatttcagcttccgcacctaattgagtttttaaattgggctgcaggaat

SEQ ID NO: 43142 - DNA, 655 bp, Oryza sativa
agaataaatgggctaggcccaatttatttctattaaaatctcaagggcccataataaatgttaaagtaataataccaccttgggaattaaaagcgtagtatctcaacttaaaaggcagttatcggaggctccccgttgaccggttaaagtgggggtcggatagccacacgcgcgcgcgccgagccgagccgaggctgtggcccggctctctctcgatccttttgcaacggttaaaaattcactccacgagattacttctgtaacgggcgagcgattcaatactgattgatcgtgtcgttacagaagcgaatcctcctcgtgcgctattaggacgagacagagaccgacgatcagcctctccacgaattctccattgtttgttctgatcgcttgcatgtacaagtgattgggacgagcagggcctccagaaccacaccctctcctgagatctgcacgggtaggcgggtgatcaggtttttggggagtgcttccgcacgactgctcgcttcttcgtcgtcgttcggttctatctacattgcgcaatgtctactggtggtggcacacctggagcctctccacaaattctccattatttgttctgatcgcttgcacgtacaagtgattgggacgagcagggcctccggaaccacaccct

SEQ ID NO: 43143 - DNA, 1423 bp, Oryza sativa
atttttgaataagacgcatggtcaaacatgtgagaaaaagtccccggcgtcatctattaaaaaacggaggtagtatattctatgccaatagtgtcacctatatacatatgttagtgaattatagggaagtgttctacatccaaaatagctgcttactgctaatcatatctgccatgtggctatttactggctttctttttttggtaattgatatggtccaagtgttcaatccttatcgatgagatgttatgtatattgtcaggcttatggagttcatatgaatgggtatgttgagaaggagggccagaaatttctttggattgctaagagaagtgatacgaagcagacctttccaggaatgcttgatcatcttgttgcaggtggcctggtgtgcatttccatcactctctttttttggtccatcttattagcagtaattatttttcagttatcatcttgttgtagtaaattatgaaactttaaaacaattgcatagggccttttgatgccttcattccttcgtaaaaaattaaaggggaactgtgcacatatcagaccgtaacattttaagcttctagttgattattgtcagattcagcctaggattgacttggctgaagtgtctggttagtggtcactgggtaaccagttgttccacttggtcagcgaccaaacttcattttccactataatatttataatgcatataatctccaaaaaatttaatctatgataacatttcattctcttctgaacgttgtggtcataaccagctacatcagatatcaggaacagaaagtctcagcatactttgggcaacataaacatccatgttcttgctggattttgttttacgtgcaaatgatgtgcctcaaatggccttaaactcttggccatatgattcttttgctcctaatgttttggggcatcccgacaattatatacctggtaatctgatgttcttggtaaagcttagatgagaaatttcagctggtttatggggacaataaattgtaatatcatacttcttatttatactgatgtaggctgcatgaacaggtggccactttagggttcatataaaatttctctaaagggttttaatctgtcttgtatgtcaaaaagtcaattcaatcaaacaggtagggatgctttagtctcaaatgtgtggctcagttcttctctctgacctgttttttttttttttctgttgtgaaagtgaatagctagctattaacttacattgatggtacactgattccccttgaaaacttttagccatatggaatctcctgtgaagagaatgttatcaaggaatgtgaagaggaaccaggcatcccaagatccatttcaagcaagtaatatgaccgctgttgcctgaaaaattataaatttctctgtgatcttcatcgtgtttgccgtg

SEQ ID NO: 43144 - DNA, 1120 bp, Oryza sativa
attgggatttaatccccaagaggatcctatgcaaggagggattgagagtggatcccaaccatatcaccctaaccctctggggatgaatttcttcctaccctctaaacctcattccgatacatgtgttctgtatagtctgatcctcttcaaaatgattgtaaagggttagctctataatctttcgacacaagcaaatccctggttttttttttctgacagaaccaatgcgcaataagcatgttatctcatacatatgtcatagaagtcattcttgaacctaaataaaatgtgaatgtatcaagacattcatatagtatatatctgaacgagagaaagtacgtgaagtttggccttgattgcttgctggtgtgtgctgcaggtaagggtatatagcaagaccattatagtcttttcacgtttattgtgcacatttatatgctcatttaagcctatctcaatgcatataatttttattcccaaatttcccttctgctataccggcaaggtttgttctcagagcaaggtttgttccggaggtcgtcggggcaccggcggtgccctaccgccagcgctgcaatcccatccaactcgcactgccacttactagcagcagcaagcccttctcgtggaggtcggttatacgccgctgggttgtctatgactgtgtttagatctaaagtttggatccaaacttcagtacttttccatcacatcaacctatcatacacacataacttttcagtcacatcatctccaatttcaaccaaaatccaaactttggatccatccaaacacagcctatatggtgcatcatcgtggtcaaccgcggcgccatccgccgcgtgcatccgtcatgttcactgtctggcctcgcccatggccgccagcggccatcatcagcacctatggtccgtctgtcctggctacatcaacgacggcgatcgccatcttcgcgctgctgctcacattctacctcttcatgtgcagttcccaggcttgcactatccataacaacttccccatattccattttatcaacatctggtgcctttgtgtcaaatcctgggaatgcatccttcaatgctccagctcaattctcccatgtgcagtaccgacaatt

SEQ ID NO: 43145 - DNA, 1813 bp, Oryza sativa
attagatggtaacatagtttaaagcaaatacacggaagatcatttagcttgcttggattattttagcacatattttttaaaaaaaatcatgaagtaatcggattttctctaactaaagccattggattttctatgcattggtggtttggacttcatattttagttagttgtatttgctgagacaatgtatatctcatttagctatgcatgtttgacaaacaacatatgatgatgcaacctgtattggattatttcgtaattcttttacagcaattcaaatcacacgtaaaagggcagggtgttctcccttaataaaaaaaatgtttcatagttcactttgtaatttttgtttggataactattgatttaatttagctatacatgtttgcagaatgatgtatagtgatgtaatatgtgcagccaacttgtttaaggtatttgaatcatatttggatggtatgcaaagcacatgggctgaatgtgtgttgatgtgaaaaacacacactggcctaggagatctgcttaactccagtgcagatcctaaatcttacttctgggttcgtcgtcaacaatgtggtcgaatgccatattttgtatataggaaaatataaggatacggatcttaaattcctagtttaattataaatagagcaataattatattagaaatcagacatgtagcttaaaaactatggttgttttaacatattgattatttctcttttagtttactcctacccaaaaatagggatgggattggcagtggtcagcgcgcatgtgaagggggcgaggaggtagatgcgatttatttttataacttctccaaataatgtaacttaaaaccaatgatgataggtttaattttttctcaaaatttctaagattatttatgattttcaggacatgacacgtggcagcgtaagatttttcgtaaactaaatctaatggttgaaaataatgggtccatcgatttaattgaaatattttataattttaaaatgtgacatatggtgacttaagtgtgctctaaaggtgtttaattggttttcattgcgtagattgtttaatatgaaataatacatgttttcattctgttataatttttcattttcattcagttgccctgcataggagtattttaatttctatatagtaaaatacaactataatggatattgaattatttaattaactgtaaataaaacaatagttaaaacaaattaaaaatcaaatataattttagaaattataagccatttagctatgttttttttaatattaggttgttagttaaaaaatataaggcgagaggatcaaataaggtatatgtacagcaggacaagggatggagatttttttctgaggcatattccaacggatcgtagtatttagttatctatttttaaaatatagatataattttagacctattagaaaatgtgtcgggtgttgtatttactaatataagctaaatgttgccactcatatggtttaaaaatctatgtgatttttcttgatatgtatcgagtgaccaataggtagtctctagcattatatgacccaagaaaatacatttattttacttttaaaatgtagttaatgtaggtattgaattctaaattttattgtaaataatctcgtcccgtgcacggataaaaaaatagctatttagatgatttagttgtttaaaataatttattagaaagtatgttttccaatattaattaagaaaatgcttgaaaataggagggcatgttgcccttatgtattagggtgagggcagggacatatgatacttcctccgtttcacaat

SEQ ID NO: 43146 - DNA, 2228 bp, Oryza sativa
ggcctcacgtggaaggaggaggaagaagagaggagaagggggaggaaggggagaggagaatggatggaggaggctaaggctgagagggataaggctgatagcgaagggatggagaggacggtgggatcgaagggacaagggataattaatgagataggagaggacggtggactggcgcacggttcggttgacttttgatcccagttggtataaacaaccaggactaaagatggatctttagtcccggttatttataccaaccgggactaaaaatgaattgggcctaacttgacccgataactttttaaaccgggactaaaggtcaaaaagtttttaaccgggactaaaaatcatctttagtcctggtttttattcgaactgggacaattgtggattttgggcgaccgagcaaagatggtttctccaccagtgttggcccgttagtataatggatccatcctactagctctcaagccacttgttaagccaattatgctaatagccaagcaacaaaatgttagtccttgttcgtgaaaaataatgggtaaatttcatgaaaccctatctgttatagttaaagttgcacaaaacaaacaaaattttggtatgaggtatatagccccatgtaatatggtcgtaaaattttacaaaaccacaccgttaaccaatttgacatactcctatatcaaaattttaaaaagctttacttacataaatacaacatttatatggtagatgaaaaacctcataattttgagatgtgactatagaagccaaaagtgtgatagatcaaattcaaaatgatgaatggtattccctccattccaaaatataaggcataaccacatctaacccaaataccaggaaataattattatcatcttatagtttggatcattctaataaatataatgcatgcatccaatagaattacagaacatgagagtggaagatttaaaaaagtaataatttaatgatgaagatgtcatagttaattgcttgcatgcatgcatacttcatattaacatctaaaaaatggttgtgttttatattatgggatggagggagtatggttttatagaactttatggccataatatatgaggttatgtatcacgtgttaaaaccccgatggttttatgcaacttagaccataaagaaatttaattaaaaataatcaaaattgttactcccaaagcattgtcaaatagcagtcgcctcgttgctagtatattccctgtacattccaagcctacacttgacatgccccttcactaggacaatggaagatgtgatgtttttgttgtttatgttttccatatctcattagcttgtgtgtcaaagcataaatctggtgtgtggttagtacagctaattatgtatacttggttcttcgcattaccatccaaaacagatctgtgaggagaatctccaagcaccgatgccatttttagtttaaacaatattttgtgggatagttgtcattcattagctttaactaatcaattggtaccaacaagatgaggcgctaagtttcatcgatcaatcagtttgtttagcagaaaagtggaggcttggctcggtgaaggttctgctctcttatctaacataaaaaaataggtcaacttggaaaattctaacctttctgtgttctttactccgaatggaatggagtaagaataagcatgcttcctgagattataaagggtgcgaattttttgcaaaaactttatatatttgaatttcttagaaaaatgttgttgatccatttttctaactaggaaggtagcccacgcattcgcgcgggcatgtatcgtgcactgtatttgaaaatggatcatatttatcagagagcctccgccatgttttggaagtgcatttcctcagcaaatattcttcgttgcatcactttgataatttctctatgctatatactatatagtatttaattaatatgtataagcaattatatataatcttcatcatcatctaaaaaggagttagacctagtttgtttagaaaacatgtttatttaattaaaagcaaggtgtttttttctttgtttgttgaatgctatgggccctattgatgaaaatgtaagacctagctaaattcattgttccttttcccccgccatacggttttatgcagctcctagtcaccgtgttgagatgtggtcattgcacctacagaggttgccttgtgattcatcgcagttgtgatcacat

SEQ ID NO: 43147 - DNA, 1966 bp, Oryza sativa
atatatgtctagattcattaacatcaatataaatgtgggaaatgctagaatgacttacattgtgaaacggagggagtacgtaactacgtacatctacctaacgtaacgtatggatggcagcggtggggtgtgggtctttctcttttttttctttaagtaaatccgagggtagaaaatatgggtgcaccggatattagtgaaaatcgatggctagatgttttttttttctataatttgctagagtgacacatggtgagatgtgagtgtttgtagaatgccatataacggtttgagaacattttaaggatgtttaatagccttttagtatataatagattatcaaaaactaactattatatatcagccccatgtgtcgtgatatatttaagaccacaatataacttataatttaattaaagaaaaacaacggaatcacaaattagatatataatttaaaaataatttagaagatggttcaaggaacattgattggatattttatattattattatagatcttagtttaactatatatatttatatttgtgatgtaatatattttagaaaattatattttatttaaagatcatcgatttttatgatgtatttttttgtcgtcttttttatgtatatgcgtatggttttttcttttctttccagcgaatagtacgtaaactattgttttgtttttgtgcacataagtacgtacaggagaagacatcgtataaacctgtacatacatgacaacagtagtagctcttaaatcatatacagagaaagttgaaattttttaataatagatataatccaatggtataaaataacgggtccaccaatttaagtgaaaatcgacggtgagatttgataatgccaagtggcagcctatgagcgtttgtagcatgccatgtgacggtttaggagcgtttgtaggaagtttaattgacttttagtatataatagataatagataatagatagatagatagatttaaaatatggttttgagaacattgattggatatttatatagatcattatttaactaaatatatttatatttgtgaagtaatatattttatctaaaatcatatttttaaaaccatcgatttttatggaagtatgttttttctgtctttttttttcatgtgtacgtttttttttgggttcgagcaagattaggaaagataatgtacattacgtttgtacgtatggaaagatcagcagtagtatcgtacaaacacatacgtacagatcatgaggaggttattattttttaataatagatctaatctaatggtgtagactaacgggaccaccaatttaagtgaaaatcaacggtgagattagatagtgccatgtggcgacttaggagcgtttgtagagcgccacgtggcggtttaggagcgttcgtaggaagtttaatggacttttagtatataatagatagatagatagaagatttgtactatttatttaattagtttatttgtaccctcgaataattatcacaagtcattcagttattcattcattcagcactgaccctactatcttaggcaatcaacaagaattgattggactccaccaacattaaaatagttgttgatggaaccagcagaaacttgcatcaacaaagcttacaaaccataaaaaaaattggatgaattcagagttttgcccacagcttttggcatcaatgtaacttccaatcctttggcaagatttttattggataataacgctggtgaaattagtccattagtgtcatcagcatgcttaacaagaacttgcccactatgtccaaaactgctcgagaggcagccaccaagatggttccgtgacggatattccaagatgacaaatggaatttcatcacgatttgcaataaaatggagtgaaatccactcatgaattcagaaggatttaggctttttttactagcagaatgatgacagcttctctgcat

SEQ ID NO: 43148 - DNA, 1785 bp, Oryza sativa
ctttggagaagaagtcctaggtggagtcctggcttataccccagttgagcgcctgtgaagatggagccataggcccgctaatccgctactgtttatttttgattgttaggcctgaagtgcctttgtaataatgtaaatattatcgatataataaagatgtgtcttttgtatcatgtttgtgtggtgtaccccggcttttcctgggacggggaataatacactagcgttctggaaaaagacaatttttccgggtgcgacaagtaaacatttgctaatgacggattaattaggcttaaaacatttgctaatgatttgacaatgtggtgctaaagcctcgtacctagaaactaggacaagaacttccactgctctgaggatttaatacacagttaacaagttgctgtaaccccaagttacttttcttttttctcaaaatggcagtcaaattcgtgaaaaatgttcttatttcaggaagagaggaagaccactcctgtttctgttacctggaaggttaggagtaaacgttcttacagccagccaaataacataaaatcgcaattttcactccctttctgtgacaccatcccatcacatggagttaaatagacctctaagcagtttgagagaacaaaatgcaaaccagaataactgtttaactaatgacagcttcaacatattcggactcaaaatgagacagctccaggtgataaaaaaaaataaaactaatttggttactctcaaaaacttcaggcatgacatccccttccactttttttttcctacattgaatccttctttccatggttcatcttccacatgttttggctgctgcaccggctactgatgtctttgtgaaatatggtaaactaacagaaacatgctaataaaaactagcatgatctgttcaaagggttgtatgggagtctatgctctgctaacatacaagccgatgcagcatacgttattatatcctgtctcctcccaagcctaacccttctctgcaagaaatcaaccactataagccagcaaagacacactagctagacaaactatattaaaacttttttttttcattctgtgctgaagcataggtgtaaccttgtagttcgcttgcaccaattcaggggatgcaacaatggccgccaacattatttaaagaagagtctgttgggccctcttcctgcaacagtttatttggtacagtacaaattgttgtgtggcagaagtgtctcgtttgttaggatgaattggtgctcctctgttttcttaatgattattttcatgtacttcacaaatcctgagtattgtctgtatgttcaaattaatgacatcgtcactattacttccattatttacatatgttatcgagtttgtgccgcatgcaatctcggttgaattctatgtagtttgcgctattttgatacaaggtgtcggagaagtgggaaccagggttaccgttcctctactgcctggggcatgatggaggttaatgcggccatctgttggcccatctatcctgagatggttgttagctgcccacaatggcgtaactaatcaaggccacccctgctcctgtttggtgccctgaggtcaacaccagcacatgacttatttttcatttagccaaacaggacgagactccgagcaagagtcccaaatcttatacctatcaaagcagttaccctgtgtaagtgtgggctggtgtacgacgggacgatgtcgcccttttttcttggaccgccatcatgagtcttggaaaggcgggcgacatggctggttgactgg

SEQ ID NO: 43149 - DNA, 4607 bp, Oryza sativa
attcctgcagccctgatgtccgtttggtactaaggaatggcaatcgatacatatataagactttggacattagaattttccttctcttgaacaaaattgtgtgatatgcaaaaaaaaaaaaagagccaagtaactaccaacaatatgaaatatgtgggataaaattcgaacaaactagaacagaactaataattaagatgcaatataagcaagaaatagacaggcatcaagatttcttgggaccacgatcttatatggaaggtggcgctggcagcagtatatatatgtgctggagatcccattctggttaaaaatgatttgagttcctccctgctgttcctagttgcctccctgccctacaatcatcgggctatgctagtgaagatctcaaggaaacttttatttgtatctcttctctgcttctggaaatcctatatattgcctttcatgtcactactggggaaaaggcccttcactcccggtttgtaaccctttttactcctgagttgcaaaccgggatactcaatccgggtataaagatgcatatctttagtcctgattaaagtaaccaggagtaaaaatgggtcttcccacaggccctccgcctggccgctcctcgatctgctctagggatgaggagaaggagaggttaaggatcagagagaggagggataggaagatgaggaggagaagataaggataagagagaataagaagatgataagtttgggaggataaatcctcgggattatatactatatatggatttttagttctggttggtgttatcaaccgggactaaagatttgaacaatctttactccaggttggtattaccaaccgggactaatactccaggttggtattaccaaccaggactaaagatgttcggcccaccgacaggccactaacataggatgatctttagtcccggttggtaataaagattacatagcttttaatcgggactaaaaattatttttttgtcccggtttttattggaaccggaactattgtagttttcggccaaccctgcaaagatcagttttctagtagtttgacagatgcatctcctatatatatgtcatctgttgggctaccaaattaagcatgcatgtttagggcgatattttcaaccataccattatttggtaaaattgataattatatggctatatttaatttattaccaaagattgacatcattaaactaatcctaccaaaattttggcaatattactaatttgccaaaatttagtaaggttcattttgacaccaatataaaatactcttatttcttcagtacactgtaaaaacgtacataattgaagtggtaattaattaccgagtgcatcatatgtacttaatatcctttggttatcaaatagtaccatttgaatttgaaagccccagcagtagtagttgtaagctagataaatagatattttctgtccatataaacgcatccctcatagtttgcactgacaaaataactgtggatacttcacactgggttaacctgggtcctggcgacagctatctattacactataatatctattacactataagtccattaaactttctacaaacgctcttaaaccgtcacatgtcattcctacaaacgctcctatattaccacgtggcgctttaataaatcctagaaattataaaaaaaaagcaaaacatccaaccgttggttttcgtttaatcttgtggacccattatttttaatcatcagatcattataaaaaaactatcaaattaatctatctcaaaaaaatcccacatcacctcgtcgtgtccccatttatctgtagttttgtacgtccgtccgtacatacgtacatatcccctatatgtcttttttctttttttcttcttatatacttagattagatgaaaaaaaacaaaaaagttcatgttaactatatgttttaagttgtaaaaatacatattatttcatgttttattctatatatcacatctcatcaaaacgtccataaaaatattaataaattaaaaatgtagattacatgattgtatatcacttactaacatagttaaattgaacttgtatttttgaaaagtaaaaacaatttaaattgtgagtagcattctaaaaaattactcactccctattgggtaatactgacatgtccaaatgacattattaaatatatcatgaacgtattttcatataatatatatgtctttattcatatatttttggaaaattaacgatcatatttttttacactatgtggatgtccttttatctcttaggcttcattcggtttacctaatcggatgagcttctctaggacacgtgaaacaaataatgtcttcaacgtaagattaattaagtactaaatattacaaacttgaatatggatttgtttgatcttttagaaaactttgcatataaagtatttgtaaaacacacatcattttaatagttcaggaaacatgctcaccataaatgtgggaatagcattttatactatatatttttactaaatatatagtataaaatatattttgtcaattaggaatagccaaatatatcaatcatatatccctactaatccctatataaataagtttcatatataaaccactatccaccaatcatcaagattgcttatgaggtgtctgtgcactgtgcacctataattagatggcatctaataagcatggctgttatcaagtaccgataaaggacaatactaagggaaaccatcaacaaataataggtgaatattgacaccaccaagacacaacaaacaataattgactacaaatagattgtaactattgagtaatataacgttcctacacacctacatacactcctaagatgccacgtgatgctctaagaaattagggtaaatctaacaaaagttttaagaaaaaagtaaaacatctaaccattgatttacacttaaactggtggatcaattattttcagccattagattagatctcttcgagtaatccattgtggctatgactaatagcggggctgtttggttcccagccacactttaccattacttgccaacaaaagttgtcacaccttgcctaaggtgaggtgatcaaattgttagccacaacttactaagcctaagggaatcttgccacacttttttgagccattgacacgtgggacccaatttattggaggggaatcttgccacaactgtggctacaaccaaacacctgtcaaatttgcctaaccttaggcgtggcaaactgtggcaaagtgtggcttgcaaccaaacacacccagcattcctgcactcctaattaatatgtcatgtgacgctctaataatatattagagaaaatctaagaaaaattataagaaaaaaaagcaaaatctagctattgatttacacacataaccatgtagatatattattttcaaccattatattatatctattcaaataatccctcactatgtacgtacacaagcgatgtcataaaagaaaaaaagaagaagagagtgtatatgatcagcccaatcgagtagttttctctttctttcttcgcagctctaagatttttctcaaattgtccatatgagtagcgaccactcctggcgaggttgtcgaagaagccatgccaccgcaacactgcttcatgtcatcttgccaattttcttgaaagtatatttttttactaatgatgtaaaagtcaatcacgagcacatatataaacgtttgcacacccctcataaatacacatatgcacacctacccccaagagaaaaaatatttgtcccaaaaaaggaaaaagtgcagcttagtatttccagaaaaaaaacatatatacataccatcgaaaatatcacatggaagcacattatatctttgtgattatgtcattctcatatatatatataatgttaataattagtacaaataattttgacaataatatatattattccatcgtatattacccatgaacatgcataggtgaatcaaatgtataataaaagaaaaaacaacacaaaaatatatcaactcatatgtttgcgaatgatggtgataaacgtgtttagatataaccacgtcatttcgtactatccttatagtttatgggtgtaatttagtccatttcctttaaaaaagtcacttccatataaggatttaccacttaagaattttttgggattccctttaaaattaatcaacactaaataagtaagttgcccgcgcatgtgcacgggccaccttcctagtttcataaatacacataatacaagaggcagctcaacacaaatcacaagcaatatatataatatgacttctgaagctagaaactagaaatgcaagagccatgaggctagctaataattttatcatcatatgcaaagcattctcattcacacgacaaattgagtttgggcttgggaagcaccgggagacacgaattatgcaaaatttgggataaaagtatttttggacaatgtaggtggttgcgccctcgtgtgccctcaggttttagaatcctccttggcatggttctgtgcgagactgaagtattttgtcctacaatttcttgacctacaatttcttgaccttcatgagcaaatg

SEQ ID NO: 43150 - DNA, 2759 bp, Oryza sativa
caattaaaaattatggaaattgttttaactgctacataacaccccccgcccaccaccacccgggcgtgcgtgtaatgtcattatctcggctgaaattttctgtttttccttaattttttgtgaatttggttaaaatttattcaagttcagtcaaattatgttaaaatttcaaataattttgttccaaaaagtgctgaaaatccttttgcctaggtgcatatattaacattcagctgcattaatgcattcatatggccttacattactctggcagctctgtttgatggtcctttctttttgacctgatctgaagaaacatgcatcaaactatgctaaagaaatactcccttcgttttgaaatgtttgacgccattgactttttagcacatgtttgaccgttcgtcttatttaaaaaatttaagcaattattaattcttttcctatcatttgattcattgttaaatatattttcatgtaggcatataattttacatatttcacaaaagtttttgaataagacgaacggacaaacatgtgctaaaaaagtcaattgtgtcaaacatttcgaaacggaaggagtatgtgggaatttggttatagttctagtttttagagtactactgcagtccatgaaaagcatggatcaaagtatattctgggtttaaatgggaatcaattgcaactgaacaaagagtactagaattttattcgttgccctttgttagtacattggtactactctgcattactccctccatcccataaaaaaacaaacctagaaccggatatgacacatcctagtaaaaggaatctaaacagacaggttcaggttcgttgtactaagatgtgtcacgtatagtgctagattggtttttatacgacggaaggagtagaatattgagagaagtgcagcttctcttaatctctcatacacgaagtagctgtatactacactcaggagtacacttaattagtaatctctgaatcagatttacgagattttcttttcggatgagataaatcattcacaagttatatggccttgttagttacctctcgtaacaccgtaagtacaaacatcaggaaaataaattatgtttatatatttgatgtgtacgtaacatggattttgctcttgatccatggagccgttcatgttgtcatgtttttagggataagtttaatgcatattaccccaaaactattgcgtttatctaaaactcactctcgacttaaaccacgtataactcacctctcaacttttaaaatcaactaggaaggtagcccgcgcattcgcgcgggcatgtatcgtgcactgtatttgaaaacggatcatatttatcagatagcctccgccatgttttggaagtgcatttcctcagaaaatattctttgttgcatcactttgataatttctctatgctatatactatatagtatttaattaatatttataagcaattatatataatcttcatcatcatctaaaaaggagttagacctagttcgtttagaaaacatgtttattaaattaaaagcaaggtggtttttttctttttttgttgaatgctttgggccctgttgatgaaaatgtaagacctagctaaattcattgttccttttctcccgccatacggttttatgcagctcctagtcaccgtgttgagatgtgatcattgcacctacggagattgccttgtgattcatcgcagttgtgatcacatttttggtcaagcttagttactcctatttccatgtcttgttatatcgtaaaatctaaatggactccaaagttaatcatttaagtatatatatacaacaaaatatatttgcagacgattaatgttcatatatagggatgattcaccttttgaatggtctgtgcacaaagaaaataaacggagttacccggaatgcttagaaggccaaaacaacaattagatggtaacatagtttaaagcaaatacacggaagatcatttagcttgcttggattattttagcacatattttaaaaaaaatcatgaagtaatcggattttctctaactaaagccattggattttctatgcattggtggtttggacttcatattttagttgtatttgcttagacagtgtatatctaatttagctatatgcatgtttgacaaacaacatatgatgatgcaacctgtattggattatttcgtaattcttttacagcaattcaaatggcacgtaaaagggcagggtgttctttcttaataaaaaaaatgtttcatagttcactttgtaatttttgtttggataactattgatttaatttagctatacatgtttgcagaatgatgtatagtgatgtaatatgtgcagccaacttgtttaaggtatttgaatcatatttggatggtatgcaaagcacacgggctgaatgtgtgttgatgtgaaaaaacacacactggcctgggagatctgcttaactctagtgcaggtcctaaatcttacttttgggttcgtcgtcaaaatgtggtcgaatgccatattttgtatataggaaaatataaggatacggatcttaaattcctagtttaattataaatagagcaacaattatattagaaatcagacatgtagcttaaaaactatggttgttttaacatattgattatttctcttttagtttactcctacccaaaaatagggatgggattggcagtggcctgcgcacatgtgaagggggcgaggaggtagatgcgatttatttttataacttctccaaa

SEQ ID NO: 43151 - DNA, 1095 bp, Oryza sativa
cggatccaagcgagggtcaagacccgcaggacttcgaccaacgcaagtcatcaccattctttgaacatgttgatccaattgcgaaattattttatttccaaataagattgcatgcaatgatgaacatcctacttgtgattatgccatgtcttgattattgtttacctttaaatccttgtaaccataattacgtatgagtccttagtcaattatgacacatacttagaaatgctacactagattcatgcacgctcatattttatcaaatgctatatgcttgggcaattacctttgggaaggtaattgagatgcggcatgtggagacatgagcgccacattgccatgatgatgatgacatgatttgtgaaagtaggaatgaaattaaacacttgttttagactggggcggacgatggatttgggtggtatatgggaaaggctagtaccgtccccggtcaattaagaaccgagccatgaagttaagcatgaaacgacccccgtacaaccgcacttctcgtatgggtatagacctagcggattaaataaccgagcggaggcagtatccctacatagatggttcacccctgagtgacgcaggtgcgctaccgtgggacagccgttgaggtagggccgagaggcgtgccctacatcggtgtcgccatgggtaggactgccatgagtgcgtgagagagagaacttaacctgaatcataatttaatatgtgtgagacttctttttcccgggagcgccagaactcctctcactgctagaaatgtatgacgcctagagtgcatgagggctaaagttcatggagcgggtactgccaatgcgaggttatcgaaaagctttgccgtgacgcgtctcatgtgttgggacgaggctcatgtgttgggcagtcacggagtgcgggtaaattatacatccactgcagtgtgagtaaactaaatctattcgaatagccgtgctcgcggttattgagcaccaggacgtgtattacacttggctagactctgaattcttaacttgtatgggatgggttattgcatgatgatttttatgttgttggagccacttcctgagaggctgggaaggtgga

SEQ ID NO: 43152 - DNA, 500 bp, Oryza sativa
aaagctcgaagcgtgttacttgctaaaaatggtgaactatatccaaggaacctatgtattttcacattctgatatactatggttcgcttcttcatgtgttgtaggcttacgggccaaagcaacataggtttctacctatttatctcaaactcgttcggaaagaatgagctttctttctttatgtgatgatattcggatatcaacttagtttgggacttttaatgcttgtatgcagtgcccaatccaaaatttctttagccattcattgtcaactataggtcagcgttgccggttgatcttttagttgattttcaactctgggttgactgccactgatttgctatatgaagagaatattgtccatagcatgtctcattaccaattcttattggtttgtatacttgtatgtgacacttatgcgagtattcatggatatatggggatatgcaatttttttatgcttctattctctgatatgggcatgactatttcattttacc

SEQ ID NO: 43153 - DNA, 2025 bp, Oryza sativa
aaacgcgagtttattgtagtactgctagtaaaattactgtagactttttttgagactagtcggtcaatgcagatacattgactgcaaaaaaaaacaccttccagactttgaacggctgttttggtgggttatacactctgcaagaacattatgttctggttgtacagtggttcatggttggtacggtggttagattggaggacttcagtcaattcttctggtaaacggcgttgttgttagtactttcttgatgatctgcggcgaaggtaatttttactgcctcagcttacaagctactagtatagacacgcgaccgaatcaacgatgaaatactttcagggttcttttggaataaaagattttttaacaaattttagaggaatttagtcttgtacaaaatttcttatgcggtcatttgaatcataggaatggttataaaaaaatcatatgaaattcctttggggctcaaaacgtgcgaattttaaaaaaattctaacatgagaaaaaacatagctcaacctcttaaaaaatatattttgtgtctatcttcttgtctaattcatgtgtctttccgcgtactattcaaatggttatcttttcctatgtttttataatccatagaatttgaggtgttagggcactccaaacatgtattgttttcgtttttgccttataagaaattccacgtttcaaagggggaagacttttataattttacttttttagtgggctaaaagtaaagaccgaagaagacaacaaaacaaactaaattatttattataggattaagttgtaaaaattaaagggttaattgggtcatgcaattataatttctcatgtgtttaaaatatataattacaattcgctaaattcaagtcgtgccattacagctttataaatatatgtcagtacttacttttttgatatatttattagaaactagcatggtggaccgagcagattgcacggctaacatcattgtattttctctcatacaatactccctccgtttaagattgcaagactttttagaattgctcatatcttaatgaatctcattaacttctaaattgtaacatcctgaaaattcctgacattaaaaatcactaaaattttgaactttttaaactttttgcatcatgcctggaaggtatggttgttatttgttgccaaaccataaatcgacgcaatggaaaaaaatcaatctaaagatttacacccgagccatagttacgatttacaacgatacgaatttttaatattaattccataaatatttatgcacattaaagccaggccaaataaagtacaagtcaattattaaaccctgtgggataaatcacaaatcaaattttaataatcaaaccatgttgatggcctgatttcatatttaacaaaaggaaacaacatatttgaatataaattacttgaatccaatctcacatgaaatataagttcacatgaaatgatgatcacatcaatggccccatctataatagagtatctcactagaatatataattaatatttgaaacaccttatcaagctcctcatagcatgaaaatcactcatataaaataatggtcatataaataaattaggctttatacataaataagaatatgtgagtgtttaattaaacaattagattaatgttgtactaagtctcaatttatatttatagaatgagtagacccacgtaaaatgcattgttatacaaataagttcattcaatgtgctattgtaataataatggccacattaggatattttaaattaattttagaaccctcaaagcctccaaaattatctaggttaattttagatttaaacctcatttaaataatacaataggaaaatatataaaatatgggtaatattaaattttggtcaactttcatctaaaataaaacatatattgggcaaaactctaattgtgtgaaatctagtaaattatgggacaagtttaataggaaatatgcctcaaaagtggataattaggaaataatcactgttcattatggc

SEQ ID NO: 43154 - DNA, 1760 bp, Oryza sativa
aatcaagaccttgaccccacctgtcagtcactatagcttgtggataaggttgtattataaataaatgaattaggaacagtaccatttctcaattattagaattaattcaaatttgaatctttacactagcataacttactcatttcagctccgatttgagtgaaacttgaacctaaattcatctaaattcataagctttccaatgatatataactcactatttgataaaatatatttataaatattaaataattaatatcaagatgatgcataatagtcaacttaaaaatatgctaataaataaaattagtattgtacagtagagtggatgtaataatatttgtctctaacatgtcttgccactgtaacaaccacacaaactaattttatgtgatgtctcaaatgaatggatgtataggaaaatactagtacttatttaatattcgatggccatataattaaatccatggcttataggttatttaaatcaagtatagccttatgattatgtaactaaaatataaacacacatagatgaatctttaacctgtttaggagaataataacagagctagatgtggaggaatcactaagtaaattaatcgatgcaataccatatagaatagcatatatatgcctaaattgattaccacttattagtaacccaatagaaccagtgcttaaacttgtcgcatcacatatacaatatcactcatagaaactagctaatgtataattaaactacattatattcaggaatcacttggagcatttgggtagtacactttctaaataagctcatgtacagtaggcgaccaaaaccttatacgttgttgcacacatattgtacatcccattatagttatacaattaatttatctttttcatatattaaactagggagtatataacaaacatgaatagtagataagtactaattataaatcttgacctcatatgatcatagttcaattgtaactccggattgttcattaagagataatctgtaactataatattataaacttcccgaatttaacatatagagcatggataattattagcccttttataatttataatggcaagtaaaatatgttcataattaaagtaaagtttccatcaataaaataataatacaaataattcactgtaattgtttgattgatcctaaatccatctaacaacagaacctctagtatataaccgtcctatttagatagatgcatacatagccataatccttctatagccatttgatagactaaaccaccgattagccaaatatatatgtatcccataaatgctatgttggttaactcctaaataggccacgatgacaatagaaaaattaagaaactttagccttagcatgattgggatccattagcaaacacgaatagtacattttgttgcgcatatttgattgttgtttgaatattggtttttctcgcgtattatagaccttgtgtatcggttagtcgtgaggcaacgtctgcaacttccaggaggtgaaggttgatcaagattatatcaataataaggattatcctgagcaaggcaagtcatcactattccttgaacatgtcgatcccaattgcgaaattgttttgtttacaaataaaattacatgcaatgatgaacatcctacttgtgattataccatgctttgattattgtttacccttaaatctttgtaaccatgtttacgtatgagtccctagtcaactatgacaattgcttagaaatgctattctaga

SEQ ID NO: 43155 - DNA, 4065 bp, Oryza sativa
taattgagatgcggcatgtagagacatgagcgccacattgccatgatgttgatgacatgatttgtgaaaggagaaataaaattaaacaaccgttttcgactggggcggacggaggatttgggtggtatctggaaaaggttagtaccgtccccggtcaattaaggaccgagccatgaagttaagcatgaaacgacccccgtacaaccgcacttctcgtatgggtatagacctagcggattagatagccgagaggaggcagtatccctgcatagatggttcacccctgagtgaggcaggtgcgctacggtgggacagccgttgaggtagggccgagaggcgtgccctacatcggtgtcaccattggtagaactgccatgagtgtgtgagagagagaacttaacttgaactataatttaatatgtgtgagacttctctttcccgggagcgccagaacttctcacactgctagaaacatggacgcctagagtgcatgaggatttaagttcatggagcgggtactgccaatgcgaggttatcgaaaagctttgtcgtgacgcgtctcatgtgttgggacgaggctcatgtgttgggcagtcgcggagtgcgggtaaagtgtacatccactgcagtgtgagtaaactaaatctattcgaatagctgtgctcgcggttaatgagcaccgggacatgtattacacttggctagactctaaattcttaacttgtgtgggatgggatattgcatggtgatttttatactgatggagccacttcctgagaagagggaaggtggacgtcctcagaaaaccatgacgactcaatggcgggaagctatccttgggatcacaatggatggtggacataaccgtcgttgtttaatgtgaacactggaactaaaatttgatcagtctatgataggtcttaggcttgtgaaaatatttgcaaaatgcagctttatgcaaaagaacctgaaaccattccttgaataccctctatcatatgcattgttgttgtggtggcttgctgagtacggttggtactcacccttgctatttatatatcttttaggagagtattgaagagaagcccttgtcggtacgcttgcgtatcccacaagatgatcccctgcggtcttgttctaggtctcgttccccagtcgactgcctgtggcatgttaaccgggcccttatattattttgtcttccgctgttgttctctgatagttgttggcctacctagccctaatgtaagtatttaactcttttagcctaaattcattcgtgatatgttgtgatccaactatgtatatgtgtaccaactactgatccagggattggtacggataaacacagaagatttccgatttccaaaatcgggggtctacataaataaatatgagcaattctaaaaagtttacattgtgaaacagagaaagtggcatatgtgttttctcattatattatttaaatatattaaaatgacatcataattttaaattttgcaataactttacgaaactacaaatgtgtaatattcatattgtattttatatacgtgttagttattaattatttttaatatcaaattttagttatttgtaaattatatatatttctatatggactctagactcgtcttttaatatttctttttttaattccaaattttctataaattgtatttctatatatactctgcacgctcacatataccaagatgtggtactcgcgtgatctcctgccggggactcgtaggctctcctacgtgtttagctcgcgcgagaactcgccacgtgatgggcagtgaccggatgcccaagtgcttatagctatggtcgtcccctgagcattaccacgtgttgacctcacgtcaggataaggatactagttagtatcgtttttctcaaagtaatatcgtatcgtagtatccggatactatgtgattttctttttaaagtttaattaatatttatattaattatatatagccattctgtataaaaaatatagtaatgatatatatcatgcaaatagagacatttatcaagagaaaccacgttggttttaatatatttagctgatttttatataattttgagcatatttaattacattattttcaaaccatgttatttaaaataagatttcgtagtatcgtagacatgtagaatcgggatatcacctaagatttcgtaggattgtgtagtaatgaatagtaggatcgagatactatgaaaattaagatactagataggatcgatatcgttttggcttggtaggatcgtaatatcgtaagatactaggatacgaattgaatactgacaaccttgcctcagggaagtcaccccgtggacgacaccgagctaagcattctatcatgagtcaacattaagataggctccgaaaaaactgtaatctttaatttcaatgagccaaatagaaaaaaaagtatatatacagctgtaatcctacgaaattagtcgacaaacccatgtttcaaaagaggcgtaaagaattggccacaggacgagtacaatccatgttcaagttggtaaagaataaaggaaaaaggtttgacacagtcaaatggaaacaaatgttacaatacaattagtcaagccaaacaaaacctttggttgctcgtgacaattttctcgaatgtatggcaagcattttattaatctttcctattagtattgggccagtcatcttaggctgtgtttagttcaacatcaaaattaaaagtttgattaaaattagaaatttaaagaaaaaaaagttagaagcttatgtgtgtagaaaagttttgatgtgacaaaaaaaaattagaattttgaaaaaaaagttagaaactaacaatcacctagataggacgttgcatttgaagagagcccctggcaccgtttgagctgcaggggcagggaatcctgcaccgtttatttaccctcatcagtcaccttgctcactttttacagtcttttgaacagtgacgctgtgactgcgaccaggctcgagacctgggccggaaggtccaaaaggaaatacgagtaattaatactcgccaaaggccccgaaagaaagaaagggacagtgcaaaaagaaagaatttttttaaagctcattggtcccaaacaaatctgtgttatcattgcacattgctactgcaattgacaaaaatacccatgtgagaaatttcagtagaatcacctgtccttttaaaaaaaggaaatacgtagtgcagacctaaaaactactatcggataaaaaaattgaattatgagaattatccatgtcatcacgaataaattttagatgtttatttttatccaatgataattttacatgtttccactacaccgttgattaaattcagtcgtgtgacacttatcttctgaaataaattgagtaccatctactccatgatccatgcatatactattctcacttgaataaaacaaattatcagaaaaccaagccacgtaattggagcaccttctacaggctcacatagccagtcacatgtctttaaccaaatgtataaaggtgttattgccccctttcaaccacatatttagtctcaagaaattatctccggattgtttctttcccatttatagatcagggacagtgcccctaaaccttttggcaataatgatgaaaagctggaatgagctctccaaggtttgctcaccacccttttgtccggtggtccccccatggccatgaggagcgttttcttatccttcccctccggctccgacgtttgcttgctcggctccctccgtccctctccgtgtctgttaaagaaggccatcagtgaagacggggggcaatggtgtcatttcgtacgccttttctacatattatatcagctgttctgacggcaacagcgtacggcgggggcgttatctcttcgggttgcgccgacctgatggcgaacgccgaacggacggacgggatgcggagctttgtttgcatcgccgcgcgtgtgcgccacggaccgagattcttttgtttttcctttgtgtggtgaacgttgttgcaccggtccggtatactccggcgtg

SEQ ID NO: 43156 - DNA, 2043 bp, Oryza sativa
cacgaccaggaacagagcgaacgccttggacgccattgctacgtacccgagatcgatcgatcacaagcgcagctaatcactagctagctaattaagagctcttgatcagctgaagatgattaggctgcttgagatggttttgatcatgggattagggaggtatttatagtcgagccccgggattaattaatcgaccgttagagctcatgtgaaccctgccctgccatcatgtgagcgtgcatacgagggcgatctggattggctggcagaacacctgccctagcaaggctcgtagattaattaacaaatcgtacgtacatctacgctgataatgtgttaaatcatcggccgaatatttggttagctgtgaagcactcgatcccgcaaatgaccaagattgctgcacacgacacatcgcgggcttgtttccttatgatcattggttgttattttatctcgcgatcttggcctatcgggcgtcgcttcgcgcggtgcagcgtgactgcgtgagcaagttggtgattttcttttgccgtttaagaatgcttgctccgtgatcacacaagagaggacatcacatgaaccgagaccggaggaatatcggggcatggtgggattggtgggtgtcccagtccaacgggcaagaagattctaagcttacctgggtttgttttcacgtacgcgaaggacaggggaagatgccattgcagcgtggcttcctgctggcccggcaactttaatctacactaggcacgtggctactaggtcggcccgcttagatagctaaggtaggctaggtaggtccgtggtaaactgccagcccatgggcgcctgggattcttcttgggccaacagaagcagaggttgggcaatgcgaagcctgaaaatcctcctcctccttctctctctctctctctctctctctctctctctctctcacgaacaaacatcctcttcttcccgaacaggctagattcaattttttttaatgaaccagtgagccaccaatttcattgaatagaagaataaaattgtacatgcgcaagcgcaaattagaaactttaccgtctcaaggccttgggccgaacatgttaaaggtagcccacctatcaaggtgtttcgcgcccgccaagacccatgtttgggcatcctccttaatttgggctatcagactagccaccggaagctcttggtgctgaaaaactctgcggttcctttcattccaaatatcctaggcgactaatagcattagagtctgcaaggctttctttggcgcttcgttggaacatgcggtggcctcccaccacttgagtagcgtcgaggcttgttgccataacgttggtcttatttgttcacatgttgtccagtctgcaagtgtcgcctagattctttcacatatctacactccgccaggaggtgagggccgtttcctgattccttcgacaaaggggcagatggagccattttcgattacccacgggttgccaatctgtcggaggtccatactctattttggataacaagccaagcgaagcgaatgttttacatttgcgcggcgcctagggcttccagataggggcattgaaattgaagcttttatgccaagaagttgtgcgttgtaggccgatgtcgtcatgtattcgccgtgactagttagcttccatgtgatcttgtccttttcgtactctgtcaactgcaggctatgaacagcaccctagacattgacaagttggctaattagttctgtcgtccagcctgaggttaccggcaaaccgaggtcaaccaaccattggtcgggaaagcgatacttgttgcaggcttgcattcttcttttttgcaatcgcgtagactagtggtgctatgtcctttagccgtcgcccctgaacaggctagattctcacttaagtttaagaatcagtacttaatttagaaaagctaaaagaaactttcccatattcagtatatgttggttgattgcttgtcagttgtttcttataattttcaactccaccaaataagatcgtactgcttctaatagaatgg

SEQ ID NO: 43157 - DNA, 565 bp, Oryza sativa
  unsure (1)..(565): unsure at all n locations
agtagtagtagtagtaaagaggatgcatggaggtgatagaaaaggagccatgcattgtaccaccaacaagcaagtgccggtgcatcgatctgcagacttttgatggaccggccggggaaggaagcacaaataagataggcgtcgattaaaaacagtcctgtattgcaccaccgaacgatgcgtatgggtgtggtacgtactacgtatatagctaagctaggtcgactctcgatcgacatctnactgagcctccactgctcgcaaagtcttgtaataatgcacagactttacggttgctaaagggaagagggaaaagagagacagagaatacagaagtgatcagattgttcttcttttagcgaatagtgatcatgctatgtacaagcgacatgatgatgatgatgatgataacgggggtctttctttctctcttcatgcacaagggccggcagtctgaattcaaaccccatggcggtacatatccttttaaacttaaaaggcgtaaaagaaaaataaaggagaaaggatatgccataaacagaactcagacagcagccatgaaaat

SEQ ID NO: 43158 - DNA, 711 bp, Oryza sativa
agcgcagttcacccttaactataagcagtcaaacttccatctcataactataaattctgccagtgtattatgtgcacaacaagatgggactcccagtttggtactagtgaattgatattacttgaaatctttgtagtctgtcattagttgtcaagaagatgctgcctaagttataactttttcacaactcttataatttgtagtttaattttcgtttgttccttttgccagaaagagtagctccgcgaccagcatattctgttcacacaagcaatgctgctggatacgaggtatgttgattactgatgttggcatgcttgtttaatttacactagaatatgagctagaattggttaagagtcaatatgaatacagatctctagtgcccacatgcacctcgtttgaaagtttatacgtgattataaataaaagatacctcctggagaagttactaacatttatagtttctactttctggaaataatctttacttgtctgcaataaatgtattgcattccaacacaggaaattgctttaaaccagatgagagatacagttcttggtacctatcaacttctaaaatagggacaaggctctcttttggatgttttttttccttggacaacccaggagactttggatggtatttggggctataaaaactcctttgccacgttaggaatttctgataactttggtgatgcacattta

SEQ ID NO: 43159 - DNA, 718 bp, Oryza sativa
taccttcagaactaagaatcaattagatataacatcattctttgatgttcgccaaaccaacttacttttctttctttccagatccaaaacaaaagttgaacaaaaatagtgtaaaaggtttgcccagaatcaaagagaattatgtgcaccaaaggcttgctaccagacatatcacatagatcatcataaatttattggaactacacaaactctacagaaaactaattttttaaggaatgctttttttcaaataacttcatattttctgacataggataaagtaaaccacaacgtcagaaaattcccatctatccaacaaagcaaactaatcagttatgtcagcaaagatggggtgggggcaatccaatgcctttaggttagcaccacaccatcagtatgatgggtaaaataaccatatgttgtcaacaagtgggccaataggttatgggcaactaactagaatgtgccatgggtacagaagaaatataacaagcagtttcataaaaaaaaaactgttcaataaacattttataattgcgtgattttgtaagagtctggtcatgatatattacctcatgaatccatgcatttttccatggtgaaccatctccaactgcgatgcattccacaactgataatcatttagaaaaaaaataactcagtgtgttagagtaacttcaatatcagcaacagagtacaccacgtccaatagcactta

SEQ ID NO: 43160 - DNA, 746 bp, Oryza sativa
  unsure (1)..(746): unsure at all n locations
taagacgtcgttctcgctaagtcgctaagtcatcattcgtgaaagtcgttaagtcgctaagtcgtcgttcgtgaaagtcgttaagtcgctaagtcgctaagacgtcgttctcgctaagtcgctaagtcgctaagtcgtcgttcgctaaaacgttctcgttcaaacgttccaccatggagtcgncggtggagtcggcgcncgncggcggaggccagtgatgtcgncgncggtggtgccgncgncggtgaaggtgnaggtgaagttggcgcgcancggtgnaggtggagtcagcgcncggcggcggcggcggcggtggagtcgncggtgncggtgncgncggcggtgaaggtgaaggtggacttggcgcgcggcggcggcggtgaaggtggagtcggcgcgcggcgncggtggtgtcggcgcgcggcggcaacggcggccggcggtggagtcagcgacgacgatggcggcgaggtccggtcggccgacgcgtgtcaagatcgatcgagagagagagaatgcgagatcggaggcgcaagatttgcgcccctcaccttgagggaggcaatgctgccgatggcgttggcaagggcggatgagcgcggtgagcatggcgacgacgacggcggaggcggcggcgatgtctggggcggtaatggcgcgagaggaagaagatcgatcgtggagaagtctaagtgtggcgcggggaagccgatgcagtggatgggtaccgagctcgaatntcaagg

SEQ ID NO: 43161 - DNA, 719 bp, Oryza sativa
  unsure (1)..(719): unsure at all n locations
ctcggtacccgattcaccgtgattagtctcacacttaataaatcgacccaatgcactgtagttcaggtgggatggttgggcctgttcaacgtggtgtagtgttgatcagtggagatttaatgttactctaattagtcaacagttttaccctttttctcaataaaatgttttacaaccgcctttatgcaaatagcaacaaactgtccttgtattcccttgcacgtctgcatcattggtgtggcttgctgagtacggtggttgtactcagttttgctattattttccccttttcagaagtgtagtgcttctgagctgaagacgaagttagaagaccaaggctcaaaccccagttgtgttttgcctgaggagtggagctgaagccccgctaggatcgcctttttccgctgctgctgctttcttttcggtgtgaggactaagagcctcttctgtaagtatttactctttatttacgtttggaactgtttattacttgtcttttgtgtaccctggctgattcttggacagggatttaatacacaaaatagtctggaaatttgggctaaattctgggcgtgacacctcccgtaattactcaccctaatttcttctcccttttcttctttttttttctcggcttcttccaatcccttcccttcttcacttcggttccctttttcccttcggttcctttttgcggccgcngccgcggtgttttggga

SEQ ID NO: 43162 - DNA, 737 bp, Oryza sativa
  unsure (1)..(737): unsure at all n locations
ttgatatctactgccacccagccgcnaggagaaagggccccctgcatgtctaaatcctggctctgccactgactcgtaaatggaactgataaggttgatgggctattcagctgaatgaacaagattttgatgcgtactgcatgaatattcggatacttgttggatggtaccaactagtctttacttttaaaattacagatttatttgcttattgagagggaacagttgagtcaaaagggctgtaatgctgtatggtgtgaaaacagctgcttgctaatttatctttgcccaatatcaacattttgtcagcctgttacacaaggttggtttccggccaaaacctcaagtgttatctgaaaccatatcttatgatggctaaacccttcagttttgttttatttggtcagtaataccacatgttagaatctaatttgaggtgcaaatagtagcaggggtctctactgactatatttttttatagatattaaaatctctttaactaatttcaaagattattatgctgagatgagcattatgtacgagaatatttctatttcattggttaattgggcccctaccttttatgtccaactacccaatagttatagatggggcaccttttttcctttgatacttcagacatgaaggaaatagctgacaaggattttgaagaacctcaagatgaagataaacatggggataataataagggtgaagttggtgaccaaatgagcaat

SEQ ID NO: 43163 - DNA, 690 bp, Oryza sativa
  unsure (1)..(690): unsure at all n locations
acagttttttcgcaattctcggaacgtgtttatatttgcgcatattgatctgtcggtggtcatgtatagtctatgaaacgttcatgctagttacatctgcaatatcatgattatttatggaataaattaaattattatgtgcttataatttcaacaaccttcacgccgccatttagcgagatcgcggtttctctctcccgaagtgcgagattgacatggctgcaacgctctcgctcatcaaaagagcatcaacggtatatttgtgtaaattttccccaaatcagtgtattcttgcgattttggaaataaaaaaaatacataatcttattaccagggccttgacagaggtaataattcgactatactgacaaatgacacggtaaaagggtatttcaaattttgttacaaatcaagaaagctaaagaaccagaggacatatggaagtaataaaagttatatttgcaacaagtagagttggaaatacttaagcgtgaacaatcagtgtcatccattaattaattatcatagcgtagtgaaatactggtgcatcacgtgttgattccctttgcattcttttcatgatagtggtaattaattttccataagaccatgaggcaatgggttacgcaggatcattgtctcaatagtgggtaccgagctcgaatntcaatnatcaagntttcatcacac

SEQ ID NO: 43164 - DNA, 626 bp, Oryza sativa
tttttttttctgactgatatcggtacaagcagatacaacgaggagaaggataaaccctggtatcttagcctcgtagtcgtagcccacgccatttttggggagtttttcgtgatctctctctaataaacggctgtgaaatgtgaacggaacatcacgagcaggcgaaaagaagttgttctgtatgttctagaagcgtctattctcattgtcgtcacggaacgcggaacgccggccgcacgtaccgtgggctttcaggccgattcacgtcactgtttacgcgcgcaattctattgctcgcctaataagtgctgatattctctttttttttcattatctaaaaaagtgctgacattcttcttttccttgtatcggcaggattttttcctttttccctttcgagccatcgggtgcatataggggctgtttggatgcccacctcaaattaccacagttttttaccaaaggtatggcaagatgcaaattgtgtggcttaaaatttgatagccacacttagcaaactttggctaagaaaagggtctatgactagtgggatcaaaagagtagaaagtgtggcatgccaaagttatagaaacaaaccaaacactaactacatttggtcaaactaa

SEQ ID NO: 43165 - DNA, 676 bp, Oryza sativa
caacgtcatcaataatatcatggtcgcaatagccaaatgccgaatccatttaatatacattttactttacttcaagtatttatcttttagatattatctttatcgggcagttttaatgaatatatttctaactcgtaggcttctagtgtggttgctctgcttcgatcaactaagttagagtagtaagatcgaccatcggtgcggttcctaattcctatgtaatctaggaaggtatctagatcaacaggggacgataggtggtaggtgatgacagtcctgtccatcccttgtagtcagccacgtcaggtctagttagtaggcgaggcggaggcaattggtttcaatcatgttcttgtcctcttctgtgataatatgttgtgttcagaagtgaacaaaacatattttcgggtttgacttttcaatctttttgaactccggaaaccaacacaaaataatggcatatcttgagttaatctacccacgcaaccaatgtttacagttgcaccacttgggacaagtgttcagcttgattttctttctatgaaacgttttctctgctcattgttcttctggctagttttaccttttccgtatttcttaaggcattgtttatctgtgtgatcgtgatcattgatgttatatcttttatatgtatttaaaatagttcatagtatgt

SEQ ID NO: 43166 - DNA, 732 bp, Oryza sativa
aatcggcgccgccctcgcgtcgcggcccgccgatggaaggaggtcttcgccagccgtcggattttgaaaagttgggagagagaggagagcaccggtttcctggctggtctcgttttttttttcttgcttctaggcggctgagggggtcgtgccattagtacggtgggtccagccagatggaagcgatggacgcgaaggccgaatgaagccctggcgcattgggcagttgacaagggattgagaatttgaaatactcaacggtatatttcaccgcgcttttatcacatggagccaacaacacattagacttatatgttagtgataaaagcacggtgcattgactatagaggatcctgattcgttgacaaaaagatttaagcattattagggaaacaattttaatcatcaaatcaaaaggaatgttcccttgtcatctgaaaattttgataagaaatattaatgattccacgtatactcaaaagctcttatattttgggacagagggtgaatgtgaatagtttttttattcatgtgtttggtcatggccacatattttttagacgatcaacaactaatcagtgtgttcgtttattagcgcatgagtaaatagcatcattgcaatctccacctatgcatgcgcctaacaccgaagtgactccacacctttatcgatgagatttagtttcaaaatgaagagggttttgttgagttggtctcagcatgatttgtgaa

SEQ ID NO: 43167 - DNA, 727 bp, Oryza sativa
  unsure (1)..(727): unsure at all n locations
gtactcaggcttgtagcgcggcatctanagataagtgaaaggagggagttatgacatttatcaattaatagcacaagtttttggattaagtaaaaggtaagtaaataaagtaacccaggcttgcaagataagttgaaacagttggaaacaagatcacaaattttgcacttttgaacaacaggttccgaaagaaataaaagaaagttataaaatcaacatgctaaatttatttcattgcagcaagattaaataaacaaatgttgtaaaacttttgctggtaaatgagccattagtacagtaacagatgtacagtactaataacactggaataaattttcaatgagaaccactaaaagagattatgaagtgcatgtgctattagtttggtttaattaaaagagaaagggagcagaacagttctacttttccaatatttttagagggcttctatgggtaaccatttggcataatctagggtcaaggaggctctgataccaacttgtcatgcccggaatttttatccaaaattccaaacgcttacatgtgtgtgaaccctcgtccaggaatcagccgaggcacacaataacaaattgataatagagtacaattattactctaattaataagcgaataaaatgtcattacagaggtagatagttcctctcaatcaataaagatctaagcagcggaaaaaaataagaaacagcgcaggcgactcctctcgggt

SEQ ID NO: 43168 - DNA, 665 bp, Oryza sativa
ctgagaatcaacgagatacttaattgaaccaatccccccatcatacagtttaatgaccttgtaagatgctagtagcagcactgcacaagaaaggaaagcacaatctgaaattaatcatgcaaaaggctgagatgcagcatccaccaccatgacaatgcatcaacaaaacatgaacctccatgagcaaagcaataccaagaaaacaagaaccggcacgaagaaacccaagaagcgaatggatccaacgatgatgagcatatacaaggacctccagcagacaatggatgcggacaccggtaacgggtgcactacatatctaaccaaaaagaaccacatgccgatccggccacgacccgacgacaaccccgggcaacacacctcgagcaacggcgggagagggtggtgattaagtcggccgcccgtcgcctggacgccgccacccttggcagtaggcggggcacgccgccgctgttgaactgctccatcgaccgccgcagccatcgctctcctccttgcctccgctgcgccgctagatccgtaaaaagcggagagagagaggggaaagtgagaggagcattttagctattacgcaccctaggtctatatatatatatatatatatatatatatattacacacatgcatatatgtgtgcactatatgta

SEQ ID NO: 43169 - DNA, 570 bp, Oryza sativa
ttttgcggagttcaaatccttgaggggattccaatctccgtcgagaagcttgcaaagagcccggtcttttttcaaccctatcctcgtgaggttgcacaaatccactcctcctttcactaagggtatctatttccttgcggaggtgagatccggccttcacaaacttctcttggccaaccacaagtagatcggtggcccaagaataacacctagctgtctaggagtcctcaacctccaagagtaataaacaccacacaacactttgacaaatcatagtgctcaagataaagaaaagtgcacactaggctcccaacctgcaaatccacactcacaaagatccaagtcacaaagaacaagggggatttgagatagagagggagagagctcaaaaatccaaagcacttagcacaaagctcaacccaaaacaagatttgaatgaaatgaatttgagcaactctagaaaactgttagtggggggtttataaagatccccccaaaatgtgaccattggaggggaatcttttagcccacgtcagatagtccgatactaaatcggatagtctgaaaatt

SEQ ID NO: 43170 - DNA, 739 bp, Oryza sativa
tcgccattacgccaaccgcagaaaaaaaaagaaaggggtggcaccgcgccgttgtgctcccggggggccgccgccaagcgctcaacggctgcgcgcgcggccaaaagaaggtggaacggcgcaagcgccccgtgccccggcccgtccacccgccgtcccgccgtcgcaccatggtaagggtttcgcccgagagaagaaaagagtggctagggtttgcccaccggttgggggctcgggttttgctctcccgatctccccgcttggccgtctgatcgaaaccctagcgatcggacagccaacgtcggccggaccgcttttggcccaagagggggcgcgcgctaggcctctttcccggcccaggcccaggttgcggcctagagaggggtgagagcccgcatgtgcatataccagggccgccagagtccaattttggtccctcggggccgaaagaaaaaggaaaagagtctatttttagtccctgtttcagatgcatttacaattatagttattaaatgtgtttatttctaagcaatttgagccaacgtgaaaattgtttagagaatagataaatgtgagaaatgcttctgaacatgtattttgtatattttcatgcaaattacaatagaattttgaattgtttttgcatgatttacctccgtttaagatttgaaccgaagggttaatttttacagagtgaataacagaattttgtcagggtaccagcaagggtatcaatcac

SEQ ID NO: 43171 - DNA, 735 bp, Oryza sativa
tacccatcactaaagaaaaataactgaatcaagaaaaataaaaatagaactaactcttcactctaaatctagaagaatcgaaataacttttcacggtattaaaagtaattcttcacagtttcagaagtagctatattggtagatgaagtaactctctagaaaaatagaagtaattttttgtggggttaaaagtatctttcaaaataaatagaattaaccatctagaaatatgtatatactgctagtttattcaaaactaggaataaatttagaggtaattatgattcgtgtattaattaggaataaataaaaaaagattctggccaatgcctacttcgcaaatcaaaagaagattcagagattgcctgttcgatcaattcgactccgaccactagttcagcaaaagcacattgaagcacgccccacgcagccgcctggtcagtttcatctaccgggcacctccccaccggccttctggtaatccccgcccatgcgtgcgcctactggctgcttgtaggctatatgtgacaccaccacattggccacgtcaacgccactcagtggagcgatatttccgttgtccactttcaaggcatcgccaagttgccatcgtcctttacttcgttgttgattcctcaggcaggcaaccactccacctcacctttgccctcaattcctcaggtgactgattcatcgggagaaaaaaaaacaaaatgtgaataagagtggggcgct

SEQ ID NO: 43172 - DNA, 731 bp, Oryza sativa
ttgatagtcgagctcggtacccaagaactcctagattatatgggatccttatacgtaacatctcgagagaaatttggtcaatgcttaacttcaattattttcaataaaaaactaatactacatgtacggcaaagtaaaagttttcaataggctagtctatattatctcgtctatctcacttgtactctttccatcttataaaaactcaacaatattagatatgatacattgtaatactatgaatttgaatgtgttaagattatattgatatttgatgggagggatggagaatttatcttcctactaccttggatgaatggatcacgtgactgtctgaacaggtaaaaacaagactacagatgagctgtgacctcgtgggttggcagataacagtcccggtgcgtgggctatcagctcaaaacacgtcataaaacttccaaatataaaatatttaagatataattatattacacactataattacaatatattttatatttgagatataattatattacacactataattacaatatacgtaattagagtttttctcccgtcctcacttttgtagcacgcggtactggtaccatgaggcaccagtcttcatcccgccgttgattgctgaggggtacgatggggagctatcgcgtgtggtcaaatagcgtgcgcgcctcgatattctcgcttcccttctctgcattaacgccgctgacttgacgggagaaaaa

SEQ ID NO: 43173 - DNA, 3677 bp, Oryza sativa
tgcagagatgaaatctacatgagtctgcaaaatattttgtttggtaaccccataggaagaacataggacctctacacaagcaagagagaatatgaggtgtgatgatctcaatatgtttgttttcttctaaaaattccatgaaacaacccattctatatgaattttgaaggtatcttcagagctattccttcagaacaaggatcatataggattttttttccctggggattcatgttgtagggcacttttgaatcgtgcgaatgaaaaaaaaatagaggaataggaaaaacgtagaattctaataggaatacaagtacaaaatagatgattgcaaaacataacaaaaacacaggaatgaccgattgattgaaccataggaaaaatgcatgaatcagatgagagagatagactcaaaggaaagtttccaagaggttggagctcttgctaaattttctccacaatctctataagattgtctgttccattggaattttagatgataagatatgattcaatcatttgttttaaagggtttcataggaaattttcctataggattgaaatcatccaaaattcctatgtttttcctctaaatcgaaggggctcatattcttctaagggctccgttgaaacgcgggattcagaagacacgtgaataggaaaaacatagaaatagaaagtcatgtctttttgaatattacagaaaattgattcagacatgaatttgtaacagataacatgttataaaaccggcctcaaaatcacatcggaaaccaaacgcggaagaaacaccataggagatccaaacacggtgacgacaccgagacacgatatttgataacggagttcaaccgaagcctatatctccagggcactgattacgggcacttctccctaatctagcatattacagcatatcagagttacaacgactcacggccggtcaccgccggcagccgctgcctctcgctatgctaaattatcatgtggttacaatatgcacgcccctctatttatgagagatcctaggatagagtccgactcttactttagtcttaatatattttaccactccaagttctaaactgtaaccgactacatacacatattcgacacaaactctaacataccatttgtcaacaccaaaacaaaaccatagaaactgcaagtcttgcaagtctccaggaagagaaaacatgaggctagacctcacgttgacttttctccaaaattcctatgaaatgggagatttcacaaaaatttcaaaggattttgtggaggccaattctttggaacagaggacctagtaggataaatttccatccgattttaatcctctatttttcctttattccaaagcagccctcagattctagattttcgtctgcacgttttctaagctattaaacaatatgtttcgtgtaaaagttttctactttctattagttaattcatacgtttatacactccaataattatataaaaatcagattatccatcaatatatcaattttagctctctcggataggacatgtcaatcataaaaattcctttagttttcgttcgttctaaaggagcccttcatttttactttttctttagcaattaattttatgttttttgaattcctttgttttataatagtcccacgttgcaaaggagtcctgttcactccccgtagagacatgtctagcctaatttttttactcatctactgcttgaacacatataaaaacatctctaccagtgccatcatgtgattgtcctacctcggattagaaaatgcgaagagctattctattcgcgactgaagggttgattaaattgactacaaaaatcggaaagacctggacaagaacactggcccctattttttctagggcttatttcatctttgctcatctcccacatggccgtgtcccctcatgcctcctgtttcacattcttgcccccatgatcgcctgcccctgcatttgcttccatccacttacaaaaaccaatcatctgtactacaaattgtactagctggagaagctggtttttctcgaagcatgcgtacaaatctatgatttgaaggatttaaaacaccatgttactggtgtgacatcagggttagtactccacagtctctcacttttttcccctgtgccagttaggatcctctacatcaagaaaaaaactttatcagagggttattatgctaatcaagattcagtaattcaggatgagattttttactgttcatcggaagctgaaacagcactcaaattgtaaattttgttcgggaggtctgacacttgctaaacacagggacgaggaacagagtaacttttgaattaacccggagaggtagagaggttaaccggtcaatcggtgtctattcacacgggtgaaatgttgttacagcagggactatctagatggtatttgacagaaaaacacctaaaaattatgcgaattctataccgttggatcgctttaagattagtgctggcagttctaaccctacctccccttgtcattctaggccccccgccgccttctctcgcgcgcactgtgcctctgccgccaccaccccacgtgccgtcgcccggactcgctagttggccgaaaggagtcaacggcgccagcgagccctcctcctcccctcccctaccctaccccctaccccctaccccctctttttctcaatggatcgcgcgagtgcccccgccccaccgtcttccccgtcttcggcggctccctgcctccggatccgccaccactagccgccaccttctaaccactaaccgccggatccactgtctcttaaccatttgcccccggcggcgacgccggcccaccgtccttcttcattcccgcggattttgcgccgccgccggcgcctcgccgtccgcccgtgtcaccgcccaccgtcgggctaggcctcccacgggcatccctttaagcccagcgacacccccccctctttccctccccccacctctcctcttacctccatcccaacccgggaccctaaacactaattccattgctttcgtcggggtcgtcggagttagagaagatgttgccggagctgtaggagaagagctaaggtcgtcagagcacgaatcgcgaagcaaatcccaaaatcagtaatctgcatgattttggcttcaaaaatcattcgccagccatttagccctttccctaaaaaaatggtcatcctatcctatctatcactcactctgattttgatagcacaacgaattataatgtgttgcaatgcaagtagaggatcaggagagagcccccgttcctgcatgagaacgtgcacttgatcatgaagctgacagctccatttgtttatccaaggagtgacgacaagctacacatttgtttatgtcgccatgcacccctattgcccccctcctctacccttcgctccaagtgtttcaagctagctacagcgtgcgcgatgcatgcatacgccactctggacctgggactccgggagagagggctaaaccacgctaaagtcggtgctgctttttcttaatccaaggagttaagcagtgcccatccattcttttgaagccatctactttgctgcaatttttttttgttaggacttgcagctttcaatccaatatagagtactcctacattggtttctttgcttctgtagagagacaag

SEQ ID NO: 43174 - DNA, 1740 bp, Oryza sativa
ggcagctgaattggggggggggggggaggggggctatgctttgtaggagtagtacttaccccttaattaatcatgtcagttaggccgcctggccagtctgatttcattcagagaaggtccaaatcaatcacaaatcaacacaaaggcaaccgctaacctaccccataaacaactaccgcctacttctatttgcaacatggcgaattatttccaaggtaggtttggtttgttttgctttgaattctacatgaatttcgccagaatgtatagtactagtactagtagtatactgcagagaaaccacgatgtttccgtggagcacagtgagcgacaagacgtgcggttaatctcggcgtgccatgggcagacttggcctttcgtcgcacggatgtagcagcagcagtggtgatgtcgcgggagaaaaaccacggccgggggccggcccccatacgggacatgtggagtggaggaggagcacccgaggacacggcctcgtgacagcgtcgttcaattggactggtgacgagtgagcggtcgtcgtcgaggagaggacggccactggccacggcgcgcgtcgtgcgtgcgtgcgagcgaaactccgtcgaccgagtagcagagagagagggggcacggtggcatggcgtccacatctacagatatagcgccgtggattgtgtttcactactccggcatcagttgatagcgagcaggcagagggcgggcgcggtaaaacttccgcgggcgaggtgggggcaccgacccggacacgggaccacgcctccccacacacacacgctaggcaacgtgcgaccaaccgtgcgcgcgcgcgcgcgggcgggggcatggcatgattgtgatctctctctgatcacgtcgcgcggttcgtcccgtgtcatatctcgtctcgtgggatttcgggcttgtccttagccggcgaaacagttggattggacggaacgggcggcgcggcagccggctacagcgaccgccaggccaacccccgcgcgcggctggggcgggggcgggcgcgcgcggatgctgctgcgaccgtgaccgcctcgttatctcctcggcgcaggctgggtctgctgggggtgtgggggctcacaccggggcttttggcaaaagaggccgcctttgctttcgcctttggatggacgttccaaaagatggcgatcgagatcaaatcttgtgggggcaaaaggagggggatgagcctcctcatcggccgatccgatttggtgatcagcctgcctgccttggccccctccctggccatgcttctcccaacgagtacgcgcgcgctgctgttaggtatgcaaagccttttcctatcgttcttttttttttctataaaaaaactattaacactgtgctgtgctctctctggctcttcagtgtccacgcgacgtgttccatattgccatatgcccatattggccagttcttattttttcccccttgaagacgggacaattgtgcttttcctggcttgggggcaatacgtttatgcgcctttagaggagtaagatcatggaaaagcacacgagattgtttccttgtatgcaagggaaggtacgtaacgtgaccgcgacgacggaggcaggccggcggtgaagacgtagacgcccaacagcggcggcataataggccagccgtgtaggcggaggcaccactcggggacgacgaaggcaggccggcggtgaagtagtaaacgcccatcagaggcggcataatagg

SEQ ID NO: 43175 - DNA, 1896 bp, Oryza sativa
agcatcgcgggctaccggaatgtgacaccagcagcgagcccgacctggcgagggctgtggcggcgcagccggtgtccgtcaccgtcgacgctggcaacttcatgttccagctctacggcagcggtgtctacacagggccgtgcaccgccgtccgccgacgtcaaccacggcgtcatcgtggtgggctacggcgagtcccccaacactcccgccactgacggcccgcccttcccccgcgtcgtcggccgccgccgccagacctccccgtgaccccgtggcgctggagagaggagaggggagagatggggaaagaggaggtgtgagaatgctacccaccattttttaattcattcaaactgacatgtgggtcccatgagatttattatttttcggatcgaattgccacgtaagcgccacgtcaatgctacgtcagatgaagaccgagtcaaattagccacgtaagcgccacgtcagccaaaaccgccatccaaaccgtcgagggacctcatctgcactggttttgatagttgagggacctggttttcggttgaaggacgaaaatcggattcgttgacaagttaagggacctcagatgaacttattccatacgggtttggagtgtcgcgcccgtttaggctcgaggaaacgtggcatgggctttgcccttgcagagtgttgcagggccgcgtacgtgtgctcgtgggctgttttgcgggagggaactgaaataggccattgggccgagcgatggcacacggaacctggaccaggacaagctgtgaaaagcagagttgcgaaaactactcacaacattccaagatttaaatacttctatgatttaaacattgttcgacaataaaataatttttagcactatttacttatcatatcaatcgcttcccacttaaatttctacctatcttacctctcccaatcttaaccagtcctcatttatcgagggtacccaaaatctgttctcctcaacctggctataattgcttatatcagttgatacacgcgctttgctttaggatatgtggatgaatggatgtagatagatatatatgtttaaataatgtgaaaatattttggagataatgatttgacattgcttgcatattgtgttttaaaactacaataaaattgtaaataatatgtcatgtttgcatgatatttaaaaatactctagataataattgctagtaggtgatcatgttgcacacttacgtatgatttaaaatactttaaataataattgctagtgggtgatgatatagcacacttacatttgagctttaaaaattagtggacattaagtatatagatagttgaaacagaggaagtagaacacattccatctaatgctagtgttgtaagttcaagtgtcttaatttggtttcggtgattaatgacaaatctaattatatgagactaacgtttttatgagtctttctttgactagtcttatttggatatgaaagtaaaaatgatgggaggtatgtattaaacttcatatattctaacttggtctctcttgtggatccaaaatatagtgtgagctccctcattgatcttgattgattatgtgcatatgcattccttcatatccatatgtatgcacatcttgagagggagcttattctatattttgttcattataagatctctaccttgatttgaaattatctttcatctcatctctttgtattgtttatatcggattattatctatcacaaaagagaaaaaagattgaaagatcttggattaaacaatttgtgtaattgttactttggtgatagatgataaaccgatgtttatgggattaacctctcttttacataagttttcaacaaggttatttcccgataatgagatgtggtagatatgcattcttt

SEQ ID NO: 43176 - DNA, 894 bp, Oryza sativa
ataactaggggcgtaaaaaagacgacgctacgctacagtacagagccgagattgaaaacgatagagggagagagagggggagggaccccccccttctttttaaaccttttttatgttgcacgcatccagggagaggattggcagtggagagagagagagagagagagagagagagagagagagaggtgtccatagcaagcagagcaggagcagagccaactgcacaaggcaaggcagggggcctctcctcgctgttctactgctgctatactctggcatcgcgtcgcgcgcgcaagcaaaagggtagttcctcaatcaaacgctccaagagaaatcaccccgccacgccacgccgcgccgggctgggctgctgctcccagatctcgccgagcggggcgctcgattatgtgggattaggtagatgagggcggcgctgttcggtgccgagaggagcggggtagtggaccacggcggcggcgataaggaggagctgttttggccggcggggaagggggggctggtggtggtggagccgatgtcggtgctggactgcacgcgcagcccgagcccgccgtattccacgtcgacgctgtcgtcgtccctgggcggcggcctcgcggactcgaccggtgtggcggcggtttcggagagcagcaccgccgccgccggagccaccaaatggggagccccaggcgagcatggtgacggcggaaagaaggagtggaaagacgggtgcgagttgcccccgatacctggagcactgaatgtggggctcgtcgggggcgaggctggacgccacggccacgctcgcaacgcagccgggccggaccagtcgttcttgaactggatcattggggccgccggcgacctggagcagctggtccgcgcttccag

SEQ ID NO: 43177 - DNA, 513 bp, Oryza sativa
tcgccatcctagttctgcgtggtgaaagtgaacctgccatataccataaacaagattctgacccatcttggtgctatacggttcagggatttagcagcagtataagtgtttgtattagtcgtggcaggtgtgcgaaacagcgtgccgataaggacgctgtgccgcttgcgtctctgtacaaaatattatctaataagaataagaagttaatcgtgctcccaagaatggtaaatagaaggattccagaacaaaaatgaatatcaacgcgtctgtttcctcagaatcgtagatgatactatataatgataacaaaatacgtatagtatcatcaacgcgtctgtttcctcagaatcgtagatgatactatacgtattttgttatcattatagtttttttttccttagcgaagattaggtcaacaccaccacattagcgaaaccatctttcaaaactatcgagatagtcaaattgcaccggttccaatagttcgggggtcgagatatccgctattgt

SEQ ID NO: 43178 - DNA, 1789 bp, Oryza sativa
ccctgagcagatgcagcctccttttgcagttttggtttgttgcaaattcggattcatttttgttttggaaacgttccgaaagatccggtgcgtgcaaacagcgttccgaaagatccggtgcgtgcaaacggcgtggagtccgaataagttacgcgcgacttatccggttcggttacgcgcagtagagatcgtgcgggcgccctgatcaagcgacccttctttatataaaccgacctgccgtcttcacgcaacatacgcaaaatcaatctagggtttgcttcctactctgtactgcgccgtcgctcgtagactactccatcccgctcgccggcgtgcaccggcgatcgggagagcaggtctccggaacctctgccttcgacgttctgcaccgggagaaggcggcaataaggtttttgggaagcgcttcgcgcgactgctccctgttcgttcgcgacggctcgccttcctcttcgctcgcgtgtttcgtgccttcgtagacacttgcgaaaagtttcgaccaagcagccggtctttccgtcacctcggtacgtgttcaatatgttgcgcatatttgatctgttcatgttatactgtgtagtttacatgtgtagatctaatgatgcattcatgctagttttcatctgtaatgtcatgatttatttatggaatagattaaatcattatatgtctataatctcaacagcaaacactagtaatacaagtagcttacttctatcacatataggaaagacagccacacgtgatatttgcagatggggagaagagacacattctataattttcacttgaaaataagacatgacaagtcaacaatagtttatttttaggttctgattttcaagtcaacaatagataactaggccgcactttgccacggatacagtgaactgcataaggaagaacatgtttgcacatagaaagtaaaatgtgtgaaaaggaagatatctataaagacaatctaaacattaacacctatcagctaagaaagttaattatatgtgactgaatacggctaacaaccatcctgatgcttccaaaaccttaaaaaaacactactgctaacaaccatcctgatgcatgtcaccaaatcctttaaaaaacaacactaaaaatagcactgcgctaaaaggctgtaatccacgaatatagaagcctaccaatacttggtcccattgttatcaatatactcaaaacaactattctaacattgatgatgtactcaaaaccgttcctccaaactggtgtggtgccaaaaaggtttatctagagagtatccctttgctgcagacaccgtgaagagcataacagacaaacatgaacgcatcaagacaacaaaatgtgagtagagaaatatttatccagagacatcctaagtattatcatgtaagagactaagagctaataagttacatgtgccttaatactgtacatacagcttgttagtataatgtgaatataacaaaacctaaataaacaatacctggcccataagtctggaatccaaagtcaaatatagcagcttgccatggtaggagaaccatcgatatactcaaaacaaatctaaaaatatgcaagtacatgaatagcatccaaaaattcagttgaattctatactactccaaaaggtgtgaatctagaagtgcaagttagataaagtaagaaaaaaccaaaatagctttgatttatcacttgtcaagttatcagttcatatctatttctaaaagctatcaaacaaaatagaaaatgcataagcaaaccatgcagtaaa

SEQ ID NO: 43179 - DNA, 612 bp, Oryza sativa
atttgctccaagaattgcatctctccagttccaactctggtaaggaggatctaagggctgcatgttctgatcttgaaatgattagaaggctgaagaaagaggctgagtttcttgaggcttcctttcgagcaaaaacagaatttcttgaggtgagcttaattatcatacaaccttttactagcctgcatttcatctggaaaaggaattactacaagtatgtggacactttaatttctccatcataggactcaggagagtgcattccaataactgcaatggctattaagggccagctatttctcaataatagaaacaacatcctcaatgactgaaataacaattgtcacatgtatagattagatggccctagacccaagcaacacaaccatgctgatgaccaggggccacactacatgggctatggatgattacctagtccaaacacttatgattatttcttgcttaatctgattaaaatccagatatatttttaaatagggcagcattaaccacgcaacgagccacatatcttatctccttatcttaaccaactatacatgttctgcatccagctgcctcatgcttcctaagctcctgttgggctgttcatgg

SEQ ID NO: 43180 - DNA, 1043 bp, Oryza sativa
gatgttttgtaagatttaggatttgtatttgtgatgtaaatgatttgggatgttacattgattgggggatttgggtatatgcatcccacttagatttggggatttggtgtttgatttggttatatacatccaactcgatttgggagaaaataaaaagaaaatggactgccggggactgcccctatcgtctctttagtcccggttggtgctaccaaccgggactaaaagggagatctttagtcctggttggtaagatttttactcccggtttgaaaaccaggactacagggggttacgaaccgggactaaaaagcaattctccaccagtgatcctttggtttgttccttgtatattctggttttgtgataggctcattgtttgccaagaccatagtctagatggtctagactgcacctagatactagacgatgggttattgtctactttagggcctaaaccgggaattggaccatttgaccatctagtggttaaagacgaccctagactatcttgaccacacaattaggaaatatccagacgagtgtagaccgtagaactgtcatttagactatggtctaggcaataggccgatgtatttttttgtgtaacaggagctgaaacttcgagcccagaccaaagctcatatggtttatggttttgacgtcgttccatatagttctgctctactctaagccagtcactgagacaaagtcaagttgtctctcctctactagtcatcaccgtagaccttgttcccacctctctttggcccacagcttacttgagtggctagacctatcatagcactgcattatctaatattttatggaacatgtgtgccaagaaagatataccgatagtatagtgtacggtatatcatatagactgtctagacttgtgtctagacgggctagactctaaaccatgggtcatcgtccatctagcgtctagcatctaggttaacactggataggctttatctctccattctaacagttcagatagctccatctgtaggtgcagtccggcttgtccctccagc

SEQ ID NO: 43181 - DNA, 1978 bp, Oryza sativa
tggcatcggcaagggcatcgctgagccttggcgaagccactgcaggttcgccgtctcctcctctccctcggccatgtcttctccaatcacggcaagccctggagctccatccccgatgtaaacagagccggccacttcttcttcctcattgctgtttcactgccgtccctgcagatcaggtgagccttgccgtcaccctcgcctctctcgtgtcgtgtgccgctgcgccatggtcgccggtggagaccggctgccttgtcctcacacacctctctatccctttccactgtttctcctctctgctgttacagcacgcacgcacaatagtttttcctttactaaactaattcacaaatttgtaaaatgccattcaaacaacacctaaaattcaaatggccatatcttcacggtttgaactcggattcgacccgttcaaattgctaattttcccttaaaaagtaaagaacccatttttatgctttgtttctgcatcttatatggtttttatttatgtttaggccatttttctttgcgtatgtcgtgtagacgctacagattcggaagagccgctctgcctcgaggttgatctagaggattttggttgcgagcatggcaagtcatgtcattttgatcatattgttatcccaatttataaaattatgtttatttaaatcattgcattttgctttattaaattcccacgcatatcactgttttatttagcactaccgattctccttgtaatagccttattatttgtattattatgatccatgataactctaggaaaaataaaactagtgagaactttatatatgtggtgcttactagttaatttaggaatatgcttagccattcttaaatagaaaacaattagactttgggaataacttgtgagtaatggtaaaaatggtttagtggctgtttatccatgacatgatgtttccccttcaaaattcccgtaacatgtttttggctgggctcgaagtgttgggtttagctaatcgcaccctggctgtcataaggatcggtcttcgggcctttgttgcaaagcatattacgtacaaccacatgtctaatgggtaaggctttaatacatcgtctagttcggtcatgagcaaggaagacacggatagggatggatcccttggtagggtcgacatctctggctgttacgctcgggggcatagactgtctgctcgacccaggacacctggcgggggaagtctaatgagattgttaagtcccgatcttccaataggtattgataaacaatcgatttgggtggagtcccgacacaacttgatctggcttctgaacgaacacactactgagccccgcaatcgcagcaccacatctcctctggttattaaccgtgccaaaacccaaatgacctcgctgagaagtccaatccctgcatgcgaatcgaagaacacaagcaagaacaaaatagattgcaatacaattgcatatgaatgattaagcacccgaatttggtgttccacaaaccgatctagcggcgaaactattcttgacatattaatctaagcaaaacccgactctaaataatgatggctattgactaaatatgatcagggatgtcctagggttgccctagggcgcacaccccgttgggctatggccacgacacaattacaaggcccaaaacccaaatcagattcagacaggatgagatatgtggtttgttttgcagattcttagcagatcggtaggaattttgacgtgggaccaaaaccatatgaaagtagactacataagctttccaacaagtacttatgggcctcgaaattccatctagatcagcggctaggtctgtttgaagttgatgctgtcaggaggcccgaatctaaatccaaagcgtgtagaacttgatctcttgtcttctatggaccatagtagaaaaaactggaccgggctagcggttcaacaggaaaagatcggtttcctcaaaggatcg

SEQ ID NO: 43182 - DNA, 850 bp, Oryza sativa
aattcacaagtctacggaggagcacaacaaaagaggccgctagctgaagatgggctgggtaggccagcccatgggtttggccgaacctctcgtggcgccgataatgcagggtttggatggacggcgggggttgatccccaatgacggttggagggtattaccgaccattccaaccgtcacaaccgtcattacctgcctataaaaggagctcctcttctcacttcactcacacacctcaagcaatagctctctcatttccctcatgtttagtttagtagtatctggctggtggaataggaatagagtagaaattaggagtctgaagcctttgcaagagtttgggtatggctctagtagcttttctattatcttttgtaagctttgtacttttattagaatactcttgaaaatatatttatggtattgaaatactttccgactatatgagtacctacttcacattatgttcatgttatactgaatatacggctagcttatctgggagatgctttggtgcgggtataatgtttgcgtatgcaattactctatgtcatgccgataatattagagtagtatctggtagtttaggcatggtgtctagattacgggatatcattatttggggttatttatttcggatgagaggtgggccgctgatggtgacagctcagtatgggtattcctccgcgccggtatataatcctaagttaattccctagggagggtattcctccgtatttagcctcggttgtatggttatgatgggctgccggaagaaactcggcagttagtggtggcttttcgaagtaccaggagggcatcggaaagagggtattagctagtatatcgg

SEQ ID NO: 43183 - DNA, 1119 bp, Oryza sativa
ctcctgtttttacataaagagaaacaaatcaaggttaacctatttggaccaatgttttattaaacatagtatgattatagatgtatataacattatctttaaccagtgccttccctgacagtggtgctagaaatgcttgttggtatttcttacgctcacaaataaatccgcaagcgcacggataccgttgtagcacttcaccaatgagtattcccgaaagtgccgcatttatatttcagcagcaaaaacagaggtgtaaagacatagtttatatcaatctataattaactcactatagtctagacctggttagtattatgattaaggggtattatgacacacataagattcatctctaattaattaatatagtggaaaagacataagagaactatgatccaaccgttattccatattaatcatgttatatatatatacttaacacaatattggtatttattaccagggttaaacctttcggtttggccgatttgatcggacctcaccgaaatgctgaaatttcgaatagaatttagttgaatttgaacaaatattaccaaaattcatgaaaaaatttaaaaatttaaaacttttggccgaagtaatatcgtttcggtcagcgcaaggaggagcaaaggcagcagcggtcggcgagcttctcgccggcgctggcagtgaacggcggggtttcatgaggtgcagccaaaagtggatttgtagagtggaggattgtgaagctaatggtggtggtcttgtgcatagtggtgccaaaatcagtgtcagcggcggcggtgagcttcggcatgctagtcagcttcgcactaagtcactgccatgtggaccccacatatacaagagataggatagctgacatgtgagcccaagggtatttttggcatttcacgtgatttctctctcctcttcaactgtaaattattgttttagtcggcgcggtgtccattggcaaaataccacgattatggatgtttccctcaaaagttagttttggcagtgtcctaaggctaaaactacacaatagcagtgtcctgtaacaaaatttcctaaaaaaaaaagcaccatcgctcaaaaaccaatagtggcagcttggaaaaaggccct

SEQ ID NO: 43184 - DNA, 943 bp, Oryza sativa
acataggatacatattaaaattgaccaactctataaagtctgcatcctgccccaacccctttactggttctaggaaaactttaaaacgatggccatttaccttaaaaatactaccttcgttatcctgcagcttgaccgctccgtgtggcaaaatatgtagacataggatacatattaaaattgaccaactctataaaatctgcatcctgccccaacccctttactggttctaggaaaacttttaaacgatggccatttaccttaaaaatgctaccttcgttatcctgcagcttgaccgctccgtgtggcaaatatcgatgacggtgtacggttctagccatttgctccgaaatttcccgtgaccgaagagctttgccctagagctgaactacaacaccttgtttcctggttcaaactcgttgactttgattcacctgtcatgccatccactggtggagaaaccatctttggtcggtctggcaaattccacaatagtcccggtttcaaaaagaaccgggactaaagattatttttagtctcggttataaagattttaatctttagtcaccaactgggactacatggcctgtcaaaggcatgttagggggctgaggatcttaccactttagccctggttggtaacaccaaacgggagtaaagatcatttagatctttattcccggttggtgttattacaatgactaaagatatatctttagtcccggttaaaaactccaaccgggagtaaatatttctctcccacatctaatcggttaagtcgcagaccaacttcctcctcatcagattctcctcctatctatgagatatagctccttgctgtgctctcctgcccttcctcctcctcccctctcctcctcacatccgacgccggcgtcggcgggcgccggggccacgaccagcgtggtgggcgccggggccgcgc

SEQ ID NO: 43185 - DNA, 742 bp, Oryza sativa
ctcttaaagtagatgacgactttattacttctctatgtgtttacaaagtgccccaacagcactccttataaaaatctcgactaaactcgaaaccctaactcaaaactcaactcaattgctctcgaaagcgataccgctaagcctcacgctccccctctattttatacatgaggtaggcagcctaaagccacgaaccaaactcatactaagagtcctaaacaccttaggaaaccctctagtacaagaaagaaactttatataaccaatcgtaccaaatttggactccttccaaattcgactccgcatcccatacgtacacaatacctccatcgtataccatatagaatctccatcaaccacgtgcatcaactctagcctaagtatcccgcatgatctttgaccaccatggacgtcgtcttatccccaagccgacttccggtccatcaccgcaaatattctcccgaggtatcaagtcacctacacatgaaataaacaaagaaaccatattccgagaccaagttatctcaaacttgactcattagtagcgaacaacagtattacatacgtatagtatccatctagaagcccataatcatgacataatcacggaacaactcgaaaccgaaaccgacacagagtcggccggtcagaccgcgggctgcgccgatctgaccgcgcattacacgccggtctgaccggcaacacctgcccggtctgatcggtcacatgaaataatgaacct

SEQ ID NO: 43186 - DNA, 686 bp, Oryza sativa
attgttgtatttatagttaaaccaatgatttaaatatccataatgcctatattttgaactgttataaaataaagcaactaacagaaaatgtcaatagggtctaaattgaactgtttagagaaaatgtaataagttagtaaaaaaatggttcttacatttcactaaaattggaccgacctgcatgttccatttttataataattttaaaatgctcaaacattaatggtcttacttctatcctatagcatagcatagcattatgagttcctccacatattattacacatataagccgcactaaggtttgtagtatatggtttgttgacaagtttatttgttactgtcagacttacaattttggattcatgttaactatgtattttctgatgaaaaagacagtatagatcacacatatcacaagtaagtgaggtataggatatgtctttattaatttactagcaaaatgcccgtgcgttgcactgggtaatgtcgtgttcgataaatgttgattgaatgatttttttaatcacaaaggttttaaacaattattccacgtgtacgtgtatgatatgaactatgttcatgactcgttagcgtgatgattgtatcatgggaggaacaaacggtgaatgccttacgtcacttttacgcaagagtagatggacaaaaatttgtatgattaaaaa

SEQ ID NO: 43187 - DNA, 597 bp, Oryza sativa
atgcatattttctttcattttcccccaacagcggttttattccccaatttaatggcgttttttctttaaaaccaggcggtttttctctaaaaccaggcagtctaaccggttcgaatgctacccatgcacattttctctcatttttcccccaacagcacccatgcgcgcgtacagcagccgccaagcctggttggaagcggttttattccccggtttaatggcgttttttctctaaaaccaggcggtctaaccggtttattgctgggccgattgcatgccggtctttttacctggaccggaccggttggggcattggttccggtttttccccggtccaaccgctggtccagtccggtcttaataactaagattttacgtatagttgaaactgtttgattgaactccagctctaggagacatggagctagagctagacctgtaccaaacagatcatatatctatctatctatctattatatactagagtccattaaacttcttacaaacgctttaagctgctacgtcgcattctaaaaacgcttctaagccgcacgtgacactcttataaatcaaaaggttcttaaaattctatgaaaa

SEQ ID NO: 43188 - DNA, 544 bp, Oryza sativa
actatagggcgaattcgagctcggtacccagtaaagctattcgaatagccgtgccggcggttatgggcggtcgaccagattcaccgtgattagtcccatcttaataaatcgacccaatacactgtagttcaggtgggttggttgggcctgttcaacgtggtgtagcgttgatcagtggaggtttaatgttactttaattactcaacagttttactgttttgctcaataaaatgttttacaaccgcctttatgcaaatagccacaaaccatccttgtatccccttgcacatctgtatcgttggtgtggcttgctgagtacggtggttgtactcagtcttgcttttattcccccttttcagaagtgtagtacttctgagctgaagacgaagttagaggaccaaggctcagaccctagttgagttttgcctgtggagtggagctgaagccccgctaggatagcctttttccgctgctgctgcttttgtttcggtgcgaggactaagtgcctcttttgtaagtattttacgctttatttacgtttgga

SEQ ID NO: 43189 - DNA, 1181 bp, Oryza sativa
ggtgccaattccggcgacgaaactcgacggggaaggggcggccggggtggagcttagcctcgcgaacccgacggcggcgacggcgcggtgcggcgcgaccctagcggcggctagcggcggccggagtaacggaaacggcggcggcgggtggttgcacggcgcgggagcgatggggagcacgagggagttcggcgagatggggaaaaagcgagagggggcgacggggaagcctaaataggggaggggagccccggatgtggccggtaggggcgggatttcgccggccaacgtggggagtgggggaggagagaggggcgggattcgaaaattgaatcccggccatctcgggcgcggggcgcgggtgcgggcgggagagagagaggagaagtgggtgcgggagatgcggcacacgcgcgggcgtggctgacgtggcctggagaaggcggagacgtggacgcggcggcggttgcgggcgcggcggcgccggctggaggaaggagacgggcccgacaggtggggcccacctgtcggcgtcccggggagagagggaggggcggcttgggctggcccacaaggaggagggtgcgcgcggcggggtggactgggccgacggcccaagaagaggaaaaggagatttttatttgttttctttttattttaattgatgcaatgatctttgtgctattaaaactatttcttgagctccgaaaatttgcggaaaaaatccgcagagtacattagggcacaaagaatattacaaaatattctcggccaatgatttttaaaggaaaatttaatttcctctataatttcacttgattaaattgatttaaattttaatataatttcttgaaatgcattattaattgatttttaattccgaactaaaatcggggcgttacactagtgtcatgaccagaaataacccaacgggcgttccttacgtgcgtgtattattccttgtcccaggaggcaaggtacaccaaaagttgatacaatacagagtttaacaagtggaagcgtaaatagttaatttattacatgggcggcgaaggaccagcacacatgaagacaaacaaaaaacagcggaagactagggcgacgaccacaggcgcttgacggcaggcacgagctagataccaaagcctacatcttataggaactcctcttctgggtttggg

SEQ ID NO: 43190 - DNA, 1431 bp, Oryza sativa
cctctcccttttcaatctctattgttcaaacatcaacccaaatagaaccacctgacctagatctaacctaggtgatcctagagcaaagtttaacaggccatagttctcggatatactacagggtgacggagtcacaggccgccgtacgcgttgagctcttcctgggccgatcgacctggttgggctgatggaatctgggatttttggttttctctataactgtgttgggttgtatgcccatatcacctccattcgagttgtatgcaccgggagcgtacaatgtttaccagaaataactgtgttggtctttcttgtccggtcagtcgcccaagatgcttagttcgtccatttggttctgtatggtcgttagactttttaacatggaatttattttctgcctcttagagcatctccaacagatatataaaattagaaacataaaaatcctattttggggacagcccaaaataaaaaaggcccaaaatacaatccttctccaagagatgcctaaaatattggttctcaaaattttaaaatttgccacatcatcattagtgggccttttcaactaattttctacccgctcgttaaaattgcctgcgagcgcggagggggcgatcgcaatgcgcacggaggactggacctggactacttggtcgatcgtgatcctagtcgcgcgggagatcacgagttagcaagtacaaattaaccagtcagcaacagcgagtgagatagtcaagcagggtacggcagcgagcagcaaggattggtgacaggcacaagcccttgtgcgtttgaaccattctagcacaggtagcaaaattttgctaacaatgctttgttgtatttcatttttttatgtttctgatctgacaatgtttttatggaaaaaaacttaatttgatatgatgaataaatatttggaaaaaaacgaaaagtctagctgatcctctacatggcagtgtcatcaatctgcaggttaaaattatagacgaccatcatgttaggattttcttctatcaatcacgttttttttttatattttgatctgacaatatcgctaggtgagaacttatttagttgtgatgtttaatggttggccagttgatttgatccgtgatgagtcgtcctcgctcctcgtatcaacggcttgtggatgaatcatcgtccgacgatgatgattttctttggggggcgcaacactaaacctgcatcgctattgacactttgatgatgcaccaaaacactgtgtgtctatgatgggacatgaagtggttgatgcaaaagaagaagcacgtcaattgagattataccaagaccatttttctgataatcctacctatagcccagttttattcaggcacaggtttgtattaagccaatttaatttgatctatctttattatatgaatagatacgtatgccttatta

SEQ ID NO: 43191 - DNA, 783 bp, Oryza sativa
aaagtgaacttattccaaaatgaaaagcagaagcaatgggtgggccggaaaaatggcgaaccgtgtgatcgcacgccacgtcggccagccgtaccttgtaccgtgaggcctgtgcgcgagtactattgggctgcatcctgggcttccgcctgtttcagtgaggcggcccgcggcctactgccataagcttcttttccttctaatgctacaaaagtgtgcatggagtttgaagaaacgattttgctaaatatttattgacaaatttttctccaaaaatttaacagatgtaattacagtacaatcgtagtgtattacactgtaacttgcatgtaattacactgtaactatagtgtaacttgtatctaactttcaaaaatctctccgtaacatgttatttcggtaaaatggaggtcgtgggaacaaattctttcatatatgtgtgtgctatgatttgttttcttcctcaccaaaacaaatcttgtaatagatctaacgatttaaaattatgtgaaacttacatataagttatactgtagttacatgcaagtacagtataattatatataagttacagtgtaattacactatgattgtactataattatatctgtcaaatttttgaggaaaaatttgttttgaggaaaaatttgtcgacaaatgtacaggcagtccacaagaaccagctgggtaccttataggaacagctggccaacatggagcgtttcaccaaaaatggatagctgaatcaacatgacccacattcatgaactgggtatgtttttt

SEQ ID NO: 43192 - DNA, 793 bp, Oryza sativa
atcaaggttttcgtatgcccccctctggccggttatttcatcggtgcaggaccgatccgaactgcgccaccaccgctgttgggccacggaagacaactgggccacgcagagttctccccgcattgggccgtcgccgttagatgggccgttcgccgcgcgatcagctcgtgcgcatgtgctaaacgggtcgggccaattttttgggccggttatggaagtaatgggccaaaataaagttttatttaatttcgccgaattaattcatttgattatgtacataattttatttggcattattttgatccatttaaaattgctggaaaattatgatcaattactcagaaaatatatatttatatgtatatatatacctaataaaaaaacacaaaggttccgatttattttggtctgttgttttttttgttttcgtccggttttttgtcgttgttttttcccgaatgcgaactgatctattgcaccgtgcgcctcctgtagccgcccaggccgaatctgaccgattggtgatctttctggacttttttatcccgaattttaagctctaatatggggaaaacagaaagggcatactagcgtagggctaaataagaaggaagaaatgggctttcggtgcaaaatcaagaaaaaaatttcatcaacttttaaattatagtgtatagcaatcccaatattaaaattctcattaaccttttcaatcgacaatcgcaatgtgtagcgagagggataagcctatctaaccaggccactgatatttttttaaaaaaactacaattat

SEQ ID NO: 43193 - DNA, 628 bp, Oryza sativa
cctcgcatctgctgagtgctgaccatggaaaaaaataccagaaccaagaagatatgacatatgcaatacaacatttataatcatttattatataggatctgaattaattttcagtaataatactccctccgtcccataacataagggattttgagtttttcttgtaacgtttgacaactcgtcttattcaaaattttttgaaattattatttattttatttgtgactaactttattatctacagtactttaagcacaacttttcattttttatatttgcaaaaaaaaattgaataagatgagtggtcaaacgttgtaagcaaaaactgaaaatctcttatgttatgggacggagggagtatatattaaggtactacttagaaagtggaatgcaaaacttctacttgcttttgaaatcaatgagcactgtacatttgagtgtaactcgaatattaccgttttttttagaaagaatgtatcaatatcaaagtagcagtttgtatattgtagataagtttgggtgaaattacatgcctatatcaggccttctgacataatatagaagtgaattcgaaattttagtaatggcttagcttcttcttattgactactcaagttttatgagatca

SEQ ID NO: 43194 - DNA, 1311 bp, Oryza sativa
aaaaaaggaaatataacaaagaattgttagcaaaattttgcaacctgtgctagaatggtttaaaggcacgagtgcttgtgactgtcaccaatccttgcagctcactgccgttgcctgctttgagtatctctcactcgccgtcgttccctggtttatacttgctcacacgtgatctcccgcgcgactaggatcacgatcgaccaggtccagtcctccacgcgcattgcgatctcctcaccacgcgctcgcgcgcgattttagcgagcgcctagaaaattagttgagaaggcccactaatgatgatgtggtaaattttaaaattttgggaaccaatattttaggcatcttttaaaggagtgtattttgggtcaaatatttttttttctgtccccaatataggatatgtggggttttaattttgtacatctgttggagatgctcttagggtgggatcattttcccctctttattcttcttctcttctaaaagaaatgaagcgcaattctcttgtgctttagggggacaaaaaaggtttatcagaaatactatcccaacgcgcattatactctagtttagaggctaagagtcaaacatgggctttatctaaataaaaattaatctaactgtctaccgacttggaacctgcatgatacttttttaagaaaaaaaaaactttagggtctgcactaaagctcaatattttgcacaaaacaggtgaaaaataccaccatgtaatatttcaagatgaaccaacacaatatgtgcttggatgagccagtttttagataaaaatctattggagaaggcccattaggcgtagaaaaatagtacccctccattttaacttttcgcacaacgtttgaccatacgtcttattaaaaaaaattaaaaccgagggagaaactcccattgagcccacacccaggagtcctcagccaacaaggccgatcaatgagcactccactcttcccacttccacggcgtctactggtgttcgttcgcccttccacttgttgatctattttgattattatttctgacgctttgacaaattgatcaattttgagttctcttttcctgctaggtagctatcatgatctctctctctgtttttttttggaaaatacatattttcaccggtaatccatgcatctcccaaacaatcaaaattaccggggttttctatcttcgctggtatttttcgttaacacaaaattatagttatcttacactggcagcgaatggccgtccccttctgcgttcgttgctactgatgggaactaatctgtattgcatgtaaaatagagcgac

SEQ ID NO: 43195 - DNA, 9413 bp, Oryza sativa
  unsure (1)..(9413): unsure at all n locations
atacttcggggcatggcnacatgtgtgttatcgtgtcttgtgggtacaattgtacactctggccagagtaaaactattcgaatagccgtgcccgcggttatgggcgatcaaccagattcaccgtgattagtctcacccctagtttagcttaatgaactggtgtagttcaagtggttggttgggcctgttgcaacgtggtgtagcgttggacaatgattggttaatattgattaattactacagctgttttactgcttcaactactgctttgaaatgcctgctttatgcaaaagaacccctagcttcctttggttatatcctgcatcatacctcctcttccggtatgacttgctgagtacagtgggtagtactcagtcttgctctcttttcccccacactagagttgaagttcttctcagttggagccgtctcagagaggttggtttcgtcgctgccgtcaaggtttgcctgtggagtggagtcgcccgctgctgaagtcaagcttcctggtttagctcacttttatctttcccgctgcatttataatcttttatatttttgtaagacgtgggtctgtatgtcaacaattgtcgtttgtgtaccctggctggtcctggacaaggatttaatgcacattcagcttagaaattctggttcgagaatttctgggtgtgacacaatctcacccattcgatctgttatagatgaatattgatcgttggatatgatgaatgaggaatgaggaatgtatcatgtttgtgaagaagaagaagaagaagaagagatagaaaacaattaaactgtttattgcatgccatatagagaggataggctaaggtcactgacaagagggacccgcatgtcatagagaggatgcaatgggtctaccatggatctagtccatagaggaggtccactatggtccatagagatggatgcctaagataaattggccactgttgaccgaaataatctgactattcagatcaattctgatctagtgatgcagagaggtgccacgtggagcctgggtggcagccacagaggacggattagctgataaaatgctgatgtggcaaccatgttggatcaacaaaggcagacccaggagcagcggcacacggcgaacaaaggagcgagacactgaggacaccaatggacaaggaatggtgaggcgacacttaacaacactttggcaaccactgatgaggatgaacggtggccagcgacgggcttcaagggtcaacgacaatgacagtgctctaacaagacttgagaaagaagaggtggtgaccgagtttccctgtgtccttcagatgccgatggcggcttcggcggggatcatcggcgcagctcggctagagacgacgggcagtaggagcacttggaactttcggtggtcttagtcttccgggaagtggaggccggtcgcacggctgctgcagtgccgaaggaggaggtggcattgactgacgattaccggggcaatgatactgctcggccggagcggcgccgatggtggaggagagagaatgagcatgcgggaaggcggctggggtatgggacgagctcggacaaggggatgctatttattagccaaggaggaagtgaccggtggggatttgatagctagaggcagcgaagaaactagggtttatctcgagttgaccaagatggaacagcgacaaaatcagtgggattccctttgagatttttggagatttattaggagaaaagatagaggaggattgatttagtcaaattaaaccatatttcatttatgaagtttccattaaaaaaatttaagcgaataaatatgaatgtgaattttcaaaattaggcaaatttgaaaaagggatgtgacacaacccttggacgagcaacctcctcccttcctcaattcaccaccgcattagtccagtaattaataggagaggggggaatgggagacagatggtggtcactgacatatgggccttacatgggtctagctatatattttttactttttccttagaactgccatgtagtcgtcacatcggtcaaaaatcaagtcaatgtgccatgcatgtgggcactttgtaggacgaaacatacatgcaaactgctcgataagacaaaacaatccagtattgataggcgagcgaggctttctatctggttttgcgggtaagagatgtgaacaagccgggcctatggttgggggaaacaaaatggattcttttcccttcaatatgtccctatgtttgacaacttaggcccaagttgtaattaagggcttcgattagcccccacctccatctagctcgttttgaatcgtcaagaaagtaagtttcttcctctaaagaaatggataaggttttgcaatatggaaggaactaattgcatatctccaaagagagaagtgatcagaacaagaagaaagctggtatggaaactgttcgagataagcacttaggcacggaatctatacatttagcagagctttgatggtccatttgaaaatcgtctatctacaatgagctccaatcgatacatttcgcagagcttcatgaattcgatgaagtagcgttttgctcaaattaggatagaattaatctattaaacgcccctctaaatttatgcatatcaacgttagcaggaaatgaattcttgccttggcatgcaaacgcctcctcgcttatataaacgagtatatctcgtcgtcactcgccactcggtctcctcaaccattcccatttccaaatttacatcattcaacagcgtaatatccatcgaatcagcaatggcgaactactgcaggagcatgacctcccctctctcgagcttcgtcccccgtcctcctcctcatcgtcgtcgccgtgcaatcccaaggtatatattctaagctcgatctggattcatctctgaacttgtaatgtaattcttgacggattacacatttaatttaccacggtgtgtgtgcgtgtatcaatcaactagcatgggcgctggatgcccaggtggcggacgacatggtgccgacgaagccggcgaagccggtggtggtggccatcggtggcggcggcgtagtagggacgttggcggcgccgttgtgcctgcagtgccggtgctgctcgaagacgaacccgagcaactgcgagctcactagctgtagctccaccttcaactgcgaccccgccggcaagtgtaccctcgttcagcagcgctgcggctgctagctgcaagcctagctactgatgctgatgcatgaactgatgcatggttacccatggatagttcgtgttgaaagtataagcttgtatagatttgattcatctcatcaataaatcttggcattaaacaaacgatagcaaacccatagcaatggatggttagatttgattcctactacactactaccaaaaacccagtggggtttatggtaaattggtcctatgtctatacgagaattccatggatcgatcccctagagttttaaactgttccctagagctgctaaagcaacccaagggaagtaaaatatccctgggtgtaggacatagtatagacaggtgttctgctgccaagaaatggcaacaacgacgtctcctagcgaagggaaggattgagaagacggcaaaggagcacgagctctcgtagatggtggtggcgcaagaaatgcaatggcgatcatgcggtgaagctcgccacccaatgacgacgctgagggcaccactcacccgcagttgagggagctcccaacgagaagacgacacaatgtggactagaccagtgaacggtaatggcagactagcgttggtgctcaccgatctataagggtgtaagtagctaacctgcgaaacacacttacgatcaaataaaacacgaaccagtttattttgatatataagcgggttcacggtttacccacttacacccctactcaccaacctacgtgaaaggaaacaaaagagcgacagcaccggtatttatacatggcgagggaggtggacagccgaaagaggaggggtcatagcctcataggaattggaaaaacggataaaagctcatcaagtttattcagtttcgatctggtatttgaagagagagaattatgagggagaggaagagagattagtggggattgatgcaaggaacttcatgacaaagcagaaaccgacgtaacttgaggacgaaaagaaacaacgtggtgctttggtttgtggcaggcggcagcgtgcgtcaaggtgggtcgcatggtggctttgaatttgaaaacggacttgggtgattattatgattcaatttttgatgttgaaggagtgaaaatgtgaaattgacggggagaggaagacattagtgatgggaaataaaagaatagctggtccgaaatagaaatgtttcgtatgtgtgtgtccagggttggaaagttcggaccccctccgatacgatattacttcggccgaaattttaaattttttcataaattttggtaatatttgttcaaattcaactaaattttgttcaaaattttgaaaatttcggaccgaaattttcgaaatttcagcatttcggtgaggccccatcaaatcagcctaaccgatagaattaacatgtgtgtgtcggggggggggggaggggggaggagaatgaaagaacaacagaagaacaggacgtattgggaggaagcaggaaggaaagatgaggaacaggatttctctggaaatttcaaattttggaggatttggaatcgttgagtaattgttctcgaatgtgaaattttagtcaaataactccaattaacaaaagaaagaatactagcacggcattaattaatttatttagtaattaggccatttttatgaagttttctttaagctattttacatgaataaacacgaatttgaatttctaaaattaggcaaatttaaaaatttaaagaacaggacgtgacacaacaagtcggatcagcaaccgcctccctcacccgatccaccaccgcatcgcaacagagaggggagagaggcaaggtaaggataggcaaaactaaggactatcatgatttgttttttctagaacttagaattaatagatatacgaagtatttataatcttgattaaacataaataagttcgactagaagaaagatcaaaatgatttataatataaaattaatttgatttaaaattctaaactgataattgcaaattgtaattgatagcattgagtcttgttttcaacctaaaccctataggtcgtaaataattttgaattcataaatatgagtttcataaattaatagctccctattaatttaattctaaaattaataatttgaaagttataaatgaaatgaaatcttttttatcctaagccgctataaataaccaacatatttaactaaaaactttttatatgtaataataataacaataataataattattattattaaagctcctgaaaagtgtataattaatatatatatatatatatatatattattgttattgttattattattacatataaaaagtttttagttaaatatgttatatatatatatatatatatagagagagaggtatagatagatagatagatagatagatagatagatagatagatagatagatagatagatagatagatagatttacagccctctaaatgtatgcatatggacgttaggaattatattgttccctcggcatgcaacatgtcgtcgctatatataaacgagcacatctcgtcgtccctcgccattcgatctcctcaagcgttggcattcccaagttgttatcattcaacagcgtggtatatatagggatcgaccgaaacagccatggcgaactgccgcaggaggatgacctcccctctctcgagtttggtcgccgtcctcctcatcgtcgtcgccgtgcagtcccgaggtattctaagctcaatctggtttcttctatgaacttgtactgtattttctgacggatcggatgacatttaactgactatgttgtgtgtatgcatgtatatcgatcaattaactagcatgggcgttggatcagctggatgacatggtgccgatgaagacggcgaagccggtggtggtggccatcgccggcggcggcggcagcggcgtagtaggcacgttggcggcgccgttgtgcctgcagtgccggtgctgctcgaaggcgaacccgagcaactgccagctcactagctgcagctccaccttcaactgcgaccctgccggcaagtgcaccctcgtccagcagcgctgcggctgctagctgcattcctagctagccggcgagccgagcgtgagctaatgcattggatgccaaagatagttcttgctgaaagtataagcatgtatatagagatttaatttatgtcatcaataaatcttggcgttaaacaaagacaaactgattaaaaaaatgtggaacttaatataataaatgcgactggtggttctgttctggatgatctctggactccattaaggacgtgtttggttcgtggtgaaggttggataggatatagacatcagatatggtgggtctaattttttatttggttgggtggatatcacaatccagttttttttgttaggtacatgagaatgagaatggattgaatgaaaaacaataacatattaattaatagtaaaatatgttaattatcatgactatagccattctttatactaattaacaacaaaataaactaattatatctaatcaacactaattttgataagttaattactaattaacaacacaatacattaattattgttaatcaattactaatgatcaagattagcaaaggtggatatcctcatccagccgatacacttatctagcatcttcgtggaatatttccttttcaggtcgccctatccacccttgtccaccaaccaaacacactcaaaaactgaatcgtcatctcccatctagggatattcctccaacaaaatacaccctaataggcgcaccaggtatcacgtggacagctcactgtataggatgttggacgatacgccacgggtgagcaacatgggccgtggtgaatggacagtgagaaatcatgcgtagtgcttcccaaaaatctcattcaccattcacccttctaggactttaaaagcgatagttaggtagacctgatctcctgattaccagtgcacgccgacgagtgaaatagactataaatgatgatgaaatacagagatatcggggtatgtgatcagaacaccgtcacggtctccacaactcgtatctgaaccagataagtcgcacataaccataccaaattttataccactctaatgcatgcactgggcaatccgatgcactcgctagacatgtcattcgtttctactacaaaacgaagccacgtatgtgtgagcacaaagagtcaattattttttatgaggcaaagctatcgagcgctcgtgccttcctcaacaatgtatattccccatgtgttagtgtgtatgtgcaatgggaagcagatcctttgacttaactgcacatgcagttgagtcactggcatatgggtcccactttgctatggcccacatgtcagtgactcaactgcacagcagttaagtcagaggatccctttccatgtgcaatgatatagcaaaatacaccaaactagtacgctaaccgcctttattatttacaagcaaagtgtcagtgcattccaataaaaaatacgaaaaaaggtaggaaaagaaatagagcgtggttagaaaacggtcgagacgaggtgattgttgggaaaattgactctcagtatggaaaccgggagacaatcacacacgttgcttttccacccattacccatgcgagattaacgcgattaattcatagttatttccataataacgcattaacgtgattggtcatgcatgaacattccttttgggattacccccgatacccacagcgccatataaaaagggaacgccagcgtcgtgtcatggtgacgatcgctacacgatcatctcgttctcgataacactaactaatctcgatcctttactaagtgctgaagggtcatcaaacggcggtaccatgccagtgcaggtggcaccccgaaggacgtcgccatcttgcaattgatcgccggcaatccctacagatcaagccggtgaccttacctaccccgctgctacgactactttctctacaccgaacaccggagcggttcgaggaactgctatctctacatccactccggccatcggcaacctcaggacaactacggcatccatggcttccaataatggtcagtcaccctaagtttctgtattatggtgatcatgttaggctaagcacttatgatttagcctcatgatcccatcatcccatttagaagccataagatgcatctaagcctctatctattgagtgtcggtttgatgcaaaatttggtttcgatttatgttagttagtccttaattatcatcagattatgattagttaggttcgattcggttttaatttcttgatgcccatgactaattaaatttgtgtctgcattttaagatcgattactgcttgggtagaaattaggaggagaattgcagcggataaccaaaatctctaattttcacaaatgctaattcaagaaaatccccaaattagaacccaaaaattccccacaatccctgcaaatccctaagaggataagattgatgtcttaccgattcctcgaatcataacgcgagcaccgctgtgcacgcaacccgccgttgtcatggatcggccttgcgcctactctcatgggccatgcaaggttgagactcaccgtcatgttttgccgcacgtggaggacaatcgagattgcactgttgcactagcattagccttgctacgcactcaccgtcacgatatttgactagggctcctacggcaccagtgtgttgcacgagcaccgggtaactcggtcggccacgaccccttcgttgcacgctgctgggcaccacaaccaccgcctcgcacatcgccggcactccgatgcctcacccgattcgccgctgttgtcgccattaggagtagaagaaaggggattggaagaaaggaaatgggttttagggctagggttttggccaatcggccatttttctcaatccaatattatctttcattttgctctatgatgaagttttactccttgtctggaaataataatgttttaatttatttacatagataatatgcatagcttaaagtgaagagaaacattgtggatagaagcaccacaaagtataatctcgagagacacacgacaaagtccagtcgatacaaagacttcacagtcgcacacaatgattatgaaggatatagcttgagaatggcaaaactctcgcacaaaagttcccatgtaggaattggaagatgagaaaagcatactcaccacc

SEQ ID NO: 43196 - DNA, 1116 bp, Oryza sativa
catgtgcctattctgatttgtctttcataagtctcttgcaaacttgataggcgtcttgcaatccccgctgcaacccggcctctcctatgatctatacctccctcacatcaaccgttctgtgtgcaagcctcaaccctgcaccccttcatcctacaggtgcacatcattgcaatcgagtcatgtaaggttagttgtcaaccaacttaatcggttcattgcatgtaaacttatttactgattttatatgtctgaattggttatttgccatgggtactgattttaattcctgaaaaaaagtgtcaatttattctatttggtaaacctgaacttggcatgaattttgaccagattctattggagtatacattatgatttgaaccaagctgaagcattatgaaaggtctatcgattggtttctcccgcccgtcggcgagcgacctgaagcggatgtgggtgcggttcaagaaggcgccgcgcggcggcggtgaccgacatcgcctgggagaagatagagagagaagagaagagagataggagagctgacatgtgggcccaagggcatttttgacattttacacgatttctctctcctcttcaactggaaattattattctaatcggcgcggtgtccattggtaaattagcacgtttatggaatgttttccccaaaaatgagttcggacagtatcctacggctaaaagcacgaagtcgaagtgttctgtagcaaaatttgccataaatatataatagatgtcggttttttcaaaaaaaaattatcttaatcttaatcttaaatatttaaaaaatccataactttctgatcatcacctctctttttttccgtattttcggtcgtaagtccgagagtcggtacattgttctccgccgcttaagcaaaatcaaacaaaaacagggagggcgtatctgcgtgagagagaggcggagagacaacgggaaacaggcgctgacaggggatccacacaagcagcaaagatggcttagagccggtggtcgatctggtggggacaacttgggtggggagggagacagacgaagaaagacggagattggatcagggagagtaggggagaaaagggatttcatcggctagcgat

SEQ ID NO: 43197 - DNA, 542 bp, Oryza sativa
aatacgcttgccgatgccttcgagctgggcgcaggccccattcaaccacaagatgtatccagccgccgattcctcgggatcctcgcgggatactcggagctctctacagactcccaccgctgcccgctcccggtcggcgtcgtcgtcgctggtgccagttccacgaggggacgagccatcgccgcccgctcccggtcgccggcacccgtcgtcattgtcgaattcacacagggtggcgttgctctaggctacctcgtcggtgccgctcgccgctttcggctgctctgctcccggtcgcccgctgtcatcactggatccacacgcgctgccagccgctccatgttgcccgccgtcgcggggccaacaccagatccgcggcgccatgaccgcccgccgccgcccattgtggggccgggagagagaggagagtaaataattaggagaggagagggggagagagaggaaaagtttttataataaaaattgaagttttgagagggaaaagatagtggaggaagattaaaaaaaatgtgaaggggtgg

SEQ ID NO: 43198 - DNA, 718 bp, Oryza sativa
ctcaagagataggtgttgcagccacagcagtctgtgcagagaaaggcagtagtgcatggccgttgcccaagatattcttctgtgctaaagccggccaacgcaatgcctagaggacagtgtgggcgtggatttggaggcacgggacgacggtgccgtctagaaccaaccctgtccgttggtggtaacatctcaaagtggcagccatctttcactctctccctttccttttaacaccagagagatgtcacagagagggtgcgtgcatgctgtatagtagtaaaccggtggtccaaacggctccccatcccgtgcacgcctttgcatatgtaatcacccaaaagttggggccttttgggcgagccatatcgaagagatatatcacgaactctcacgcatgttacggtcgatctgatctgacgaccgtcgtccaacctacgctctcaccaaagacagccgtggaatcgtatagattccctactccgttctaggtcatcacctcttatagattttagctattgttaaagatataagaggtcagtgataacttcacctcatctctaatgaataaagacatgtcagtgatgatcaatacctcggatgtgtgtaagcagtccgtcacattaaccattgacccaccggtgttgccacatactccctccgtcccaaaaaaagacaaaccctgattttccgtgcccaacgtttgaccgtccgttttatt

SEQ ID NO: 43199 - DNA, 4821 bp, Oryza sativa
gagttgttccatccacttttgatgtgattccaagagtgaatactacatagaagagtcaagaccgggctcgctcccaaatagaatgtttagccgatccattccggatggatcgaattggtatgagattttctttctatatgaagatgaaaaaagaattagggtcaaacatttcttacttttattgagtatgactgaatgaggaatccttatatggtatcgctttaccatcatctgaaacgtgcaaagctccgaattaaatgaataaaaacctaggagatgctcactagtatctcttgtctgactatttagaaataattctatttttaattggatttatgtcgtgccaatcataattctatttttgattggatttatgtcgtgccaatccaacgtaacgacaccagatagagggttgttgcttgctcatcataatgctggaaaggcatataatgtcaccggttaacattgctagtgctgtgaattcgatctattaaaaatcgggctcaaagaacacacgcccatataaataaatgggactcctccgattaagaccctcttgtgaaagttatttttcacaagtggtcatcttagaagtattgcgtgtgaaaatagagttattttcatgggcaagccttttagggaggtgcatgtaaataattggacttttctctacggcccctatccatccatgtatctcaaccatctccgcataattttactagatcgatatccctcttaatttactgcattttctcttccctctcccacctctctcggtctctcctcatctcattcctctcaagcagatactgcgacatcagcggcaaatagaaccacgacagcggcgacggagaggggcagcggtgtaggcgccgtatccggcggtggcgggtaaggggagggaagagacagcggcagcggcaaaaggatgagcggtgacagtggaggcattagatccggtgtagtggtgctcggtacctccggatccagcggcgacagggaagggagggagctaggggcggcagtggaggcactggatccggcaagcattgctcgggtagcgctccaaacacctatcaccatcggttcaagcagcaaatagtgatacatacttaagtatcattgcctgttcgtggcctgaaacactgatactccaagtatcattacgaatttacgatcttttgcttgaacaaacacttatgtacttgacatcatatcactgctggttccagcagacagtcgcactgctggagaaatggtttttaaccccggtttgtaacccacaagtaatcctaattatgcaaccgggactatggatccgggactaaagatgggtatcattagtctcggttgaaataaccgggattaaaaatctatttttagtcccgagccaggccagttccagttggtagttttttttttctttttttcattgtttttaactttgaatattgatttcactacaacccaaatcatccccaaatcgattatcacagaacaaaagggatcatctccaaatctctaaatcgatcatctccaaatacatcacaaattctaaaaaaattatatcacaaactctaaaaaaaatcataaatacatcacatattcacatcacataaagatcaaatacatcacaaatccaaaaaaaacaaatcttccttgggcagccgccgccgcttctcccgttgcgtccccggcatggccgccgccgcccccgcccggcggcctctaccgcttctcccaccgcctccccggcccggcaaccgccgccgcttctcccgctgccttcccggccgaccgccgccgtccccgcccggccgtcgtcgaccccgctcggcggtcgttgccgcttctcccgaccccgctgcgagagagagagagagtgagagagagagaggacagagagagacagcgagagaagaggcgcgaggagaagcgctcggtttcgacgaggagataaggagaagtctctggtctcgcgcgctagataaggacatatatatatgcgctaagagataagtatctcatctctagttcgatcaagttaagacgtgggagggagatatttagtcccggttagagatatcaaccgagactaaagatctattttttagtcccggttggtaacaccaaccgggactaaaatcttcggcgccttgacatcgtctgatacaaacccggttggtaacaccaaccgggattaaagtcatagtccccgtgcacttttaaaccgggactaaaaactattgtggattttggccaacccatgaaagatggtttctccagtagtaacgatgatacgagatcgtatataaggggttgtttagatccaggggtttaaagttttggtgtgtcacatcaggtattatatagagtgctgcatggggtgttcgggtattaataaaaaaaactaattacagtatctgtcagtaaactgtgagacgaatttattaagcctaatcaaccagtcattagcacgtgtttactgtagcaccacattgtcaaatcatgtagcaattaggcttaaaagattcgtctcacaaagtagtctcaatctgtgcaattagttattttttaacctatatctaatactttatgcaggtgctaaacgttcgatgtgatatggtctaaaattttagattggtatctagaccggcctaagtttctcaacccactagaaacccagtgctataagtttgacaaccgcggtgccgctactgtcctaattaaagtcatcggcagacgtacacatgcatcgacgcagagagagttgtaaccaaaaggtgcagaaaaatctgtaattttcagcttcttgaaacacttgtgctgctgctgtgacctgtgtagcatttgcctgtgcgggtagcggcggttgttgttaatcgcagacaaacccacgagttaacccactgacgcgccgcgatttgtttaagcgctacgaggcaccgctcccgaccctacgaacgtgcgcacgtgacagcccttgcccttgcctaaagccacgacttaagtggctgttaattctagttgtgtttaccctcctgctgctgcccagcaacaatgaccgcctccaccaccatcgcgtcaaaacctagctccgtccgaaattaaaccctctaggttagtttggagagagtgatgcccagcaatattgttttaaccatattctttctaattgataaagtaagatgatcaccgcgccaagataggatagggtttctaaattaagttacacaagttctactacgtatagtaattgagatttgttccagtccaacaaaaagtacctcgaggtaccggtatctcacggtaccaaatcgttttcgatcgttgtatctaactgggtaggatgtgcattgttagatcatcaaacataaatgattataccgtaaagtactgttatctcgaggtattttttttaaggaccggagctaatctcacagtgggctgttagattagattgtaaatctgcagttgggctgcttttgttgtgccgtacaagaagatatagagagactgaaatagtgtgggaaaatataggataggaaatagaacgaatttataattaattgggtattggataggcacttttaaaccccgcattgatctataaatttcagcaaatttatccacaatgaattattttgttcaccttgttcactgagtattaaaccatgttatttactccacatttataaaagaatatttttttaaaaaaaactttcttcttataaattacttctaccacttatttgaagctactatttgttaagcttatttcttataatatttaatttatcactagaggttgtgtttagttcgtgcgccaaatttgttttaagtatatggacatacatttgaagtattaaacgtagactaattacaaaacaaattacagattctgcctataaactgcgagacgaatttattaagcctaattaattcgtcattagcaaatatttactgtagcatcacattgtcaaatcatgacgtaattaggctcaaaatatttgtcttgcagtttacatgcaaactatgcaattgattttttttgtccacatttaatgttccatgtatgtgtccaaacatttgatttgacgaaaaattggaagtttgaagaaaaaattttaaatctaaacatggccaatggccgaacaaataattcgtgacaataatccgcttaataatctaaatcaaactgaccaaacccaagttggttttacgcaaggtgactttggatacacttttttttcaccaatcgtttacttgcggttttcaatctaaccattgattggaattcaacgcagcttttttttaatttcaataaatttggtttctacttgcaaaattgcaagtgcttttgttggttgggttaagagtaataatctaggttgtagacttgtagtagctcatgcacgtcaatattcgtgcacattagcgtttcccctatgctgttgaatttcacctgtttgttttcgtgtctcttgggaaaaaaagccaggcatattttttgaattgatattaaatttatattttaagtttgacattaaatggatttcaattgatgaagttctagcaatttttttgtctgagtttgttgtttgcattctgttactagactggttcacagctcaccctaatgatactgtagcggtggatctttatagtgattaatttattggttttttgtggcaatataataactccaatattattggtactacggctagcacttaagtgatactgtagcagtggtactttgactcccaacttttaattccacaccttggccactgccccctgcatcatgctagctttact

SEQ ID NO: 43200 - DNA, 542 bp, Oryza sativa
tacccatgaattcagaaccccagagtccgcacatcctcaaatacaaagcacttccctagttagatgtaggttagacttcccgttcgagaaactctaccttctacctgccctcaatttatgcacgattaatgaatgccacctgggtggaagcgagaggtggaaatggaaggtcttagttcggaggtgggatctctacctgatagttgcattgccattcatgatgatcccctggcattcgtccattcagccattcaccattcacccattcaactggaattttggttgaatgccggaattgtgtccacaaattgtggatggatagttggttggctggctggatggctggctggatggctggctggatggatggtgaatggctggcggcggttcggttgctttgaagcatttgttgctatctaaattccatttaaggtcgtaccttatcgcccagcatcatcttattctctatttgtattccctccatctttcagatacggatgtagccttggatgtgcccgtgcccaatgaagaggaagagcgca

SEQ ID NO: 43201 - DNA, 605 bp, Oryza sativa
ctgcccccaccgccgttcgaaggtcctccgtcgccgacgcatagccgctacccgccgtcctcccgaccacctctagccgtcaccaacccagacggtcagcgcacgagcccggctgcctctggccaccatcgccgtgcctccgcctcccacctccccgtcgccgatgtcctagccgccgcgcagacgccggtcagctttggcggtggtagggccggatctagggggagaggaagagacacagttgataattgttggaagcgatgaaaatgaatgagtcgtccgacaactgaggagaaattccttggaagtgttcaaacaactgttaagtgcacattccaaatgcccctatgcatttagatctctaggtacggtaactgacggtaccaaatcgtttcacgatcggaaacgatttggtaccatgaggtactagtacctcgaggtaatttttggtggaccggagcaaatctcatgcatttaagttggctgaataataagtattccgagcagatacagagcatgttcaattcaaaatgtgtagtcacgtagaggaaagagaatcaaaatacagaaaaaaaactgaagaaaaatgagtttataaataggaa

SEQ ID NO: 43202 - DNA, 766 bp, Oryza sativa
gttagacatggagtgaacaaaatgaagagcaataggccaagaattgactatctgatagcatttgacttttaacaagttctatgaggtggccgagaagatttaattcttctgtaggagcaagcaatttctataattgggaacattgtcactttttgatggtgatgacaactttgatttcatgtttcagatttgagaatggtaagtgttatttggaattatccttttcccttgaagacaatatttccctttgaaagggtcaattaggcctagaggggggtgaataggctaatttaaaaacttaagtaaggcagaagcagtaatttcgaaactaggcagggaattttcggaacttccaaaaatgcaaagaaaactctagatctagaagtctaccacagggaatccaaagcgcaaacagcagctagaccaatagcggcacaagcaagtgaagctagaggagagggatgaagagatatactaagatgaagcttgcaaacttgttcccggagttcaaatccttgaggggattctactctccgttgaggagctcactaagagccgggtcttagctaaccctttcctgaagaggttgtactaagcactcctccttccactaagaggtatcccttccttgcggaggcgagatccggccttcacaaacttctcccggccaaccataagtagatcggtggctcgggagcgacacctagccgtctagaagtcctcaacctccaagagtaaaagatgatgcaaataactccagaaaatg

SEQ ID NO: 43203 - DNA, 1253 bp, Oryza sativa
ccttcaaatccagcgcaatgagggaacagcagcagtgcaaagtgcgcggcagccaatgggcaagatgaggagcggccggtggtgggctccttcaactccgacgcaacgagggaacggcgacgatggcctcctccagctcccccgcgcgcgtggatctcctacaacttccacaccgctgcgtcctccccgagccctggcgtggcggccaggatggaagatgaagacgacggggagggccaccggcaagctcttctagcattggagggaggaagaagggccaagggtatttccgtccatgatggtattttggcgaatgtcctgattgagaatggtattctagcgaagccaatttaagtgatggtattccagcgaatccaatcttatgcgatggtagacatgcaattttctccataaattgatgcaaatgatgctaacctgcgatgtgaaagcaaagggtaattcagggttgcaccacagtggggtttctcccttgctgcttctctttgacgaagggccaaacgttgccattcatactgctcagagcatctatatccccctgatgcttgtactctatcaaaaccaagtccaaatggcagtctgtccggacccatttaatcgtcaatcgttgacacaagattggactaataattcttgcttctacgatgcagatgaggctgatctggtgtatacatccaattccggaataaagctgtcaagaataagaaatattcagttaaaagttacaagacgtattaaacagcacagaaaaatttcagaactaccagtatgttactctgctaagtactctgtttagtaaattgtaatttgaagtctcgcaactctaaaaacctaggagtttagagaaagctaaatgattgtactggattatttttctggaacctagcatattgaaaaattcaatagaaagataaatcaacccaaatgtttttctcatctattacatgtggtacagagaatagttcaccacaaagaaaccaatttactcccaagtgttgtcctcatcgataacacatgatgatgaggatttatatggcaaccactttacaactgcaaggatatagctagctggaataagttggtattgggggacacttcttgtgaaaccttgagattactcagatatttattttgcaagaatctgagcagaacatcacctgtatccacgtacaagtatttgtcatgttcgcagaatatgtgccaaaccagagagtcagatccaagtcagatttaac

SEQ ID NO: 43204 - DNA, 2756 bp, Oryza sativa
attttcatagcaaacagtaatgtagtttgatttgctcaggctctaaaaaaaaatttggtaaacggccactggaagcgcccaaataatattccttccatttttaaataatggacagcaggcactattcactttctcactaggaccaatccaattcacaagatatctacaaacactaaaaatgatgtcatgttcttaaaatgtattatatccaaaatataagcatgaaattttcattcactttagtctaaccatttatgagtaattagtggtcaaagtttaaatagtaaagtcaaagatgtcaattaattaaaatgagaggaagtaactatcaagtgagggaagcacccatacaccataggccccaggcccgatacgcatccaagcaattaaaccaagcgtttcacgagggaagcacccatacgccataggccccaggcccgatacacatccaagcaattaaaccaagcgtttcacgagtgaaaaggctaattggcggttggctgcgcgcgccctctcccgcgcggcacaaccacgtggcttgccgcagagatggggcagctgaaccgcgcggtgggaaggggccacgtgcccttttttggttttttcccggttttctcagtttctttccggttttccattttttttatttttctctcgttttttagtatgtacgtatacaaacttgtatacatgttttttcgtttctctcgtgtttttttttcagttttttaatatgtaggtatacaaactttatatgtattgtatacatatgtatacaaagtttgtatatgtgtatatttttttaaacataaaaaatgtaatatgtatacataaattatatatatacatattttatatatacgtatgcatatactttatacgtaaaaagagggaaaaggaaagaggaagagactaaagggtcgaaagccacgcgtgcgggcgcatccccacgcagccacatgcgcattaaagctccccttacacgagcacaaaaaatagtgtttggtgtgcccattggcgtcaaatgcgcaatggaatttcgacgttgtcatagagattaataatacttcctccgtttcacaatgtaagactttctagcattgcccatattcatatagaagttaatgaatctagacacatatatgcctagattcattaacatctatatgaatatgagcaatgctagaaagtcttacaatatgaaacagagggagtagtgttttttcatagcaaacacacttaatatgtagttcgatttgtccgggctctaaaatttcttttgggtcaatggccactgaatgtgtccaaataataactgccaagtgatggaatcacccatacgtcacaggtaccaaccccaaacacgtcagctaagcaacagaactatggtggaccttgcaaaaagcgaagcattcgtccatgtgtaaagtcaaattcgaaatcgagcccaaataaggccttgtttagttcccaaaatttttttcccaaaaacatcccatcgaatctttggacacatgtatagagcattaaatatagataaaaaaactaattgcacagtttgcatagaaatcacgagacggatcttttgagcctaattagtccatgattatccataagtgctgcagtaacccacatgtgctaataacggattaattaggcttaataaattcgtctcacggttttcaggtgagttatgaaattagttttttcattaatgtcgatatccggtcaaacgtctgacgtaacacccaaaaattttcttttcacgaactaaacacaccctaagttacaagaccaatttcttctctcttttttttcgatgacagacttttttttcccaatgaagaggacctaatttagagagaaataaattaggggaggtgcatggcgagaaaagcgttgcttgctcttaccctcagccagcagatgatctgctggtaagttttcgttgatccaagtcttcacgcgtcacagattaattaacctggaattcatatgacatcagaacatcaaaatgatcaaacccccatggattattcgagtaggagaaatccagacaagataattattaaagagaaaagggaaaatggacagcaatgacacgatgatgcacaacctttagaaataaatgaggaagggaaatctcgaaataataaagaaaaatagaatgcgaaaaaaaaaataaaaaaactaggcttaaaaggaaacaagaaatcaatttgaaattgggggcgggggggacagaagaaagaatgtcaataaccaaaatcaaataccttattaatgaaagaataaacagaagaagttagcaataaaataaccggaacgatcggatgccaagaaacggtcaaaagaggccctacgagtacgagggcgtcctggctacgtgcggctgcgaataaaccctcaaaaccctagccgccaccggccaaaatcagtcaagactacgagagagagcccaagaagcgacatgatcgatcggaggagattactagattagggcgcgttaccgggcgggcaccgtcgacccaatgcgagaggaaagtcccgaacgagcgagcggcggcggagcggggagacggagacacggccgatcgagggcggagcgaggaggaggagaggagagcagcgagcggcgtagtagtaggctagaggagaaggagacggcggaaggaaggaggacgagaaaagaagaacacgggggtttttccgcggaaactgcggtagaaatcggagagagaatccgcggcggagat

SEQ ID NO: 43205 - DNA, 660 bp, Oryza sativa
agataaatatatatgtctaaattcattaacatcaatatgaatgtgagaaatgatagaataaattacattgtgaaacagagggagtacgtaactacgtacatatacctaacgtaacgtaatggatggaagcggtggggtgtgggtctttctttttttttttctttaaggaaatccgagggtagaaaatacgggtgcaccgtatattagtgaaaatcgatggctagatgttttgttttttctataatttttctagagtgatacatggtgagatgagagtgtttgtagaatgccatataacggtttgagaatgttttaaggatgcttaatagccttttagtatataatagattatcaaaaactaactattatatatcagccccatgtgtcgtgatatatttaagaccacaatataacttataatttaattaaaggaaaacaacggaatcagaaattagatatataatttaaaaataatttagaagatggttcaaggaacattggttggatattttatattattattatagatcttagtttaactatatatatttatatttgtgatgtaatatattttagaaaatcatattttatttaaagatcatcgatttttatgatgtatttttttgtcgtcttttttatgtatatgcgcatggttttttt

SEQ ID NO: 43206 - DNA, 2941 bp, Oryza sativa
aaaggaaatcatgaacctgcagctgctgctcatgcatgcatactagctaattattgatccaatggatgatgtacaatatttttctaaaaacagatttaactaactgcaccaagaagcagatcgagatagtataatcagagctgtcgtttagccacacaggtatcatttccatatgataatgaatagtatatctcatcagcagccatgttgctgataatatacagtgatttttatatgcttgcaagtggccatgccatgttcatatttaattatttcaaccatcatttgcttgcgccgttattagtcccaatctggtctgttgacagaaaatattaccaccctcaggattagctcgctagtcatggtagtgattgagctttcaagctcgttaaatttcctcagtatttcgtttttcattacaaggaaaacactgtgttcttgtagtagaatcaatcactatctttgctgcatgtttgacgggatcgatgagactagactgttactatcagtactctgggacaatctttgaaacaaaacaaatgttaattgcctatatgcaaccagtcgatattgaccgtctcactgcaagaaaacttcatgggaagacgcgttaaaatcataaaatggatgtgttacaaacggtttggaaaaaaaggggtttcatcgtctttcatttaggaactaattttccttactttccgggaaaaaaaggagaaccaatgtctttgtttgagccatgcatgtactccagataaacatatatatttacaaatacacaccaataatttgacactatcagatcagtactatatactatatgtatatatatatctgtagatggaaaaaaagcctacaactttaagtcatcgtctcacccaaccttatgatcatctttcttaattaatcacacaccaaaaagcttaactatctttgagacaaaaacaagtgaaaagccgtttcttagtggggataaaacaaagggtgaagtcagaggaggggctcccattggcgaagcaacgtggaagggccgaccgcgtggcaggaatcttcaatccccggccctttccgcgttttaatgagctcagcgaacggacgaaacccttacgtcggagagagaacaaaaaaaatggcaaagccaaagcatgtggacataattaatcacttcaacactactactgtacttctgtttcaaaatagtataaatgtttttagattatttagcaaatatactaagatttaggacaaaagatttcattttagtcacttaatttagttgttaatttttcaaatttaaattactgagattcccttttaaaatgttagctaatttgattaagtttgaaattattgaaatatataatgggaatcatgcttatatatcgtggtataaatttaagccttagaaatgcttactactccagtttggtaggaactaggaagccagagtagcttgctgtgagctgctactagcatccatcagtttataagctgttggctaagcaagcgtggccttttgtgcaagccgatgtgtgcgcccacctgcgccgccggccgtgtgtaattatcctgcaagttcatatgcacatgtttcagtttggactttagccacttaatttcctagggattttcgttggagtaattaagaacctagcaaaggttttccgtcctagctacagcctgtaagtacacctacatatacatactaggagtatatgttttcttatgtctggattaggatttcatacacaaagaggtccatgtgtaatcccttcattcttaattagatagtataattagatgatttcctaattaagacacttgcagttaaatatttcaaattcaaaataattactacctccatattttaatgtatgacgtcgttgcctttttatctaacgtttgaccattcgtcttattcaaaaaatttatataattatcatttattttattgtgacttgattcatcatcaaatgttctttaagcatgacataaatattttcatatttgcacaaaagttttgaataaaacgaatggtcaaacgttgattaaaaagtcaacggtgtcatacattaaaattaaaatacagagggagtaatatatacaaatatgtgtattttaacatttaaagaagttatataaatatgttactccctccatccctaaaagattattgttttagcctaagattcttcccacaaaaactttagttttagattgggtcacatttttaatactactttttcttcttgttttaaccattgaactataatagtagtccctagttcttctcattttctctacatttttaattttctctccacataatgaaagatatttaacattttacttaatatatgtctttggctagattaaaaaacaaaaacaacggtcttctaaagacagaaagagtaatgaatagtgaagtgcatcgtggagaccgagtcgatgtaaacaggtccagcaaaaagggtcagggaagtattgttaccaaatggtttctcctaatgtgtgcacgcctcgagttaaattttcttgtccactaaaatacgtgaaaaaaaaaagacttaatgattgcgaaagcttgcgctcccactgtatcaaattcatcatatataactatatattacaattgatgatatccgattagtacacatattgtgtatctctacacaatgacttcaggatgtctaagatttgtcaaaggcatagttcagtgtcctaataagcataaatgatgtaccaataacgtgtcaactttaagtgataaaaatagcactccttccctttttgaatatagcaatactagattatgtctaatataataataggttgttatactttggaacagagcgagtaggtgtgtttgttatagaaatccaaatatgaatcatgaacaaaaacagaacaaaaacatcgagccgattcaccgagccactccaca

SEQ ID NO: 43207 - DNA, 557 bp, Oryza sativa
attagggcagatgactgccggagacaatattatctgccgtgaaagctttagagtatctacggcagataactgccggggatttgatacctgccggcaaaaggcattccctacaggactttgtagggcagttaactagtgccgggaatgctttttcctggcagatgagctgccacagaaacaactttctagggtagttgcactgccataggcactatgtcatggtgtagtgccatctctttctctctctctctcaccaccatcgctgctcgtcggccatcgccagcacccatctcactctccggaatcacactcgccatgtcgtcggtgagggtggcggcgcttcaccacccacgggccttcttcgctccagccgctcctacctctctccgccgctagtcgccatcgccagtgagttcgcaggagctcagggcgtttggcggtggtggcttgtggtggcggcggtagtgtggggagggccgtgaaacgaagtgacttgtagctcttccgcacctggagtcgcggctggtgtggagagtccctttctcctctgtcgccac

SEQ ID NO: 43208 - DNA, 3120 bp, Oryza sativa
atttttagttatttaagtaatagtaacaaaaacacattacatttgtaaaaatctattataatgatatgcacatgtactatcactccttgcactccccctaataaaaatgatcaataattataaaaacaaatgattataattctgaagttatatctcttttttagtttgtttgaattgttgtttcatttataactaaataaataattcaacatccatattacccatatttcactatataacaatagaaatatgtcatttgaacatagatacctatcctttgtatagaaaccaaatagaaaaaagaatactaaaaaaaacaagaataagtattatttcacattaaattattttacatcctcagtgttgcacttaaagcgtaatgtgttacgtgttaaaatttaataataaaatcttagattataaggggaaatatctgaccatccattcccacttaaatttttaaaaataaatcggttattacttttcattcaaattggaacaataattgctcaatgttccattgcaataaataatttttaagtgcttagatattaatgaccttccatctatcctatagtgtggcatgttaatgcacatatatgcgacactaagataggagtatataattggttagaaagttatattagttactactaattttttttgacaaaattattactgttaaattaaaacttactcatgttgactaggtattttcttaaaaaaaacatattatatatcacacatatcataggaaaggaagcaaggtctacgatatgactatttattcatatgtaactatgtaacaaattgcaccaatgtgaatcaacaaggaggataacttgatgatacaaaaacttatcttctgcatataagcattctcgtgtacacattgtgcacataaactaaaaagtatcacaaaaaaaatctagaaaatattgtcttacatctatgtgaaaagtcccagcttacaattagttatatatatgaagaaaaagacaaaaatatgatagaattatactcttaaacctgtcagaatttttatcttttttaggctaaatataattaattggaggttaaaactttacacataactttaatactgttgtaagtatatgtataattttttttagaattttcaatgaaaattgttagttggtgtgtacgttgtgtacacaaaatacttttgtatagaatatgtttcttaaaaattaaacatacttatacaaacctgggtacacatgtgtccaggtttatggtcaggattgggtttcatgggacagagggtgcatttatttacaataatattccatctgttccaaattataaggcctatatatttttacacggtcttcaataacataatttgactagcattttattccattatgtgatccaataaatataaaattagcatcacatgaaagtacttcaaaaatatgaatctagtgatataacatgcatattacttagcatagatatagttagtatgactattagtcaaaagctagcgagtttgatttcccttaaaaagagggcgccctctaatttgggacggagagagtaacaatttaggatatgtgaaaaagcccctaaatattgaattaaacaagaaaaataacatacttttaatttataatttgttagacatgttttccaaacaaactaaacctaacctaatggagagtatatataattatttataaggatgtattagtatatataattatttataaggatgtattaaatattatatattttaaaagctaataaacaatatagaaaatttatgtaaccaatgccatgaacaaatttatgcacaaataatactttttaaaatatggcgggtatcatctgattgattctccgctctaacaagctttttaaatggaatctacagtgcacgcggggtacctagttgcttctaatattacttggctggtcaacttccggatttaaaagtctgcactggctaatcggtcgctgaccttctgttttttgttttgacagctcggctcttcataattgatgatgtaccttcccttaatcaaagctatgccaatactagacaggcattattgtctaacattaacgatcaatctaaaaactctcattatttaagttgttaaggtttttttccccctgggaattaagttgttaggggcaatttcgtttctacccctactttgatgtctaatattaattttacccttactttttagggttttcgtttttaccctcacttttttgaactgaatgcttgttttgcccttactttggatggtgaagttaacggtgttaagtaattgataaaatgatatttataccctctcatatatgtacataaattatgttttgccccattttatacatgtagctttggaactttatttttgggagtatatttaaaattagatgacgcacattgactaatataacaatttggacaaattctgaatttgatggaattttgacaaaatttcagcattttgatagaacttaaacaaacttttgacaatattttgtaaaatgtaattatatatttcctttagatattagtcaatgtgcttcatttaattttaaatatactccaacaataaagttctaaagctacatgcataaaatggggacaaaaacacaattaatgaacatacatgagagggtataaatgtcattttatcaattacttaacaccgttaacttcaccatccaaagtaggggcaaaacaagcgttcggttaaaaaaaatgagggtaaaaacaaaaaccctaaaaagtaggggtaaaatcaatattagacatcaaagtaggggcagaaacgaaattgtctcaagttgttaagttggttgcacaaagtctatggttctcttatattgaaactggatggtactccatgcggtactgccggatgttgtaaacttatatactcataaacaaagtcaagtctagaatgtttggaacgtgaactgctttgttatgattagtcagtttatatttttaaaacgagtggtacagacaaattgtatggatggcgcatcaacagcttgtatttacatcattagagacatgttggtgtcatcgcgctaggcgaaaatttggagtctgctactttggttctcgct

SEQ ID NO: 43209 - DNA, 3322 bp, Oryza sativa
atcatttatctttgggccgatgtcatatatgcatcgatcggcagtcatgaataagtaagaaagaactaaatctactcgatcggctgtagatattaacgatatgtaatccttatgtcgatatatacttaaataaagtgattgggatagattggtcgctatgccgagatagtataaatcacttagatcgaaatatatattaacaacaggactatatatgttcatagcatagccgattagatggatctagcgtgtatcggctaatactccgataccactctatattaagatatcaaaacaagtaaaatataccaaacaaaggcctaatatacttaaatgtaacaagatcttaatataaagggcatatttaacatgtcaatcaagcatataagataaatgtaattaaatcaggtaagatcggctgaaaccccgatgctaccctaatcgacaaccaaaggcaggctagagattgagattctaatctcgactcataagatcaaactcaactgatgcagctataagtatgaaaagaaggacaatatctagacaatcaagccgttggatgtttcatagagtggtagatatcatatataatctaagtcaacgtcagtattcaacgccttctagtaacagacgttagccgattaacggttagatagcgatattgccggagattacataagatatatgataactcgatgaattatataaacaagattagagtatcataaagatggaagcactaatcccgagaacacaagccgccataacaagttttacctctagtcgaagatcgaaaccgatgcagctcaacccgaaagcaagaactcgtcgaaacaaaatgaaagtaaaagggtggcgatgcgccaagattgtattaaacgtgtgttgttttattacatggggttcggggtctatttatacccgagattacaaaatatgtccatatcggacacaactcttatctctaacaaactctaagataccataagtttttgcggcagagttttgcccaaacatatatctaaggaaattgcataaaacatcctaactaatagatacaattgcattctcatgactcttatccatgcgtggaaatcctcatgaagctcattgactcaaccagacaacgtattccttgtcatattgtcggattcggctcaatcggctaaccctgtccaactcggactctgccgatataggtcgcagctgattcggacttcagccgatcccactctgtttccggaacgatctccatctcgaactccacttcaattccttctccacctccgatacttggattaccaaatttggtcgttaacacataggtggcggagggacgctggcgtggtgctggtggcaccaaggggttggtttgggtgatggtcgggaggccggcacggccgatggtgcggaaggctgacacgacgacgatagtgaggccggtgaggttgtttggcgggggatgtcggtacaacaatgaccatgtgccgatggaggatggtcggtggtggagcattggagcgttatctatgagtcggcagggagcgggcggcaggtgtacaacctagctcgatcttgccgggccagcaacgacagtgttttaggtgttgttttccctcttggggcactatcaagccatccctctccctcgggtggactgctgactggaaaccttgtcttggttctcctcaagacctcgacagataccgacgtcgatgtttagcgttgcttttctccttggagacgtcatttagtatgcctcctgccaaaatctctcttggacatcctgcgcgtgccctctctagatggatatcctcttgcgctggcgccctagtcgatgcaagcaagccatgttggtgggccttgttgtgggggggtggggggtggggagggagcagttccatcttctctctcactctcttcccctccgaccccaaggacgtggatagagttgtgcacggtgctcattgttagggtttggctttggccggctcaggtgtagcttctttgttggccttgcagcggctagtcacccttagcagcggctagtgctagggcctactcttggatcctatataggtgctgtcaatgtgtggtgtgtggtcatggtgtttttttttcttttcctggttactatcttcaagagtgctagccttgtaatttttttcatactctattcgatgaatcatcgtaccgtcttgtgtggttcgttaagaaaaaagaaaccattatcaaagttcaaaagtattttcaagatctttcatgactgtttgcttgtatagtttaaaatactgtaatttaaattagtctttggttctttcagtctatgtaaatagtgataaaaaatctaaaaattagatatgtaaattgtaatgcatctatcatcctaccaaatttcaatccaatatacgatatatcgactctgttagagagagaaatacccttaaagaataaaatggactattctcaatagttgatggttataaaatgagaacaaaaaagtttaggggttatatgctctgttaaaatagtttgacggagtaaactatactcatttcttaataatttaaaaagagtgaattatactttggttcactttttattatctaagttttactttgaactacccttagacaatctttttactttggactagataagattacctttgttacactttatacccccaaagtttcttctctagttgtattgacactctcatctaactaataatagcgtatgtgtaagtcggggtgattgccagaatacaactaccgatgtgcaccagtatatcgttgatgttgttgaaaaacgattttggggtgatccaaagtgaaacaaaggcaaaataacctaatccaaaatgaaaagatgagctaaaggtgtctaaagtgaaaccactactacacaaatgattttcctggacatggagccttttagattgcgtgtagacgataactcgatccgcacgagaaaatcggctcattttcccatacggtccatttaagaggaccgcacgaaaatttttcccgtaaaatgagctgattttcccataccctattaagagagctgcctataaacataaccatcccatttttccctcctactacttcaaaattttccaaagtgccgtgcgcctcgatcccctctccctttttattcggcgcagcatgggacgtcggactcggtgctcggcctgcgcgtgttgacgagctccgggtcgatgtacccggcggtcccgagcacgactttggttgtccgtgacttggcgccattgtcgacgagcctcgctcgccaggccgaagtccccaagcttgggctg

SEQ ID NO: 43210 - DNA, 1168 bp, Oryza sativa
aaacgaacacagccttggtgttgtaggacgagccgagtatgatgttgcttggcttgatgtcgccgtggacgacgcactgctcccactcttgctgaaggtagcggagtgcagagcccaggccaatgatgatcttgtacttgttgatgaaagattagcgtagtgaaaatgagagaattgtttgtagctatgtccgccaacttctggtgagtgtggatagatttgaattctacatgctaaatttaatgttgttatttatatttaggaaactacacagctgaacctaaccaactgaagatttagctagtccttaattttagttccattattgtctcaaatctacctgaaaatataaacagttgattaggagtcctaaaaaaaaaaaactacttctcaactgtggaataaactcaaatgagtactccctttactataactacgtgagaagtagctaaccttcatagcctagtgtttagaagaaaactacttctaaacaaaagttaactgtgttctcaactgtgtactctctccgtcaactgttaactgagtactcatttacctttatattttttcataggctatgtcaactgttgtgaggaccctcaggagtcctcaactgtgttatagttttcttctcagtcgtagaagtagtttttttggttgtcctggcctaaccttcatagcctagtgtttagaagaaaattacttctaggactgtaaacggcctttcctacaccaaaagctagctattgaggtgaggggctcccccacttatatcttaggtcctttatccttcacattgatgtcccttagcccttcaccatctcccccttcgcacattggtatctctcagcccttcaccatctcccccttcatacattagtgtcctatacgggccccaccggcccacagtccatcagttatacgggccccgcatgcacccacggtccattaggtcttcacacactgtgtccatcgggccagagatgttaacctagctaggctctgataccaattgtacgatcgtaaatggcctttcccaccccaaaacacggtcttcacacacttcacacattggtgtcctatacgggccccaccggcccacggtccatcaggtatacgggccccgcatgcacccacggtccattaggtcttcacacactgtgtccat

SEQ ID NO: 43211 - DNA, 1369 bp, Oryza sativa
ctaaaaacacataaaatcgacacctttaagcaattataggtatcggttttaaagaaaaaccggtattatagtataggtgccggtttttatacaaaaccgacacctaaattataagtgccggtttttaaaaactggcaccttaaataaattataggtgtcggttttgtataaaaaaatagcacctatatggagccgagccggccatatccatccgcccgtccttatccatccgccttatccatccatccgaccgagtcgctcacgtctctctctcgctcttgctctctcgcctctctctctcgcctccctctatccctctctctctctctctctcggcggcccggcggtggcccgtcgaggtaggcgtggcggtggctggcaacggcgcgccctcccctccgccggatctagctggaggggaggtggtggaccttggggacggccgggcggtggtccggtggaggcggttgcggcggccgcgccctcccctccgccaaatccggccggagaggaggcagcggacctcggcggaggcggcacagcggctggcggcggacctcggcggaggcggctggcggcggccgtgccctcccctccgctagatctggacggaggggaggtggtggacgtcggggacggtcgggcggcggtccagcgaaggcggtggcgccagcggcgcccgatggatttgttggatgattttatagttcttttagatttttttgtgatttgtggatgattttatttctgaatatgtttcatctgtgatctgtgatatgtgatttgtgattcgtgatttgtgggggtttggggatggagtagtgacgatgattgtgagttccggctcgattcgagtcggctctttttttttttggctcgtgcaaacttataggtgccggttctattttggtataggggtcggttgtttttattggtgccgaccaataggtgccggttggaaaactggcacctatagccggttcccaagcggcacctatgatggtattttactagtgtcaggtgtttggaattttcgaagatatcacttagggtcttttttttttttctgggcatgtggttttgacaagccctatacatatctttgtataattttctcctattatatcaatataggaggcacaacttttgcccactcttaaaaaaagatattaaagaaagttccaaatgcatgcagatgcgaccggaatgcttttgaattggaacagggaccttactggaaaaggtgactcacacggccggacacctctccattttgctgtatcgatagaaccacccacgaagattccatattaccacaagatattgttctccatcatgcgccacatagacatatacactctttgtttgg

SEQ ID NO: 43212 - DNA, 667 bp, Oryza sativa
tttgcgccaccattgattggtggcctccagagaagtgcaattatgaccagtgtccatgggggcaagcttctatcttaaatttggtaaattgctaatttcccaagaatgtgtgtgttttatcatgttgtaattgatatttttgcaaagaactaattttgatccttttgtgaatttcccaggacttgactaatcctttgctagctaaagctatccaaggtgaatattatacctattttctgcgaacaattttctactgtaactaaaaaaaatggacaacagtagggaatttccatactaaattgcaaataggattaaagttacaaagtcaaagactcaaagaattcttgtcaaagatttatctgttcctttgcaactacatatgccagcaactgtgatcaatttcattctaccgtgtggaggtttacttgttacactgactaatataagatattagagggtaaatcccgttttaagaaacatattgacatttgtggttcattctgtacctttatttattaagcttggaatttgtttagagctactttccacaaaatgtatttgccttcttatggttttatacactttcccatgattcatggactttttttcccattcatttgtatttggagcatttagccctcaacgaatcagacgtgtaggttcctta

SEQ ID NO: 43213 - DNA, 549 bp, Oryza sativa
ccatccgtgttgtttgagaagcactcacctagtcgttttagaaaaagagttcaaataaacccaattgcaaaaacaacagccttcccttgaagcctgcattaaacacttatttcccctggcttgctgagtactcccgtactcacccttgctctatataaatatcccccccagttgctgaagaagatgaagcggatcctgctgatgaggagttcttccaggagcaagccggctacgatgagttttagggtttcggcctagttcccaagtcgcgcctgtgatgaatggtccaagtcctggcttccgttttccttttgtaatgcagttgtgagctcgggatctgtccgcagcccaacatgactgtactcctactctataataaagagacctctgttgctgtgatattctgtctccctgtgataccagcactgtttcctgggactggtatcgattaacaggttaaattggagcgtcacgggctagtcccggtcgggactagttcggggcgtgacaaagtttgaggacctgaacggtcgatttgcgagtttagag

SEQ ID NO: 43214 - DNA, 1433 bp, Oryza sativa
ctctactacaacaagttgatgataggaaattaattaaacatcgtccatcatgaaaaagggaaatccaaacctagtgagcatatgtaatttgcagccatggggtggtataggaaagctcaaagctcgttgctcggatcgattcgtattgagctgtttgacatcgtagtaataacgagcagagccagattagacttttagctcgttcacttaacaatgaagcccggtgtagaaaatacgttccccgctaatattagttagaatgtgaccatatgtgttcatatctttttatattcagagtttcttaactaggacttaacgaaattccaaattaaactatttgcaattaatgagtagttcatgtttataattatgttaatatatactctctctatccagtttgataatcatctaagattttttaggtctacctaaaatgatcattctctaagagcacccgcaatggtaaagtaaggtgctctctataaaacatgtacatctcagcaatagactagattaatagtaaaccacctcaatagtatgtctacatgggtatctatagctctctcatgtattgcctcatttttctctatagactatctctaagttagtagatagctttgctctatctcttcatttaatatcttccaagtaggaaaatatactgacatggatcttttgtagagagcatatagataaccattatgggtgccctaacaagtgcttctttatttatttgtgcagagagtattctttatttatttgtgtagagagtaaatgagcatcattaaatgcgatgcatgcactcaactaagattaatttctattggtataactacgtgcaatatttaaaacttgatgcaatccatgagatacgaagtaacgtactccctccggtttcattttaattgacgttttggataatgacacggtctacaaaatatatctttgaccttatttttctactataatatatataataaataaatgtatgtttacttttattatagtgctttgaaagacaaatctatatatgttgttctagtttatttatactaaatatttttaaagttattgatgattaaagttataaaagtttgacctcaaccttatcgaaaacgtcaattattatagaaccggagagagtagtagcttaaccggtaagaattaattacagtataatgaatgtttagttgtccttggtctttgcgctctttgtttatgtgatgattaaaatggaatggaggaagtaagtaattagtaaatgttataatttgtagttaagtgatataaatgagacggaactaattaccgagcccgtcataaaccgggctcgagaaaggcttttagcttctttaaagttaacgagccaaactgagtaggctcattattaattattactccatcccgtttcatattataagttatttgaatta

SEQ ID NO: 43215 - DNA, 1236 bp, Oryza sativa
attcgagctcggtacccgaattatttttcctagttattttttttaagttcgacaaaatttataaaaaaagtaacatctaaaatgtcaaattagtttcattaaatcaagggataatttcatttttgcccccattttcatctctaatattgattttgcccctactttttagggttttcgtttttgcccccacttttttgaactgaaagaggtgtttgcccctgttttggatggaggttagtgggaccgaatttttggaagaaaataaagaattttcgatttattgaattacctttttacccctgtgaaatgttaaccatacagaacagggatactactcctctcggcggcggcgatactactccagaccgcgagcacgctgtgaccgcgagaaacaagcggcgggcgccggcggcgtatgagagcgggcgtcgcccaggctccgcttctcccggcgcgtgcagaagagcggccgggtagagggtggcgcggcgtcatccaggggccctagcggcggcccagcggcgcccaaggcggcggcgagcgggcggtcgcggcgtcggccaggggccgctcctcccggcacgtcaaggagagcggtcggggagagggcgtcggccaagtggcgccctaggtggcggcggggagaggggtaggcggcgggggagggggtaggcagtgggggaggtggctgggcggtgtcgaacagcagggcctcggatgcggctggcgtcggccctgtgatgtgagctattggtgaatcacggaggaaatcttgcaaatggaggagattttcatggaagaggttaacaggtaacccctttgtgctattcttgtgactgtagtacttcatacctttgtgctaattttgtgagtgtagttgttctcagtttggtttgtacaacgaattagctagtagtaatacaattcaatgtggttgagataatttaccaatgtgccaatgtggttgagatcatccttgttctgttagtaatacaaaatgtgaatgttgtttgtgctgacttggttgagataatttaccaatgttgtttgcaatgttgaaatctctaaacctccccctcaaacaaacttatatatttggaattgtatttttgtggctattggtaacatgcaacaattagctaaatgtatatttttgttgctatgatttgtaggacaaatcacagtgagttgaaattagttgttagagatgggtcatttttcagcttgccagatgaa

SEQ ID NO: 43216 - DNA, 549 bp, Oryza sativa
tcttcctagcatgtttttttgattttttttactgacgacaaataccatagttttctcccttttttgcttttcttttctcacgcgttttttgcttttttttaatgttctttttttgctttttttcccaatacatgagaatataaaacgaaataaaagccgtgtaatagatggcaaaaaatcgatggatcctatccgactcaagcgtccatcaattaagcgtttttttctgacagttttttctagagcgatttattttttaatagacggtgttttttcttgcgcggttttttcaaatcattttttagaaatggcgcattttttcttacattttttttccttgcatgcttttttgaaaaaatttaccgatgatggaaatagtatttctcgcacgtttttttaatggaagatggaaaaaacctttttagcatttttttgcgtttttttctcacgcattattttgaaccgtttttatttttctcgtgcattttctctttttaaatagttagattagattatagatagagaagagatatatactgttagaaatcg

SEQ ID NO: 43217 - DNA, 974 bp, Oryza sativa
ttttacatttctgctaatatatatgtatatattactcctaccacatggtatatatatggtgatatatagttttccttgttagattttgattaatatttagtgtcgatcgttttctcttaagataaatacgtacctgtacgttctttatatacgtgaggcagtgaaaatgtgcccaaaatactactagtactactactccagctacctggcaaaccaacatcagttatacatgctccacgttaatccgtacgtttttatattgtagtggagtactatatatcataatcacatctaccaatacactgtcagttgttgtttaatttgctgcatctgacagtatgttttcaatcctttgccagctagtataagcttgtgtgtgtgtgtgtgtcccctttaatttggccacttaattcggctgagtaaacaagcatatatatagagaataatcgttacttgtttcttcttctgcgtccgatcccgtggcccgtgattgcttgcaacgaccagcagtactggagggaaagtattctaattcctcgagtggatgttttctcgtttgctcaaaaaccatttaaacggttatgaaaaattttggaaaaaaattgacaacattcatacaacacatatatacaactttacagaattttaagtctaaactcaactcacacgtcgagatataaaaaagacaaattcagcatatgaatagtagcatactgtttatatctaaatttgtcttttttgtttctcgatgtgtagattgaatttgaacatgaattttggtggactagtaggtatcattatactctacattgtcaattttttcagaatttttcacaactatttacatcgaatttggaagaaaaatgtatactaggggatatccccgagagattagaatccactgctggaccacaccaaaacgagcgcaagatcgatcaagcaaaaattattggcccggcccggccacgctttgg

SEQ ID NO: 43218 - DNA, 1552 bp, Oryza sativa
tcgagctcggtacccgattagcggcaaacaacaacagatggatgcacatgtgaaaccctttctcctggagggaatagatagatcaaataatagaagcatcggtctaaccttgtacgcataacgaacataaaccaatggcctcatcgtttggcatattcatatgcttatcagccaaaatttaaattttcaacgttaaatttatagctgattttaggatttttttatcgaagattatttttcagcctttgcttttagatcgctaagaacatatatataaaagttttattcacaaattgattttcgtttgtaaatatgccatttggcatattcaaacgatgaggctgcaagtacggccaagtacgtcacgcatgcatatgcatgggttgggccaggaccaagcgctagcggcgccccacatgcatgcagcagtgatcgatcagcctcccaatatgcatttgcatgcgagggtttgatcgatattgcatgcatattggtacggcacccgagacatattggtacgccccatctttttcttcgcttttttctcccctccctctccagatcccgactccctcccgtttttttttctttttcttagctttttttctccccttcattctcgacgccctcctcgtgttttctttgctttttcttctcccgttccggtgcccccctatctatccgtctcttattttttttcccatggaataaaccttcattttttttctcatttttttaagaataattcaaaacttggacacatgatctcatagttcatagcaaagccctcctaaccaactcaccctacaacactatgtgttttgagatcatatattgttttttttatctatatatctgttcaaattttgtgaacccaaacccgttatgtactgtaggaatcatatcttgttactacaattcggtagtaacattatcgaacaagtgcagtaacacgacacgttactgcgaaatttacaggtcgttgctatgaaatttatcggtcgttactgtactttttgcagtaacatcatgatgaaactgtagtaacagagaacatatgttagtaacggtagtactatagtaccactgcttatgcattgctaaatttttaaatctcaatcttatgtaacatacaagttgttaatatctatatgaatgttggtaatgctagaaagtcttataacctgaaacggatgtagtaatttatagaaacacccagacatgtgttattaacgtataaaatctatatgctttataggtggattacatgtttgcttgtttccatcgtattatcgttatggatgctctgcttagattaattccctgcttttgatctatatgctatggagaaaaccgtgtgagagaaatcactaaaattgatgggaaatcctggattggagacatgcctaattcggttgagccgaatcggccgactcttccgcctccctcgcatctctctgtttctctctttctctaatgacgccacgccgggaacacggtgacatagtctcagactgtttggctggacttggagacatatcgatcgtcgttc

SEQ ID NO: 43219 - DNA, 693 bp, Oryza sativa
cttcaagtccattagtgttctgcttggcaactttagaaggatgagaatcattaaatactacctgttgtatacatgtggtgtaaacaagatatttatttattttcatcactactatagtgagccttgatatttagagtttagctatgtagaagctaccagtttagcatgtaacgcttgtaaataatggcaagaaaataacagttttatgtacaagatagcttgtccatcaccatccaacacaataacataactgctataaaataatattacccaagaagtgacacaagctttacagtggattccaaagtaaaaacacactcaaaggaatcatgacgttcattctcaagcacaagtcaccaccaacataacctactgagaaactttgcaattcacatgcttggacagaaatagaaaatatggacagtacttcaaaacagggaaagaaacttactgttgccttcagcctaaaagcaaatgaccttaaatcataatcattattcttcatgtcccagatgaattcatcaaaagagtctgggaccttcaaatcaacaggtacttcttcagaatttatttcgtcaagcatcctatacaaatccctcatgaccctctgcgcattagaatatagaaattaaataaggaactaagcaaatccacaaaattgaaaggagaagggtaatatcagaggagatgtga

SEQ ID NO: 43220 - DNA, 712 bp, Oryza sativa
atgatacttaaggacttatctttctctttgttgtgcggcttgatccatcataatttatacatgttcaaatttgttcatagttgaaatttgtgtggtcaatgacttgctactaattcatgagttgttactatcagattgtctaggcagacggttaggtccacggcttcttggtaggggcaacgatggctccatggtactcacatctcctctgatattacccttctcctttcaattttgtggatttgcttagttccttatttaatttctatattctaatgcgcagagggtcatgagggatttgtataggatgcttgacgaaataaattctgaagaagtacctgttgatttgaaggtcccagactcttttgatgaattcatctgggacatgaagaataatgattatgatttaaggtcatttgcttttaggctgaaggcaacagtaagtttctttccctgttttgaagtactgtccatattttctatttctgtccaagcatgtgaattgcaaagtttctcagtaggttatgttggtggtgacttgtgcttgagaatgaacgtcatgattcctttgagtgtgtttttactttggaatccactgtaaagcttgtgtcacttcttgggtaatattattttatagcagttatgttattgtgttggatggtgatggacaagctatcttgtacataaaactgttattttcttgccattattt

SEQ ID NO: 43221 - DNA, 695 bp, Oryza sativa
cgagctcggtaccccgctagggctgtcattctggcaagcggcaacggcggcagtgctggttgcctcctccgcacgcgcaacggcgcgaccggcgactctcctcgccgccggtcaccggtcgcctggcccgcctctcgcgccccgccagccaccgcatcggcgcagatcgacggacgccgagacgcgcagccgcagtcgcgcagaggcgccgagtgcctgagggctcagccagccgccgaccgccgcggccgcctggcccccctgcccgtctcgtcttctccagtctcctccaatccttcgtggcaggtctccaaactccggctccccgctgcggcgctccacctccgactccgattggcgattggacaacactgaaggtcagtgactctgtgacgtaactcaataattttgcctcactgcttattgtcatggctaattagttagctcatagcttaggttgccaatttgtgatttgtgaatggctgaatgggaataaatcgctgctgttattgtaggattggaattagcttattgggtgaaacataaagaggattggggattggtattgacctattgtaatatttgctcattttgaacttgcttgttaaattagtcggctattgatggtataagatactattggtatttatgtgtcgccttttattcaaatttgtacttgtatatgagaattgccg

SEQ ID NO: 43222 - DNA, 698 bp, Oryza sativa
acggtttctagcagtgagaggagttctggcgctcccgggaagggaagactcacacatgcattaagttatagttaagtttaggtttacacatggcagtcctaccgatggcgacaccactgtaggcacccgcccctcgcggtcctaccaatggctgccccaccgtaggccctgcctcacacacatcaagaaaaccactatgcagagatactgcctccgctcggctatttactccgctaggtctatacccatacgagaagtacggttgtactggagtcgtttcatgcttagcttcatggctcggtccttaattgaccagggacggcactagcctttaccggacaccacccaagtcctccagccgccccagtcgaaaacatttctttagttttaactttctttcacaaatcatctcatcaatgtcatggcaatgtggcgctcatatctccacatgccgtatctcaactaccttccccaaggtagttacccaaacataaagcatttgataaatatgagaatgcatagatctaaattagcagtactaagcatttgtcataagtgactagggactcatacgtaattatgggtacaagggaataattagataaccaataatcaaaggcatggcataataacaagtaggacatttatcactacatgcaattttatttataaacaaaacaatttcataattgggatca

SEQ ID NO: 43223 - DNA, 714 bp, Oryza sativa
tttctcttcgtccatggaggaagctggccactgccaccggcggccgcaacgaggacccctcgtccccgtcgccgccattgccgaggatcatcatgtccccgacgcccctcctcctcctcctgctgctgcagcagctggtacgtatatatatcacacacatctatatatctccctctcttctgtataattttcttcttatgtttatgtgtatatatatatatatatatactgtatgtctgtatgcgtgcttgctctccttcttgctcatcgatcagaaattcggcaaaatgtggcgaaatttataattaaacgtccactgctggctgctggtatgtattcaagtgctaattttttcttcttcttcttcttcttcttcaccaatggagatcgatcacttctgtttctcacttgcactgaatttcaattaatttcatgcttcccctgcaccactaacctagctagctagtcccaagaatatgccgatctaatccgccaccatcctaatcactccggccaatttgcttcccaaaatgccgccgtcgatcattacattgggatgaacgacagagaaagagagaggagcagattaattagtgctactacaagacaccgcttcaacacaacccaacggctagtttcaggccactcacatggagtactcctacgcattagttggtgataaatttaatcagcgattttaagcatatatatata

SEQ ID NO: 43224 - DNA, 1343 bp, Oryza sativa
tgggtttgaatgcgggagttctctaagcgggaaaaaaaagcttttgggaaaaggttacaaggaggggaacatggtctgaagttgtatgagttaggctttgaagtgctgagtttggtaggatagagttccatggagtgttgaagaagacgattgatcgatccgggttagggtagggtttaatgtataggctgtaaatcaggggaatttcgaaaatagctagcgagtgaagagtatcattgaatttgtttgcctatgagtgatcaaagggccggggttgtttttcttgaagtgatgttaatgaggtcgaagtccccaagtacattaaactatgtaactatgccgacataattgtttggtgaatggaatatggttcattttttttgttgtgtcgttgtttaacctctgtaactatgccaaattgtgtggtgattggaatataggtatatatttttctggtgtcaccgattaccctctgttactatgccaataattgtttcatgattggtgatgtgggatgcccaatgtgctgtcttttgacaatgtctttttatatcgtggttctaggatgcccagatacggctgatgggtgacgtatccgtatcggatacgccatcctgattactgtgattttaaagaaaagaaagtagttcggatacttctcatatacgtgcgtatcccgtcctgatacggccaaaccaacgcagcaatgctgctccgcatcacacggacggaagcgtcgacccaatccacccgcggcgccgggaatgcgctgcctcaccgcctgctatctcactcatccccgaagcagtccgaggcaggcgcagccgcgcagggcctccactagccggctgttgggttccgccgcgtctcgccatctgagctacaggatgtccaccggcatctaggcgtcgttgttgccgctccccggcggagggcctctgctggtcggcggtctctgcatcacaaccattgggcgaagcgtctccgccggcctccaagcccgtcaccaccgctaagtctcgatctgatttgagttttgttactgtatgtgttttcccttctcaatttcttagtgcaagactgcaagtgctatctcttttcttagatcccgtgaaatttggaattggaagctcaactacttctctcctacatacaacacattatccatgggatctacctgatgggcaagatttcctgtgatagcgctaaaagatttttggtgcattagacctgctagatgatatagcactgtcaatgatgctaacaccaattaaacttattcagccattgagtcgaatttgataccctgactagttcatgccatgtaatgctatatctttttt

SEQ ID NO: 43225 - DNA, 1122 bp, Oryza sativa
  unsure (1)..(1122): unsure at all n locations
tgtttttctcgtaagtgaaaaaagcaaaaaaaaaaacatggtaggagaaactgttttaaaaaaaaggcgcctcttcaaaaaatggtttgagaaaatcgcgcaaaaaaaaaaccattgtttataaaaaaacaagccgctcattaaaataaaaacattgtcattcacatgattatgcatgaaaaacgtatattattattagattttttttacccgttgcaacgcgcgggcatttttgctagtatatatatatatatatatatatatatatatatatatatatatatatatatatccttatatggtactagtattaatatatatacttatatggtactagtattaattaatttcttgcactgcaaacatgcatgtgcattcgatcatgcacgtgtacgtagaacaagcggactccacgatgtcggtgttagctgggttactagctcaagatcaggatggtgatgatcaagaggttactagtcatgcagcagctgcctccacgcagggggacgcgaacttcaccggcggcctcgacggcgtcgatgatgcagccagcctttgggtgcagccgaaggcgaagaaccctcttgttgatgaccccgacttgataaaataaaaaccccgggggccctttttttggncctgggaacgacccctccctcaaacttaaccggtacgtacagctacggatgtttctcctcaccgtcattggtgatccgcgcagacagcatcattatatttttttatataatagcatatatgttttcgtagtatattattaaaatatattaaaataataatttattttctcatataatataatgagactctcccgctggcctagtatggatttcaccggtgcgtacaaacgagcttgctacgtactctctccgtcccaaaaaaaagataaactttaggttttcgtgtccaatgtttgactgtccgtcttatatgaattttttgtataattaatattttcattgttgttggatgataaaacatgattaatactttatgcgtgacttatctttttaattttttcataattttttcaaataagacggacggtcaaacgttgtatacggaaacccagggtttgtcttttttttttgggacggagggagt

SEQ ID NO: 43226 - DNA, 780 bp, Oryza sativa
tggccattgcttacttcttctgtaaaattgttcatagtatatttttctttgtgtctatggacgacaagataggtctggatgcatttatcaggatgttcgggtgatataattctaaagttgatatctttcaacgttatgaaaccaagtttgccttttgacttgctgcagattcttatctgatataccaatctttaggttaatgctaattgttgatttgaatatacatattaaagatgttcttggccatgtgtagttaattcgtctaaattttcctctatggttccagtagtagagttcttgtttatgaaggattgtgttcagcttactccgaattagttcatgtaagcattgttccactggagtgaggtgcatctcttcttctatgatatccattaggtcaatgatgagctcccaatctttttggatttctaggggtttccatttcttcttgcaactagccttgttccttttaggtttgactgctaggaagcctgcaacatcagtaacatttgtgtttttttcatgcggcttgttgtgatgtatgtgaggaggtctgggtttgaaatgcgggagttctcgaagcggagaaaaaaaagcttttgggagacggtaacaaggaggggaacatggtctgaagttgtatgagttaggctttgaagtgctgagtttggtaggatagagttccatggagtgttgaagaagacgattgatcgatccgggttagggtagggtttaatgtataggctgtaaatcaggggaatttcgaaaatagctagcgag

SEQ ID NO: 43227 - DNA, 866 bp, Oryza sativa
tgctagaaagtcttataatatgaaacggaggaagtagcgtaagaataaaaattagaaattatacaactctaaatttgtcatcatctcaaatacattactaacatacattatatttcaccttcaatatagcatcagcttaaaagcttaaaagcttttgaccttaggaacattctcgtcttttcaaagaatttctctctccaaccgagttgaaattgcccttcagcaaattaccagttttttatacatttttacgatgtctaccaacaaactacacaaattttgagtgttctgtagcaaattttgccaagtaagacatacggatgcatatataacagaagtttatttttcccctctatccagcttatatataaaaaaaacataaaaaaattaataatctaccactacatatttaaaagagtaaaatccatcaccggtccctaaacttataccgctgtgtcatcccggtccctaaacttgcagatcactcgtttaggtccttcaatttgttcagttgtatcaccctggtccctaaacaggacggtctaaaaactttatatcaaaaaataattcataattttttcatgtgaactctaatgaagacaaattttatatcaaaattgtagccctcgacgcgacctacaactttgtagttgaaaagtttttgaattaaaactgtttagggtcccataatattgttgcatgtttatagattttgaaattttaattttaaaattacattttgggacaaaaaatgacttaaaataaaaacaaattcaactacaaagttgtagatcgcgttgagggctacaagtttgatataaagtttgtcttcattagagaacacatgaaaaagttataaattattt

SEQ ID NO: 43228 - DNA, 642 bp, Oryza sativa
aaatatattaaaataataatttattttctcatataatataatgagactctcccgctggcctagtatggatttcaccggtgcgtacaaacgagcttgctacgtactctctccgtcccaaaaaaaagataaactttaggttttcgtgtccaatgtttgactgtccgtcttatatgaattttttgtataattaatattttcattgttgttggatgataaaacatgattaatactttatgcgtgacttatctttttaattttttcataattttttcaaataagacggacggtcaaacgttgtatacggaaacccagggtttgtcttttttttttgggacggagggagtaatgaataagcatcatcattgtgaattgatgatgattatatatcacatgtgcgatgatgttgttactatacatgtgttaaaaaatatgatgtgcatcccctccatgcagcagctgccatcggcgccgccagtgtcgaatatgatgtgcatccaaacggaggccagggaagaagaaggtcaacaataagaagaagaagaagaagaagaagaagatcagtggtatggaaatacatgacattagatccgtcgggaaacgaggcatcgtgcacctactgcaccaagaagctgtcggctaatt

SEQ ID NO: 43229 - DNA, 672 bp, Oryza sativa
agaagagagcaactgcagattggcaccaaattaagttcacagaaactgatctcagaaaaatgaatgacattttcttaaagaacaaatgtgactaacttttaatgaggccaaaatcacatcatacttaccactaactggtcagaatatacagtaccaactgcacaaaatgggaataacctcaagttgtgcacatgctactaaccggtaagtataactgtataagcaagcacaactggccaccaggctcagtttcacatcaagccatatttcgcaagaaacacccaagagcaaaagggccagtgcactactgtctgcaccaatttaactagcatttatttacccagaaatcatttcaagatatatcagctatatataatggaacagtacattgcaggaactgagcaaaactgctctagcacacacatccaagccatggcctttcaatattaaaaaaaaaaacagcaataacacactcatagatcagtatggcatcacatcaaggctgccataatctaggcaacaaccaaattacacaaacattaaccagaatctttttacacagcaatcatgtcgttactcattagtatatccatatttactgaaacagagaagtgtatgcattagaacatattgttagtagtaaaatgttcatccattgcatgtgactgaata

SEQ ID NO: 43230 - DNA, 682 bp, Oryza sativa
atgggggcgctcggcgcggctctcgcacgcgcgaacagcgagcggggggggaacgctccggggtgggaagggagcaagagagagagagagggggggagacgcccgggagagagggggccggggaagagatgggccgagcggaattcggcccatcgaacctggggaggcaaactagacttttgcggagggattcgatttggaaggaattggattcggggttgaactcgacgatagatcggggattgagatcttgagatggcacggacactagacaacaatcaaagaaacagatttcgcaattagggtttttcggagataattttcccgctaggcgccacgacggaacgggcgctacaaacttgttcgactgtgtcatcccggttcctaaacttgcagatcactcgtttaggtcctccaacttgttcagttgtgtcactccggtccttaaacttggatttgaatatcgtcttggtcaaataggacggtttaaatattttatatttaaaaataatttataactttttcatgtgagctctaatgaagacaaactttatatcaaacttgtagccctcaacgcgatctacaactttgtagttgaatttgtttttattttaagtcattttttgtcccaaaatgtaattttaaaattaaaatttcaaaatctataaacatgcaacaatat

SEQ ID NO: 43231 - DNA, 549 bp, Oryza sativa
atcggagtatctcgacttctgtggatcaaccgtgctgcatactgctgaagggaaaagggagttggaggtgaggcatctatttcttggccattgcttacttcttctgtaaaattgttcatagtatatttttctttgtgtctatggacgacaagataggtctggatgcatttatcaggatgttcgggtgatataattctaaagttgatatctttcaacgttatgaaaccaagtttgccttttgacttgctgcagattcttatctgatataccaatctttaggttaatgctaattgttgatttgaatatacatattaaagatgttcttggccatgtgtagttaattcgtctaaattttcctctatggttccagtagtagagttcttgtttatgaaggattgtgttcagcttactccgaattagttcatgtaagcattgttccactggagtgaggtgcatctcttcttctatgatatccattaggtcaatgatgagctcccaatctttttggatttctaggggtttccatttcttcttgcaactagccttgtt

SEQ ID NO: 43232 - DNA, 1149 bp, Oryza sativa
ccgcctgttgggttccgccgcgtctcgccatctgagctacaggaatgtccaccggcatctaggcgtcgttgtggccgctccccggcggaaggcctctgctggtcggcggtctctgcatcacaaccattgggcgaagcgtctccgccggcctccaagcccgtcaccaccgctaagtctcgatctgatttgagttttgttactgtatgtgttttcccttctcaatttcttagtgcaagactgcaagtgctatctcttttcttagatcccgtgaaatttggaattggaagctcaactacttctctcctacatacaacacattatccatgggatctacctgatgggcaagatttcctgtgatagcgctaaaagatttttggtgcattagacctgctagatgatatagcactgtcaatgatgctaacaccaattaaacttattcagccattgagtcgaatttgataccctgactagttcatgccatgtaatgctatatcttttttctctatttatagtgttgtaattatttatgtttttcttctatgttttttattttttttaaatatatatagacatatccccgtatcggtgtttttcagaaaatgccgtatcctcgtatccccgtatagcatatccatatatgtatccccgtatctaggtaacatagtcgtggttgtcttatactatgttggtggcaaattgatctatgtatcaatgtatgccttttcagctttccgatggaggatggaaagatacaagttactctcggtgatggtagcgcacatgagatggaagatcctccagaactgcatgatcaacataccatcaacatccaaggctgccgtcgacatcttcgccaagttcctcattgaaagagaaaaggtcaacaacaatggcgatgaagagagatatccatctgctatcctctattcaattagagtacttactatggctggagaagttgagatgaaattaatggcgactgacattgcccgcatatgtgttattcttcaattagtctaatctatagcctagtattgcagctgagatattatcatttctgtaggaacaaattatactttagtttgtagcaaattcctcaagtaatctaatcgagactaaattggaactgggatgatactgctgtaggaa

SEQ ID NO: 43233 - DNA, 2952 bp, Oryza sativa
gtgttttgtctaactgatgatggttttttgtttcattggtcttcatattcatcggtctgaggtgaaagacatgatttttgtctactggtatatagttacaggctataatactcatactatctttttgtttcgtaagcaacaaatgtacataccttttatgaatggcaaagtccatatagttcctgtattctttccacacttgcttccatagtgaagctgtgttgttcacatagatgcaagtgatgaacattttactactaatgatgtggagttctaatgcattttactttggctttacacttctccgtttctgtaaatggtgatatagtaatgacacggttcctgcgcaaaatgatgctagttaatgtttgtgtaatttggttgttgcttggattaagacagctttgatgactccatggtttccatgtcatgtattgatctatgaatgtgatgttcctttttttttctttgtttggatgttgaaaggccatggttctgaatttgaatgtattgctcggatgcatgctggagcagtcttgttcagtttttgaaaatcacttttccttagcattttcttttcatgttctgtatatgctgatatatcttgaaatgattgttgggtaaatatattcggtgccagttaaaattggtgcagatttctggttcttttgcactttggtgtttcttgcggaaaatggaaatgaatccctttgtagctttgcttatacctacagttagtactatgctttcaaattgggagtttaggtccaatttgtgcagttggtaatgtatatacttaccaattagtaatatccagtaattatgatgtgattttggcctcattaaaagctggtcgtattttcttctttcaaaaaaaaaaagctggccatatttttctgctacgtcggttctgaaaggcacttgtgctgagagcttaatttgggggcactttgtatgcttatcatgataatgtctctgcagtaggtcccttttcctcttaggtgctttcttgtcaaacttcattagttaccaaggcactcaattagttgagataagctcatttcaagttgtaatcctaccttctagaaagagaagaacagaactgaagtcagaaatatttttgtcttttttttaaggaacaaccctgtatgcagtaatcatcctaatactgtatttgacagaattaaatgaaagatgaaaattagatcaaaatggaatgccttttccatcctcttccaccactcttagaatcaaatatttctgtttgcctgtcaaatgcaaatgcagttttgcagggagtgcatatggttgctttctacccagatacagaaataaattgatgctgacttgccagagtgtaagcagaaaaggaagagctgatgctctcagcatgtgctggattgctccaagtaatgatgttctctgaagttaggccagaaggaggttccaaactaattactttgcattaagttagaacttcacatgtgccatgtgataatttttcccccctaaaggaatatatgtcaaatattacatacatctgacatttttctttaaaagaaaaattctgaggtcaataagttactggtcaatccagagaatagatcatcaccatgggccaatgactcaattctaggggatcccaattgaaaacgagtcagattttgtgagtgcatcattcaaaacacctaatcctacaattccatgattggtgttggatgggtcctctaggaacatgagtgtggctctatgccatccatcgtcctgaatttctcaaaatatttcccttaaaaaaataaacaaaatatcatgagtcggtatatgagtttgcactagaacacaacacataatgctccaaaaaaagaatccttcattcgacgactcatatataaaaagtgcgccctctggtgaaaaaagggctaattgtttggcttatgcttatgcttataacccaaaattaaattttagaacttaattttgaatttgatttcttggtttttttcattctactttattttacaacatttgctcttgagtcgctaatgatacatttataaaagttttactcacaattttttttggtaataagtgttttggataagtatatgaatacgctaaacaatggggctttatgtaacgttttgagcaagagactccgacaaattttaaaacttccagccaaatatttatgactagaaagagtatcacgtttatttccgatcatgacgttcatggagctattttttaccattgggtttactttccacgagaaccgataaaaaatcgcgaaatttggaggtttcgacgcacgacgaaagtagatggagagtaaaatttcaaacggtacaggaattcaaaatttaaatagaaaattaaatcaaaaatttgtcgagaactgtcatactactaccaaggatcgggggagccaacactaaattggaaaaggcgaacccctgtgctatcacattcatcaaaattagcaatcagtagtaattaatacaacggtgcatgttaaccagaacaaaatattccctccgtcttagtcgttttgatatttttccctaatcaaacattctaaagtttgaccacgtttatacaaaaatatagcaatatatttaacagaaaacaaacatattatcaaattatattatatgttagttttagttagactaattttatattctagatgctgctaaattttttctctagactttcaaactcaaacaagtttaacaaggagagaaaaaaaatcaaaatgacttatactaatattttaaaaaaagagtaaaaaaaaatctagcaaggctagggtaggagtagcaataataccacacgtgggcagtgggctgggatgcttgtgttgtgtcttctgcttcctggaggaagcaaccggccagccagcggtttggtttggtttgacccaaccatgccacgctggacttcgacccgacc

SEQ ID NO: 43234 - DNA, 674 bp, Oryza sativa
tttttaatacagctgggactattatgaaatctggtcgatcgaccaaagatggtttctccaccagtgtaactgatcaaattattactccttccttttcactttcattagtattttgatttttggaaaatcaaacttgaaagagtttaaccagtaattaattaatatacaaatgcatttagcacataaaatttataccatgagagtcgtcatacttcaaaatactttcacataatatttggtttagtacctatacaaaataaattttataagaaattaatggtcaaaatttagtattaaataattatttgtactagtccatgcatgacttgcttggtaggagtttgcgacgtatgctataaatacaaatacagttatacagtaatcaattgcactactgtactagtagcagccaacccctagaaccacacgcttcaaacatactttctccgtttcaggctataataatttctagcattgtccatattaaatatatagatgttaataaatctagacacaaatgtctagattcattaatatttataggaatgtgaataatgctagaaagtcttataatatgaaacggaggaagtagcgtaagaataaaaattagaaattatacaactctaaatttgtcatcatctcaaatacattactaacatacattatatttcacc

SEQ ID NO: 43235 - DNA, 1144 bp, Oryza sativa
agaggggattggggtttttatgggggcttggcttggggataagccaggatggcgtggaggatgaggtcgatgacaggcgcactcgatggctgtctacggcctaggttagggaggttgacgcggctaagagcacccgcaatggtaaagtaaggtgctatctataaaacatgtacatctcagcaatagactagattaatagtaaaccactttaatggtatgtctacatgggtatctatagctctctaatgcattgcctcgtttttctctatagactatctccaggttagtagatagctttactctctctcttcatttaatctcttccaagtaggaaaatatgctgacatggatctcttgtagagagcctatagataaccattgtgggtgccctaaggtttccatcctcttctccattaagtctctgtggcttaatcatcaccctacagctcctagcctgtgaacctcggcgctagcttgagagggtgcgcatcgttttgtccagcgggtgcatggaggggcgacgggacgtcatgcgtctggataatttggcggacgtggcaatggcgacgcgcttatccaatcggcttcgttcctcatctcttggagtgacggctgaaggagatggcggcttgaccggggtcgagtcgcgggcccacctagcgtggcgctgacggatgccgggattcgcggcggaaggacggacttggcgcgacacggagttagggcgcggcacgatgcggtgcacgggggcgacgcgagatgcggaggtggcgcggtcgatcgcgtgcgcggcgtccgggcgcgagcgcggatgcggagggatgcggcgcatggcccacaagcggcgcacggcctggaagcggatggatgcgacgtgaggaaagggaggcgcggcgtgcggcatgcgggtaggacgcgggcgcggtcatgggaccggatcgaatagatgatggcccatgaacagtgacagacagaaaaagagagagaaggaagaaaaggaaaaagaggaagagggaggggctaaactgcaaaagtgaatgggattggaattgaattgaaatataatctatacattttgggctttgagaattcaaatgtttgatttgaatatttatgtatttctcacaattgaattgttttgatt

SEQ ID NO: 43236 - DNA, 643 bp, Oryza sativa
tcttcacttgagtgataggagcttttcaaattttcttttgtactgacgatctgtagatcaattttactttgctctacacttctgtgtttctgtaaatgcttgtctgctgaaagaaatggtggtcagaatgaggtgattttaatttgtacactaaattctaaattttgatatatattctactaatcagtcaatattaaactacagtctcaatttttcaagcaaaaccagtatatgatgtttttttttctcatgatagtaatgtgacaagttcttcttgacaacatcacagccgtccgatcatgacacgtgtcctcatcctgcgcctcaccacgaaccccctcttcttccccgatgcgtctctctctcccctcctctctccgcttccgcaaccaaaacctccacagctcgccgcggcgctggcgcggccgcgcaggatgaacctaggacgcggtacagtccaggttcatacgatgcggcgccctataagagcacccgcgcggctcgcacgcgcggcggtcagtttacaagcgccgtccaccgagagatcgagctccaagaatcggaattggtgggatgggtttaggaagctcgattcctcgccgcccgtgaaagcattggtacattggcccccccaagaaccgtt

SEQ ID NO: 43237 - DNA, 632 bp, Oryza sativa
catgtaggctgctatcgtatgcacatggcacatacacataaattgtttatctgtaaattcataggggcaatatggacttgtttaagtttactgtaaatgactcagatatatagatcattatgtttttttttttgacagttatagatcattatgttggcagtttatttctgtgttttttgagacagtttatttctgtgtgagattttattctgctgttgtagctcatgatgttttttccttggatttagatgcacatgttcaatagctgtttttgtagttgtaaaatgtgctgtaatgatttgcaacttgtccttttggtgcgttctggcgggagattggattcggcgtgacaattaataagacgtatagtactggttatgcccaatgatttattcaatgccatattttggcaggatgaggaacctgaccatcaatatggttctcgccgaatgccagcacgtagtcgttttggggatgaactggaggctgaagcactagctgagaggcgcatagttagtgcaaagaaggtgagcaactcatcagcatgtaacccttgttatttttatccaatatattgctgtttatacataatctgtattgtttgcacattttcagtcaagtatgggcagaaa

SEQ ID NO: 43238 - DNA, 1704 bp, Oryza sativa
agcatcccacaatcatgcgtctttttcttcaaccacgcatagcacattttatgttttgaaccaagccgttgctttccatccttacatatttggtgccagcctagctatgctcccaaacatgtacctcgctgctgtccctcgccaccaccgtaggcccaggcggcccgggaggcaacggcttgtttgggttcttatccgttctttgctttgccaaaattttgacaatgaaaaaaaattaacattgtaaaaagaaattattttggcaaaagttggtagggctttaatctgtttgtaaaatttgatgatttgacaaatttttttttgctgttttgattgtattgatattttctattctgacatgtgggatcatttgagtctatgacggtgggttatttggatgtcaattgtcaaatgagtattaaaaaaataatcaaacttctcctttattttccttactaatattgtgttttggctatgaccccaattgaaacaagacaaatattttggcaatgccaatttttttgccacaaaccaaatgggtgactaatttttgaatgcccattttccttttttgtttggttgagtttagctataaaccaaacaaacattacattcatttttatatgtcctgacacgagcttataatatttttccaggaagatttccctttgaattctttcaaggttatggtattctagttctaagcttcgaaccattgagaattaaacttcataataggccactcgattcacaacactttcaacttttgccacttaatttgtaacaccttcaaaaaaaaaatgtcgtcaaaaacacgaatggtttcattccgtgtcactccgtccatccaaagccgcattcgtcaatgcaaggatatacattttttcggtgtataaaccaaaacggaaaagaaaaaaacacgatgagaaaagaaaaacaaaatcgcggacgaatatatatatagcccaatcactgtaaaagccctcgatcgattagttgcccggtgatctggtgtaatgttgtggtcggatggtgatccggtagatggatgctagtaggtgaaactaacatccaagaggtcgatggatcatgcgttgggcctcaagacttttgaggaacgcactgtccgaacataggaacatgccaaataacgccagacaaatttatatatgcaatcaactttttgagcctcgctccaaaatcgatgccgtgaatcttgcacctaacatgtatattgctctaatttgaagactacaaacttattaatcaaccaattaatctgcagcatatatacatggtagcatatgtatatatatatatgctgtgtgcacctggatcctcatgtatgtgaaataatgaggattcactcattcacaacatccgacggtactcctgctattggcggccgcccattataggataattggtaccctttctttctgtttcatattataagtcgttggatttttttttcaaacttctttaactttaccaaatttatagaaaaaatataatatagtattttcaacccaaaacatacatattattaaaatatatattcagtgtttgatttaaggggcaatttcgtttttgcccccactttcatctctaatattgagtttgcccctactttttagagttttcgtttttgcccccacttttttgaactgaaagatgcttttgcccctcctttggatggaagag

SEQ ID NO: 43239 - DNA, 679 bp, Oryza sativa
atttaacagaaaacaaacatattatcaaattatattatatgttagttttagttagactaattttatattctagatgctgctaaattttttctctagactttcaaactcaaacaagtttaacaaggagagaaaaaaaatcaaaatgacttatactaatattttaaaaaaagagtaaaaaaaaatctagcaaggctagggtaggagtagcaataataccacacgtgggcagtgggctgggatgcttgtgttgtgtcttctgcttcctggaggaagcaaccggccagccagcggtttggtttggtttgacccaaccatgccacgctggactccgacccgaccccgacccgacccgacccttctcctcctcttcgtgttcatcgcgtcgggtcaaatccctcctcttcttcttcgtctccgtctccgtctccgtctcgtcgccgcctaatcccccaccacctcgaaacccagatcaaaccctccctcccctttcacccccgcacgatccacctaccccctccccccttcttctccctcgcgcgcgcacgcagctagctagctaccgcgaggaaccgaatccaatcgagctcaggacgaggcggaggaggagaaaccaccccggattctcttgatccggagtccaagaaaccacggggtagtgccgtagtggaagcaatcaatc

SEQ ID NO: 43240 - DNA, 625 bp, Oryza sativa
attgggcataaccagtactatacgtcttattaattgtcacgccgaatccaatctcccgccagaacgcaccaaaaggacaagttgcaaatcattacagcacattttacaactacaaaaacagctattgaacatgtgcatctaaatccaaggaaaaaacatcatgagctacaacagcagaataaaatctcacacagaaataaactgtctcaaaaaacacagaaataaactgccaacataatgatctataactgtcaaaaaaaaaaacataatgatctatatatctgagtcatttacagtaaacttaaacaagtccatattgcccctatgaatttacagataaacaatttatgtgtatgtgccatgtgcatacgatagcagcctacatggtttcaaaaaaggaaataaaattaaccagacaagaaaattttggatatcatcgcgtaaataacatgtagggctgaagaggatttcagttttcactgaacaaagtttttaccatgcaacagctttaggtcggagagtgaaattgaactcaaatcagttgctaaaatcaaataaggagtgggcagtgatgcagtgttaataagatgtggagggaaatttggaagcatagaacgactgtttg

SEQ ID NO: 43241 - DNA, 1274 bp, Oryza sativa
aagatacaagttactctcggtgatggtagcgcacatgagatgaaagatcctcaagaactgcatgatcaacataccatcaacatccaaggctgccgtcgacatcttcgccaagttcctcattgaaagagaaaaggtcaacaacaatggcgatgaagagagatatccatctgctatcctctattcaattagagtacttactatggctggagaagttgagatgaaattaatggcgactgacattgcccgcatatgtgttattcttcaattagtctaatctatagcctagtattgcagctgagatattatcatttctgtaggaacaaattatactttagtttgtagcaaattcctcaagtaatctaatcgagactaaattggaactgggatgatactgctgtaggaacagaattatgctttagtttgcagctgatccttttttaggaacaaattatgccaaagtttgcatgtttcgtctctcacccagcatatgtggtataatatgcatctagcagtctcttaccctattactgtatggtctactggaagtaattgcatgttaaatcttatattttggaattgcaattgcatactaattttttttatctggcattacatttatttttttggaattgttgtgattacaattgagttgtgtggtggattagaatcgagaattgtgtgttggcatgtatccacatgttggtcactgctacgagcattgcagatctgaaatttgaagctgatatgatgaataacgacgagagctgagactaaggacctgtttggagagagcttctagctgctgcagcttctcccagaattagaagctccctcaaacatttcatttttttattcagattccgagaagatatagtcgtaaaatccagaaaataaaatagaaccaaaaattgaaaaactcagtttttccagattctcagaagctggctacaatctccgagcttttgatgatgaagatagaactcgagaaagtgttcatagatgattactcgtttgtcagctgataatttaattgtgatgatttactcagcttgtttgcagtgctgtgatttacttacatatgctagtgaaaacatataaattggcgaagtttgaccaggagcactaaagtttcattgggttttcagttttcacttcattattttgccgtttctctttgaccaaggtcaaccgaactgcggttgagcgaggcggtctccattcccaccgtccgattacgacacgtggcgcgatcccagcggcctaaacccttccac

SEQ ID NO: 43242 - DNA, 629 bp, Oryza sativa
tcatcgagccagtaatctacattgattgttaatttgttccatgtagtaatgatttgaatgatggtcctgagtaatgtaaggttgtgctgtgtttaattcacattaaaattgcaagtttggtcgaaactgaaacgatatgtcggaaaagttgaaaatttgtgtgtgcagaaaagttttaatgtgataaaaaagttagaagtttaaaaaattattttggaagtaagcacggcgatagaatgagaacatacattacatatggcattcatttcatataataatgctactggatctcaaacttgtatatttctgatggtgtgtttctcattttactttttgcagctcaatatttttttctccatgcactcttattctcagattgtttgtcataaaattagtaaaacatcactcatcctgtccaaacatttggaaatgaagcgaacagatattaacggtagctgaggtatgtcgattactttcgctctgaattaacttgacagattctataaggaattataaatgcagctgttaatttgatttacctttgtacatgattcaagattcaagtgcaggagctggaaggtttttacccctgatcaagaagaatatgaaccttatggccagtgttcact

SEQ ID NO: 43243 - DNA, 1264 bp, Oryza sativa
acatgagggttacaaaatagacttattcccaatccggttgatccacaggcaaaacgacgccatcaggcccaaaactggggccttctccggcccgattagctaggctggccgtagtgctgtaagtaggcctattaagccaggcccagttactcctactcgcctcgacgccgcctgctcgcttcggcgcggcggcgccccacctcccctcctccgacacgacggcgcggcgcccttctgcggtcgacgcctccgtcctccaccctccctctcctccatcttcccgccatcctcaactacaagacgacactgcggtggcgatcgcatcgatccctctacctcatcacgacccggcgggggcgaccgagcggcggcggcggcagcggcgacggcggccggatcatgggactaggaagggaggtgtggggggtggttccgccccggcgaccgaggtcgaagcggcgctgttctgagcaggtgacccaagaacgtacgcccattttcttgaactcggtcaaaagaaaggtgccgattatattggttaaatctagccttgatttctttaattcgaactccgttgtggcacgcaagatgtgtggtctgaatgtgtatgtaatgcggctcagttacttgttttgtttggacgatgcttaatgagcttaaggattacgctagctgtttactggtaataattaccttgccaggttcttttagtatattttaatttcgctttcatgcatataggtcattaactgcgcaaataattaggttcatggatgatacctttgtggacgcaagtagttcaaggacaatggacatataagctctgggactgggagttggagccattgtctaagtgatgcttttagaagatctactcaagcagatatatggctatcacgtcacgtgcagagattcttccaaatgtgctaatgaattagcatttcacttcatagaagcactgacaaagaatctttaactctttcacaagatagactggtacaacatggatgtatttactttcaagaagagcaaattactgaatgttaacagttcatatcctagatatgatgcatgctttgacataacagggataatatggcgacatgataaaattgattaatttcaagctgaagcttttgcagtgtgctttcatggatcatgctctactttaaataatggaacgctttgctccagccagtacaagatagcacaacccatctttggttgtttcacttgtacatatagctctttgctatcttgcaaa

SEQ ID NO: 43244 - DNA, 557 bp, Oryza sativa
aaaaacacttcccataccagcatgtatctgactggaaggaattgcattagttgagtttacctgagtctcatcagcagtttgaggtagagccactcctgactgcattcctcccgtagataaaattggtgccactgatgaaaatccagggggaactaatggtgcaatcaaagcccctgtcccagtagcagcctgtgctcctgcagatacacttgcaccagccatagcctgggtccctgcagatccacctgcaccagccgtcccactagtactcgcaccagcagagtgaaatccaggtagagctgtgcaaatactcttcaaaaggtccttgatttctcccatctcacctctcagattactcagatctgtcatctcccgcctaagctgcaggatctcagctctagcgtcaaatccatccacactatccaaactgttaacggacctggtgcgagccggcatgttcactgacaacgaaattcggcttgagggttatctccaagattcaccctctcccctttttgatctcgtcgtcgcaggtctaccgccgcctgagtcaggtc

SEQ ID NO: 43245 - DNA, 561 bp, Oryza sativa
agctgacagaaaaaaaacgagaatggattaaggagttacagtttggcgtttagagattggtttttggttggcgggtaccttcagtttagtacgttttggttggtcgctgtaggataagatttgggccttggctttcgagaggtaggtagaatgggccttcgagctgtgggtgaaagtctagtggaaaaagtccactttgactcccttaaaaagtcacccgaatctaatccgtgaccctcaaccgtaaaaccggataggatgactccccgaactattcaaactagtgcaatttgactccctgagcggttttgctgacgtggcggtattgacccggtcttcatcccacgtggcgcttatgtggcattacaatgaaaaatattttgtgggacccgtctgtcatttacacacaaaatatattgtgggacccacatgtcatcctttctctctccaaccttcttcctccccctctctctcccttctctctcttttctcttgcagccgcacccgctgaacatgccggtgcagttgaacccgtgcgccacctcgccggtgccggacacc

SEQ ID NO: 43246 - DNA, 692 bp, Oryza sativa
tatggactctatactctacttctaatattccttatttttaattccgaatttcagttatttcctaattgtatttctatatggactctattctctacttctaatattccttatttttaattccgaatttcagttatttcctaattgtatttctatattgactctatactctacttctaatattccttatttttaattctgaatttcagttatttcataattgtatttctatatggactctagtctcctcttctaatattccttattttttaattccgaatttcaactatttctaaattgtatttctatatggactctgtattttctttttctctaattaatgtgagaaattctagaccatgagagcgaacgtggaggctcttttttctattcctttaataatataataaataaatgcttcatgtatatatctaaagattcgatgtgatatttttagaaaactaaaccaggcctgactttgcattgactgcaaacttggatcgacgactcgatctcacaatcacgcctgcagcatgacggtaacatgtttttagccctgtgctgcagttaaaaaaagaagggcacgcgagagccatgagctgcaccgagcgtgcaaaagcatgtggaagtgtacgcgttgcacggcgtccatcagtttccacgcagcctgaaattctgtggtggttgttccgttc

SEQ ID NO: 43247 - DNA, 574 bp, Oryza sativa
gaagaaatggagaagagtttcagaagtttcagttaaaaattcagaagttcagagttagagtgggataccggttgggtgacgtcgtttaatgaagatgaacggtagagatgaggctattccaaattaccatggtgcatttacggctgtgatcgctttgttgtactatttaccgtttctgtttgtcgtcgcctgcgcgcgacgctgcttttactctgcttcctctgtctcactcgctgctctgtaaaaaaaacctgagatgcctgggggtatataacccggtgtgatgaatggaaaagctatcgaagatcattaaccctagtacttagcttagaaccctagtttttcttgtcttgcggtggccacaaatctgagagagagcgtgttcgtcaattccatttcgggggtgttttggtgtggttctgacacgggtgccgtgggcgcggtccgtcagtacggcaacggcaagcagctcgctcgagtcgagctcccctctccgcccggggcttttcgcgttggcgttgccgcaaccatcggagtcttttgccccgccgccgaactcctgcaaccaggactg

SEQ ID NO: 43248 - DNA, 590 bp, Oryza sativa
taggccggtggatgccctaacggctcttgccgttgccgcagtggccggaaatggaacgcagatgcgcttcgcgttactcgctttccgcttgctgcgcgcagcgcgagaaaaaagcacacgaccagaattccacaaaaccgtgtcccactctcagtctccccaccttttgtcgtgtctccccatcttcacttgttttctcgccaaatcctacgtgagtcgctctctcgagcagtcgagcgcgcacagggcgccccgctgtcctccgcgcatcgccagcccacgcccccgcgaacctgacacgaacatgcgcctcgccactgcagcctgcactgtactacacccctcatcctcctcgatcaattcgtacacactctcccaaccacctccgtcaccctcacgcttaactcctaccccacgcccagcaaaaacatcgtctatggctgtgtttagttggggaaaaggaaatttttgggtgtcacatcagacgtttgaccggatgtcagaaggggttttcggacacgaatgaaaaaactaatttcagaactcgcctggaaaccgcgagacgaatcttttgagcctacttaagccgt

SEQ ID NO: 43249 - DNA, 697 bp, Oryza sativa
ccctaaactctttcatgcttattttataatctgagctattttgtactgaaattttgatagaatacatatgcatttagaacttacgtctagtcctctcttttttttttgaaaattttgaactattagcgtagttcgaaagcactaaagactaatttaacatcaaaaatttaaaatttaaagttcaaacaaacatccatggaaaattttgaaaatattcttgaactttaataatgatgtcatatatggcttaaaaataacagttttaaatacagcttgtataaagaataaaaaaataaatgttatttaaacattaaagtgaacgatttttattagtttaggggtaaaatgagccaaaaaaaaatagttcacgggttaactgatccattgaattagttcggataagtaaaatggatttattttcattaggggaagtaaaatgaatttattttcattataatacaatggattatttattgtcacattgactatgggtaatagaatatcttgtatatttcatcaccgattaagatcaatttttaccagagttggattagaaattagcttaaacgtatcttcgggataaaaggggacagcacgcaaatcagaacgcaacatgttccggccggagaaacgcagaccactcgacagtcgcacacgcgcagccgacgtaactaaccaccttaccaaacgggacgat

SEQ ID NO: 43250 - DNA, 629 bp, Oryza sativa
ctatagggcgaattcgagctcggtaccctatatactatgagatattgtttgtgttctaatgtttagttaagttgggaaaaaacttgtgctcggatatggtttcttgtttgattcatgtgtaggtatgtcttgataccccgggagagtgttgtcgatgataatcgagggtcaacttgggatatgatgacatctggacgatcgggatacatgagggatgcttatcctaaagaacaatttacgtggttggtgaagatttcatgcggcatacgatattggagagtgtgtgcgtatgaaaaggcaaaatcgaatttggaaggagaccaaatttgggaagattggagtctgaattataataagataagttggatacttgtacatgaaggtttcctagtggattagatagacttgtataggttggattcgtggctttaggctcttacctctaggtataaatacaagaggggttgtgagagttgagttgagataaaagttagggttttgaatttagtcgaattttgagagaaaagtgttgttgttgcattttgtaaacatgaattaaggtaaggaagtttgatctactttcaagaattcttcaatttgtatttgcttgggtttggtggtcacaccaa

SEQ ID NO: 43251 - DNA, 761 bp, Oryza sativa
cagtatatactacttccaccgtttcatattataaaactttctagcgttgtccatgttcatatatatatatatatagtaaatttgtttggtgctccatggtgcccgggcaccattgttgaaattgagtatataaccaattcaaatgagtatgaaactttttcaattatttaggtattaacattaactactttactaactagttcaaagcaagtttgaactgaatttgaacttgtttttgttagattttgattctaggtatatagcatccatacatataattagttaggtatgtaaacatgaattgtgaaataaagttaaatttgagttgttttgttgatagatatatgtatgaatcgaattcttataactaggtatatactcacaatttaaaaattttgaaaaatttgagtaattttgtgcatttgaaaccatggtgcccgggcaccatggtgccccatatgagtgtcatatatatatatatatatatatatatatatatatatatatatatatatatatatatatatatatatatatatatatatatatgttaatgaatctagacatatatgcgtgtctatatttattaacatttatatcaatgttggtaatgctagaaagtcttctaatctgaaacggagcagtagtagtagcaacactactctagcacgcacgcatacacacctcatccccgcctccggcgactacgactcagctgctgtggcgccgccgggagtgacgacgatgttgagctgctgctg

SEQ ID NO: 43252 - DNA, 654 bp, Oryza sativa
aggcgctcaacaggggtataagccaggactccacctaggacttcttcttcaaagcttctcttactgaatgggggagagatagagcaagaatgagtataaccacagtactcagcaagtcacactgggagatgcatgaataatgcaagggggtacaaggggtaataatatagggttaggttttgcagtaaacagcatttaaaagtcacttagttgcccaaagctattttataaacacgatcctatagctacacaatattattaatcaaggccgtgaaccctggcaacccgaactgggtcccagctcatcccaagccaacctaggccaactattacacattttagttgttaagtaagttttaagaattaaaccactaacttgggtacattgctaggcttgcccataaccgagggcgtggctattcgaatagatttactctgatcagaggtgtacatctttacccacaagacacatctttactccgcattctatggccttggaacccgtcataaacatgtgacataacccttcacccatccgagctgtgaacaaaagtaccgacctatcccagcctacggccggtattctggacaggcaggccaggattgagcccctagcaataggatcaagaccgggtgcgccacacacataggggt

SEQ ID NO: 43253 - DNA, 1477 bp, Oryza sativa
ccttctatatccggtctacgggtatccaccgtcgacaatccataatcctaaaaaaacaacacatcaacatcacattcatcgataatacattcatgaagaacacacattcatcaagaatcaaacatattcatcaagaatgaatcggttcgaggaggaggatgccttcatcaccaccgccactgcggatgaagaggagggcgccaccaccaccgctgccgcttacgaggaagccaccgtcgccacctcccgccgctgagccgtagtcgggccaccgccgccaggcgccacgccgggccgtcggaccaccgccgcctcccctcccgccaccgacccgccgccgccgcatccccttccgtcgtcgggccgctgacgccacctcccctctcgtcagatctggcagaggggagcgcgtcacccgtagctgccgccgcctccctcccgccgccgccctcgggtgcagagagagagagagaggccgagagagaaaggagagggtgagatagagagaggtcacgggtgagagaaaggataaggttgccccctcacctcccactcggcaagcggataaggccgtctcttgactcggctcgtttggtagggtgtcggtcttctaaaaaaactagcacctttaatatattataggtgtcagtttttagtgaagacacaaaatataataggtgccagtttttatttagaatcgacacctataattacttaaaggtgctggttttttgcgatttcaacccgcggaggtggaaaaaggtctataggtgccggttttagtactaccggcacctatagtggcgactactatctctatcggtacctatagtggcgactactatttgatgtcttgtatgtcttgtagtagtgcttcttgaatgttagaggagccggttcccccatcaaccatatccatgtaaatattttacctcatcttatacctaatcttacaatgggtaccaaagtttttattctcaatatctctgctgaacaaaaaaaatgcttatattttgaaatgaaggaaatagttatatttagaccattagctcatcaagctagcttagctgtaggaaaatttttcaaataagacggatggtcaaacgttggatatataaatctaaaaatggagtctttgtgggacggaggaaatattaattaaactgtcagataagtcaaaattttatgtggcaccaaaattaaatttctgttcgtactagtcacaaggctaagcatgagagtttgagaggagaggaaaagagaaaattgagaagatatgcaaaacgagttcgcatgatttgttgagtattaactattttaaattgtaaaaatggattaatatggttttttaaaagcaactttcccatagatttttttaaaaaaaacacatattttagtagtttggaagcgtacatgtggaaaacgaggtcttttctttttcgatttcccagccacgaacaagttagagatgttgatt

SEQ ID NO: 43254 - DNA, 604 bp, Oryza sativa
tttgatacagcttcaccaagctagtgttagtgatatgccctacaggcaatcatagagatgattgtatcacatactatatttacatatttatccgactttgttccttgaaatagataactcattattagttaatgaatatgtgattctttcatgagactctttatgttatatgctgttatttctaaaggatccctgatcaaatatcatatgtggaacaaatatatttagataatcagcacatgtattaattgatgatcatgtctcatggatcatggtatagagatactaaattaataatgtggacacatgttggcgaacatgttgttggatagacccaacatgagacactgcaagagccatatgtattgtgtcatcagtgatctcatttagtgttggtgttgaatccttagacctgagattgtcatggttcccaaaatatgtagtagcttccttaagaactactaaacgcaactccgtaattgggtagttataaaagtacttttcgggtatgctatgaaacatgtagtgggatatgaataatcaagatgggatttgcccctcctatggagagatatctctgggtctctcgatgttgtagattatg

SEQ ID NO: 43255 - DNA, 627 bp, Oryza sativa
aatcggctaatgtgctcataagtcgatgtactatcttgccctgagaactttgaaaaatctagaactttgaacctgttaggtagaggaactttgaaccattcaggatacggctgtcgatataggtttccaacatctttcggcctaagcccaaactgctccttcgtgacatctgcaatcaaatcggcccatggtcgttgttaaggtgttccttgaggttgttgtggcatgggctcgaattggttgtattgaggaacaaattggggttgagccgatcctgcatgctggtactgaacattaggtgatggtggctgatactgatagttcaaattgccccctggtaattttggaggtctggctgaatattgcgcaacaaatgttcaggaataacttgaggaacaagtgtgccatctggttgtacatgatgaactaagtgttctgtgacaacctgatttgcggtatgctgcacaggttgaccaccaggtgttgcaaacccagccaatgcattcatgggactttgttgctgaattggctgaacaacctgttgcctcaacggtgtctgctgaattggctgcaagacctgccgtcttggtggcgtctgctgaactggttgcacaacctattggattg

SEQ ID NO: 43256 - DNA, 683 bp, Oryza sativa
gtttaacaactaaaatgtggaatggttggcctgggttggcttgggatgagctgggacccagggtcgggttgccagttcggtctgaatcatcgtaggccttgggttaaggcaggctcgtgtgggttcacggccttgtttaataatattgtatagctctaggaccgtatttacaaaatagctttgagcaactaagtgtcttttaatgctgtttacggtaaaccctaaccctttatattataactcccttgtactcccttgcatttattctgcacttgtgggtgtgtcttgttgactacggtggttgtactcagtcttgctcaatttttcccaaacccagaagaggagtccctggaagatgaaggctttggtgtctagctcgtgcctgccgtcaagcgcctgtggtcgtcgccctagtcttccgctgtttctcgtttgtctttgtgtgtgctgggccttcgctgcccatgtaataaattatctatttacgcttccgcttgttaaactctgaactgtatcaacttttggtgtaccttgcctcctgggacaaggaataatgcacgcacgtaaggaacgcctgttgggttatttccggtcgtgacagactagaaaaccatgcacccacagctcaccattcagtcgcattttagttggataattacgaccaatgccacatggccggatgt

SEQ ID NO: 43257 - DNA, 2024 bp, Oryza sativa
actacccctttaccctcctcctatgactctcccatcctctctccaattcaattatctcatgttctatttttattaactaacataatataaaaatagtcatagctattgttttatttataattcaataaataaatcaaaaatcacattagctatattctactatataaaagataaaatacatcatttgatgggtgaccctatcatggccagacagctaaacaacaaagaaaaattaattgaacatacatcttatgttatactaaatcactgtacataacaaaaaatcaattaaacactctccagagtgctcataaatgatcatatatcatctcctaaaattctaagaaaaaccaattaaattaatacatcctttattttttacaattatatgtattttttaaaagaaaatcttaagttgccatgtgtcacgtcctataaaaaaacataaagaaccttagaaattcttaaaaaaaacaaaacaccccatcatcggctttcacttaattgatttagaaaaattagaaaacaaatctcctccacctcctccttgccatcacatgcacgcaacactgttcttcacctccctattttttatctattaatgttggacatttttttagaaacaaagacctccctttttatctattaaactaaaatagaaacaataaataatgttggattttctttgagaaacaaagtacatatgcaggcgctcacatcgcacgcatactcacccctatgaacgcacaccctacccctatgagttcctttgtgagaagtctatgaaggtacatcctacccctatgaggacctctgagagattaggccgacatcatattttgagattgataaagtcaccacgaacgccttagtgttgatggatacgtcgtctaccactgaaaaaaattcatgcctaggacttaaacccaagtgggcaagttccaccataaggaaactaaccagttgaggtacgttcacttcgcaataaatgttagacattaaaacaaacataatttttaagctacatctctggaatacttccataccttttaaaccggtggaaccattatttctaatcgttagatctatcgtcatatgtattcatggtacatcacatttcaaacatattattgtatattttatcgttatcatattcacgttaggttgcgtagaacctcttatccactctacataaaatgttcatatatcgaccatcgttgtcgccggttgtcgatcggcaggacatacgggtcaggatgtcaccaaggtcgaaaaggccggcaagaaatcggtggcccacgccacacatgaccgtagtcgacacgcgaaagaagctacagagatagccattatctgcagcctcgggaatcaagaacgagaggactccctagtgtaccctgtagtctgtagagacgaaagataggcccgttggatcaattttgatggtggatgcctgggttacgttactcccgacatgcttcactgctacatctatatctatattaatataaaaagaaggagttggacccctccaatcgtactggtgaaatcacctggttcagtctctaccgtccatacgcaggtcagatgtaatccgaaccgtccacccatctccaccgcacgatttcaccctctccacgcgtgaagaccgagcgaagattacgcctcatcagtcatcaccctctcaacgcgcgactcactcgcgtcgtcgtccccttccgccgccggcgcgcactgaacgagaggcgaggtcttccccaccgctggagcttccccatccaccgcggccggccgcaggcggagacgacgtcgtccccatccgtcgcccggagccgacgttgtccccaaccgccgccgccggagacaaggtcttcccgatgcgccgccgccgccgcagtccaccgctgcccatgaggtcgttcctttccgccgccgcagccgccgtcaccgcgcactgaaccggaggcgaggtcttccccagcccctgtcttcatcgtgcgcatccttgccgtgcgccatgttta

SEQ ID NO: 43258 - DNA, 2147 bp, Oryza sativa
tttctcctttctgctatcaaataggatcaatgaattgttccgtgaatgctaattatattatgagaatttttccccgccaaaaaataaacgaatgaaatctgtagaaatatgctatatattaatcttgaatttgtgagaatgtcaacattcaacctttcgactatgaccctatgtcacactgattcattgtcatatctgttgatttccaaatttgcttaatcgatacatgttaaaatgcaattccaatatatatgaaaaataacaaaattgataaaatgtttgattatgctctggaaattatacaaaatgaaaagctcaatctatatgtaaatcattgattctgggtacttattcaactacaaaaggcattgccccagatcccaactttcataactttattagtttgtcatttttgtttttgatccttgcacatgatgacagtacctctgaggtattgtttcactttcaccctaaatttacatgaaaaatcctaaatgcaatttgttttacctatgtaaatgatgcaagatgcaagtgtaggagctgaaaatttctctttcagggaccaagaagaatacaaacttaacagttagttataatcataagattatatattgtgtttcattttattatcattaaactgatccacatgatgttcaagtgattacagaaatgcatagatttttttaaaagttgggtttgatagatgtgtagaattccatgccgccatcagtgatgcctcgcaagcaagccacaatgtctgcacctaggccttcagcggctccagctactgcgtgctgcagatggtacccttccattacagtgagggggtcttccagattagctatcacggtggttccttggtgtgcccatgggcatctcaccaactgtttgatgaaatgcatggtcgaggtgcactcctgttactgtttgaatccttattattatctcatatttactctattttgcactgtatgttgtgattgaaagctctgcctatgtaaactaaaactgaattgttccttggtctccaatacttcatatgttgcaggcaaatatttcatttctgcagggtagaacaccatattattttagtgtatagattttactatgagatccttgactttttaatgactattggagtcatgtcagtatgttaatagtgatatagatatgttaacctgtccaattttaccttatattcccaacacaatagctttgtttcttgactgagatttatttgtctcatgtttctactgcattcaaaagtttgcagatcaattcatatttcataatcaatcagcaaacctggacattgtttcaagggacatgtggacttggctacagtatatctatttgcttgatctttagttgcatgtagactccttttgagatttatttattttaacccacaaaaaaggagattatttattttaagatatgtccctttattgttcaactgcaactaatttggaagttcatagataatgagatgtaacagatgggccattaaaaactctctgagtccgttctatgaaatgtaaagtaagatgccatgcccttcccagtattaccttattactgttatctgccttcttttattgataaaaaaaagtcatgtgaatcttggagtggaatattaaaaaaccactgcatacaacattgcattatctggatgagttatcatcaagcatcatactgctatttctaatcagtgttgcacatgtatttcatcaagctcctttgttactttctggctacatgaagtggagttactaatatattgctctatgaagtgaaagtttcttcttgctcaaaaaactactcctataataaaatggctaaatatgccaattttctaccactactgaatctgaagttcaactgatgtgcttcattcccatgttagccttgatatggtcagccaccagtattaatattaacaaatttcctgtcatatttgagagaactgaaaccgcttctttgaaatgggatctaattgttgaaatatgttttttttttcatgtttgtgcatgattggagtatctcttttttttcggctgtactgaaatttggtttgtgattaacctgtgaaagtatctgtttgcactgctcgatatcctttattttgaaagcgacatcccgag

SEQ ID NO: 43259 - DNA, 667 bp, Oryza sativa
aatccagcccaaagctctcccttcctccttcagcccgctgccaaagtctccttttgtatcatacccttcctcctctccctctctttctccaccaacctcttgggccatcctttcccgctgacccaacctcctcttccctgctccttcccacgccctgcctctcgcgccttgtcgatcgccctcgtgctctagcaggtggggcccacgtgccaagcgcgtaccctagctgcgccatttcactctaccggccaaaacccttgtgccgcccacgccgatctgcctcctcccagtttgtttgctcttccaattgattgcaaaaattggttctcctcctcctcctcctcctatcatttcccagtgtttctccctcttaatttagcctttattacccgaatttactctccgacgaactgttgccattgatggcaggctggagagctcccccggcctttcctctcctccccttggcttacaaagggtaggcaacctcctctccccctcctttggcattccggaggtctgttgctctcttttcgtctcctcacatctatacctcgccagcgaactacagctgccattcctcatcgagccgagctgggcaggaacccggtgccaccaccctcggagtcgcagccaccttctcttccccagtctcacgtctggttcg

SEQ ID NO: 43260 - DNA, 6117 bp, Oryza sativa
tggagtcctctaccatcgctgacggtatctgcctcccccctcaccgagaaccttgcaccagcgctcaagccaccgccgatcctagggccacagtccccgccgccgaggaagtcttctccccgaactaccaggctaccgccgccagtggccgctgcgtacgggacccacctccgtcggatctgccatctcgtagctgaggattggttgttgacgcttaggctgtcgttgtccaccgctagtcgcgccgccatttgaagggacgccgtcgtcgacacttcgccactacccgccgccctcccgatcaactttactgccgtcaccgacctgcacaactagactcgggcacgttccgcatctgtcctccaccgcccaccttcccgatatctacaccgccagatctatgggcagtaaccccaaccccaacgcctccccctcccccctaccccctcgcataagggagcaaggtcctcaccaaggaagccccgcctaggggtggcaacaaggcggggtgggtccaggttgagctggattgccccgcccccaccctcctacgggtatccccgccctcggccccacaatgaaagttggatgaaaagcatcacccgtcccgcccccacgggagacccggtgggtgaccggggccccgtatcacttggatggagttaatactctataaaaatattgcaatacattaaataatagtatgataaaatttcaatagccccagttgtggggcttgattgaagaaaggaaagggattacggttgagaggaactagggtgttgagcttttacatgtcaattctgaatgggcctgttgggtctatagtattgcaatgggctacttttagagaattaactcacatccgggtccccccggtcacccgcaggttaattccgatctctgccctcatccacactcacccactggtgagaattctccccctgccccggccccgtaggggcgggtcccaagccccgcagccgccttcctcacagctggttggcacgcaggcggtcttcttggcggcagcaaggcagcggagaaaggagactatttcttcaacatgactaatggtcaagcaattacacaccacacgcccgatgcgtacatatagcattgtccagggagctagtaatatattactatttgcgccataatttgattagtagttagtttcatatgagtataccaaattatctacaataattgtcgtatttgctgagtattctctttataaggctagttaaatttatatttgcagtgtgatgcatcggtcatgtgtgctagctatagcatttaggttactaaagttgtaccgatgtcgctgagatcactgtgcttggactgatagtatatatgtgcagatggcatacaagatgtacatacactggctgtttgacatgcatgggaggacatgtgcttggattatttgctgcagtcaaggagcttcaggctgatcatatgcagcagtggatcagatggtcatgtctaggagccggaccgcagcggcagcagctgaactagtaaagctgtggcgtgccgttgtgttgcattgcatgcaaggaaggtggccgagacagaagcagagcgtgggtggctaactggctatacaagatagagatactttgtagtacttcctccgtttcataacgtaagactttctagcattgtccacattcatatagatgctaatgaatctaaacatatatgtgtacctacactactatatgattgattttcctggacgcctcccctttttgtttccgtgcggttcgtaagtggaaccgtacagaaaaattgagaaccggcgctggggtgtcgcccgcacgggaaaatcgattttcccatgcgggcgtcctaagccaaccgtacgcaccgcacgggcccaccatttaacccctcccaccagccaccgcccactcccactccactcctctcctctcctcccactctcctctcctctcctctctctccctccctctccctcccctccacgacagcacgggtgcagcgacgggaggagagcatgcggcggcggcggcggccgccgtgggcgacagcgacggtggcgcgcgccccctcgcctccttcccctaccagatccggcggagggtgggcttgggggcggcggatccggcggcgcttgccccctcccctccttccccttgcagatccggcggagagggcagcggatctggcggcggcggccacgggcgacagcggcggcggtgtgcgccccctcccctccctccccgtgcagatccagcggaggggggggcttgggagtggtggaaccggaggctgccgccccctcccctccttccccttgcaggccggcgacgcgcggctctctcccctcccttgcagatccggcggagcggcggcatgcgtcggcgaccagatctatctctccccctcctctcttttttacttgtgtttttttgtgtgatttgttcatgtgatgtgtgttcttgtgatgtaagattcggcggcgggcgacggcgacggcggcggcgggcctcggctaggcggcggcggattagggttagggctagggtttcttttttctttttttttgtttctttttttgttgctccgtgcgggcgacttaagcgcccgcacgcaaaaatcggttttcgcgtgctggcgcaccacccgcacgtgaaaatcgcgattttcccagacgactgggtgcgtgcgggccgtccacccgcacgcgaaaatccgcccacccacacggaaaaattggcgctgtagcagtgctagattcattagtatatatatgaatgtaggcaatgctataaaatcttacattatgaaacggagggagtagttgatttgatagtactcatgagagtttccatatttacttaggactgttgtttaagatgtttcctatatatattaggctatactaggtctctttaggcggaaaacctaatgcgcgaatgttcgctaccagcgaagtcagcgaactaatccgggtttcagtttataggttcacgcattattttcattttctgttcacctgctgcctgcatgttccctcgctgaaaatattacatgtgaaagggtgaacataagcacatgtaatctaatcttgttatttttctctggagtggcctatcggccttaatgatcctaacataaagtttctgcaaattattttttaattcgtttgaaatttatatgtgcaaagtttataggtgcagaatttacatgcagaaactttctatgcataaagtttatatgtataaaatatctatgtataaagtttctatgtatagattttttttcacgtataaatatttttttagaaagggtattacatactgtagcattcatttaaatttgtatgtacaaaatttacatgtacaaactttctatgtataaagattacatattgaagtattgatgtatatattctaggtataaatatgttttgggttgatcaagacgttgttgggctaaagcctggtaaaaaagaaaaggcaggttgaaacccatgggctggcttggctagctcgcagcgttgcacgctggttggaaaccacgtatgaatgtacaagagcgataggctattggaatattcacgggtcacatttgttcgcgtactagacacgcccctgtttaggacccctgaaaaattatcaatcaactatttcatctttttatttttctattttatttttatggctgagctttagcaaccataaagtttggttaatcttcaccattttacgctgcaaaatggtcgcgcttctccacgaaaatttaaaggttattcttactagtttgctcagaaattagtctttcgtcatcatgtaagtatgatatttatttttttttctttgctaattttctcataaattagtcgctcgattccgtgaaagtgaattcatttggaaagtgaattagtcgctcgattttgattcttcgattttgacgattccgttgattacaccttaaactgtgagatcgatcgaaaacagcaaattttatcgaataccatctacctagtccagatttcattgcaaacataggatttggctggtgctcctcggcaaacatatcggcagcgccctctacatcacatttcttgtcgccggtttcgtggagatggccgtggagctagaggtactctgcgtagtgaggctggaggctgcttgtatgtggctagggtgacttgaacaaatgcttgttgattgaaggggatagaatatagggaaaacattgacatcttcaaattcttcaccttcaaaacttgggactaatggctggcttatgcaaaactgtctgctgaatcaaaatttcccaatgactccaaaacctatctttatcttgtaaaaccgacttgctcatgtgcgacttcttatggcaatgccaagatactttatcctacataatcggaatgcaaaaatagtgactttggattggcagtgacctgtgaggtggtggggataacaaatactgccagcacacaatatgtatatttcgctcaagaccggcttggtgcagtagcccagcattgctatgcagagagggtgagacagaagaaataggtagccaatgacatgtgggcctacataagcattcgatataaagaaactaagatggaaaacgaagacgtcgataatgatatgtgggtcaacatgaggataggttggtcattttaccgaaattcttacaaattcctatcgtgctaatggcatggcaccgttaatagagatatcaatcacggtggcataaaatgagaccaatttaaatcaagtggtatatgagttaactcacattctgaatggcaaataagcgatcggaataattttcagtggcattacagtggcttacaaggaattaaatttttctcgtgaaaaaaaaaagaaatatacaacaatttattctagtttcaccacattatatatactcattctgacttactaaaacaacgtcccacctcatatgccagatttccacgttcgtatgaatcgatcaaagagtatcatactacagctatagctaagtattggtctgatccagttcaaccaatgcaattaggactttcggttcctttttttttcactgaggtaaatacgacatttttagttaggtaaaatacggtattttcgaagaacaatgactatttattgaactttaatcaataggacatggctatgctcagtgttcactgtttataaatcacaaaacatccaactaagcaaatgttaagcaatttcagcacacctgatccatacatgtcttttccagggagctagtgaagtattactagtagaacataaccatgtaacttctcgtataaagtagctgctagtggtttaagagatcacctacagtctgatttttttcgtgaaaccaaattttccttattttttaccacaaaaacagaatatgaaactaccaaaacatcccaaataccaaaccggacagaccatgtggtaattgttcactttcttgccaaaattacccctactaagttttggtaattgttaacattgccaaatcttacctccattacaaaattttgataattctagatttttcctactgttatgtatttacatgctaatgtgctcctatggaaccttttgatcctatactatggacagtgttgtagtctcaaagtctaactgctcagcgaccaaacaacgcactatttcctctgattcgcacagcatcatttttattggcacagacaggaatagaaattggtgtccttccattgctccctactgccctccgcgatgtgtgctgacatgtcccattctcataggatgaagcacttgtgttacagtgaaaccatatatatgtttcactgcatcaggactttgagaacgaaatgctgttacttgtttaagcttggatggttggccaacgttctcaaagcatgcactaacccttttgtgagcgaaaattttacgaagaagttctcagatgccctgtccacccatgtttttgtctattgttgaagcaagagatgcaattatgcaaaattaatgtaccattgtacacctttgtcataaagtccataaatttgatgttattcatctgggcgcccagacaaagcatgttgttggaagcaattggatggaagtacaa

SEQ ID NO: 43261 - DNA, 1936 bp, Oryza sativa
tgtgcgtggctaggtcaatagtgatcaaggcggacgtaaaacgagggagaattgacggaaatgttaaaaatgggaacggggtgaactttaggtactattaaagtgaaccggtgtctttcggtgctataaaaccaaaaacgtgaactttcgatgctatataaccaattttgcctatggattaattgcttaattatttgaaacccaactatcaatttaaccttactttttcagatttgcttatttgactctgcttttcaaaattgaagtttcgtctgaccctgttttttacttcaccgttagaacttcattttgaaaaaaaaataataaatttactaccccaaagtgaccaaaatacccccagagtactaatcaaccctatccccatcccaccccccacctctccatcccaatccctacctatgctaaattcattacaaatatttaaaaaggtcccaatgaaaaaaaaagctttgatataacatggttaaatgagcagggcaaaaaggacaattttcttattagctaactccgttatctcaactcaatttgtgctcatctctgcagtccaaggagatagcccagcagcaccatggcaacgctgttcgagctcatacgctcattacctttctacaccttcaatgctttacataaaggaaatcgtcttagataataagtggttggtaaaaatggaagaatttatactgttctgctatatcctaatacattttccaattgatccatatatatatatatatatatatatatatatatatatatatatatgcaacgggtgaaactaatattattaacaataaataaatactaataattaaagtttaagtatcacaacattatgatgagtaaatattggagttttcggctaaatatcttgttggttccggttagctcccgctgggccattagtttttgtcattggatcgaaatcaacatccaggatttctttgtagcagtgtgagtcggctcaggctgcatgtcatccgtaggatcttgaccgaacggtccagatttctccgttaacaaacaaaaatcatacccggtcaaaccctaaccatttctcccattcctccccgattcataccgcgctagaaatgagcagcgacaacggctgtgatttggcggagcggtgacgacggcgtacccatgcgcggcggcctctgatgctgtgcacagctccggcggagctgaagccgacgggaaataataattattttgacctgaaacaatctactgagtgattaaataattgaacataatttcctagcaattttaaatggcttaaaatagtgccaaacaaatttctataaatctaaaaaaaattaaatcagttgctttgaaaaataaaatgatttgggccttagtaagtttcagggacaacttgagggaccaaaactgaacttatccgtgcagagcgtacacatggcccaattgtgtggtggcccgggaacggcagcctgatgcgggagaatacgcagccgtccgatctgatcgacgatcatgattgatccagacatatatatatataaagtcggcagcttaaccctaaccctaaatcatttcccctccgctccctccctctctctctctcaaacgactgcgacggcgccttcccactccgccgctcccctcccccctcccccccaccggcggcgacgctccccttaccctctccccaccggcggctacgttccacctccctctctacctcccgtctcttctacctccggcggtggtggcaacggccgagggccgcggtggcgatggccgagggcggatccggcggcccctctagcctctctcccgcggcagatccgccggcggtggcggcggcgtccgcggcagcagcgggcggatctggcggcggcaggcggcaggcggctccctccgccccctctcgccttcctcccactgctgatcc

SEQ ID NO: 43262 - DNA, 2260 bp, Oryza sativa
cctccccctccccctctccctcctcctcccacggtggcgggcagggatggcaccctcccctccaccggatctagcaggaggggaggcaacggcagcccagcgtccctgcaacgacgacgacgacggtggcacccttcctttccggcgtcggcgtttttgtgcttgtgatgttcttgtgttatcgttgttgttgatgaaatatgttcttgtgatcttttagtagtgttttctctaggattttgtgatgattccgatttgtatttggattgggattgggattgagattgagattgagattttgtttttgggttggattggatgtgggatgtgggatttggagaggaggtgtgccatgaatcggatgaggaaaaattagtccgtaaaacgcgatgaggaaagcgcgatgaaggacatatgtgacgaccgaaaaaatccgaatatatatatatatatatatatatatatatatatatatatatatatatataaccacaacacaaatgggcttgtcatattcctggtgccttccaaccctaagaccctattgatgctttacatcggcaataatttatagggctacgcacgaagtctaaaagtggatggatgtacatagacaagtgtttgagacaggttcaaattctgtcaatgagagataccctacttttgtttaggctgggataacgagagatacccaacggtggttatgagagctttcttagagtgtccaattaatataggtgtccaattaacgagagataccctacttttgtttgtttaaagtctattagcaaaatgctcgtgcattgatccgggtaatggtgggtggctgaagtttgatttcaattatttattgaaacaccatgccccaagcatgatcataagcatcgatgatgtgtataatgacaaaaagtcaagtttgttctcgaacaattaatttgctttacgttttacgggatatggatgatgctcatgacacgaagccgatggttgtagcatatgagaggaacaaatgggtgcacaatgcgattgcttttgttaaggagacgacagatggaaatatgtgtgatgaacgaaaaaatcaatattttcttaaagtagataaatataacaaaaaataagaggaattgacgttgctacatgatgaaagtgcccgagattgaactgatcgacacatctaaatcgtggcacaacgaaattatattttcttatattctgtgcatggtggtcgtcattggttggtcaaatctgattataagccataacgactcattagcgaccaaaatatattttgcggataaaaattttatatacatgtaaaagtcaatgctgaacaacaaactacattaagaaaacttcaaacttatgttttaaaaataaattaaaattcaaaattatatacgggcaaatacgattttttttcatttatattcctagcaatatatatgtgtagtcgttggcttcattaattcaatattcatgtacacccgagtgtacatgaaactacagggtcgcacgcttaatgggccagaataagaggattggatggagatccaatatgagcttaattctaatagggatccgaataggagtcctatgggccttggaggtccaaggatcctatatattcgcgcggagtgtgaccggcggtgagattgcatcacatgagaaaccctagccgccactcccctcctcgagcaaaatcctagcagcgcatagacgctagcacgtctgcgcgtggcgttccatccctgtacgtttggataccgatagaggtgccgctagtttgcggtgttgatcggtgtgggagcactgcgaggagaacgcatgaggaggagaatgtcgagctgttgcgatcaactacttcctctacaccgacgtgagctacgtccacaacgttccttcggctacttagcacttactttcgctgcacagcgcgtcgagtggtaacgatttatgatctaatacttgcatagttcctgatttacatagtagaaaattttttatttatgctatcatagcctatgcgtatcctaacagccaccgcgccctcactacagcatgacacaaaatccccaacggaaaaatcggttggcaaagaccacattcatatacaatttgtcgatcatccaaagttttcctgaccaacttcaacagtcacaagaaatctagtcagcaaagagatttcccgaccaacatatttttaccgaccgaccatcagaccccaatgatagagatttgccgacaaacattattttttctg

SEQ ID NO: 43263 - DNA, 921 bp, Oryza sativa
aaaacttttaccaccaaaacttttgccatatgttatttaccatttcaaatgatctaaatatgccctatgaactagcaaatggcaaatggcaaattgtcaacttttgctactagtgtttagatctaaaatgataaaaagtgctctaaaatagtaaaacttttatcattttggagaatctaaacagggcctaatacaaagtacaatgtacttttgtacagccaggttataaattccatagctttaatgtttttgaagctggacttgccgataaataatgtggttggatatgtagcgaaatggtagacgagtagctcaattacaacaaactaattacaaaattttgggtcaacggcatttaatttgtattttatcgcaaatggttattgattgggagaatagctaatatggtccctaaagtttcactcctgagtcattttagtccttaatatttcatattgtccaaataagtcctttaaatttatcatgtgggctaatatagtccttggttccaaaaaatcgccacatgaacatgccatgtcacgttcctatgcaaaactatatgatttgtccaatttacccttacgcataggaaaattaaaaataaaaggaaaaagttaaaaatatatatatatgatatatgtaagagcaaaaatatacatcaaaagggtgaaaaaagaagtattttttttcctatggttatatctaattcacccctatatttacttttctatgatatacgtaagggtaaattgaacaattcatcatagattttacatgaatgatgatatgggatatctatatgatgatttgcaggcatgcaaaggactattttaggttttatgacaaaggttaaggatttctttaaaacatttaaaaggttagagactaactaaacgagctattcttcctcattgattcatt

SEQ ID NO: 43264 - DNA, 609 bp, Oryza sativa
gaatatcaaaggggacagaagatacaatgaacatgagtaaaattgacattttgagcttcttctccttcgagaaaagtacatacaatgaacatgagtaaaattgacattttgagcttcttctccttcgagaaaagtactaactgctggattgatggattggatagatgtctaaagctcccgttggctcattttgtcaattttgtaatcacttctgtacactttacttcttcttcttaatttcctttttgcttaattcagataggccttagtacagatgccatgaccactgaagagcactctaagaaaattaagtgcaaacagcatattccggtataagtcgagctaaattttgtaactcttggtgtatcttccgctaaaatgcttactcctgatccctccggagcctaggagtctattgaaatcttcgaggttgaagttacacctactccatacgcaaatttgtgttggtttaccaaaagcagtactgcagaccaacagccaaattatatcacaaacaacttctacattgtccaagctctgaaattctcatgtttcaagaatgcctccttcgtactgaatactgccaagttatcacattgaagtatattt

SEQ ID NO: 43265 - DNA, 4902 bp, Oryza sativa
cgatagtatgcatcagagcatcacaaataaacttgaacagtgcagaacaaagctaaagtaatttggtttaacagacaattatttgttctagcggttacattgctcaagtagcacctctacgtcctgggttcaactccccaagggagcgaatttcagacttaaataaagaaaaatataccgtgggggcctccctcactgtttccggtcaaaaatgaaatagacaactatttgttcaagattaaacccaagaagccactcagtttccatcagtgatggcaacttaatgctccaatgcatatggtatccgtaccaccaccaaaaagaaatcacatttccaaaaatttactagtccagtagtcctgaccctgataatatctgctactgctaccatctctactataaaattattttgactacaaatatcagaagttggattcatccttgcagaacttggttcgatgttgcggaattttcacaaatgacactccttaactttcatgcttacttgcttagccctgacagtgatttctgcaacgccacaatcgttatttaccagatcgcagcacattaataatgaagacatgtgtatgtcctgcaacacttatatctgaatctaacttgtagtggtatatgaatatgttagtcaattcaaacatgcttagcacatacatggaatgatctgaggaccttaaaattgaaccaaaacacaggctgatgtcaaccattgccgcagtggtaacctggtgatttcttcctcacttaaacaatgagcacaaacaaaaaggcaaaaatatttcagtacgcaatgtgcaacataagaagaaaaaatgttcttggccctatttatttagacaacaatttctaaacttgagtcaaggtctagtgggttgaatcctactatagggagcaacgaatcctaaacaggatatgcaatttgaattatgtgatccacatgtattcaacatatacataccactaatcatggtggaagatagaccatcacctttgagtaccctttgctttgaaaaattactttcccacaattacacatgactttcggcaccattatgcctgctctggtcaatattgttttgcttcatagagcatgcataaaaaagacactatatgctaagaggaagagcagcgtgtattattttatttccattccagcaaaatataatgtatatagcatactaatattacattagatggcttaatgtatttggaaacaaataaaagcaagctcccgagaaccacccaacacaaacagtggaggcactagtacttagcttgcttgtttgtgcacacggtaccagttcatcttagtcacggcaattctccaaaatccacagatttctagagctatataaataccacattaagtgaatactacagtatcagctaatggctctatatatttgcacaatctgaataatagcgaaagcaaatccatccaaatcgctcccactcttcgcccgaatcgaatcgaggagaccctcgtaaacacggcgagccgtctcaacgcatgatttgggcgaaaatgcgggagagcgcgcggggtggcgtggctgtgtttggggggggggggggggggtagggttttgtacctgtctgacctcccggcgcgggcgcggatggcggcggcgacgctggatgacgccgcggcgcggatgggcgcgacgaagctggcctcgtggcccgccgcgccgccgtcgccggggagggcctgcgagtcgaggaagccgaggaggcggagcgcgagcacctgcgcccccgcggggtccttgcccttcagcgcgacgtccgcgccgaactggagggagtggagccgccgcagcctatcgtccgcctccttcctccagttcgtcggctccccggagcccgcgccgccgccgccgccgtcgccggcgtgagactgctccgccatttcgcgtgtttttcttttttgttttctttttttttcctttcgccgcgcgtctctgctggtttccttcccgctcgtctgaggaaggaagggggttttagagctgggctttctaagtggtagtcatgggttattgggctttctatatgggccggcccattacaaatttacagttatacttatatccaacaaaagaacacttattttacaatttacaaatactcaatagaactttcaaaaggaaaaaaatacttttttttaaaaaaaataacgatacctttgatcttactgtaagtggtagttttgttggttttgggaccaatatatgcattcctaattctgtgcacttttaaatacttattaatatattaaaatttgcaaggtaacggaaagtgttgttttgcccgaaaaataaatctcattcatccatttcatattacaagatgtatttttttaaatcaaaatttttaaagtttgatcatgtttatataaaaatatagcaacatctccaacaccaattaagcccggttcttttcttcaataaaaattggataaacttttagatactcgtagcacgcttttcaagctgctaaacggtgcgtttcgtgcgaaagctttctatatgaaagttgttctaatatatcagattaattcatttttaagtttgtaataattaaaactcaattaatcacacgttattaccatctcgttttacgtgaaacacttaatctttatctttatctttatgttcaggagattcaaacaccaccttagtttcattaaacgtaaagttgaatatattttatactatattatttttgtgaataaattgcattcacgatgcatcaacttggtaacgagggtgcaatttggtgcaaaaatttgagaaatgagtatccttatgcaataacttagtatatgggtgtaattagtgtaagaactttataagtgagcgataagttgtaaagttggtgcaattttggtgatgcgataacttaattattatgagtattttttatacaaattcaattttaagtacttatttaaactttactatatagaaaatattataatccgatttagatttgagaaggtgaaaaaaaaaatccaaaccagtggtgcaaaatggatttgcaatgtaattctaatatccgtaagattgctatgtaatgccatattgacatttgagaaaactcacctagcactcgttaagcaaaacatcacatacttagctaagttgctgtaccaaaaatactacattatcaagttcttactagaatgtactcacttaccaagttgttccactcagacgtaattctcaaattaaattatatcataccccaccaagcaagttgttaaaccgtggttgcaatctactcgttatttttcattgttgctatatatacaacatggactttacggtgtttaagaagatacgtacaggctagttccacttctttttatggcaaaatctgttactcccttcgttttaaaatgtttgacaccattgatttttttagtacgtgtttgaccattcgtcttattcttatttattcttttcatatcatttgattcattgttaaatatactttcatgtacacatatagttttacatattttacaaatttttttaataagacgaacggtcaaacatgtgctaaaaagtcaacggtgtcaaacattttgaaacgggggagtatatttcagcacatcgggtcttgagatcaaattttacactatttttgtaccctctcgatacctaccatagaatgcctgcatatatacaataatatttaagtcacgttcgtttcaggaaaaaaaaaaggtcaccaataaacaccatgcactacatgatccctactctctagttttccaacacgacacgtatgtctcatggaaatggatcactcaggctataggcttgcatatgacatactcccccgtcccataaaaacccaacttattaccgaatgtgtaatattacgaatttgaacatatatatatatatatgtccaaatttattatactagaatgtgtcacatgtggtcctagattcgtttttttataagatggagggagtatgaaatgcctgagacggagggagtatgaaatgcctgtatagctttggtcggcgtcctggtgtgtgttcgtgaaatagtatcctgacctgaccgacgctctggccatttgatcgattaattggccttggctcacaggctcagggctaaaaaattccaacggcaggcaacggtgagtgagaagacagtagagtgagtgctttgccaatgaaaatgaggatcagtcgaattcagatgccggcccgtttcatttaatttttgttggagaaagttaaaagttgacacttgtaatgtacaataatgtactagccaaggtttgtttattgatggctggccacgtggcaccgtgctggaggcctggacctggagctacaactacccgcgggcgtcctcggcgtcgcgacggcgtcagggtgcgggcggtggcggaaacaacaacctactggtggtgccgccgcctgcggccaagcagagggcgctgtcgctgatgaggaccccgggcctcggcggggagagcgcgagccgcgaggggagagatcgagcagaagcaagctgtagcttttattgctactcacaaaattaaacgaagtttaatgaatcaatgaggaagaatagctactttagttagtctctaaccttttaaatgttttaaagaaatccttaacctttgtcataaaacctaaaatagtcctttgggtccaccaaaatcatcatatagatatgccatatcatcattcatgtaaaatctatgatgaattgttcaatttacccttacgtatatcatagaaaagtaaatataggggtgaattagatataaccataggaaaaaaaatacttcttttttcacccttttgatgtatatttttgctcttacatatatcatatatatatatttttaac

SEQ ID NO: 43266 - DNA, 685 bp, Oryza sativa
gaagagattagagatatcccttgctctggttcgcaaggcagctttctttttatccccctttatctccttgtatcactggcccttttttggtgtgtgctatcagggaatgatccactttagcagcgatgggttcaagcaacattcccgatgacttttggcaacctattggtaaactatttaaacgagaacgcaccatagtttaagcttgatcaacacgttctgacgtccactgtctcaatttcctggatctctaccgtgtgctatcgttttttaatagattaaaagtttacttcagccgacgcgaccttccgtagtttcctctagaaatatccgaatgatcattatgcacaatgtggagtaacaaaaattatatgatacttcctctgataatccgacaagatccgtttccgtttcactggattcctagacctccaccgcccctagggccgccgcctctgctggagtcctctaccatcgctgacggtatctgcctcccccctcaccgagaaccttgcaccagcgctcaagccaccgccgatcctagggccacagtccccgccgccgaggaagtcttctccccgaactaccaggctaccgccgccagtggccgctgcgtacgggacccacctccgtcggatctgccatctcgtagctgaggattggttgttgacgctaggctgtcgtt

SEQ ID NO: 43267 - DNA, 554 bp, Oryza sativa
ccatctcttttacctcaatctcgcatataccctgctaccaacaatccccatactatgcaaaataccgtagtcgtcatatgaaacgtcgacagtggcgcgccaggtagggggattttggtgcttaaaggtttcgacgagatgggtataagagatggattctccaacaacaagctactcgacgacttcggctgtgggtagatccaacccgaccggagtatgtcttttgacgagatcggaaccatcgtcatcaacaatttgatctatcgagatcgtccaagcctctacaaaggtacgcaatgatgtcaaactagtacgcaacaagataattggtagattggttttgaaattaatctactaatttcatagatacatccggcatgtatctacaaaggtacgcaatattctatatgtgatttatcatagctattcttcagatcaatacaatattgtcagatcaataatttattatgtctacctagagcatattttttatacaacatctattgcacgagtgtttccgatgttaggccaactacggtttaatgctgggggct

SEQ ID NO: 43268 - DNA, 689 bp, Oryza sativa
tgtaaaagataatcaaagatcttatcacacttggccacatcaaaactatatttaacctcactttgccgatatttgcaaggagtcggcattagattagaacaaacaaaaggcttgtttttgttagtccatgaccactcagcaacatacatatcatgatcatccttaccctcactatcactagcctcagggtaatcaataaaattaacattaggctttttctcatatggtctaacaaattttttattatccttaacccagctttcctgagctagagccttttgcataagttgactaacatcaagaaattgttggccatctaatctttctctaagaggagcaattaaaccattaaaagcaagaccagccaaatctctatcagttatattcaagctataacattggtttctaacatctctaattctcttaatataatcaacggcaggctcattatatttttgcttaaccgatgtcaaatcacataacctaagctcagtttctctagtacagaaataatcatgaaatctttgttctaattgagccaaagtatgaatagaatatgctggtaaagaagtaaaccatgtaaaagcggtaccggacaaagataaagaaaacaagtgcaatttaaatgtatcactattagcctctcaccacattgcgctaaaaattgacctacatgctcccatgttgtc

SEQ ID NO: 43269 - DNA, 613 bp, Oryza sativa
  unsure (1)..(613): unsure at all n locations
tgcttacaacctattctttatggcgacgatgaaatgtccttatggtgaactattttggaagattagagtgctagcgagggtcagattctttatgtggttggctgtaaaaggatgatgcttgatggctaacaatcttctcaagagaggatggctgttcgttgtgccaatctgagatggaagattgtgaccatatgttcatcaagtgtcgtacaccaacagagtatggacaatgctacgagattggatcaatgtggcctttgacccacctagtcagcaaggtcttctatgtggcataatggtgacagcaaacgcaatcttgttttcgagcgagctacatgaacatgctcgatatgcttttcatgatggtgtgctggctcatttggaaggaacgcaacgggatagttttcgagcagaggttaaaacaattgcagagaagctttggagatattaaagaggaaatagccatttggagaactgctggcatatttcaatattgntatgaatagtccgttttagctaatgtcatgatcaatcgctataacatataacacccccttacaatctcaatgaaatttgattgggccatctttcagccgacccgcgaaaaaaaact

SEQ ID NO: 43270 - DNA, 632 bp, Oryza sativa
tgaaaacgacataattaagtgttcgaaattcatgaaatcatatctaaaaaattttgtaaattggtgaaaaaaaaatactaaaaataggtgtacatatgcaatacaatctaaccaaatctcaaatgaagttgaggttggacttcagatttagtgagaatgttcttcatatccatatttctctgtagtaacttttttatgaatttagtaaatttgtatgtatgatttttcattcggaagccaccaaaattacttgaaggaagaagacaaaaaaagtttcggatatggcaaaattggttatatagcatcgaaagttcacgtcttttgtttcatagcaccgaaagatatcggttcactttaatagcacccaaagttcactccgtttctatattttaacagttctgtcaattctcgatcattttccgtccgccttgatcgatattgacccagccacgcacgcgatatgacgtttctacccctcacaaatacaagtagaatgcatggcaatgagaggtagaaacgttatatcgtgtgcgtggctaggtcaatagtgatcaaggcggacgtaaaacgagggagaattgacggaaatgttaaaaatgggaacggggtgaactttaggtactattaaagtg

SEQ ID NO: 43271 - DNA, 595 bp, Oryza sativa
aagacaataaacatgacatgaacaatgtgaggtgatctagtgataaaattaaacataaccaggagcatgcttaagataaaataagcatcaacatcatttagagaacgcaataacattgcgactaacagatgtaacaaaaacagagatagcagtaggatggtataccctgtaaaggtccctccgctggattgtgagacagaactgcctccgttggtgttgtcgatcggtgcgactccagttcctggcgcacctccgttgacgccgtcaccagtagacattgccgcgacgcataccgaacagaaccaccgacgatgatgaagagagagcagttgtacggaagcactccttaaaaacctgatcacccgcctacccggtgcagatctcaggcgaaggtgtggtttcggaggccctgctcgttccgatcattcgtgcgcgcaagcaatcagaaccggggaagcagaagcagcacaggcgcaagcgtggaggaagaaccagcgatgggagaaagcgtagagatctgatcggaggaagaaccagtgatgggagaaagcgtatagatctgaccggggggtctctattttctaatagcgtcgga

SEQ ID NO: 43272 - DNA, 664 bp, Oryza sativa
ttccatggacttgagctattcctgttgtacttccatccaattgcttccaacaacatgctttgtctgggcgcccagatgaataacatcaaatttatggactttatgacaaaggtgtacaatggtacattaattttgcataattgcatctcttgcttcaacaatagacaaaaacatgggtggacagggcatctgagaacttcttcgtaaaattttcgctcacaaaagggttagtgcatgctttgagaacgttggccaaccatccaagcttaaacaagtaacagcatttcgttctcaaagtcctgatgcagtgaaacatatatatggtttcactgtaacacaagtgcttcatcctatgagaatgggacatgtcagcacacatcgcggagggcagtagggagcaatggaaggacaccaatttctattcctgtctgtgccaataaaaatgatgctgtgcgaatcagaggaaatagtgcgttgtttggtcgctgagcagttagactttgagactacaacactgtccatagtataggatcaaaaggttccataggagcacattagcatgtaaatacataacagtaggaaaaatctagaattatcaaaattttgtaatggaggtaagatttggcaatgtaacaattaccaaaacttagtaggggtaattttg

SEQ ID NO: 43273 - DNA, 616 bp, Oryza sativa
caattagggggtataaccgcgagaatgctagctatcgtgcatctgatgggataacgaaatatcatggttttcttttctagccacccgtgactccctctctctctcacacccccttttctctctcccacgctcacatgggagggcgaagctgtttctcttccctgtgcgccattgggaacccctgagtctcgtcacccttgcttcatcaccaccaacaccgtttctctggcctactgctgctaccggtgggaaacccctagtcccatcacccccgcttcattggcaccgacatcgtttcgctagcctgctgctgccggctgcttgatgtttcgtgttccaaaacgaagtgtttcaatccatgattcaacagtgtttcatcattttaatagtttgaaacatgtgttaagctagtggtgaaacattcttctataaatactgaaacatcgtctgatttttaggatgaaaatcatgtgcccgacttgtagttgcctgcgcataacaatagcaaactacttaacgattggtttgtttgcaatgccaaatcataagcaagtttttggaacatttgtatagtttggccaagtttaatagcaacaagacattggcaaaatactat

SEQ ID NO: 43274 - DNA, 584 bp, Oryza sativa
tctaatacgactaatcattgcaaggtattgtcacgtcctgataaattcatcccgaaataaaaatcattctctaaaaggaataatagaattaattaaaattcgaaaagaaattggcaaacactaaaatacgtgccagaagaattcgaatgtggtccggagaatttttgttaaattctccttggtctaaaaggagacctccaattttacttgaattttcagagcacaaataataattaagaagaaataaacaaagttaaaatggttttataaaaagaaaagctctaaaaagtcccttttccccccctctccctcttgggccgcctcggcccatcttcttccccctccctctcctctccccgcggcccattcggcctccttcccgcgcgcgcgccgctgacgggcgggcccgcccgccttcctcgctgacgggtggggcccacccgtcatcccctttctccccgcgctcccgccgacttgcccgcgccctagagccgtcgccgccgagaatcccggcgaccctgtccgccccgcgtgcaatcaattggggggaattatttcccgggatcccctccccctttcccccc

SEQ ID NO: 43275 - DNA, 635 bp, Oryza sativa
cgaattcgagctcggtaccccttgcgccaatgcccctccctggacattacaagcaagctacgcagtgtggggcacctccatcgcgcctctaccatggacctcccgcaggctctgataccacttgttataaaaccaaccccaaaatcgacattggtagctaaacgcggaagaaaacaccataggagatccaaaacgatgacgacaccgagacacgatatttggtaacggagttcagccgtagcctacatctccggagcactgattatgggcgctcctcacagatccagcatatacagtatatcagatttacaacgactcacagccggttgacgccggcagccgctccctctcgctatgctaagtcaccatgcggttacaacaggcacgaccctctatttatgagaaatactaagatagagtccgactcatactctagtcataatacctattacaacttcaagtcctaaactgtaaccgactacatacacatattcgacacaaactctaacatatacagcaatttttccacttattagtggcatccctcgctatgttttgctggcttgatatttgatgacttccatttctttttggtaaattttgacagccttgctcttgatgcagtatttgtagac

SEQ ID NO: 43276 - DNA, 708 bp, Oryza sativa
aaattcctcaaactcaattcagaaatttgaaagtgaattcaacttttacctttcaaattaattttttaatcagtctttcctcatttacaatttgttcagattctcatatatcaaaatccaccccaagataaaaaaaaaatccttatgatccgcaggatgatggatgataaaagaaaacacaaagatttttctatgggtagatagcgaagatattcctaaattaatttttataatttgatataactaatcattattaatattatgttttaattaaagtattagttatgagattaatcctactttgatccccttggtgatcgaatgcaaacatatatttacatatacatgtaacaaagcgcaaaatctttaatacgtattcattagcacaatactgatatctcatctatacactcaagcagcaaatccaagttcacgatgagcacaactatcgcatgtttctggttagcatcaaagcttccaacgaagcatggtcggacacgacaaacgaaacggattaagtaaagaatcaattctcacggatgtacatgctttggaaacaattgttgtgaacacacgcgtttccgtaacaataatgtagcataccgcagcggagagaaaatgcggagatcgtaggacgccacgatgacgcaagcagatgggaatcaatctcggataaaaattatgtcaaaaacatcttcaatttttata

SEQ ID NO: 43277 - DNA, 662 bp, Oryza sativa
aaagtcctgatgcactcgataatctgccattctttctccttcagttttgcaagggtgacatgtctaccatgggtaatgccggataaagcaaggagctgcaaattcataggtttgccaccataccaattatcctcccaaaacagattgtttttgccatctacaacctaagttgaacaaaatttcaggaattcttcctgacttccatcaaaccatgctagaaatgaaaattacccgctttataagtcacccatgacaaagttttttgactcaaatatttttccctgagaatggaaattatagaaacgagcgctcgtcaattcgtcattgataaatcatagaatgtcacatatgtatgttggtatgaataatctagagttgagctcctaattggcacagtccgtaaaaagacattcggccttcatggtaactatagtcctcttaatttttatatgtgtacaccgatctcaagtgaggccaaaagatggacatcgcttgaaatgaagaacgaaattaccggtgggcggtggtacaatcaaggaatgatctgcggaaaaataaaaacggccaccactttactgttctcgattaccgggatatgtagtacaccgatcttaagcgaggccaaaaagtggacagcgcttgaaatgaagaacgaaattacc

SEQ ID NO: 43278 - DNA, 1081 bp, Oryza sativa
ggaagatcttatcaataaagtgataccctccattacttattaccatttgaggtgttccgaaatggaggaagatgatttcgtggaatatccaacgggcgtgcttggtgtcagcgacttagcacggcattgcttctacccactctaacacatagtcgatgggcaccaagatatactcacaatcatgggactttgggaaaggtccccatagatcaaataactccacttgaaagttgtaggtcaagggaatcgcatcttgagtggtgatatctccatgcttctggcatttccaacatattcgaatgaattctttagtatcttcgtatatggttggctagaagaatccactctaccatatctttgcatgtgtgcaaaatgcatcataatgccctccatatggtgcatcatgaaatttttccagagaatgatctggttaccttcagcagctagtacacatctcctaaggaagctgtatgcacactctgtaaaggtatgactcatcccacaagtatcgtctgttctcgtagatgagcctcctttcgttctccctttgtcatatgaatcctgcaaacatgaaattcacagtatttgcataccatgcattggaatctgttacatatagtagcatgtcatcccgtaggaagtcatttatcggcggttcctgtatgtcagtcttgacaaacgatcagccaccatattttctactcatttcttatcttttatttccatatcaaattcatggagtataaggacctagtttagcattggctttcccctggtctgccaagtgaatccagcctaaagctatataacatacctgaaagtggatgtttaccaatgacggacagagatgtcactacctgctgcctacctctacaacccatggagcacgcaacaaacaaagataacctttaacctagatactatctctacattattgattactactctagactcacgtaagaacttctctatccagagtcttattactagagcacttaatataaaccttaagcaatgcacccgcaatgaatagaatatatcttacttaaacaagaaaattaaatacctaaaagaaatctcg

SEQ ID NO: 43279 - DNA, 1051 bp, Oryza sativa
tgcaccctcccctctggcggagggaggcagtggacagtaggctccagatcgagctggatttttattttttatgttcatacttttttttatataattttttatgtgaatttgggatgttattatctgtgatgtatttttttttgaatttgtgatgtttttttttagaatttgtgacgtgattctgtgatgttatccgtgctttgtaaagttatgtgtgaatctttgatttggggatgtatgattttctgatgtaggaaacaactcatttggggatgtagtgagcaaccttctgaaattaatatgcaaccagctaaaaacaatgaaaaaaaatcatttagtcccgtttggtgttactaaccggactaaatatggatctttagtcctggttaaaataaccgggactaaacatgaatttttagtcttggatttggagtcccgatttataacccggaactaaagtggggtgcaaatcgggactaaaggtgttttctccagcagtgtgtattaacaaccatgaacaaaaatacgaaggaaaacaaggtcatgcgtcgtgtgtgcggatggccaggggataacttgtattgttgggcggagggaatggcacgagaggatattttaaggtttcttttttttttaaaaaaaagatgatccaatggctaaaaacattggttttactggtttaagtaaaaaccaatgattggattttcttttccataagaattttaaagatttaatctatctcattagagcgtcacctgatatcttagaagtatttatagaaatgtcacgtgaactagaatacttcatagaattttactatataactaggaagataacatgtgcattcacgcgggcatcgtattatttagtttcgaaaacagatataacaaaataagttaaaaactaaagtatggtattttccctttttaattgaatgttcgttgtttatttttcttaagaaatcttgacaaaattttagctaacaaattaatttttttttaccatcatgctggaatataaatatcttagatagcgcttctctatgacatga

SEQ ID NO: 43280 - DNA, 2818 bp, Oryza sativa
tgcaggggaaaggcgtgcaaaggcaagtttgcgggaaatcttggtacaaaggcaaaggcattcattctaatccaagtacagtgtgggggaaatctcgcaggcttccagtcacgtacgcaaatgagattcccatatctatgctacaacatgatttgggaaccacacaagaaaagacaaagtgatcgggactaagatgtggtcggccgaaccacccatgagcaatggtttgcacaattcctcactgaacctcccagaatttttagtttaaatggttcttactattgaaaaatatctggaaaatcaaactcaagattacaataaactaggacgtcttaactagggtatatgattttccttgaaatgacttgcatactctttattcttcacataatacttgttccttgtgaacataaatttataggaatatatcttatctaagtaattgatgaataaaagatggcctgataaaatgaactttgctcttatgtgttgagtattttggaatttttatgaagaaaaaggtataactttacaaacttctcaatgatgcattattcctaccaaagtcgtatgttgatcatattgacataccttacacatgagctgcatcttattacattgagtttagtcaaattgttgagaatattgtaagattctttttatgatttcaagatcaagatcacggacacaccacaaccatatgctatatttctacactggaagttagcaacctttgcccatccaccaaataatgcctccgtatacctatgatcctctctccaactatccatccaaaatgagacttgtgctaaagaaatgagaaaaaaatagatatatgctcacaaagatatcctcgagcgtgaaaaataaaagagaaagagaaagcaagcacccatttctcgaagtgttgctgaaatatttgtatgcaggatgttatatatgaaaatacacctgccatgtgaagaaacatacctccggccaatcaatcatgagcacagggattgaagacccacaaataacagcaaaccgacataattgaggccaattcagtgtgtcatgagagcccatatgtcagcctcacagaagaaagttggtggctagtgacagtggaagtggttcgggcgtcacgtgaagcttcctcattggttccctatgacggtaatggatgaaatggacttaaccacgttcgttagtaactgttattaggcatcaataaaagaaggaatgagcttcaatctcaacacacaactcaagtggagatctctaactttcattcaaggctactctctagcagagtgttagaaaatatggagagagtgagggcaaattccaacagcagtctctcaactcttgtacctcggcagatgtatgttttataaaaatgagtactcgatatttgttctgggtttttaaattttcttgtttaagtaaaatatattctcatcattgcagcttcatcgcttaatattttatataaagtgctccaatactcaggctgtataaagaaggaaattcttgcaccaggctagctatattagtaatagataatgtagatgtagtgtttatgttaaggattgcctttgtttgttgcgtgctccacaggttttagatgtaggtggtaggttacggcagccttatttgtcctttatagtcttccacggttgggtgtgtcatagagctataaaccggattgacatggcagaccaggagaaacccggtgcccaaaccaaatgtgagagttttaccttaacttaattaaaaaatcgtaacccatagcaaatcgtctctaccatacgcctatcatttagttgttatccttggaagaacttgttccttagattttacacacacattcactgttactcaatacccttggaatactctaaggtgaaatgctacaacagtatccgtgcgcttgtagatttatttcagattgcaacaaataccaacatgcccaaggccacgcgcgtcgaggaagagctctcggatgacaagctgctggtgtagcagggacaacaaggtggcatcctcctcatcgtcatcatcattctcgcctgacgccaagctcctcaggatgttgaagttgctttgcgccacaatctcctgcttttctagcaccccgtcatcacaaagcaagcaagcaatcactcgaacactttctggtagattaaccacccaaccgaccaaaaaaaactaaacaacgcaaacaaaaatcaccgaagctgtggctaggtcagatcacaactcgctagagccaacgacaatcaatcgcaatgatgacggcttggattggatattatagcgtggagtctatttcgagaaaatgaagtagaggaggaagagatagaagtagaagaaggccatgttcagtcctagtcttggacgaacatcgtattctcctcccaccatgccctatgcaggaggatgtgatcccagctgtcgcctcgggtatcatgaaatgggggaataatttaccactaggttcctctattggctccatcgctttccgcgagagaagaagcaaaggtgggtgtgctcaaatgtgaggtaggaagggaaggttgtggtggggtttgggaaggtggttgtctctggcgccagcgagtgatggagcgtttgagaggaagagaaaaaaaggggtggggggtttatatatagacggaaggcagggctgcaggtagtagctgttggaagccggtgttactcctgctttcctagctcgctgaggtggctgaactcggagcccaccaccagcgctggcaagcatgcaggagacaagtggaatagaagaggggaaggcaagaagtggaagaaggcg

SEQ ID NO: 43281 - DNA, 878 bp, Oryza sativa
tgagggttattgttggatcgaacacaagtaaccaagcctaccataagggaggtgaatggtagggaaaaccaaaaacccaaaaacttttagcggaaataaaacttaccctcaaatcgatggaaatcttgatgttgtccgatcgccgtcggtcacaacgctcctaagccgctggtctgaccttcgtagcctatccggtcagaccgctgcactcccttcagttagaccgtcgtactcccaccggttagactgccgccttgctgtcggtcaaaccgttgggatccagaaaatacgtatcgacgaaactcttgaaagtatatcaactttgttgcatcaatatgtatttacaaaatgcatctaaagcactcctctctaaactcaccaactaggattgaaagcttgaagcaaaccctaacttttctctcccaaaagtcaatatccttctagcctcacccctcatctatttataaaaaaaaaccctactcaaagtaggtctagaactcctattcacaatagaactttatggagagacctacggatcggacattcaatccaggagaaaaaaatcggacgcccgtcccagccatcggatcgagggattaaatcccgaccattggtagcgcgtcgttactgttcgatgcaaacttctcctgggcatctacatgcatccatgcaacttttcccgcgcacagaattgcatgtgtgacagggatagttaatgttttgtaagcaaactttaaactatttttttctcttaaattattaatccaaatcatgatccaattacaccattaaattcgttgcaattaaatctttaaaacaagaccacacatggatatattctgacgaaaaaaattttagcttattattgaattattttt

SEQ ID NO: 43282 - DNA, 831 bp, Oryza sativa
agctaagtctgaaaatatctagcataccacttagtctactttgcacctttactaaaattagaccataactcgtttagtaaaaccctttgatcagcatgttaaaaataatgcactctaccactatatgaaattacttaatctaattcaaaatataaccacatgaaatgacatatataagttaaacagtacatagagatgcaatttttttatttttatttcatttttttgatatttttttcacacttaggagaacataggaaccaaccgtataaaaaataaactcaaacggacaaaatatgtgacatgtagaattttccgaaactctatcaaaacggacaaaatatgccatctattaaaataggcgtaactttctcatacggactcggaatcaggcaaataatatatgtacggacatctacagaaaaagttatatccgattctcctccgctttgccgggttcggcgatattaaaacctccaaattccgcttgcaagattgtgttttcgaggagagaagtttttcggtggagctttggaaaattccacatgccacatattttgtccgtttgagtttattttttacgtggttggttcctgtgagttcctaagtgtgaaaaaaatatcaaaaaaataaaataaaaataaaaaagttgcacatctctctcctctgcactagttcagagagaggagaggagaggaaaaattctacatatcacatattacatccatttgagttcaatttttctatggttggttcttgtgtgtccctaagcgtgaaaaaaatatcaaacaaataaaacaaaaataaaaaatttcgggggggggggggggt

SEQ ID NO: 43283 - DNA, 601 bp, Oryza sativa
agtgctgttgagattataggcataaaatgatttaatctatttcataaataaatcatgacattacagatgaaaactagcatgaacgcatcattagatctacacatgtaaactacacagtataacatgaacagatcaaatatgcgcaacatattgaatacgtaccgaggtagcggaaagaccggctgctcggtcgaaacttttcgcaggcgtctacgaaggcacgcagcacgcgagcgaagaggaagacgagccgtcgcggacaaacagggagcagtcgcgcaaagcgcttcccaaaaatcttattgccgccttctcccggtgcaggacgtcgaaggcagaggttccggagacctgcactcccgatcgcaggtgcacgccggcaagcgggatggagtaatctacgagcgacggcgcagcacagagtaggaggcaaaccctagattgattttgcgtgtgttgcgtgaagacggcgggtcggtttatatagagaagggtcacttgatcagggcgcccgcacgatctccactgcgcgtaaccgaatcggataagttgcgcgtaacttatccggactccacgccgtttgcacgcaccagatttttcg

SEQ ID NO: 43284 - DNA, 683 bp, Oryza sativa
tagggcgaattcgagctcggtacccattccgctgctgttttcttttcttttgtaagtatgtaacgttattattaagatggatttgtatattaaattgtcagtttgtgtacctcggctgattcctggacgaggattttatgcacaaattagttcggaaattactacagaatttccgggcgtgacaatagccagctcctgacgcgtcaagtcaccggtcgggcaaatcgggtttacaatggctgcccctagcgcgccctggcgacgcgctccaacatgccggggctgaggacgacggcgaggtcctcgaaccactaggtgcggctggtgcaccgcacgctgaggcagctgctcttggtgtcgcacgagaaccggaacaccgagctctccggcgaggaagctcgtcagggtggcgtcccctgttttgcttgtgcttttggtttctgatgtaaaatactccatcatgttcttgtttggtgagatgaatcttcaaatctgcaaagttgcagatcggttgtttgagcttagcatgattgattggggtgggtgggggagacgtgtgtatatcgtactgtatattcgagttttgggtgggctcacaaggtcggtagcgccgaaaggtttttttttttatccgaagcgctgattgcgacgttctgaactggagcccgatgctggtgtggcat

SEQ ID NO: 43285 - DNA, 504 bp, Oryza sativa
tcatgctatacaaaagataaagccgttgcccacgctggattgtggttggcacgataaatgtttcacatcagtagctcgcgacccagtcgttaattgtcatgagcacaaccatcaaaaccatatgctcacaacccaccttacccagattttatttatcaattaattaacatcacacgattaaccatcgtgatcgaccattaaatatagccataattaaaataatataatatagtttataattatcccctttagttagctaatgtttctaagcatagctaagcacacatacatatagcatttagttgaaccaatccaatatataaggttcatgctactcgaattataacccataggaaaataaagtcatcttaggccattaatcaacggggaaaggttcaccacccaatgacattcgtcaaataatgcatagttgaaataaaataatagctttaaacgggttcaacatgctcaaagggttatttgggatctgtgtgacttgccttg

SEQ ID NO: 43286 - DNA, 514 bp, Oryza sativa
ccttttgttcttgattactttattcctagataccttgggttattataatttgactagttgggctttatatattggttcagctagatattaggtgtgattgcttagccatgcttagaaacattagcacactattgggataacttatgattcattattatttaatgatggcttaatgatagttcacgatggtcaatcgtgattggctaattaattacttgccaactaaaacctgataatggtgggttgtgaacacatggttttgagagtcgtgctcatggcaattaaggaccggttcacgagtttcggttgtgaaacattaaccgtgccaaccacaagccagcgtgggcaacggctttaccttttgtatagcgtggttcattgcagagcaccagactgagaagtggcggagataagcccacaggggtcgctggggagtccatgccttgtttataagggggtgattatgatccaggaaaggtgcgctgtagtggattgtgttgtgcgaggggtattg

SEQ ID NO: 43287 - DNA, 683 bp, Oryza sativa
acccctttcacaaatcatgtcatcaacataatggcaatgtggcgcttatgtctccacatgccgcatctcaattaccttcccaaaggtaattgccccaagcatatagcatttgataaatatgagtatgcatgattctagagtagcatttctaagcaattgtcatagttgactagggactcatacgtaaacatggttacaaagatttaagggttagcaataatcaaggcatggcataatcacaagtaggatgttcatcattgcatgcaattttatttgtaaacaaaacaattttgcaattaggatcaacatgttcaaggaatagtgatgacttgccttgctcaaagtcttgcgggtcttggccttcgcttggatccgcaactccctcgggctctattgttacgtgcaaaaattgatttgaattcggttagaattcaaataaaaatccaaataaatccaaatgaaagtcgaatgcgaaagtcgattcctttttattaactttactatgtgcaaactacggcaaacccaatttcgatttaaactactttgcgggtataattatttcgttgcaataatttactctccccgagcattgtatataataggttagaaatttctattacgagctaaatattggacgaaatcctagaaatattatacaatttaatttagtctatgactaaacg

SEQ ID NO: 43288 - DNA, 595 bp, Oryza sativa
cctattcccattcttctcttttcattctattatctatttatctctcctattttccttcttctaaaagaaagcagaatttacgtaaaaaacatttaagcaactatagcatttaaatcataaaagtattctaatatgcttatgctgttagattatttatatagtaactaaatcatacatatatgatttgatcacactgctaaaaaagacacagagatttacgtaaaaaacatttaggcaactatagcatttaaatcataaatgtattctaatatgcttatgttgttagattatttatatagtaactatatcatacatatatgatttgatcacactacttaaaaaaggcacatagagctcggtgttataggtgctggaagtaataaaaccggcacatatataccatttcccatctatgcgggttgaaaatacaaaaaaaaaaaaactgccacctttaatagactgtaggtgtcagttttctattatatagctagatgtatttttttttaaaaaaaactaacacctttaatttactataagtgttggataattaaaagtcgagccgagccgatcggtggtcttgagcggataaggttga

SEQ ID NO: 43289 - DNA, 521 bp, Oryza sativa
gtttccctgtatggagttgcaacggtgttatttttattttattttttcggatgttttttcacactcaggatcacgatacaaccaaccacaaaaaaaatttaaactcgaactaccacttagctaagtctgaaaatatctagcataccacttagtctactttgcacctttactaaaattagaccataactcgtttagtaaaaccctttgatcagcatgttaaaaataatgcactctaccactatatgaaattacttaatctaattcaaaatataaccacatgaaatgacatatataagttaaacagtacatagagatgcaatttttttatttttatttcatttttttgatatttttttcacacttaggagaacataggaaccaaccgtataaaaaataaactcaaacggacaaaatatgtgacatgtagaattttccgaaactctatcaaaacggacaaaatatgccatctattaaaataggcgtaactttctcatacggactcggaatcaggcaaataatat

SEQ ID NO: 43290 - DNA, 2465 bp, Oryza sativa
gtattgtacatgtatagatgtaaatagattgattattaaagtgataaagctgaaaaaaacatctgatgagatttttttaatcccctgctttaggcattactctgctacgctcccttatttctttattagtaatctgcattgggacctggtctggaagcctcctggttggactccactccaaatgatccaacggtccatctctgtttcaactcccatctcctaaaggtccctgatatttcagatgacgaggcatatcgctgtttgagaggcttgctgctttcacctattaagatatttatgtgtcggattctatttccattgctagtatttattaagataagctgatatatacttttagtctacaaagagattaccctcatataagagttgagacgacagatgctctagcaatttttctgttacctttctcttctttatccttcctcatgcatcaaacttcaatttaataaacactaagagtcgatgttaattaagctgttgttaacatatttttaattatagagttattagaaaaaaaacaagattacttagagactctatacttacatagttgagctacgataaagactctaaccactaactataaaatatttttattactattttttccttatttttcaccgtcatctaaccatatttccattttatagagggtaagagtcgttgttgacagtagtaagggcattttgtctttccttttctcttttataagtgagcaaatatttctaactagaaaagctaagagcccctatatatgacgtacatgccctttaagcttaacattgatgtttctctcatctcccctctctcttccatgtcgccaaacttgacttctttagttaacaaccataaaatctattaattgatttgtagatgcccttacctccattcctagcacttgtcgtaattatgggcaataccagagcattatgttttaaatttaggagagaacattccgaaaataataaccataatatcctatgaaattctcgaataaaattgcatctaaaattagacatttggcaaaaattaatgtatttggtgttgtatgtattatttattgtgttgcttcattaggtcaatatagtgaaacaaaacaagcatgtccgccgcaagtttctcgtcatttggatcattttgcatgacatccaaacggataccaattacttaagcaaaaagtaacaatataggttgtgttatcatatatcactttataaaaatttataacaaaattagacacacaacataaaaaataaagcttgcgcgattttgttctttacggttaaattaacagtttaatcccatgtcgacttactttattttataaaaaacgaaggctattttctatcatattcttactcatgcaagtcatccaaggccatctccacacccaaggtcatctttgctggtgttctgaattttaatgaaattaattgagacattgaaaacaagataaggttttcttaaaaaaaaatcaaaccaacaccttgaaaatgcaccagtcaagcacaagtggcagccaatagctagcatgtggtctggcaacgagcaacttgccaacgatgcaaaagctcagtgacgactcatggcttagcacatcctggcgaagcattatatggcagcaggagaacaaccagcgatgtacatagtgtagatggatggccaaagggtgctcaccagcaaccatcgcacatgaaaaaacgctataggaccgaaattatcttcaatattagaagctctaactgctcgatcggaaggatgaagaaatctatcagcggaggcattgtatttggttgtgacagcattgtttatattgggaggaaaagtgcttgatggatatttttttattatgaacaaggggatcagtccttcctagatcttgcacttgttggaattaatgaatgggccttagcccactcgaagattaattctttggaaaatcacaaaagtccacctcatgggatggcatgcatgtggagtttagtatcccccttgcttattctaggagagggggacctccttaaaagggagaatgccctcctagccacttgaagcatgtgtagtagagagaagagggggaacacgcgcgcgcttgctcgcctcgcctcgcctgcgatcggggccacctcgatacgtgttcaatatgttgcacatatttgatctgttcttgttatactgtgtagatctaatgatgtgttcatgctagtcttcatctgtaatgtcatgatttatttatggaatagattaaatcattatatgcctataatctcaacaatccaaaaaccttattataggcactgtgattctactatgactggttttgccgatgcactgaggccggataaatttaccggtgtgcattttaagagatggcagatcagggtcactctgtggctgacagctatgaaatgcttctgcaaatttaccggtgtgcattttaagag

SEQ ID NO: 43291 - DNA, 674 bp, Oryza sativa
tccaaacaaatccgagggagagagggagggaaaaatggggggaaagggggaggggatcccggggaataattccccccactttattgcgcgcggggacggcaggaggtggcgggattcgcggcggcggcggcgctagggcgcgggggaggcagcgggagcggcgggaggaaggggatgacgggtgggccctacccgtcagcgagggtggcgggcgggccagcccgtcagcggcgcgcgcgcggggagaggccgaatgggccgtggggagaggagaggaagggggaaggagatgggccgagccggccaaagagggagagggagggaaaagggactttttagagcttttctttttataaaaccattttaactttgtttatttcttaataattattatttgtgctctgaaaattccactaaaatttatttacgcattttagacttttaggaaatatacaaaaatcctccaagccttatttgacttttaactttgcaccttttaattgttggaggctttcacacggattttaattattctaggcataatttagaggatgtattttagggtcattttgggacgtgacattctctctatatgatcttcccacgggataaaataaatacgatacccttggaatactctcgagtgaaatgttacaataatatatccgtgcgct

SEQ ID NO: 43292 - DNA, 563 bp, Oryza sativa
ctccaagctgagtcatgctttgtaattgttaacttcgatttatgaaattagttataaataataactaagattaataatgagtcgtgatagacacgatttggcaattaacacttcaaaaattggttattcattaacaaggatactaattgagagtccacaacaagtagcacggtgcttagcaatttttatcttgaattatataaattattgttgtacagtccaacatgatgggaaggtagagtagtagaatggtagaaagtgtttttaatcccggttcgttacccccatatgtagtcccggttatacaaccgggaccgcgaatccgggattaaaggtacccatctttagtccccagcctggccgctgcagcccccgcccggcgatcgccaccgcttctcccggcgtcttcccagcgcggccgccaccgcttctcctatcgagcccgttgcgagagagcgagagagagagagagagagagttagagagacggcgagagaagaggcatggagaatggctggatttttcacattttgatccttttgaaaaacttatttcgcaaatag

SEQ ID NO: 43293 - DNA, 1214 bp, Oryza sativa
caaggaggtcatccaatacatcaaccaaacctcaaccacaagcattaagaaggaagacttggcattgaaggcgaaggaagaagaagaagagagtcgcaagagcaagagcaagagcaaggcggagatcgatgatgaagagatggctctcttcgtcaagaagttcgacaagttcatgaagcaaagcggttcttcaaggaaagttcgtccaagtattcctccaacaagtcaagtggaagacactccgcaagggtgtgctatgtgtgcaaagagcccgagcacttcattgacgattgcccccacatcaaggattgcccccacttcaaggaagacaagaagaagcttgagaagaacgagaagcacaagcatagcaagcatgatcgctatggccaagctcaccttggggtgatcttcggctccgacttcgagtcaagctcaagtgatgaagaaggagttgccacattcgccgtcaagccttcatcaccaccgagactcttcaactactcaagtgatgaggatgctcccatttgcctcatggcaaaggagcctaaggtaccctctcccctcgagtcacttaatggcgacattcgagctcggtacccgaagatgttgaggatgaggttatggatgacgagttgttcaaatccatagccaaggaatccataccacacttgagtgagttgcttgggagaattgagaatcaatatgcaaaccttgagaggcaagaggaattgctcattcgtgagaaagagcggtctcatgaactcaagagtgaacttgctaaggagagagagaaaaatgaggctttggtacggctttacaagcaaaccaaagagtctcatactaatcttgaggtggcgaacgctcaacttcaagagagagtggatggcttggacaaagcttacctctctcttgaagagaagttcgaaaccttaaagaatagtgtctctctccctagcgaggcatcgtgctccaaaattgtcccaagcaacgaaccatgtgtgaggtgcaaagatattgatattgaagcttgtagtactaactctacttctttgagtgctttacaaaagcaaaatgagaagcttatgggactccttcataatggcctacttaagtgccatatgggtagtaaggcgctaaaggagtacctaggctatcaaagggacaacttcaaccatgaaggtcttgggtatgtttctccacctaaaggaaaggtg

SEQ ID NO: 43294 - DNA, 522 bp, Oryza sativa
gaacaggaatgataaaacgaagcgacgcattacgaagtgaatccaaagagttttcatgtgaactgaaaatagtcactctgttgttatgttacataattaaaaaatccatccattttgctatgcagaacaagcagaatggtttacttgaaatctgtagtaacgcatgggcactatattattcatatgagaaataaaaccctgattgttgttgcagattttaaccagtcattgcaaatggttaggaaggatacttcagggtatatggattaaagaacatataccgagtaattcagatactaaaaagttctagacgaagaaaaatcaatcgagccacatctgaagcctgggtcaagtgaataaatcatttacctgttgcaatgtcacgattggtacccatggcaatagttactctcttccctggttctagcatttgctcaaccagaacattctgtgatgaaagacaattataggaagtttattggatgagaacgtacattatctaatacatgatccacaaaggtg

SEQ ID NO: 43295 - DNA, 987 bp, Oryza sativa
agggagagagagctcaaagatccaaagcaccttagtaccaagctcaacccaaagtgaatgagaatgaaatgagttgggtaaccctagaaaagggttaggtggggggtatttatagaccccccaaaaatgtggccgtgtgaggggaatctttcagccacgtcggatagtccgatacaagatcggatagtccgatattttaaacctccaaggcaacgagaaatagagaacgaagttccatgaaatttcggactttccgagacatcgaactatctgatgttaaatcggagtatctgatattttagaagcaaaaacttcgtcctcatacagagactcgagttctatgaaatttcggagtctctgtatcatcggactatctgatccgacattggatactccgatacatagaaaaactcactcgataggattttttcaaatcaagacagagagtgaagttatatgaaaaatcggatagtccgatacatcggatagtctgatttcaaatcggatattatgatgttgctcaagtaaaactgcaataactttttactctgaactccgatttcgaagatcttggactctatggaaagctagtttcgtgggctatcaaacccaacataaaacatggtccaaaaccttcaagagattttgaaaaacttgcaaagaaacccggtgtaagtgttgtgacaagtgaaacaactcgtgattaaaattttgacttaggtttttcaactcacacaaagatgaagcattttgagcactagtattttaccaataatatgcatgtggtatccctcttaatagtacgacattcctacgacacaatgtaaggtaaaaggtacaatatactatttgatcattgccgcattgcatcgtgatgtcgcattcatggggtatgcatctcattacaacatgtcgaggacataacaaccttcacatttgcttgaataaaagtgttagtcctctctaatcgcattgtaatcaatcatc

SEQ ID NO: 43296 - DNA, 833 bp, Oryza sativa
ctcatcaacataagcacgaggattatatttttaatttggacttgttccggatacattcatcatggattcatgattacgagtcgatttctcatgcccaacgattgaactattcattattccccacgagggccattagctgagtgcttgtgctagtcgggattcaattatcacatctactttggtattctccatgagggataattactcggatcagaagccactcagatgagatatgcatgatctacatcacccaagatatttatcactcggggtcatattaattgtcgtgttctatacgtcatatttaagggtatcggtagacatactttaggtctaggcctaatatgtctgcagcccatatttttaggtgtggcctgtcacgttcttttagggacttaggcattttttgcttaggcaaaagtgcacgtgattatatgcccaataccttcaaatccttttataccgcagttactcaactttttaggagttggtgtaatgcattttaaaaggtgccaaccagtaaagctttaaataactgcccgctgacttttttatatagtcaggcggctgttttgttttatcaagcaattgataggatacaatattgttgctttttgccatgtaagtgtgcatttttattgaccaatattatggcttaggctgattatatatttggtcattttccaagcagtagatatatcacttggatcatgttattcgtggattcacaccgcatatgctattaatattaagttacttggttgactataattataaaaaccgctcggttggttggattatttactccttgactatatgtttagtttgttcaa

SEQ ID NO: 43297 - DNA, 797 bp, Oryza sativa
catccctactcatacctgtcttgaatcaacctgagtttgctactcttgaattactcctcgatatattgagcgactgaactcttgttcagacagcattttcaccatgatagtgtttggaactaatatgtgagctaaggcctatatgtagattaattctttacaaaatcaaaaaagcctacctcatgaaaaaacatgcatgtcaacctttagtaccaccttgtctattctagaacaagacctttttgagagggagatttcccttctagccatttgagatatgtatggtggagagaactagaggaacacatgcgttcgctcgcattgtctcgcctgacataggacagctagttttgttcacttgagatatgtatggtgggttgtgaaagggcctatgggtgctggcccattaccactcctaagtgtgcatttgttagatgagtaaagatggacaggatataatgacagaatgatacaatatgatggattgctttgatatattaaataatattgtttgattggttaggttcttataaagtattggatagtaggagataatgtttggctacaagctagtgaggtggtacggtatactcttctatgcacttttgaacttttttagcttattttctaattgtttttccctcttctttttttttaaccatgtacacatgttcccatacatatatcagctaatggtatgatcctaccttttgaatttagatctaatatctcgtgcctataagcagggcatggccaagacgctgctagctgccagcccccttcaacccgacctaata

SEQ ID NO: 43298 - DNA, 2457 bp, Oryza sativa
agcatgatacaatatgacaatagcatattactgcaggaagtccatcttaacgtcagtgacatcgagttgcagtatctcagctctgcagcttaacatgacgccaacactgcaagagcagcaaggtcgttaatatatatgatatgatttaaaggaacatggcgccaatacagcaagagcagcaaggccatgaacatattatgaatttaaaaggtcggttaaaagggcttagataagaaaatatgaggaattgaaaattcaggctaggtttttttttgaaacgaaccttgggtgtgtgcgtccaagatctccgtgcacaaactcctttatgtatgtcccagcctgtatggacaccaaggttgattaaaccggagggagcaaactacagaatataaatgcttttgatgaattgccttatgacggattcacaaaagcatttaagaattgcaatatttttacaagttgatctgacatacaaaaccataatatacagtgaagaagaccacattcattcagcgaaaaataataacccaggcaatcacaaaagatagaactgacgggaaggacaaaattgcaatgcttacttgagtgcatagatgcaacaggtaatagtttgacccgccagaaattttttcaatctccatcctgacagatggttttctgtttctcagatttatggaacataaaatggatttgacaaagctgaaatcagtctcaactcaccagtgtataatccgttttctctctaatggacttctacgatgtaagactcttattggcgtcttttgtacaatttcctacacagcaagcaagagttactatgttcacatagtatccaaataccttagaacaacaaagaaaatagaaaatcaatgaccttagctaagatccaaacctattctttccaaatatgaaatatattagtcacaaataagcatgatacatataagactcagatttattcggaaacagcatgtggacattaaggcagagaaggtcttactggataaacatttgaggccaaaggttatgactgtaatggccactggcagtttaaaatttacaagaaatcatccattatttcctgtgatcgcccatacagtatttttctactgttgtagacttattctgcacaacccgtgttctggttctaatttattagatcaggacaatcttatgggatatggcagcacgttgctaggtgtgaaaagaaaatgaaaaaaaaaacaaccaaagaacatgatcaaaagtcaaaacaacactctgcaggtctttagtagaaagaaaatatgttataccatatctttgataagagaaatattatgtaggtcatcatccgtcagagggcgagacgtccatatgagggcagcatactgcttctgcacacgtatagtagaattaagcactgacaatcagcaaaaggttatcacctttcggcaacaaagttatttatggcttcagacaacaatgcaataagtatgaaacatatcatgttaaatacaataacaaactttgatgctatcgtttcagtaaagtgatatatcatcagtggtagagtacctgcttctctgcttctccttcccgcatcattgtccatatttcactgcctaccagcttgagatttctaaccctgacctataaaatgctgaagcataagcacatcatatctaatccaagtgcgatgttgataccctttactgtgttcttacatgtttcttttcagagtcattaatcttatctgctatttgttgaacttcagtagcagatggaatagatcgcacattcaagacttcaactaagaatggacgaccagatccaagcatccgaacctgcatatatggttcattcagcatagaaataacaacagatactctgatgaaaaaaatagcaaaagacacaactcaaaaccatgggattacatcaatatcttctcttccagcagcatggaacttatagccatcacctttgcagatggcacggacattctccccaattatctcctacaaaggggtatggggatgttcagttgtacttttatttcttgggttgagacagcatataaggtattgtgtcttacctcaactgatgcttcccccattctctcatcatcaattatccaacatgactggctgacattccttgaaagctgataatgaggaacgttgtcatgagggaaacaactcagttgaatagcacagcatcaattaaagtgcaaacatgcaaagaaacctttagtttgcttctatgcactgagtatgaggaaacacttccaagtggcattcctaatggtaataatccattacagaagacactgctgcaacaaaaatatttttctgttgcctaacttaaggttgtcctatgattatacagaactacatagttgttccaagtacgtaattaggagattagcaactacaaaaaggattactgtagtgttgctgacatactgatgggctgcag

SEQ ID NO: 43299 - DNA, 666 bp, Oryza sativa
gtgttagttaagagcctaaccatcatttataaagggtaattaatttcatcgatgagggagttaatctctgatcctatcagtccggatcaaacaccaaagccccggcaagtgttgctgctcgtcgccatcacaatgatgaacgcctggcacctggccatggcatttggttcgcgctacaaaaacatggccgtattgagcacttcagttttacaaacaaacataaaaaagaaagatgcatccaaaactccaatcattctcgcgtacaatcatccagtttttgttggcactgcaccatgtgaccgagaagcaagcatcaatgagttcattagcttttcatccatatggagcaatgcattgatgttgcgacggcttatatcactgatcttggcagaaaatttgccccatggtcgctgatagcctgccactactattcaagaaacaactgtaaaatcaaaggtgtttttgattattattctgtgataaacaattggcattagagattattggttttgatatttggaatttatttacgaagtggttttggagataattggatttcacaggtgaatctacaggtagtgctggatttgggtccggtcagaccggcgtgtatcgcgcggttagaccggcgcagcccgcggtctgaccggccgactctgtgtcggt

SEQ ID NO: 43300 - DNA, 780 bp, Oryza sativa
accttgatttaattcgcgtagaaattgtgtgatcggcttctttccgtaggctttgcttcgatgaatttgtttcttatgcaactatgctgtcagtatggattgttattggcgtggtatgatattaccttgtttgaaatacatgagggcttgacacctgctcttaattggctgagatatttgattccatagatagctttggataatatttataatccgtcaaattatacgttactatgaacttttggattttagtttgcaagttgttcttatagctataaattaatgggatggttggagtttttttgctggattactgaatagtagacttcttaatgttgttctgtttcatgtgtactaaaagcattgtgagttcaagttccctgtatactatacttgtacagttactatggcccattatgataaactaagctagacaaatttattgtgatgtgttgcatcaatttttcagagcaacgtttcgtgacatttttaaaaccaactgtgatttcattggaaacttttgtaactgcaagttaccgatagttgtgcctgacttgctggtttacttacaaccacattatgtctgatgatgcgaagtcctgattgtttactgatgagggctaaggagctctatcgtttgcattcttctcacccttgcatccttctgatcagtgatattgaacagtcttatctatattcaattaatggtcttcacaataattttacgatctatcattgcatgtcttattctacaaaagaggatatttgggggtagaagta

SEQ ID NO: 43301 - DNA, 632 bp, Oryza sativa
tagaacgtagtacttaatttgctgaggtcgtgtacttgttttttaaataagggtagtccaattttggaccccaaactttcatccaagtccattttcattctgaacacaaactaattatttttcactctaaaccttcaaaaccagataaacttcaccttgtgattaattgcttttagtggtgacttacataatgttaaaaatcatattgttacaggacatcaaagattgttaattacatgactaaacgacacctaaaaatttagtaatttgctacaagacactttcagtccaattaaagagagaaattcttcaatagacgagaatgcccctaagaccacaggattgtacgtaacatggacgttgaagtgaaaatttagaattatgccactctaaatctgcaatcaaccaagtgcattgctagggtcgtagaagcttttgactctaaggacattgtcatcttttcaaaaatttctctcttcaatttaggctgaaaatgtccttgaacaaattactaatttttgatatccttcatatacacggcccaccagcaagctacacaaactttgagtgttaatttagtagtaaaattgatcttaatatgttgctgtagaacatttaaaaatttgtattac

SEQ ID NO: 43302 - DNA, 613 bp, Oryza sativa
tgcaggtcgactgtagaggatccccatcgagaaggaccaggggtcacatccagccattatcgccagcagattattgtgtggctgtatcagacagcaacttggatctaaccaaaatacttccaaaccttttgacgagcgcctgcaagactatttttcaagcctcggctgcaacgagagaatttcacactgaacagttcgattatagagggagaacggcagaattgccgcgcgtttcgaacttagcccggttacttttggataacaaccagtacggctaacgatctcagaaacttcagtacctttggtgctcactgaagttgctggaagtctgaaacacatttaagaaaggttgatgctgtcttgtgctgaaacatacagtacatgtctcaaaatgatcggagagtatagttgggcctcatctgatttgtgcaagcacttgaattatcagccaatgctcttcttatgcaaggtagagaaggaaatcaagccttgtgttcgggagctcataatcattggcccatcccgggcctttccacgggtgggccaattattatgggcctccaagtgaggccttagagattaaaaaagaaataagttcaccaggcatccctca

SEQ ID NO: 43303 - DNA, 1456 bp, Oryza sativa
accacgcattgttgcagttgcatatatatacatactccatggagaagagaagagggcgattgctgtgcaaaagtagtacgtgcacattgcccgcgctggggcctggttttgcagaatgattccatgcaaaagcggctaaactgctcgcgccattgacatatgcacatgtcctccgtccgccgtgtgcatcggcttttcagatgaaattcagaatttcaactgttgagagtagcagtaatacgcatgcagtcatgcagagtacgtcttgtctgaattggacgttgataccggcggaattaatggctgaagttctctgaaatgtatctgccagatcgatggtggcggatttatctgaaatgaatttatgtaacttacagtgattgcatggtactactactaattgattataagctctatatttgcttattgcagtgtgtacgtagtacggctatatatagttctattgagaatttcagtcgatgaaagaaagagaaaaaaaaaagaactgtgatctatatactgatgcatgatcatcgatggagagcgttggatggcgaaatggcgatgggggaagtggcatcgaaacggagagagtggtttcccccttttttctgcagattctctctggtttttgatgggagaaagataatggcacgtactgtgagcgtaaactgtgtggcagtttgtcgtgcctgcttgaacgtagcggcgaatggccagaacaaaaacatgtccaagatggcagacaacgacgcttgctcgccacgcacgtgccagtgctgcgttgcacagctcgacacattcgcagaaagctacccctttttaatattcatcttcagatacaagtattttgtcctaagatatactgatatagtatgtgtatattcaccggggaggaactataaacttttggtacaagttcaccacacacattcacccgaaaaaaaaaaaagagtttaccacacgcattcaccgtcaactcatccaaataatgacatactccatgcatcatctgcagagatcagtcatcagatgatcagatcaatatgcatcatctgcagcgatcagtcgatcatcagatgatcagtggtcagtcatctgctagctgctaatcaacggatgagccggaggccgtctggccgtgcgtacgaacgtcaccccatgaccccatgacccagctagctcctgctaacgatcgatatgattaggcgtattcacgagctcgaccaaacggaaataaacgcatgcatgcatgcagacgcagtgctttcaaatcgatcagctactagtatatacgtgtagtacgcgtactcctactgatcagcgtctcgatcgggcccaaataattaactggccggctgggctccggctgcagcatgtgtcacgccccggcccgaccggccgggccagcgagatcgatgcatctagcttggtgtatatcctagtatagtcccgt

SEQ ID NO: 43304 - DNA, 625 bp, Oryza sativa
gcacgtcgactctagaggatccccctatgctctgaaaactaatcatctagtcactaatcattaatcatctgattattagtatacttttgttttggtgctaagttgagttcaaaggaagttgtcattggaggtacaggttagcacaatccttatcctactgggctacaggtaaaggaagttgagcttttgaggattgtgttgcaccctgcattctacaagtcacaactcaagttataatattttctagccatgagtctcagatgaattttgtaggatcttgaaacaaacaatttaaatctggtaagagttcacaaatttaatggtcatgttccttaaagacagaatccgaagatataaacaatttccattatcttaaaataagttctataagaagttcagaggaattcatcagcattttgacagcccataattcaatgcatctcttgtgtaaaaatgtatttagaatgtgtttagttcacacttaatttaaaagtttggttgaaattggaacgatgtgacggaaaagttagaagtttgtgtgtgtaaaaaagttttgatgtgatggaaaagttggaagtttaaagaaatagtttggaactaaacacggcattaatgatttttgtgt

SEQ ID NO: 43305 - DNA, 645 bp, Oryza sativa
cacgaaagggttaagcattagtgtctttgtgaaagatgcatctcgcctattctatccatgtcacaatctgcctactgatctcaccatggcctaacatgacatgaccaatgatgctacatcactgtttctttaaaaatatatttttggcaacagactgtatcactggctattcacaaaagtatatgtaccaacaaattaaaagttacataacaaaaagaaaacgtccatgtttcatcgcatagtgatactccagtccagtcacttgcacccacagtcccaggatctcagctctagaaacttaacatcaaccaatagaagcttatttggaacaaacacagcattgccatgtaatcatcggacttatggtgcacaaattatccttgttggaacgcattacatccagaaaatttgattatgaaagtaaccccccaccaaaaatataattgaatgtgacaatggaggtcaaaatgcaggacaagtataggagccttctctatcagttcacatcaaaattaaaggaaaaggtgtcatgttgggggattggagagggagagagattccctggtatgctaggcatgtctcccatatttgttaggtgagcaatacgacaattgcttatgcctgaaatttcgagaaccttcaggt

SEQ ID NO: 43306 - DNA, 624 bp, Oryza sativa
atgtatctgaattttgccttgcaggaacaagaaaaaaccaattgcattcggacatcccgtccggcaatctgaatctaaaatttgttcctcagttcaattatctatcttccccaggtgctactgctacatctgctggcatgaaagaaaaagctgtactactgtttgtgatttgtatgaggaattgaggtggtgtttggatccagggacttaactttagtctctatatttaaacactaattttgagtattaaatatagattacttacaaaactaattacataaataaaagctaatttgcgagacaaaattttttagcctaattaatctataattagagaatgtttactgtagcatcacataggctaatcatggattaattaggctcaatagattcgtctcgcgaattagtccaagattatagatgtgttttattaatagtctacgtttaatatttataattagtgtccaaacatccgatgtgatagggactaaaagttttagtcccatctaaacaggttctaaggatacttccagggagctgcagagcaaataagaaaaagaatcaaacccaagaagattcccactatttgatattgatattccaattttcctgtttccctagcta

SEQ ID NO: 43307 - DNA, 1293 bp, Oryza sativa
cagaggctggcttggcaatactacatgaggatacccataagagaacaatcatgatggactgggttcaacgacaagaagcaacgtaggagtgtgtgtttttcccttcccgggagcgccagaactcctctcactgctagaaacgtatgacgcctagagtgcatgaggatgtaaagttcatggagcgggtactgccaatgcgaggttatcgaaaagctttgccgtgacgcgtctcatgtgttgggatgaggctcatgtgttgggcagtcgcggagtgcgggtaaagtgtacatccactacagtgtgagtaaaccaaatctattcgaatagccgtgctcgcggttaatgagcactgggacatgtattacacttggctagactctaaattctttaacttgagtgggatggaatattgcatgataatttttatgctgatggagccacttcctgagaggcgggaatgtggacgtcctcagaaaatcataacgactctatggcgggaagctatccttgggatcacaatggatggtggacagaaccgtcattgtttaatatgaacaatggtattaaaacttgattagtctttgctaggtcttaggcttgtgaaaagaattataaaacttgctttgcgcaaatgaaccatagccatcctttgaaatcctctgtcatgtgcatcattgctgtggtggcttgctgagtacgggtggtactcacccttgcaaatataaattttatcagaagcgggagatgaagcttcggaggatccctatgcctactaccaggagggagatgaagacgaaggcgcccaataggtcttagtacggtcgttgcctgtggcaatggcatgccgctgcttaaattctgctgccttacctatttctgcttttggatgtattccggaccgcttggtccgatgatttaagactatgcctgcaggcttatgatgtaataattcgtactagacattcgtgtatgtgtatttggtatttcagctatgaattcgtgtgtaccagactacttgatccagggaaatggtactgtttacacgattgattcctgttataaaaacgggggtccacagttgttatgcatgataacggctcagagtcgactcttagtatttatttgagcaaattttgttgcatggtagtgaaagaaaggaaagaagagtaagaaaaaatatttttgatacattaatgattagagatcatattgtctctatctgctgtagaatgctactctctagataacgtagagcttatatctgactctatctttggggatcctctagagtcg

SEQ ID NO: 43308 - DNA, 649 bp, Oryza sativa
acttggactctgggttcaccaactagaaatttctagttcataaattccatgtacaattaagacaaacaaatttcataggatgaagatttgactgatactgtaattctgcatttaggaattcagagatcattgaagcaattttagtccacagaactgaaatatttttataggatgtgttccacgcagatatatgatacctggggaaacacaatgatcaaggacctggaagccgagcatgacaaatggtgtatatctgcatctaaaacctcattaatactaggatctgattgagtttaaaaaatgcagtagatctcaccaacttcaacttgctctagtggcactcggaattcttgctccctatagctagtcctctcttccccatgaaagctagctttaatcttaattaaaaaccagttctccatgaatagctgtcttaataaataaaagcaagaaatatctcgaggattctagtggtattaactatcgccagcatatgttcatctctacttttctaaggaaactaaattaactcgcataatttgattatatttgcctgtcacatatgactcatatgcataatctacccatattgccagttggaatatctgtacctgaagaaatcaaatgttgttaggtggcaccatcgatt

SEQ ID NO: 43309 - DNA, 890 bp, Oryza sativa
aaagatgccacatcatcatccactaattaacaagatgccacatcatcatccactaacaatcatcacatttaaacatcatgcaaacatgctatatctttatagtttttataatttaagaacttttcaaatacaaacatgttaaattatcatccaacataattcacataatgttttaatgtatatctttattatgtgttatgatatcctatatacttatatagttcatcctcacttagttagtgcttaaatgattaatctctggtacaaattatctttcttcttttttcctctaattaagtcatatcacatcaattgtttttagcatttagatgattaatctacggtccgaactatctccctacttttttttcttccataaagtcataccaccttactttttacatttgaatcaccattctacatactatttaaatttaaattatcataaaccacattaatttacttaatctgatgttatctagctatcttacacgctaatttttttattgttatcacactaaattcccgtagcaatgcgtggggtttcagctagtacattacaaaagaacatatggcggcttagacttaaactccctaaaggttaataatgacaatttcgacaaaaaatcgtccttattaattccatgttactcttgaaagcgtttaaagggaaaaaaatagtcactccccatgatcatagatataaaaaccagacagtcacttaataattcttgcagaagagaagttcataataatcccatttccttaatagcttagtcctattttgattcagtacgatcaacaatggcgatagtgtcatgatacctcattaactacaccactaatccactaactactcacaaaccgatcttgaaataaaaatgctagaa

SEQ ID NO: 43310 - DNA, 1199 bp, Oryza sativa
cgactctagaggatcccctcgaacacgatggttcagagggtgaggaggtaattcgtgctttttcctattttttatggttgatagaaatttatatgccgaatatagttgatggacaaatgttatacactattgaacccaacactaagtgcaatcaggcgaattagttagtgtaaattagtttgtgaaaataaaataaatacattcttagaatcagtaagtgtgtctcgtatagtaataaagattttaataaaatcgtagattaaagaccgttgacaacacatcagtgttggcactgatggttagtgtttctttccaattctactatgtacgtgtgcgtgttttattttatttttatttttttgctttatctttttttatcgtaaatggtgtaggtatttaagttttgttttttttttttcgggaggagggcgatcatacgaagtacgcacatacgcacattatgttttttttatagagattagtatcatgagatttttaatagatctaatctaatatttaaaataataggtccaccagtttcagtgaaatttgaagattggatgcttttctttttgttctctcgatttctaggatttctctaataaattagagcgccatgtgacaacgtaagaacatatgtacgatatttattggacttttaatatataatagatttttagaatttatctaatttattagagagacacgtaggcagcggcgtaagagcgtttgtacaaagtttaatgtacttttggtatataatagatagatttagaagatggtttaaggaacattgattggatatttattataaatatttatttaactaaatatatttatatttgtgaagtaatatattttaactttacattgtagattatcaaattttaagagactgtcgatttttatggatgtatgtttttttctgtcgttttttatgtacatgcgtatgttttttttcttccggcagacattagcaagctttattattttgttttcaattgtgtacgtacgtaggtacgttcaatcgtgtatggatgtacgtaccggaagaacaacattaacgtttgtatggtattaacttagtacgtacgtacggcacaacagtagtagcgctggtatgatataaacatgaggaagttattattttttaaataataaatctaatctaatggtgtaaaataacaggtccatcagtg

SEQ ID NO: 43311 - DNA, 605 bp, Oryza sativa
cacgcggcacgcacccctcacccgcacgatgcgaatccgacggtccgcgcgtgccgcatcttcgttagcacggagcgacggtggtgtgtgggcgcgacaagttccgcgcgcgacacgtgcgaccgaggcccgcacgtgagggcggcagggacgcgtgcgggccggtccacctgggccccacttgtcagcgaccgtggaaggggaggagcgcggtggactcggttcttggatttccggctcgagtcggaggagaagatggttgggttggaccagtctgtcaggctagcgagaggtctcgcgtcgtcacgacgatttgatggttttggacagcctctgcgtgagagtgaaggggtgtaatggcatcatccggcgacagtatcggcagattagataagcatttgacttgagcttctgtaatttgacctcacttgagtgagtgagttagttaatgagacgtgctcggacgagcggcgatggataaaagcatgggcgtttgtactgcggagccatccaataacagctgctattgcttctgagcccaacaaatcacacgtgatggagccaggttgtacagtggtaagatcttgagtgttgatacgttgatt

SEQ ID NO: 43312 - DNA, 758 bp, Oryza sativa
gcctgcaggtcgactctagaggatcccctaagttgcacccacctagcaagtttgatagcaagtttatgtgctatcagtgcaatttactcaaaataatggtaagactatttaagtgtgttatcaatattacatatttgtgactattttagtctggtgcactgatgttcatatgatgttttatatgagatgaagacctatgatataatagagtggactacagtaagtcctaggctagattcaccccattttcaaaaccggctataaccgtgtttttaccgggtacaataaaggcatgcacacaacaacccatcaattttaaataaacttataataatttaaattttggataaatttatatggtttctcacgttttgctgtgatattgtcgccgagatgtggttggctgcaaaagtttcaaacatccctatatcaccatggatcatatagtaaaaatacgtggtttagttttgttttgacacaatatactagacacgatataaaagtgagatataacttgaatgtatcaatgtgcttgtaactgatatgcacaggtgcatgagggaacctcaaattagccaacacgtacatttgcaatttgcaaaggacaaaggaccgctcaatgtgatagccaaattaacatgataaacagagatagcaggttcaccttcgcttctcttgagttgtccaggacaagatgttgtcataattgctactccctccgtattttaatgtataacgccgttgactttttaaccaac

SEQ ID NO: 43313 - DNA, 1065 bp, Oryza sativa
atctatatagatatatatgtctagattcactaacctctatatgaatgtggaaaatgctagaatgacttatattatgaaacggagagagtagtatatatggagaaaataaatggtccctagctttagcttaaccaaatcaacataaggccggccatttgtcaagtttaaccaatgcttacagcaggcccgcaggtcaatttgctccaactacttaatttggcatatataaataagtcagatgtatatatcgatcaacgcctgtgtaggatcaggggttatttaatatatattcggctagaacttgaattctactactagtagtagtattttagtatcaacttgatgtatcacatatcctataaataaggatccaaaccataataatttgaacggggggagtcattttacaacttaaataaacatccatgccatgccatgcatgcataatcttctatgaccaaactatatatatacgcctagtggtgtggtttgagcgcagtgatattacaaatgggatagaatgatgaaaaagggatgattaattaattaatttaacccacaatgcatgtacataaagaaatactataatgtaagcacatatctatggtctatcactagcaaagtagcaaactttaattagtgctttcatgtttgatgactagctagaagtactaggccgtgcaaatgtctgccctaaactttctcccatcaagatgacaagaagtaacatctcaacaaccatgcaagaaagcatgaatgtttgcaagatgctagctactagctagatgaatatatataggtatgatcagatcgatgcaggtacgcatgataaaaaccatgcacgtaaaatttctccagagtgaagaaaaatgtcgttaacccttacaaattaagaagaaacacaaacgaaagggggaaaaataaacaagaagatggaagcaagcaaatcaaaatcatcttctcgccaagaacttgttggcgatcgatgaataaaaatggatgcaaatctaggaactaaaactatcatctccctcctcgatcgctgcaacccaatgtgtacgtacg

SEQ ID NO: 43314 - DNA, 1571 bp, Oryza sativa
gggctctcttggtctctctctttaacttgctctccatggccacggtagacgagagccgcaacatcgaccgatgagggcgagggcaacgacacgacggtggcagccgtggccgaggcggacgaagttggcggcgacagctgcagtggacaaggtcggcggcagcggcatacagaggcgacgagcacggttgacaaggacgagggtagcggtggtcgcagtggacaaaggcggcagcggcggcggacgcggacgtgcgcgacgatggcggcgcggccctggacttggacgctccgacgcaggcaacgacgagtagcacgggtgcatcgcttgctacaggcgggcccacgtcctcgggccatgcgtacagccgggcgactaattagtcgcccgcttgcgccctctcccctcccctctctcctccagctcagcagaaaatcctacatggatctcctatcgcccattattgtacctgctctaagttgccaataagtgttgtggtaattaatgatgaatattcctacaatgctccccatgctactctctcggttttaaatatatgccaatgtgatttttgagatgacgtataagcatttgttttattaaaagaaataaaaaataagttatgattaaagtaaatttaatgagaaagtaagtcgtcacaatgacataaatggtacttataaagtatttttaatataagaaatagtcaaatatcaaatctaaaagtagcgcctcatcgatgatgccccattaggtcccacatacatgtgcctagtgtcactaagaacctgcagtaatgagtcctcagtagtgtccgtaaattggcaccactagtggagtatcaagttttacctgtaccgtttttattataaaccggcactaattaatgataattcattagttactttaggtaaactgatactgataggaggaactagctagcgagccgaaccatatctcaggccaagtcaacagcccaagagcccgtagacatcgatctcaagtctcccctcgttgacctatctcactctctcccggggcatttaactatttgctacttttaaatttggtgtttaattattttttactcatatgtcaatgatacgtgggacctcatatgtctataacatgtgggtccatatagcaaatagttaatcgccacatctaagaatggaaatagttaaatatctcccctttctcccccttctccattttttttcaatctctccaactcgcgacgacgtctaacttggcttatgacgtcaatcagcttgagaatgagaatagcaaggccaatgagcccacaggtagcggtggcctctaacctcactgccctacatctctatgttgtcgacgcgcttcttaacgtatataggtgccaacgacgagctcctcctgaagcatcaacgtaggcagcgacctccttgctcgctacctagctcttctttttcctccatctccactagggtttctcctcacgctggcaccccgatccatatggtggagaaggtcgcatgggtgccaaatccacccccccccacccaccccccaagctcaggcctacaatctga

SEQ ID NO: 43315 - DNA, 2399 bp, Oryza sativa
  unsure (1)..(2399): unsure at all n locations
gatataggcaacattcagtagaatttgttttcttctattccctacgtcccaatgcaagtataaccttgtcttatattcagaaaatgctttgtatcacacgtccgacgaaacggaaatatcggacgcctcgtctaccctactaaaaagcctgatggatcggaggaacctcactgtaacatgtatgctacctgtttcttttcatttttttccctcctctctttaaatattttttcttctaattacttatccgatctacgaaccgatcacaccgttgtattcgttgcaattaaatctttacaacaagatatcatatgattatattatttcaaaagaaaaacatgaatttcaaaccgttaaaactaaatgtttcatacttgatagtgatatgtttcaacgtgcatcttcagtgtgtttcacaaaattcctgaaacttaactgccactacttttcctctcttctccaccttcatccaatacaatacagtgcattatatttttagcaaagctttcaaaagtgatttnttctctttaaatttactttatccaaatcttatgatccggatcacantcattgtattcggttttaattaaatcttttacaacagagatatcgaatgattatattttgataaaagaaaaacatatgtttcgatccgttaatacttgtttcatacatgacagcgacatgtttcaacatatatcttcaccatgtttcataaaatatttaaatgtttcagttgctgaattttttttcaccatatataacttaatgtttcacctgttggccaactgcaacatttgaccgtctgattttttttgggtcatcggacgtccgatgggtagattgctcccttatattcagtagaatatattactacatccatcccaaaatgttgctacctaggatgggttaaattctatcctaggtagcagtattttgggacggaggaagtacatctgtactaagttgcacttatattgagggcatgtttagttaccaaacaaaatttttcacgctgtcacatcgaatatttggacacatgcatagactattaaatgtagacaaaaaaaaacaattacacagttcgccaggaaattgcgagacgaatcttttaagcctaattgcgtcatgatttaacaatgtggtgctacagtaaacatttgctaatgatagattaattaggcttaataaattcatctcacagttttctggcggaatctgtaatttgttttgttattagactaagtttaatacttcaaatgtgtgtccgtatatccgatgtgacatacatgatatatgggcaaatatttctgccaactaaggctctgttttgttcccaaacaaaaacttttcaccctgtcacatcgaatgtttggacacatgcatggagtattaaatatagaaaaataactaattacactgattacgtgtaaattgctagatgaatattttgagcctaattgcttcatgatttgacaatgtggtgccacagtaacatttgctaataatggattaattaggcttaataattttttctcgcattttaaaggcgaaatctattatttgttttgttattagtctatgtttaatactttaaatgtgtgtccgtatatctgatgtggcacgccaaaactttttgtctcgcgaagtaaacagggcctaaacaagccctgggttagagggagtaccacacatgacaacttactactccctccgtttcaggttataagacgttttgattttaatcaaagtcaaactgctttaggtttgaccaagtttgtaaaaaaatagtaacatttttaaacaaggcaaatttattctgaaaatatatttaattattaatttaatgaaactaatttagtattataaatattactatatttgtctataaacttaatagactaaagttaaaacgttttataacctaaaatggagggagtagctatttcacctctgagaatgtctcttttttttcccttctgttatggtggaaggatggtggaagttgtcggccggtgactctctgaagtttctacacgcacaacttttccttcagaaattaaacatttcaacagagaggaacaaaacgaggcacctatatgcatgcttatttttctaactgaaacacgcacgtgttagacgtgcgctagttgtaaaagctcctgttcttctatacagacacgtagtaattaactagtgtaatgtacgggtctggatgatccaacggccagaattaatcgcatcatatatatgccggatgaataacgtacttgctaatatcatatatgatgctagctgagtacacatatatattactccctccgtttcaggttataagattttctagcattgctcacattcatataaatattaataaatctagacatatatatatatat

SEQ ID NO: 43316 - DNA, 1547 bp, Oryza sativa
gtacccacttatagttttacatatttcacaaaattttttgaataagacgaacggtcaaatatatgctaaaaagttaacggtgtcaaacattttgaaacggagggagtatatacatcttcatctcatcaccaattaatcaaccactaccctttgttgttgcgcctttgtttgatcatctcctgtctccaaatgctttaatttaatgcatgaccaaagctaaataaagcttccatatgactgatggcctgcagtgcatgcaggcgatcgatatgcccaggctttttgattcatcaacacacacacagtacacgtacacgtacacgtacgttgaatatatatcaaaggcgatatggaatcaacaccacgatgattagcggtgatagatcctgatatgatcctatatgatactgtccgtgcgtgcgtaccctgcacttacctgagatttgcatcagcaaaactactgatctcatgcataaagctaaaaaagcttttcaacaatatttttcagtcgtgcatgcacagcagctagcacagagatcagctaatcaacgatcaatcttgaatatatacatacttctttaaatatatatagaaggaatacgccatataaaatttaattaggagagctacactggtggagaaatcatctttcgtcggtcggccgatttccacaatagtcccggatgcaataaaaaccggggctaaagatgatctttagtcccggttcaaaagggtaacgggcatatttgatctttagtcccggtttgtgttaccaaccgggactaaagatcatctttagtcccggttcgaatgctgtcaggacctgtcaggccccccccgggatctttagtcccggttggtaacaccaatcgggactaaagatcttaactttagtcccggttggtgctaccaaccgggactaaagtcccacccctatatatatgtcttcttcctcctccagctgcccgagcaagcttcaaaattacttcaaaaaagaggggaggtcatgccaaaatttctattgaatttattttggtgattacatacaaatcggaggtgcctaaaaggtttgcaacttcatcctccaatgttttttttgtcatactacatttgcacctatgttttgcacacttttttttgtctccaaaatttagttgtaagttgatgagagagaaaatgtgtgtggggaagaaagaatatatagaaatttagttcatttgctaaacaaggttttataaaatagttgagaaggaaaactctagtgaaagttaatcttaaataatagaaaacaaactaaaatgaaaattaaaagaagtaaaacacattaaaattagtttaaaactttacaaatagtttttaagaattatttggtgtaatattttatgatttttgtatgaataaagatatcttataattattgtatgactgtcattattgtaagaataattatttgtgtgcggtttttttgactcatgtagatggatcggcaatggatgtacgctgaccggcggtccaaagagtttattgacggcgtgcactattttttg

SEQ ID NO: 43317 - DNA, 710 bp, Oryza sativa
ggcgttcacgacacaaggaggaggagctcacccagccccgccgccgcaaccgccgcggccgccgcggtctccgacctcctcgccgccggtaagaagaagctctccgagcaggccgccaagcgcgccgaggtcgcaaggtatataggcaaacccttcgaaaaccttaacccatgcatcctctcctccggccggccggacaccggccggctggccggagacggagaagacgacgactgagccggcggctgttgcatgtattgcagatcgactcggtggtgaagctgaacgccggtggccggagagcttgttcatgttgccgtaagcgtacgtctcgtgtttgcgtggttttgagcgggaatgagcttgtgagaaaaacaaaaaaaacaaaaaaaattcagtccatctgctggtatatacatatttcatctgttcagtttttcagtacatatatcttgtcaactgtgtatatttgtgcatgtctatatataccctatatacaagtgttcagttgaaatttgcaaattgtgtagatatactccctctgttttttaatagatgacgccgttgactttttctcacatgtttgaccattcgtcttattcaaaaattttatgcaaatgtataagatataaatcacacttaaaatactatgagtgataaaacaactcataacaaaatctatatacctaattaaaaaatacgcaaggttt

SEQ ID NO: 43318 - DNA, 579 bp, Oryza sativa
ttatatttctgtatagtcgatctgatcatggaatatatttcacgttgtgttatgcgatcatttgaaagtaaagtattcgctctgggtccttcggaacgacgagttgctatgattaatttgaatatgttctctgactaagtatgcacttaagctgcaaaaggaaaactttcatgaatagctatttactgaagatgagacattactagcattgccacgtgatcatatttttaatctacatagtctgcatgctcataggtggttgccattgattatctgagaatgcaaggaacatcgtttatgttgtcaaatacaatttcatcccactcaatgcaaagaaattcccttgatctctctccaactgtttcgattactttgttttctttaatggcctcaaatatcccacatttgcagatacggcacatttgcaactggtggatgtgacagttttatggcctttgggatggcgctagcaaaaggtaaattgtcttccgtgatatatttgttgaagaactatgtatgataacttcagcgtacattattattttttcttcttttaattgaagtgccccagccctcaaa

SEQ ID NO: 43319 - DNA, 505 bp, Oryza sativa
ggtcgactctagaggatccccagcatcaaagctctaagtatttaattagctgattaagtagtagttaatgaggagagaaactaatctgtcaacgacaggccggtcattccttcaaaagatagcaaaggtcttagcctgcaatagtcaacaaaacttgatctggtttcttggaccaactacgtacatgaacacaaaactattgacagatcttttcactactccatatcagatattagtactccatccgtttcataatgtaagttattttagcatttcccatattcatatggaggttagtgaatctatatagatatatatgtctagattcactaacctctatatgaatgtggaaaatgctagaatgacttatattatgaaacggagagagtagtatatatggagaaaataaatggtccctagctttagcttaaccaaatcaacataaggccggccatttgtcaagtttaaccaatgcttacagcaggcccgcaggtcaatttgctcc

SEQ ID NO: 43320 - DNA, 798 bp, Oryza sativa
ctatcagtgtcctttaggaagctctgaacgttagtgtcatgtctgcatcagttcttaactgtgctcaacttggccgacatggttttctaggatactcctaagcaacctttagttgcaagttattgcagaattaactgctgctcattaggagttctagtactattgtgcaggtagcagactgaaatgtttcttgtgctgtactgtgcattccagtttagtgaagagttaatggggtttgtacagtgtacagcaaccgtgtgtttaaaggctgaaaagttagaacttctgaggctggtgccacctgcgagatgcataaacacaagaaagttataacttctgaaaagttggaatttaatggcgtcttttttgttcttttcctctcacggatagcgtagcagagctgcaggatgcagttctactagggtcatttgttactggtagagtgccggaattgccaaccctgctgtcatttgtagtatttgcaaataatcaagatccaatccgctcaaatactttggccttgctatctttgtgggctcatggaaccatggaaccattcgccagatcgacatttccagctccatcctgtttggcaatggtttttctctcataataagttccaagatttcgtagtacgacacgtacacctgttggattgttcttctgtctctgccaaatcgttgatgtcacaagctaagagacgatgaagtatagataaataacattatgtttcatgatgcgtgaaatttaaaaatagatcatttaacttactattcaggttgttcaaattgatgctat

SEQ ID NO: 43321 - DNA, 581 bp, Oryza sativa
aggatccgcgacatgggatccacgagttacgggttcacgtgtcagtcagttagggcatgttattataaccaaaataaactagagcaagttaacaatattgtcaaaattttagcaagatttcttatgtatttatcaaatttggcaacatttttttaacttttctaaaaaaaatagtatagttgaaaatagcatcaatttgaacaacctgaatagtaagttaaatgatctatttttaaatttcacgcatcatgaaacataatgttatttatctatacttcatcgtctcttagcttgtgacatcaacgatttggcagagacagaagaacaatccaacaggtgtacgtgtcgtactacgaaatcttggaacttattatgagagaaaaaccattgccaaacaggatggagctggaaatgtcgatctggcgaatggttccatggttccatgagcccacaaagatagcaaggccaaagtatttgagcggattggatcttgattatttgcaaatactacaaatgacagcagggttggcaattccggcactctaccagtaacaaatgaccctagtagaactgcatcctgc

SEQ ID NO: 43322 - DNA, 710 bp, Oryza sativa
cgctgcaaatccgacagtggccaaacaattatttttaccagctctactaaaaaaaccttgaaacagctcagcatcaaatcaaggactgcattttcgtatgccaaatataggagaaaatcatgtaaaacactgagatgtgatgctccaagcatgtacaacagcgatgaaacctagctgaattggtagataaaagggacaccccaaggtgaaaaacacaagacaaagatgataaaagagtggcatgagagatatggtgtgaacagaacaaaagagtggttcataacaaacagactgaaatgccacaactaatgaccaggaatccaggatcatatgcagcgccaaggatatcattagaatttcccaatagatcgacataggcgggactattctgtttgctttctgtttctttttcgttttcaggtctcttcacacttggtgatgttgtaaattatttataccctactttttttaacattaaataatttctatcctacttaatataacaaaagacacaaaccaaaattagggcgaaacaggaaaataaaacgattggtcttaaccaaccagaaaggataagaaaatttatactggaaagtagatgtgatggaagaaaagaaacagaaaaggtagtaaaagtttttataattaaagagtttctatagtaaagactaattgtgatcattgtttcctatttatgtttgagtgcaaag

SEQ ID NO: 43323 - DNA, 505 bp, Oryza sativa
ccggtccacctgggccccacttgtcagcgaccgtggaaggggaagagcgcggtggactcggttcttggatttccggctcgagtcgaaggaaaagatggttgggttggaccagtctgtcaggctagcgagaggtctcgcgtcgtcacgacgatttgatggttttggacagcctctgcgtgagagtgaaggggtgtaatggcatcatccggcgacagtatcggcagattagataagcatttgacttgagcttctgtaatttgacctcacttgagtgagtgagttagttaatgagacgtgctcggacgagcggcgatggataaaagcatgggcgtttgtactgcggagccatccaataacagctgctattgcttctgagcccaacaaatcacacgtgatggagccaggttgtacagtggtaagatcttgagtgttgatacgttgatttcgacggggttaagacttaagaatatagaatactactgatgtttttagatactcatgcacc

SEQ ID NO: 43324 - DNA, 510 bp, Oryza sativa
taattagcactaaaccaaactattatgtatttaatcctaccaaaggcttccctgatccatggcaattatcaaaatgataaacttagtggttttgatgctaagatgcagtactactgtactgcttaagaatcaatgacatgaattatattaacatatcaagaagatgcacgtactcccctgcagaacagaaggattatcgaaattggggtccaagttgtttaatgattattcgatccttgtcatgctttgacatgattaaactacctaaccaccaatccctaaccacctagcatctaattaaactccttgtctgatgtaactaacaggattgcataaagtaatcaatcaagtacaactccatggaccaaagcagaaacagaaaaacaattgttgagtttactaagaacactagaccaacttgcagatcttagcataacacgtaatcagacggggggaagtggctattgctggctctatcctgcttgggttctttgttttttttaggccatc

SEQ ID NO: 43325 - DNA, 620 bp, Oryza sativa
tggcaggggagagaggctaccggcgagctagctgccaatggatgcaatgttggagcattgcatgaattttcgtgcctggatggttgtcggtctttctggggtcaggcttgtgcaagtcgcctgacaaaaagggctcgcatacacgcatgctgcacaccgcgaagaactccaggcttttttcaaggcgatcaccacttaaaactgagggccattgccaatttgtcatggccaccatgcatgatcgagcaagcgagagcgaacggaccaaaagtttttgctttctctcatacacgacctaattgcatcgtttctcgagcaaaaaaaaatcagtctttttgctagctatagcttggttcattgcatgggtacaattatatcatggaactgtactgctgcattatctgaaactatttgccatatgacagtggcaattaagctcaagattcaagaagcattccatttcctcgaatctgtcgctaagaggttggtagggaaggattacaagtacatgtacatgcgcgagatgcttcctgtcatcactggatagaggattaacgttgttcccaaggagaatgaactaaaaatgcagcaaaacatcatcgttctctaggtaacctcgc

SEQ ID NO: 43326 - DNA, 682 bp, Oryza sativa
atgaagcattaaatatagataaaagcaaaaactaattacacagtttgcatgaaaatcgcgagacgaatcttttgagcctaattagtccatgattagccataagcgttacagtaacccacatgtgctaatggcggcttaattaggctcaaaagattcgtctcgcggtttccagacgagttatgaaattagtttttttatttgtgtccgaaaacctcttccgacatccgatcaaacgtccgatgtgacacccaaaaaattttttttcgccaactaaacaaggcctaagttgcttaagaatatcatacgaatccatttttcaaatcaataataattaaaactcaattaatcatgggctaatgtcctttttttatatattttttttgccctaacttcgatcaatcaatcttcagtagaaaccagcacaccttaacaagagtttctttttagccgttgttcaatttccctataatttctgcaaaattcatcaaatccaaagagacctcaaattttaaggacggcggcgtttgattcccccacccttcaccgtcgcttaccactctcctctagccgccggcgcctccgccgcggccgtggccgccgtcggtcacttccattggcgaccacccctcgcgcatggtttcttccgcctctaccgccgctctcctccccctcccccgaacac

SEQ ID NO: 43327 - DNA, 608 bp, Oryza sativa
ctaggatttctctaataaattagagcgccatgtgacaacgtaagaacatatgtacgatatttattggacttttaatatataatagatttttagaatttatctaatttattagagagacacgtaggcagcggcgtaagagcgtttgtacaaagtttaatgtacttttggtatataatagatagatttagaagatggtttaaggaacattgattggatatttattataaatatttatttaactaaatatatttatatttgtgaagtaatatattttaactttacattgtagattatcaaattttaagagactgtcgatttttatggatgtatgtttttttctgtcgttttttatgtacatgcgtatgttttttttcttccggcagacattagcaagctttattattttgttttcaattgtgtacgtacgtaggtacgttcaatcgtgtatggatgtacgtaccggaagaacaacattaacgtttgtatggtattaacttagtacgtacgtacggcacaacagtagtagcgctggtatgatataaacatgaggaagttattattttttaaataataaatctaatctaatggtgtaaaataacaggtccatc

SEQ ID NO: 43328 - DNA, 615 bp, Oryza sativa
aaaatcagctacaaatttaaggttgaaaatttaaaatttggttgataaacataatgaagccggacgctttagtgtgcgcgctgagacagctagaggatagaaacaaccaagcagcaaagctaccttcctaccgcacactagctacctttgaggcataggtcgcctctcgcctttcagaattttcagggcctcatgattctgccatggatgtaacagcgagacgtcgatcccgatcgatcgacggtgtaacttccgatcaaatctcagcagcacgcattccgttctcgagtagtaggatccgcgagcacggcgacaacggacggacggaagcttgcgttcttgatttccttggcgccattatccttgcttgattagtgagcgtacgtgcgagattagttgcattgcacaatcgcgcatatgcaacgggtgaagcgacaaaaaaaaatctgcgtgtcaaaagcggaatgaattgatcctgaaaagtttcaggttcacacgtgaatcatgaacggcttggccattttcgtatcccactggattgcatgctggcactcgcacgctcgtccatcacaacgtcagatagcacgctgcataggggatcctctagagccgacc

SEQ ID NO: 43329 - DNA, 564 bp, Oryza sativa
tcgactctagaggatcccccatattaatttgagtgtatcatatagtgaagcacatgggataatatggaagttcttgccaagagaaaactaataagcatccatgccaccatggataccaagagacaactgatcccttgttacttgctgaataagttggttgctaactcttcattagatatatagaacgtagtacttaatttgctgaggtcgtgtacttgttttttaaataagggtagtccaattttggaccccaaactttcatccaagtccattttcattctgaacacaaactaattatttttcactctaaaccttcaaaaccagataaacttccccttgtgattaattgcttttagtggtgacttacataatgttaaaaatcatattgttacaggacatcaaagattgttaattacatgactaaacgacacctaaaaatttagtaatttgctacaagacactttcagtccaattaaagaaaaaaattcttcaatagacgagaatgcccctaagaccacaggattgtacgtaacatggacgttgaagtgaaaatttagaatgggt

SEQ ID NO: 43330 - DNA, 879 bp, Oryza sativa
acccccacacgcactgcaagttcacgcgcaccacgctattgtgcctgcctgcctgtaaattaattcgaattgcctttctttcgtcttctcaatttccgacccacccaaaaccctagctagttcctctacctggaggaggcagcagcaatgatgcccaactccccactctcaccatgctcacgcgaacttgtacatggaaattcctagtgtatctttgtatatgccaaaaatatatattgctagtgtattgtaccgtagaagtccttcaatttctttaatcaatcccttccaaaattctacttgttctcaacagaattttcataggattctcctagggtctattggctaacaccacaatctgattagccaacccagctcacatccctcctatcttaagggtttattcgattgaaggggtgtgggattaatctccttaatctcatgtgaaattaattgattgcccaataccctccaattgccatgtgaaaaggattaatcgaacaacatgtaaatagggtatatggggaataagtcttgttcatatgtactaatttgatcaagattttagtgacatttcaagatttgcgactcatatcccaaatgccgtagcacatgactacatgagcaataaatcctgatttttttcccttttaaaacaaccttaatttcatatatgaaacacgtctctttagtagaaacaattaattttaccattctagataaaaatgggtaaatggttttgtagttgttttcttacgttaaaaaattagaaatgtaacagtttttacgattgtgtgcaatattaggtctggcatggagtatagaggcacgaagcatatgttcacgcactccattctagagggagtataagagcagggt

SEQ ID NO: 43331 - DNA, 526 bp, Oryza sativa
attttatttgtttgacgtccaacatcatataacaaggaaaggagggagtagtaatatttttcacactcaagctagcatatgcccggcgcagaaaaggaagctggccccacatttgtcacgtatagctccacggcaccaccgcaaaattctcgttgcgaatccttgcaaagcgtatgcacgtgtgccgtgtacatggcaccagaccagatccatctgctactagcaccttgcagtcctgagactcctgattccttgctacttggtccccaacggcgtgccgctagctactgggcacgccgggggagcaggcacgttattgggcgtggtcgccccaggtgtgccgcacgggcgagacacctcacctgccacgagagccttcgcaggggagagagctccacacgtatacggtgatcacaggccgccccatgaacaacaatgatttaaccagttgatacatatctgaactctgaactgttgttttctgacaacattaaaatggacggtttgaagaacctttattaaaatg

SEQ ID NO: 43332 - DNA, 949 bp, Oryza sativa
cccctctccctctggtcataagtattatatgtttagaacaaaatttggttaaagttctgaaatcatgacgatcgattacatattagaataagtgggatatcgtgctagtaattttcacagtaaatctatgtatattatttttttttgaataagtatttgaaaaattgcaaagttttaaaagattaaccataaatttcaacaaattatgaccggatggagtatctttcaagtcacacttgtgtccctactacaccaaccatatgctactagtaaatgtttgcaatcactctttactcctatatatgtcccacttgaaacacagagaaattcacataaattatgcaagtagtatttcacagtgagccagcaggaatactcctggagtcctcccattctttttataaacaaagtgaggatactatttaaaacagggaccttgcgggttgtgccaaaagtcaactcctggaaacgggttccttacagaaatataatactacctccgtaccatattataaatcaccgtgattttttgctattcaaaatttgttaagtttaattaaatttttagtataatttagcaacatgtaaaacacgaaattagcttcattaaatctaacattagatatattttgataatatatttattttatgttaaaaatgctaaacttaaaaaatataattacgaaaaaaatttcaaaacaactactccttccgtcctaaaataaatctaagaccagataagacatttcttagtcctcgatagtattagaaaatgtcttatctgattataggttattgtattttgttatatttcgagacggtgggagagggagtaataacaaggatggaacagagggagggagcagtacactcccaattgcaaaaatctggtcaaatttgagccgtacgcccagttgatatgataagtggtgcactacatatcccccgt

SEQ ID NO: 43333 - DNA, 621 bp, Oryza sativa
cctcacaaggtgaggttacctttgcctcctgtcgtattgttgttattgctcgctgtgataaaattctggttaggaatttatttgtggtatgtgagagcggtttgtttcagaacaattgtcgcttcaggtattgccgtcgaaactcacacttgcagtatttctgccatttgtttagtaattgtgaacaagtaatgttgttgttaactgatagtttcagtgaaatattagattcgtttgtaaagttcattatgaattgcatcacgtgtattattgattttgttgagattggcaggagttgatacatgaaaagctcatgcatgtttcttaatttaccggacactgattcaaagaaatttgtattttacttcaccattgctaatgcccacttatgtttttcttctctagtttggaacacacgatgtggttgctctgaagccaaataaggcagatgctggatctgctgctcttgggcaaggtgtagtttatcgcttgaaggtacctaactatcatctaagggctgttgactatttaaagtctttgcttctgaattaggagaaatgactgtaatttgaacaaacaggattcttccattactgttgcctttgatgacattcctgaaga

SEQ ID NO: 43334 - DNA, 729 bp, Oryza sativa
tcagtcttcggtcattgaggaggttttggtcatctcaaaattaagattgacttacattaaaaaaaagttaggaccaagcaatacggtctcgatcatgaccaaaatcatctagagttatccaaaaagatcatctagggatgcaagcatcacacagagtccaagatcatcaaaaaaccaaacaaacacacaatcgtcaaaaatcacaaaacacatgaacccatctccagccatcgctcatggatctctgctactgccagcacacacgcaagcatcgaaggctcggagcggcgtcctgcgaacacactgttgtaagggagcacgtgatgtggaggagtggaggaggaaggttggatatgtggttagtggcctaccgcaccggtgctagatgggggcaacgaggtggtgcgggtgtgcaacagccctcccttcagaaccgcatagctagtccatccgacgggcggacccacttacacataccaccacacttacattttcgttctcgctttgtgtaaaagggttaatctgggagtggtatagttggagggacacggccttgtaagttggttccacccttgttaaactagcaaggttgtactaaacatacgcacacagctcacatgggctacacatgcctcatcctgattgggccaggatgtcccaaggtgcttaatggaggcagcaaggtgatgcgggatgggggacagctcgggtaccgagctcgaattcgcc

SEQ ID NO: 43335 - DNA, 625 bp, Oryza sativa
ggcatatgcagctccgatcataaagccatacgtacgcacgacatttctcaaccgccgatagatgcagtgtcatatagctacatagccctggggcatgcacccccaggggcacccgaaaaaaaacccccagctggctctgtagtcccgcccggtgttcccatccgggactaaagatcgatctttactcccggttatttcacccgggactaaagatagcgatctttagtcccggattggtactcccggtttggaaaccgggactaaaggggggttacgaaccgggactacaaagggtttctccaccagtgctagtaagctagtaacacttgcatctatcgacggttgagaaatgtacgtgcgtacgtatggctttatgatcggagctacatatgcctaacgataaaccgtacaaaactttaaaaataaaaaagaaatgctttataaataaaacctctctactacaaaagaaagccaccttaaatcaattaaaaagttccaaaacttaaagtttggcaatgatcgatcatccctgggattacaatcgagctgcggatcatgcaaccacaagaaaatttacagcggatcagtgcaaccacaagcgaaactactatattcattctaaaat

SEQ ID NO: 43336 - DNA, 685 bp, Oryza sativa
  unsure (1)..(685): unsure at all n locations
aagacgaagcgtcgcttggatctcggatttattgtttaagggtatcgnaggtgcaaatgggcctaggcctgaacagtacttcagcccaatacttttaacagcgtggcccattgtgttccttagggacttaggcatattttgctttggcaatattatgcgcacaatagtgttgcccaatgctgataaaatcctttttatgcggtcatataattctttggaattattgcaatgcaaattaaaaggtgcccgacagaaaggtgttatactgctttttgttagctttattaggctacagaagctgtctgggttaatttggaatgacttgtttttatcatagtcacttccttggtatgttatatacctattttcattatggtaaatagtcatagcctaggctattagacttattcattaccataatttttataatacttggtgggtaatctttagagttttatattcggatgcctgtccagtgtgttcattcgtgaaccttttagagtgtaaaccactcggactcttttcattatggctaaaaagcagtcggctggcatgcctatctaggcgccgtgtatgcttttgtcatatgatgcacaattgtgttattattttgtttctcaactatatgtttagttcgttaactaatcacatagttgaaggctacacctaattaggtgcatctatt

SEQ ID NO: 43337 - DNA, 3468 bp, Oryza sativa
ctactacctgataagaagaaatgtaagcctccaaatgtaactattaattgctccttttgtgccagcctgatactagatagaccggataacacctcttttttttttagtgagttcagtcagaactgttggacaaagattagttttcattggaacctaaaccaggagatccatgggatggttcaacagcgaaaaaaaaatctcttttggaggttcatattttatggatgtttttcggcttgctgcatggaatatttggaagcaacacaataagtatattttcaataatgtccaacactctataaagttgtagaagcgtgcactaaaggatgacctaagtctatatttaattatgcttagagtagttgatagatcttttattcaatcatggattgagaactttagggcatcagcaatttttaagaccctcttgtatcacaaggtggaaccaagtgggcccattctttatataatagcacttgttgtagtgtatgtgtgacaaaggtgatattgcacctaaataaaaaattcgttccactactcaactaccacatcccttcaatccccttatggtgcttttttattttgcctcaaatcccctctgatccccttccgtgtgagcgaatccaatcactgcaacgatgcttgtgagaggagcaggtgatggcggtgaccatcgtgggaggagcaggagatggcagcaacgctccgtggtgctggtggggagatcttctggcaacgacggcagtgctcgcgagcacgcgtggattcgacgagggtggctgcggcgacgctcgcggacgcattgggggtgacagcagcactcgcgggcacatccaacaatggtgacggatctgcaacagcggctgcgacagcactcaccgacagatctggtgggcatcatcacaagggtcttatcttcttcgagagatagcatgagagggaattgtgattatttttttatttcttatggatggttcttatgcataaggataactcatcctaagaacatctattaggactactcccatagtatataatgcccactttagaggtctaagatcctcccctgcgactacattaattgtaggtgccctaagattcacataccagaggggcttcccatactttttttaaggtaaaacaaaggccagtgtattgaaaactgggatggttgaagaagctgtagatgaacttgcggctatttaggtgaagatatatggcatcccgaaattggctagaactgaagatgcagtcaaatcaactgttgaattagtgggagaatttgaggatttatactgggccagcttgcgatgtaatggtccagtaagcgtgagggttgcttgtaaacatcccagggagctgcacttctcaaactatgttgtatatcaactgggttggttacttgattagattgtagaaagagctaccctacatatgagaatagacaaaaccaacctgttgatggcgatgacatggatgataaaaaggatgatggagaggaagacataatgtggagaggaatacaaagagcaaagtgctccaaggtggaggcaacctgaaaagagtgatgtccggtaggtgatggtaattcttatgatcatagagaaaatccgcaagcgcacggatatatcgatgtagcacttcccttacggagtattccaaagggtatcgaatccaagggaacgtgtgtggtcagatcttcctctggttcatccaaggacaccaagcaaaggataagccaggatagagaagatttacaggtgagaaacagtgtctagggaaagcttaagtttaatcctaacacaatacttcaggcactggcaacctgctgttcccaaatgtcgctctactgcatacccggacaaggaggacttaagtgatctcgagggctatcatcacctctacatctacctcaaacgtactatgggatacgcaacaattatttgataacaattacctaaacaccatgtctaagcaattaatatctactttagtgtttataactcaccaaatcaatcactatattttagttgattatagtgaacaataatcccgtaagctatttaggaactaacaaagagataattctcacaagataaatctaaattactcgggaagaatattatattgaaatcagagtaataaacagaataaaaaaatgatagaagattactgacaactctggaattcatccgacatcttctactctactctcttcctattctagtattcaatatagtacaatagagcctcttataattcagctcaagcttggaagtgtgtgtgtgaagtgagggagtgaagtctatttatagggcagttatgacggttgcgagaaggggaactgtccgaactgctccacaaccgtcatgaggagagcatctggagcatccacgccaaaccctaggatcaacggtgattggaggggtttggccgaacctgggctgggccctcccgacctggccttcggcctgtggactcccctaactctcctctgtccatttctcggaattttgggctgagtctttgatattttgatgacgttcacaacccatccttgtatggatacatgtttcttctcactttagtctagatttcctcccaactttgggggtcatcacttgcatacaaatgtacaccaacacttgtggaatatgtgagatttaacacctatcactatgttggatgttttattatctggactttatgcaaatgttggcggtatagaatcggcatttagcagccgccaacaaaaccccccacacttagctctttactcgtccctgagtaaaggttagtgtagaatgaatttctccaagatataattcaggcatataaatcattcacaaccatacctgcacctgtgaactttattagtagctacttaccatcttgagtaattgataaatggaacgatcttgattccagtccttcttgcttctcctgtcagactcatgggattttatgaattttcgcagaccaactcttttactcatattgactttctctcttatctctcaaagatatatattttcttgtggatgctcaccaaggcgaagtgtgccagagctaatccctattctaaggctgatatatggagctcggtagggataaatagtgatatacctacatcatatttattgcaaagccaaaaatatggactcaagaagatcatcagtcatactcctagatcaagggtgtttatttgtggtggaaaatggaaaagtaaaatattttgtggaatgatgaataaagaaatggctctccctttttcgtatactttctccattttttttctttgcataaatatggaagctttatttcttttttttctttcttcaatagccatgccttttccttcttttctcattttctttatgccaagggattttctaggagaagaaagcatagtctaaagtaggaatttatttgaatggattttttgtgggaagccaacttccggtgtag

SEQ ID NO: 43338 - DNA, 833 bp, Oryza sativa
tttggatcctctccatcgttcctgagtaaaacacgagtgcacgcgtctccggggtataaagaagaggaatatgaactcaagaaagaactcacctggtaatttagttgacgtgcacgagcgcgggtaataggaccatcatgctgtacttggggggacgtggatgtatcgatggtgttgatgtcctcatcatacctgccctttaaatagacttcacttccatcaattcacacacttccaatcttgagttgaattacaagatgctgtattgtactatttgtatactagaattaggaagagagtagagtagaagaagtcggtggaattctggagctgtcggtaatcctttcctgtttcttttattctgtttattactctaatattaataagaattatctttctgagtaatatagatttatcttgtgagaattacctcttggttagttcctaattagtatacgggattattgtttactataatcaactaatatatagtgattattttttttgaaagaaccacagtaggggaagcccccaccattaagattttatactaataaaggagaaaaaattacaacaaatttaaccactgtaacaatgtatctctctcagaatttttgattttatattaatagtgattattttagtgagttataaacactgaagtagatactaattccttagacatggtgtttaggtagttaatatctagtaattgcagcgtatcccagcgtatcccacagtacgtttgaggtgggtgtagaggtggtgacagccctcgagagcacttaagtcctccctgttcgggtacgtagtagagcgacatctaggaacag

SEQ ID NO: 43339 - DNA, 1189 bp, Oryza sativa
acttgttattttgaacaaccatccatatgtagggaaccttatgcatctaagtaattgttatatgagtgatggttaaagataaaaggaattcttgcagcatttgtcatgacttttgggggatttgtttttcaaaatgaaatttccttcaaagctcgttcctctaaatgatttcattattctacctactaaggccatatgctagtatgacaatgttaaaccatattgatgcatatgactgcttgacattataatgagctttgcgaaattaatgtgactcgtgttagatatctttcatactctcgtgatcaagggttcatatccacatacacaaaatagctaggcttctacattggaagttggctttccacaaaaatttcattaccatctaaataaactcgtactttgtactatgctttcttctcctagaaaatcctttgcaaaaagaaaatgagaaatggagggaaaggcatggctattaaaaaaaaattctttctctcaaaacatggaccatgataaaaaaaaagagaagaaaaagggaaactagccatgccccttccatatttatgcaaagaaagttggagaagaaagtataggcaaagcagaaacattttattccatcattcataaaaatatcttacattttccaccaaaaataaagacccttgatctaggagtataattgatgatcttcttgagtccatgtatttggctttgcaatatataagatgcaggtgtcacgaccggaaataacccaacgggcgttccttacgtgcgtgcattattccttgtcccaggaggcaaggtacaccaaaagttgatacagttcagagttcaacaagcggaagcgtaaatagttaatttattacatgggcagcgaaggcccagcacacacaaagacaaacgagaaacagcggaagactagggcgacgaccacaggcgcttgacggcaggcacgagctagacaccaaaatcttcatcttccggagactcctcttctgggtttgggaaaaattgagcaagactgagtacaaccactgtactcaacaagacacacccacaagtgcataataaatacaagggagtacaagggagttataatataaagggttagggttgcagtaaacagcattaaaagacacttagttgctcaaagctattttgtaaacacgattctagaactatcaatatt

SEQ ID NO: 43340 - DNA, 1043 bp, Oryza sativa
catgcggtcctcctaaggagtcgcatgcgcccgtttaggaggaccgcatgcaaaaataagctccctcctctctagatcttttctgtctcaacactttgaaaattttcatccttatccccctctatctctatctctcaccttctcattcttatccacccacatcctctctctcattcatcatcctctctgcctttctcaactcctctcctctctctcactggtcgacagtgagaggtgagaggcgagtggtgggtggcctgggccctcggtgggcgagagcggtcgagagcggcggtagtgggctcagaagaggtatgtcgtgggcgggagcagccatgagagggctcgacggccggaggtcgcggatccagcccgggcggatccaccggaggcaggtgatggcgacggtgggatgggaccgagagcggcgggcgggagcggccagcgacgatggcatggatctagcgctgacggcccatccctacgcggatccggcatcaggggccctctctcacgaggatccggcactggcgacgttggagggtggtctgcgaggcggatctggcgcagaggacaaagtgacgtggggtggcaacgacgccgccccacgcggatctggctgacggcggcaggctagggttcggccggcggcggtctattgtccgcctgggtttttttcgaaaattagatttttgcatgtggttggctggccacatgaaaaatccgattttcgtagacttttttgtgcatgtggttgtgcatgtggtcgggatggctgcatgcaaatatcacttttgaccgcttgtaaaaatgatttttttagcagtgcacccttaaggccttaataatgacaaagaatcccggtgacacatcaacttcgattgtaaggctggaaacataagtatactaggtgatgtgaccatggctactatggatacgaccattgctcacatcatgaatcaacaagaagacatcaagatcaagtcctccatgtgctgcaatctgattcggccacgtgttacattgctgacttcaaacggccg

SEQ ID NO: 43341 - DNA, 704 bp, Oryza sativa
ccttttaacacatgattaattaagtattagctatttatttttcaagaatagattaatttgattttttaagcaactttcgtataaatttttttttgcaaaaaccacgccgtttaatagtttgaaaagcatacgcgtggaaaatgagggagaggggttgggaacatggggttgcaaacacaaccacatgtgaagcagcagacagtcgggcccgcatgttagatccgcacttggactggagagcagagcatcgcacacaaccgccaacgcagccgtcagcgagctcggccaggagcagaccatcgctgacgagttcgatccgtaccatgccagctgtagaccccgattcggagcttgttgccacagacagaccaagagcacgccgtcgacattctccatgagcaaatcgaagaagcaggtccgctgtgagggagatggaaagagagggatcagttccgctgtgtcgttgccgacctggaagtggaaccggcgtcctcgattcagagcactctactgccgtcgagcttctgtgtctggtggagtggtggatacctcatcgccgttgctgctttttcattgaacaatcagagatctgctgtttcgttgaacagacagcattcacaattttggagattgaactgtataggggtagagattattttttttatgaacatatatcattaggatgtactatgagttggattttt

SEQ ID NO: 43342 - DNA, 677 bp, Oryza sativa
gatgattcagaccgaactggcaacccgaccctggtcccagcccgtccaaagccaacccaggccaaccattccacattttagttgttaagcaggtttgaagaattaaaacactaacttgggtacattgctcggcttgcccataaccgagggcgcggctattcgaatagattatactctgatcagaggtgtacatctttacccacaagacacatcttcctcacgtgtaaccacgtgccacataccaccacggtatacaggcggaagacgtgacatagttcccaacccatcctagccatagacaagagtaccgacccaatcccacctacggccggaacccccgggacaggcaggcaggactgagccccctagcagcaggacatgtcacgcccggaatttctatccaaaattccaaacgcttacatgtgtgtgaaccctcgtccaggaatcagccgaggcacacaataacaaattgataatagagtacaaatattactctaattaataagcgaataaaatgtcattacagaggtagatagttcctctcaatcaataaagttctaagcagcggaaattaaataaacggcgcagacggcttcacttcacaggcagcttgaccaaggctacacctaatccttcacaccatcagcctcattgtagaactctttctctgatgaatg

SEQ ID NO: 43343 - DNA, 1327 bp, Oryza sativa
aaaaaaggaactttcgcaaataatttttatttataaaatatgtccttgggttttatccacttggcttatcctacagtcgagatggctctgataccagcttgtcgcgaccgggaaaattgccttttcccgaacgctagtgtattaatccccgtcccaggaaaagccggggtacaccacacaaacatgatataaaagacacatctttattatatcgacaatatttacattattacaaaggcacttaaggcctgacaatcaaaaataaacagcagcggactagcgggcctacggctccatcttcacaggcgctcaactggggtataagccaggactccccctaagacatcttctccaaagcttctcttactgaagaggggaaggattgagcaagaatgagtacaaccacagtactcagcaagccacaccggcagatgcatgattaatgcaagggaggtacaagggaataataatatagggattaagttttgcagtaaacagcatttaaaagtcacttagttgcccaaagccattttgtaaagacgatcctagagctacacagtattattaaacaaggccgtgaaccctcacgaacctgccttaacccaaggcctacgatgattcagaccgaactggcaacccgaccctgagtcccagctcgtcccaagccaacccaggccaaccattccacattttagttgttgagcaaattttaagaattcaaacactaacttgggtacattgcttggcttgcccataaccgagggcgcggctattcgaatagattatactctgatcagaggtgtacatctttacccacaagacacatcttcctcacgtgtaaccacgtgccacataccaccacggtatacggacggaagacgtgacatagttcccaacccatcctagccatagacaagagtaccgacccaatcccgcctacggccagaacctccgggacaggcaggcaggactgaggtgctactatcaaaaccatgcaccccgagcccagcctaaaaccattttggggattttgaatagagggggcggtgtgaatccaattccacaataaaccaacaattccaaagtgtccaggtgatatgaatatcccaaagtctagagttgtaaaaccgcctaatgttacctaattaatcagcgaagcatctacctaaaattatactagtggtactatgagtagagtgtccactagttggggttttgtttaatctagggtgaacaaggtaataataacaatagcaataataataaggtcataacaaaggtaaataggcatggctaaataaaacagtgataacgcgggaatttaaat

SEQ ID NO: 43344 - DNA, 508 bp, Oryza sativa
tacgtacctatatatggatatatggagtacatgtgcttttgttttcttttttggtgaacagtaaggtatttgtttctttttaaagggataataatacatttaatctaatggtccaaattattgggtcaccgatttaagtgaaaatcgacggtgtgattatacattgccacgtggtggcttaaaaacgtttgtagaagtgacacgtgacgatttaaaagcgtttatataaagtttaatggacttttagtatataatagataatgcaaacggcgaaaccacacgaaacagggcaatcggtgcacgtttaatttaatcacacaccccatgcacgtcgtcaatgtttttctaaacacaatgggccatggggggcaggccatgtgtccaataatttcgaattataaattcgtaattccatcagcaagcttaaatttaaattcgtgatggcatgtcggcgatcgatgggcttcattaattaggaccccaaagatcgataataaataaacgcata

SEQ ID NO: 43345 - DNA, 624 bp, Oryza sativa
agttgaaaaaattcaatcatatttctttcatattcaatcatatttgtatgaatatgcaagaaattaattcaggtaacaagaattgtagaatagcactatttctttcatataatttcttttatgattagaattttcaaaatttctgcagaaaatggagctaacaatgcaaaggttgattatgaaaacaatgttctatctctgttggaccaagactacattgcagtaagtatttttactttgacaaccttaagtttgatataatttcttttattttctttgacaatcaagactacattgattttttgttttttttatcaaataggattcatttatatcatacactagtctaatggaacatattatttcatcacaaccaaaacgttgcaatgaattgaaggtaaatttttttttgaaaacaaaagtactgatttgttgttcatttatgaatttatgtgttcaattaagtatattttttgaaaatctttcaaaaactgtttaattaaggttgaaggaacaaaaaaatgatacaatagagactggaattggacaagattatcaaaaggttgacgaaagtttgaattcacacgttgaatatcaatcagaacaaagatgcttgatggatat

SEQ ID NO: 43346 - DNA, 502 bp, Oryza sativa
actaggtccaacccatccaaaaaatagaatggatcatctaacctatcccaccacatctccaaaccaaacacatgcttagtgactattatatggagtaactaactaataatactaataagtagtactactttcatttggtgcctcatcatcatcagaagaggacttgtcatcgtcttcaaggtcgtcctcctcctccgtagtatcgtcgttggacacctcctcctcgtcggacacctcctccgtagtatcgtcgttggacacctcctcctcgtcgtctccattgtcatcgtcgtcctcctcagactccttctcgccctcgctgaaatcgtcctcatcatccccatcattgtcactctcctcttcctctgtcacaagtgttagatggatctccctccccttgagcccttgggctcaagggggcctggacccgcgccctgatcgggggcgcccagcccaatggctggtgggcccccgtcacactgtgccatataaagaggggtgg

SEQ ID NO: 43347 - DNA, 2624 bp, Oryza sativa
atactccctccgtaccaaattgatcatcatataagtttatgtatcgagactaaggataatttaaatcacatcaatgaagtaaccatatacatattctcccacaatgcatgcatcgattaaaacaccatgtcaattatacattttagcatgcacatgttctctcatgctgcattaattgtattatgatgaaatccgtgtctatgcggttacatgatgatcaatttaagaaattttaaatttcattatatgatgatcaatttgggaacgagggagtagttagcctatactccctctacttttgatagtcatattttcatcttggcacacagaccaaggataagttattctacttatcatccatttaaacatgctactaatcattcctcgtaaacaagcgattcattaatatttacatttcttaatgaccatgtagccaatcttatatggaagaatggagagtcatacattaaatccgagaaagtcattaagataataggatgttgaattgaaatacgcctatcaaaaataaatttttcagatttgaaaatatgactatcaaaatagatggaaggagtaattaagaaacactcaggagtctttcggctagtttcatagggagtatttgtgtccttttagttagcttaccttaatgttattatccttctttaatctcagttcagccagccttccaagaacccctgaaaagaaaagggaaaaaaaacgaaaagcaaagcgccgcggcacacagagggaggggcctcgggatttggtcccgaaggtggcgtgtcagtctggagccccacgcggatccgacggccaccagacaccgtccgacgcgtggtccccacgcttgtcacatctcccttaaaccgcgtgctaattactgtgctgaccgctaattaatccacttgtgctcaaactttacccctcgtggtgattaatttactcctactggattagtggtaaaagtgtttagtgtggggggaggcagccgagccaggcaggcaggcagaggccaaaaccgtgttgaccttttggggggttggggcaggcgaacgagggccacgggttggacacgagggaagtgaaatcccttggtgcacacggttgcaaccacacttaagacaaggcaaaaacacttcctctcctttcactttgggcctttggctcgtatgttttctgagctggtgggatattcgcagcgtctcttattttgtgggcaaaatttttttcactatattttacgtgaagccatgtgagaaaaataagcaatgattaatacgagacttggagtgaggccacttgggtaggtgagcatgcatggtaacacacatacggtgtatgcttggttggttggctagaatacggtgaaccatgctgaataaattattgtggtagtaggttggctgtgtttgatggtgattttacttatatagcgaagcatttgtgttggtatagttatctaataaaaaattatgatggaatagtattagctaagatatcaagatactattcaattttggattttatgatactatttgtggtatctattatttaatcgtacttaattgtagtgaattgatgtttacatggcaaaatgatttggattcatcaacataaacaactcagcatgttgaataaattaacatggtaggatgcatgtgcagtaattatatatattaactggcatgaatttgtcttatttaaacacactcaattctagtgcgttaatattattagcgttgaaatgattctgattcatagacatgaataatagtagcacgactagttgcaactaaacaaccaaattaaaccaagtaatttaacctagatatgcccatattaaagaacataatattctaatactaatataaccaatatgtcttttttttttgaaacttaaacacatatattagagcaacagatcaagagggcaagcccccgaacatcatcaacagagacagcaagatgcacagaatagaaaactggaacaagaacacaaacaacctcctaaaactagacagtgcagaaggcgcgaatcgacagggagcagcggcaaagccatgacaattgcaaccttgggtctcctttagcatgcagaccgcttgacgaaccgttaatccccttcggtcgcctccacagaaactgcacaaattggagatttgctgttgagccgtagattttggtggaagcttcaccggactcaaccaaacttcaccacggagttctccattgaatctgaggagcttgagctcaacccgaatggcacacccagcgtggatgccactgcccggagacaaagaggaagaaggatcccagatccagccaccctgatgcagtgaagagcacaaccatcgacgaatgaactgttctctatagcacaacgttggggaagagcggacttgcacaaggtggagcagaagcaccagactaacaccaccgacgccgacgtaggccacaacagtgcagtcattgccgccagaggcagcaacagcgcagccgccaccgccgcgggccacattcgagccgctgccgccgccacggaccgcatccgagcagccggcgccaccgccatcgccgcggactggatccgcgccgccgccatcatcttcggtcgtaatcgc

SEQ ID NO: 43348 - DNA, 9070 bp, Oryza sativa
ttaggtattatccttaaattgtagaaaaatctttttttaaagacttccgattgttttactttatcataagtacttttttttgtccttccgtcagatgatatgtaagcattattgtttttttttcaattatctgtacgtacggagtacttttctggtcaacagttatataattttcatgtatccgtatataggagaattgtattatttgtcaataataaatctaatctaattgtgaaaaatgaaacaactaaattgtgttgttttcatttttacaaatatagatttaaattagtgttgtatattcgtcaagtgatatttgacaccctaaaatatgatatgaaataaaaaaataccatagcattaattattatatatattagtcttgtatgttaagatagaatgaataaagatcattgatgggatatttcatatttataatataaatttagtttaaccacgtatatttacataaatttgtagagcaatatatttatcttcaaatagtagataatactatttcaaaagaccatcgatcttttttccaatgatacacatttttttccgtgattttgaaaatactatttcagaaaaccactgtaaataatatttttcttggttcccagtaggtaaacttcatttcttttcccaggtcatatgcacgtactgactactccctccgtttcacaatgtaagactttctagcattgctcatatattaataaatctaaacgcatatatatgtctacattcattaacatctaaatgaatatggacaatgctagaaagtcttatattgtgaaacgtaggaagtacttatatttcccgtatacgtatatagagtaatagggtgtttttaaaataaaatacatctaatctagtggtctaaaatattgggttcaccaatttaagtgaaaatcgacggtgatatttgcttaaatttatagagtaatagattttatatttaaatagtagaaaactccatttttaaagataattgattttttaatggtactatgtatgtatatttttttagctttattgttttctatagtaagtctgtgcatagttttttatttataaacagtaggtaagattgattgtttttagtattacgtatgtacgtacctatatggagtatatacttttgttttttttctttttctggtgaacagtaaggtattagtttttaaaataaaatacatctaatctaatggtttaaaatattagattcaccaatttaagtcaaaatcgacagtgatatttgcttaaatttatagagtaataggttttatctttaagtagaaaaatatctattttaaaaataatcgattttttcatggtagtacgtacgtactttttttggctttattgttttttttatagtaagtctctgtgtgtagttttttttaaagtaaatttcacaaaactacatatactttgaccacaatatcggaaaactacagatttaacactaattttatcacaaaactatagatttaaggtaaaatatcgcaaaactacagatttagtaatactgttatcacaaacatacaggtttaatgtcaatttaatcaccaaacttagatatttataactcaaacataacattagtgcaaaggatttaaatcctaaaatatgtagttttgtgataattttattctaaaatatgtagttttgtgatacttcgtcttaaacctatagttttgtgataaaattgttactaaatctgtagttctatgatatacggccttaaatatgtagttttgtgataatttggtcaaagtatctgtagttttgtgaaatttactctttttttttcttacgatgaacagtaggtaagattattgattgttttttagtctttaggtactacgtacgtacctatatatggatatatggagtacatgtgcttttgttttcttttttggtgaacagtaaggtatttgtttctttttaaatatataataatacatttaatctaatggtccaaattattgggtcaccgatttaagtgaaaatcgacggtgtgattatacattgccacgtggtggcttaaaaacgtttgtagaagtgacacgtgacgatttaaaagcgttatataaagtttaatggacttttagtatataatagataatgcaaacggcgaaaccacacgaaacagggcaatcggtgcacgtttaatttaatcacacaccccatgcacgtcgtcaatgtttttctaaacacaatgggccatggggggcaggccatgtgtccaataatttcgaatcataaattcgtaattccatcagcaagcttaaatttaaattcgtgatggcatgtcggcgatcgatgggcttcattaattaggaccccaaagatcgataataaataaacgcatagaaaaaaaatactactaaatgaacctgacacgttatcagttatcacaagttgaacggaatttcaacagccagacacggactcgacactgttcttcacctcctgcaaggtcaaacccgttgcacgttgtgctcccccaatccgtatttgacgttgaccggtcagctttaacggaggtcggaacggcttaccgggggagcccgcacgaatctcaaagccgcgtggaaatcgggccgccgataccgataccggtggcgtttttgcgtacggaggcagacacgtggggtctgtacccttgggcccacgtgtcagtgggtggtgtggctgactctgggtgtggtaggtgagcggacgtggacctgcggaaagtcgcaccctttgactcgttcaattccgctgggttgtgtggggcccacctgccaggctggcacgccggtgtagcgggagaaaattgacattttgccattgtcaaaacggagtttcgctaaaatgacactctcaaaagtggtttcgttaaaatgccatccttagtcaggggcaacatgctgcaatgccatttcatccatttcttcttagtttaatgatttttttcttactgagatgaccaaaatacccttggatcctatctcatctctcttcttctacctcatctcttcgttgcatatggtggggcggcgccggcgcagctcggcaccgtcgctgaaccgctacgggatgagaaagctggccacaccggggatggcgccgacgccacctttcgccgccctcactagctcgacggcgaagctcaccgggttcacgcacaggttgccgccggtggcgatggcgaccaggaacgggaaaggcggcgcgcctggggatggggaaagcgccggcacggacggggacgatggttcggctcggcggcgcggcgcaccaagcgctcgacttgaacgcgtgccacggcgtcacccccttctccgatgtgctcctcgacatgggcagcgacctgctcgcagcggagctccttgtcgaggcgacctggttacgcgcgcaggcgcaaccaaattaaccccggggggttcagcaacttgagtgggcccttcaaacttggccgggagagagatccacccccgccattggggggcttggtattggagaaggacttcaaaaatcaccaacggagtaaacccgtttgggtgggaattggtggggggaattaatgaggaggacgagaggaaccaatttttgcattcaattttgggcgagagcaaccaaggagtgagatcaatttgggacatgagttcatcggagagagaatgatggtggcggacggaggtgaaagacgctcctggcaagccccacggctgaggcaagggcatttgggtcaaaccaaataagcaaaacagtagaaaacatttgcaaataataaaaattggttgaaatggcagtgtggcaagatggggtcgtttgaagatggcattataacgaagccacatttggcgatggcattctgacgaaaccccaacccgagaatggctaaatgtcaattttctcgtgtagcggtggctgcatgtggggtccacacgcgtccgtggtctggctggacacttcgctgacatgtggggacatcgtgctggggagggtgcgcgtcatgctgacgttggggggtgtgcaccacgtgtacggctttttctcctcctggcttccattattggcagctgttgttgttgttggtagtttttgttagagcaagtttaatagtatagccaactgatttatagccaatttaatagcttattcatataatagttacatactatactattaatacctagccccacctgtcatagacacactgcgtcttggagtccgtgctatagctggctacgaatatgtagtccgctgctcttctctctcctgatttatctttttaaaatatgtttgcagctggcttatagcctgctattgtacctgcttttagggatattgttcgctagggatggtcctcagctcctgatgaaaggattgttagttctattaattaatagatcattgttgattcatcataatttcctttattcaatagcaattcatggctgtagtcgatcaatctttgctgcaaacagcgtaatcttgttactatactgattaatctcagtctggtgaaacttcgatctttcaacaaaaaagaaaaaaaaaatctttggtgaaacttgaattatcagattgaccattcgcccttttggaaacaagaccttgaaatgcgaagcctggttagtcgtatttctcaaatcaataagcttgaccagtctttgcttaatttgcaatgaatttctgtcctggggattctcatgtacatcttgaattgagcccggtagtttgtcaatgcaagacattaagaagtcgtaaatttatgtgcaagtggtgaggtcaacgctttcatctacttcttccgttccataatataagggattctgagattttacttgcaacgtttgaccactcgtcttattcaaatttttttgaaattattatttattttatttgtgacttactttattatgtatagtactttaaacacaacttttcgttttttatatttaattttttttaataagacgagtggttaaacgttgcaagcaaaaactcaaaatcatgcatatatgctcccgtatatagtcccatgcatgcatgccttttcttatacgctaaagaaggcagcacagtgcacactattgacttatatatacgcgtaattagtcaattacaatggcctagtttgatttaattgtcaatagagtgcagaaccaaatatatgggcgaggtgtgcacatatatacatgttgcttgatcaatgcatgatcacaagactaaattaaaccctcaaataattatcacaaatcattctgctattcagggaaaaaaaaactccggcttgctaatgttcaacaaccaccattggtcccatgcatattttttttaaaaaaaaaagaattcctaaagtttttctatagaacgactcatgcatgtaatccaagcaaacattgcaatccattctagttaactgcgaatgaaggaataatgacagtaaaggaaaaaaaaacaaacaggatgtaccttttggtacctgatgttagttaggtcaagaaacgttctcactggttccctaatagctcacaaagatacgtgacgcgtcaagaatatattatacattattgctactgggaattttcaatagaatggcatgatatccccaaatcctgaagccttgtttctttcagtggaaatgtggaatattcagtgtctattcatcgaccttttgaatgatatgcaggaatggaattctatatttttaaatagatatgttcatgctaatattccacttaattttggaggaatatagcaccttgaacaaatttgcagtggaattattaggtttagatatatgtgcatttccctatatgtttacttgcccaattcttctgatcggaaagaacttctcttcgagattattcccaaattaagaattccttgttatgtttacggctggatcccctgctaatataataacgtgtaaagcttttacttgttcaggaaaaagatatttgcagctgcagatttattacagattcttttatcacacagtaaatccggtacttcacaacattggggctgcaaatatcattttccctagtatttttattgtttctaaacagtgcctctctgattttatttatttgtttttttgagggaacattttatttattggtttaataaatttatatactatagacctcatcttttcgcttattcttatactccctcattccaaagagatatttaactatttgatgaatagttaaagtcttattttattctttgatttttctaaaagtctaagtcatatttgtaattattatgtgttatattaaatttttgatcggatcccaagaaatcattttagtacttattagttgcatgttcgttggttttgtcacatgatgaatgagttaactacaccttggttttggtaaaaaagaaatactagaacttagacttttggaaggagggagtacttatcaaccaaaatttgatttttcaacattaaatttgaagctggttttggatttttttttatcgaagtttatttttcagcctttgcttttggatcactaacaacccgtatataaaagttttattcaaaatcactttttgtttgcaaatatgccgtttgttttattccaccagacgatggggttgcatatgactgtttcagttatttttctgcctactgcctttgaggtacacccatgcaaaggacaaatttgcagttttttcaaaggtatagtacggatcaaaaagcgcaagtagccaagagattagatagcatcatacgtaagcgcttacgataccgtacgagaaattatcctttgtgtccgtacaccggtactgcagctaatccaagaagattagattatcagaaagaatattatgccaaaactactgtagagcacagtgtacatcgccgttatattagaaaaaaaatgggtcgctttagtggcatcctgaatagtatttttctctcacgtgggggcttcgtatttcttactaactgaacacgattactgttgaactgttgaagaattatatgtactggtcggttgcgatcaaggcatgttggcgcaaccgtggccaagacaatgttattatgtgacactataaagtgtttgtgggtacgctattaaccattggcttattatcgagaaagcaccgtagtgtactggaagagttgggtgtatatgacttgatccacggagtattaggttacaaagcctgatactcacggatattagaatattttcattaaaaatatagagggaccagagatttatcggtagtcttcatctatttgagcgggaggtacatatgtaggaaaaaagaaatctaggccattagaaatagggtattgaagaaaaaatgaaggaaatttacggtattgtgatactatgaaaaacctactaggccctttagaataggggtggggaaaaaactcaaaactcgaatggcttggattggcttgaacttgtagttttaatgcgtcgagccagtcaccctgcagactgggcttttagctcatgagcgtaaagccaagccaactcacgagctgctcgttaatacaaagagagatcaccatatatccatgtattcagtgcttcttaaccagtatttagtcatttagctacattccaattatttgcatttaattatttttattagttacttcctccgtccaaaattaaatgtgtctaggatagggatatgacattacttagtataaataggggcatgtccaaatttattgtactaggtatgtcacatcgtatcttaagttggtctattttgaaacaaaatgaatagtttaatattatgtttatatatatatttgagaaaaatgataaatttgaaaaatataaaggtgatataaaggattagcctactttggaacaaaggattagcctcaacaaaatcctttgaatttcctgtaggatgacccattttcataagaattgtgaggtaaactaacaaaagatatagccttatgttttctctcccttgagtcttgaagtttcaatgtttttttctggtgctgttaaatggtattcgttgcaaattcccatggttcaattttctacaagatttaacacaacatggtattgtattcatgtgttttctttattggtgtatttttcgaatcctctgttttagaggagccccgagcccatactgatttgtatgtactccatccgtttcataatgtaagttattctaatattttccatattcatattgatgttaatgaacataggaaatgctagaatgacttacattgtgaaacggaggaagtatactgttgtccgtgtataatgggaaaaaaaagaaacatcggtccgccaccgccatcttaaacattttgacgtgattaaaatcgcatttttccaccatctgactttcatcatgttgtcttatttacagttcaaaaattatacatacttcctccatttctaaatatgtaacgccgttaactttttttaatatgtttgaccgttcgtcttatttaaaaaatttaagtaattattaattcttttcttatcgtttgattcattgttaaatatacttatatgtatacatgtagttttacatatttcacaaaggtttttgaataagacgaacggtcaaacatgtgctaaaaaatcaacgatatcaaatatttagaaacggagggagtatatctcaggtcaacgttgacggatccatcatgaatcaacgggagcaagccggcaagtggcaaccgtcagttgtcgtgcatcgctctgccgctgacaaatgctcctactgatccgaggcgttcggaggcgcaccatcacgatccaccgtacgggttagaacaaccgatgtacggatcttcatctgccaagtgcagtagattcgctttttggcatgttggcagtgcccgggttcaattgagaccgaccgtttaatccgatatgaaatccaaactgtacgtttaatacgcataataatactggtagtatcttgtttttctttttctttttttgaaaaaagtgctcgaataatccgtattagggtagttgacttgcatacaaattctcttccaaatccatacaaatactactcactccgtccctaa

SEQ ID NO: 43349 - DNA, 2253 bp, Oryza sativa
caccccataaaccctaaccgatcgagggggcgcagccagtgacgggaagactccaccgccgcgccacgacctcgccgggatcccctacgaccaccactgccgcgcagcaccgtcgccgtcacgaccgccatcgccgccgccgcccacgtcaagcagagcgacgacaacgacgatggctgggacttcctcttcatccaacgcgtcaaccggtcacatccctaaaccctttcccttattctctattgttgttcaatcatccatcgcaaatagaaccacccgactagatctaaacctaggtgatccaatagacaacctaacaacaagctcctccctccaatgtataggagtgaaggttgcagcgttactctcgtcgatatcaacgtaccctttcttctccagctcattacggatccatgccttacgcttgacgatgcgtttctgaaactcgtcatgcgtcctcatgcagctgtgcatgagacggagcatctcataatctttcttgatccggtagtattcagggcatctgtagaataatgcatcgtcttcgtggcgaggatcgcatcgatggtctgctgcgagagccggatcttgccttgtggcaccggaggatgcccctcgccgaccttctccgccgccttcacctcgtgcactacgctcaccatcacccgcactttacgacgggtacccttgtcagggccattcacagtcgccgacgccgtcgcttcatcacccacctcctccttgtcggcaatcaacgccgccgctgccgtcgcttcatcacccacctcctccttaccggcaatcaccgccacatccttatcagccatcaatcaccacgactctactggggattttgaggatttctttcgctgggagaggaggcttccgatggggattttcggaagcctagccgacccgatgatggagcaggcggcagtggctcccgcattttataccagccggtcagggcaaaggattccgagttgggctttggatgtgttcgcgatcgggcctgaagcctcacctcaatggagtccgtctcggataagcccagcacagtccaacctgcagttctactggaaattggaaaatactcctgatgagatccgatatatttttctggtgaaggacatgttctttccttctatcatcatgctatcttgtgaatgaaaaggttgtcttttgatgtgcggccaatcggcaccaatttagcaagcttaatacaacggcacaaatttggtgagcatgcagtacggaaacgggtaaaatatatgatgtggcaatgattatatagctttgaaactgaaaatgcaaaaatgaaatcaacgccgtccgtggggatcgaacccacgaccacgtggttaaaagccacgcgctctaccactgagctaggacggccaccgtatggttacgtttggaaagtcttatctctaaactgtaagaaaaagcctagccggccaagccaactatcgcaacgactaaattttagtttcttatcagatcgaggatgatcgggagcttactctgcaattcaagtattcaacagctttcactctcttagctttttctttattttgattagatggaagacacaaacgcacacgcgcacagacacccaccattacacacataacactaaaccaaaatacgccccaaacgcactaaaccaaacagcacaaacttgttcttactacatatttgctaatggatagagttatgcaccaacgatttcatccgtgtatcagtcggatcttaagttcgttcgcttttggaaatacggatatgtatttgagatggattttaaattctttcgcttttggaaatgcaggaggagtaatataagaaatctctttaaaaaaaacttatatgctaacttgagatgattgaactcttaattgcagctcataattttctagaaaaatatatatatccaagcgaattctcatagtgaaactattataaaaattgaagatgtttttgccgctactttggtatgtcacccgtgtatgagtcggttttaagttcgttcgcttttggaaatacatatatgtatttgatccgggttttaagttcgtttcttttggaaatagataagtagtctaagaaatctctttataaaaacttacctgctaacttgagatgatcgtactcctaattgctcttaattctcgcattgaatttcactttcaccttaactataatgtataacaataataaaattaaaataaccttcacccgttgcaacgcacggat

SEQ ID NO: 43350 - DNA, 631 bp, Oryza sativa
tgatgcttctctccgttggactgcggggttggtggcatcttttcttcgtcagcagcaaaatgatttgcaatcttttggtacatgatcagttcttcacaaaagaaccaagtgatcctgctcgttggacacctgtcgggtggatggtcttcctcacaatgaacgcatgtagtggcacacgagctggcaacatgacggatttctccacaacgagagcatgccttacgttccattttattctggttgaaaccttggggagacttctcatcttcatcatctgaggagacttgatctgaatcttcactatcagacactctacctccattagctaaaagatgctctgtcaactgtggtgcacctcggaaggtatttcttctctgacgttttgtcattcctggtggaggccattctgtgctggtaatgatcatcttacggacttcatcttcggttcgcattggtgtttttcttttctgctgaggaccctcctgtcacgtcctgataaattcatcccgaattaaaaatcattcgctaaaaggaataatagaattaattaaaattcgaaaagaaattggcaaacactaaaatacgtgcaagaaaaattcaaatgtggcccggagaatttttgttaaattct

SEQ ID NO: 43351 - DNA, 689 bp, Oryza sativa
  unsure (1)..(689): unsure at all n locations
gcagtttttggtgtcacaagggatccacttatagtgttatcatcaaatatttttgctatttctggtaatccttctttcttttgtgtttatgaacacatcttacaacaatcctttctttttattcatagcacatatcagcacttaccaatgtaagaaattttacaagagaacttttaccactagctaggaacttcccgtgagcttgctatttatcaatgaatatttctgcagcctttacttttgttagcacctgcagcctgcattcattcagccagttgatgctcagagttagttttcacaattttgcagttatctgttccataaaagtactgtttcttgctgtaggtatttgggctgcattcagcttgattgtttcatataaaatttaaatatactagttatatatctggatattacagacgatggtctaatgtggcacacatgaccctattatgtcctctcgataacgccaactctaggtttctagcaatctttgatgtttatacctcagtttgcagacaagtgattgatttggtaattgagtaacttctaatgatgtaattgggtaaatgataaatngataataacatacatcatagttacatacttgaagttgaatgaagcatgaaagaagacattagatatcagctagttttgatgctatatattttatatgtcacacattttat

SEQ ID NO: 43352 - DNA, 1561 bp, Oryza sativa
aaagtgtttctatgaaggcaaagagtgaaatcttccactcggtatcagatgctacacggagtgaaaaatgcaagcaccggttaccaggcaacgccacgtcctgggagatgatccaacgggaaagaactcatcaaggttaaaggtgtaaaggaatacgttgagtgctaactgatgacaacatgaagagaatagcggaaagtaaactgaacataaagaaagtgaatctgagttgcttgttcgtgggagctattcccagttatgaaccaagtgatatgttcgaagatagtctacagaggtcagtttaaaatcacatgtaacagcgaagcctcagatttggcaggataatgattagacaataacaaatccagcagtaaagccatttgggaagacgtcaaagtatatcaagtaggataagttggctctcttgggaagcataattcaaaggtaaagttatcgacccttgcatcaaatagcagaagtagctatcacccggagaccagggaagctaatatgaggcagttggtggcgagttagaagcaaatgacaagcatggtatcttagtaatgacgagctgatctcgacacatgacatgaagcgggtaacttgtatgaggttgactccaaagatatgaactatgcgaagttctggaactgaagccccatcttcaagtgccgcaacccagtcgaagtcagctaaaggttcaaccctggttcgagtcaggtgaaaagaagattccacctgcaacaggagatcgagccaagcagtccagagtggagaagctttgttaggcaagtttgttatagaaagcggagcggaagaagtcagacaagaagagaagaccgcccacctatcttcatgctagcctcctcgaatctcggggacgagattcttgtaaggggggtggatttgtcacgtcctgataaattcatcccgaaataaaaatcattttctaaaaggaataatagaattaattaaaaattcgaaaagaaattggcaaaccctaaaatacgtacaagaaaaattcaaatgtggcccagagaatttttgttaaattctccttggtctaaaaggagccctcaaattttagtggaattttcagagcacgaataataattattaagaaataaacaaagttgaaaaggttttataaaaagaaaaatccctaaaagtcttcttttccccccccttcctctcttgggccggctcggcccaactctccctccctctctttcctctcccccgcggcccatcggcctcctcccccgcgcgcgcgccgctgacaggcgggcccgcccgccgccctcgctgacgggtggggcccacctgtcatcgccttcctcccgccgctcccgccgctcgcccgtgccctagcgccgccgccgccgcggattccgccgcatcccgccgtccccgcgcgccataaagaggggggaatcattccccgcgattccctctctctttccccccgtttttccctctctctctccctcggattcgtccggattcactcccgcaaacctcgccggcgccatcaatggcggcgagatctccgcgccggttt

SEQ ID NO: 43353 - DNA, 808 bp, Oryza sativa
gtccgttagtgtgaaccgccgcccgtgcgcccggtccaccaaaccttagccgctgacgcaataatccttttttccttttcaaaaataattcattattgcgtcataattcaatttaaaccgatataagtgttttaatccgatttaatctttaaaaattcataactaattcatcttagctccgatttagttggttcaagtctctaaatttttctaaaattgagatctacacattaaaaatatccacatgtactgttcatgcttgtttatgtgctgttttggtgattttgctcttttctgcttagattccgtcgtttccggagagtccgttttcgccgaagaagagtttgaagagttccaaggccagcaaggcaagtcacacagatcccaaacaaccctttgagcatgttgatcctatttaaagctattgtttctattcaactattgcatctattttcgaatgtcattgggtggaattgacctattctttgttatggccctttcgtacttgattaccttattccttgataccttgggttattacaatttgactagttgagctttatttatattggttcagctagatattagatataattgcttagccctgcttagaaacattagcacacattcgggataactaatgattcactattatttcatgatggtttaatgatagttcacgatggtcaatcgtgattagttaattaattaatgtgccaactaaaacctggtaatggtgggttgtgagcacatggttttgttggtcgtgctcatgacaattaaggaccggttcacgagtttcggttgt

SEQ ID NO: 43354 - DNA, 646 bp, Oryza sativa
cctgcaggtcgactctagaggatccccatataaaataatgactcatattttcttttaaaaaaataagacagacaattaaagttgtacacggaaactaatggctaagcgtattgggagataaagtgagaactatttttttatattatttttaagtattttattgtttggtctggagcgtgacacgagatgtggacaaacatgtcaatgttatgcaaagtatgcaacctgtcgggctttggaaacgtagattattggactatcgtttctttatgagtttagggtgtacaactagctatattattttgctaatcacaatttctatggttttttttgagaagggacaatttctatgggttggtgtactgtattttagtgatattagcatatacatgtgccagtagcatatacatgattttatacgttcaactttatttattttatcttctagttggtttttttctagagacactgatttttttatgaattgattttcttgtgaaaatgtcccttttatggtttctgaaagggtggtttttaactttttttactttgttttttatagtagtaaattgataattacttcttctcactccgtcctataaaaaaccaaaatatgataatgtcagggttatggataccacatacc

SEQ ID NO: 43355 - DNA, 642 bp, Oryza sativa
caatgtaatgtaattatagttttgtaactacaatataactagaatgtgactttgatgtaatttgaaaaaatctgccataaacatgtgatgatgggactagcttgtgaaaagagggtttagattcgataataaaatatctcattacaaatcttagcgcggaatcgatggctaaacactcatgaaaactgtcgaaagtcagctagtagttccgtttatttttcatagtagtactaatactaatattaaggacaagtagaacgtctcacatcagagtactccagtggataaagacagctattaccgacgaacagatgggaagtcggaagtacccaagcaaaacaactgatgaggcgaacgtgtatcaacaggcacgaaattaaattgttttggagtaatttatgacggcttcttctccgtacggactttggaatctcctctaatgaatcgacttgacgtgacagtcgtagtagtattaacagatgattcaagttgacccgattttgcttctttttttttcctccccttttgctggcgatcccccaataattaacacaaagagcaaccgcccctctggtggcatgcaactaagaaagaaaaatgcacgcctctgtgaagtataaatttattatatatagttgaagt

SEQ ID NO: 43356 - DNA, 2108 bp, Oryza sativa
cactcccatccccttctataatattggattatctcgtgagttgatagggaacatatgccaattataatcctaacgacaacaatcggggtccctaaatgagtatggagataagtttatttcatatgtttatcacacaatcaagtgtaaatgtgaatctatttcacataagatggttgaataatattaaatagcaataaatatagaatatgtaatgtaggaaaaaccataagtttaaaacatgttgccatagtaatttgcgcacaaataaatgcatatgaggatataacagggagggggatggaaaaggcaatcttgttccctctgtgcaatagaggattttctagtggtttgacaaggaatgggtccctattgcaatacctatacaacagtttccttctccttttataattgctaacctgtttttttgtcgatggtaggaaccaactctccattggatttgtgagtagatttacgctagtaacatcttcttcttttccaactctgtggtgacaacaacaacactgtgttaaagttcaaataaatagagggcgaggggacgagggatgggagaagaggaactgaggaagagtcttacgtagagggatgccgaccacggtggtagatcgtgatgggcggtggggtggtcgaccgtgtggagaggaggggaatgagcgtggtaagtgatatatagggccaaggaaatccaattagttggtggtgagcggtggtagcatccggaaacgtggaagacactggtgtgagagatctatacgagaaactataatatgttggtggttaaattggaggtgtagggagtaggatgggagaggaatgggtggcaagggaagcatgaattgaagggaaccatgggataaagtataacggctatatcatggcaatgtggggagagtgatagagcgcgaagagagtgggttgctaggattatcttgaaagaatgtgagtgtttggaccgttggatggaggtaggttttctagtgtaataaaatgataccttgtttagatccaatcctggaatccgattagtaggcggtgagtagtggtagcttttggaaacacggaagagactagtgtgagagatctattcaaggaagtgtaagatattggtagtaaaattggagatgtatggagcgggatggctaaggaaggggtggcaagggaagtatgaattgaatgggagtatgagataaggtataacggatgtggcgcggcaacgtgaggagtgtgatagagagcaaagagagtgggctgctaggattgtcttgaaaggatgtgagtgtttgatccgttggatggagtgggtttgctaatgataccttgtttaaatccactcctggaatccgattagtacgtggtgagtagtgataacttctagcactacaacaaaaacgtcatgcaaaggcaatttttaaaatgactttaaaatcaagagttctaaagtgtagagacatcttttagaggcactttaaatattgtctaaaacgcttttaatctaaagacacttttagcacaatttattaaatttatcttgtagaggcacttttttcaacactttaaaatttgccttatgtaaaggcattttttgagacatttcaatctctatagaggcacttataggaaatttaatctaagctaattaactacataaaagtaacacgcggcacatatgtacaagtaataacatgaggttgagatggttagaccattcaagttaaaaataatatatgcaataagtctaaagttaaaggattggcaattgcaagggaagtgattttttttctttattacattggtttgccatggttttggaagattttaatgcctttagaaaatgcctatactctcttataaatattaaaaatgtgcctctatgaaagtgccagaaggcatagagacattttgtaaagtgcatctagagtattctagagacatttaaaaagtgcctcaattcactagaaagcatttatgagacatttttgaaaatgcctctagaatattctagagacatttaaaaagtgcctctatattattagagaaatgtctcttccatgcatttttgttgtagtgtggagacacgaaacacgctggtg

SEQ ID NO: 43357 - DNA, 1649 bp, Oryza sativa
tgctacgctcaacataccatactcttgagattatgacgacacaaattttcacaaactacaaatggagatttagcaaaaggtttgcttttaatttttacctaagcaatgtttggttttcactatgcttggttttagtttttccaccatctttatatatgtggtgctacagcttgaatggtgacctttgtaataagttatggcaggatgcttcgagctaaaggttggattaattttattatcataaaaatatttggattgaaagaacttggtttgctatcatattaaaatattgacaatactaaaatctaggcaaatattgattgatctgccattgcaaccatcctcaccactgccatatcctcccaggtcccgacaaccaccgtgagctcaaatgaagcttctgtgctggcgtctcgctccacgacggcgcacaagagcgacccgtacacaagatcattggaatgtgcttgctagccggcgacctcaagaagcagcatgggtattcatgacgacgaggccaataaggaaacgattgtaaaagttagtgttgacatagggacccaaaggaaaaattgactaatcaccatcggtgattgcgattctaaacttttgtgttccgaaggccgtattttaattatggactggatattgggtcctctacgtaaactttgggcgtaggtgatggcccaacaccctctttctcacttataggccaggcccatattccagtccgcatgcacgtgagagttttgttttggagggcccacctgattgtaatccctttccgaggaaatgggccggatttgagctggcttcagatgttgtgggccgaaaaccattgcttcctcgcttataaatttgtttaatctactaaaaaataccctgcacattgtaatggactttcttatagaaaaaaggtctatcaatccttacgcatattataccaaagcaaataacacttataatttttttatgatttttctattatacaaacatacctcatataatgcaatgggttaaaattgtgtccattatgtcatatcactttagactaagattttatatatatatatatacatatatatatatatatacatatatatacatatatacatatacatatatacatatatatatatacatatatacatatatacatatatacatatacatatatacatatacatatatatacatatacatatgtacatatatatatatatatacatatatacatatatacatatatatacatatatgtacatatatatatacatacatacatatatacatatatatatatatatacatatatatatacatacatacatatatagatatgtacatatatacatatatacatacatatatacatatatatatgtgtgtgtgtgtgtatgtatacatatacatatacatataaacatatacatatacatatacatatacatatacatatacatatacatacatacctacatacatacatatacatatacatatatacatacatacatacatacatatatccaaggaagttaattttttctttgcatatttccattttctttttggataatattaacccattttgttccacctttctaaaaaatatttcaagatgagcaatatgttctttgtaagtcctt

SEQ ID NO: 43358 - DNA, 641 bp, Oryza sativa
aaaaaaaaatcctctattctgaaggccttaaggacctattcgttttggagaaatttcagaggatttggatttttaagaattaattcctatcattgccatttggtttataggaatgtagacataggaaaatcaaggaattcttcctttcctacaagttgtagagagaaaacataagaaatttttcgtcttcttaaatctcttggaaaattcctgtggattgaagtgtgcgtatatttctatttctccactttaaattccttaaaaacaaatagggtgcctaactatttcatctggtcttgtatgacactgacatggtttttcagatgcacatttagctaatacagtacaattcatattgttgaagttttgcgcatatttttatgtaggagtaaatgagttttaagtatcaatttaaatttaaaatgatgctggtacatcttttcaaatttgatcaaaagctccaacgagtattactcctatttgcacataattggcagcgttgtgaattccaaacaagcaaataaagaaagaaaaagacagcttaaaacgaccgcataactagagtcacagctaagcgataattcacaacatcacgatgcaaatcataaatcagtttcgtttttataaaaaccctcgtaggt

SEQ ID NO: 43359 - DNA, 675 bp, Oryza sativa
cttgctgtaagtcttactgttacaagtttctttcctagttcatcacgaagcattgctttttcacttgtctgtgagagtatggagtgtatactaataatctatgccaggacgagtttaatgcatcctaattcatctgcatctaacgtccacattttcatcttaaaaacaatccctgtatacattttcatcatatagaacatcacagaattcggttgtatgtcactgttgagatgtttggtagtttgttgtacaatttctgagatcctcaattgtgaaacaattttcttgattgtcatgcaggctgctaaaaggcatttgactcagcgtattgaaaggttggatgataaattggatcagcaaaaggcgctttctggacaaataagagatgatgtactttctccttaacattcatatcaatccatgtttggcattaacatgtcttcattttcacgcgcatgggttgaataattaagaaatgtctagtagcatatgcctatatgcaattattagcccaattatattttaagatgcactttttatttctttttagggaagtgaactgtgagaacttacagctaagtacattcttgttgtatcattttcacttttcaaatatctacttttttatccaggttactgatgcacgactgaagcttgagaatattggttcagaaa

SEQ ID NO: 43360 - DNA, 753 bp, Oryza sativa
tcctgcagcccacaaacctttgtactaaagcatgtaactgatccaacatgaacttggaaggtgatgacatcaaatttgtgttttatctttgttactgcattggctgtgatatgctgcagctccgccgacgtataagaaacaggacggctgaaagccaaacatgggaatcatgctttgcttaaagcattacagtggaaatctgacagccacagtgaaagctaaatacccaaaggctatcaaagaataccaggatcaacatattagccaccaaataacagcacacgccgaggattaaaaaacggacgcctatgataagagtggatctagaaacatctcatcacatcactgttttgatgcaacgtaaaaaaccattagcattcatttctccaagaaagtatctgaatcccggtggttcaaatgctcgccatcaatattaacatgactaacattaatgaaaaaaagcaacacctatcttcccgggggtgcagaaggcagcggcaatattagtttgcttccgttaatgagaggaacgtcggtacgtgagtctgatctcccttttcttttcacctcaaacatgaaggatcaaaatggaaagtctgcacaacaaaatatgctgtcaggcaacgcaatgcaacatttgacataccaaggttacacaaacaccagtctttcagcaactttagaagccagaagatactaaaatgtttgcatgcaagccaaatttcttcatatgaaaatttgaacatacatctc

SEQ ID NO: 43361 - DNA, 632 bp, Oryza sativa
tagtgacgatttccacaagtatgggcagccctaactcctcgtggcagagctcctcgagcctcccgcggccgccttcgccggagcagcaggtgtcgatcaccatgcacagtgggtcgaggactcccttctccctgacccgcgcgagctccagcagcgagccagggaagagcgcatcccagacggcggcgcggtggtgctccccggcgagcgcggcgttgcccagcgcctggaggcccgcgcgcgcgacgtcgggggagtcggagggggaggagagggcggaggagacgaccgcggcggggccggagaggaggacgaaggtgccctggttgaggtcgtcgccgcgaggaggttgcggaggaggcggaggcggaggagcaggaggcggtgggtggaggccggcaggaggtggagggtgtcggcgagggcgtcggagagcgcggcccggccctgggcgcttcgggaagcttctagaagcgcctctagagtttctgtcctcgatctcctcggcttcccacattttctcctctgcgccgttgcggtttcgccggcggcggagagagaaggagacagctgttgctggatggttatggaatggggataccgtgcaggcgtgcagcggcggcctcgggcca

SEQ ID NO: 43362 - DNA, 533 bp, Oryza sativa
ctaataaaatcaaatcaaacaaaaacaattcagtaccaattttaatccatcaatcaatcaatatatccaacaccaaaaataccttcttacatagtgttttcattttccgggtactcctgggccggagctgggagagagcagtcgaaatcgagctcgccggagaataagttggcgtcgatagcggcggccgagaactccggcgtgtagctggccatgaaaggggatgaggagtaggagtaggagttgctgaagaagaaagcttcagggttcagtcctacggaagccgccattgcacagtgctgaaccttttcaccggtgaattttcttctgtgatggtaatggataaatggtcagggcggcgaggctcgcaatttatatgcagccatgtggcctgagaaacgcgaggtggctggctttcttggcttggcttcccggatctttctgggatggcgagcttggctttgatccgaaggttcggagatgcgtcacctgtcaaatccatggacctttagctaatctttgctttgggagat

SEQ ID NO: 43363 - DNA, 678 bp, Oryza sativa
cccatcacgtgctcatgaattatcatgttttacatgcgccagagaaaattcccaaccttctctcctaaacgcaccctagttattggggaatttaactattgccattattagatttggcaattatccaatgctcatcttaaaattgcttttatttttttccctctaaggtggtgtttttttcaactatttgtcacatttgcccatgtaacatgtcaacatggtagtccaaggtagaaactatatggaacttagtagtcagtctccccctcacatggcgacggcgacgggttcacatcctctaccataatgacactcacattacaggcactgacgtgtgggacaatagaaggatggaacccatataacaatgactataatgatagtaacattatgatagaggatctcacccgacagcgacgatgtacaacccagcactggtgacacagcagtccaactaagctcgcgcaaatcaagtgaatttttggcaggaacacacaaatcaagtaaaacacttgaatcaatgagaagaagcacaaatttcccctagttatcgcttggagggtaacccattaccacccctcctatgatgttaagggaaacacagtaggggtgtaccatccattctattggacttatatatgccgctattgaacattaacaagcgggcctcgatcgcca

SEQ ID NO: 43364 - DNA, 654 bp, Oryza sativa
ctgcaccccagctcaatgagtgcacgtttggcaccaagaacatggcaaacctcgaggtgcttgtttttgctaaatgtgcaagactcagcagcccgccgccgaagcttgatgaactaaacttcctccgggaggtgcatttggctcaaatgcctcaaggattctatgacggcatgaaccagcaaccaagaagctcgtgcattttccagagttccagcaccacttccactcgtcaaccagagctgtcgtgcaagggggaagctaagccataatcgccgatccgttcgcttcactcaccacaggcaggtgccacctctatcctccattgcaaaatgtttcaagtattcatcatcaccctcagcgtcactaaccaaacttttttacttcttgtgtgtacgccataccaggcttctgtttcagtgctgtaatttccggccagcttctagtcacagcttcatcagttcggtgtggccgtcagatatatttgctgtgcaagttctgaatatttaccgtttcataaatcagagttgagtgaactactttcaaaataaatttagtcatcagtgaactacgtccatatatggtgagatccctgcccgccctcgtttactgctgtttcaataaggctgtatgttttcacaaacatggtgttaatgg

SEQ ID NO: 43365 - DNA, 643 bp, Oryza sativa
acatggcggcaatgattgcgttgaagacagtaatctaaaagaaaaatcattttcaagtttgctaaaagggtattatgtacatgcaaatatctcgtgtcatctctccttcatgcatactgctcagtaaggaagcatatataacatgtatataaagagaggatctgacaaaaaggctgcatgcagcaaagtcatagcaagaggttcgattttttttcaagagatcggacgactggattgaagcattttctgcctagctgtctgtctctgcttgcgatcgaacggcctgaaaaaactgacgatggcaagtgtgggtggctgcatgcatgcgcgcgcgcggctagcaacgcggggcgaggtgagccaaccacgccaactccgaccattcctcccgtcgcctccctctcttgacaccatctcaacctccatcccctccatgacttgtgttttgccatcgcgcgcttttgcccaccgcttctctcctcctcctctccccccttcccttccctcccggcgtgtggtggtcggaggttgccattcattggccgcccccccaccaccggcacccgccggtgaggagggacaccgccatcacattcttgctatatccaacgacctccattgattaactacgtgcgtgtgagaa

SEQ ID NO: 43366 - DNA, 657 bp, Oryza sativa
gtccaaagaataattattcagttactgtcagacaactgtttaccggtgcagtcttattggcttaacctgcacgagtgcagcaagcttagagcagtggtgttgtaatgctacagccccaagtcgtattatcgtatatacatcaaagtatcgaacaccctgaaaggatatgcacaataatctcgacgatggtcacttcagaaagaaaattacactggcccttacccaataataacccaaacaaacactcatgctccatagctaaaggactactctctccgtccaaaaaaacccaatccagattcaaatacaggattgagttatttttgagacgaagggagtacactatgtccagattcaaactcaggattgagtttttttttcaggacggagagagtaggagagttgcaaagatagtttctgcaagtcccacacccctactcaactcagtcactttgctagctagtactattgctctgtagtactccgtattgtactactgccaactgtgacgcgaaaatgtgatcagttatgagagcagtgacatcaaatgtatatttcttctgatgaatcgccataatgctggcgaaggcgactctgtctgtctgtcttctccccttgcatatcgttccgctatgcagtgggcctcctgcactataa

SEQ ID NO: 43367 - DNA, 4132 bp, Oryza sativa
cctttaatttcgctatatgcatgtcctagctctctgtccttctctgcaggtttaagcacgagctaggcgtgagcatgaagctagattctaacattaatttagttcaactgctagttaaagacttaaaagtttgaatttctgagaccatgtcgatgtacaaaacgtattatttgagtaacttttcaaatttcatagttataaatgatggactagaagattatactgatagcttatttctcttgggtctttgacccaaaacgaacaaaaaaggataaattattaatcctttttatgtttgtaaacaaaaagatattttactgctccttgtttggacttcagagtgaaattgaagtaactagagtcatcaatgaactgattgaatgagacagatgacaataacagctttgaacaaggaccttttgtgctaaaaagtgtagagttcaatctaaacatagtattaatgactgatgcagtgtgagaaaatctttaggtaattctgctaccgggaaaagggtatatcagtaaaacgtttaggtcacaactaaattgaatggcagtttggcgccatttagatcatgaagaaatatttttagttcctagaatgatgcatgatgaatatcatgattcaacagtagtactcctatatgtctgacaaaattgactagctagcctgaaatattttctgcaaactagagttctagaaacaagtgcattctgccatccaaccagggcttaaaattttggttcttttttttttgagaatttcgggcccctataagaaccttttttttcaaaaattttaccgttttgtgaatttaataaaatttattgaaattcagtcaaaaattttcacaaaattcaaattatttttgttctgaaatattacaaaatttcgaaaattttggtcctcctggtagattgtgctcaccgaaattataaagcctgcatccaacaccacgttaattcttcttgccctttattgacgtcctaccaaccgtccaaccagccatactaaaattttcagggttttgtcacacctatatcgtagaatctgagcaaatatctcttgtaacctacaagattgggttacttagaccactttttggtgtctattttttgtcatagttggaaaagcttgcatcatggataagaaaaggcggacaaaagagagattttttctttctttctgaaaaaaaatatggaactgtagcatgccctgattccatctcaacaaattggtgcttgtcaagttaatgtatctgttcttctaaagaatacttaaaaaaatgacttaggtacgaatagtttatctaaaactacatagtacatattcacgctcaatttttctatttcctacttcaccaagacgatcacagcgatcgtactacgttattgtaatgaactgatgtactcaaattttcagcctacttgtgaactacaagtgtctgactatgtctcagtaactgatacagggaaggggatatgtgtccatttcgcttacagtatcactactggtacagtagtacttgatatgaccaaagcgtgaattgaatgacttatgttgcaaggtcataattaactagggcttcagtttgatcaatcagtatgtcatatgattaaccatttcaagctggcgagatgcattgagatgcattgcaccacgaggcttaaacacaacgatcaaaaactgacggtggtttattaattagctatatagccaaacgagcaaattaattacctctgaggagattctccagcctgttgagctcgtcgacgacgggatcaggatggccatcgaacggaagcatatccttgctgacgccatgctcgacgacctctcccaagctgcccatcgtcgctcgatcgacctcctcctgtatgtcctcctgccctgccttttgtacacctttcttgcagttttgctagctgctagcacctagcacacaagataaacccaatcagctacactctatctgtctatctatctatctatctatctatctatctacctagctagttttgtttagctagctatatatgaaagcccagttgatgttcttcttcccacctaagtggaagaaagaatgctcgcaaagatcacggctgcccccgggagctgaatacttgcagtggttgcagtgctgcacgactaagcgagagtgggtttggttggattttatggaggcgcaatgcgtggggtttcttgaggagcaccccattgctggggctcgcgagcgcgcgagaaaggaagccgacggtgcaagcagcggatggatggatggattggatggaggcgggaggagtgcggttgaagcagagacaaatggagccgcggcctcacgccggctttgctgctgctgctgctgttgcatagtccagagctggcacgagagcgacgccaaaagttaacttctgcgatatgccgatgtattttcccttggagaaaatccagtactcctgcaaaataaatatgattgtggttaaatatatgtgaaatctgagtagctaatactccctccgtagttttagattataagacgttttaactttggtcaaaatcaaactgctttaaatttaattaaatttaaagaaaaaaattagtaacattttttacccaagataaatttattataaaaatatattcaattattgatttgatgaaactaatttagaattataaatattatactataattgtttataaacttagtcaaacttgaaacagtttgactttgaccaaacagtttgaccaaagtcaaaacgtcttataacctaaaacggagggaatagctagttaattaactactgctgtatataacttaattaatggtgtggcactgtaattctcttgctaatgatcggggtcaatataatatggtcctaactctcgtcggtgtgatacaggggtaacaaaaatcttagtagtaacttactacactagtggtgatatttgtgtcctttttgtatctgtccttctcagaagttcatcgttttgttgaaaaaaaaaatatgctagcatcatgcatctagttaatgaattaattaattggttgtttggtaagacctggcagtacaggaggatatggttaattgaatgataatctcctattatgaacacgccggttttgacgaaaagaaagaaaccgtgttaaatgcaattagctgtagctggctaagctaagatgaagtgatatgaacaaggccttctcacatacactgcactgtgctgaaactgaaagcatatccattatccgtgtttcgtaaccgtcaccggtcgagggacaaactataatggtgcgtgcacactggaagggtgcaacgggccaacggcccatgctgatgttgaccatggaaggagccttcccttcgccgtctgcatcgccacaaaattactcattggatgaagtggtggcaaactagcttagcttgattagctcctatgtgtgttccaaatggcagctagctagagatggaggaagcattgcaagcattagtctttaagggtaagaagataataagaggctttgcttgattgcttctgctgtcataacacattttgaagctttcaagctactaaaaacgaatcaacctaccctctatatgacagtcttcttcagataaccaagtaactgggtactgattggtgtgtagttttttttttcctacttaaaatattgaatatcagcaatcaaaatgcttcaaatattataaatcaagtccagggtgttcaactagtttaggtggtcaaactaaaacgtgtgaatatgtgtgaggttattgtggcctgccttctctaggtagaagcttgtgttagttagaagatgacaggaggaagaggataagaagttagaaaacaagcttcctgaatggcctgatcgacaattcgacaaatatgatgttatgatgttggaagcatcgaacagttttgtgctggacggactgagactacacagttcgtttcttctcttttttttgccttttctaaaggagatgcttctggcaacttgaatgaagtattcttcttgtggaagttttaacttctcattaacatctatttttgccaaagaaaaacataaagagaagtgaaaagaggaagagcttaattattcgattattacatgtctatattttt

SEQ ID NO: 43368 - DNA, 1161 bp, Oryza sativa
aaacgtgattatttttttctaattgcgacgcagacctaaccgcatgacgtgttactattcctgactggttcagtgcattccgctttcaatcctctgaggcagcctctggataatagttttattggtgatttttatgattagaggtgatagtgcagcacaagagggttaatttgtaggtgaagctccagtaaagctcatgctgagcccaatgaaaaccaattttgtcacgcattcaggctcacacataggctcagctttaagaaatgtgacatggacctaaccccatgatgtagcagtgtgttaaatgctcttagtgcctttttccttttcattccattgcaccataggctttatctactgggactagtattgagtgttccattattgtgaggttatgtgcttgacagtggcgttaatttgtaggtcaagctagggcagtgctgctctgaaatcttctaagtattctaaacatattgtatttgtcaggaagtgctctgtatgcatatgcactaagataaagcatagccatggtattgcagtggtttggtggatgcttaagtggtcaggccagggtattgcttaatactcatggtaagtagataactctattctgcaaatctgtaatcatgtcatgcttacagaaacaaagcaaaactttgtacaaataattttctagaaagctttgtgtaaaatagctgtccaaacatcgactgaaaagaagaaacggtattgctatgactgaggtaacgataaaaaacaaacttacaggtagcatgtctactctgatcctaggtaaaattctgtgcacctcagcaacaaactgtttaaaaataataataataactctcaatttttagaccaagtgatagattgatagataggacataggagtagaacatgtactgacctctgttcatcagatttcactgaacatggcgcggccatcatcagatgagacagggtcaatttcacatcaccctctgcccagatttatgcagggtttgtttctgtagagtttgctttcgcttccttggcgaaacctgatcgccaatccaaccttcacatacgcatcgataaaaattttcgtttatttcaacttttcaacagacgcaaaatcttagaaattttgaacgggagaaatcaagcaaaagaacagggggc

SEQ ID NO: 43369 - DNA, 899 bp, Oryza sativa
aaaatgtgcggctgagattgcgtagaagtaggacagtggagtcgaggcagttttttcgcggaggtccttcgcttattcggtattggcggttgacttcatgggcctcaaagctaatcgcgttgagagattcttgggcctcatgccagccaagttagtggacctccgtatgagcgcgtgccgtttgggcttgactgatgccattcgctacaggtgctttaagattggagtaaattcacttttaatccctcaacttgatgtggagtgttgaatcatgttcttaaccgcaatataatatatatataacacgttcccccaacttgcaatactggattacccgaggttatgggtggaaaaaaagctcgggctcgtgagctcagctcgggcttggctcgagcttggttagcttggctcggctcgtaagccaaacaagccaagcccaagcctcctttttagctcgttgctgaaatgagccgagccgagctagctcgcgagccgcttgttttggctcgcgagcctaggccatcgtgtgtttatattgattattttactttatatagtgttattatttgtcaacttgaaatttatcattaagattttgaagaattgaatataaaaacttatttaaattttacatgttgatgatttgtttttactttttttaataattataaaatatatatgaagaggtgtttcaacaggaaggcttgcatagctcgagctggctcgagccaagccgagcttaagttttagcttgtttccctaaccaagccgagccaagccaagcctagttttttgcgagccactgcaagccgagccgagccaggcggctcgtttccacccctacccgaggttccagcatagtttgtgtccagtttcaaccgacgtgagggctgcaggaa

SEQ ID NO: 43370 - DNA, 4911 bp, Oryza sativa
caccaccacccacagccaccgggctagctagcttccggccgcgggcgcggacgtacgggcggcgggcgcgcggcgtggggagtcgggccggtttgaccaccggggagacgtacgcctcgtgcctgatgggcctctcgtcgctcgctcgatcgatcgcagttgatcgggagctacggttgatttgcttggtgctcgatcggagatcgagaggcaggcgggcattattgtgcttgatcattgggtgcatgccctagataactactgtatccgtcctaaaagaaaactcaatctaataatagaatatggtacatcctaatacgataaatctaaatatactaaattgtttatattctaatattagattgtttcgtcccagggagtatagtgaagctgaaagttgttgtaccggctgactagtactgtacttgttcagagcgccaacgctgcaggacgtacggttttgattaagggattaattagctatatactacgtaactttcgacaggtgattaattaatctacacgcttgatgggatttgaggaaccaaataatactactactactactaatcatgcataaaatatggatatctcgtataaataaaaaagagaagttaaatatttgtatacacgcacgtacgcatgcattcaagtgatcaggaccttgatcacgggacacagccagccggggtccctaccaacaacactccccctaatcgatggttatcgcagtagtgggcacgccacacatgactaggtttcgcgctatttccacgacatgccatcgctgcccgactgccggccagccggccggccggcatgcagctgggtctgttctggctggtcctagcggccggccggccaaactcgcgacctcccctcctcgctgatccgatccgatctctttctttaatcagcgcaaagcctgcgtctgcaacgtactacgtgtcgctcgagatcgagctggatcgatcgcgatcgatgcgcacgcgtacagggcgcttacgcgacgaatcacacgccctgcgccgcctgacgagagctagctgagctatcatgtcgatcgtccggccgcggtcggctctccgctccgcgccgcgccgcggcgtgcagtgagtgccgcgacgacgggcgcctgggccgtgcgcatgcatgcgcaacacgagcaagcgaacgtactcccccgcacggtcgtcggtgatcgagctagctacgcgcgggccattgatgatgaggttgatcacaatctggttggccggccggcgtcacatctctcctgaggtttcgcttgctgcctgcctgtgctgcgggtccatcatgaactcaatttgatcatcagagattcacttgcacagtagttagtggaaccccacctcgctgcacgaaaatgaaaataagttacgtaaataccccttgcattatatattctaccgaaagaacagtttttattgattccgatttcatgcatgtgcatgggttggttgcaatggagtggtttcattatctaaaatgaataacatttccaaccaaaagataagtcgaatcaattttgctatatatttgtcgacaaattttctcccaaaaatttaacagatgtaatatgcagtacaatcgtagtgtaattacacagtaactgtatgtaattacactttaactataatgtaacttatatgtaactttcaaaaatctctccgtaacatgttatttcggtaaaatagaggtcgtgggaacaaatcctttcacatatgtgtgtgctgtgattttttttctttctcaccagaacaaatattgtaatggatctaacgattcaaaattacgtgaaacttgcatacaagttacactatagttacatgcaagttacagtataattacactacgattgtactataattacataatttttagaagaaattttgtcgacaaatgcataggtggtcccaagtcggataatgccatccactagtaaatagcacgacgcttcttcgtgaagctcattatttgaatatattgaacatcataccattgcgaaagatactccctcgtttcagggtataagatgttttaactttggtcaaagtcaaactgtttcaagtttgactaagtttatagacaaatatagtaatacttataatactaagttagtttcatcaaatcaataattgaatatattttcctaataaatttttcttgggttgaaaatgttactacttttttttctgcaaacttggtcaaacttaaaatagttttgacattgactaaagtcaaaatgtcttatagcctgaaatggagagagtaacaacaatgtttgaacgagctccttaggataagggctccttcaagcaagaaaaggaattgtgaatgcgtctaattaagaagggtaagcaattaattccgagttagagctagggacagatttaaggtgtgttcgctaatggggtttaggaacccatctcctccgcacggaaaatggaacagtccattagcgcgtgattaattaagtattagctaattttttttcttcaaaaatggatttatttgattttttaagcaactttcgtatagaaactttttacaaaaaacacattgtttagcggtttgaaaagtgtgcgcgcggaaaacgaggaagggaggttgggaacctagggcaaagaacacagccttagagtataccgaatcactggtggagaaactgtctttactctcggtttgtaacaccctgtagtcctggttttctaaccggccgagtgaaataaccggtagttaagttgtatctttagtcccggttggtgttatcaaacgggactaaagagagggatctttagttccgattggtaacaccaactgggactaaagagagggtaggggcagtcccggtaggtccattttctttttattttctcccaaatcgagtgccatgtatatatccaaatcaaacaccaaatctccaaatcgagtgccctgcatatacccaaatcaaaccccaaattctcaaatcaaaacaacatcccaaatcattcacatcacaaatccaaagttacttacacacaaatcaaatactcccccgtcccaaaaaaaagacaaaccctaggtttccgtgtccaacgtttaaccgtccgccttatttgaaaaaattatgaaaaaaaaataaaaagataagtcacgcataaagtattaatcatgttttatcatctaacaacaatgaaaatactaattataaaaaaattcatataagacagacagtcaaacgttggacatggaaacccagggtttgtcttttttttgggacggagggagtacatcacaaatcttaaaaaaatacacacaaatcaaatacatcacagatcgattatacatctcagatcgatgcaatgaatcacaaactgtacaaaaagaaattatacatctctcaatcacaaattatcaaaaaaaaagccggagagaaccggcgcgctgccgctcgccatggctgctgcttgccacggccggcgcctgccgccccgtgcacggcccccgctgcccaccgccgcgcgcgctgcctcgtcgcctgttggccgccgccgccggccgcctgcccgctgccggatgtgaggaggagaggggaggggagaaggaggaaggagattcgaggggttgaaggatatctgattttatctaaatatctcggtgaggaggaagtctcatctgggacttaaccgatcatatatgggagagaaatatttactcacggttggagactccaaccgggactaaagatagatgtttagtcccggttggtaattaaactttagtcccggttggtagtatcaaccgaaactaaagatcctcgtctcctggcatgcctctgacaggccatgaaccgggactaaaaatgatctttagtcccgattggtaacaccaaccgggactaaagatcaaaattttttatgaccgattgtttttagtcccggttcttattagaatcgagactattgtagaaaacagctgacccagcaaatatcacttttccagcagtgaatgagggcttggtctctagcaattttacaccgatcgatctagtgggggcaaatgcgtccttatccatttttaatttctcattctatgacactcgcccccacgtactcactcattttaattcctgcggatgcccttgctctgagttcaatccaacacggaattaccgtacctctcctactttaaattgctagggcaataaaaatctattaggtgtgtgatatgtatgatggttatccaactctataccttacggctaggttgattatattgccgtgggagctgcccgtgcatggtgggaattctgttgtaggcataattattttggagtatcatttagagtcgacaagggtcatatacggtgtttggtaataatcacaaactaaaggttaggaaaactcttttgataggaggttgggactcgtgtcattcatacatatatctctctctatatatatatatatctataattactctctctattctaaattaagttaatataatacgtgatgtgacgaatcattgtaacacgaatctaacgagacgtacatgtcctgattcatcgacaaatggatataaagctagataaactctttgaatcgaaacaagaaggcatggtgacgagtcaattgatccaccccacatgtttttgtgacccagtagttctattgtatagatatttacgccaaatatgtaatctatatatgcaagattagctggtgcgcacagggatttaattagttctatctctacaaacggtgcattaaacagtcacttgcaaaatagaatatatgcatctagaatttcctaatattcaagaaatgttacaatcattttaaggggcaatgcaattttactttggatcacttcatttgattgcggacttgcagtgccaagtgg

SEQ ID NO: 43371 - DNA, 5586 bp, Oryza sativa
ctgcaccccaaaatatttattgaaaagtgatatatgtatacttttatgaaaatatttttcaagacaaatctattcatataatttttacatttttaaactcaacaactcgagagttattcataatttatatttccaatgtttgacttaaacattgtcataaataattttttttacgagtacgaagggagtaagtgattatattttgaggcggagagtataactttagcatatatatatacacatatatccagctggggaaaaaatgaagtatatatatatgatgggacagatgaagacgaagatcgtgatccttaatttaatttcgtcctcgcaaaaacaaataaatgaaggaaggacttaatcagatcccatatgagacttcgacgatggcaaataaattactggtttccctcagatttggcaagtctaaaatgggattaataacaagatggagatctcagtggagatgcggacgcacggaaagagtcacaagtaggacatgactgtggggaaagtttcatactcctatatatctggtccctgctgggacaacctgatcaggtgatgttatcttttttgttattggatttgacagcattaatacgtgtaccagaaagatgcagttgtactacttgaagggagcactaggatcttatctcacccccaaaaaaatagggggcaaaaaacggagccacctgtgaatgatgggattagagacatactacgtacgtatgacccggccagccctgctccctccgttccttaaaaaaaataaatcctggtttccgtgcctaacgtttgaccgtctatcttatttaaaaaaattataaaaaaattaaaaagacaagtcacgcataaagtattaatcatgttttatcatctaacaacaatgaaaatacaaattataaaaaaattcatataagacggacagtcaaaattggacacagaaacccagagtttgccttttttttttggacagagagagtatgatttttagtttgaaccaactgcattttttcgttctacacatgtttttttcttgtctttgttgcagccctagaaattttgtttcccctaattaactattatacatcctcaaagatagagtacttgttgtatatatgtcctcccgaatgtatacgaatataattaagttgcatatatatgtggctattgtatgtaggcatgtcattaattcccgtagtctttttttaaaaaacaaaatggatatgctaattgccacttgctcgcatgggatgtcgaccaaaagcttaccattattccgcagatatataggttctctgtccccaaactttacacctggaactgtagtgatgccgtttgtggggttaaaatgtatttactactttagtaattgatcagtccttcagttccagtgaaattaatgtctttcaacaccgcacgcccagtgtattttacatacagctaataaaatctgttatgtaaaaccaacatttcatttatttacaactgcctccatcgtcctgcatgttttattgtttctttaatcaaagtagagaacatgaactgcattgtttctttaataaaataacttttcatagtttatgggcttgttctgtttgttcccaaaatttggcattaatatcccccaaaaaattggcacactttggcattaccatttttttttggcaatgttggatgtgcttggtttgccacctttctagaatttggttatgagatgttggttgaaaagaaatgctctcatttttgacaatgtccaaccatctttcaatacttggaaagctgatttcaaggaggatttcgctcttcttatgcatagagtgaaggaggaggataaacctagatatcaatcatggattgacaacattttttaaaattttcctcttttgtatatatatattttgtaattttcctgtaactcctgttcatatattaatatatttaccacacagtaggagcctctcctactgtttaaggtaaaaaaaagaaggaacttctgaaaatactaaattttggtagagtgataatggcaaaaaatgtttgatttgttaacttatcaaattttggtaaaacaaaaaatcgtagggtcgaaagtggtagcaaactggacaagccctgtgactatatatatatatatatatatatatatatatatatatatatatatatatatatatatatatatatatatatatatatgatcataccagagacaaacttaagaacttaggactcttttaatattaattacatatagatcaaagatgcacacgctcctaacaatgttcttgttggactccaataagattaggaacaaaattagcttatatgcgcataaaaatgatagggaaatttcgtacattaattatggtgttttgttggatctttatgcccataaaatagctatttttttgtttactagtaaaatatattggacacaataagtacatatttgaacccctgtgttatataacatgtttaaaatttgcaaatagtattcctgaacattgaaagaactgtggcatgcaggaaatatataatactaatatacgtgtgtgtacgcgcacgtgcgaggggggtcagtcatataatattccctcccatatacatatatatgcatgtgagcccgattgagattacaaagataataaactaaagcctatcaccgataggtcttatcggtgacgggcttaaaatacatgcacgggtacggtatatcttttttacgagtatatttttgtcggtgtttattttaacctgttagagatgacgacactgtgacggtctgtaagccccatgcacgggaaaggccgttacagataagtagttctgtactagagtgtgatttttttaaaagaagaatttcttcacttgctctcattacatgcactaacacgaggaccccatgccctgtatgtcagtgagcaagtaattaagagatttaactaaagctggtatatataatttacgaggaaaaaccaaaggatcacagaaaatcacagaaaataactaaagctggtatatataatttacgtggtagtactgattgatcgatcagttctctgctggccgatcaaacgagttgatgagcagatgtgtgcgcgcgcatcgagcaaagctagcggcatcatcgatcgatcaggaccacaataattattcgatctctgcaaatacgaactaaggacagtccaatcctcgtagggtcgcacaggggcagtgcttgtcccagattagcattggcacctgatcaatgtgtatgtccatgtcagttagacgcttacatctcccagaaatttccctctcttttcattgcgagatctatgagtgccctcttctttttttatcaggcccactgatcacattcacactagctcggccagccagcagctgcttccacatggaaaactaaggcatcagcagggttaattctggagttatgcatttgctagattggcttagcatgcaaccgttcaactgagaaatcatcaggtgcgtgcgtatatgtgtgcgtgggacaaagccaacggcaaagcgtcacatctcacgacaatctgggcgcagaagggcaccacgtactgctcgaattttggaaccacacgtacattttatcgactgacgaacaacgtcgaccgaatagccaggaatcatgtgatcgatgagtttggggtcatgagagccccatgtacattggatgttctgaataagctcatcattatgctggagctaatgtacgtacggagtatcaaacaaaattgctgaatggagatgagatgtgatcgagtgctggcacaaaacgagtatgtgtcgtcgatttccttttccttgcacggatcggagcagaaatcaagctagctagcatcctgacagttctctgacttctctcctataaataaactagtcaaactaaatagacccaatagatgtttgccgttggagtttggagataatttctccattcactactagaaaaatgatccttgctgggtcgggtgatttccacaatagtcccggttttaataagaatcgggactaaagattgttgctagtcccggttgatactaccaaccgggactataaagatcataattagtcacagttcatcccctatcagaggcctgttagggggccaagcatctttagtcccgttgatactaccaaccgggactaaagatgaccagtaccggttggtaataagtaaataccatttaccaatcaatcttcacgggagtaaatatttctctcccatctctgatcggttaagtcctagacgaaactttcctcctcactgagatatttagataagattggatcgatcacatcccctctcctcctaacccctcagatcccctttcttctcctcccccctcctcccctctcctccccctcctcccctcccgtccagcagtcggcggtggccagcggggccacgcccggcgggggcgcgcacgggtgtggcgagcgacggcaggcggggccgcgcacgggcgtggcgagcggcagtaggcggggccgcgcgcggtgacagtagcagtggcaggtggcagcgtccgttcttttttttatatataatttgtgatttcctgagatgtataatttgtttttttagaacttatgattcattgcatggatctgagatgtatttgatttgtgtataatttttttaggatttgtgatgtatttgatttgtgtgtataagtaacttaggatttgtaatgtgaatgatttgggatgatactttgatttggggatttagggtttgatttgaggatatgcatggcacttgatttaggagaaaatacagggattaacatattataagactttctagcattgcctatatttatattgttgttaatgaatttagacacatatatatatatatgtatagattcattaacatatatatgaatgtgggcaatgctagaaagtcttataatatgaaacggagggagtagcaaagaaacaatgaaaaaaaaaagaaaagaggagattcaactttactccggttatttcacccgggattaaagatgggaatctttactcctagttcccaaccgggagtaaaaacggttaccccagtagtgatttgtccttaacccttgccacatacaaagaagaagaagaagaagaagaagaagaaaattcatgtgtatccctgagattgcatgtgtttgtgatatatatacatgcaagtattcttaaactgagctgaataaaactttttttttgcgtggtgaataaaactaatttgatccatcagttgacctgtgtgtgtctatatcctcatctcccaacttccccagccctaattgagcacatgcaagctactagcacacactatccacgtactccagtacagaagtactacgctctaattaaatactactattagttaaactccctgatgaggccagttagcacggagagcagtgctagctagcccagagagagttaagaaggcccatctttggagggggttggcatcctacactctagctagcccacagtccgctgccggctgccggccagcgcgcgcgtgcaagtctgcaagcaaagagttttcagatgcagatcgaagcaccg

SEQ ID NO: 43372 - DNA, 3302 bp, Oryza sativa
attctgcccatcagtgtcttcttaatgtaacagtacttctgtacttatcatcctacattgtgcgctggcaaatgcttctgaagttgaatttccacggaacagtattataaactagtgctagatctttcaccaatctttattaattttctactacaaggttgcaatttgcttaagaatagtaacgtgcaagttagtagtactccatactatagtatgcaatcattaattgccttgcaagttgcagcatggttcccacacactcgtttgcacttgcagaaaagtttgcaagttgactcagccagcacaaacttgttagctgctgcttaaggctttctctggattgaaggaattttacagaaattttgatcaattcatgtaaaatttctgcgtgtggtacaaaggagtagggaaagatgcaaccgtcgcatggtacgaagcagctgctaacaaggcaactgcaccgcagatcgtacagcggtcagttagcctttattagcacctactccatcagtccaaaaaagacaaatcataagtttccgtatctaacgtttgactgtccgtcttatatgaaattttttataattagtatttttattgttgttagatgataaaacattattaatattttatacgtgacttgtctttttatttttttttatattttttttaaataagatggacggtcaaacgttggatacagaaatccaaggcttgtcttttttttaacggagtgtgtagctattgatttcgtccaaaacaacatcattagctggtgctagtgtggagattatggcgagctgtcaccaccagaatgactctgtagcgaaacaggatgcatgccatgccagggcaagttctgcatggtgcacaactatgcatgtacgtgcacggcactatcagtggatcgactagtaaatgatagtactatgcccgtaatataagcaaagtttatatatacgcagaagaatgctattggaacaagacaacacagcacattcaacttgagaacaatataggtgatgtttgaaaagcagggactaaactcacaaaaacataaattcctatgagagggactaatccctccttcccaaacaccaccgtaacatcattatttgcttgtactatgctactgattagtttggctctgatttgaacctgatgtttgtcgatttaaatgtgtggacgtgtcaatctaaattttcgaactctcaatttatcttaggtgtcatgcagatccaaatagactccaatctactcgtgctaatattcatatcacgataacacctatgtatcaatgggactcatatgttagtcacatagaagaaaataaagatatctcatctctctatcgctaatctattgtaggcgtctctctagcgaaaatatgtttttaattttattttttatatgactaacatatgggtctcactgacacgtatacgtcaccatggcatgtcacgtcagcctacgaagcgggttggtgcctgtttagacttatatgacacccatcacaagtttaaggacttgaaaatgcattttgatagtttggggatgaggatgaccgtacctgcacaaatttagaaaccacccgtacactgcgctctttggattttaagttgtttggatttcccttctaaacacataattgttgtatggattcccatgcattagagttagtatctcacaactgattattttatgtacaaaaattgaatatgactataattatatccaacaaggctaattcgcgaacgcattatgaccacattatgacaagcagctggattagggtttggggttaggtagagggggaagcagggatattccctaagcttagaggagtggccggggaggcggtgtgtggtaggcaaggatgggcatcaaggcggtgggggcaaagcaaacatgagtgaggggaagggggaaggagagcgggaggcagacaggcagtcatccaagtgtgcctcgccgacatgttgacgcgcctttcaacggtggcaaggccgagtggcgccaacggaaggtggtggaggtagggcactgcattgcgagtaggtcgagcttgatggcatcgttgggagatcgtcaaagtaaagtagtagcagcactacgttatcaaagaggtcgttgtctactccttccctctcaccgtctcttcgtacagatgtattagatgaggatgagaggatgaggtggagggaaagataggccttgagctgacatcacacgatgatggctgcacgtggacctcgtcgtcgtttttcattcacgtattgctagacactcgaacgtgtgcgcattagacccatccaattatatttgcaactggaaaagcacatttgagtactagaataaatggttttgggccttcttttaaacacaataactttatggtattttcatgcatcagaatatcaataaaattcctcggttaaaaagtctcgcttaacacaccccaaaattcaacaattaaggctatgttttttttatgtaagttgagaactacacatgtaaaacagagtagcggataaacgcatgattcattaagcattaaaaacttaaaatatattaatataaatttgtagagcaactttcttataatatttttttaaaaaaacacatcgtctcatagtttggggagtgtgagaagtgatacaaattggaaaaggagagaaaataacaccgagtaccagtaggctgtagtggtttattttttaaaataacgagtagtcgagtatcaatactacttcctccgtcctattataagtgcagccataattttccgtgcgtaattttaaccgtccgttttatttaaaaaaatttgaaaaaaaaatgagaacataagtcacgtataaaatattattcatgttttaacatcttataacaataaaaatactcattataaaaaataaataaaacagacgatcaaaattagacacggggaaattatagttgcatctataatgagatggagggagtggttcacttccttttcacggagcaatgagatcacctgatcggccttagccagtgtcgcgatcagaccgacgtggagacggcgaccgcggcgcccagtaaaaccgtttccggccgcccatttcttctccccccacgatcctgaccgtcggtccaatcacgccggagcccgcgcgggcagagagagcagagccaccgctttttttcccgcgccgagacagcgacgcgtcggccccgccgtatccgcctctcccgatcctcctgtccccctacccccaggtaggccccaccccgatttttcacattttggtctttttgaaaaactt

SEQ ID NO: 43373 - DNA, 1080 bp, Oryza sativa
cgccagagtggctggcgccgtcgttcaacaggacggcgccaacctctttggcgccgtccccctgccgacgtggcggggcgatgctgagatggttagggggagtgcgccagagtggctggcgccctccccccgaaattttttatttttgttttatttgtttgatattttttttcacgctttgggacacacaagaaccaaccatagaaaaattgaactcaaatggacgtaatatgtgacatgtagaatttttcctctcctctcctctctctccgaactagtgcagaggagagatgtgcaacttttttatttttattttatttttttgatatttttttcacacttaggaacccacaggaacaaaccatgtaaaaaataaactcaaacggacgaaatatgtggcatgtggaattttccaaagctctaccgaaaaacttctctcctcgaaaacacaatcttgcaagcggaatttggaggttttaatatcgccgaacccggcaaagctgaggagaattggatgtaactttttctgtagatgtccgtgcatatattatttgcctgattccgagtccgtatgagaaagttacgcctattttaatagatgacatattttgtccgtttgggtagagatttggaaaattctacgagtcacatattttgtccatttgagtttattttttatatggttggttactatattcttctaagtgtgaaaaaaatatcaaaaaaaatgaaataaaaataaaaaaattgcatctctatgtactgtttaacttatatatgttatttcatgtggttatattttgaattagattaagtaatttcatatagtggtagagtgcattatgtttaacatgctgatcaaagggttttactaaaggaattatggtctaattttagtgaaggtgcaaagtagactaaatggtatgctatctattttttcagacttagctaagtggttgttcgagtttaaattttttctgtggttggttgtatcgtgatcctgagtgtgaaaaaacattcgagaaaataaaataaaaatgacaccgttgcaactccatacagagaaacaggaatggaggc

SEQ ID NO: 43374 - DNA, 539 bp, Oryza sativa
caagaatatcaaggaccatgaggtattgatatgtggagtggggacagctgaactaactgtgggcaccattaggcatgccgtacatttggagcaacaacatattcttgtagggtttggcaagtgactggaatgccttgcagtcattgctttagcattcattgcaaagcttacacggatgtccatatggatgattttgtggatgattgcttctccgttgagaagttcaagaaggcttatgcatggactttcaatccaatgacatcgaaggatagatggacacatgttgatctaggctacaaaatcaagaagcctagattgagaaggaaacctaggaggccacgagtggctaggatgaaggcaagtgatgaggctggcactagtaagagaaagaaatgcactgaatgtaatgagctaggccacacggccaagacttgccaaggaggtcccacggcaagtcaaaaaaggatacactcatcttcagaaattgggacaggagatgggaacaacgacacaagtgctgcagccacttccaagtgagt

SEQ ID NO: 43375 - DNA, 761 bp, Oryza sativa
tctaaaaatgtggttgctatcagtatatagtttttaggatcgtgctgctggcttggcaagtcagtttcaggatatctgttcttgtcaagtagccctttaagtcacatgacacgcgcaaaaagaatcttaatgggtattcttccttgttctgtaactttctaatttcacctgcagtagactttcttcagtactccttttataggaacgcctacaatctttttaacccaaagggtgaggatgggaattaagtaaatatggataactgctagaatggataactttgtagtgaactgaattcatagatcttattcaactaagcaatcagattcagcaagctttttttttttatccgtgaagattattaccacagttcagtgactagtggcaggacacgtggacgtggtgcagtgtttacagtgatgaacaaatgacgataagcactcgagattaaggaaaaatcatcttttatgtttctagattaaggaagactaattatgctttgcctttgctcaattcatagatactcttcctcacatgaaagaaacttaacactcagtcatcagcagttagcagaattagtttgagcctgggtagcatgcatggtagaaattgaagaagtctttcatacaactaagatctgaaatagtaattagatacagagtggttactggttaccaagtttcttctaatacatagtttctcttattacttaataatcgcactacttcaacagcagaaagaaacgtgtcctatgtgtggat

SEQ ID NO: 43376 - DNA, 574 bp, Oryza sativa
tttggccctgaatgttagtgcagatattaacatatatatagatactcgtgcatcatggatgcatcaagataacctaaccgcaaaaacatttgcatgcatgtatgcacacatatccttaaaaaatatccgtgcttgcttaatttgattattgtttcattatttgcatatataagaagccaaatgaagatcagttagctccttttttacataaatatggttggaccagcagctctaaattccaatccaatactagaaagtgaagttttattcgcaactgaaaacaccagtggcgaaaacaacagccaaacaacatgttaataattagatcgatcccctccctcacacacaccccctgtggcgtcgccatcggagcttctgttcatgtgtctccgatctgcagcagagctttgcctttttaatttgtccggagatgcatgcatcgatcgatccaaacagctagctagctatcgaagtatcgatcgatcgatcgatctcgaccgcacatcggtccatcgatcgatcgatcgaccgaacataggatcatgttgggttttaatgtttctaattcgtacga

SEQ ID NO: 43377 - DNA, 616 bp, Oryza sativa
tcctccacgtcccacccttgcatcacgagaccgacctctgaagcctttacatcctcggccggcacgacggctgctcccttgccgatctcatcgtcttcctcctcctggatcgccaagaggcacctggccacggcggctccgcagagccagctcccgctggcaggcgggcgccgacgcttcttgtcggcggcagagagagagccgcgctcgccggcgccggcggcgcgagacggcgagcagagcgaccggccaccgcaggagccgaatgtcttgagcgcctcgcagatgttgactgggatctggtacacccagccctggttcttccccgcaggaccgtcccggtcgtctccggcgcggcggaagctggcctccgcgctaccgccgccgccgacacccccgcgcctggaccgcgagcgcagcgcggcggcggaggcgtgcttgggcttgcgctttcctcccttgacgcggacctgccgatgcaggtgaccttgggcgacgagggctcggctggctcgaacccgccccggccgcggcggccgccggaggaccccgaggggaacatgggggactgcccacctttcaggctcccgctgttgcggaggcgacggctgaggga

SEQ ID NO: 43378 - DNA, 885 bp, Oryza sativa
ttcctgcagcccagaaagctcgaaactcgtggctcggatcggctcgtagcaagctcagctcggatccattcgaaatcgtagtcttaatgagtcgagtcgagctagccttttagctcgtgagcttaacgaggtagctcgcgagctgctcgtttagctcgttagtataaaatatcaccatatcttataacttagtgtttctttactagtgcttagtcttttagttacatcaaatctattcatatttagtgagtttatattagttagtgtttattattacgttaatacataataaaatgttaaatttgaaattattaatatgatattaatgagatatagctcattaacaagcctaacgagcttacgagccagctcgtgaaccgagccgagctagccttttagctcgctaacattaacgagcccggctcgttaacacaactaactcaactgagccaagccttaacaaaccgagttggctcgttaacacaatgagctcaaatgagccaagccacccctagacgaggaggagaaagagaagaagatcgacaagggttgctaccgaccacccaagtcatcgccgccgtcgtcatgagcctcagcacgccaattgatcaaacctcccttttctggtgttgctcctgctgtttatatagtgctctccctttgcttgcttgggcctggctttaagagtagctgacagcccataggcacgcccaattgggttcctaacaaatcttcaccaagaaattggggaccttctaggagttttcagtaggacttgttctagcattcattaatcaattaaatgtaagaaattcactaattaattaatcacgatttttgtttacatcaacaattgcataactaacttaaatgaacattacatat

SEQ ID NO: 43379 - DNA, 754 bp, Oryza sativa
ccggcacgaataccaaaagtcactgttacgaaaaatcatatgtatcgagtcccttgccatcacggatgacagtcacggatgatataccatgaagatcatcataggcttatcgtcagatagttgtttgtgacaggaagcgatcaaaagatttacagattatatatggagatgagattttgaatcttcttgatatgtgcttatatatattctaactgcaacgactgaaacttttgggtttgtttttgtgctaatagcgggaatggaacgttaattagatggccaaccgtagtttttataattcgaatggtttgatcgtgtccaaccttggttaagcatagtctatatagacttgtagcttgactttggcaaaataaaatatggcctcgtacacagtactttaattttatccgtataaaattaaatgtggaagtagcttgatgaggcacataataatgttttacgatgttggcaagctgcaactatatattctaggattatcggggtattcacttgttctcagcttatgtcacaaagattactttttgaatgtatcctgaatacaggtctgattttggtgatctaccgaaataatcctgtgagcgaagttgcgtagtaaggaaaatctcacattttatatggtctgagttatagaaaaccacatgtgtaaagacatatagcacaaaaccacatgttttaaatttatcgtctaaatgattcacaaaaccccacgtttattaaaatctgggctgcagga

SEQ ID NO: 43380 - DNA, 688 bp, Oryza sativa
ttcctgcggccccataatgacaaggaagaccattctaagcatggctaagcattatagtaacctagtgactccaaaactcatatataaagtggtatagtcatattgttcctaaggttaggaatgagggatatggatatacgtggggtcaaggtgaatgcaaacaataggagtttgtctaacaagttacaaaattttaatttattagtgtacaatcgacatgcaagatttgcaaacattttcaataacctccaaacataggttcaaagtgatcaaagagagggaggtaggacttgccttgcaactggaaaatgtcagcacctaaatcacttcttcaccgattaagcaatcatctatacaaagtacacgttatgcaattaaacaccaaattatgcgaaaaatccaaaatgctctaaaatgcatgatttgtgcatagtgaataggtactggtctaaaatgaatttaggtgaaagaatttctattttatctcatttcatttgagaattatgaattttagaagttttgtcggtatagtgtaggatttacttaggtactattgtgaaatgctgttgtaaggtgattcttattaagtttatgtttggtggggtgaagatatgttttctaagactaacacatttggtttcataatttttagagttaatatgaattctttatgtattttacaagttat

SEQ ID NO: 43381 - DNA, 701 bp, Oryza sativa
ttcctgcagccctcagaaaatccgatttgagcaaacttctgatccttgatttggtttgagaaacttattggaaattctgatcatgtcaccggaaattccatttcgtcgggaaatcagaaattttgaaagttctgagtcacggtttgattttgaagaaaatattggatattccgatcgtcagacggaattccagtagtactggaatatcccaaattctgtttttaactcagtctgtgcaggcaaaaactatctgaatatcctatacgacatcctatacaatttgagtttggagtaattaactcaggtgaatcaatctcaagatgctgtccaggactgcagggtctccactcaggacattcacagtgcgtcactcgcatatgaggaacctcgttgtaccacgtattctagaactacaagtccaaaatccaaattcttcaaagtacaagtagctctactagtaaccttaattttatattgcagcccctagtactttttctttcagttcacatattttcgttaatttgtgtggaggtccaaaatttgcaatcaacacccttgaatccaacaaagaatataatatccccctttcgccctctctcccttatcctcacgcccacttccttttcccctcacgccggtgcacccgccgcccgggcagcgcctcgatctcctcccctggctggtgccctggctagcgcccc

SEQ ID NO: 43382 - DNA, 758 bp, Oryza sativa
ttcctgcagccctatggtgtccaatccaatctaaattctttgaaataaaggttcaaggatgattttactctacatatgtttagagtaaaagaagtagaaagacctatttggaaatcatgaataaacacaatgatgtagtagcattgtaaattatttccctttttctctttatatatatatatagagagagatagcagaactattctacaaccggggttctataccccctccctcccaaaagccaaacccaccacccatccctccttcccaaggtctaaaatccacctcccatatcagttaaagggtggtcaaaagcctcctcgcgctaatcagacctcggtcaatgcgcctactaacttcccccaccatgcatctcttctcagctctcgtcgtgcatgaacggtgcagtaacatgatggccattgtgcactaacactatgttttatatatagtaacaacgctaaaaaatagttaatatatagttatgacggatctacttttaataagtatttttttctagcatcatggtacaaacgtttttttaaaaaaatagtacaacacgtgagagattttattcttcaaagattcacttcattggaattcgactctccacaagcggtaataccatagcatagcattattatttctattgtctgttatgtattactgcaatcccatcacgacattactgcaatagtgcagtaaggactaagtttcaagtaacacaacatgttactgctatttcttgataatgttac

SEQ ID NO: 43383 - DNA, 722 bp, Oryza sativa
ctgcagcccattgacaatgtaacaattaagcgacattatttatttgatgctagtatatatatggcataaaaggtactcccgccgtccctaaacacgtagttttatccaaaagaatttgtcgagtagacctctttaatacaaatacatctttttcatctcactgttaataattggaccaatagtatttcgtgttttcttcctcttcgttttttttcatatcaataaacactataaaaaacctaatatgtgccgacaaattaaaaaccggcacctatgagagttttgtcgtggtcaccaccgacggctatgccaccaccaccgcctaccttcagccggccgaaggggccttgtctcgctggtccgccctcccatatggaaagagagggagaggggcttaaatgtggggcccacgttggattcatttgagccaagtgcaaacttgtccttaatggttgtttctctaacctattcttccgaaaataataaaataatggtgcgagtgtctattagctaattaccattttttgcaatgtcttacggcaaatacgtgttcttacagtgtcccctggctaattacaccatttttgtatatcttgtaacaaattttgccgaaaattaatcatgcttgcaaaacgtggctgtgtagatgctttcttgatcaaaggaggtatcaagtattatttttccatggatgattttcccttttttggctaaaattttgc

SEQ ID NO: 43384 - DNA, 1148 bp, Oryza sativa
atgaagagctcagtgccaccgccgccgccgccgccgccccggtccgagtgcttcttgcggcgcatgagggggggaggggatgtgaggcgtgtgacctcgctgtttttttctcctctctgtatttatgagaggagtgaggcgttgctgctgtggctggctgcgctagcgtgttagatgcggtggaggggaataaattagggtttgttggtggtggcgctggcagcggagagttggagaccggagaggagaggcgaggtgtgcgctgtgcgggaggaggagaggggaggtggtggaagatacagataatggtggtggtctcgggtgggtctgggtctggatggccatgggactgtgggaggcaggagcagcgcccgcgccacgctgggtttgtcctctccggcttggcgatggaaagttaaaaggaaaaataatatatatacctatttttaacctttttaaaattaggcatcgttacattatcaagttttggtaattatagattaaatatgatattgtcaaattctttagacatgaccaatatatcgtaataaactaaacaccgccttaaattttgtcgattttaccaaacaatggtataatttaaaatggcatgaatctgaataggcccaaaatgtttttcccattttgtttcttttttctttttgtttttctttggaggactgatttgcccatagttttcggattgagatcatatacattactaagtcaaaaagaagtggacctatccatgaataattttttttttgcatatgcatcatgtcgcctatccaaaataaaaggttgaaatgtatgaacaaaaagttttcaaaataagttgttatgtatcccgtcgtctattcaagctttacttcactgcctccgctctggagccatcatcgagttatcgaaaatgcttacgatcggacgaccgatccagcgcaaactatcggacacttggacgatggacgcaccgtacaactcttttttcagattatgagccaacatgcatattgtctctttttcaataccaaaacctttctctcacataagatagcacacatactactcctgccctctctcccctacacatgcatgcattttttttaataagctttaaatgtttttttccaataatcgggctgcaggaa

SEQ ID NO: 43385 - DNA, 739 bp, Oryza sativa
cctaatatgtcattagcaaaagtttactgtagcaccacattatcaaatcatgaagcaattaggcttaaaagatttatctcgcaatttacacgcaatttgtgtaattagttttttttgtctgtatttaatactatatgcatgtgtctaaatattcgatgtgacaaagtgaaaagttttttttgcatggaaactaaacaggacctgaattttccattcctttgctcttatttttcatgcacacgtttttccgaactattaaactgagtttattttgcaaatttttctatagaaaaattattgtaaaaatcatattaagccatttttcaagtttttaaactaatacttaattaatcgtgtattaatctgtcagtctgttacttgcaaaggtcataaacacgctaatagcgattggtgttaagttctttacgttaaaataataaatatgagagtgttaaaaactttgagttgaaggttttaaaatgagttgaaagtttcaggtttgagctaaaagattaaaaattgaattgaaagttttaaaaattgagtttagtgaaagtttactatactttttaaattttgaaataaatctctgttgaaaaagtatctatttcaattttttaatcaaatttaaacagcactaaaaaaagatgtgcatgtgtgctatcagcacaactgcgcgaaatagctccactatgtatctatctaattaagggcatgtttggtgaagtttcaactccta

SEQ ID NO: 43386 - DNA, 698 bp, Oryza sativa
ccgtgaggaatacggaacgagaaagagttggtgatgacaatgtctcgacgacgggttgcggcgtccttcttcttggcggccggcaacgaagagatggaagaggagagctggagctctccctctcggtttcttcggcttagaggtggaaaatgatgtgtggaaatgcagctgggaggggtgaagcctcggctcggtgctgccacgtcgacgccgtccagagtgcgctcggcttcggcttctcttctccctctcgttctctctggtcggttgggggtgttgcatagggttggagctagtcaagacactgtcaactgggcccagaacgaagtacactaggctggagtgtgggggatgggtagaaaactgtgtgaaagagatttttggacgaattttcagattattttctcttccctaacttgttaattcatagattaatttgtgttgcatatgagttcatgtggattttattggaggtagatgaatgtacctagtttccattttctttgattgtactcatagtttagattactcacaaaaattaggagaagatgggctctttagaaactagtttgaatttctagaagacctaaacagtgaggataaatcctggaaaaattatatttattcatgataaattacctagtatttgaataaattatttcactcatacacttttatacagtctaatgcatattttg

SEQ ID NO: 43387 - DNA, 512 bp, Oryza sativa
cttccgacctagcccactgctcaccagccgaaccctcctgcagccctagccagcttgctcaatgggtcgggcaaactgagccgagccgttggcctcggcttgttccccttcaccttgatggcgacctgccgccgcccaatccaccagagtccaggctggcctgtccgccaacaagctcatcgacagaatccattgtacctgccgctcctcgccacaattagaaatcgcagcgcattaaaaaccggcacctttgaggctacataggtatccattcatcaaaatggcatcccacgagtgtgcgctctggcgggaaaaaacactataggtgttctttctagtattttcggcatctatagtgccatctttttttatgttatgttgtagtgacagctacatgaatgtattttgtcctttcttggcctatttggtctatgtggacagtgattgggccagtacgcctatcaaacctacttttgctttctccctacgctctagccacccctaaaggctta

SEQ ID NO: 43388 - DNA, 1466 bp, Oryza sativa
aaataatgcataagttgaaataaaacattagctttaaacgggttcaacatgctcaaaaggttgtttgggatttgtgtgacttgccttgagcttccacaaaaacctgtgaacattcctcaactgaaacgctctcctcgggaacgtcgaaactaaagcaaataaacaaaaaatcaacaaaacagtaccaaaaacaaggcataaacagtacatgtggatatttttaacatgtagatctcaattttagaaaaatttagcaacttgaaccactcgaatcggagctacgatgaattagttatgattttccgaagttttaatctatttcatctattaaaaaaaactaaaaagaaatggttatgacgtcatgctgacgtcatctatgccggccatggcaaaggcgacgacctcgccggcgctaggaggctcggccgggcctttggtgggtacctacgcgtagagggaaacgatacgatctcaaaggtgctcaccgaagcgacaaacgacgacggacggcgcccggcgacgaggtggtgcggcggcggcggctcggtcgacgacggcggcggcgctacggcgaccggagacgacggagagggggcggccgggattctactccctcacgcgcacctaacggcggcgacggcatgcggcggcgacgacgcaagcggcggcgcgacgcgacccgaggtcggccggcgacggcaagcggctagggcgacgcggcggcgactctacggagcactagagagctcgggaaagggggcaaacgaaagaggacgactagggggtcctatttatagccttggattggagagatcggactcccacctcgagtaatcgagccgggaaaatcttcgggtttgttttggggataaactcgaatatgagtccgattcggttaaaatactcaacgatttactccgaatcttgggggcaaagatagaggagaatgaggggatcaaaacccctcaatcaataggacacggggagaccggattggggcggaatcggtggaggaaggcagcggctcggatgaactcgggcggctcggccggaggttgaagaaggcccgacaggtgggccccacctgtcggcggctggagaaggagggggcgggcggcgtcggctgggccggcttgggccggctcgcccgcgcggagagagaagatgttgggccgaaatcggcccaacgacttaggggaggattttttatactttttaaattaaattaatttgtgaaatgttgtttcatttattaaaaatacttcccttgctcaaataattcccagaaaaatctagaaaatagaggaacaagcaaagtatttataaaattttatctagctcaattttatgttgaaaattttgctagattattagagtttagcttgtaggcttttaaaataatttctaaaaatgatttaaaatatgcattattaatttaggcgatttttagggcgcaacacgaggaa

SEQ ID NO: 43389 - DNA, 1568 bp, Oryza sativa
ttcctgcagccttgcaaagagataaaacatttctatcttggaagatatctggataaaaatatcatataaaacctattatgttttccagttgctacgtggcctcctcccgttgctacagtaaaacagtgacacaactgttcgtagccgtccgattagcttcgatctaggccatcgtatcatccttatgttttggacacctcaatcgaggccctgtccactcaccctcttcggcctccccttcacgccgcccccgccccatcctccacctccgtgccagcgtcggcattgcgtacctcacccttgtgtcgccgccgtggctctggtccgtgtcctttctaggctgccgccatcatcagcctcccctccatgccaccaccgtctttcccaatctccacttgatatgagcgagggtatcccgatccttcgatgagaggataagtcgattggatgcagcgatgttggtgatccgattaggtgtgagagatattgttatttaaagattagaattctaaaagttcacttgtaattggcttgctagtatgtatctttatatgaataaagagaagtatttttagcacttgtgtcaacttgtgatcatgcacatgcactttttagcactgtattttgcacaagatttagatttaaaaatttagctatgcacaagcagtagtattatactagtagcgttactaccatatgttaatttaatcatgatgttactaaaaacgtgcagtaacacctataaatttcacagtaatgtatcgtgctactgcacttctacgataatattactactgaatcatagtaacaagatataattactatagtaaacataactcatgtcttctcacaaaatttgaacagacatgcaagcaagaaaataatgattgctaatcacttaataaagatgatcacgaaagttgacttaggtattttactttatagaaaaatattttactacaaaatatctttcgtttaaaatatgaacatttgtaggaattaagcatttataggacttaaaatatgtagtatcttcgtttcaacaatataagcatttctaggacacccaatccaatcaagaaagtccatacaactttagccaattaatcaggtgctagaaagaggaatctaaacaattcaaaattcaaaatttgatcaccgataggacttacatggaatattttcattaaccctaatattttgctaaaaaataaaaatgcttgtatttttaaatgggaaagtagtagatatggaaatatgaaagatataaaagatcagaggttaaagtaaatgtctgcagtcctgatagttagcaggagatgtttgatatgtaggttcggactcacatgttagacactactgtatcaacagtacttacgaggttctgcatccataatacttcttccgtgccaaaaaaacaaatatataactaaatattacatattatagtaaaacgaatctggacatatcttagtccagatccgtagtcctaaaatgtgttacatctaatactagatttatttttttataggacgtagtggagaccagtagcaaaacttaccgatgtg

SEQ ID NO: 43390 - DNA, 750 bp, Oryza sativa
gtttgtcttgtccctgttaattaacttttaatccgagccattgatgcacttcaatttccaagcgttctttttctttcaagaagccttgaaggaagaaggtgagagatagagagaagaagaaaaatagagataacattatagttcatctattatacatggtaagttcatttgacaggatgatagttgattagaactaattagtgcacacgcattgtgtagtcccgtcgatcaaaaactactcgctccgttccaaaaataaacgaatttagaattagatacgacacattctagtacaatgaatctaaataaatatatgttcagattaatagtattaggatgtgtcatatctagtactaggttggtttctatgggacggaaggagtaggcttgtgcttgttatgagttaggcgattgattttttttttaagttttgtgagttgactttctctcctccatcggtcatcatctaaggttgttgaggtcttcttccacctccggcacaagatttggttctttctttttctttcttccggtgctcttacagttgctaatgaacctctccgatcatgcctcaccttccaagtttctcacagttcacgatctccccgtgccatcatctccctaccgtcagtggggcgcccccctccctggctcgccggtgcaagaaagtcgccaacgttgctggcaagccctacccaaccaactaggatctcccttctcactccccttactccttccttgctctaagta

SEQ ID NO: 43391 - DNA, 590 bp, Oryza sativa
  unsure (1)..(590): unsure at all n locations
gttgtaatcagctagatactttccttgtaaaccctcctcctcatcatatataatagggggtaggggtcacgagatatggggcaagccggtcatcacaacccggcatacgcattctccacttcaaccggacatagatccaatccacatataattggactagggtattagctcacatcgagggcataaaccagtataaacatctgtgtcaccatctctccttgattttccccaccagataaattttattgctgttcattaaaatcgacaaccgccattatgtgntaattaaattgttatcagaatccaaaagtcattttagaattattggttgcatgtccattggttttatcacatggtgaatgaattaattgctttttggtcttggtgcaggaaaaagaaataaggttcttaggatttttggatagagggagtatgatttctgactttgttttaccattgttttgtttgtcttgttttagtttgccgtttaaattggtagaatttttatcaattgtgaaaattatctccacctgtcgcaacacatatgtatttttgctagtatatatatattttaaggacaagactatacg

SEQ ID NO: 43392 - DNA, 910 bp, Oryza sativa
tcctgcagcccatgatcccactaatcaattcctccatattatcaggcctatgttggtttggtggtggatttggtggcctaataggttgtggttgcggcgcaatataattatattggccttgcctagtatcgggaggataccccctggaaacatcattgtaagcattgggaacatgtggggggggatttgggaactagtagtgcctttagatacagggggatcaaatgttctaagatgatacaaatacgcattgtttgtcattggatctaccccctgtattgggatgattgcgccggtctgaccggcgtccagaggcacggtcagaccaatatgaggaccggtctgaccgctggggtaatacccggtctgaccggccatctggccagtctgaccggcggcgaagtcgcggtctgaccggccatctagcccgatcagaccggctatatgcgccgtccacccctcaccggtttgttgtgtcttcgccccatcggttttactacttatttgatctataggggcttggctagcactggtagaggctttatctttgaacataaaatcggccatgagagggctgaatttagtcctcaaaaatccttcaacatgattctcaatagatgcatttaacttagtattcaatgtagctatagatgaatctattgtagatgcaatttgttgttagatagattgtgatacctctttagaacttaccacattgaaattaggcttaatgcgcggtccaggcttgacgatcacactttgacgagtcctagtgcacgccctcatcaatgcctcatgtgtgacctccttaaggtactcctccatggacttgcgcgcttccctatcgagctcctccaatgtaattggtatcacattggacggttccacctccgccttggatgacgggggc

SEQ ID NO: 43393 - DNA, 677 bp, Oryza sativa
  unsure (1)..(677): unsure at all n locations
tgatagatgaaccaatggttaccatgattcagggtataaccaataaataagtgatctaaaatcatatggatatctagttttataagtacgaaataatttgaacaaaaagtatgtgctacataaaagtaagcccaactagcctcctcaaatccatgaacaaaatctgcttcttgaagctctgaagcacaaacatacatacaatgaacaaaaacaaataaatggaaagtacaaaggaaaatagatataaaacccaaagaacactatgacaggatatatttgtcgactttagatacatttaggagggaatggactgaaccaaaatttgtatgaaagagagagaatagacctcagaaatcggtcacacaaatagacttcgaaaatatttaatctagacaaagaaaaatactatccaataaatgtttccaaattaaaataaataggaaacatctcatgttggaggcagtgttggatagtaataagggaagagaggngaatgcagcncaaatattngacacattgcattgagccccaagggccgatatatataggagtgcatgaattggatcttaagtaaacttagagagatagagatggaaactaatcctatcctaccatatcaaatcggatataatacgatattatctatgtactctaacaacccctccccccctagccaa

SEQ ID NO: 43394 - DNA, 779 bp, Oryza sativa
ggtcgccgagggaggggaaaaatcggtcgctcccccctccccccatgacgcgcgtgcgcacgtgcgccctgggccccacgatgtgtcactgactacctactacgtgtctccaccacatactccgttgcaacaaattacccatatattttggaaactctctattaagggaattcgttttattttttttccaaaaaaaatgtttcacctagtgtactcacaatgtttcactatgtatatatctaatattgcagagaaccgaaatattcttttgcaacaaatcacccacatattttggaaaccctctattaagggaattcgtttcattttttgttccacaaaaaatgtttcacctagtgtactcacaatgtttcactatgtatagatctaatgttgcagtgaactgaaacattctttcgctatttgctgaaacattgttttcatgtaaggtgaaagaacgtccgatttaaacgattgaaacattttcgatctacttagtgaaacaatctcgatatacttagtggaacattgtgcaacatttcaaaagaaaatcaataataagcttaaaaaaattcgttggaatatatccacgtgtggtcttgttttaaagatttaattgcgataaatatagtgatataatcggatcatgcatcggataaatattttaggataaaaaatagtttagagttagtagattttcatactgcatgagggaagagagagcaactgtgatagtgtgtatgcatgactgcatgctgcagagagagcagagacctataggg

SEQ ID NO: 43395 - DNA, 651 bp, Oryza sativa
ctgcagccctatgttttggtgattctacagaacttgggtttactcaaaaagaatctaagatgaattttatatgaacttctaaaattcagcttatctaaaactagtcattttaaaggtaatagttttagaggcatttgatgtatagtatgtatactatttcattttgctttataggagaacataagttgctggatctgtagaaactgagtttgctccaaaatgagttgagatgtactttatatgcattttatagtttgtgtatgctttatgtatgatttatcttagacccattttagagacaaggtttgtgctgagggtgccaagcttaatgttaccacattaaagttcatagttttgtgaacctatagaaatttgaatcatctcaaaataagttatatttgattttatatggattttacaagtttaggtgttttgctgttaaaaagtaaaggcttttagtattatcttttacattttcagattttaaactcatggggtccacctgtcggtctcaggccaatatgcaaaagggcctctagggtttcaggaaatcaaacgcaatcctatgactgttctgtgtgtcttgagcttttgcagaaaggaccctacattaacctaaattcttgtgacgaggtccctggttcgagctga

SEQ ID NO: 43396 - DNA, 769 bp, Oryza sativa
agcagaagttcaagatagagctgccactggttactggcgctgcaacatatgcaccgtttgttctgaagcgctgcaaatcggagccgatgcgatctcggcacggctggcgcccgatgcctgcttctggaaggaccggcataggcccctcaatgccaccggagttggcttttgattccagccgaacacaacctctggtatgcctagttagctaacgagtgagttgagagttttcaagctttgtcgtgtaatagtgatgaagttctttcatgcttggtgctgttatgtgatgtggacaaacaaataatagcatgttaagttacatcagatagattagggaggagtatatgtaaatctcttggggttgcttcatgtgtgtgctaaattccttttttcgttgatgatcatgatgttgtgcagtgcagctatagttctttctttccccccatcaacatctgcttgtttttgccacatgttaggtcttccttcaacattcagcttcatcattccttcatttccttgcaaataagttattgatccacactgccaagttggtaggttcacatggcttgatttataaaaaatgccatccagtcaaactttagtagcattgttgatccattacatattgcacaattagatacttatcccaattggctgtgaaactgtgaatggtgtcgcatcgtcgttcaatttcattccacctttattctgccatgacactgtcttgccgtttggggtttttcccgttccttgcttggtcgcgttattt

SEQ ID NO: 43397 - DNA, 1712 bp, Oryza sativa
ctgcagccctaatttcagtggttgcttcgtatcccacagtaggtttgaggtgggtgtagaggtggtgacagcccgcaattacactgaagtcctccctgtctgggtacgcaatagagccatatctgggagcagcgggctggtcagtgcctgatgtatcgtgttaggattaaattgagctttcgccggatccacccaccgtcgcgaagccacaactacacccgagggcggcagatccggccctcctgagggcggcgccgctggatccgccgcccactgtcgccgcccgccgttgcgaagccgcagccattgccacggctgcaccttcgctgagccgccgcccgcccatcgccgcccgtcgtcgcgaagccatattcattgcctcccgttgcacgaatgcatcattggtgtggctttatgagtacggtggttgaactcagtcttgctatttccttcttttagaagtggagcgcttttgagctgaagacgaagttagaggaccgaggctcaaaccccagttgagttttgtatgtggagtggagctgaagccccgctatgatcgcctttttccgttgctgctgctttcttttcggtgtgaggactaagcgcctcttctgtaagtatgcacgctttatttatgtttgaatttgtatattaatttgtcgccggtggcgagggtgggtgtgatggacttgggtcgcccggggtgtccggttgtccagcttccggattcactgcggcggacgaggggactgcctactccgggttaggggtcggggtgaaaccttagcatggtgtggatggttaggggagggttattcgaagggtcttgtcacaatcactcgacatggtgatgtgcccgcgcaggcatggtgacatgccggtagattgtgtcttgtgggtacagttgtgcacctttggctagagtaaaactattcgaatagccatgcccgtggttatgggcgatcgacaaggaattcaccttcgcgatgattagtgctcatccccttaataattggttaatgaactggtgtagttcaggtggtttggttgggcctgttcaacgtggtgtagcgttgatcagtagagatttattattatcttaattaatcaactgttttaccattttcaactataaatgctttacaactgcctttatgcaaatagccacaaacatcctttgcctcccgttgcatgaatgcatcattggtgtggcttgctgagtatggtggttgtactcagtctttctatttctccctttcagaagtgtagcgcttctgagctaaagacgaagttagaggaccgaggctcagaccccacttgagttttgcctgtggagtggagctgaagccccactaggatcgccttttccgttactgctgctctcttttcagtgtgaggactaagtgcctcttctgttagtatttacgcttttattgatgtttggatctgtatattaatttgtcgttttgtgtaccctggctgattcctggacaaagatttaatacacaaaatagtctggaaatttgggctaaatttctcgatgtgacatcgctggtcgtcgatccaacgtggttgcctgttggtatttcttaacgatattactagaaatattcattcctagaaatggcgacaaaatagtcctggtatatttatggctactgttggtatttcttatgatcacagatagaatccgcaagcgcacggatataccg

SEQ ID NO: 43398 - DNA, 582 bp, Oryza sativa
atagatagatcctgtaacgccccgattttcgttcgggtttaaaaatcattaaataatgtattttctagaaattaaataaaagttaaatcaatttaatcaagtgaaatattgggagaattaaaattttcccttaaaaatcattggccgggaatattttgcaatattctttgtgccctaaaatactctccggatttttccgttaattttcggagttcaagaaataattttaaagtcacaaagttcattaaactaatttaaataaaaagaaaacaaaataaacttccccttcctccctttcgggctcggcccaaaatcctctctccttcccctcccgcggcctggcttgcctccccttttggcgcaagtctgcttttcctccctcccggcctcccctctcactcaggccgacaggtgggacccgtgggccccacctgtcatccccaacctccagcccgggccgcaactgccatggccgcctgagccgcccacgtcgccgccctttcccgcgcgtcttccgattcccgcgcgcgtgtgggcgcggtccaccccacgtcatccccttcctacaccatttcccccact

SEQ ID NO: 43399 - DNA, 1122 bp, Oryza sativa
catatttaatagtttttttcttaaaaaaacatggaccaaagtttaaatttaaatagtgatggtatgagttatttgagaacggaggaagttgctttagaatgaattgactagcggttggatataagtatgcaactctatgatatgatataagtatgcaactctatgatatcgagagagtatctagggtagacaattgggtttaccttagcatgcgacaaggggttatcgtaccctagtgataatcccgaatcccgacgggttatcgtaccctagcggtaatcccgataaacacggtaaccatacagttaccgtagtggacaatgagaaaatgggatgaaatctatcaaaaaaagtatatatcagattatgtttaaattcttttaaacttgacatggttatcaggccctacctaccatttaccctaagtcctgatatggtggtgctttttttttaagatgaagattaagttttttgcgcaaaatgaggtggtattaacgtatgattgattgaattttaattattacagacttgaaaaatatattaatatggtattttagagcaactttcatatagaaagttttcacacgaaacgtactgtttaacagtttaaaaagcgtgccacgaaaattttaatcttcattcaaatcttgttggagaaaagaacaggaccataattgaaaccgcgaacggtaaggaaacctactcgacagcgactactaaggactactttgtagagccagactttcttcaactaaatccaaacatttgattttaaaggctactaaaaattattaattcatgggaagaaaaacctattattttaccaacctctatgcaaagagaaaaccaattacttaaaagagatcagcaaggagagtcaaaattgttggcctgtccaaatgcgcgtgtggaaattaaaatcaaagaatgaatgaatggatgcagtggtcttatcattgaaaagtgattcgattctgggagacccacacccacacacacaaaaacaaacgcaaatacgcattgcattgcatgcaaaggtggatttcctgcgtggcccattggctagcagctactaccactgccactgctgcaacctctgcaactcatatccacatcaaatta

SEQ ID NO: 43400 - DNA, 3534 bp, Oryza sativa
tgcctgccgcgctcatggaggaggtcgaccaacacgatgacgacgccggcggtgaagagctggagcatgacgagcaccgccgctctcgcccgctgcccatgaccagcttcgctcgcccatcacttcgccgccaccccacccattgctcccgccgtcccgaccgcctctctccccctctcccgcagccactgccgcgcccgtgctcgcctcctctccccctctccccattcttccccacgcgtcgccatgcccgcattagcccgtctgctggtgacaagcaatgagagccggcctcctctccctatctcccacttcttccccgcgcgtctccacacccgcatccacccgcctaccgcgctcgcttgccacccgcagcaagcctccctccctgaagaagagaagagagaagagagaaaagagaagagaaggagaagaaaagagaatgtgtagctgacatgtgggccccacgtactttttaaatttttttgctgactaggatgccacgtcaactaaaccacccatatatattgccataggaccgtgagtgcacggtttgtgtgagtttaggggtacacatttctgattttgtggttaagggaccttaaaaaatctcactgttaagttgagggacccccggtgaacttattccttaccgatttggaatgttatgagtataattcagggcttttttactttgtttccaaaacaacaaactaaatgagactttattgttacaatcttgtcaatccctacaaactttataattctagaaacttctactcacaaaactataccaaaatttggtaaggtatcaaacaaaacaccacctccacattgtgatcttcccaaaaatttggcattactaaattttggattaccaacaaatggtaaggttttcttttttctggcaatgaactgaacaaccccttaattttacttttttttaagccatggtaacagtttgctacagtagtgatgacactcactctctcccgtggcccattttttggtaatgggataactctcactttgattgaatatgatgtttgcgacatggctaccaaccagaacaagttcatgacatcgtgcaatcactatgccacaaacgatatcgtaccaaccatgacgcgtggttgacgttccctgcaatgcaaatcagagaacactacaagaacaagataagatgcaatctaaatattgcgaataggtaattaagcacaaatatatagttgcgattgaagtgatagatctaatcgatccgacaaatcaacacatcaacagttgggggctctgaatctatagtcgtcaactaatcgaacgagaactagagacaaggtgaatgactcttggcaaaattcaactaaacaaaacccaattgttctttttagggcgtacaaagctatttataaaggaaaataaagctaggattagtgctggttcgtggaggtggagagaggcacttccgagatgggcctaatctattacaaggcccaaagcccaaattcagtttcaaactgtcttgttttgaaattcctgttgactcgagatgaattttgatatgagaccagaagcatttaaaaggtgacgacgcaccgctttccaacaagtacaagatcatccaaaccggagttgacatgaaggcgctaggtccatttgaagttgttggacttgaatatcttgtagatcttccattcatccaatatattatttgacaatgttttatatttctcgtgcttgggtggaaactttttggccgcttgtgaccttacgtccccgtttgaatatgccaatatggggctccgaccacttgactcataggtgacgaaaatcatcccgccgtcccggctccataagagcatcacaacagcacatccaaattttatcttccatattcccatttggatgctcatccaaaaagattccctctccatatttcctttcacttcaacagatcatctatactaaattgtccatattatatcatcctttattttactaatatctttcaactaccatacattttatattaatttctcactaactcttcctctcttctacttcatatataggacggggaggacaagaagggctgacggacggttcgaaggcgacggggttgcgagccgtgctggtgcggcacggtcgccgggtggaggagtagcgctgcgggagggggaggtgcgaaggaaggcacgggcgaaagggaggtatggtggaaaggcgtgggtggccaggtggggaggtggcgggagcggcggtggaaggccgagtcagcatcggaaggggactacttcttcttcaaactccctagatcttgttggtgccacctctctacctcccttctccgacaaccggagccaatccaactagagctgcaactcatcctccctctcctcctctatttgccgctggcgcagatgctgtgggaggttgatccggaactctgtatgggagcaggagtttgatcgaaatgtggcggttgcgtatggtgtgaggagagaagaacgccaattttgacgttcctctctcctatttagcacacgcgctatttttggcgtagccgatggtgtatcagttgttggctgatttttcacccccatatgctaattttcagatggagcatctgctgaggatgctctaagattttgtccctattaccgatagggaaatcatcacccttagcagtatatactagtaagggcatgtccaacatcatgaccttaggttgtaccatggtttcaagcttcagctaggctcggatgccacgatggaggggagtagtggcttctagggtgccagagtgacctacaaaatccatgggtagcttggggagaaaaggtgaggaagtaattgattgaaaatatggttaaatgtgtgtagaaattaggtataattggaagaatatgtagaatacttacaaatctaacttttgagtgtaaaatacaaaaatccggcataaccttttctatattatggacttcgaagcaattcaacatttcatagcataataattcaacaacctcacatttcaaagcattatgaagtccacacaaaactgaaacaatagagttcacaatataatgtccatgactacaaataaggtagttcatatgacaagcaacacgaatatagaatgttgtagtttgaaacaaaggatataaatgacatagctaggtgttccattgattacatgttgtactcttctgtggacatgagcatcaaagccgtgagagtgtagcaacccagccttgtattcctgccaagtgggtttgaagacaaataaacaaaacaacagactttcttgcaaaaaaggctagagagaatacttcaactaatgttgttccaatagccagtcaaagaatatctcatttgtgctatcaaacataaggtagctttggaatcatctccagttatggagaatgtatatctagtgtagttcattgactgtgcttataatgatcaataaactttgttatcgaaaaaaaaacagaatccagcagggctcaggctccctccgctagcacatcggcgctg

SEQ ID NO: 43401 - DNA, 4359 bp, Oryza sativa
cccgcagtgcagaagggcctcatgaataactttaatttttcatttcagcccttgcccctttcaatttcatccacatatttttttttgatttacaaagaagtccaaattttacactaaccacccctaaaattgagagaagaatataaatcccaccccaaacccaccaccggatccacccccacaacccctcctatccccccacacacccccacctcggcaagttcaccggcgacgaactcgcctccggtgtccccccactcccccacctctacgatgaactcccgctgccggcggcctctcccctctccccgttggcgcctctccacttccgaacgccgttctacctctcccatcttccctgacccagctacgagctcggcgttgagcggagcagcgacggcgacaacgtcctctctccccttccacggccacgagctccgtgacaaaccgtgtgaatcgagcgaccagatcgacgccatcctcgacgcctctctcctctaaggcttctagagtggacggatgcgaagcttgacggtgtcgccggatctggtgtggtgctgagcgacgtgggcagaggtggatcttggcggtgtaaattgggtcggcgagctcctcggcggcagtgtggagtgggaggccacagtcgcctggcttgaggcggcgggggcggagattgatgtcagcggcgcaaatcgagtcgacgagctccccgctgcaaccgtcgtcgagctcatccgatggtcatggaggcctccgttgtcgagctcatgtgcagtggttgtatgtggcgagagactaggcatggcaaacggctttgtgcgctttgtctgtgccttttcctcgcctcttcgttgaggaacgaaaagctttgtggaggtgtgagggaccacaccctctctcctccatggcatcacacagtctacgtggtgggatgaagaaacgctccaacatggagcactgtgaagggccttagctcccatcagaccgtccttgcctccgcctctgccgaccgagtctgcaatccctagggcatgtgggtccaaggctccaagacgagagggacgaggataagatatggtgcgtgtatttctctccaggggtatttaggtctttatcattttctaaatgtattttttaaaatatatttgtaacactagttagaatatagccaaacaacatgttcattctttaaaaagagggttaaataagcgaagttaataatttagggttaaattgatagttagctttccgtatgtgcaatggttccttctataaaaggcttggatgtcctgtcatgtcctaagtacccccatcatcctaccgggtcatgtgcacaattttcaataaaaagagttggatgtcctgtcacctattcatgtctcacgtatgtctcgcttagagtaaggctaataatacagacgatttgttggctataaggttctctgcagacttctcttagcccacacgtataatagttagctatttacaattaatacagtgtctctctcacataatttcatggttcttgtgtccaagccagctgtaagtttatagcccgcttctcctctctctcttctctcctctcctccaccttagcatttagccgacttacaacctcttattatacttgctcttagggatagcagttttacctacgggtcgggtacccgcagatacccgacccgatgggcatgggtatgggtgtaatattttatccgtgggcatgtccgcccgatacccgaacatatagtgggtagcagccgggttttattttttacccgtggataacccatgcccgacccgatacatatacatattagctatatttggcccatctcttaattcccatggccttcttcttagcccatttagcccattaactgagacatatatatactcactcaatgaaacctaacctaattcctcatttccccaccccatctttcccggatgcctctctcctctccataatccaaagcggcggcgcgtgcaggcagcggcggcggcaagggaacggcggcggtgctgtgcgtgcaggtgggggagcggcggcgcgcaggcggggcggcggcaggggaacggcggcggcggcgcacgtgcaggcaggggctgcggcaggggaacaagaggccgcggtgcgtgtgcaggtgggcgggcggcggcagtggaacaagcggcggctgcgcgcgtgcaggagggtgcggcggcgacggcgcgtgcagtgtggcggtagggggacaagcggcgacagcggcgcctgcaggtggtggcaacaacaagggaacaaacgggagcggcggtcaccatggtaggcaatagcgacttcgtcgtctccattgcgcatgaccacaatcttcgtcaaccgccgccgctcacctgacccagtcttcgtcactgcgcatgacccagtggatatccgtcggcgggcatgggcacgggcacgggcatggggttttgcccgattggctttgcgggcatgggtcgggcgtgggcacgtgggtcttgggtcaggcatggattcactctgctcgtgcccgacccgacccattgccatccctacttgctcttatgcgaccttgatacgggtgcatccgtaagatatgtatacaagtcatttttacgtaatatgcccatgaactaataaatgtcatcaagaaaattataaaaatacgtatcatcttcaaattcattataataggaagaaaagaagacaaaatctatcatacttatactcttaaaactgttaaaatttttatctttttgttatggttaaaataatgcattgaggttaagactttacatagcagtgtaatactactgaaaatacatgcatatttttctagaatttttttggtaaaatttataatattagaatatgtctcatcttttattagattggtttattttggtacaaaagtagtaggtaacaagatgtaacaagtagcgggtagtaagatgggggccatgatacaatagaaaaaaagacagatagatattggagggaagatgaacgtccgcggaggaatggagaattaagggaagagagtttttaagtatttgtttagtttttaatattttaagtatttgtttagtttttaatatccggtctatggctagatgatattacgcgcctcagccaaagcatctggccatacgacgaggccatacgacatatttggttggtaactaatgttgccacacattcttaactaaggtggctaagtttagtcttgtcacgcttttgtggaacaaaatgacaaactaaagcttagacagtaacaaaagtgtataacatgtgggccaaatgactagttagacaaaatagagttgtgataagaatcaaatactgcctatcaaaattgtggcttatctaaggatagacatggcaaatttaattgctaatcaaacatgtcctactatctgctttattgccaacctcacaataatgaaccaggtaatatagttttttacggtgccctaagttttattttttcttaatagaatctagaattaaaatattgtacatatttctagtaatgaattagcgcagttaatgcgacgcaaagtgtacatcctgtcggcccggtcttattgattttgttcttggttgaacggcagcacaataaatgaaatattactgtttattgttgaaacatacagctagctcgctgattaatactacctccgtcccatattacttgtctttttgagtttttgtttgtcaatgtttgatcattcgtcttattcaaaaaattttaaaattattatttattttatttatcatttgctttattatcaaaagtactttacatatgacttatctttttttatatttgcactaatttttcaaataaaacgaatggtcaaacgttgcaaataaaaagtcaaaaacatcacctattatgggacggagggagtaatatacacttacatgtgtgaatagccacttaagattaaaattttcatgtgatacttgcttaaaggggatgtgttaactaaggataatttgtcaaggcgtaactcgaatggcagcttgaggtgttctttttgtttgaagaatgagtctattcaacatctctttataaattgtcattttgcaaagttcatatagagagcagttcagttctcttttggttttaatcttccagttactatatctcatatttttaatgagtggcttttgggaattgataagaaaaaaagcaaactgatactttggagcttctgccatttgttgggcaatatggctaagtaggaacgatatggtttttgataaatcaccatcattttcctatatgcaggtcatttttagggcaactcattggcttcgattttgggcacaactacaaaggtgtgatg

SEQ ID NO: 43402 - DNA, 10416 bp, Oryza sativa
ccctgccgacagttggtgttggtactgaacttattattgagcatttgatgcgatgcgaatggaggaacgctgtgagaaacggagatattcgaccaatgcatagtgtattaaatataaacgaaagaaacaaattacacatattatgtgtaaattgcaagacaaatcttttaagtctgatggtgccatgatttgataatgtggtgctacaataaacatttgcaaatgatagattaattaaacttaataaattcgtcttgcgttttacatgcagattctataatttattttgttattagactatatttaatattttaaatgtgtattcgtatatttgatgaggtacatccaaattttacaacctatctaaccacagccatatatgtgtgcgtcaacgcgtctaatcgaggaggatttggagctggagttgttggtgaggtggcgcctcttcatgccccctcgccggccaactactggactacgggagcaacgctttcagacttgtgcactaggcactgagacagtgactattaaatgaaaagaaaatacttcctccgtattttaatgtaacgccgttgattttttgataaacgttggaccttttatcttatttaaaaaaattatataattataatttattttattgtgacttgatttatcatcaaatgttatttaagcatgacataagtatttttatatttgcataaaatttttgaataagacaagtgatcaaacgttggttaaaaagataacggtgtcatacattaaaatatggagggagtaataatgtcagatttggttttgccacggtgagagattgtggacaaagttgtcactgttcgtcacttggacctgggctacaacacgacggggcctcgtgaaaaatgtttctcttgtgttttttgtgtgccctactactcttctactgctgccctgtgctgctgtgtgagctggttacaataagcaccatggattttgtttagagaaaaaagagtgactcatgtttacctatggcattttatatatttgagtgtttaccgtataaatcctaaaatttctctttaggttgttcagaacttcagattatgccattttaatccataccaatttttaataaagttgttaaagatgtgcatccatttaaattttttttaccaaattttagatacataagaaatcttgtcaaaacttgtcaatattgtcaagttgtcaaagtttgataaggtttattttggctataatctgaacaacccctatgctcaccaaggagatataatgaaattaataattgagcgaaatacatttttttcttactctatctgtccctctaaatataagcatgtgtaggattcaaattttatacgcatccttggaacactaatttcaatgcatgtgaatctagatatttttagccattacgatggagggagtggatgtttggagaagaaatcgaataaattggaacgaaattatttttccttaattttaatctttactaaataacctataaatacatatactccctccaatattcatattgataatcatgtaagtattttcaccaagaccgaggaatcattaacttccttatattttatttaatgtaagtatgtggtgggagaaaaaaaaatcaagaaacggtaccttgaaactcgaattaaatttaaaaatatcctgttcattcttttttctcaggaatattcgagatgcaaaatatttacagaaatatactgtcgatctcgcacaatcattacgcgtgggtgtgacgtcgcgggcggtatcgcacgaggaaaacacaagaccgcggtctcgtggaatggaagagcgggactgaatggtctcgcaaaatcaaacaacgacactatccaacggctccatttgattagtgattaattacttaattaataattaactaataataattaatgattaattatcctaattagtgattaatttcaggataattaatcgctaattaaatcggcattgaaccggtatcgatcattgcatgagcaagagcgctccgctgccgcgcggtctcgcgcgatactgcccgcgacgtcatttccacgtcacttttgcgcaacggttgtacgagaccgatggtatatttttgtaaaaaattttgcatcccgaatattcctgagaaaaaaaattgaatgaatagtatatttttaaatttaattccttgaaactctcctatgcaagaaacaagaggcttactatcccaaatgcctgcatgcatgcatgcaaactcaatttgcatacataaatgcaatgatgcagtacataccaatcgatggaactaatcttatatgatgatcaatttgaaatatctctttttagttattatgtaataattattataaaatagagggagtatttaagtactctatcgtattttaatgtatgacgccgttgatttttttatcacatttgaacatttgtcttatttaaaaaaaattatataattatcatttattttgttgtgactttatttatcatcaaatacggagggattttttttatctcatatactaccagccaaggttattgtgatataggctgtgtttagtttttttaaaacttccaaaaattccgtcacatcaaatatttggacatatacatggagcattaaatgtggacgaaaaaaaaccaattgcacagtttgcatgtaaattgcgagacgaatctaaacacgactctactacaggacgctgacgaaacttaggacgaagccggcatcatcgatcagtactgtaccctgaccatcgcatgcacgcaaacggatgatgatgttaaaatggagaagcataatcccacatggacgccacatgtgtccctcacattggtcgccggatagctgcagcatgacacgcaatgcattgtttgtccccccaaatcaaatcatcatcacctcccaaaaaaacaaatctctattaccattatcttaatatgcaactaatctcctgaaagcataaactaaaaagaaaagagtcatcgaacaacaagcagttccatgtgcaatcaattaatctgctacaatcactcatcatacaagcagttcagtttcatgtacaattaattaattacaaatcaacaagagcaagaaaccgcaaatcagcaacaaaatttgctcgaattggactcctaatttctaatttaattgctttttaaattaatttctcatgttcctgcaagctcagatctcttcctatcaccatttacaagctacagatttcccaaaaagaaccccaaaaaaagaaaaagagagagattttttttccctttctggctacgattctaccggtggtggatcggcggcgaactctccgacgagctccatctgatcctcgagatacttctgcagcagcatcccccgatcgccgccggaatcctccccctcccccttctccggccaccgtcctcctccccctccgccgcaccggcggcgaccacccgtcgccgccgacgacctcatcatcctcacccgccggaacctgaagacggccaccgcgcagcagagcagcggcagccagagcaccgccagcgacagcaccacggggaccaggcacagcgccacccacgccgccgccgccgccctccacgacggcagcaacggcgccgcgccgcccatcaccgcctccggcggcggcggcggcaagaaggggatcaagcttaatctgctcgtcggatttggatttattttcgcggcaaaagattttttgctccttccctttttatgagcgtttggttcggtttgcaccgaaagcaggagagtccgattcggaaaagtggttaggggattcttgtctgaattaagctgagggaggtgagatgagagaaaggatggggccctcgacgttttattgccgcgtcaccgtgggtcactttcgctttctcttgcttctgggagaggatcaggttaggctattctctactttcacttcaggcttccagccatgcctcacacagtcacactttgattgatttttttaaaagaaaaactgaattgctgatattttcatgatattttctgtgtctgtggcccacttaattactcaccgcgttccatgttcatattgtaatttgttttagttttttcataaattgtagaaaaacacaccaacgtctgtaacatccgattgatttcatcattaaatccatcatgaatatgtcttgatagcatatctatttgttactgtagaggttgatatattcattcttattagtggaggattttcagcacatgtaaaatgagaaaaaacttattagcacatgattagttaattgtttactattataaacttaaaaaatagatttatttgattttttaacaaattttatatttatttatttttattctaaaaagacataattgaaccatttgaaataactaaaaatgatgaaggtgaagtttgaagttgaagaaaagaacaaagcctagatataattagagaagtttgattcagagcaaaactaaaacgacataaatggaggaaataaagtaaataatttcaagaagaaggtggtagggaaatgagcattcttttacagttggtcaaatgatatggtatagaagtggttacatattttaatgtgcggaattaagagagaagatgggcttccgatcttcattactcctttcacttgtccttcaaagtcgtgaccactgaccacattatgtttctctgaaaaaaaactgaccacattatcaataattttccttttcaaaagaagtcctccaaagtagacccattcagatttcagagtcaactttagtccttttttgaaacatatttttacgttgatattaagacaaatttacataactaacacgataaattaatattttaagaaaaaaacttcctagaacaattaatttaaacaatatagcagaagatttttttttgagaaatcatatttttagaaacatggagcaaataacccgtgacaaaaatatgaaaaaaagacatgaaacgtacatgggctcagattgtggtgagtggatggtagcaatagattactctgattttgtgacattatttaagagtataaaagaactaattaaacattgaaagttaaaaaatatatttacaaagcaagacatttctgcataaaatatttttaataaaagttagaccgtttaacgatttaagaaaggtgggtagctaataagctaactgctcacaccggagttcgtcgccgcggccgccggtgacgacggcggcggctgcaagaaacggctcggttctttgcttgcttgttgctctggccttgaggtagtgaagcaatagcagtcgtaaaagcttgcttgcttgcttgtttacggcagtttacgttgcttttgcttctaccaaaagcgttcaattcgtcgccaggttcagactgacaggcgtgcccatgacgccatcatttctgttgccggccggccgaagcaaagagatggttttttaatggggaaaaaactttaccatcaccttggcatgttttatgcagtaccccatggttagctatatactactccctccatttcacaacgtaacattaaccacatacatataggccgtgtttgcatccccatgttcccaacacatcaccctcgttttccgcgtgcacatttttcaaactactaaacgatgcgttttttgcaaaaagtttatatgcgaaagttgctttaaaaaatcaaattaatctatttttgaaaaaaaattattagctaatacttaattaatcacacgctaatggaccgctccattttccgtgcgggagggattagttctcatcactggaatccgaacacagccatagatgttaatgaatctaaatacatacatatgtctagattcattaacatctaaataaatatgggcaatgctagaaagtcttacattatgaaacggaggaagtatatctgtttttaataaacaatatcattgacttttagacacatgtttgatcattcgttttatttaaaaattttatacaaatatgtaatatataaattgttcttaaaatatttttagtgataaaatatttcatagcaaaataaatgataattacataaatttttttaataagatgcatggtcaaacttgtacctaaaagttaacggtgttatctattaagaaaacggaggtaatatgtcattttcaattaaaaagctccggttactctgttttgagatatatttccttcaaaacaagacagtacatatgtgaccaaagcaacaaattatcataagcgttatatatatttcattactaaaaaaataagcgttttatatacctctacttttaatggttttatagtaaaatctgacgagcgacaaaagaaaagggcccattagtaagtaaaagaatcgggcttgtttatttactctctcgcggaaaatatattattgtaggtacgcttctcaagctcataaacgacacatgatttctcaattaactttcttcattagcatgtctgagaattttctttgaaaatcaacttactttatattatttaatccattcatttgtgccctcaaagaaattcaggggcgaagctagtatatgttagggggtgcccaggaacccggtcaagaaaattttttagctatacctcatctattttcaccatgtatgcacccctttaatacaaacttagacacccgtatcagtttaaactcgatctaaagtaaaataaattaagcaagtggcaccaccctctatttcactctagctccgcccctgcaaagaattatcataaatttagttttatccataatctatcctccaccaacactttaggacacactacttttcaaaatgtaaaaaccggttgcttgcgacatacatataatataagcaaagagaaattttatgcttctttagaaaatatcttgagttacctaaattttacactaaaatttatagtatctctgaagatattaaattttacactagaaaatatggtatctatcggtagtttcttaaggatgataaaattacccacaagcaaaggatcaaacaaagcacacctagctattagccaaacatccacatcactataattaaaataaaaataatttatataaacttgtacataagtgtacgtgtctatacatcaacgtgtatgtatatacctacaaatttctatgagatccatgcattaactgttactgtactagttggcattgatggagcgatgcatccatactcttgtgaagaggtacatgttggaggggccagcaagcacatggccatggagtaatgcattctattatttccttcttttttttaaatgtacgacaccattaatcttattatatgtgtttggccattcatattattaaataaatatatactaattatttattttattatgatttgatttatcatcaaatattatttaaacatgatttaaatatttttatatcggcaataaaaaaagataaatggttaaacattgataaaaagttaacaacgttatacatttaaaaagtgaaggtagtattttttttttcttttaaagagaaggggagaatataatagtggtacgttttaatgtagttatggacaatttcgtcaggtagggtacgtgcaaatatattgtcgtgcgtgcagcgtacgtagtgacgcagtttcatgtggcggttcgtcggtggatcacagcagtgtcgatcaggtacccatagcttcgtgtccactgcacgccaatgctaccaccagccttttttttttagagaagggtattttttatccggcctctatatccaattggatatatacgaccattgaaatagggaacttagccccgcaaacaacccaatctgaaattcgctccataggagatttgaactcaggaccttggggtactacttaggtcactgtaaccactaccagcctagaatacctagtagcatgtggcgttcttagagcaagtttaatagtatagcccactactagatccacttcatctatagctaatctaatagccaattcataccatagttgcttactatactattaatacctggccctatctgtcatacacacattatgttttggagtccgtgctgcagctggctacagatctgtagcccgatgttcttctctctctttctttatctctttaaaatatgtttatagcctgctattgtacctgctcttagctctaggccttaatcaattgacaaagctaaccatattaataagtagtaagttaatttagtaaaactgtaactaatgaaatcatcacaaatgcattgactaacctaatcaaattataaatcatcaaactgttgaagcaaaacttttcaaatgtatggttttgtgatatagagattcacatgtggtgatataactatgtagttttggggtagctagcttcatcatagctaaatatacaattttgcaatgtcatgagacctaaatccgtagttattggataaatttgactttagttttgtgatattgggccttcagttgtggttttgtcaactggcctggcccataattgttttatcataccataaaaagaagggagttattattattattattattattattttttgaaaacagggagtgtatatatgacactcgattgtactatctccatattttaatgtatgacgccgttgacttttttttcaacgtttgaccattcatcttattaaaaaaattatgtaattattatttattttattgtgacttgattcatcgtcaaatgttctttaagcataacataaatattttcatattttcacaaaaaaattgaataaaacgaatggtcaaacgttggtcaaaaagtcaatagcatcatacattaaaatacggagggagtaataaattacataggtttccatcaattttgtggaaattctatatatatatcgttgtggtgccagccaagaaaacctcaagttttattaatcctctggcaggctagagaagagctggcccattcaacctagacggcatacgtcttgggccaaatttcttagatcaattttcgcacaatcacgagcgcttacgtccatcatcctggcccaatctcctctacccaaaaagaaataggtgcactattcatccacagtacaaacgttgagtttcaatcacatccatcaactacaatactgggtagtaggcatccctcatcttctagaaccaatgcaaatgtagtcccaacacagtattgagtatggtttttgttgatttaccatccacgtggcagccaagtcactaaataaattaaaaatagacgtaaccccacatataagtgataatggaggacgagggagctcaggtcggcatcgatgatgctccgtcttcgttgcagggagagcagccatgttggaaaatgtgttagagtatatagatatgatcgtattgtatccagtttgttatggtagtataggattagattccatctctatctctttgagtttacttaagatccaatctatttaacctatatataccggcccccgaggctcaatacaacgtgtccaatattcgcagtattcttctctcatctactatccaacaaaagggaaccacgaagtgccactgtcaaggtcccctagcgccatttcctccgtgatctccaacttcttgagtggtgtcggcaaaattttgtggagctccacaagccggtgaccagggagcagcgacggaggagatgcaggtggcggccggcgtcttcacagccggtgagcctgtccatgggagaggaggtgcatgctgaccccacaaaaggaaaggagagagagagagaggagggagggagggagagaaggggcgtgcaaggtgccctggacgccgcgtgaacctcctccccctccattgctccctcattgatgcagccaccggtggagacagacgatgggagagataggggaaggggattagaggaggaagaaaggggatgccaatgagacgtgggtctcacaattttttttctaattgtaagcaccaaatgggcgccatttagaacaacgacaggatcaacatgacacgtaggcaccacatcagccaaaattattgtccaaaacatcgagggattacatttccattggttttataagttgagggtgctctatatccagttttatccagttttgcagttgagtgatgcggttgaaacttgacccctatttaagggaccttaagtgtacctttttcaaataaaaaaaatatggtattagcttttttcttctaggaaaaaatgcgttatattagttaattaaaaaatcaatatatatccatattcctatatttatttattaactagcataatgcacgtgcgttgcaacgaattgtaaataacattcattgacagtcccaatgaaataataagggtttttaatatatatttttttgcatttagataatttcttaaatatgtactttgtaacattaaaattactta

SEQ ID NO: 43403 - DNA, 3489 bp, Oryza sativa
cgcgaaatttttttttttgatgtcggaaggggttttcggacacgaatgaaaaaactaatttcataatttgcctggaaaccgcgagacaatttattaagccaaattattccatcattagcaaatgtaggttactgtagcatttatggctaatcatggactaattaggttcaaaagattcgtcttgtaattttcatgcaaactgtgcaattagttttttaatttatctatatttaatgctccatatatgtgtcaaagattcgatgtgactttttaggaaagagtttttgggaactagattgtagaggaaatttattaatccacgaagaatcacggcgtgacatgcaataccatactcaaatttcgacgtcgtctcaaatttctctgtactaatttcacatgcatttactcacgcttgcccaaaaatgaatggatgtcgatcgagtgcgtgaacgaaaatgcagctgatgagtgctacagggatccaacccgatagagctccaacaccaaactaatcaataattaaattaaacagcagcagcaaccgatcgatcgacaaattaaaacgttgcaaattgcgtgcgtgcgtacgtgagagagcccgcgtgctagcatcgaccatcattgcattcttgtgtaccatcacgaaaaagtagtggttaatcttagagaaaacgaaatggtggccggcactgctacgttgacacacatccgtatcgatctcctacgtatacggcaccacgcatatacgtatataatgataacaaagagaaaaaaacatggttttttttttgaatggttgaaaaaacatggctgttaatataaataatggaaagaaccaacaaattctaaaaagttattcataacttcaaaagagaagtcaatgtttatccctaaactttctctgtaccgttgatgtgggctaaagataagttctttttgggctaaatggttcaatggctgaacagctagctgaacttttttgtgataattagttgagagtaaaataaataatgaattaactattataaagttaaaattgtacccgagatagttttctaataaattttatactaaaaagctttgaaacaaacagtattaccgttttactcatgaacgtatgcatttatccatcaccacaccaaacataatagaaaggataaagaaaacaaactaactcttaattgttctaggcttgtcttgtgagtactcttattcaattctctcacctcctcttcttcaaccccgtggaggcatcgaggtaggaatgagttgcaacaaactaattaattgtttgtttattattgcaggggctattctttgatcatcaaacaatctaaatgtggatttaggactcggaccgcctagactggtccatgacctagaatcaaaagtcgagtatgtagtacatgtaaccatgtaaattcaagcttagttcatagtgcaatgggctggcctgagccttaggccaaggctgggtcccctgaaacagtccaaactcgatcaaagatacatgatcaataacaatcaacattaatataatactcaagcaaggatttcacctctaaattggcaacgtacatctcggaaacagatcctctggaaaactgctgatgcagtagcaaattagcaatggttgaggacccacatgttcgtgtctgctactgcaccagtagtactgcagacaatcctcactagttcacttcacactactaaattgatatagatgcttagagttccacttatattatcatatcttcctatatagttggtacccactaagaagcatttactcctataaagcaagatatgcaagaagccacatcatcaacaattttaagctattggattgcattagtatagagttatcagccgttggatcaagaagctagctactcatccatctaaattaatcattgattatttaattactcatccatttacctccctttagctcataatcatgcgtgacattgttatccattctgcacatccaaatcctcaaagatgataataatctcttttttttttctaaatacaactccaattattacataagatgtgagctttgttttgttataaacaattggataacatacaataattaggtatcattaatccaaactcatttttgaaacatgcttgagatgaagcaaagaagtgctacactacctaattgtgacgatatccaaattgtgcatgaaaattactttcatacatcataacaatattcaatgacgtttcaaaaaataaaacatgaattgtattgtaataacagaagctatatatgaagccatattttcatctattttgtatataccaagagttacatctaatcatttaaaacattgattttattcgatgataaaactagcaaatcccgcggcaagacatggggtgccaactagtttaatagtacttgtgtgtgccgtaaacactagtgaggcagcaataatttgccacatcactggctatgtcattgtgacgcgacgcgaatgacatgatatatagtccttgtcacaatatgatgttcttctacttaatacttatatactccctccgtcccgaaaaaacgaattaggacttgatgtgatatattctagtacaatgaatctgaacagaggtatgtccagatttgtagttgtagtactaggatatgtcacatctagtactaggttggttttttatggaatggagggagtaattgtgtatcactgtaaaactatcacaacaataagaataaagaatatacgtgacttaattaaagacatcctaaaagtaagttttcaaatgatttattttaaaattatatttggaagtttaaataaaactggggaaatgatgtgaccatcaagtatatgcatacaaccaagcatgagaaatataaaacattgccaaagaatacattggatgaatggaggatctacaagatattaaagtccaatgagttttggaatccaattcggtcttcggagacagcactgacttcaaacagacctagcgccttcatgccaactccgatttgggtgatcttggattttgtggaaagcttatctcgctacctttcaaacgcatccggtctcacgtccaaatttatctcaagtcaacgggaatcgccaaaacaagacaatgctgttgctgaaaccgaacttgggccttgggccttgtaatagactaggcccatctcggaagtgtctccctccacctccacgaattagcacttaaccctagctttattttcctctataagggcccctttgaatcgcaggattgagaaaacataggaataggaaaaacgtaggattttgataggaatgtaagtgtaaaacagaggattgcaaaacgcaggaaaaacacaggaatgaccgtttgattgaaccataggaaaaacacaggaattggatgagagagatatactcaaaggaaagttagcaagaggttgaagctcttgctaaatttcctccaaaatctctataggattgtccattacat

SEQ ID NO: 43404 - DNA, 1470 bp, Oryza sativa
gtttcaaagggcttcataggaaattttcctataggattgaaatcctctaaaattcctatatttttcctccaaatcaaaggggccctaaatagctttgttcattctcaaaaacaattgggttttgtttagttgaattttgccaagtgccattcaccttgtctatagttctatcgctcgattagtcggcgactattgattcagagcccccaatagctggtgtgttgatttgccgggtcgattagatctaccacttcaatcgcaactattcctttgtgcttaatcacctattcgcaatatttagattgcatcttatcttgtttttgtagtgttctctcgtttgcattgcaggaatcatcaaccgtgcgtcatggttggtacgacatcgtttgtggtgtagcgattgcacggtgtcctggacttgttctggttggtagccacgtcacaaacgtcgcactcgaccaaagcgagagttatcccctcaccagaagatcgggccacgagagagcgtcatcagaaaaaatggtttataccgatccagcaccatccatatatgcttgcagacttaccaaccaagctactcctacataataacatcgaaaaccaaaaaaaaaaaaagggtcgatcgtctacttgttgatagccgcagcttttagcttgtaaccgttactcagtcatactggtcgctggttgttgctccaccaaaaacgttacagcataaagctgcagatcggaggattttgcctcacgctagaggaggcacctgcaactgcactttgctatacccagctgatcaagtatatacatactgagcatagtagagtgtagtaggaagaaatcctcagcaaataatgcttcagcagtaatgcggcagatatgtggaccccacttgctcaaggggccacatgtcagtgactcctactgcaggagcaacgatggagaggagctggtcaatatgtagggtgtaaactatctaacgttattctaatgttatagtgttaagattgttgttcgatttgtcggttacttgatattggactagccgatacctttgaatgactccgatcggctcaagattcctgcaatgataatagatactgcatataaatagatcccccaattcatagtgtactcctattgctatcttttcttgagcttcactgctgtggtgagaacttttgttgttgtccgccaactcctcactggtctcagtgtctcacctgctgaaagttgaagatgatagcacgggttgttggattatgaattatatatatatgatgcattgtccccatattagcaatttggtgaggtgtataagtgttatttccccaaaaaaaatctctccaattattgagcttaaaaggtttaaataatgaacctacaatgttctaaccaattaccacaaaattagagtatccaatgccaaatacatgtttttaagtgttgccttataaattgcaatgttatgtagca

SEQ ID NO: 43405 - DNA, 2774 bp, Oryza sativa
gcctccggccggtagccggggagaggagagatgaggggaggggagaggaggagaggggaggggaggggaggggagtggccggccatgagaagtggagaggagaggtgaggggaggggtgaagtgtggagacttagaaaaattcctgctatcccaagtctatttatattcaagtctattttcgcaggcgcaccacttaagcggcgccgcttaagtggtctgctttcgcaggcggaccgtaaatttcaccccgatttatatttttgtaagcggtcatttggctctaagggtcatgttcgcctgcaaaaataagaccctcacgtcggaaaaaatgctttttctagtagtgcgattcgctcctcaaccggagcttggcaatgttggcgaggagcagcttgggcactcctcaaacggtggagatgcacgatgccaccgattcaccgtgcaagggatcgtcggcattgagagagatgcgaaaccacctgcctcgtccttgttagccctgctttcgagccccttctccatcctcatcgcaccattctcgttggctgggaagaagaagacgatagctaaaggagaagttaagtataggagcaaatttgaccatacaaaagtacagtacaaaagaaaatgagtccaaataggtatgcgcgtacggtatggcatggaaccaattcatagtgtatacgaatggtatggttacgaatagatgaatagcagtggcatttatgtaaaatggtaccttttgtaatggcatggatcaaactaacccatcttcatctatatatgggacacaggctgaaagttgtgaaaggtcttgaatgaaaatgaagttgatcttaattgtattgggccgtgatttttgtgctgttgggaaggatgcccaacaagaccttgaccggtcagcgtgctgctagattgggctctgacaggtacaaaattataggccttgttagcaaggcctagcccagccttctgctgggcctgggctacctacatatccaaaaatcgattaatatctagacccaacaggtgcaaattaaaaccaaatttttgtatgcattttcttttaagaaaacacaatatagacgtaaggcttaccacacatgcacactcacccatataagtgtgaacacacattccctagccctatgagcacctccgaaagactgtaccatcatatcttaagattgacaaagttatcacaaacgtctcactgttatcgggtaagttgtataccacttatagaacaaatagccgtaaatattaatacccgtgtcaagtttaggacttaactcgggtggaatattggttccactagtttgttatcttggaaaaactattttgatctcgcaagggtgaaggggaagtccctggtttatttgaaaaccacttaaatagttatgaaatgctctcaaaatatttgacaacactcacacaatatatttatcacagtctacaaaattttatatccaaactcaacaaatatattgagatatttaaaaagataaattcaacgtataaatagcatatactgtttattacacaccgaatttgtctctttttttgctctaagatgtaggtcgaatttaatctcgattattttggactcatacatgttaatatactctatacattgtcatttctttatattaaatttttataactatttgaattggatttaggagaaaagggtacagatggaaacatacctcgataaagtagaatccattcccgttctcttgttgtattcacgtacacttaaaaggtacagtaagtgatgacaactaaggtggtgtttgtatccagggacttaactttagtctctgtatttagacactaatttaaagtattaaatatagattacttacaaaactaattacataaatgaaagctaatttgcgagacaaattttttaagcctaattaatctataattagagaatgcttactgtagcatcacataggctaatcatggattaattaagctcaatagattcgtctcgcgaattagtccaagattatgtatgggttttattaatagtctacgtttaatatttataattattatccaaacatccgatgtgatagggacttaaaagttttaaccccgtctaattataccgactaatggtaaccagaagatagatcgatgtatatgagacgtgcttacaacaagaatgactcctgacgcaacaaaaaagaaaagaaaagaacgaaaaaaagaatggtcctgaatatgctgattaagtcaacaagccagtgggagaaccaccaagaccacacccccggtcgtacgcacgccccgctttttgacatatttttggaagattattcgtctggtttaaaataagacaaaacatatacttattgtttattttatcataaatgtactttagatatggattatatttttatattttgtaaaaagttgaataagacatgattaaatacattaaaacattaatggagtcaaaaaaaaaaaaaggaatggaggacttggacacaattagatcaagttttaccgcggaggtgactaccacctctaattttaactagctatgtcatctggtataaattaattaagagataacatgtacctctagcccacaaactccaaaatcttctttaatgggctcactctcacactattttattttttttccactttcttaaagattgtgtagagattactctttgcatgagagatggaattctatgtggcattcctctctcttcagtcttcacttcataactaattctatgggctgcaggaa

SEQ ID NO: 43406 - DNA, 938 bp, Oryza sativa
gcatagcgcccgcacgtgaaaacaaaaaaataccaaaaaaaatttcccaaaaaagacctaagcctcgccgccgcccgagctcaccgcagctgctcccgtcgtcgccgtcaccagccaccaatggatccgctgacggctgacggatctgctgccccacgacctccggccaccgacatcgaagaagaagagggagagagggaggagaggcgacggaatccgggaggtcggagactgagcccgccattgcccgagctcgccacagccgtgccgtcactcccaccgtcaccgtcgcctgaactcgctgccctcgttgctcaccatcattgcctgccgttgccgtagccactcttgagggcggaagatccggccctcccgagggtggcaccgctggatccgccacctgtcgtcgccgcagcctctctctaccgccacccgctcccgatcgtctcctcgtcggtggcggcggcccaccggcgctcactcctgctcaaagaggaagagagagagaggaggagaggagaggaagagagagagggagaggagttgaaaaaaatgaaatggtggtgccgcgtggcgctcactcctgctcggagaggaagagagagagaggagaggagaggagaggaagagagagggagaggagttgaaaattttgaaattgtgggagggaaaagagagtggacgggagaaaaaaaaagggtggctatctggcatgcgcgcgccagctggcaccccctgcttcgtgattctcttttttttcacgattttctccgattttggcgccactctcccatcggcgcgtttttcctttttcactttttttatttgttttttaaaaatcttcagtacacgtgttttcaaatcttttagttaagagataatccatgaaatgccattgacaagcgtctaagtcccagaaatgctatcgacaagtgtga

SEQ ID NO: 43407 - DNA, 1319 bp, Oryza sativa
tatgaggcggccggtgatagcggatccggtagcgaggagccactggagatggggaagacggcggggccaggcggtggtgctgtgtgggggcgactgtgacagaggaggtggggggatcgtgagctttccatggcaacggtgatacgcacaggagggggagggagtgggaacgaggaagcaggagaagctagggttaagtgtgatgcacgaatcttaaaaatactaaatggatccttttcgcggcgccaacatcattggcgccgtggttcaacatgactgagccaaagacattggcatcgttcccctagtctcctggagaagctaagtcacttatatgatggggaatgacgccaatgataggacctatttgtaatttttttctaaaaagaacctatttgtgataaaaaaaacttatttgtaataaaaaatatttacaaataagtcctcgacaccaataatactagtattaaagagcggtttgtaaataatttttattataaataagtcatttttcaaaaaaaaatacgaataagtcctcgatgccaatgtcatcaaaacaggcctaagtagacgggatatatgatccctttgttacttgtatattattatgctactgaataaaatttacatgcgagttctcttttctaaggaatggaactattccatagaacgagaatagttagtccatttgtttgtaccatcgattatttattcaagaaaaaaaaagacccttaagaatagttgattattctaggactagaactaagagttgtttaattgatcttgatcaagaaaaaaaaatagtgatacacgcttcgatgaaaataaaaacatgagaattagcaattatcaggagaaaatagtgcacgaaaagaacaagagatcacgcatttaaagtactaacagaatatataacaaagatccaaagtaatattgttttttgttactatcttactaatactgctatatagtttcacaggataaatttaaaaaggtcgtaaaattatccgagtaattccagtaacatatatacacaccatcactgttgttccaggacggctgcctagctgcaagtttgagtgcatgttaatctgtcatcatctcaattcttaactaatccgtctccttcaaattcacagcccagctttctgctgaacattctgctttcacaactgatgctaatccaggctcaatgttactaccataatccatattgctgaaaatacagttcatgtcaacatgagtgtccatgtcatagagcaggtattgtgcttcatcctcctcatcttcctttgtgtcaaacaaaccactccacattt

SEQ ID NO: 43408 - DNA, 2676 bp, Oryza sativa
ttatgtaacatagattttatttttctctctttttgactggtgttcgcttttccgctgctatgctgataccagtatggtaccagttgcatggtacctggtacctgtgacagctggtacctaatacctgtgacacctgatacttggtacctgtgatacctgacacctggtaccagatacctgtgatacctgatatctgatacctggtacggtggtacccggtgactgtggtacaacatgttgtacactaattaatcacacataaaaattgtcccatgacttcacttttccacggtatcccatggactagctgccctcctttgataatagtactaactagatttttgtacgcagtaaattaaagcttcaccagttagcaaactatttaacataacaagatttacaagtgatgagattggtgtcaatgttcacaaattaaactaaggtactgggcatatagctactccctgcatccttcttctttattgccccttcttctttgcatgttattttggacaatacattgatgtctctccaaagtacatgtttgatttagttatttttaatgatatatatacataaataaaaaaatcaaggagaaattaaaacataactgcatgcaagtatttctcatgataaatctatcaacctgttttttacatttcaaatcttagtagttttctatgtattagtgagttagtaatgttttgagattggactgtaatactctaagcgcccgttcttaagaatcttatcagccaactactagctctaaaaatagacatatatgtcatttattaccaatttaatagtgtatctatacagtagttatatattgctagcaccattaatacctagcttacctcttgtatgcacacaatgtttttaaagcccatgatgtagctagctacaattttctttaaaggagaagctacaatttttgtagcacacttttcttctcccccatctcctctctccttcatttaaccataaatccctaataatttttaaaactgattatatcacttattgtacttgctccaagactagtctaggatgtctacctatttgacgatgaatggggcaaacatcaatctttgtttcatggtgactacagggagtgaacacaaagatgcggaggatatatacaacctgtagctagctaggtcaatatgtgatgtatttacctgcaggctgctctcatgcatgcatggtcaaccatatgaagcggtaaggtaaattaaagtcaaactgagcatgtgcatgcatcactgtatgggccatgggggacaaaccacaaatctacaatctaggaaggtatatatatatatatatatatatatatatatatatatatatatatatatatatgtttgtgtgaatttgatggctacatgatcatctttttgtggtaaaaaacattttttttccattgtcaactaaattaattaaaaacctctcgtctgggatgtgaaaatatggagattctcttatcttttttttaaagaaaaggaacatatagagattatttttgcaaggaaacatatagaggttctagtatatactggcatgatatttttattttacagtaaatttcacaaaactacatgtattttgatcaacctatcataaaactatagatttaaaattgtgtatcacaaaattacagatttaacaccatgtttatagatttaagatatcgtatcagaaaactatagatttaacatcaatttttatcataaaactacaacttgtgtaatctcaatataatactatggatataaactctaaattatgtagttatttgataacttcatcactaaatctgtagtttgtgatatgattccttaaatttataattttatgataaatttagcgctaaatttgtagttctgtgattcatatattttaatatgtagttttgtgatagtttggttaaagtatcgtacggttctatgaaatttaatgtacattttattttctttcacaacctaattaacctatatatatatgttgcttaatttacttcttaatttggtacatttagcttccctactgcctagctagatattaggtcgagccaacatacatgcatgagagattcagggataaacaggcataatttttttttaagaactacaaacatagctaagagcatgtgttgcattggtctaccacagacatgtctatatatcttttttatctgaaattaatccgcctcttcatattaaaaaaatgtattcagctatacacgtgtgtttatgcataaatatctactcctgtattaagctatgattgggtcagaaaggtgcactaatgatgcacctctagatttgccaaatggattggtgctgctcaagtagattctaggctggtaggtaggtcttctagaaaaccaataggacatgcatagacatcatcacaggaagacacaccaaattttatagaagaggtaattgacacctttaattttatccatataagctaagaggtagtgtgtacaatatatcacttctacactaactctagcaaactattcctaatattttcattttatttgtatgtccaatccactttttattttctatcctttttttggagtttgcgtaaagattgctccttacatgaggggtggctcctactctctctcttttttttttctcttctccacctcaccat

SEQ ID NO: 43409 - DNA, 1059 bp, Oryza sativa
catctatcaacttgaacaaatttgttccataacttaatctgcagaaaatagaattaatatatgtcgaacgttgctagcaggttgatgggctttacacgcgcctgacatgctaggtcgagggtttgcataacagtatgtgaggggttagctctgcttagcagtatcatggttaaccagaaaaccaagtggttactaataaaaaaaataggaggtttagaaaacgaataaaaggttggcacacaagttatcacggtaatcgagaggtaagtgagtcatatacgaaccctggctcgagttctctcacgaggaggatgatgatggagaacgaagaggccaatggataataactgcataaagttcactatatcgatatccctttcaattcgcccactagatagattatgttatactctatccatatcattttgatcatcctataaaatttttgtgatcttcccaaaataatcatcatctaacaagtgttttttttcgtttatttatgtaaagagtaaatacatcatcattaaatgtgttattgcttcgcgcaaccaaccaagattaatttctattggtgcaatgacattcaatatttcaaacatgaataatccatggagcacattaatcaatgagaattaatttaagaatgataaatatttttgtgttcttggtctttatgctttttcttaggggaggatcaaattgggatgaagggagtaatgtctatgaaacggatctaagaagaaaacaattatacttgcttatgtttggtcaaaatcatttgtactgctattcagctgcacgtatatagtggaaagcgtcgtctctttccttgtcatatcataactgcagggagtatatatatgtgaacataaagatgccaaggatatatgggattggagaaaaaagtgtttcatctgattgtagtttcaatgaagttgagaaaattaaccctgctagttaataggtcatcaacatgtgctgaatttacctgcaggttgcaagtgagcacccatggtcaaccaatgaagaagtaaaagtcaaactgatcgtcactgtgga

SEQ ID NO: 43410 - DNA, 654 bp, Oryza sativa
caaagatggaccaaaggagggatgtaaattgagatctttggcacaacttagacttcaacactcaaagaacgaaattttcgcaattaggattttcagtaaattagcttttaacgtctcgcgaaaagcggggcgttacagcaaggaagtgcacaagaagaggggtttccaagacgacggcagcgggagctggctgaggaactgcagcggcgtcaccatatccccagtgccggctgcagggcggcgtcgtcatgacgactgacgaggaggagcccgcagctgctggcgctcgggcggcgaagctcgagacacccgcaactgccagtgcatggctcgtcgagacggcggagggggcgagtggaggggcctgtagagcgagtcgatgacggcggcagacagagctcggggcgcgacgacgatgggtggaggcgaagctcgggcggcggaggagggtaattcatccagggcgcgacggcttcggcggcaggcagagctcgaggcgcgacggcgatgggtagaggcggagctcgggcagtggagccccgcctctgccccagtcgctcgctacccgggcgagccgcaccttcgcaaccggccgccctgtccacctccgctaccgtcacccgccacccggtctgcctctgccgccgccaccag

SEQ ID NO: 43411 - DNA, 8550 bp, Oryza sativa
  unsure (1)..(8550): unsure at all n locations
tcctgcaccctttgaaggcaagtcgcggacacggtggtcgtcggggcaggcgacgaccgagggtggcgatggcggcgcccaggcggtcggccacgcgcacgggcgcgcgggaatcgaaggcggcggctggaattttgggcggcgtcggcgggaagcgacgccgagagaaagagagagaaaagagagagagagagagagagagagagagagagagagagggcgctctctgagggagtcacgtgcggcgcacgtgcgatggagaggctggcgaaagaagaggatgggccgaggatggtttcggcccgagcgagttggagggaggcaaaatagacttttactggaaggtttgatttggagagaaatttgatgtggagattgaatttgaattcaatttgtatatttgtacacgagggttcaaggtggatccccagggaggggtcaaggaagggcttcaaaagcgggaattttggtatttttgggatagatttatatttggcggcacgaaggattatttcagaggatttcaaaaagggaagatcattattcaaaaatggaacaagggagatagcggtagaatgccatagatagatagacagaaagataggttgataggtagagggacggatagacagatggataggtcgagactcagagagagatgggatggaagagaaggaagaggtggaccggaaaaaggatgaaggaatccaacctatgagggaggttaaatagactttcacagagagatttaattgggaggttttagagttggggtctggatttgaatttcgaggttgatactcggtctcgggagaataggaaggagtcaaggaagggaacaatattcggagacgagtcaaagtgagatggataatttagagaaagagagtgtaacttgggagtttgagtttgactactcaacgagatatgtgggtaaggattttggagggaagtctgaatagaagggttcggacttcgagattatttcggaacggaaatcattttggggagaactcaaggcgaaagggattgaatcttggggtttagagttcaagggtggaagtgatctcgatttgcatattcagacttgggtcagaagttcgagaaagaaaacaagggtagattgacgaaccaatacagagagaaagatagatgaatcaaaacctgagaggttgaattcgaatttgagaatcggtttgaaggaaccaaggagagagtttatgacgcgaaggtgaatccttggacggagttagggtccgggcattcgacaaagttcacggatggggttccaggaggggattccgaatagaaggaatcgagcttcgggactatattgggatggaaactttgaggagacgatctttgatagcacaaagatggaccaaaggagggatgtaaattgagatctttggcacaacttagacttcaacactcaaagaacgaaattttcgcaattaggattttcagtaaattagcttttaacgtctcgcgaaaagcggggcgttacagcaaggaagtgcacaagaagaggggtttccaagacgacggcagcgggagctggctgaggaactgcagcggcgtcaccatatccccagtgccggctgcagggcggcgtcgtcatgacgactgacgaggaggagcccgcagctgctggcgctcgggcggcgaagctcgagaccacccgcaactgccagtnngcatggctttcgtctgagacggcgagaggcgggcgagtggaggggcctctgtagagcgagtcgaaatgacggctggcagacccagaggctcgggggcgtcgacgacgatnnggtgtggagtgcgaaggctcgtggcggcggaggagaggtaatnntcatccagaggcgcgacggctnntcggcggctagnagcagagggctcgaagggcgtcgacgcgcgatgggtagaggcgagagctcgggcagtggagccccgcctctgccccagtcgctcgctacccgggcgagccgcaccttcgcaaccggccgccctgtccacctccgctaccgtcacccgccacccggtctgcctctgccgccgccaccagccgctcgggcgactccgcctccatcgccacagccggccgcccgagtgcttgcgagagagagagattggggaggaatcggagttcatcgtctttgaccggtgcagtgcggatgttccccgccgcgcacgctcgcctcgatgttccccgccgccgcgctcgtctcgcccgtccccgccgctctcgccttgcccacccagccgtgcccgcctccgcatgccgccgtccaccacccatccttgtgcgcccacgccgcagcctcccgcacgccgccgtccgccttccatccctgcgaggagcgaggtccacctccgccgtcggccgccggtcgcccgagagagagaggaagaaagagagagagggagagagatatttggcgatgacaggtgggcccgaacgttttttattttttatttgctgactggattgccatgttggcgccatgtgtgcaagcttaagtcnnaaaaccacnntcagaanntagtgctnnccagggggtaacttgtccggtatgaatacttgaaggtgtaaaatgtccggttttgttgttcgggggaggggtaatcaatcgacattatagttcagtggggtaattcgtacttttcactttcctatatataaacatcaaccaattaatatatatgttttccaaaattattaaacgtgcatgaatgaatactatactatatatatgttgccatgttgggcacaaaaattacttgcataaatgtacaattaagcacaccacttatatttctaacctaaaaaaaaagtctatgtaggtagcatgcagagaagtacgtgtagtaggtaaggtggtcttgatgaggtcgctgcgccaccaaaatccaaaatccaacaaaatagccagagcgcggtaggtatatgttgttgtatgtagcagaacacgtctgtatgaataatcttcattgatttttcttttattattacagcacacacatgaataaataaatgcatctcaggacggacacatgcttaaagagacggagagacaagcagcaaatccttattagcctcttttaactaacgctgaatggattttaagtcataattaatactccatccgttttatattataagtcatttgttttttttttaattcaaaccttgttaagtttgatcaagtttatagaaaaatttaacaacatctaaagtatgaatttagtttcattaaatttaacatattgaatatagtttgataatatgtttgttttgtgttgaaactactattatatttttctatatatttgatcaaacttaaaaaaaattgactaggaaaaaaatcaaacgacttataatatgaaacgaagagagtagagctttgcaattatcaaatatatataataaaagtttaattatatgaaagaagtatatatcttgagatataaaaattttcagtaatactgttttgcatgtcgaaagcaaataaatatcaatattctgattacatgactagttttaacagtaatatatatatataggtcgttcgaatacatgaatatctaatgtgcatataatatacttttaatagaaaaaacgattaagtacctctaaaaaaatgcagaatatgggcaattgaaccatattttaaaacacgttttttcactgcgaagccatatatcttcataggtagtcggtcgtattttcaattgcgattgctcgcctgcatagttgtaaggggagggggtcatcttaaagggttcgtctgagaaaattaattttcacgagttgtgaaaaccattggctttttgaccgcctgaaaaaggctttgtctaagtagtgccatgcaaatgtgcaataatgcaagtactataccaaattgaattgatcaaatcaacaaatatacacaagatatatatacttgaagtcgatcgattggtcaatgcatgcatcatattgatacaacaggaccgccaaaaatgatcgatgaggtaacacgtagtacgtgaagaattcttgagtcgacggcttatgtatatatgtaatttggtgcatatgccaaatttttaacagtggtactaccattaattctatctgtagttgctgtcagatcagaatggaatttttccccatgcagggatcttttgaattcttcaagctctatcgatcatcatgcatcttttgtccaaattaaacgggccagatttcaggagtggacaatagagttttgtactggcttggaacctttgagtttgtcaaaccgaaggtttcaaatctgaagaataattggcaacgatctgcctgcatggggccaaaacaatccaagaaaatgaacagatgtaagaaaatgaacagatcgtgagacctaagctagcgtaattaagcattgactggtaaaagaaacgttctacagatgtaatgctttctccttaatgcagtcaaggtagtatttgtcttgcatggaagcatgctggattgctgattaatctaactggtcagaagtgtactatagctctcttttggtcagtaggtacagtagctagctagccgatatatgcatgtgttaattctaattccgtcaagaaatgatcaaactttcctgctatctatcccttatccattcctagctactcggtctttatatgttttattttcaagaaaagacactatttggcaattggcaccaagctatggcatcttttcttagcaagagggtcatagacagctagagttatacctaattatgataatatgattgcaccttaatttctgtaaaagatgtatgaaagtagaaacgataattgtcataactaattatgatgtcagttcttttctagatattaactgaacaacaaatatgtaaatagaagcaactttctttcttctttttttttacaaaaatgaactgcggcaactgcctgatggagtgtaataaacagttcccacatatgatatcttccacagataatttaactttaacctttggaactacacataagagtgacagcactatgacgaagattactctcaaagacaggagtatactacaggagacaatcatggtgacatctctgtaatgcgtgtagcaccagtttcaaagagaagaggttgaaatccatggcactggaagaagaaattgctagcatatctagataggttgggcatgcatgcgtgatgcgtccaatatatgtcaccaagctagatcatgtcaagaattcatggtcaactatatatgctttaattattactattgtagctaattatatcattcaaattttatttcataatataactatttttttacctacatactcatctcaactaatcacaaccatccttcgtacgtatttaatttcaccatattctttaacgaaaaaatacgcgtccctattttaaaatataagacatatttttttgaggataatattttcaccaacaattagtcttttgtcacataaaattgaatttattatgttcatatttaaattacttatgacaacattttcttatcacatataactgataccataatagagaaattatatcataatagggtacttgtgctaatcgaaaattttgttataataaaataacatatatcttatattttaaaatgttggaagtataaagctagctaacgggacagatgtacgtagtaacacgtgctccctccgttctaacatactccctccgttcctaaatacagggcgtaacatcttttcaactggattccataatacaaggcggcagcttctcggtgcatgcaggaattgatgagtaatcctcggctcctgtactggtgcatgcagaattaactgatgactcggtttggcttttaaatgcatctgcatgcatgctagctattcgcgcggaaagtgcaggtcgagtgcacgctgcatgcatggtggttaatgctagcgtatctaccacgcaacaaccgaaacgttgctcttcgaacggagagaattaatcagcataactactatttaaacggttttattggtctttgcaactacaacagccacgccctatattaaggaacggagggagtacgtaatacatatattagtactataaattcagttagatgagattatttcggattcatattattagaatctgttatatttaatttaatattataaattactatattctgaaacagagacgataaccagtttcaaagagcatcaccatggagagtagcagagctttgctcaggtgccattgactggtcaagacataaaggaagctgctaaactagctacaggagaatctatgcgggcatcggcatgtgtgtagacggtacgtcccccgttccaaaatataagaatataggactagataaagacatttctagtaataaaaatttgaacaaacattcagttctagatacttatattttaggatgaagagagtactccctccgtcctataaaaaatcaacttagtattggatatgatatatcttagtactatgaatttggacatatcagtgctagattcgttttttttgaggtagagggcgttggaaaaaaaagagatccacatatgaaaccgtgcagcagagagtggggtcacgcatgtccttaattagttggaacttatttgtagtgctactgtattagtaatagtatattacgatatatggtcaattaggaagaaaaaagtgaggaaattttaatgagaaggaaaaggatgtgtcctcaacaatgaaaaggaaacagttcatttactatcattcacggtttatataactttgtaccttcttgaaatgacagtgcgatttcctgaccttttctccatgaatattaatgtgtgcatgtctattactatgcttagctagtttacagtgttttgtacacgatgatctcgtaataagctagcttgtttgttcgatttaaatggagcattgagcaaacctagctagtagaagaaaataaaccttgtctatatatgcggcccgtttaatttatgaatgttaccttttgttctttagaatctagttaaacagggaaaactttactaattacagcaagatttttctattgaattaaagccagaccaatttttttaaacttactctctgcaacgaccaaaatttgaagagaaatttaacggtagactagggttgatgactatactttctttttctatttttaatgtacattaggatgattatatgggccgtacgtcgtcgtccaatcaatacattattttcaatgcaaaaattaattctgattattaagcttgcatataatatattatctattcatcgtgttctagtacataccatgtacatgtcttccatataaatgtactagttgaacttaattaattaaaataagttgcaaattaattatttaaccgatatcgattttcttctgcccacgctttgcttacgactcttgcacggcagcaaagtaaagtttttcttgtgttattcattcgtatgtcagcatagcgtaagtgctaagtcccagtagatcgatccatgcgattatacatgcaacaatagaccgtcgtgtacgtcgtactactagctatatactatatattttgacagcaacttaattttatatatatatatatatatatatatatatatatatatatataggacactcatatggggcaccatggtgcccgggcaccatggtatgaaatacacaaattcgtccaaatttttcaaaattttcaaattgtgagtatatacctagttataagtattcgattcatacctatacctagcaacaaaacaactcaaatttaactttatttcacaatccattattacatacctaactaattatatgtttggatgctatatacctagaatcaaaatctaacaaaagcaagtttgaattcagttcaaacttgctttgaactagttagtaaagtagttaacgttaatacctaaatatttgaaaaagtttcatactcatttgaattgggtatatagtaaatttcaatcatggtgccgggcaccatggagcaccaaacaaatttactatatatatatatatatatatatatatatatatatatatatatatatatatatatatatatatatatatgtttggatgctatatacctagaatcaaaatctaacaaaagcaagtttgaattcagttcaaacttgctttgaactagttagtaaagtagttaacgttaatacctaaatatttgaaaaagtttcatactcatttgaattgggtatatagtaaatttcaatcatggtgccgggcaccatggagcaccaaacaaatttactatatatatatatatatatatatatatatatatatatatatatatatatatatatatatatatcgcgatctcacgaatcttttgttgagtctagctagtgatcaaatgttacagtagtaaagcatagcacatgcagtagaaaaaatggtcacctttacgtagtaaacccatcgttttagtcttcgaatgtacaaagagatgatctgctaaattacgtcagccaggcgtattaattgcgtctagcatgcgtac

SEQ ID NO: 43412 - DNA, 858 bp, Oryza sativa
aacaacgtcttggcgacgagggggggaggtggctgtggcgctccaacccatctccctcccttcctcctagatccatccgccggcggcgggtatgagtggtggcgacgatttttttttgtgcgcttaaattattttcgcaggcgggccgctaggctgcctgtaaaaatcatctattttcgtaggtctttgtttacatgtggccctttccccggtctgagaaaactatttttggccgcttaggaaaacgattttcctattagtgtgcttcagcatgagcttgtgcaaaggtctggtttcccgtgaaattggagaagtgcagaaaggaatcaaagtctgaatgctatttaccaaatcctttgttccaaacgtttgaacagttattgcaaaaaaaaaaaagttgaacagtgaaaattttccttactaagttgaatcccttgaaatttctttggaatttcgtcaaatccaaacatggcctaattattaaaaggcagccaaggaatgcgaaacgtttgtatcacattgatgaagtttttttttaataaaattagtgcaaaatgatttgattttcactaaactttttttgttaattttttgggacattttgtcatattcattgttatagctgtgttcacaagtttactttctcatttataaacttaattctgcattattgtagaaaggctagattgattttcatatttaagaaaggttaggggcaatacatattgattttcatatttaaccagacacatatgtatatgtactattaactactagctagctttcatgtgatgcaatatatatgtccccctattatcttataattaactatatacaggtcctttcgtgatcatgggg

SEQ ID NO: 43413 - DNA, 618 bp, Oryza sativa
attcctgcagcccgtccccgtccttttgctgtcgtcgccggcgtcatcctctcgggcccggcgccccatgccgcatgcatccaaaaccatgaggtgcggctcgttctcatccctttcctcccaaaacggaaggagcaaagctccctttcctcctcctcctcctttcgctttttcccctcccaggtagcgagctccctacctccactccttggcttcttgttcaaaaggcagagccgctgacgccgctgcagcgcctcgccgccctccaccttgaccgcacccgctcaccccgcgccaatcctcccgtgctcgcggttcgatttccaccacacgatccaccgcctccaccaccctttgcatcctcgccgtcgctcgttctcgcggcggccatgaacaccagccgagcgccaagaaaaccgcggccacctcgaaccgacctcgccgctcccactccgtctctataaaacccaccccctgtgcttcctccctcccttgcttcattccccccccaagcggcggagccctgccgccatgggaactcctcgccgtcgcgtcgagctccatgtccggcgacatctcgtcgtcgcacggtccgtcctctgccgccttctccctcaa

SEQ ID NO: 43414 - DNA, 736 bp, Oryza sativa
tgcacccctcttatttcgtgagttaataaatctttttcccttgatcccataaatcaattctctattccgaaatttcatgaatcattttccttataaatcatttcctttggtcccgcacgtcagagacggtcaataatattcttgagaatattatttctataaatttcatgaatcaatctcccctggttccacaaatatcttccttcgccagaaattccaattaaacttccaaaattcgtatctctcgatccaatcgtccgattgaccccgttccacttccagtatttccataaaatcgagatctatttaatggcactattatttagtctaaatagggtctttttcttggtctcttgtttaggtttttgtttgtttgcgcatagttgcggttaccggattttcgtcgatcgtggatttctcgaagattcgtgaagctcagtgaagaccttgagcaaggcaagccacctttgaacatattgagcctatatttgaacttaattaatttgcttgcaaaatattatgcattgataggattgcacttaatctgtttgccccgtctgcaaggcagaccggtgggcctacccaacttgttgcactgatccttccattgttaattgttatatcatgttcccttgtaaccatctagttgcgcctcgatattcatgcactctgtgcgagtatcgacggtcgccttcaaacttaaaatctgagtaacttcttgggtaaaacttggttt

SEQ ID NO: 43415 - DNA, 717 bp, Oryza sativa
attcctgcagcccttcgttctccatctgtgtagacaatatcacgattagcatcaacataaacaattaattatttgagcaaataaaaggatttcagagaaggtggtaggtccatccaagtaaatcatcttgttaagccttaataagtcgatcgattcatttctctgcacatatattaacctgcacaaaattgtttcagaaattaattaatttttttgacgggagaaattaattaattaattaatttaagcctgctgaaaacagaatagaggctaaaatgagagaggacgatgggattgggctctctttttcttttgaggacgcacgtgcggcccaataaattaatcaggccgggcttgcgcatgggctgggctcgccgataatattaggcccgttcaacgaacgaccatgcgtcccaatacacctgaatatatactggcgcctcaaactctttgataacagaaaatctagataacggcatcccgtaggaacgagatgacttaaaaggtctacattatttccatcaaaacaattgtacacgcatgcggcacgatttcttactaagtggcaggtctatactccacaacacatccacgtgtatgtgtccttcctacagcacgaggcctctaaatacactggttgggcacttgggccatgtgaatcaatttgggcatgcacctctgtaggcttgacttacatcttctatataccatggtcat

SEQ ID NO: 43416 - DNA, 572 bp, Oryza sativa
ttctttacgttaaaataataaatatgagagtgttaaaaactttgagttgaaggttttaaaatgagttgaaagtttcaggtttgagctaaaagattaaaaattgaattgaaagttttaaaaattgagtttagtgaaagtttactatactttttaaattttgaaataaatctctgttgaaaaagtatctatttcaattttttaatcaaatttaaacagcactaaaaaaagatgtgcatgtgtgctatcagcacaactgcgcgaaatagctccactatgtatctatctaattaagggcatgtttggtgaagtttcaactcctaaatttaactctatgagttaggtctagagcggagttgtggagctaactaaaccttacccagctccacctttctaattcattttatgagatcactccatttagttccactcccatttttagtggagttgaaaccgtttagttgggctccaactcaacgaaaggtggagttgggctagagatatgccaaacatgccctaagtagatttcttctcaaaaaaaaaagagaaaataaagtaggttctattgatgggcc

SEQ ID NO: 43417 - DNA, 1963 bp, Oryza sativa
atgttgagcaaagccaagagaagccaatgcaatgcaatgcaagagcaacacttcttgctagttcaattagccttgttaattaaatttttttgggggtattgtttttatttttgtattgtttgtttttttttttggattgatctatcaagattcaagaaccatttgtcttgttgagacgggtgtttgatgatgattagtagtgggtccaaattaggagggccaagaaaaaaggagtttgagagagaaggggaggatttgtacagttgatcatcttgatttatgctgttgcactgttaattaattctagtttatttttcattctttccatgtgtgttctactagtactagtgtatatctctctctctctcttaattttattttttcagtgtgcctgtggctgtgtttatgtttagatccaaaatttggatccaaactttggtcctttttcatcacatcaacctatcatacacacacaacttttcagtcatatcatctccaatttcaattaaaatctaaactaaactttacgctgaactaaacacaaccgtgttgctctacatggcaatgatcttgtgcttatcaccttgggatctactactcctttgtcttgtgatgtcactgtttagtattactactcctatcttgtatggcagcaaacattatcagcaatttccattcttttctgtggttactgaaacaatatttgcatgtactactatctcaatatctttgtttaattgtagttcacctggtggatttttatcccagctactataacatttttttagggtttgttcactttgtagccaaatcaaccttgtcaaattttgatagcgttgaatgtatttagtttgacgcctttgtaaaatttgatagcacttttatgagagaaaagttccggaactatggcattgctaagatcatatttagtttatttgcatgctgaaaaggataataaagtgaataagcttttaaaaatattaccaaagggtgttttacaagacttgattaccttgtttggtgcgccggaatttcacaaaaactataaattccgagatatgaacaaagagagaacattgtggataatgtcccccttgtcctagcacctctgttagtagaatgagatgagctaatttagggcttttatgggttggccaaatagaaatgattcattttgctattcctattcatgcattggagatgatggatctctttcacacaagtagacacactcccaaagtttttcagggcttggtcatcacatctctacttgaatcatgaatggcaaaccccacacacaagatattactaaaaaggataccaaattaatcaaaataaaaaaagggtggaaaagcaagcaaacctaatgaagagatcagcaaagcatgtcagtgaagataattcggtggtgatgcaatggtacagagacaaaagagcttttaaaaaatgggtgagaaaatcagaaaattatttatagtactaggactagtataatgtactccctcactcctctaatataagggattttgatattttgcttgctgtttgaccactcgttttatttaaaaatttatataaatataaaaataaaaagttgtgtttaaagtactttggataataagtcacaaataataattctaaaatttttttgaacaagacaatggcaaaacaatataagcaaaatatcaaaatcacacttattaagagatggagggtgtactgtactatttcattagagagagagatggcgttttcacgggtgattggattaattaacagaggaaagggcgtcgttatctggaatgggtggtaacacaagttggtttatccctttaattattgcctgtcgcgtcagctttcagtttgctgctgctctgctctctctgttgctgctactgtgctatactgctgccgcgtggatctcgaggcatatccaatggcgtagcctgtttgttggcccaga

SEQ ID NO: 43418 - DNA, 583 bp, Oryza sativa
agggtgtaaagttttttttttcatatcacatcagttattatatagggtgtcgtatggtgtgtttgggcattaataaaaaagctaattacagaattcgtcagtaaacagcgagaagaatttattaagcttaagtaatctgtcattagcaaatatttactatagcaacacattgtcaaatattatggagcaattaggtttaaaagattcgtctcgcaaattagtcgtaatatgtgcaattggttatttttttagcctatatttaatacttcatacaggtattcaaacgttcgatgtgacatgatttaaaatttttgtgtgaaaacttaacaaagaccttcattctggtccaggaggcgacaggaaagagtgtatattacgaaaaaaaaattttgtaaaaaattataaatcttacgatactaaactatacggatttataaaaattgatggtcaaatatagatatatttaagttaaaacaaaccgataacaaaactattttaaaatcaagggagtacatatcataataatctccataaatgctgaaaaatgtacataattaaattactagcgatttggttcagagaa

SEQ ID NO: 43419 - DNA, 1083 bp, Oryza sativa
ccaacaagttcctcttatttctctgcagctacctgagctcatcaccacaagaaaccggatggcaagctgccggcggcgagcgcccatcgcctcgcccgtccccccgcgccactgcccacggcgcgtccccgcgcaccgccgcccaccgcccgtccgcagccgcgtgcatgggagagagagagagcgcgcgaccgaggagagggagaccgggaaggaagagagatgaaatgtgggcccaagaagtctttttctgactagattgccgcgttggcgccacgtgtacaagctcaagtcaaaaccgctcaaaatagtatcgatgggggtaattcatccggtattaaaagtttagggtgcgttatgtctggtttcgggttcagaaggtaattcagccaaccgtgatagttcagggtaatccatactttttccttgtatttatgtataaacttagtcttgaagtaattttacttttatcataatctggtggtagtagatattgctgcattttgtgagtggtgacatctgcatttgactgcatgttgaacgaattgtgttgttgctgtgcagaatgtgatgtgaagcacgtaggtgcgtgaactgtcaaaggtgtaacttaattcgtcaaatttgattgctgattttgaattgacaatggtagttcgtgtttttctttaaggtgatggaataaatggtttacgtctctgacatataccgacaggcacatatccaataagttttgttgttggaagaaaaaaaaggcaacacagggtgatgccgatttggatcaaataaactacggagttgctagaaatatggcgccatatgctacagtcgattttttttcagccacttacacagtagttacacctcatttacaacccacttacatatgtaattagtatgtaattttcgaatttacatatgtaattttagtacttacatatgtaattttgagacttacattgtaaatacactaaaattacatatgtaatttagggacttacaatgtaaatacataccgactattctttgatgaaaaatatggcgccataaatatagctacacccatcaaacggttctcattgt

SEQ ID NO: 43420 - DNA, 1860 bp, Oryza sativa
cctaggcataggttccatgttattgtaaatgattctagctacattatgatattttatattatataatagaaatataaaatatgttttgatagttaattagaatttgactatgggtcgttttagtttccaggatcttttgttatattaaattgcaggtatatatatttttgggtaaaaaacactaatgagaactagatgataaattcctacaattaataacactgaaatcttgtgatatccagtttcttttctttcataattatgataagaagaaagatgaacacactaccagaaactagattacttaaattatgacggccaaaaaccgtcaggataaaaaaaacacgtcaggaaagttgtacatgacgtgtcaatgtcagaaaaataaattccgccaggactagcttgtcagagaaaaattccgtcaggatagaaaaaacccaatatagttttttttaacctttaactggaaaggaccaaggaggcatatacatctcaataattaatgggaatggaatgggagaaaaccatttttttatttccctatgctgttcttttgtcattgcttgcagactggatgtgcattgcatcggaaaattaaagaagaacattctcatttattttaaagcctctaaaaccgtgtaagatcaagtttaataagaatggtactccctccatccaagaaaaactcaagttaggaggggttataggttagttttttttggacggatggagtagttgctatctgtaattttgttcattttgctagtcattaattaagagtctagatatgcgacaccctacactatccctaatacacttattccaatactaagaatttattttacttgttttctctccttttctcttggagctcgatcatgtgcaagctgcctcttctatgaggggcatcatatatacccggtctctctcctctctttcgtcttgacactattatgtacttgctctaatcatcaagccctttttcatcattttctacatatggcgccactgaatttctgcatatagtgcctttctaaataacaggtgaacttataggcctcacactgttttttgtaaaaaaaattgctacgtgacacttaaaatatatgatctttgctgctagacatctgaaaaaactaatacggctcgtggacacattagaaactgataatttgttaagggacactgttgtgattattttattattttcagaacaaattgagagagaaatagcattgaaaagacgagtttttgcccctctcctcctctctgtatctcccgaagttgatcagcagttcagcaccagcccatcgcgtctgtgcatgagaaatttttcatgtgcggctgtgaaccggtggttctcaaaccataggaacttgaataatttttccataaaatttctttgttaaccatttaatttgctgttcttcctctaaacacagaacccccacatgttcttcttaccatgcatggatgagttgatgtttaaaggaaaatgcctaaaatggagatagcaagtatatattgagtgacaaataatcaagtgatagactgatgagcagttaaagccacatttattaagtggaaaaataataactgggtcgtcgtgcacagcgccgcacatacgtgtcggtctcgccctgcgcgcccgtgctcgtgctcatggccctggacaccattgggacacggttcacgttgcgttcgcggagacgcaccggtcgctcgacccggtggcgctgcactgcaggaccctgtggcggcgctgaacgtggtcgcggccgacgcgcgtcaggctgatcgtggcaaggttgacctaggagctagaggctgcacttggcaacaacatcgaggaagccg

SEQ ID NO: 43421 - DNA, 1928 bp, Oryza sativa
gatcagtatcaccggtcacaaacatggtgggacagtgatcaaattcagctacaatgcagtgtctcttgcacaagacatggagctaccatttgcagcatacggaacgtctcctctcaagccggcgaagctatttgtcccagctgattatcctcgaagctccccggtgtacgaagatggtgatgaacagcaccagggaatgtacagcgtgatttcaggcatggttgacaaggtgttccagcgtgccctgcgtaaactcccggtgccaatgtcgatcagggacatggcccggcagtggggcatctccgtgcgaacggtcaccaacggtggaggaacgttcagctccgggtatggccagtgggagagttgcaccgatgagtttgcaagtccatagtccatggatagacccatgaagttttgcaggaacaagtgatatgaagaataatgctgatctgctgttttgctgtagggcagatgcagaatccagtgtgagtgttgtgagagaatatttatatttttgttatgcattaagaggctgtgtggatcatctgtttttgattaaaccggttttgcttaaaaaatatttcttactacggttgtgaattgtgatatttatctgtttggactgtgtaattggaatgagcgaatttgctagtaaaacatgttttctgaaaactggttcgtatcttttaagatccaaacaaccacttagagtttttattggcaaatactttggtcgttaatcttgcacgtgcaggcttatgcaattattgtgcaacagttcatttcatacttcatactccgggcaagtagtatgaactgaaatgttgcaacgggcttatgcaagtagtatatatatgttcgtctgaaaatttttcacaggaattgaactgttttagttcgatgcaacaagatggaagtctgcaatgcatccgggtctgacattttatttgccacattctgcttgacacatggagttcctcatacagatgttcttcggctgcgtctgacaaagtttagcaaactgaaaagtgaacttatgcctatttagaagcgcacatatctcaaacaaattttgtgggcctcatcgtttgccctatatagaatcaactactactgccaaagtttaatttttaaaacttaattttgaagctttttcattgaaatttttagaattaccttttaagtcgttaaaaacatagagtatataaaagtttttacctataatttttagtccctccggacaacattattttttgtgaacaggctgtacggcgtattctcagtatatagtttttaagcagaagtttcagtctgatttctccatgaacctgcaagaaagaaaaatgcggaagtactgtccttaaccatggaatcctttcagaaataactggcaacagggatcaacttgcatagatttacgttaacaaaactaatatgaaaaatgcataattcttctatttccaagaggtaaagtgtttcattttaattttcatgtgtgatcgatcgaaaaaaaaaaagaagcttgtgttatgttggtggagccaggacctggccaccatggcagttgcccgggctccaccgtccatgcagcagtagattaggatttaattactgtgattactgaccttgcagccacatggagtacataaatacaatgcttaagcaaaggcaaagtgctataatcattgtgtattttggtgaaacataattgaatcatatggtaaaacattttggtgtagcgtttgaaacgtcaagtttcaattgttgaaacatccacgcagggacagatccagaacaaaaaatggggggagggggctcaattacacggtttctttaacctccagttatataggaacctttagtttattattcatggtgaaaaaactaaaggggtactccgggggtatccatagatcttgtgggtgtag

SEQ ID NO: 43422 - DNA, 637 bp, Oryza sativa
cctcccgaagttgggccttaatgcgtgcagctttctgtgccttggaaagcttgtgcttcttgtactgccacgcgtattggaaaaacccaaacttccatggaacattggagccaatgcccttagtttgtccacggtgttcttcatttccaacgctttcgtgcggatgtcatcctcgcgtttttgtgagcatacctcttgggaggcctgtctctcagcattcagttcgacctggggtacagttaggacgcgttagacgaagaacaagatacaacataatgaaacttattctatgtgttcaatttacgattttctggtacaccgcttgatcttcgggatttggaaacgaaagagttccgtcactattcttcttcacccttgcccttgcccagttccttgcccgctggaccgggatatcagcaagcacttgcggggtgttagattccgctgcagcttcatcctcgttgtcccattctgcctgtttccccgtgtagcctccggtgccaagccggtgcgggtgaaggttccttgcctgcagatcacggtaggtctggcttttttctcgagactctttcgtttatttggcggcatggaactcatcccacacgggttgggtgatgaatgggtatttcccaaatgg

SEQ ID NO: 43423 - DNA, 524 bp, Oryza sativa
gcagcccgggagagagagggaggagggagctgggccgaggggaagggagggagctgggccgggaggggaggaggcccaagaggaggagggagagaaggagagggagagaaagagagggaggagagggagactttgggctgggcttggcccaaaggaggaagaggatttatttttaggtttttctttttaataaactctaataattgtttttgttgcttaataattatttccggtgctctgaaaattcaagtaaaatttgagggctccttttagaccaaggagaatttaacaaaaattctccgggccacattcgaatttttcttgtacgtattttagtgtttgccaatttcttttcgaattttaattaattctattattccttttagaaaatgatttttatttcgggatgaatttatcaggacgtgacaaatccaccccccttacaagaatctcgtccccgagattcgaggcggctagcatgaagataggttgggcggtcttctcttcttgtctgacttcttcca

SEQ ID NO: 43424 - DNA, 739 bp, Oryza sativa
taggatcgcctgtaacctatggagtcgagcatctaatcgactctcaaacgctattacctgcaaacctaatgccctattcatctatgccatggtccctccattgctttaaccatacatgaacactgtggatggtgaaaactagagtcaggcccattttgcacacaccttatccgctgtacccccagatactttataaactaagcattctgagcatatctgccttgtacccaatatccactcctccgaatagggatccataatcctagtcaaccaatggacttaataccaatatatcagcgctcttcagtgccaatccccaattgaaatattccacgtatataccaactgctgcaatataaagtcgtcaacctacacctgactacttctttgaaagttatcattacactatcattataaaaaagctaaaatgccctgaataaacatatttacatattatatccatacaccatacgcacactgatttaacacaacacttaactccctaacatacacaatgtctccccacacatctacaacacttacatataatctatcacattctattcaataacctcatactacatttctcaactctctgatcaataccctcctatctaatcaaacatacccctgctattcatcaacaaaaatccacacgtacctaactttaaaccactctgtagaattcaatcaatcactcgataaatccactccacacctaactatttcataaatcccg

SEQ ID NO: 43425 - DNA, 4366 bp, Oryza sativa
gacctgcaggcatgcaagcttgccccatgtgctgcacaatgggtggacctcatgttggagccatggacaaagtccagaacgttagaaagatatactcctatctagaaaaaaaaaacacttttgtactttcttttttcttggtcctagacgtatggatgatcttatgctgccgccatatctatataccttgcccatatgataggagcactcgagcaatatgcatgtctcacttaaataattagggcactaaactatgttgtttaacttaagaggggtcaataaacctatcataatattttaagggactctgtttggttagttgtctcactttatcacgccacacttgagttatgtttagatatgtgtttgcttcttatcacaattgagtcatgccactttttttagccttagaaaccacatgtcttttaaatttaaagccaaccatatcacaattgtgcctatctatttcttagccacacttttggcttaagttataatttgtcaaagtttagttctcaccaatcaccatccaagcttagtttggctccagttctttcagcttactggtagattactaataaatatattcaggctagtttaatctccattatgaaaagaacaccaaatctacttaggaccatgagttcctactattagaagaacaaatatgcatacctatctgttatagcactttgacttgtttgatcagagtaaaagggaaaatggacggtggtgatcatctgggtgtgtatcgagtattgtgccccactagcaagtgggcctccactacccctgtatatgtgaaaggagaaggcccactttctgtcatggaaagagaggggccacaagctgtcaaaacagagatggcccgttggccattggtggacagtgcctgacaaaacaagctgcaaagcctgtttgaactttgaagtgaggtgtgaggaaaaaaatgctgggtcccaaggcacagcaactgggatacgatacccagatgtgattgtgttgtctccaaaattcatagggacagtactccactccgttctaaaatatactccctccgtcctaaaaaaagacaaaccctggtttccgtgtccattatttgaccgtccgtcttatttgaaaaaaatatgaaaaaaattaaaaagacaagtcacgcataaaatattaatcatgttttatcatctaacaacaatgaaaatacgaattataaaaaatttcatataagacggacagtcaaagttggacacggaaacccagggtttgccttttttgggacggagggagtaaatgattttgagatgtgacatattctagtattatatctgtccagattcattataccaggatacgtcacattcacccaaaatcctttatattttagaaaggagagagtagcaacaatgcggcaaaagcaatatatgttaccatcctaatattatttcagagtacctcgacactataaaaagaaatgataaattaatattataaaatatccggtgattgcaatttcagaacaaaatttctaaatttttggtaatttgaccaccaacaggcaaacacaatatcgacagaaattatcggtttttccatattttttgaaatttgatcaaagtttattcaaaaatcaaaattttttaaattttcaaataattttggtcaaaagttaaagtagcaaaattctcgaaatttcggttgccacttaaattgtaaaattttggctgaaaatgaaagtgtaaaccctggatatatcatggtgtcactttctaggattagcaaaactcaagtgtgaatcatagtaggtacgatatagtataggtggattggcatattgtacagtactggcgttgagcttgaggagagggaggagagtagacagaattcccagctataccactgtcgagataaaagcatagatgaacagggagagagaggtaaagattgcctatggaaatgacaatgacaatgtcgccgagatccatggcaagacaaccctccgcgcgtggctatcatctctcacggcggttgaaggttgaggtgattgtccttggcgatctaaatgcctgttatctcccatagttctccttgcccgcccactcttgtcgtgccgctctcgcttggcttgttcaattcggtgctcggagatagcgtcctcacttgcaattgcttaccttacctatgaagctcgaggtcatcagtgtggaggagctcgagctggagcatgagatcgaggccatggcgactagatctagctaggaaaaaaaaactcaagctcaagaggcagtgcagtggctggtacaatgtggatgaatcatgaacccagttggaagcgccgagatcgacacacaagcttgcctggcaacgcttgatgcgggaaatagagagggtggcatagagttatttgctgatgaccagaacgatggagggagggaacctaatggggaattgatggtattttattttaatgcaataatgtgaaatgttagggctcaataatatagccatgtaccatgtacatgcttaatctatctgtgagagagctgcaaagatgatttaaacaaaattggagcgattggaattaattatagctacttcacattttaatcttataatttcaagataacagtcaacataggggttaaacaaaaacaaatactccatttcacttcatgttaggctttaattttgcggtcaccgacgaagattctttttcacgatgaaaatgccatcgttgagtgttaccaataggtgagaaacatggcatgatcatcgaggaaaaccaacttgttggtgggtcatggctcatgtgacagatgttgctagaagaagaggggctcctttcacattttagacaacaactttatgcgaacaatccgcataaatgtgatttatcaaaataaacagaaattgcaagattatttcacaggtgagatagtgtcctacaaagaattagagatatcttaaaatgcatcttataacctatatacatacaattaattgccccgaaaaaaataatttgtgaaactatataaaactattttggacaggtagagtaaactttactccactatacatacaaaacattgatttaggttgaaatatacgaatagacaacaaagagttttccaagaaactttttaagccacccgctacttgtataattcgaaatgatttcaacgttgggggtgtgtttcagaattttagagattagtgaactgagttgcatattggagtattaagagcccactaaattttggtatctggtgaataaaactttatagtcttgtaaaatgattttatttagttttgaacataatttgttttcggcaattaggcaaaatttgagttgcaaattttgtacataattctcttcccatgccacaataatcaatggtgcaatgcaacttaaatgccacgcctagcaaagtggtgtaactcaaaggttttgctttagaactaaggttttgcagagtaattttaagattatcaaaggaggtttaaataaaaaattggtacctcgcaaaaaataatgccacgcatgcctcacttctcttaggttttattgccatcacaacgaaatgaaaatttcacaattaataatttataaccacactggttcgcaatgaatttttagtatgcagagataatattttaccattaaaactattggttataaatagttcatagtgaaatgggcatatttatttacgagtgaaatacatgatcggttcttaaactttgataggccaaatgctacttaggtatgtgaaatcttgcagttcatacgtttagatatgtaatcatggcttaattatcaccttaggttcaaagtgtgtttgacagatctcatgaacccgacttggctgtccacgctttgcatttggccccctcaccgtgacaaaaataatgcatatagcccctcattcctaccgtggacatccaaatatccattcagggtggtcgtccctccttccactccaattcaccacttcgacaatatttttgtcacactgaatttcaaaaggggttgaatgtaaaattttggcccatatggacagccacgtcggtgtccgatcgagattggtgaaatgtgacttggacttgttatgataaattaaactactattataggtctaaatgtgtgatatacaacatcacatatctaagtgatatatgatccaagtttaaataccaaccatgtatttcaccctttatttatttcaaacaatttactaattaaaaagtcaaacagtgtttcaacctaggtcacatacctattcaaaaagctgaaaacacgacccgaaacaatgtccagtctgaagttcaagacttttcaaggttttgtttcataaaagaccacagttgtaaa

SEQ ID NO: 43426 - DNA, 556 bp, Oryza sativa
ggaaaataaaaatagatttagtgatgcatcaacttaaatagaacaagaaacaaagtgaaacagcatgcatgcccactatccaaacaaaatactagtacacaaagagcatctaactaatgatccaatagctcatgatttttgatggggttaaagctagatgcatccttggacaaggatttagccacaggaaccacaggagacgccggaatcggttgactgcaagctcagatctggatgcaagagaaggaaagggtgacttctgcttagcactaaactgagtaaaatagatgaggcggcagtgactaccgagaatggggtggaaggggacagccgacgcctgctctccccacgacatgttgacctcgacgacgtggggtggtgtggacggcggaccgcttacctcacgaacggatctggcgtcgctgaagctaggactgcaggatctggagcacccaaactcgggatggttggatccgcgacctctgagttcagggtgtccggatctggagcccccgagttcatggttgctgggaccgtcagggggagggtgggggat

SEQ ID NO: 43427 - DNA, 589 bp, Oryza sativa
ttgctgttaccgatctgatcactagctagctagcataaggtaaacagtaattaacttatgtacgtacgtacgagcagtacatatgagtggctgtgccgatcgaatcagcacgcacgtgtggctgtcacgtgagagcaagggtgagcaatttgggataatagattatatggatctcttagcgctagctgcagctagctaggaaggagcagtagtaaacaagaatggcaggtggccatcaaaggctgtacagctcctccgatacattccgatctcgtcgtcgccttcatctcgcacaaacaattaaaccctaaataatccgtggaccaatcaatcgctcggcacgaccaagttaaaaattaaattaaccccatggcctcgatcgaaaggacgacgagccgcatgcatgcagatcgatgcgagctagtgaattgaatgaacagcgaagaattaaagagagagagaaaaaagaattatgtacggcgattccgaccgcggcgcacgtaccggttgtagttaacgacgcgacgacgacggcatgagatgggaacaagcaggaagaacttctcgaggcgctaaacaaatcggaaag

SEQ ID NO: 43428 - DNA, 821 bp, Oryza sativa
ccatttacagctgaatggaaaatagaaaacagaagcaaggaagggaagtgaagggactggttgcgccagttctattcttgcaacaaatggggcgatctaggactgccgccggctacataagtagctgcggaaccacagccttcgcaaactgccaaagagctgcttcttccgccattgtctttgcaacgtcgacccagttctgctgtcgttggttgcacactcggtcattgcgctctttcaaatggaccaggctcctagagtgactcgagccggttcttttcatgatatagagtgccagaagtagtttttgggcatatttcgttgatggagagattgttttcctttataatatataagaatatgatatgtgggacaagttactaccggagcatggtacacacaactgtaacagcaagccaaacaaaacatgacatactagaaatctatgataataaaacaaacagtagccacagaaaaaatatcaaagtacctaaatctgacaaagtctccaagcaaacaagaagcatgttcttcttatttccaattttgcacctcttctttgagtggaccaacaaaatgtacaagtttctattaagtcacttacgtgctcgttgatgaaaatgggattcttgagctctgggtatatcccaacaaccctatcggcataaagcgcaatcaagatgtactcatcaaatgtaataatctggtacttccctgtgatcaagtgtgaaagcattattggcaaccatattttaagcacagatgaaacatagaacaattaacaaagattagactgagcattacatgctacagaatacaca

SEQ ID NO: 43429 - DNA, 1342 bp, Oryza sativa
ttaggatattagtgcggtggtggtagcctacaaggaatccagttaatcagaactagcagtggaaggtagattcgcaatttttgaactgtatacagtggatgctatttttctaaccaaagctttaaggaaaagcataacagaatgtgactaccacatatattcaacacataaaccatccatgtagcattctctgttatctcgtgatgtgataactttgtacttttaaatacaaaatgtgcatattacaaaaaaaaggatattcttgtgtagttatgtggttttcagttatacactcaaattaatagagatgcacgtaatggctatgaagtaaatctgccaggaacagttaagtgaaaaaacaaacaaacctcaagatcttggcaaatgctgctccaacatgaatttgaaaagtccctagtttagccagtccaaaattcaccatgcagctctgtgggtactgcaaacatacaggaacgttaaagctgagtaagttcatgtggattatccattgcttcccttagtatcaactctgccctctgctccttatcctccttgaagaaccagggatccttcagttcaaccagagctctcgaattcagtgccatcaccattgacttcttatcaatcccaattctaaaatacaccggtggcctctcttttggaacaaccctcttctgagtctgactatcattttggccctgatccataccctcatcaaattctccaccttttgattcttcaaatgcgggtgcgaaggcctcaacaacagagaatgtcttccccacaccaggcatggtaacctcggacaccgccttctccccataaggcaaagctcgctcatgaaacggattcgccttgctctcaaccacatctagtccgttcgctttgactgcatcatcgaccagcattcctggtcggaacccgtcggcacctgcaagagcaagacgccgttgcaggctgagcagcgacttctcagctttcctccgctgccgcgcccgctccacctcatccgccccagccttagccacctcctcactccacaactcgctcctcacatacgtgtgaggttccggaaaggccgggagccattccgggacatggctcatcccgctctccctacccaagaccgcaaagctcgtcgtcgagtgcagcggcacacgctgtaccggaaacctcggcaatggccggcccgcgaacggggatccttggacgcgccaacaaacacggccatatccttgacgacggcggagttggcgaggcaacgggcagaaaccgaggcggcccccgcgaagccatagtaggccgcgccgcactcctcgaggaactgtatgacgtcccactc

SEQ ID NO: 43430 - DNA, 2453 bp, Oryza sativa
tctcttcatttaataccttccaagtaggaaaatatgctgacatagatctcttgtagagagcctatagataaccattgtgggtgccctaagggcagccccaaccctccatctaggatggtgtctatagcattaactacattgccatgtaggacttttagcttatatggcactatattaattcagagagtaagtgaagagaggaagaaactgggtctcatgcaagacacagcctcaacacgagaacctatgcactagacactatcaaattttgtattgggagagaatagtatcttcataatagatgaagaataaatatgattggtagagaagagagatgatgtatttattagtggcctagtttaagaaaccatgggttgtagagtgtagtttctattgtgatgtcttattgacatgatatcatagacactgcttatggacactatgggttgggactgccctaatagggtaggcggacactcaaaggttaaattggttttatttagagaagagtaaagtgtgttggcggtccttaaacttgtagggttgtgtcgtatatgtctctaaactctcaaaatggatatccaggtctcagaacttgtcaaagtgtatcatcttggccccaaattgatacatcccctctaggatcctacgtggcgctgatgtggcaatgccacatggacgtgacgtgtccttttcttttttttctttttttccttttcttttccgttttcttctcattcttcttttttttcctttcttcagagaaaggagaagaaatgggaaaaaggagaagaaaaaaggaaaaaaggaaaaaaattaaatgggtcctatttgtcagtcaaaataatgtcacgtcatgtccgtgtggcatgccacatcagcgctacgtaagatcctgtaggggttgtggcgatttgggacctagatgacacactatgacaagttctaggatttggatatgtattttgagagtttagggacctaaatgacacacccttacaagtttaaggaccgccagtacactttactctttagagaaacaatacaaatgtatgcgctcataatatacacggatacatccctatgcacactctactcttataagtatatccgaaaagctcacacgcatgcacatttataagtatattcgaaaagctcagccagtatatttggagattaataaaagcatcttaaacgtctcaatgttaacattaactttcatgaactgccggttgtagtttcgtgaaaactgatggtttttaactagtttttactaagttggcttctcggtttgtatccttggtggataaaccgatgggttttcaatttcaaaatgagaagggaaacccgctttcaatttccacgtgtcgtccaatccataatgatccggtgtttttatagttatttttggaatgttcctttggccaattttgttttactgtcgtgaggacacatttacaatttaaagaacataatcataattattatggataatttattacaccctccgtcccaaaataagttcatttatatgtttatgtgtgcaatgtttgaccgtatgtcttatttgctctttttatgaattactagtatttttgttgttattagatgataagatataaatagtactttatgcatgacttgttttttaaaaattttcagataagacgaacggtcaaaagttagatatagaaacctaccaataaacttatttttgggatggtggttgtacttctgaaggtgtactttacgcttaggttttgttcgcctttgttcagcaccatgtttaagctgagatgttttgcagcgaaggggaaaagtcacatgattaggaaaaaatatgaattacccctctgaactatcgaggttgattgtattccccactcccccaacttaaatatcagatattttacaccctcaactatgcaaaccggataaataacccctctgattcataccggagtggttttggccctacgtggcaattcaatcagcagttttttaaaagttgcccatatgtcatactccccctctctctctttccttaatccccatcctctatcttcttcctttcctcacctccctctccacctctctttcaccaaaccgagcagggaggaccgagctgacgacaatgcacagcaaccggcggcaggaggggctcgagcccgtgtgggcttaggcgcaagcagcgatagaggtagcaagtgactcgcgtctcacagccgacaaaaggcacacgcgagggacgacagacaacagctagcaaaagttggggcggcggcgtttccggcgaggggtcggtgatgggtggtgctttgtagtgcgacaagcgacgatggcgcgtggctcgagcgacatcgatgcccgggaggccagcagcagggcaagctcagcttgcctcatttgaggaggcattgccaccgtaggtgttacccctctccacgtcgcct

SEQ ID NO: 43431 - DNA, 3634 bp, Oryza sativa
agcaacagagagggtggggggaggggagaggatactggcgagagggagagagaagaaaggaaatgacaggtgggccctataatttattattattattattattattattattattattattattattattattattattattgctgactatggcaattgacaccacgtgtgcaagctcttggtcaaaatcgcccaaaacagtcctagaagggtaattcgtccgctttagaaagttcagaggagggggtaattcgtactttttccttatgattaattaattactacattactattaaaagttgaaattagttttatttgatatttaaagatacatttatgtaattttaaaaaagtatcgtttagcagtccaggaagcgttctcactagaaataagaaaatagctaaccctgtcaacttaaatacagtagaacacaacgtttgacgaagtatttatagtcacgggtggtataaccatacaagtgtttttaggtagagtgtggtcagcattccgaggtttattatcattgtatgagcaaatactataagacctttaattacttgtcctacattgtcatatatgcttatatgtatgatgaggtagatgagagaagagaagagagataaagagagaggagaagatacctctcatgcaagaaacaaacttatccctcccgcacggaaaacggagcggtccattagcgtatgattaattaagtattagctaatttttttaaaaaaaatagattaatttgatttttttaatcaactttcgtatataaactttttgcaaaaaaacgtatcgtttaatagtttgaaaagcgtgcgcgcggaaaacgagggagatgggttgggaacacgaggatgcaaacacagccttaacacaaacttgaagagaaataagagaaaaggaaagagttgattgatcaaacaaataaaataaaatcattagaatcaatgcaagtgtatccattgaaaagggaagagtaaatttgagcaaacaaataaaatgaaacaagaattttaaaactgtttttttccctgttaactgcctccattaaaattattgtaatgctagtgttggacgtcttatgagtcttcctgatttctcattttctatgtggtgaagttgttgaaaacatgttaaatgacgctacttgacaaacatattctggtgggggtggtagatcgccaggcacattcctttgttgtatcaatatttgttaaatacatttaagtaagcaattcgctttaccaaaagcagaacatgactccatggcccaatggataaggcgctggtctacggaaccagagattctgggttcgatccccagtggagtcgcccatgtaagtttcgatatttactttttacctttctttttttttataaaattggaaatttttgataaaccaaaagttgattattctcccattataaatatagattatcttttaccattttgtgttttaatttttacctttctttttttttgtataaaattggaaatttttggataaatcaaaagttgattattctcccattataaacatagattatcttttacttttttgtgtaaaataggaaaatcaaaagctgattattctccaattataaacctagattatattttacttttttgtgtaaaattggaaacttttggataaatcaaaagttgattattctccaattataaacctagatttatattttactctttttttttgtaaaattggaaacttttggataaatcaaaagttgattattctccaattataaacctagattatttggtcatattctgcgcgcggtgcggtggggtgctataccggctgatgtaagatgtctaccggtaaaaagataattccgtgcacacatatctctgaacaattttctccatcctctaaattttgcctcattttctatgtgtctttgcgttttgcttcgagctcctctatgcccattctagttcaccgttagatttttctaaaaagattacattgccctttctcatagttacgatctaccaacttcataaatctcaatgtgcaaaattttaatctacgataaaatcaagttgtggaaaattatttgatgcaaaatttttaaaacaaaatttaatttttgaacaattttttttattaaatccatacctcgtttcatttggaattgagaatcaaaatatttatttgatttaaattttagtgaaattgttgtatgaatttcatcaaatttgatttgaaatttattttttaaaaaatcaaacttcatctttcaaatgtgtggtcaaataattttatcccctttgtttttagaatgattctttttttcacatgagaattgtgtttttatcaccaagctaacacaaaagtatgaagcggcgtatctaggatttttatacgggtagtccaacctatatatattttttaaaataccctaaatataatgaagttagaagtacaattttatcgaatgtgcatcataaaatatgaataaggatttttttcctttttccaaaatttttttttcacatatgtatatatgcatggggctacgattttttggtggctacgaaacaacccctggatttgactagtatgagaaaggggcaattagtcccttttgaaatataattccatcattctgcatgcatacttccgcatgctgccttaggcccctttctttaatgttttaaaacataggaaattcaaagtattgcaattccgataggaaaattttctagaaaagctttgtttcaattgaattatatattttcctttgaaatttcaatgaagatttcggagaaaagttagtaagagctctaacctcttataatttttcctttgagtctatttctcctatctcaatcctgtgttttttatgtggtctattcaaatcatcattcccatattctccatgttttacaatcctatgttttatatttatatttttatataaaagttctattttttttatttgtcttttttttcagtacagatcccttagaatatgcatccatcacttttttttttctcaaaccggacgcctgagtctaggcattttccaaaggaaaaatgttcacttttcgtacctcgaatataggttgagtttcaatcgcgaaactcaacctacataaccaggtacaacacattagttatcttctaaaaacagtgcaaatagtcccaaaatattaagtatggttttggctaacatgacgttcacgtgacagcccggtcacaataaattaaaaatagacatgggcccacatgtaagtgataagggggaaaataaaaaaaaatataagacccacatgtcagctccgacttctcctctctctctttcttttctcttctttcccatccacaactaaagttcatgtgagggaggcagaggtgggcgagggtgagggaagaggaggcggccgatgagacgaagggttacctcatcgacggccggtggtggcgaggaggggaaaggtagtggcacgggtagctagggtggaagccgcgggctgtgagggctagatctacgcgatgagaatgcagtggagagaggaagaaaagtccgcagtggcgtagaaggagacgggagcatgcaaggaggcaggatctcaaaacagtaatgacgataacactctag

SEQ ID NO: 43432 - DNA, 2066 bp, Oryza sativa
attcctgcagcccgccttgggtggagttcacagattactgggctattgggttaatagttgtgctttgtttttttggtaggtttggtttcccaaggtagaaatgtttcacttgcgcttcctgttgcaaaacactcattgccgaaaaccttagttaacttaaatgagaaccaaatgcaaaactgaaaacccaaaaaactggcagttgggtccggtcttcggttttatttttacccacaatgatactatattttatttctaataagcgggtatttaaatgtatagagaaatggtgctcattatatttacttgtggaatgcaaattgagaagttagttagcttctataaactgtagtagatgaaatatccacatatcttttttatgcaacatattcctaaggttagaatgaccacggtccatacaatacagttttacgtacttcaaggcatctcactttatttttttcacttattaattaatcttcaataaaaggacaaattccaagtaatttctcaaacaagttcacttcttcaatacacaaacaagcgggtattcctttgatgaatatggtaggactctaataagaatgcaatggatcctttagattatgttactatcattgctcacatcttccttattgctaccaactttgccaacaaaatacttacgaagagtatccttgcgtacatgaaccactagataactctttctgtagagtagcactatatgtatctatcatactgtggtgattggaataaactggataataatagacagcaaaagggtggaatatcctctatagggataagggtcagcgtgttggcaaatgaatcaaagcattggattgatagtgccatctgtggttggtcaaattttctgtcccaccatgttgctgcagattccagggatggattttgcaagttcctgtttatatatcttgggcaacacataataaaatctactagtatcctctggcatagttataataaaatctactagtatcctctggcatagtttatcacctttgaaaaaggtgaactttttgacttttgagattctgttctgattgatttttacagttatgtttctgaaaattttgattgcagttaaattctatggcaactgagaacaataattgttgagttactaattctttttgtagagaaccctatggctagtaaaagcctgcttgatataaatagcatttaatcatttccttctgaaaggtaatgcatgtacttgttgcattttcaacttctcagcaataagctggcacatctataattgtaatcaatttgtgcaacactcaagttgtgtatgtatgatattttacttcctaccaccagcatctacttttgtgtgtgtgtgtgtatggtggggaaaaccaaatctgcctgcctgtacattggagatgcaccaggccgttttcccccacctgtcacattctcgtacagcctgttttctaaaattgaacttgattttccttttgtgtcatggatattgttgaatcctaaattgtatcaatttgtgataattcctcgtctattgctagcaatgagcttccttttgatttggattgaaggtcaacacaaactataatatggcatatgttatgaatttatggttttccttgtgtgttgctagccatgtacagtgcacaaatgcacaatgaaaaatgcctatataaaactaatactggtaactgaacctttttattttgtagttctagtaaccaatccatgtggtaagcaagacatgcgacattgggttttaatgtttaatgaactctaatatgagacataatctatggcttaacatcctttttatttgaaagggtttgcaagcgaaccataccgataacagaaaactgaatctggacatccttttgtaccttggtaccttggggttactgagcatagacttttgtgctacaatgttcactgttcactttattaaagtgtaaatcttggtatgaacatctcagtgctgtataaggatcctctacatcttacctatccagtgtttaaattcagagtgtggtgcaataatgagaactaataatgtttga

SEQ ID NO: 43433 - DNA, 1965 bp, Oryza sativa
ttggtaaggttttttttggtatcaaagtgaacaggcccaaagttatacttcctctctttcacaatgtaagtcattctagtattttccatattatcaatataaatatggaaaatgctagaatgacttaacaatgtgaaagagaggaagtatatattaatgacaggtgcatgctttcatgcacgtggctagtcaagtgaagtcacggcaagcacagggtttcttgatctagccattctctactgtaggctacgcttagatatcttatcccttgttagctactccagtttgttgacacccatgcatataactatatgcagcaacagtggaagcatgcacagcgcatcagcacatacatgcatgcagcccgcggcttgtagcgcaggccgggatgatgtgcgatgatcgatgaaccagatcgagatgagatcaatcaagatgagatgagatgtggtgaggtgacaaaactctcatagaccactactcatcacgatccttggctgatatatcttgcctctgcttgacgatggaagaccgaagtgtcgtttacctagctagctatatactccttctgttccaaaataaattcaatcatagagaaaataaatccaatattactaattaaaaataaatatggacacactaggattggatttattctgggacagaggaaatataaacagttaattttcatagtcagaaaaccaacatcaatgtcagaatcagtcttcttaaattctcccttctggagcatattctcgaaaaacaagatgatatcgtatatatatttgcaaattggtataaaacttatgcaaatttgatgataagaaatttcaaaggaattaagtatatataaaatgctagctatagcttaagaaaaaatatagaaatatgtaacattatagtttataagaaaaacatgacatacagatattgtaatgtctaatggtgaaaacataacagtacatatacttcatttttcttaaacataatttagagacacaaccacaaatttacgggatatataatatgtttattaagcgcacgcgcgcgcgcacatatatatatatatatgatccatgcatggtattggtggcctactattgttaatttgcctaattaattaagggaatatttaaaagattgattgtgttttatgatgtcgtttcaattgagagtaaatatgcatttatgcatggatatgcatgatgggaggagtaaatgcaatagatgaaaatgtgtatcactcaaagaaatctaagccaactaaaatgaatccaatggtaaaaagtgactttagggtgatttgggatgttgagttccaatcttttgttaagatgatgaaagctttattaaattcaaacaattacatcaaggtaatacaaccatctgagaacacttccagcgtctgcattactaatataaacacagccaaaacgcacacccacacactagatttttctcaaaacaaaagagaatacaagaaatgttaaggaccatcaatccgaagactacaccgccacccgtgctcatgggtaatacactccctaatcactcgctccaattgctgacataccatcgtaataaaatcatgtaatcttgacttctgcataatatcccaagtatgaagccagtgaacaataagggagaaataacctgcaaaggagagtatatatttttgttgtaaaaaaaaccacatcatttttgcataaccataaggaccaacgcaaaataattaaggtgatggaagcactacgtgagagagaaatactaataactactttaagtgaggatcaattgtatgggttatatgaaactattagaacaagaaaaacaggttacatctccttttcgtttgcaaagtaggattgagtctattaaataaaaatgtgattacaattctactgatacaagaaaagatatacgtagcacctataccaacacataatataaataatataaagaggc

SEQ ID NO: 43434 - DNA, 2732 bp, Oryza sativa
atccctccaaaatctcttatattgtgggacgaaggaagtattaaacttgctctaagagcaggtacaatagcaggctataaaccaactataaacacatttcgagaagataaaagagaagagagaaggacagcgggctatagatttatagccagctgcagcatggactctagggtgcatgaatgtatgataggtgggaccagatattaattatgtagtatatgtttataggtaactattgtatgagttgactattaagttgactatagatgatttagagccaataatggttatgacattagagaagttacaatagcaggtacaatagcaggctattagccagctgtaaacatattttaatgagataaaagatgagagagaagaacaacgggctatagatctgcaactagctacagtgttgactccaagaagcgatgtctgtttgacatgtaggaccatatattaatagtatagtaagcaactattaaatgaattggctataaataaattggagctaatagtaggctatactattaaacttgctcttatggtagagaatcgttggtatttcgtacaccacctacataggcagcaggggtagcactggcctatccactggagtagtagtcggcgcggcgcggcgcggcgcggcgcatgcttggcctcgggagccgcgccgctgcgactgcgaccgcgactgcgtggtggtgggatggcaccgcgcgcaccggtcaaaaggaataaaacgcgcgcaagagagacagagatgccaccaccaccaccaccgtgcgtgcgtagaatagctgcctacaggtggcgcgtctggcatggccatgtgtgccgccctgcgccgcgcgcacgctcgcttggacgcatccccgtccacgcacaccacacacacccacccacccagccgccgcgtgcgtgcgtatgggcgtgcaggcgtgcagcctccttctgctgaaatttcttctgtactctactgtactgtactactcctgcgctgcgacgcacggcacggtggtgtggtggtgcatggggatgggacgacggatcgaggagcacacacacgagcacaacactgcacacggcttcagaccagtgggagcaaatcatggacgccggctgggaggactggggtcgtctggggatggccaaccttgcagacttgcacgtgcaccctgcaatttataatggccttcgtttataacaaaaggcacgacattaatttgcacatattaatgtgtgttcgtggtttattaaaatatatactaatataaggcatatcttcagtttcaaccagcactatagaacttgaattttagagaatgatctgtcgtattaatttctgctaatatttatagttattataatatattctacggtggactcaactaataatattttatagtgatcgacctatccaggagctgtctctctgatcgatcactaactatattttgaacttctagcagaggcaatcactagaagatttagcaagtattggatggctactatatgtgacaagattctcttaatttgccattggctagggcctattaggttcatcttcttgccaattttttcctccaatcattgatggatgttgcgtttctaaactttgacgtaccacatttgcacaaagtttggtaggaaaaatctagcaacaagtacaaatcaagccgcttagtagtctaaaaaaaagttaaggcttttggttctagttaatttgcgtactccaccattggaacatcacaaattttattggaagagatcacatttaatttgctcttggctttctctagctcgtttttcttttcctcaacgaaagatgttgttgtgtccttgatcttgaatgttgatttgtttgtgagtgggtcgatccaatcaatcatgaggtccgggatgtaaaataaagaaactgaaaagaggaattgcatgagtgcattggtgtcgatgaccggcgccatgtgcgcgatacatggtagtgtctagctactgattgatcatgcacagtgctcaatgagattttataggtggatgggttgatttcattataagtggagtaaacctatcaatgtctacatggtaccactagttattactttcccccatttaactataaggctcaagacattttttacagatttataaaatgtatgtaagattatattgtagaaaaggcaccacagacattttgaaagatcaaaatattatatttacatatgcatctttttaaatcaaacaaaactatgccaaatcaaacagcacattatattagaaaaaaataatggatgaggtaaatttatcaaaggataagtaaacaaaacatggaaagagaaggttgcattgccattgaggtggcacatggggtggttcccattggaggaccaggatggggcgtgcttgcatctgcacatacaggagtgtatacatcatccggggcgccatctacgattaaactgttatgtatacttaagagtgaaatttgaataaaccgttaaacattaaacctagcttggttagttattgattagcaatggtatgggttgggcattttatgccataaaatgaatacaattgatttttgcatggtttcgaacagaccttattcagcatacctccgcaacatggtgaaactcgtgccaagcaacactatcactactgataaaaatatattgccatacaatattgacaaaataattttaaaataatatattgttgacggtcaatat

SEQ ID NO: 43435 - DNA, 809 bp, Oryza sativa
ccgccaccaccgccgcataccctgccggcccgggccaccacccccgccgcctctgctgctcatgctcgccttcgcgctcggccgcgccccaatcataccggcggcacctctatcccaccgccgcgaacccaggccgcgccgccatcgagggggggagtggcagcgccaaaattgcgggggaattcgagcaccggtggtcgaaatcgggatggaaatctagggtttaggggttgaccgttggggaatcgggcacgcggaggcggcggagctcggaattcggagagaaatccaaaccccaagctggcgaaatggggagagggagacgacttgagttgactacactagcgagagagcgaggaggacacaagcagcagcggagagagagagagaggcgtgtcggctgaatgcggaatgcctcaacacaggaagatttcggccatcttccgacggcggggaatgaacggccaggattttccattctcgattcaggagctttgtcactcgatgggtggattatcgggtgcttctatggtctatacaaaacaaagtcaacatggaaggcatccacaatggttatttataggctctctacaagagatccatgtcagcatatttttctacttggaaggtattaaatgaagagagagagcaaagctatctactaacttatagatagtctatagagaaaaacgaggcaatgcatgagagagctatagataccaatgtagacatactattgaagtggtttactattaatcgagtctattgctgagatgtacatgttttatagagagcaccttagagcaccc

SEQ ID NO: 43436 - DNA, 610 bp, Oryza sativa
tctcactgagcctgactccactgtaattctcaataactcggctgagaattataaacttgaatgtctcaatattatataggttgtatcttaagaaagtttaatagatgtctcacaaaacaaactcttgaaagagtaagcatttttattttaattagctccttaattacatatataatcagatcagatctgagggagactcaagcctaattttgctccgttatctctgaactgtgatgtcaaaagatactattgcattaacactggtggtggtattgatttatgcacttatgtactagaactactataaaccatcttggctttatacacttatgtaccaccacttactacacttatgcacattcatgtaagaaatctatagttttttgggtttcatcagtataccactccagaatttagagtgaagcttattttacttgttatacatgcatgcaggttgatgatccaaaaattatcaattttctgctggaaaatgaatttgttcctctatgcctgcataatatgacgatcggcagtgaattatcaaaaactgtatgtagccagacacattaatcccccttaaaatactacttcctccgtttcacaatgtaag

SEQ ID NO: 43437 - DNA, 646 bp, Oryza sativa
  unsure (1)..(646): unsure at all n locations
tgtggtggaaaaatgggaaagtaaaatattttgtggagtgatggaataaagaaatggttctccttttttcctttactttctcctccaattttcttttcttgcatgaatatggaaggggcatggctatatgcacttttttcatcatgctcaatgttttgagagcaagctttatttctctctttatttctctctcttttcttctatagccatgcctttccctccttttctcattttctttttgccaaggatcttctaggagaagaaaacatagtctaaagtaggagttttattgaatggaatttttgtgggaagctaacttccggtgtagaagcttagcttgattaaatatgtggaaatgaaagtggaaatgaccccttgatcatgagaatatgaaagatgtctatcacgagtcacacacatttgacaaagctcaatataatgtcaagcagtcatatgcatgataaggttcatcaatgatatacccttgcattatgggncccccccttnttggggtttaaaaggggggttttaaatttttaaaaaaaaaaaaatgggaaaaaaaaaacccaataggaggaatgacctttaaaacattttttattttgaaaaacaaattcccataaatcatgacaacagtcgcgataat

SEQ ID NO: 43438 - DNA, 2233 bp, Oryza sativa
ccgtcaagttgatacaagaagagttgaacattggcgaccctctttagctacacaaagaacgggagagacctaactagacctaaacctatctactagtggagaaaggagccgaaccccctctcctagacgccgacgactgggtggccaccggagaaggaagggaaggggccaaaagtcaaagctttttttttttgcccaagaagccgcctttcgctaggcatttcgaggtgaagagataaggactaatgccaattgattaggactttacgtcgtccacaactatcattgcacgatataatgtccacagagtgattttcaaggatcaaacctcgtcatcatgccaaaatatggagttagcttagcattttccacaattttattgccaggtatcttaaaaatcatatactattattagaattttttggggattttctatgtttaaattcgaacaatttttatcaaaccctatcgctggtagcttgggaaaccctgctttctacatgtcaacggctttgcatcccggcttcaatttttctaacttttctaaagagccctcgcctgatgatatttaaaattaaattcaggcatacatatcatcactaccatatatatgatagctgttttttttagagaaatatatattagctgttgattttttttttgctagttaacccctaatttgctagattcaatacatatatggtaatgaatctagcaaaactctacaaaattcatgtctcaatctagattttgtttacatgttaatgttcaaaactaaacagtgtttagttgcatacgaggttttaagatgatatacagtgtaatacagtgagaacattctcatgtaaaggggcctgtgggttgtttcatctgggagaagcttcaattcttcatctgttcttgtccctgggttttcattttgtccattactctgttcttatcttcacagaaatagtagtctcctactctccttttcctcacaagctagctaatgttctaaagttgcctgaaaatgacgtgtctgagctttcctcatgtggttttcaattaacagagaaagtcataagcagccctgcaggacatctgaccagattatctttgacttcactgaatttcagaatcaaacgtagcagattccttacagtttcgtgtttacacgaccaagacaatcttcactacttatccgattttttatcctcatgaaaagaattaatctttatatgataatattgggcctgtttgatttggagccaatttttggccaaaaactttagtagtgtcaaaaacttaccttgacaagttttggtattaccaaatttaataatgtagaattcaaactatgaaagaaaccaaacattgttgccaaaattttgggtgggtaaaaattggcttcaattcaaacaagcgcattgtttcaaatattgtcacatagtgaagtctaaactttctcatgaatggttctcttgggcttattcgtttcagcgtttggactgagatttctgggcggcatgcaaaacgagataagttattagtgcatgattaatagagtattaattattataaacttttttttaaaaaaagaaacatctatatagaaaattttttacatagtttatgaatttgggaagtagccatcccaaaaagctatttagaacacacccttagcaagtatagcatatttttttcaaggacatgtcagtataaaatgaaaagaaaaaaaaattccattttactcccttgacttaattcaatgtagagtactgctatacgtatgacccgttgtacgaatagagacatgtaaccatagatcaatcaaaggagagcatgttcatatacactaaaatacagtcttacatgagtcggacatttggatcatatgcatagcaatttccttcaatgtatcgcttaacctgttgtactacttttggttcatttttaccactaaaactattaaaccattgaaatggatcactttactacttattgacatttgtcttttttgttactatttatataagttgtatttaaagctgaaatttcttagacatagatagcaccattatcgaagttgaaatttgttttcatggttgtttgctttaactttaaatttttggtgtttaaatcgggcttatgcgctttcatcctacgcgaagtgagaaaaagaataaaacaatgttgatacgtaagttgtgaatgcatctgtattgtcctaaatttttaatgcgaactatga

SEQ ID NO: 43439 - DNA, 655 bp, Oryza sativa
ggcgaaacggagatgaagccggggaagatgacgttactgcggatcggatggtggcgacaccgggctgcgaggaggtcctgaccgccggcgaggggtggctggagttgcgcgatggcggcgacacgagaagaaggcggcgtggcagccaggtagagaagagggggagggcagcggtatgtcgggagagaggagggggtcaggaatcctttttataggcctggggggaggaggggatcggccggggagaggagagaaacggccggagagctcgccaggctgccatcaatggcggcagttgatcggagattaaattcaatgattaaaggctgaattaagaggagaaaacgtgggggaattgatgatgaggaggagaggaaccaatttttgcaatcgatttggtggagagcgagtggggaggggcggcgctggagttcttctgccgggaagaggagcggtcggctggaggtggaagacgacaacgtgtccctttcctgggccgactgggccacggccgagcgagcaggggaggaactgggccgaagcggcccaagggagagagggaaggagggtgggccggcttgaggaaaaggatgggccggaggagaggaggtcggcccgagagggaggagggacccgagagagagagggagcgaag

SEQ ID NO: 43440 - DNA, 743 bp, Oryza sativa
atgcctgctccctgacgccaccatccaagagctacactttccccatctgtagcatctcgggcttgagcatgtcaccgtctctgagggctcacttcacagcatgattgccagctgccctgtcctggaatgcttgctgcttaactgcaaccttggtttccattatcttcggatcaattcccctagccttcgaagcatcggtgcacgcatcatatcctatcgtaatagcattggacaccttcaattacaagaactcatcatcgaggacgcccctcttcttgagaaattgccccatcttgaatcgcgcaatgacctgcatgtatttgataatttccgcgcctaaactgaaggctgtaggctgcctttgtgatccatggtttgtccactccaggttcacgtttggcaccacagttattaaggtaaccatgctctttttttcccctttagaaggcttctaagttggtgtggatgaaatttatgtctgctcttatagatggcctatgcttgttgaagggagttaagtacgaaagtttggcggaggttgtgtgcaatgtgaagattttaggtatccatgtggatatgcttaatgtggataatgttattgacttgatgctgctttccttgcttggataggttatacttcaaggtaactattctttaccaattgtttattgtttcaggctgcccttgtgattaatttattactgctccaccaaaatggttgatttttattctttgtccttttt

SEQ ID NO: 43441 - DNA, 2089 bp, Oryza sativa
ggcatcgcagagccatggttcccaaagccacggcttgtctccgacgtgaagggttgaccacagtggtgcgtagggcatggcctaagacacctgaccattcataaatttggttcaggcaccactgctctagaagaagaaaattacacaaaattcattatggtcattgtccgttcttgaagtctctctcgcttggtttgccctggaaaagaaaagaaaagaaaagaaaaggagagggagagaggaatacttgggggagatgtctgtttaatttgactagcggtaatctggttggtttgggttaggaaagttcctggtgctgaacgcagatttgtatgtacggcgtacgtgcttctttgggtgtggagaacggaacgtgtattgaaaaccgagcgtgtgcagtcgacttgcattgatcttttcaaagtactccgtagtacccagtacattctctgaatgggataaattgtcaatctgaaactaatggggtaatatgttttcgtgcattataaaaaaaacttgagcaattaagctaaacagtatacaagcaattttcacacaactcttgattaagatttaccataccgttttagacaagtttaatagtatagctaactgttaccttaaaacaatctacatatacatataatatatatatatatatatatatatatatatatatatatgtgtacatatgtatatatatacatgtatgtatgtatatacatgtatgtatatatatatatatatgtatgtatgtatgtatatatatatatatatgtatatatattatatacatatatatgtatatatccatatatatacatgtatacatgcatatatatatatatatgtgtatatatatatgtgtacatatacatatgtatatatatatatatatatatatatatatatatatatatgtatacatataaatatgtatatgtatatgtatatatatgtttctatattggccccattcgaatctacttaaaagggtggataaaattttagattaatgttgcacgtttttcaaactactaaacggtgcgttttgtgtgaaaattttttatatgaaagttgttctaaaatatcagattaatctattttttaagtttgtaataattaaaacttaattaatcatacgttattaccatctcattttacatgaaaaacttaatctttattttcattttcatgttcagaatattcaaacactaccatagattaaagcatggtggtaacgctacatagcacgcaaggtgctacactgctacgtagctatatgtaggacgcctcacaagttctttcacctcaccatccgttaaagagtaaaaaaaattactcgttgtttccggagcctccatgctctcccacttccgtatcctaaaagtaataaatttactaaaaaattaattgacactaactttcttaattgctctttgagtaattttttacaagaacttccgcagagattgttcagtaataaaattactgacacgaatcactcccacattagtctttcagtgatatttttactaagggtgtgacggaaaagttaaaagtttatgtgggtaggaaagttcgatgtgacgaaaaaattgaaagtttaaagaaaaaagttagaatctaaacagggcctaacacgtactccctccgtcccaaaaaagccaacctagacaaggatatgtaacactttatagtacaacgaatctggacatgcaggcaagaatgggacacttcatagtacaatgaatctggacatgagcatgtccagattcgttgtattaacgcaaatcctggagattgacgaagtcaccatagacgtctcgctgtcgacgggtatatcgcctaccactgaaaacataatgttgttaaatcctgaaaaatttattcccatggatagtcgaacccaaaacctaaggtgctactgaggctcttataaccattaggctacaaggcctttcgcaacattgtgatttttctagtaacacgtaacttcgcatccaccgtttagtaacacatattaacttgtgtatccatcatcgtttgtaagtttctgaacaacaccatataacttatgtatccatca

SEQ ID NO: 43442 - DNA, 1882 bp, Oryza sativa
ttagcattaactacacttagtgggggataaactttatagatatataggattggtacctatagttgctcaaatgctatatttttatcccgtggaaacaggaaacagttcatagatatcagttttaaatgaaccagtatttatgagccgttaccgatgagaggttttataggtacaccatcctagaatatactaatattttttagttacgattttttagctatgtatatggatatgattattcaagtttatagctaagaattgtaataatttttatgtatatggatatgattatctaagtttgtactaagaattgtaatattttaggatggacggagtagctgttaacttttttttttccaaggaagctgtatctctgaaatctccttgaagttctaccctgcatacgtattgtggagctaaattaagcatttggggaacgaaggcaaaggtaaagaacagttaaaataacggaatgaacacagacaattgtgcgggagattaattaattttatctctcaagggatatcctctcgttccttaggcctgtttagttggcaaaaaaaaaattttgggtgtcacatcggatatttgaccagatgtcggaaggggttttcggacacgaataaaaaaactaatttcataacacgcctggaaaccacgagacgaatcttttgaacctaattaattcgtcattagcacatgtaggttactgtagcacttatggctaatcatggactaattaggctcaaaagatccgtctcacgatttcccccctaactgtgcaattagttttttttaatctatatttaatgctccatgcatgtgtccaaagattcgatgtgatattttcggaaaaacttttggggaactaaatggggccttaatgtatctgaacgttgctattgtaggaggagcatctccagcaggggtcctaaacacagccgctaaacaatttttgagagttgagaaaaaaaatcaggtccaacaaagcccgtactaaaggccctaaaataggaaggcctctaaattatcttctcaagcccccaggcctaggaactttctcgctggcccctattccacatgcgggagagatctcccaccgccgcgcgctgatcttttttcgcacgaaaaattttgctagcaccgccgctaaagcctctcctccgcatgcgcgtcgcctggatcagcgccctcctctccggctgaccacctccttcctcgccgcactcctccatggctggcgacttcctcccctgccggccacctccctacccggtggcctcctccctagcgccctcctgccctactggccacctccctgcagggcagcctcctccctggcggttggcgccctccctctcggctgccagcccgcccgacgccctcctcccctgtaaaccacctccacgtctggcacccttttcctcgccggcaatagtcgaaggtagttttttttctttttccaatggatttgtcgatgcaattagataaggcttgttctttgttgagatttagcttgtgaaagaagagagatggaaggaagtccatctctcttctttcactttagtttctttctctttggcgtcaagcaaatctttctgttataaaaccggccccgaaatcacatcgaaaacaaaacgcggaagaaaacgccataggagatccaaacatgatgacgacaccgaggcacgatatttgataatggagttcagccgaggcctacatctccggggcactgattacgggcgctcctccccgatccagcatattacagcgtatcagagttacaacgactcacggccggtcgccgccggctaccgctccctctcgctatgctaagtcgccatgcggttacaataggcacacccctctatttatgata

SEQ ID NO: 43443 - DNA, 680 bp, Oryza sativa
tattcgtaacctcaccacccacaagaggagatatctacacccaaagatgtatccatccaaccaaacaacatctcttgtatgcaagtgttccatccacctttttatgcagccaaccaaataacatctaaccacatcctggctcattcaatacagacaaccaaacaactgcatctgtatgtctctagcctggatgagggagaagagccaggctagatccatacgagcaaccaaacacaccctatgctatccggcttacgttttccttgttggagctagctacttcctcatttactacctcatttaccgagagcaagctttccagattattgaatacgacgtttttctaaaaactttccaaatagagatttcttttaaaaactatataaaactatttttaaaatttgtaatagataatatttaattaatatgactgttttagtttgcatgtggcttaaaagccacgaattctgtatcgaaccaggcttaacgacatgtacagtgaagaccactggtactaatgtctcagcatgccaaataagataagaacaaatgaaagccacgcaatctaaaacagagactattgttgagtatatttttcatttcagcccctgattatttatgcgtctgcccctagttattgaatcaattagaaattttatattttgggccttataatagta

SEQ ID NO: 43444 - DNA, 590 bp, Oryza sativa
taactcggcgttatcggatgagaaccatagattttggtgacggcatctaccaaccctcgtatagctacacagatctgatcgctaccaaacagattgcgtccgacatggcgtgtatacttcctgactacattggggcgccagcactaatggaagattggaaatataacacctgctactatgagagctggtaaaagctcggagataaaagcgaatgtgggcgatatataatctgcctctacctaccaccagataagaccatgcctcttctcgcgtatagttgctcgtgagctactgaccatggcaagagagtgcatggagaatctagatgaggcttctaaacaattaacaactcatacatgcacgatatatctcgatcagtatgcttcttacgcatatagagtacatgataaagagatcgatctggatgactgtacttcgtgctgtctcctgtgggactcatgagatcgacgaataggcaattggcagctatcatcctcacatacactttgatgagtcagagatatatattgccctgaggatgctcgctgatactaatagtggtacaactcatgcatattttaagggtgata

SEQ ID NO: 43445 - DNA, 2532 bp, Oryza sativa
caaatatacaaccagcaattcagatgatttataagtaactaaatttgaaataataataataataataaagactatgaaaagaaaaaaccatctacaacacaacatgtgattaattaaaatttaaaaaataaattatgaaattagaaaaataaaaacaaaagtttaagaaagaatacgatttatgaataacaaaagttcaaaataaaaaaaatattaaaagaacaacccataacacaacaatggtaaataacaataaagagggagggataacgggtgagccgtaaataaataaatagggtgtagcggttgatgggatattttaaaacaataaaaatataaatgacgattagattcaattttaaaaatctcaatgacgattaagagaaacagcagcgagcaagccgtcaaggagcgcagtcgtgacgtttgactggacttctaaaaagaaaaaaaacaacgataatcataatatcatatttgactttttaaattccaatgacaactaagaggagacatcgggtggattgtagaacagtacaatgacgacatttgatgtaacttctaaaaatataaatatgtcaatcgacaagacaatgaactaaaaaactataagatctaaatatgaaagtttcaaagaggatgaataaaagttgtgacaggtcgggcaatcaaataaatgagtggtaaaaaagtaaggggtgacgacttattgacttttaaaaactaacccgatgataataagattcaggccctctttgtttaggcttaggcttattggcctagacttttaagtcagcttattggcttatatgatttataagctagtggatttaatatcctaagtttagtggtggagtcatacatctatctcatataagccaaaaaagcttctccaacctagcttttggcttaatagtgttagagtggcttatggcttcaaaaaagccaaatgaaaaagctgcttgtttgttttagtttagacttttcgacttataagttggcttataagcctaaacaaagagggcctcaatcttttaagatcggctagatggctatttaacaaatttaaataaaaccatgcttaaaaatatataattctggatgggtgctagccgcgcaacaaataaaggggtgacaaaggagtaagggtagtaacaggtgtgacttctaaaaactataaacccggggatgataatgttcgatctttgaaagtcctaaaacaacgagatagatatttaataaattttaagtagaatcatgtgaaaaattagataattttgtgggtgctagccacgcaattgcgcgggccacccagctagttattaaaatttaaaacatcttctacatataaagttttcacacgaaacgcaccgttaccctactactggtgcggaagttatgtgacaattttgacaggttcagcaataatcagcgttgagcaatagaaaatggatgagttgccgttgcatattcaggtgtgcacgattaaaaaacaaaagcaaaaaattgcagacagtgagaatctttcgttctttcaccgtagggcccggcagttgagtgcggtagtaggatgtgtgtattggtgggccgtgtgggcaactgggcgtggtctccacatgcggaatgggttacctctctcaggctctcaccaaccagatcaacgtcggaaataatttttaactttcaatttcttaaataatactctctccatcctaaaatataagcatttttaacttagtctccgagatgctactttgatcaacgatatctataaaagtaaaatattttaaataaaagaagttgcatattatgatagtttgtttaatgataaatctagtaacatcaattttacatgattgatctttttttttctattaatagtcaaagttataaatatttgacttgacactataataaaaatgcttatatcttgggacggagggagtacgatgtttgcagtgagaaaatcacaattatataaaagtaaattcaattatcaatcaatgatattatttttatcaaacaaaactcaacttattattaattaagtatctatagagttcaaatttaaaaatatgtacgtgcattattgagtggatcggaaggagtacagaagagcctcggccttgaactcgggcgtcactgcacctaccgaccaacgcaacacgcgaacatcccgcccgcacatccttcttctgtcactctgatcacacatggacctcgtgggagatcggaaaatatatatagtcgttggatacaaaatccgttaaatctttgagctaatttcttattacaaagtgctgttggttgatatgtagcctcgccagctacctctgcgtttgttgttattcattttgagagttggcaccagagttgacaaactccattataaccactcagttcttttttttaagatcaaagggcgagagcccttccgtttccattaatagaaatgagatagtagctaccacaaactggaaaaacgaaaaaaaaaaactgtctgatagtcctgactatcctaaaagttgagaa

SEQ ID NO: 43446 - DNA, 1065 bp, Oryza sativa
gcgacaccctagatccggccttcgcgcgccgctcgccgtcggccaccccgcgccccgctcgctgtccgccaccgcgagagaaccaacgacgggagagaaaggacgtaggagagcggatccagcgccgatgaggaggacgacgacgagtggcgggggaaagagggagagattgacgacgggacagagaggcgccgtgcgaagggagatagagggagagaacggtgacgagagtgagggaggattgctgcggtgggaaaaagagaagggtagtatagaaaaataccgaccgtgggctttttggttgggacacccactgtgagcttgagttccttcatccagatgcctaagattttaaagagcctacctagattattctccattgggagataagtgtccctacgagtaccctcagttaggctttgttgtagatgcccttttagggcccctttgatttgtaggaaaaatgtaggaattttggaggattttaatcctatggaaaaaaaatcctatgaatgcctttgaaacaaagaattgaatcatatccaatcctttaaaattcctatggaatgggtaatcatatgcacattttggaggaaagttagcaagaggtataacctcttggaacatttcctctaagtctatctctctcatctgatttctacgtttttcctgtggtccaatatcaaacagccattcctgtgttttgcaattctctgttttacaattgtattcctgtcagaatcctgtgcttttcctattcctttattttttcattcctactattcggaggagccctaagacaccggccagcggagcggtcttcggcaggtcaaccagtaaggtggtgattgggctcaccaccttttacgcccagtgcgtgcgtgctacacgctccggagtctgcacccatcttccccacgtgcgcgcccatcgccgggccaccggaaagccaccgccggccatcccgccgccgcgcgatccatcacccggaccagcttcacacccgcgtaaaataataaacaatcaaagccccacgttttcccactcgccccacgttgaatagac

SEQ ID NO: 43447 - DNA, 2894 bp, Oryza sativa
ttgcagggcttgaagagttggtagtcgccatggcctcaatgctcgcttgtgctgatgctcctcccattggtaggttcccggtaataagatgatcttcttcagctccctattcacatcacatgacagcagatatatgcatgatttgtgaaacttttctgaaagaaaatgtgcatgcttgatgctctcctaagaaaagatgaatttgtactacaacacattccgttctaaaaaaaaaaaaactacaacacattcatgagatatgttatacatagagatagtacgtacactttcaattccctactactaactatttatgatcagataatggagtactgactagaactgtttcagggcctacttaaacagttacagtcagaagctatatagtagtccaaagaagttcaacagaagttctagttaagtcaacaaagatgtgcatccatggtggagctagttaatacactcttcccatttatgcttgtgatctcaaggatgcatgcatagatatgtacctgatgaagagcatcttgaagcactggtgagtagttatgcttctgacaccggtgcaacgagtcaacaatcgcgacacccttttccagcgctggcgtttggtcagtcctcctgtgctcaagaaaagttaaagcgaggcagctcttatcaattccatgtagcaaaacatttattaacattgaaattgactgtattactacatcaacatctccatatatgcattcatgaaacctacaagacagtactagcagctactgtactcttatgtttaagccatcgatcactgcagtgtataactaactaatcaagagctagctagcccttcacatctcacctgcatgctttatcattgcagacatgaacgagcactctgccatatttctttgttgcttagcaaagctcaacactgtttaatctgtgatatatatagatctcacgaaacagtcatgcccttgggcagttgcgttgcatatgggaacatgcctggctcgatctgtccctacaccaccaatgcaatgcacccaacaacctggaacactgactgacttaaccgatccattttttgcatgcatggccaccgggcaccggtcaggaactcttcagaaaaacgcattgcagctaacactgttgcgaggcctccatatctgacactatatgactttatttgctcatgcatgcatgtacatgtactagtataaatcgatcgatcttcaaatgctatccatccacagttagctagtatagcttctttgcctcggctactgtgcctggacttcacttaggttgtgtttagttccacatcaaaatcgaaagtttgaaaaaattagaacgatgtgacagaaaagttggaagttcgtgtgtgtaggaaaattcgatgtgacggaaaaactagaagtttgaagaaaaaagttagaatctaaataaggccttcacttgatttctcctacttgactggaacatcgagctcttcttgtttgagagagagagagagagagagagagagagagagagagagagagagagagagagagagagagggggagggatgggtacggtgtagaggggatccagaagaacaaggtatccaagtgcatgagcaggggcattatgatcgagtgaggaggagagatcgatgcatgtggacgcggacaaggagaagcgtgcatggaaaggtgacgacacggggaagaggtcggcagggaaacatatgcgctacagaaaaaacactagttgtcgctcagtgcatgctgatgcaggagctagccgaccggcctgcatgcacaagttaattagctgcttctatgaaatttatcagaaatcggtcgaatggaagaacaggcgaaactgacaagggctaaacgtactggaactcttatgaaaaaaaaaaaggcatatatgcatgagaggagctagcagattgatcagggacgacatttttaccatcatgatcagagattaatataagtaattggccctgtctacgtgccatcatcgaccatgcattcatgacgatgtactatttcttttcttttcttccaaaatgcaatctactggccgcaatctgatcagatcatcagagttgaagactgcagaattagtagacattgatcttttcttaaaggcagctttgtctatacgcaacatgtgtggtaatataaatagatttgctaaatcacgacaaaaatggtcattacctcaagtaccagttttaaatactaatgaacaggggcgtagccagctaggtggcaccgtgatccacggaccacctaaaaatttaaaattatagtatatatgctagttaatatagtaaaaattgtatagtagaccacccttttaattgacatattacatatagatggaccacttttactttaaatcctagctacgccactgctaatgaacagtcttccaaagaaaatttttaaccttactttatgttgtaaaccacaaaaagaactagtaaaactacaacattatgaaaccaggttcaagacaaatcaaaagtatatatacacaacattttcatgcatgtaattagtcaaatatttaaataactaataacggaaaaaaattaaacaagtcgttccagtagtatacttgatccagaacaacatgtttttttattggatgaaaatattttatctttattgtaggctttgtttgggcgaccagtttaacaatagcatttaatttgttttattaacaattggaaaaggtttgactatatatgtgtcttataggttctaaatcaaccaaaccatcacataagacgaagtagattatgcgcactcctactcaatataattaaccacttgacatccttcaaagttcaaacaccatgcacaagcatgaattgaactcaatacattttgggctgcaggaat

SEQ ID NO: 43448 - DNA, 2453 bp, Oryza sativa
atagcagtggtggttctggtgtgatcaacaagagaagaggaaagaagaggacatgaagagagagagggaaaaggagatgtggagagatggcaaaaggcaggacagtggaacagtcactgagaaagagaaagggagtggtggggtagtggatttgtgcaaagtggtagtggtaaaaaggagtgaggaggaggaagaggaggaggggagaaaaaaaaaagaagaggcttggagccttggagcctgaggggtagtgatgagggcaaaaaaagatgtggtgattaggtcatgagtggtttatgatttggtccttgggaatgctgcttcgaagagagtgtatgtaaagaagggcagggtgtatatgaagggagtactattttctttaagaaggccataatgaagctacagttgctgttccaggccggtattcatgtacaagctgacaaagaaacaaatacactaatggtatatgattgatctaaatattcaaaactcgactgtaaaaagaaaaacatagttcatcttctaccataacattattcaggcatacatatattactatggtacgtatttttattcctctgttagttgtctggtacttcctccgtttcacaatgtaagactttctagcattgcacatattcatttagatgttaatgaatctagatatatgtatgtgtttatatttattaacatctatatgtatgtgggcaatgctagaatgtcttacattgtgaaacggagagagtaaaaaaacaaaaggtttgttggtgcaaaatttggtgcattcattccaacacaaattcaaaaactatacatatttttgcttgaaggtatcacagagaaaggcgacatacatgatttgaaacctttgcgggttttatgtttttagtacatattaattgctttgttttttttccaacctcgcaagttttagtacgtatcgctggtgtgctttattctacttttatcaagaacaactcaattggtacattaattagagccatgcttggatgctactattaattagtttgtttggagatataagaaggttgatttatatataccgttatctttatgaagggtacgttttgcttcagattaaacttattgaggtaatgttatatatcagttcatttcaggttttggatgaaaatccagctctattatattattggatggtagtggtagacatggtcaaattcttcttaaagacgttgttctggagtaggtgcataatattatgtattggacttagttacatgtgcgtgagttgctgcaaggcaacatgatatgttcatgtttgtcttcgtttttttaggtggtgtgcatccctagctagtcgatgcagaggccatctgtaatttcattatctaaagaaaattaaacctataccttcatcttaatggtattattgtttaaaaatcaagtccaacttattttatcctcttttcatgcaaatagctagaaatttgatgttgcccttagatgcgggttgtgttcaagggcatgtgaatctcatgtgaaattacaatgtcaaattagggatgtggagcacagttagataaagtaattaaagtacatgttgagaagtgtgtgatccaacttgttatttttcctaaataatgctcactttggttaaacaaatatttaaaatcaaataatagtgtgactgctaattgatcaaataccgaaaacattaatggtgtttcctctattttttttatgaacaattagggcgaggggggcgggggggggggaaggagatctgtcctttcgattaatagataatgaagtaaaagaggtacatataagttcactacactggacaaggtcaccagtgacgggcccaaaccctcacctttgacggctttaggcttggtcagtgatcagtggtcactggtgagttcggtcacctttgacgggtggaagaccgtcactgatgacagtcacctctgacgggttagaactctacgacccgtcagaggtaagtgtctgcgctaacccatgccattttgtaacccgtcacagatgactcacctgtgatggctcagagagtaaaaaacgtcacaggtgtgtcatttgtgatgacatgtatgtgcaaagctgtcactggtatggtcacctgtgacggcttttgcaatatgaaccgtcagtggtgagcttacatccagaaaaaaaaaataatttcccctaggatttgctagccatgcctctggaaaaacagaacatacacatgcaatatatatgtctccagtttcagcccattgcactaaaagtttcaaactaacatcacatgcattccaagttgtcaccgaaaatccatagacattcacacacatgcattgcaagttctcaaattgagccaagccgatgcttcaaagcaccagaaataaatccagaaaaaaaaagagaacatacttcgatgccaacatattgaaaaatgagaaatacag

SEQ ID NO: 43449 - DNA, 5360 bp, Oryza sativa
caaattaaacatggtagggactagatcaagaatcctagccaaccagagctacgcattgtgtgccgcagagatgaccgggtagcttttgatctgaaggcagagagagaggggtctctgcagggtgtgcaggaccagcgagggtgtaaaatgtgctgacagacacctctcttttggatgtgcacatattcagcaaagcagaggtataatgcccccaagagagccctcttgggatctttccgtattcatgaaaggaagaggggtatgtgacgatggaagacgctagctgcaggccgaaatgaatgtggcggaatgcgacaacacgatatgggtggcactgctgctagagagagtgtgacatgatagtgatatatccatcaggacaacatccatgcaggcagcatcgatctcaagcggtggtcaggtcgatcagaaattgatcgagcagcaaatttgtaaaaatctgcaaattttacacgctgtttaattatgattagatttgcttatacaatactgaattgctgttaccgatctgatcactagctagctagcataaggtaaacagtaattaacttatgtacgtacgtacgagcagtacatatgagtggctgtgccgatcgaatcagcacgcacgtgtggctgtcacgtgagagcaagggtgagcaatttgggataatagattatatggatctcttagcgctagctgcagctagctaggaaggagcagtagtaaacaagaatggcaggtggccatcaaaggctgtacagctcctccgatacattccgatctcgtcgtcgccttcatctcgcacaaacaattaaaccctaaataatccgtggaccaatcaatcgctcggcacgaccaagttaaaaattaaattaaccccatggcctcgatcgaaaggacgacgagccgcatgcatgcagatcgatgcgagctagtgaattgaatgaacagcgaagaattaaagagagagagaaaaaagaattatgtacggcgattccgaccgcggcgcacgtaccggttgtagttaacgacgcgacgacgacggcatgagatgggaacaagcaggaagaacttctcgaggcgctaaacaaatcggaaaggggaattccgattccgggcctgtttgatgcgtcccgtagctcccggtcagcgcctaatgcggcgtgttcctcgcataaagcatgccccggctttttcgatctctagctacatagctctctctgctgctgctaattcccatgcaatgccgagttaatgtgctgctacttctaccgtctgtttgtgcgtgccttgatcttggtccggggtgctatcgcgaactagtttaatcgctgtcgtgagttggtaatcctgtctgtcttaccaccacactgtgtggtgctcatgtgccatggggtcactcactcactcactcactgtctgattatttttttctccctcgcggcaatggtggtcaggggattcagttgattgcttgctagatggtgagacctgagatgtgcatgatatgatgtgcgtacgtacgcggcagagaggcaataactatatatggggatcaagatgtctggagcaaatggcatcattcccatgtcttagcttagcttagaccaaaagtcactaccactgaaaaagcgctacagggaattgcggggccaatcagagctgattgagcctgcctactgcgtgcctaagcgctctagctagctactaacagtgaaattaattgtcctctctttttttttctctctgaagaggagcgttgtagcagaaagactaacatgcatacatggtggcttctctgatgacaatcccgctgatagtacatcagtactaataataatcctgtagtactactctgcttcttcagtgctagctgcatggtcgtgggactcactggctcaggcatgcacgtctaactcggtctaactcaccaatatctagtgtcggggcagttgcccagtccatggccccgatcgtatctctaccttagtggaaacaccgaaactggagagagaaaacaacaaacaccaacaccaaataaccaccttcttttgcaatccggatagatcgctaatcgatcgatcggaatgtcaagtgtgtggccgtgtttgtttggttcgtcatgagtgccctcgagactacttgggcatgcactttgcagatcaccccgtgctgtcctgcatgcatcccggtgtgcgccccacacgacttattttctctttgcgtgcatgcattggcaatcgtcgttccatgtagtcgatcatgcatgtgtgtgtacatctacatactggtccgtcgttcgcacgtacgtacgcttccaatattcttcaatattcatggatcgatcatagagtgtgtgtggacctcgatcgtgttgagttatgatccaaattcatttgcacacgtataaagatcagtttcggacgaagcgaagcggaggtttcatcttcatatatatactttttgtaagccgtcgttcggcgttgtaaccttcactccgatatagtgaagatatttgccggttagcgctcgtagttttttctctcctattttgaaagggttttcatgttaaattttgtgttttctatatgatttatctattattttttatcgtttatttgcctatcgttttctagcagatccatcggaacatgcatgtacatttgtggtctcccctactgatcgatcgatgcggtgccttacctttcttccaaaggcgggcgcggcagctgggttggccgggccgtggcgtacgtggtcggtgctagctgggcagtgggcaccgaccgcgacgcccgcgcggcctaaagctgccgttgccgctgccgcgctcgctgcaattcgtcgcggtggccgtccgcctgcatgattgggattggctctcgcggcgcgcgggccgcggcccagcttagcctactccctcccccactgcacgcggccgtacgtggcccacggcgcgcgcggacgagtccacgcgacttttcggtggaaatcgccgccttttccacgcgaccattggtgttttttctccttcccgtctgccggtggtggcctggccgaatggccgatctatcgtggatttgtgagagaaccgtgatgatccgtatcgatggatccatgatgagttcttcgctgccgatcgatcggtctctgatctatggatggagcggtagccagttccgttgtcagtttgataaaaagcgaggcaaagaagcagcaggtgtgtcaacagagaccaccgggctttgttgggtctcgtcggcatatgcacgcagtgcctgcgttttgcgacaacgagccacttccaaggataaacggccaattgctgcgacgagatgacctccatcgtcgtcaggtgtcccggaacagagaggcacgatgcacacggaatggaggacgtggtacatgttagtaccttttttttttcccggtgatatatatgcttttatatatcgaggctctggtcagactgtagtcagtcagagaaaaatagtggtgttcatgctttaggaatactaaagtctgtctctgtcatgggaaaactgatttatcgaagtgattttttaaggacatgttagattacagcatatgtacttttttactttaactaggaaggtagcccgcgcattcgctcgggtatgtttcgtacactaagctggagacacttataagagagaaatattaatcagagaacatctgccataatttctctataaattgttttgtcggcattaattacttttataattctctaacctatgagctttatcctatatcatattttagtaatatctacaagtaattatttataatcttcttcatcatttgaaaaaaaggtagaattattttctttacaaaacatgtcaacaaaagataaaagtaaggtgtttttctctttttttaattgcatatatattatcatggtttaatagaggagaattgggtgggacatgaagctccactaaatgtatgggtttatatagcctaatataactgatgtattttgagaggtgatccatctataaacatttcatgtagagtaggtcaaagcctccacacaacttaatatggatactataatgataaaatataattgtgcagtattagttttgaaatgttatagtattcatattactatagcatgaatacacgcttgttttttatataagacagatataatgataagaaataatggttccacaggtttaaaaggcataggagtattccaaaaatgtagcttaaaaattatgtttgttttaatattcaatatcattgcaaagtgagtgtagctcaaatggttaggtttcttgtagtggaaaatgccaccgggttcaagtcctaaactttgacatgggtgctcgcatttacgattaattattctttcattggtaggtgacgtatccatcgacagcgagatgtccgtggtgatttctttaatctcaaaatatgttgtctaatcttttggagatactcaaagggggtaagctatgtgtttgtgagttcataggggtgagtgtgcgtccattaagttgtgagcgcttacgtttgttgtgtgtttctaaaaaaaacattcatagtggtaggctatgtgtttatgcattcatatgggtaagtgtgcatgttttgtgagtgcctgtgtttgtaatatgtttctaaaaaatatccaacattattgattgtttttcttttagtttgagagctaaacaatatgaaggggacgggtggtgttgtgcgcatgtgagggcgaggaggaggtggaagagattttatttttgtaatttttctaaataatttaaagtgatagccgatgaaggggtgtttcattttttttaaaagaatttctaagatactttctttgttttataggacgtggcacatggcgatttaagattatgtttaagaaatagatttatagttaaaaataatggatttttttagaatcttaggacatgatagctgctcgggagggagtttaattgattttggttatatacaatgatttagtataacataatatatatttttaattaatttttgattgttaggatattatttttttaaagatagatattatgggtcctagttttgagttatatatttttataaatacatttaattttagatctattagaaaatactttgggtgttgtattttctaattaaaccacttagattgttttaaattgttctacttgaagtacatgttattaatcagaaggtttaaaaatctactttatattttcttcaaaatgtatgaatcgatgaacaatagttagtccgtagaatatatatgacacaaagtaataaatttctttaatattatacttaacttggatctttagttttaaattttata

SEQ ID NO: 43450 - DNA, 1709 bp, Oryza sativa
attaaaaaagatataatatggttccataagacactttcaattgaatgcgtatatgttttttctggcaaatactaagcacgtactttttcctcttcttttggagaaatatatgtttttctcttagggtaggtgtgcgtatgtgtatttatatgatggatgtgcatacgtttatatatgcgctcgtgaatgccttttatatcattagtaaaaaaatactttcaagaaaattggtgagatagagtgaagtggtgctgcggcaacgtggattctttgacaacctcgtcaggagtggtcgctactcatatgcacaatttgaggaaaatcgatctcatagctgcaaagaaagaaagaaagagaaaactgctcgatgcagctgttcgtatacacactcttcttattatttttcctttatgacatctctttatacgtatatagtgagggattacttgaatagatatatatatatatatataatggttgaaataatatatccacgggttatgtataaataaataactagattttacctttttatatattttttcttagataaacacgggttatgtaatatataatacttaattaatcgatgatgatatgctttgtttcgcgtgtcctagatatgctcttccaatgaggtagaccaaatgattcttaaaagataaaaggacatccacatgctgtaaaaaaatgattgttaatttttcaaaaaaaatatatgaataaagaaacatataatatatgaaaatacattcatggtgattgcatatatctgtatgtattacacaatatggagtgagtaaatttttagagtgctactcacaatttaaattgtttttatttttgaaaatataaatccaatttaactatgctattcagtgatatacaatcatataatccacaattttaatttattattattttttatggatgatttgatgagatgcgttatttagaataaaacttgaaataacatatacttttacaacttaaaacatatatggttaacatggaatttttttagtttttcatctaatctaagtatacaagaaagaaaaagtgaaaagacatataggggatatgtacgtacacggacgtacaggtccatggggacacgtacggccggataacgtgggatttttttagatagattgatttggtattttcttcaaataaagatctgatggttaaaaataatgagtccaccagattaaatgaaaaccgatggctagatgtttttcttttttattagaatttctatgatttattaaaacgccacgtggtgatctaggagcatttgtaggaatgccacgtagcggtttaggagcgtttgtagaaagtttaatgggtttttagtatataatagaagatttgtataagacagcgtactagctatacatgtacaagggagaagtgaggataacaaagataagtatggcgcaattctgattttccataattccattaacttttggaattgcgcgaagttagttccccccccccccctttttttcacgttttcatttataaagtaacagtgttcgatccttccatttcctgttaagaactcaatgtacatgccaaactacaaatatgtatgtattctattaaagcacttttactggaaaaaaaaactctaacgtaacaatcacctaggctaaatgttacttcctccgtttcacaatgaagtcattctagcatttcccaca

SEQ ID NO: 43451 - DNA, 741 bp, Oryza sativa
cagtattgcattgagataggaatggaaggtgtattgtcaacgagaatcattattgctgtggtcggtgtggtgacattggagcatcaatggagtaccttgttttgttaggtccatctagatcacgttggtacataccattttccataccggtcaaatcaaggatgaacataaactaacaagcaaagattcttctaaccggtcattttcgatgcttgaacccaatcatgagtttcaggtaggtcatttatctataactaattaaccggtcacatctactgccatgtggtgatgctacacagacatgtgccactctcagttcctaatgtaagctttccatgagaggcacatggaagctttgcaattgtttttttctccttcattattgagtggtaccaagatttcagatttcttgctccccgaaacgtggtatgatctctcttcagatctcaatatccactgaaaagaaatatgcaaatctgggcatttgatgaaaacatgatcaccgaaaatcatttaggactgaatgatcttccctatttttagatacttccccccttctctgaaatacaaggagaagtcactgaccaactgaaatgtctactgaatctgaattcttcacaagtcactcactgcttcactgcattcagtttactcttccctgtcagcttctgaagacctgcaagccagcaaagactggattttttgagtgaaagactgaaatctcactcgtcaggtcaaggg

SEQ ID NO: 43452 - DNA, 588 bp, Oryza sativa
ttcctgcagccccgtaatattaggatatgtcatattcagtattagattgtttttttatgggacaaagggagtatgtaagaacaagttgatatccaggtgattaaaagagtttcccgtgtttttcttggaaaagggcaaactttttctcgcaggtgaagcgaggctgggctggctcggtggtgagatgggccggcaaatatcgcgatgggcttttgttcggctctgtagcgtcccggttcttccattgcgcgattgcgggcgacgtggcggcgcgtcggccacccacatcatcatcgtctccacctccgggcttttgactcgggtagggagaggttactgactttaactctgctcgagtggttcttcctcctgcggttgccgtgccgtctcgtactctctcgtgcaggctaacgttggaatcttgggaggggagatggcggtcgtggcatcgaggtgtacggggctgctcctccccgacctcggcgcgagcctcgccggcttccgccgccgccgctcgacgccggcttcttctctcagcttccgcccgcggcgggcccgtcgacggctcgggtccctctcctgcatcgc

SEQ ID NO: 43453 - DNA, 1762 bp, Oryza sativa
ttttcttgatcatgtggttgctcttgcttccggtgagcccactgtacctcatgcacgggttgttggccaattctcgagtgcagaatcccgaaagttcatcaagttgctgatccaagaagccatggctaacaatagcttgtggtgatcaattttagtggtaatgctaagacctattgacaagtaagtctcgtttttctgttgaagaggtactatgtgttgtctgcctgagcaccagcatgtctatgtctgtttgcagaagtgccaccagattactttactcactaaaatctcttggtgacagaaactttgaacctttatgaaagctacctttccagctaaactaatactatatactataatttaataatagttaaatgaacttgttttaaatgtatgttatctgaatatcacccttatcgtgttctctcacctgtatattgtcatatgtttcccttcatctgcatctcgatttctaaaagatggtctaattcctgcaggaggcgatatggtctgcatgctcagtcctggaaccaagcattagcgcgtggacattggtactgagctgttccaactcccttaacgtatatgattttgctggtagaaccaggcattcggctacagcattgatatgttggtgatatttgaatcggtgcatgtctgcatacatatttgcataatgaaaatgcagacatgtgttgcagccgcaagcatgcccatgttagtaaactgtttaccaatcaccactagtttctacttagaattgcaatagaatgtttatatacaggagcttactaaaatttgtgtgatatatatatgcttctgctactcttggggaaagctgcacaacctgtgttgatctatcttagcatactctcaactgaagtgaaaaattgcaggccaactattgccgtgtgtcgttcactcgttcgtctgaactttttcagttcggactttctatattttgagcataccagatgagatgacagaatcgtgacgcaggctcgttgtccccattgtcgacagagttctgaactcttttatctaaatctctgttctgttcatatgaagtcattcggtctttgttttcaagagcaagccccttctttagtactctttttaatatttgacggtttgactctcaacataagtttgaccatttattttatatgtatttcctttttccatattataaatcgttttgactttttccatagtcaaacttcttttaaatttgattatgtctatagaaaaatctgtagcatctacaacatcaaattaatttcactataactaacatttcataatatgtttgttttgtgttaaaaatgttgctatctttttgtataaatttggttcaacttaaaaaaattgactaagagaaaaggtcaaaatgatttacaatatgaaacacggggagtaattatttttatgtgttttatcattacaagtattttaaatatgattttttttcatatttgcccaaaaattttaaataagaccaatgtatgtctgtagatcaacgatgtcaaacctagtaaattttactttgggtcatcttttattatcattgttttgcttttgaccgtcatttaacaaatgttttcattttgaaccaattaaatttattttttatggcactttggaccaaccttaacaaggtaataatctaaagttagctacgggagttcattgacaaatagaagccggcgcattggttgtcctaagtgaaacaaagccgatctaaaatgaaaatattagttta

SEQ ID NO: 43454 - DNA, 1909 bp, Oryza sativa
ataagagtacatataagaacccaatagcagattaattaaaatttctaataataaataaataaataatctgcaattaggcaaattaaaaagagagttaaagtaggaatacaattttgaaacaactgcgattgaaaataaaaaataaaaatatcaaaagaacataataataaataaaataaattctgaaattagaaaaagaaaaaaattcaactaggagtacaatttataaataactaaaattggtgataaaaaaagactattgaaagaaaagaccatctaaaacacatacgagattaattaagtaaagtcctataggagcaaagtggtggcggttgatgaacttctagaaagtaaaaaaataaaccccaatgataatcatatttgattttaaaaatctcaattacaataaaaatgagaggcagcgagcgggtcatataggagtacaatggtagagccgccgatgattggtgggtcttctagaaagtaaaaaatgaattctaacgatagatagttatgttcgacttttacagtcccaatgacaataaagattatgcgatggacaggtcgtagagaagtatagtggcaacatttgacgggatttctaaaaattataaaaaacatgaaacccaacgagacaataaaactctaaaaacaataaggttcaatttttaaaggttcgggcttctaaaagtaaaaaaaaaataaaccccaataataatcatgtttgattttaaaatctcaatgacaataaagaagggcggcaacaggcgagccatagaggagtatagtgacaaagtcgccgactttttggcagaacttcaagaaagtaaaaaaaatgaaacttctagaaagtaaaaaaatgaacctaaacgataattatgttcgatttttaaaatagaaatgataataaaaagaagatgcagtggacggttgtagaggagtataatggcagtatttgacgggacttctaaaaattataaaaaagaaacccaacaggacaataaactctataagtttttagatccaatttttaaaggttccaaggagaatgaacaaagctaataaaaaataatatgacagaagtaaggggtagcaactgatgtatcttttaaaaactataaaattagaaataagaggatgataagatttggtttttcaaaatcttaagacaacgagataactatttaataaatttgaagtaaaatcataataaaaaatatataattttatattggtgctagccgcgcaattgcgcggaagccaccacgttcgctgtggaagctagaaattcccacattaatcgaagaaaaagaaaacaagagtccaagtagaaatacaaactaaaaaataactgaaattcggaattaaaaataatcaatactgaaataggagtccatataagaacccaatacgagattaattaaaacctttggcaattctagattttaactgtttatagtatagaaaagataagtgtatagatctgtactgtgtacgttacatactaggagtctttgtccttttctatttctttggcggtgtacacagtagacgtataatctaattcaattacaaacctatatggacaagagttgtgctgccaaataaacaaagcttgcactgctgcacctatatattctgtagatttcaagcagcaacgattgggctagagcggcagaatccaatgatagtgggagccgaccctagtaaaaagacatgatatttacatagatattacaacaaacagatcaatacttgcagccggcaatgcatcaaacaccaaaagtttctttgatgtttatgaaagtacaaatgatatcgacatattgtaattagtgtatatttttcacaggagatgaattagtgcaagccgctataaactgacagtcagattaaacgtttagattat

SEQ ID NO: 43455 - DNA, 722 bp, Oryza sativa
agctacaaaattcaaaaagtaatttagaagttagaaactgggtttttcaaaaaaattcatattctcaaaaactaaatcagttgcttctcaaaatttagggagcttaaaattataagaagcaattgattgatagtcggtctctaaagaatatgaaaaagctaggtttcctagtttctggcttctagttcattttctagtttctacaactatagctcaattttctagcttattttctagtttattttttagattttactatatctttttagaatctgaacgaaaagctagagatgattatctaaagagcttctaatcctaaaagaactgcatttgtcagagattcccccaaacaagccttaaaagcatgagcaatgggtatacttggctcgtacccctgctcatggccattacttttcatgtccatctcgtgcccctgtgggggacgcaccccttggtgacttttggtagagggacaagccaggagctacattgggcacgccgtagctagggctggagcttgtggacaccgcttcccacacatgtatttccctttctacccttggccagacctggaggcggcgaggtggtggaggagccagaggcgacgtccgcgaggtggatagcgatgagaggcgagagagaggaagagatcggaagagtcgttgtcctccccggcctcctttgccgacgccgtgcccgccatagtctcctcgggctgcagg

SEQ ID NO: 43456 - DNA, 659 bp, Oryza sativa
gtattatattgacatctcagtttgtattgtagtgaaaatagtttttaattaggcaatggtcgtagcagcagagtataatgttgacctgcttagtctgactgtacttttataaaatactcgaatagttaaagagattatgtttatttctgctttgcattatgtgttgtcaatggtgtctatttgcaatgtattgcctagcggctctaacgtggtaaataattgcaagttggtcaataagtatctaacagaatgactaagctcatcaatgtgaagtatggagtcccgacttaagcatgaaatgcggtaggttgtgactggaggaatgtcaagctcattctcttgagtcgacttgagtgtgcattgttcagttttagagatgaggagttgatggagggtttcactgaaacaacatcaatcaactagatgggttcttcatggtactactgcacagtagtactggtaaatttctactactagtatttatagctttcctagatcaagattttgaccaatacttgttttaagtatctgggtttccaaggcttgagataaatttcagcttgactataacctagtgtctagctgatgctgctgatgccctgatttactaatttagggaggagggaattccataaaagaggataaactgcacctgcaat

SEQ ID NO: 43457 - DNA, 4795 bp, Oryza sativa
gcgacgcgggggctggccgctggcggcggcgcgggggctggccggctgacggcggcgtgccgcttggcggcggggattcttttttttttctttttttttcagatctggagctaaaagtttgccaaacacttttgatgggtctgtaactccaataggagctagctccaactggagtaggagtttggagctgggagttggagtttggagccctaccaaacggggccgtagtactatgcactcgtagtagtagtaatggccaagaacacctaacacagcaacagtgcaatgcactcgtcggtaaaaagctgaaaagaggctgtgaaagttagaccaccgtggtgattaatcatcagctaatggtagcatctttgcatcaaagagtatatccaacagtatccaactatcagtagtatccatggtggtcgtggacctttgctcccaaaaaaagacattggattcgcgtgtcttttgaccttgcaataaagaacacaacaacacccgggctcgctggccaagaccaagagagcagaagcagagaccttgggttttggagagacccaaaaaaatgagatggacggacggatggataccgatggatttgatagaaagaaagagctgtctctgcagtgcacacacacatgcatcttttgggatctcaagaagatccatgcatgcaatgcaacgatgcagcaaatgagatgcatttgcatgtgccagtggcaagcaagcaaaggggcaaagcatagtctactccatctccatgtgacatttgacattggaaatcaagattccaagctccatcacacacgccctgtgactacgagcatgtctgtctggactgccagtcttgttcttgtcggtaaagcaaaaatgaatcttttttttcaacactctcaatcttgctgtttgcacagtgatttaacttaatcactgatgagagtagtagaagtactagtagtactccctccgtctactaatataagggattttgacattttgcttgtactgtttgagcattcgtcttatttcaaaaaaaattggaattattatttatttttttgacttactttattattcaaagtattttaagcacaacttttcgttttttatatttgcacaaattttttgagtaaaacgagtggtcaaacagtgtaagtaaattgttaaaatttcttatattatagaacggagggagtatcaaaatctcttatattatgggatagagggagtactatagtgggaatagggtgaacagtaatgtaacatgaaaatgcttactcaggattttggtgcagggtgagatgtgattaatactttaatcatcatgtgatgcagtggccaatcatggatggattgacttggacatgccatgtggtggcttgtgaaaagatggcaggagcaccaatccatcaattcacaacccaaggaagagcaagaggagcagtgagtgatgtacactctgcaatagctgaccctggagaagctgggccttcttccatggtggcagccattgccggatggggagcaaagcaatgctggttttgtcctcgtgtacattagggatgggcagtttgtaataacgtgatggtactgtgtccaaagctgcagattggccatggtattggcatggcatggcatggcattgtgtgtgcctaatttaagaagcgcatggaaatcaaaccaaaatttggcacggttcaattgttcaaaacttgtctgccgtctggatgtcatataaaacagggcacaccagtattttcattcaagtggtaggcaacaagaacatggcatgtaaagggagttagtagagcgttctctattttatatatatggccggacacaatgagatgatctcgtggccatctgttatagtactaaccatttgttagatactctgcgagatgaaagttattggttctcatgtgtagcaatcataagacattctgcacactattcctctttgcattaatctatctattatattattaagacaaccttgaaagaagacattacgtttgttgtgggggctataaattctcacattaatcggagaaagagagaaaaattctaaaccgttagatcgtagtggatctaaattataacggtgtagattgatagctatatatatgtagtgcaattgtagtttttaaattataataagttgtagatgaaatatagtaatctactactcatatttggaatcaggcagattagaatcggaatttttttctttaatgaaaccgttaaggagtaggattgcagccgcgtgaatttttcctgttctttaatgaaaccgttaaagagtagaattgcagctgtgcaggagctaagtgctgaccggcccttcatgctctgctcctgtgcttattagaactctagatttactgtgaaaagcagaggctcatggcaaactaatcaggagtaaacacacaagccattgttggaccatgcatcttccgagttaccagttggcatctggccaaagcacatcttcacacattaagctttatatattacttgctaaaataattttaggacatcatcttttcacttatgcttatacttatcagccaaaatttaaattttcaactttaaatataaagctgatttaaagattttttttcatcgaagtgtatttttcagcttttgcttttaaacaaccttgaaaatataaaaattttattcacaaattactttttttttgcaaatatgtcgttaacgatggaaccgttaattgtttgttaatcttaaaacatgtatatatgtgaaagcatcctatcaatccacaggtcagattaaaaagggacaatgaggatatacattatgttaacagaagcaaaaaatatcaccaagtttgatttggagttctagaaatatcatattaacaaaagaaaacaataactatttacactattagattatgacagatctagattataatggtacagattaattgtactatacgaagaaaatctacacacctaccaatgtattgcatataaaagaaatagcagattctaaaaccacacaattatatgacaattcgatttaacatgcctaataaagaatagtagcggtagacattcgagtggagtggtagcataggaataggaagtggagggacaatagggaatataattttgaataatataactttgtttcgacgctagccatacaattgtgcgggccgctcaaccttaaaaggagtcaccatattcatcatggtggctaaaaattcttatattaataggagaaaaaggaagaaaagaactcaactaataatatactaaagactacaaggtccaattttcaaaggtttggaacttctaaaaagtaaaaaaaaactaataataatcatgttcgattttaaaatctcaatgacaataaaaaaggaggcagtgggcgagccatagaggagtacaatggcaaaaccgctgatggtttggcgggacttctagaaagtaaaaaaatgaacccggacgataattatgttcaaattttaaaaacccaatgacaataaaaagaaaagacaatgaatgggccatagaggagtataatggcagcgtttgacgagacttctaaaatttataaaaagaaacccaacaagacaataaactctaaaaattatttgatccaatttttaaaggttccaaggagaataaataaaaatagtggtagatcgagcaagtaaataaagaagaagatgacaaaagtaagggatagcaactgatgtaacgtttaaaaactatataactataaacacagggatgataaggtttggtctttcaaagtcttaagacaacgagatagctatttaataaattttaagtaaaatcatactaaaaatatatgattttgtttaggtgctagccgcgcaattgcgcaggccacccagctagttagcttgaattgacagtgcttctcatatctttaattaacatcgtctgagttgtgcaagctatcgttaaataagttatcgatcggggatgtcacacgccacggcacgcatgtggagccatgaccttgaaccctaagaacggtgtgaaatgcctacttgaaatctactatgttcattttttaggtttctcgttataaaagtgatttttagataagatttatactaagtgatgaaagagtagtaatttgcataagatgatggactgggtttttcaccttttggttcttttagaaaacttattctataaatagaccaataaaaaaacttattttaaaagtggactttttcatggcgccggtccaacatgacggcatctatgatcgttggcatcgtccccctcatccctagttggaagctaaataatttaaagagagacaacaccaatatcgttgacaccgagggtttatttgtacttttttttaaaaaaaactatttgtaataaaaaaatatttataaacagatcaaccttcaaattagtgacttactctattagcatcgttatattggaccacaacattaatgaagttggcgccgtgaaatgtttaattcctaaaataagtttttttagtctatttgtagaataaatttttaaaaaagaccaaaagatggaaaatcaaagaaggatggacaacacatccaattcatcgtactccaagtaatagtaaatgcttgttttttctacagagtctcagtacaaaatcacttgttagcgattgtttagtttggtaaagtaacaaatgtccgactgtccgattcaacatgaatactcaaatttacggctagttatcttttttccacacgaatgctaggagacgggataccgttgccctaacagga

SEQ ID NO: 43458 - DNA, 1938 bp, Oryza sativa
accccatccgcgtcgcagaggaaccacccctcgccagcctcctccagcgccatcgccgccgtggccggctgcgagtactccctcagctcgccgccaggcatcaccaccctcgccgtcgccgccccctccgccaccgcgtcgcacgacacgcagatgcccattgccgcagtatgaaattctctttcctcgatcggttttgctttgcttctgacgctggggtggatcgctgtgccgcgcctgttcgatcgatctttttgctgccgtggtctgtgccggagacggcgacgagggtgaggagggtatatatagcgggggcgggaggtagatgacgagggtgaagtgtcgtgtaggcgggagtgggggcagcacaggctggaggttcgttgcgggttgcgatttggcggggttttctgggtaaacgtggtcagaggatatattatctgaagtttctgtatcctgattaagcagagggtgttgttgttgcgattatatttggccagctagattagctttgccggtcaattgcacgtacatgtacgttgggctcggattggctggataggatggctctgtatacagggatgtggatttttcatccctcgaggcgacgtctcctcgatatttatatatcatctaaatagttatcaaatttttttaaaaaaattaataacatagattaatacgaaatatatcactccacaaacatataaaaccaaattcatcttctactagttgcaacaaaaataacaaattaaactgaaaatagctatcgcatattcgcaactgtatttattattttttttacaacttataggagttgaatttaaacttaaacttgtatgtttgggagtgatatattttatattagtctatactgcacgacactatcaaacgaggacaagagcgcagggtggttcgctgccgtcagattcagatctgatggttgcagatcacgtggattatactctctccatgctccattctgcccccgttattttcaacttgcacttatcggattatttttatcagttttatttttaaaatctattatattattaaaggaataaaaaaaggagcctccacgttcgctctcatggtctagaaattctcacattaatcggagaaaaataaaaagcagagtccatatagaaatacaatttagaaatagctgaaattcggaattaaaaaataaggaatattagaagaggagactatagtccatacagaaatacaatttagaaatagttgaaattcggaattaaaaaaaggaatattagaggaggagactagagtccgtatagaaatacaattaggaaataactgaaattcagaattaaaaataaggaatattagattaggagactagagtccatatagaaatacaattaggaaataactgaaattcagaattaaaaataaggaatattagaagtagagtatagaatccatatagaaatacaattaagaaataaatagaaattcggaattaaaaaagaaggaatattagaagtagagtatagagtccatataggaatttaaaactaactaaaattcggaataaacataataaaatgaaaagtagtgtttagagtccgtataaagatacaatttacaaataactaaaataaaaaattaagaaaaacatgagaagaagagtttaaagtcaatataggaatacaatttagaagtaactaaaatttgaaattaaaaattaaagaatattgaaagatgagtttagagtccacgtagaaatacaattagaaataataaaaattcagcattgaaaaaagaaatattaaaagacgagtctagagtccatataggaatatatataatttacaaataactaaaatttgatattaaaaataattaataactaacatgtatataaaatacaatatgattattacacattagtagtttcgtaaagttattgca

SEQ ID NO: 43459 - DNA, 534 bp, Oryza sativa
taatcacgtattgggttcctatatgaacttctcttttcatattgcatatttttaatttcgaattttagctatttttagattgtatttctacttggactcttcttttctttttcttcgattaacgtgggaatttctagcctccacgacgaacgtggtgccttcttttcgagctgtcttaataatataatagatagataaaactattttttaagtttttaataattaatatttaattaattatatgataattgcatctctcgtacagctaattagcccaaatcttaataaaaaacaacgcacctttaggggccatttgaatcaaaggatttttataggaatttcataggattcaaatcctatagaaaatttttctatttgtccctttgattcaaaagattgaagctttccaaatcctatgaaattccaatagaatgatatattgcatgtggattttggaggaaatttagcaagagctccaacctcttggaaatttcctttgagtctatctctctcacatgattcttacgtttttct

SEQ ID NO: 43460 - DNA, 761 bp, Oryza sativa
ggttgaagaataaacactaaacacatatacctattgcatttatcactctttctcaaataacctttagcacaaaataaccaagagaattttttttcatttttttcttttcttgagcctttttgctcatatttttctcttttattccgggtacgtccctgtcgtcaagactgtttccagggattcggcacccattattttgctcacatcgaacacgtccttgtcgtcaagactgtttccaaggattcgttattcatttttttcatattttattctctttctcacaatgagcaattaaagctatttgaggaataacaatttaataaagcatatatatagagcatttatagatcaaaccatatgctagcatcaacattgcatattttcttaattcaagtatagaatttaagtgtcatgcatcatctcacataaaaacaaaatctaaatctcatgaaaagactagaatacatacaagctatgttagagacaaataaaccttcaaagtattgctagcatgcacaagaaaataccatatgtataaacaaagctctcttttctcaaatttttctcattgtcatattattgcttgataaaaccatgaggtacaaactccccctcaaaccatgccaaaaggatgaattattcccaattcaccacgaagaaaagcaaagcgattagaatccaaaggtttagtgaaaatatcagcaatttgcaacttggtgtccaaaaaccgaaattcaacatctcccttctcaacatgatct

SEQ ID NO: 43461 - DNA, 738 bp, Oryza sativa
tatattaaaactcaaataatattacatgcatgctaagactaaaatagtcatgtatatgctaagtgtttcgtgcgtatatgctaagtctaattaagactacaatagtcaattgctacttgtcgcaccaattccgtagtcaataattacatactaagtctaattacaaataaagtaatcttatattaaaactcaaataatattacatgttaagactaaaatagtcatgtatgctaagtgtttcgtgcgtatatgctaagtctaattaagactacaatagtcaattgataggagtcgcaccaattccgtagtcaataatgtcatactaagtctaatttgcaataaaataatcttatattaaaactcaaataatattagaacactacacaatcttatatgataagtctaattacaggtctaataatcttaattaattgcattacaaatataacaatcatttatattattacgtcacttgcctgctccaattccttctagggctagctcttccactcaggcttgacggacgactccgacaacacgtcttttttgcaagatacaaaaagatgtatttggataaatgcgaagtaacaaatatatatatatatgtatatatatatatatatatatatatatatatatatatatatatatatatatatatatatactatatatatatatatatatatatatatagatattgcatttcacgttaacgttcgtcctcgttcgttcgggc

SEQ ID NO: 43462 - DNA, 1002 bp, Oryza sativa
tggggaggggtgcaggtcagggtggggagggaggtggggtgaatccggagcgttggatcggagcgaggtaatctgaacccttgagtgatgaataaaagaatgagtgaaagtatttgttgaactatagggtagatgagtaatatactcttgtagtattttcaatgcccagtacacagggaaaatatcatcctttaattgatgtcctttttctttctttactgttatcctaaccacttgcttgaacaagctgaggatgctctagtttgcaattcatgctctgtgttgttaactaatttagtaaaatatatgatgtgttcttttgcatactgctcctcggttaagttaaccaaatacaaaaacctgctacaaaggggaatgtggtcagtggagcagtttttagcttgtctgttaaatgtgccgtaatgattagttggcatttattgttcagaagtgaatgaacatatactgctccatgatctctatctgggcagcagccacactgcaaatttatccatgggatatcagattgtggcagatatacatgataaactgatcacataaggctatgagcatggttataaatttggagccatattttcagttgattccatttggcattctgatggcacccaatacattggatcattggtaataaaatggacttagaaaatatatgtttatgatgtttttgcttttcccccctttttgattaattgtactcaaccaagttcatgaatattgattggtatattgtgaatgagcacatgaactgttcatcatgatccaaactggcgttcttttattgttgttataaatgtcatgccaacctattcaagttcatgacttcaacttcctttgtttgtctttaatgtcatgtcaacctttccatggctcttgatgtatcaaccacaaaagctagctcctagtgaaactaggagcaatactcatggttcatgccagtagcctatcccttttagtttgctgttcatgccagtagcctct

SEQ ID NO: 43463 - DNA, 2092 bp, Oryza sativa
tttgacaaaattaaaatatcttatcatctgaaacagagggtgtaattatttgacacgtctctctcaaaatctcaatgcaccaactgatcgagccggcatcattattagtacctaaaggtaaaaaaaaagctaattaaattgcaagttgcaaatctctggccccttcacttaattggaacaaacaagctagagaacagctcaacaaatcaagacaaaaacttaaacgtagtaacacaggatcagcactagaataataatgtactatcgcactctgtacaacaacccctgaaatatatatagttaatccattggagtatatagcagtttttagccgatcttaattagactcaaaagcaaggtcaattctaccatcaggggtccatattgtgcccatcgcgtcgagcataaactaacgtcctgacagcgaatggcgaatctgaacctagattttcctttcacaggcaatcactatcttgcgatgcatgccctagcacttaggtgtatttatgcctaattaatctaggggcactagcttcttaatttactgactatttgtcactgtcttacattaggttagggttttacaggtagcttcaattattgccgtccgttggttaatttgcttaattccattttagcagccttttgatcgcggtagtgtgctttagcatatatgcatatatatatatatatatatatatatatatatatatatatatatatatatatatatatatatatatatatatatatatatattactgctgctgctagtctagaagcatctaaaagaaacatgcgtacgtactggaagaatacgtacgaccgagatatgattaagatgagtagatatatggtccaaattgctgataactactcgatcgtatataattaatcgtgactgacgaaaaccctaggtttatataatacgtcgtgatcttttgatctgttcacgaggtcgaccactcgaccgctggcttcatggtttctgattattatgcctgcaagcattaagatgaatgtcttctatctcctgacgacatccatttttctctgaggaaagctagctgaaaatatcaccaggatcagctccattgcgtggcatggtgaaacttaaaccgaaactattaatgttttaatagaggattttggaccccactaaacagggcttagctccgcgcgcccctaatttttcttaaagattatatatatgtgtacattttcttaactgaaatatatatatctataattaatcacatgcaaactatgtagtgtacaagaagctcaagctagctagctgcaaagctgatcaacagagtgaagtgtttattacaatcttcaagcagatccagttaggtgtgtgtactgaagaaattaaattaaagatgccatttgtgatctgcggttatatataaggatgaactgtgcttgtcatgcatataacacgactattgcgaataaatacactatagtgtaaaaaacaaatgcaaaaattagccacctatatatgcgcatttgtagaagacaccatgtacgtataaaacaatttcaaacagtacatactcccttctcctcaaactggatgtagaacatgctgccacacccaactctttacaagagcaaagatacacagagcctcgtcggttacccatatcccctaataagccaaaacggcttattaagaaataaaaattaatttataggtaaaactatattatatatttattcgtagtgatttaaaagccaatgctaaaaagaaattacattgaaatcatcttacaatcaatttcagaataatcaaatttgaaaattcaaattttggcttttgcttttacttattagaccaaccgatagggcgcgcgcgcacaaacatggaaattgtggttttcaatgtcttctctcacacaactttattatatttatataaatgttattaatcgtatttgattatgaaagatatattgaattaacagggctgatctgctggaattaaaaagaattaaattgaaatataaagtcatgaggagggcaaggattctgacctgagtataacatatatacgtactgtagctatcatatttcgtatatacca

SEQ ID NO: 43464 - DNA, 5756 bp, Oryza sativa
accatgatgaaaaaaaagccttcaagagatagctagctttaaaattaatgatattgatttaatcaatatacaatggatgagcaatctgctagctattttcatttaattactttgattcatttacaaaggtatacatatttaatttgtatccggttcttattttgaagggaaggaagcatgcataaattaagaataatggtaccatcaaaatatcaatctgcagcagtacgtcattcagatgcgcatgaagtgctagatttatgcagaagctagctagctaccaagagaagaaaattaaaacagtcgtcgcagttaggtgatgtggagccggccgggcggctatagcaatttgcaaaaatatacagtgcatctgttgacacagcaaaatctgttcctttcttgctagtggttccccgggaatctaaatatgatatggcaccttccatggccccacccttgtttaatatgtggacaaaccgaagcggctgcaggtatgcatgcatatatatgcaaatggtagcaatatcatgtatatgtgcaatatgcagattacgtacacatgcaacgacacttaaaaatactaattgaccgatatattaattattaccttcatctaaaaataattgtatttctaccattcaaattttgttccaaaaatatatccgtagtaaggtgaaatacatctaattagttagatggggatatcctgctcccctatatatatcattccatctttgtctgccttaacctatctttcattttatgcatgtggggtttattgtggtctttgtatgtcctattaatatgtctaaagatttctaaaaatataattattttaaaatggaggtagtagcatgcatgcatgaggtagtaatacacaaaattatcgtgcctttttttttcaaatatataattttcatacgaactcgaaccattaattaatctctatatctatatatacaaaattattaattttgtaaaactcatgcatgcagtgcaaattaaggagtcctgactcctgaatatgttgggagaaacacctgatctaacacacacacacttgctatttcatcacgacaatgccttgacaaacgccaaaaaatggcaaagaatatcttagagaaaaaaaggacagctaatgcaggtcaagttaattaagtttatacaaagcatgggttatgtcggatatgtgaaaactacgtacgttttctatgtaaaatatatatggcttgcctaaaacaaatgaaagtgatggtacatgtactgatgtacacaccttcgaaagcgacttttatttagggctgtcgtcgtgaaaactacgtcaattcgatgaagggacaataattgatctataaatcatctgagtccgatctgatatatttgtgtcactctcttgattttgcgcttgtccgataatttataccggtcaatatcttgtataagatcgatatcgagaaatacttggaatcgtatttaattagtgcatgtcatatcatacttacagagccccattaattcttcaaatttatttgatttttgaagcgcatagaaagggccctttacttctttgcaagaatgtaattaataaataaaattacaaataaaataaattaactcattatcatgagaatatctatgtatggtctatttcatctctggcaggtgctagatcgatcgaggagacatttttaaccaacaggaacaaggcagatacatgcataatatgttgatcccgcgccgtccacgcgagggcagctcgagggccaaccctatcagccaccgccgcactcctctcccctcccctccacctcgtcgccaccggagcatgccgtaggaaagtcgagcggtgagccgggatggcagcgggccatcccccggtggagctccgcctttgacacaggaaaggcggcgcgacagcgtgcgtggcgtagagaaggcaacgtgatagtgcaggcggggagagaggcggtggacctggtgccaccgtgttcagatctggagcacccatggcaaggggcagtggccggcgccgccacgaccggatctggagcccccacggtgtgtccttgccggatctgaaggttttcatgaggcgatagcctcgagcggccagcgcgcggtgacagtctcgagcagtaggcgtgggagatcgacgcgaccagcgacgacggagagaggatggcgtggatgatagcgggaggatggcacgggcaatgcgggagatcggcgtgaccggcaatggtagggaggtcggcggtggctagtggttggtgcgttcagcgacagcaacagtctaccatttgtgaggcgatggcatgagaagcagctggcggtggccagcggcaccgacgatggccgagctagcaaccggtgtgggaggcgtcgttggccgcatggaagacccgacgaaggctagtgcgggctggtccacggtgggacactggtgctgtggtgaagctttgggggggcgatgataggttttggtaagggtgctgcaggtgaaagtccagtggatgggtgacgatggcgcctctagtgtcatggccttcttggaggtgtcatctaggagatctcttgttcctcaacatcaccgtcttttctcggtttgatcgtcagagtttttttgttgtcgtcatcaagttggagcaagggatgagtgaatctccttctctctcaccctctccctcaagtcctcaactcaacccctctatgtgagtcgttgttcttttgtgtggagtcagtgtttagcacggcgtttgcaacccccttgtaggtctagcggcgttcggtctcgtttagtggcgatcggttcggtgctagcaccttctccgggttgtgctgttaacttgtggtggtgatgtgcttgtgtttttctctttcctgattataatctctagggttgtaatcttttttttattaatttctatgtcaatatgaaacattcgcaatgtctgatgggagttgtttcatgataaaatatataatagtcgatgtagtatatatatgcgtcgtcgctgatcaaaagttgattgggatgtgccaaataaaaaataattaaaggtaacactagtaaaatttacttcaatatataccattccaatcaattggaagatgccaacggcggtggagtaataaactggtgccactacgccagatcctcacacctttgacggcatacctgtgaaggcataagtgttggtcagtgataagagtcacctttgatgggttctacgggatgccgtcatcggtgagccatccggcaacggcccgtcacagatgttatgaaaccatctataatttgtcctcttttttttctgtcataggtggaaaccacccaacctgtcggtgatatgggcccgggggtaccatgtttagagagaggaagccgcccccaaactcgagtggcatcccctgagaagggtggcgcctgggtggagcggcggccaccccctcccagcttagggtcccaagtttggagggaagaggctgcccccagacccacgtggcacttccccgagcgggtggcgcccggggtggagtggcggctaccccctcctcgcttgggggtcgggcccgtcccgaccgagactagagggaggaggccgcccctggcgccacgtggccctcccccgaggggggatcgggcccgaggtagggcggtgcccgccccctcctgtgataggggtcgggctcccccctcccccgaccccctctgtaggtcgccacgtgcgatggattaggtggacgcctccaggcgcccacctacccgcattcatggtgacctgagcggttgcgccacaccacatttaatgcagcgtgcagtgcactcaactgatctgtgaccgatccgtgaccggttgaatgaccgatgggacgacgactgtgtgccttcgccttgtcagtgtgtcaggcgccgtgcggcgtgccccatcccgtcccatcataatgatgaggggcttcacagcctcttatctcggtcagagctggtctaaccactctgaactgacccgggtacctttttcctggagtgaacgggaacccggaagtccttaaccattaaacaacgaatgacaagggcgccccgcatgatctgatgggccccacgcagcagccgacgcgcagatagcttttgggctaaggcgcaagacatgtaattaatatagagaatattttcccttctccctaggtagcactcgtagcatatgtgggatccccttagagtataaaaggaggaccatgcctagtgagaggggggatcggactctggatcccaaactaaagcttctctaaccctagcttgtacttgggagatttagaggctttgcaagcatagaagaatcatcatacacacaggagtagggtattacgcttcatagtggcccgaacctgtataaatctcttgtgtctcttttgtctcgaggaaattcagatctcactcgctcccccggcggaactcacaaaagggggatctcacgatctcccgctagagaggatcactccttgacacaacccaatccttatctatcacccaccgacagtccgagaccactcatctctcgttttttctttcttccttatacatccctctctctctatcgttttttcttctttcttcctcctccacacgcaccgagcttgcacgcgccgagcaccgggtccaacggcggcctccgactccacgcgcaagtagcggccaccgccggttgcttcctcctccgccttccaatcgccggccagcgccgcctcccccgaccgccggccgccggatatggcctacggggcgcggatccggccaccgtgggctgcttcctcctccgcctcccgaccactggccggccctgcctcccccgccttccgaccaccggccactggatctagcctatagggtgcggatctggccaccgcggcctctgcccccacagcccgaccgcttcctcctctgcctcccgactgtcggccgccagatctggcctacagggcacggatccagccaccgcggcctctccccccaccgccagccacttccttctctgcgtcccgaccgctggctgccgccgcctcccccgcgtcacgaccatcggcctcgaaacgtctgggggacgcagatctggcgcctctcccccgaccgccagtcgcctcctccgccaccccaccgccacctgccagatccggcagcagcctcctccaccgcactggcaacagttggatccggcggcctctaccccaaccgccgacgtcgtccaccgtctccttcacccgctagcttcaccggttgtgcaaattttcattgccaaatttcagattgggttatactcatggttgcttgtgtggatttgtagtttattactcaaagttgtgtggatttgtgatgtatattacttgtgtgaatgtgcttcatgtgtcaacatatctgtgaataaaatgcaaagttattgtgtcatgagatcttgagatgttcttcatgtcattagatatggcctaagggctgagagctaagagctagctagaggctgagggcttttgaaattttttttcgttgattttccacacctgtgacgggtggtgagttgaacatgtcagaggtgtttgtcacctttgatgggctgaaaagatccactcgtcacaggtgtcaatcatcattaacgggcttttactcatttgagatgaggttgttgacgaaaaaaatcgaacacaccggcctaggagatctgcttagctcctgtgcaggtccaaatcttgatgagatgtgggcgtgc

SEQ ID NO: 43465 - DNA, 508 bp, Oryza sativa
tctagattcattaatattaatatgaatatgggaaatgctaaaatgacttacattgtgaaacggggggagtagctagtagtttttgtttttcttttttaagaaaaagaagtcaataagcatgtgcaatgcatgaattgtggcagatgatgataaaattatgcagtttcattctctcatttcctagctatgcaaattaatgagattcccatatatttatgtgatatttattgtactctttccgtgcatatatatgcatctaaccagcaaaactatttgactcgtgggccattattattgttagcattttctgagaaatgcactgcataagtcattatatttcttctgtctagtacataagttattactaatatatttcttctatttagtgcatctagccggcaaaattaattgactcattactcatttcttctgtctagtgcatcattagttaattaagacacaattgattggaccattaccattatatagaactccagagagtgcataa

SEQ ID NO: 43466 - DNA, 542 bp, Oryza sativa
cccgcacaaataatatttttttaaaaaaactttctttatcatcgcttcttattattaagatacttttaaattaaatcaatttattaacttcataatatttaatttgttcgtcttacccttgaataattgatatgtaaactcaatttcagctatcgtccatcagcactttagaacacatctagttttgttagctccgtttcgtatgctaccgagtttatggcttgctctacgacctagacctacctgtcagccggttgccctcatatttttaaccatttgatcatcaaaaattgccaacttaaggtagaactatatagagtaaagtccatcaccggtctctaaacttgtaccgctgtgtcatcctggtccctaaactcgcaaatcgaccgttcatatccttaaacttgttcgactgtgtcattccgatccctaaacttatagatcactcgtttaggtcctccaacttgttcagttgtgccacctcagtccctaaatttggatttgaatatcattgggtcaaataggacggtctaaagacttta

SEQ ID NO: 43467 - DNA, 745 bp, Oryza sativa
cattggccttggtcagtactattgtctcaacagaaattcagttcagagtttcagatcaaaatgtgttttacttttacatgcttcatactaatttggcactaactaaatagtatgtttgtttgattccagcaccaagggcagtggagaaatgcaagagctgaagctgatcaaggagaattaattagcgccgcatccagatttattaattttcacggatattatattatattatattatattatattatattatattgcatgcatgctttgctcctccctgtattatactagtatcaagtaattagtttactgtaattcagtgtcagttaagcctgtgtcatctcagtttttctaagggattttgatgtatttacatgtgggttagctccatcttgttatgctcatggagtatatatatacgtaacaacaatgtcatccttacgtcacccttttcctctctgttttttttttctgttccttttttttttttgcgggaaatgcggttggtgattacctgttcttctgcagggatcctgcagcttgtctaacactagtacagcagtgctcattatcgtggccatccaacagattataattaattgcctagctgcattgtttaattaattatgtcgaggtgctaattaaaaaacctgtttctggattcaatgatgagaatgagaggcatccttttgtgatgtagtgtacacaagaaacattagtatcttcacaatgttttatggggtgca

SEQ ID NO: 43468 - DNA, 726 bp, Oryza sativa
tcctgcgcccctactgggcttatcgggccaaattatatgggctatatctacaacattgctactttacaaggccgcatggttttctcacaggtgaaaatcccccccccctgtccaatggacctacggggcaagaatctcagtcgcccttggcccgtatgggtagggcctcgccccgttagggaaatttccacccctactacccagttactcataggcgcaaaaaaggtatttgcacataggctaacggaacgcaatgcatgtagattgtgatatcatttttttttttacaaattggcttatacaatcatattttctacgactgattgtcaatagaaaaccatcgaataactcgttttcacttgcaaaacttagattttctcttattagaaatgcaaagactttaagtccacgcctatttcgtgccaccttttaacaaatattttcactttaaaacaggtaaatatacctttatagtaccctggaccactcttaactattcttattcatctgcatcaatttgtcatatatatcaaagtaatagtgtaaatatagttgtgaaggttcattgattattcaaaattgttcatatatatgcttaagaagagagttgatactcggttcaaagtgaaagcgttggttatagtgtggtccaaagtgaaacatcattagtaataaaaggtagactaaagtaaaatttactaaaaaatataccattggtgatatttt

SEQ ID NO: 43469 - DNA, 4671 bp, Oryza sativa
tgaaagtttcaaatttgagatgaaaagttaaaatatttcaaagtttgacttacaaatttaaatttcaagttgaaagttttcaaaatttgatttcaacgttaaatcttgagtctaaagttttcaaattttatgttgaatgtttaaatttcgagttgaatatttttaaaatttaagtttagagtttcaacttttcggtatgtcttttagtttttcaatagaaagtcataattttttttgaaagttccaatttcacttatagaatttttttcaatatgctagagaaaaaaaaaatattaacttaattatcgtcattatctaaatctaacaaggttagttatgctaccgcgtggatctgcctctcgaaaaccgcgtgccacgtgcacatgatttctcttcccggcgcgtaagcgcggaataggatatctggcctctctgctaaaagagaggactaatgttcactgagaagacttacaagcctacgagtctgcgccatcaacgaccgtgaccatcttgtacaattaaatgttttgaaaatgttatgagagaaaattgtgggtcagtttaattaattacatagctcaaccagcatgtacagttagacctcttttggattgaaagaaatttcaaaggatttgtggaggattgaaatccttaagaaaaattttcttatactaccatagtttacgaattatatttggggagagatgcatcacattggaaggctcgagagccatcgcaagctggctccagccgtgaaacgagctgagccaggcccatgttttacctcatttacctaaccgagctgacctgagctaatcctaatgttttggccgaaaatttgaccatcttaaaaatttaaattttaaagagtaaattaaccgtgtaaatatttattgtaaaaataagttatttgcttagtgcaatcgagatcagcgccgaactaatatctcagcaccacaaatgttgatgttgagatattgtccgaggtgacgaaaaatggtggcctcctccgctgcttcacttcgtagacttgtgaattttggcctgattcatcgtgtcaagtctgcgttcttggcacattcatacacaagtccgattctcgatatcctccgattgatttatcgtctgagttgatgtcgattttcctccactttattgtcattctctgcaaaaggttagtatacctaatactagtggaatattattattctaacagatatatgcattgcaagcatcactagttctcctctattttggtaatattgacggtcgaaactaatcgataacgaccgtcaacaatcgggatgttacaatttcactagttaaaggataacatgtataatatataacttttttcactctcatactatttcacattctctttatatttttcttggatttcactttaaacttttcttagagattgtgtagatattatcttttatatgtggggtattgttcgttctctctttcccacttctttactccaccttatcaaataatcacatgtgtcacttttagaaacaatagataaactctatgagtaaggctactagtagatctaatgagaatagaaaacattaattcaaatttagcatgtcatccgagaatagatctaatgatattaatggacaccaaaaagataagaagaattatccctaaaaacaacacataattttgcatgcatatggagcacacaataattcaaatcatcaaatgagagaggaacggagtgagaaataatgaatattttctttctagacattaatcttcaaccaaacaaaaaaatagagcaaaaccaccccccccctcctctagctgatcaggcaaaaatgagagacgccgctcttttcttgctcaatcagctgggcgggtgggatagcacctatatatgtggtcgactgataggtgccggttctagacataaaactggcacctatttctgacagtacagaggtgtcggtttataagttgggccccccaacggctagttcaggaggtggagggtgaaaggtgccggttctataaataaaaccaacacatatctctttcaccacaaagatgctggttttagggtgggccccgtgccaactactttgatgagatggggaataaaaggtcccggattttatatagaaaccgacacttttatctgacaagggtaataggcacctaactatttgaagagaaatgtgctagtttttacggtttaagtaggctggtgtgggcgtgggcgggaacggcactataggtgtcggttttactagctatttccagcgtctatagtgccgacttgtattagaggttctgtgtgtacagtctgtaagttaatttctttttagatgacgaacatgtaaagaaccagctaattgaaaattaaaagtaccaatcaaagcttgactccagaaactggccgaaggtcaacaggcaaactcgaaggaggtcgacatgcacctcaacatcgacgacatggccgcagcttaacgctcgtgtcccctcgtagcaacaatcctggaaaatcgagatgggaccttatcataggcctggccctgagcggggcgaccgctctggcccccgattcctaggtgtgtgactacttagcgatcttctgccgctagacacgtgagggggcattcctaattaagctccatgattttgcaatcgtgcgagtatcgatctcatctgacgactgccgtgctggttggtgacgccatgcgcgcagcacatcagccgcatgcccgcatgcttacttatatcgacgatcgacgtgctggatgagcacgtttggtgtcgccggtgccgcatcaattgctggccgctgtgctgggctgaatgcttgaatcgatctcgccactgatataaacaccaatcatggcactgctgcctgctgggatcccggcaaaaaggattgtacgtcaatatattagaagatgagagtaaaatttgattacacaacgcacatggtaataaggctgttgccaggggtcaaggaaacactactggagaagttatcttttgagggtcgggcgatttctacaataatcccggttccaaaaagaatcggggctaaatttagtcccgattaaaaaaattctgatctttagtctcagtcgatgtttccaaccgggactaaagatcatttttagtcccggttcatcccatgtcagaggcatgtcaagggactgaggatctttactcccggttggtagtaccaaccgggactaatgtaggtatttagatttatgtttagtctcagttggtaacttcaaccgtatttactcccatatctgatcggttaagtcccagacaaagtatttagataagatcggatcatctcctctcctcctctcagatccgatcccctcttcctccactcccctctcctccttacccttcctcctcctcctctcccctctcctccccctcctctcctcccatccggcggccagcggccggcgcggccgtgcgctggcaggcggccagtggcaggcggcggcggccggcggggccatggcgagcggtggccagcacgcatgctaggcggccaagcggcgtcccttttttttccttttttgataatttgtgatgtatagtttctttttttatatataatttgtgattaattgcatggatctgagatgtataatctgtggtgtatttgatttgtgtgtaatttttttaaggatttatgatgtatttaatttgtttgtataagtaacttaggctttgtggtgtgaataatttgggatttgggatttgggatttgtgatgtgaatgatttgggatgttaatttgatttggggatttagggtttgatttgggatatgcaacccacttgattttggaggaaatacagggattaaccctagcaaatagtaaagaaacaatggaaaaaagggaccaaccaggatgtggctttgccacaccaaccgggactaaagatgaatctttactcccaggtatttgaacaaggactaaagactggcttctttagtcctggattctttctcctggttcgttacccggaagtaaaggaggttgcgaactgggatagaagaggggtcctctagtagtgaaaaaagaaaaaaaaaacaaatacaaagaagataagctactaaaaaagaaaaatctcctatcccaatgcatggtggggttggggatcccactacactccagcctgcgtcggaggcagggagctggggaagagtgaagatagggctatggcgtgatccagagggaggggctgggagaagagggcgttgtaagccgtaacagcctcggccaacacatgacccttctcaggcaccaacccaagcttgcgcatcaaattgtgctgcgcacataaggtcatgtcactcgggccggcgagcgcaagcttggccgcaatcctcttgctacgcttcgacgctagtctatggtggcaacggcaggcgtaggaggcgagggtagcaggagcagtactggaggcagagtcctggagtagctggcgaggaaggcgtgtatatacgtagcgcggtgttctcggcgacctaaagcggaagctgcgccattggctggccatcaagatcgagggtgaccatcggaacgtcgattaattagaaccccatcccttgcgaccgagggaacagccggcggcagggacaaggtcgacggtggcggtggtaagtacgc

SEQ ID NO: 43470 - DNA, 1008 bp, Oryza sativa
catatttccataaactgtcagtgaatccttccttttggttgacgtttttgtcatccgacaacatttcagttagggaaaagttgtacgtttagcagtgagaggtagggtgggtgctccttggctaaaaacccatgaaattaatgcttccattgacaccgagatagatagtttgataggtcctacaccgagatatatagtttgataggtccggttttcaggcagcattttttgtaatgttaggcgtgttttgcatatagaccagaattgaaatgaagtgacattagtcgatgtgtgtgtgttttgtatagggatatatggttttccccgctccctctgataatgtttaataagataattgatgtttagacttgggaatgctagttatgtcaaataaacataactgtgggggagagaatttacatttattttcttccttaatttggttataattgagattaatttggttataattgagatgagaatagataggaagaatggtcagcataatttagatggttatagctaagaatggtcggtcagtcaattagatggtgaatactacttgctatatagtggaatcaagattccaatgggatcgaacatactcctatgtctaagttgaaacacataatgctaatgtcaatagctgctgttcggtggtggatagtagcaattaagcaagcagaggcgaatagttactccactgtacttcaatgaataaatattaatctatagcaacaagtaaaagtaagacaaactaaggattaagtaacaaacgacaaataacacaaacttgactattaggttatttcttaccactccagttttacgcggtcaactagttgaatctcatgttgggcttagtgcttctaccggaagataaggtcgtcgacattaggtccagctctggctctggctatgtctgcacgtgcaaaccccactcccataagtgagtgcttggtgaggagcttccgcaggtggtgattgagtttatttagtgacagtata

SEQ ID NO: 43471 - DNA, 3542 bp, Oryza sativa
cctccctagagtgcataaaatgacaatttccaatttcctcagagttaatactctccctttgaactctacccgaatatctctagagtacatgaaatattgatacgtttcctttggatctccacctaaatatccccagagtccataaaatatccttttcaatccctctttgagtcaacatacccatcctttagagtttatcaatctaccaccaattccgttcctgtagaaattcccatccacatatacttccgaatccagttctattctccaacaaatatttcccctctgaaatctcgtttatctaaattatccactcaaaattccaaagtctactactttagcttgggccaatatttccccgattgacccgactctctgttatatcccattaaccatttttatattccaggctaactcagtataatttccttttcgttggaatttattttggatcaacacctatctaaatctatctcaaaaacctttattttcctctccatcaatccaaaatattctggggtcaaattcctagtttgatcgagccgccaatgtgattcccatggcacatgaataatattaatacaaatagtagagtgattgcacttgtgctaagaaacctattttcaatcccttccatacaaaatccaacttcctttagctcacaaatatttcaccgagaatccatatcacatatattgggctaaaatgcaatttatttgcctccatctatagagccaccatcccaaagatttatccaaagttagaattaaatcatttgtattttcttttcttcccatttgactattttaatttttaaatattagagaaagtcttacatttgattcttattgaattttataaaattggagcatttttttatccttattgaattcttttaaaatctgagcatctttattcccattcttttcaaatttatattctaaaaaataaatatatttgattttaaaagtatttcaaactcctaaaaaccattatttttaaattatttttaaaattcaaagaccctcaaacatttctttttagattttatttcccttttaaaatctatttaaatccctcgttagtttctatttcctagatatctttcttgtcaagttcaaaaagcctcaagcaagttctcttcattttattttcccttcaaaatcatatcccattgtccaaagttcaaaagtccacacgcatccattcatcctttagatttcatctcctttgaattccattcaaaaccctctacacaaaaattcctaagagtccctattcaatcgggctgaaacttctttctttcagcccatctagctcacggcccagccggcccaggaggactgagctgccgcctctctttccgtgggcccaccgccgtcgaacaccttgtggacgccgacgccgctcgccccttcccgatgcgccgccgctctaccgcaccacctgtgccgccccaggcactccctactgccacactaccaccgcgcctcggccacaaaaccggggccatccggtggcgcccacacattcgccgacgccgctgcaaagccgccgccgcctactgcaatgccgccgccgcccgccacatttgccgctgccgcccaccatcttcatcgctgccgtgacgctagtcgtagtcgcccaccaatccgccgccgtccaaccaacccggtgaggctgcccgacgccacctctccacccccaaatcgacgcggagccgtgccgtcatcgagttctcctccctccgccgccttcgccgcctatatatggccggcgagcctacaccaatttccccacccaaacccgagctccaagctctctatctctcttcccaacatcctccccaccggctgccgattccctttgccccttcaccgtcggccgccgcctttgcttccattcccggcgccacctccggctaccgcctccgtcgggcgcccttcatcggagccgcgtgctccctctctgctcgaccctttctcccttccctctctgtgttgtgcatgaaggaaggaaggagaagaagggaaaagggagacactgacagtgggccccaccttttataaagtaatttcattttcttttattcaattccaatctttgagcatcgatatctctccaaccgttgatccaattccagaaaacttttgatctaatttcatctcatttcaaactctcttttgataccaaattttctatttttaaaattttatttaaatttctttatttaaatccccttttagtcatttatttaattactttctaatttcaattttttttcaaaaccattttattttattcaaatacctttttaaattctaaatttatttaatttatcttaaatacctttaaatttaaatttctttgatttatttcaaaacccttttaattcaaattcttttacaatcctttagccacaaaaagccgccatgggaaatttcatgccttccatggggacgctcatatggtccgaggacctcgacgtcgaaccgagggtcatgaaaccggcataacctaaacccaaggtcgaagtgttgcttttcgcacctcacgcctcgacgcgtacagtagtcgaagcctcactactccatcaacctccatagcacaccgcacattagctttcgggatctgtgcaatccaagccgtttgctgccactcgcggctgtagggtacattttccgccccacaaacctgcataaaccttcccaactctctagtcattgtaccgcttgattgtagtatcgactagacgagccaatatttagccgctctgctgcccatccttagcatcagctaaccaactccaaatatctagccgtcgtgctgccttactctagcaccgactagaaaaccaaatccaccaaatcaaccacacctatccattttatcctttccttcaattccaacctttagaaaccaaaacccctcttttattttccaaatcaaaatttattttaaaccattatttttccccttgccttgctccaattttatttattccttggttttatcgtttctttgtagcaatttgcttataggctttatttgctatctttttcgtactcgtacgttagaccgtagagcaagctctatcgacatccaaggagctgacgtggacccagatggctacgcttaagccgcgggaaatctcgaggcgcaaggcaagacataactaaaattttgatcatatagaaaacttaaaataatcttcatatttaatttgatgcataatatcttttttctttacatctcatgggtaaatgttatacttcagaataacattgtgataattattaatgcttttgagcattgttacatgtggttatagagaaatgcattggtcatcattttatgtgatttattattcaaatatctttacaaactgagaaatccgattaaaatgggcatttgagttgtgattatgaatgttgatgaatgatgaagttggtgtggggagtttggaaagttttgggtggtttaaccggatcataattatccccttataccatggaaatgacatagttgcgcccatccacaca

SEQ ID NO: 43472 - DNA, 643 bp, Oryza sativa
tcataaatcactcacatcgagcgatctcacatccataaccatataatctaagtatggagtgtacaaacgtctacaatagcaatgttaagcaatgtcaataattgaatgcgcataaagagatagacttaagcaacaatggatatacaaaagtgtataacgataacaatatcaagggtaggcaatattcaagtgtaggtacgcaatttataaatagcatgcaattttatttgcaaacaacacatttataaatataggctcgatatgttcaaggaagagagcgtagtgacttgccttgctataggttcctaataatgtcttcgagaaatccgcatcagttaaataattagaatacccacatgcgataaatatccagaatatcgcggtcaataatagaaaaccatataaaatcctccaaataaagtacgaatcatcatgaactaattgtgccatttgatagatcctgattttagaggaattctggaagttgaatggagtcaatcggggctacggttcgaaagatatcaatttctgaagtttgggagaatttataaaccgatgaggagggtgtctcgggaaggacgtgattttggacttccatagagggctctgggttgtagagggacacaatacagactttaggtag

SEQ ID NO: 43473 - DNA, 793 bp, Oryza sativa
tcttttccctccttttattcccaaccccaacccccccccccctcctctttttttttttttttttttgctgtgtgtgtaaattttattcctcttaatacaaaggtgctcaatccttttgcgtattcccgaaaaaaaaaaaattcttcctgggcattgatcttataagattctagttcatgtctaatgtctttgtgcaagttctcctgttgctatggaattctctccagacatgcaaatcttttctccttgttggcatcaggtgcttcaggacacactgcacagcggacttaggggtgagggagggcgccggctagccacagaaatcatgtgaatcagggctgacagtgggaatatcctgcaggcaggctgcagcttgcagcagcagaattgcttaggagagcgatacagtttagtcggtacacacaggggtagattggtgtaagatagctttctgaattctgaagccctctacttgatggaaatagtcattatctaaatgttggaaactttgaatggttctaaagtgtatttgagaagttggatgatatatttctgaaactagtatctttggatatcactaaaccatcttttcctctaacaataaacaactaaacatattaggctgggcagggaacagatcacttaacacccatgtcactatctgttatgagcatagttttgtgaacaagcattagctgcttagtttttaaactgaaatgaatgtagaatcaatggtttatcaaatatttttccttgttttatctattgttctctctttatttcaaaatgacca

SEQ ID NO: 43474 - DNA, 638 bp, Oryza sativa
aaatttagagtctgttacaggattgcagtgtagttgttggaaagcgcgcataaaacctaaaatatatatgtagtaaatatttcctaatcccgggagcgccaggactcccctcactttccggcagtaggtaggttggtgtgccggtgtgcaatgggggctcatagtccttggagcgggtgctgaaaagcaagaacgactgaaaagtcgggctgtggcgcatctcatgtgttgggactgggctcttgtgttgggcaagtcacggagtgcgggattaaaagcgtacatccactgcagtgagtaaaccaatatatttgaatagccatgctcgtggttaataagcgtctggacttgtactactcttgactagactcatagattttgatactgcttagtttagatatgagaaggcatgagtaaccttgcctgatgtgcgggaaggttagtatgatagagttggtgtaaaatggaatgcaagggtaaaccgaaccaagcgaggcttgggaaggtggatgaaccctcgattaatgataacttcaacattaacattaaaactgctaagtcataggattgtgaaatgaattgtgaaaactagctttatgcaaataaaccaagccattctttaaccccctgtgagcacc

SEQ ID NO: 43475 - DNA, 1071 bp, Oryza sativa
agtgtgccgatcttgatggtgagtattgcactctcgaggagcagctccgctgcctattgtttgctcaacctcctcaccggagtgtcatggatgatagcggtgctagtgccggtgggctctttggcatgccgaggggaggagtggagaggggtgcggaggagcttggaggggaggaggtccatgacccgtccggtggtcccgatggctcggcggcaagaattacagcttcaacgacatcctaagttggaggcgaactcgaacacaagtagagacgaagggaagaaagaagagaggggcaataaggtcattttcacctcaagttgttgagttgatggttaaagtagtaaaatagaacgaaaccagttggttcgagtggcaaataatcaaagtccatcaggaggatggtatttgagaatgtgacatctgggaggatggcataaagtccaaaaccttggcgtaaacaatacgatggaagaaaatatattcgatgtttgggacaacgattggtcatgcttttgaaattttgagatttagcaatcgatagttaaaattttgaaatctggttcaaaacattaaacatacatgacttatgctgtcgaaagacaaatacttctgctgaagcacatgcttcacttgaggagtagagcgggaaacagtagttgtatattgatttctcaaaaatcatatccctattatacaccttttggggtttatttataggtttgtagtcctgggtgacaaccctagggtttggtctacgtgggcaattatagtagtgccccctgatggggatgtttacaagggtttaagcctgtgtgggcaatttggttcctctttgcggtgagtccagagaggataacaattgctgacaaccaaatttttcattggaccaaatttttaggctatgtttggagatagataagagctttcacgcaaatgatctgagcataacagtttgggcaactggatttgataatgaactgccgtccgaccgcaatttctatacagtcaaactagagagtgaactacaacccagccacatgtatgtaagtgttctgatcggcaggttcc

SEQ ID NO: 43476 - DNA, 990 bp, Oryza sativa
tttagatgtgtattacgtttacaaaaacgattttgctatccatctcagtgtgatttttttgctggcataagttctctgtcagaaaactagctttaaaaatggacaacactaaaattggtaaaaaaaaaatcgtaactcctttatatgaaatcctttgtacgaaaattgtagtgctcgacgattgctacaactttcaacatattaatatatcatctcacatagagactacatgatataagtgaataatcttattaaaagaggtattcagggaaatatatatgtaaccatccatattaatagagaacatcaatcgtaaagatcatatagaactttggttcacctcgattggatctataatgatttttctataaatttttaaaatttattcattttttaaagaagatggaaaaatgatttttgcaggtgatgaacttcttcatgaaccagccttaaaaatgatattttacgtgctaattaacttcttaaagagctgaccttaaaatatttttttacggacggttctcataagaccatggattttaatatcgtgggtggtttaagaaagtcggccttgaaattaaatgcagttgtaaggctattcccaacccaacatactagacatagttttcataaactccacatcattaagaaactagtactagacactactcttccaatgcaaactggaaatgctgttcggcgatcgatcgccctggggatggggcaacgatcgatcccctcccccctccctccctccacccctccacctggttttcttttgtaacaccgcattactttcctattttagtaaatttatatacctaaagtttatacacctcaagtttacacatctgaagtttagagaccaaaagtttataagtcaaaagtttataaatccgattcaaatttgaatttgaattcaaatatttttttatatatagtatttctatacatctaaagtttatatatcaaaagtttatacacctaaag

SEQ ID NO: 43477 - DNA, 1446 bp, Oryza sativa
aggtagctacacagggagaggcaggtttggaccttgcattcctacgcagccatgccccaaaccaataccatagatgccatcatcatcaccaccagtggtgagtatagtgcgggtgacactgatcacgataagcacacgtactatacgtatatacggttatatataaatacataggcacatctgcgaataaatgtactcgatcgctctccctctcctggataatactccctctatcccagaatatagcaacctaagccatcctaggttgctatattctaggacggagggagtatatccctccgttaagttgtccttccatcattgttaatggcaatattatataatattacattgtaatatgttttgactttatatgctacgcgttcgagaatctaacatgaatattactagtaaaaatgtctgtgtgttgcaacatgtgaaaaataattttcacgatcgataaaaaactatgccaatttaaacgacaaatcgaaataagacaaacaaaaaaatagcaaagcaaagtcataaatcatatgcagcattgaacccggttgcgcccacttcatgtgtcatcacacgaataatcccttatacacaccattatatagcctcaaaaatcgatcgggtgaccattccataagttgacgcatgtgcattttactatacctcataaaccaaagattgaaattttgattattcaattagttactgtatatggaaagcatttgcaaagtaacaaatttgccctatgcacaccttttaacaatgatagattccaaaggaaaatatttatgagtgaaatttggaagagagaaaggagggaaaaagagaaaagagaggaaattgcaaggagagggcgagtataaggattatcaggagaaaagaaaaggagaaaaaaacaaagaaaaggaagacaaaaaaaaaagaagccaatcgggggagaggcacacacggcgccgagtagaggcagcgacatgggtgatgggatggtgtggaacggttgagttgggttgtgatagtgatgtataatatttattctaaactcatgttgaattggatacggaggacatataaccaactcaaccacggatgacgtaccaaaatttcggtgaaaacatcttcaatttttataataatagagaagtgtcggtatgcaaaacgagaaaatcattagtgtaggattaattgaggtttaattatttcaaacttgtaaaatagatttatttgatatttttaaagaagcttctatatagaaagttttcacacggaacgcaccatttagcagtttcaaaagcatgctaacggcaaccagggtagaatttgtatcttaatcagaacagaacagggcaaactttaaaaagtttaacctagtttatagaaaaatgtagcaacatctattaattttattaaatccaccatcaaatgtatttttgtagtatattt

SEQ ID NO: 43478 - DNA, 565 bp, Oryza sativa
ttgataaagtcatcagtatatagtagaaagagataatgacagtggtaaatcgttgaactgggataaactcagtagcatagaatagattatctcaactttatatacacatataaaaagtttatacgtatgtatgtaaagtatatacgtacgtacatataatataaatttttcatatgtatatacttttgatgtataaaaaatatatacacgtataccaagtttgtatctaatttaaacattcaaatctttcaactcgaaaattttaaaaaaataattatgtatagattttaaaactttagattctaagttttaactttcaaattcaagttgaaaacttccaagtcacctatttatttcattcctggttaaggacgtaggattggaacgtcgatgcgacactaaacatgtcataggtgcgtctccttttgctacctactaccgtctaaatccatgtacaaaagctgcttcagcaactatgatcagtagagctaattaattaccatggcgccgtcttcgttgctgctctgctggagcatcctctgcctcgccgtggccggcggcggcg

SEQ ID NO: 43479 - DNA, 849 bp, Oryza sativa
gttttagaaaagcccacaacacaaacgttacatgaaaaacgcatgggttgataaaattatcaaattcatcataaatcatgtacaggatcttctcccgtttatttataccaaaaagcagagaatacaacagaaaaaaaaatcattaactatttagctgggaaggagcaggaccggccaggcaggaagaagcccaagagcctaggcgatgggcagatggcccagctggtaaaaaaaaaaaaattcaggactcacgagcgcttcctcggtcagatgcagaacagcgcctgtacatctccgtctccgagcgacgtgcggcaaccaagccgacgcgacgatggataaaaaatgggacaacgtacgaaaatttgagggcaaaaacaccttgcataaattaagttgcaacaaaataaataatatttatataattttttaataagacaaatgatcagacaaaaatcaaccaacggtatcatctatttaaaaatgagagtactatgatatgacgaggttttctgcttcgaacatcagatgctagatgacagtgaaaacccctacagatgttaattttagttctaaaatttttcttcaaacttttaacatttccatcacatcaaaacttttctacacgcataaacttcttaacttttttgtcacatcgttttaattttaataaaacttctaattttagcatgaactctacacaccctatgtctacccgtgttgctagtcgtcctggttttcttgtacgtcaaagaagtgctgctagtcattaatgattgaccccctatgttgcagttactgtttggaaagtcgtacctcatcatgctcaaatgttctgcagtgtacaaa

SEQ ID NO: 43480 - DNA, 548 bp, Oryza sativa
aaaactatatgtgtatatgaaagtatacttaacaatgaaataaatgatatgaaaagaataaatacttatttaaattttttgaataagacgaatagttaaacacgtacttaaaaaaatcaacgatgtcaaacattttgaaacggggggagtataatataaaaagtgtggtgtgtatctgtccgattaattacctgaaggacacacagtagctagcaactttggtcgagctagcccatgcatatatcagtcccattccgtcgaccgtccttattgtagctaacaaatatccggtacacctaattgatatgacaacacccagtcacctacttccacgttaattgtccaattctatcacgtagctagcacaagtacgccttgcgctgtactaacactactacaataccctccagtcgctctctccctccccgttctctctctctctctccccctcatcatattttgtttgcacatatatataataacgacatgattctatatattcttctctgcccattgttattcatcacagaaatcacaattattaacac

SEQ ID NO: 43481 - DNA, 747 bp, Oryza sativa
aagaatgaaattatccagatgtaaacagacatttaataagtgatgcttatctttgttaaacaactcaaattatgtgcaagtcagacaagcaagtgacctgtaaacacaaggccatctagtcatgcacactgaagtcccactgggaatttcacacttcacacgtatttgtaaggtcattgtgtcagtgcactgctgcttataggctagtttgtacataactatcttgaattccactgtctaaaaattcctataatactatttgatacacaggccttagttgacattgtaacaacggaagtcgtacctagttatttaacgttgtttgtgttgatagccgtgatactggcacgaatgtgcaggcattgtgagctgtaattttcgatatatgcaacaatagagtactaattctttatccctaataaacggtgcctgtgtttttaatactttatgtttctaggcagtcacatagagattgctttgattcaggttctgtttggcattgcagtggactatgagttttggttcaactgcttttatacattttggtgcttgtaaactgtcttctgtttcaatctaatctcaaatgataatatatagtgctatgcaaatatgaataaaaaaaagagtcatgacagattgataaatattttgtttagctttcatttgattcataaacaaaactacaaccgttttagatttatttttctacagcaacttttagaaaagggaaaaatatgcacagtgcaa

SEQ ID NO: 43482 - DNA, 756 bp, Oryza sativa
gatcccccgacttttataattcctacaagtagctcccaagtcaagccatgcatgtaaccaaaaagataatttttttaataatagattaaataaaacccggcctctacatctatagaaggatgtacacaaatatggtattacatcaccaaacacttaggcttatactctccatcccaaaatataaggcacaaccacttttctctcatgtctcataatgtaaggcgtgcatgcatgcatacattaactagtatctcttggtcctataaaatttatttgttttaaatcttatactatcatcaaacctcccaatcactcccaatcacattgcttgcattcatcaaggtgatccaactaagaaagtgattaaatgttttcttggtctttgtgttatgggtggttatgccttatattttaggatggatcgagggagtaaacaagttcaaaagcaaacaccaccataggagacaaagagacaacaaagacatccagatcaagtctcacaacaaaaaatttcaactaacaattcaatcttcctctacaattccacctagattttgaataaaattccataacagtatcaagaaagattgataagccgtttgatttcatatatcatgttccaacccatcccagctcaatcatcccctctccaatatgctactgttgacaaccagcccagtccaactaatatgtgtgagatgcttgatttagaagcaggctgtaagaatctaggggttcaatttctcagcttctgac

SEQ ID NO: 43483 - DNA, 605 bp, Oryza sativa
gactatggttattttgaagggatcggatatggtttttggtcaactctctctgtcttttttatagtgatctccagttatttgtgacttgcgagaaattaagtcacacataatattcaatattactgattatatatctgcatgatttatcagtataagacttggatggcgacaggccactcctgtatcgagaatcattatgtactactccctctgttccatattataagtcatttgatatttttctcagtgaaactattttaagtttaatcaaatttatagaagaatatactaatatttttaatacaaaacaaattaacatattaccaaaatatatttaatgttaaatttaatgaaactaatttagtattgtaggtgttgctaactttttctataaatttggtcaaaactaaagaactttgagtaagaaaagagtaaaacaactaaaaatatgaaacaaagagagtagtaaatatcgatatatatgccaagatactctaacgtcctattattcctatataatacacatctatctattatattattaaaggaatagaaaaaggagcctctacgttggctgacattaatcaaagaaaaagaaaaagtag

SEQ ID NO: 43484 - DNA, 571 bp, Oryza sativa
cagcaaactttgctgccagttgaacttgtgctgagactataatatgaactaaatctagctgtgcaatctaattaactaggaatttacgaaaaaaattatagtgcaatcctaatgtactggtgtatgatatgtaaagacatttttcttttgctggttagtttcgcttaccaccccaacaataacctccaattccaataacagatttgccttccctttttagagcagcaaaaattgatttagcatcttcagctgcttttacctgaaattcaaattgaatatactgatcaatatccattaattaactccacaataagcatcatctagaaaaggtttttttaatgcaactatgatcattattacttggcgttttgaaacgaaccatgtgagatttcatattgatatagcattaaaaaattacaagaccatagccctaaaaagttataaatagaggaaaaaaagaaacaacagtcacaccacgtgtctacaagatgtaaacttcctcctgtttggatccccttaagctattttggggctaaaaggggtgggctaaaaaatatctctaggatccaaa

SEQ ID NO: 43485 - DNA, 967 bp, Oryza sativa
gcggcgccggtgacgtaggcctcgtagcccgccaggtcgtggactaccacgccggcctcgccgccgccggcggccttcatgtccggcgggtgctcaaagcactgcaagcgcggcggagcagccgcggcggcggcgccggccgccgcggcgagcgcggcgaggcagaggatcaggaggctcaacgaagcagttgccatatggttaatttgcatactgatgagtgagagatgatgcttgggcttttgtacatgcctttaaccggtagagtcagctgcacgctgcaatcctgcgccccttttttcttgtaaaaaaaacaaagtgaaactattacactttgtattacgtataatataaactattacactttatattataattggtttgattttttttaatcaaacttcttttaactttgaccgagttcgtagaaaaaaatagtaacattttcaatacaaaacaaatattgtagcaatgtacatgctgctaatttttactataaacttaatcaaatttaaagaattttaaccaagaaaaaagtcaaacaacttataatatgaaatgggggagtactccctaactatttgtcattgtcatctccaattatttgtcatgctgtcctttcgaattatttctagttgtcgtttcagcgtggtccaatttgatgtttggagcgtagtgagttgaaccacattcggatcaattctacgtgtcccaagctcaagaaatctatcaaggaggatgagaaagataacaaggacaacaacggcttatcttttgaagataaaaggaagaaccacaagtgcaaacttgtgcgtcaaaagctttcaaagcaagtcgagtttagcgatgaaggataatcggaaagcgaggatgataagaaagcacataccaaaagtaaggttttgtgagtttatgtcttatagtaaaatgcttgtgcgttacaacgggaaaatctacccactcaaaa

SEQ ID NO: 43486 - DNA, 707 bp, Oryza sativa
ttatccattcataaatcagctttacaaggacagcaatgagatattactattgactattgagttacgacagcgtttgcccctaaagaaatgatgttttagaaagcatgtaatgaacatagttatgcacagtaatacagtatacaatgatagtactactccttttgtttcaaattaattattgttataactttgtcccaagtcaaatatttctattttagcctattaataactagcaatttgtataatttaaatacatgtggattgcatatttggaagtatttcttattgtgaatcaaaaaacatattaaaacttatgtcattaaaatatacattttttttaaaaaaaatgattgttaaagttagaaattgttgacttaggataaaactagaactacaaataatttgtaatggaaggagtagtagatttatcttcaactttgtagggatacagaagatgaaagttttagcatatatgttgtctaagtagagtagttaaaataatgaaattgcacattgatagtaaatgatgtatttcaaccgcttaacatatttatatcattagaaggtcagaatatggaaaatagcaaaaatgagtatacgcttctgattctccgtatgaattgatggttactccaaaaaaaaaaaagatactaactactccctccgtttatttgacgccgttaaattttttaaatatgtttaatcgt

SEQ ID NO: 43487 - DNA, 692 bp, Oryza sativa
cctaatgcttaccaattgctgcatcttgattgcaagctccagaaaaaaatattgtcatgattattgtgccagggggagaagtttcggttttttatgtgttttgtatgagaccagtgcaaggggatctacattgttctggattttgttttggtttcaattttgctggtcctactacgtgtgcatatatagacagaaagccttgacgggacataccaaattcaaaaactcagaaggaatcaccttgcgcttgtgcctaattgctccaaagtataaggttggcacaaatagtggcccgatttttagttcactgatttttatgctttcccaatgttgcggttaggctattactgtgtttgaggaaattccttcatatagttttatatgttccgtatattttgaaatttatgcccatagagcaccctaattttgttgacgtgatcagacaataaaaaaggcaccatgacagctatggtggataatgtcatttagtaacacagggcaatgtgttgtaaataataatgggaatggtttgtatcatttgtttcttctatgctcaagatcctggactgttatgcatgtatcatttgttgcccctcgagtcagattatttgacgtggatactttagtactttggatcaaagaattagggtatttatattgtacatagctaacaattgcatatactacctccg

SEQ ID NO: 43488 - DNA, 775 bp, Oryza sativa
ggccatggccttcgtcccactggacgagctaagagatctagtgcatctgttctgaatttttcaggacggttcatgtgtcctgtattgttctatgctatgtgttcccatttttgtttttgttgtatgctatgacattgttgctgctctgatctttttttttttctgaaataatgaagataagcttgctagtatttgctttttgggctatcgatgtggtcttaattgttgctggtcctaatccttgtggttttgtgtttcttattcatgtactgggcataattatatatatttgtctcaacttttttttttcagaaataaaatttgtacagataatttgcatgtatgaaccataagcttccattataaggaaacgttcagagctcagagtagtagctgaaactgaaacatttaatttgtcaggctaacgaaaaacgaaggtcaatctgtgtacaatgaggcagttgtggaccgactggaaagctgtgggtttgatccaatttcttctttataatacagctacagagagttctgtgccaagatttttacaggagttcatcatagatttgcctgtagataaaataccagcgacccgttggctaaatcgctaaacacaaggtcttgctttcatgctcgactggtttcttcagaataaattcctggtccatgtaaaaatttgcattaacaaccttgcaggctgaataagtactgttagccatctgcttagtttttttttcacatcttttcttatttgtggtccacagtacagataatttta

SEQ ID NO: 43489 - DNA, 1616 bp, Oryza sativa
ctacatgaaagaacatgcaaatgtttcttcagaataaattaccggtgtccatgtacaaatttgcataaacagccatgcatgcaggctgaatacaatgagtgtctgcaatctggtggcttggacccagaatttggttgctaatttctttatacccactcaatgcctgttgggctttactgtttttccaatgatggaataaaaaaataccggccattgtttaaagagctacaaccatttattaaaaaaaaatcactcaataatgagtaccatcactttcttctcttaatttcaccattatagtagaggtagaatcctaatttggctccgccgctctacaacgcaatagactaatattgatagctagatttagtgccaattacacaagtcaacacgctcaattcctttagcacgactagtacttgtttactcctatactatagtctagctatctattatttatttattttatttattatcatattattattattattattatttattatattataaatatatcaaatccgatgatccaaaatcatctaatccaacatccaggatttacaaagccgattggtttgcgtggtttcttgatgtttcgacaaggctcagaattaattttcggttgaaattttgaatgctttcggatagattcaaatgttacacagtaaatttggtcaaaattaggtcggaattcgtcgaaaaccaaaccgtgatacgatacgacggggcttgaatggccaaccggtaaatgtataaagggtaaattggaaccatgccattataattttgtaaagtttgagatatgccatcggtatctcaatgacatgtaggacccacatgaattaatgacatgtgggtcaggatggcatatctcaaattttacaaaattataatggcacggttctaattttccatgtattgtataaacccttgccaatgccttgtaagttgtatcgccacgtttcccctctctctctctctctgaatctctcgcacacccgcaagccctcaaatcacgcacgccgcgcccgacagtagaggacagccggcgacccactacaaccacggacgagcggccagacggaaggccacctggccatcgtgagcagtccacccggatatcatcagaaaaatcagggggcggcagaaccgggagcactcccggagtcgtcaaggttttctctcgcggagttccatcccggccgtgctcccctcccccacccccctgcacgtgccgcgctcctcctgtcgtgtcgtcgtcgctccaccgcaaaaattctgtggctcctgagaggtacaatggtgccattgctcccctagtgctcgatgatatgcctttagggcgctttttttttgtggggggggaagggggggtaataatttgaggcaaaaattcagttcaccctagacaatcatgcggttgaatgagttttgatttccctacgaaacctatttgatgattgtggcaatttttaaggatgctaatttttcaatgaataattccatgtggcaaggcctgaattaagatggccatcatgtatttttggagctaatttcttaatattctgttgatttatctttgttcctttagttttttcatggattgccatcgg

SEQ ID NO: 43490 - DNA, 1177 bp, Oryza sativa
tctcctcatagggttggtggggtgaggtgggaaagagcgggcggcgacgggcggtgcggtggcgcggcgaaactggagaaggggtgacgtggcaatggcgagccgggagcagatggcgcccacagcggtagggccatggcaagtagagcgcaggcactgcggcggttggcgcatagtcgaataggaagccatgacattgatgatgctgccgccattgcgagagagagggtggcctcggcgagcagagcagtggcggcggagcagagcgccagcggcgacgggcgagcccgccacacggagcggagcatgcgcggtgaccgccatggtggtggggaaagttagcgctggtagcagcttctgggcgccacggcggcgtgagcttggtgagaggatgctacaacggatggagcatcgctgcgttgtcggctggctcctccgtcgccggtaccgcgttgatggcggggacgcggcggccgagcttgtcctcacggatagggtggaaggaccgaaggattggacgtggtggtggatgaggtagagagggtttggtaggctgtccttggttaccctcccacacgcgagcccccacatgtcagagctgccaaataggtgaaccttaacaaaatagtgacggaatggtgtggagagcgcagtaaagttcaacgatggcatagagggaggctcgaactttttagtggcacagagacaagcaccatctttcttaatggcatacaggtaaaaacctcctaaaatggactatggatgtagccttaattgagagacctaaaatggccgtagcctgtgttggccaagactcaaatcgtgcaggagcagaacagcccaaaaaagaatcaagaccatggcccagcttttttcgatggaccgccctgggcttcgaccgaaaaccaaaagatatttctgactcacaatacgtagtcatcatgtatgaagagtggaagacagacctcaaaaagcagtttagtaattctgtgtttaaaatgtcttttttatcacgtaaaaatatactgatcaaacacgtgaattaaacgatttgtcgatctgcaaattaaacgataaataaaaaaataacagagggagtgaaaactctcgggtaccagacataaccgacctcgcccttcactcgttaaatcccttggcaaatcatgctcatatccaa

SEQ ID NO: 43491 - DNA, 612 bp, Oryza sativa
taggggatcttttcactgcattttttttttgcagctgaaacggtagggcggatacacgccctaccgctgcccattgcagtcggggtgggtgtccctggggtggcgatggaatagaatcaaatcgagctaataaacaggtcgtgttgtctcagaatgggcgatatggtacaaaactcattaccggatggattcagtcggagccaaagaacagcgcgcagagcaacctagggctaggagtagaggtgcgtggcatacctgctctccactccacgtcgagggcgccgtcgaactggccgtgctggtgaagtttcccgccgcccggccgtcgccgtcgccgtcgccgctgacggccggatccagattctccggcagcatcaccagctggctgctcgccgccggtcttggggaagcggcggcgtcgcggagagtggagagaggtcgggagcgagcgagaagccgagaaggggaggaggaggatgacccatcgacacccatcgactcaggcaaatgcaggatgctgggccatgagtccacgatgagtccatccttctgacgacgcacgtggggccatccttctgacgacgcacgtggggctcgagcggaagctttccc

SEQ ID NO: 43492 - DNA, 568 bp, Oryza sativa
tgaaaacccattcataatgcattcatggctttgtggtatatttcttgcaattattatgaataaccttaaacatgtgattcttttgtaaaatttatatacaataatataattctttttgtaaaatttatatacaataagtacaaagttatctataaacaaactcttagcttcggggtttgcaacaaggtgaatatagtaaaaaatgaatttactataacaaatgcactggtaggttatattaaatgttgtaaaatttattcaacatatgaatgtaaaattgacgacaaacatagaggatgccatagtccttcttagtggcatatgccatagtccacatatagagattgaaaaaagtcatgatagtcgcgcaatgggtgacgaatgtggctagtaataatatgaagtttttaatgcaactcttctacagaaatttttttaaaaaaaacacgccatttagaaaaacgaggaaagtgaagttagggaaagtagactaaagaacgtaacctaattagaatctatgttataaaattcagaaaataaacaagaagcaagaaggtatgaaatctaa

SEQ ID NO: 43493 - DNA, 1027 bp, Oryza sativa
gataaaaccaggaaaaacatttgataaaccgttgattctatattcatttcagttttaaaactaaggaactaatgtttgttgaaaagattatgctgataacagatagtggcacgagtgtgtgcagcctcatgtttagttgtttattgttagaaaaattggtttagtgatatccaaagatgctaacttcagaaatataccatccaacttctcaagaacactttagtaccacccaaagtttcccacaattagataatgactatttccgtcaagtagagggcccctatgaagcacctgatgccaacaaggagaaaagatttgcatgtctggagaggattccatagcaacagaagaacttgcacaaagacatgaagaagaatattacaagatcaatgcccagggacaggagataaaactgaaagaaccgctgcattaactgaagcaattactgggggtggcgaattgttgggcgttttctgcatccttagttggtgtcacctggtgaataactaggacatgcactgagatgtccaccaatcttgacaggatacgcatcacaacaaaggtgacgaaacgtgaaagcgagcaacgtgaggagattgggatggtagatatatcaaagagtttagaacttttagatggtactaaagtgtactagagatttttagtggaatgtttctaaacatgggatcttcggatgtcacttgaccaattttacatttttttttgttcgaaatgcttaaatgctacagtgaagttctgaagattgtacaatgaaatttatgatggtgtgttcataataggtacaattgtttaaatatgctgtgccagctgaggtgacagggaaatccaagccaagctgctacagtagctggagcagatatgttcattagattgggcagaatatacccctcacacgtttggctagtcccttgcttttccaaacaggttattctcacttcataacatgcaaaatgcatcaatctggaacgcaaaccacatcacgatgcaatcgatgggctgcaggaat

SEQ ID NO: 43494 - DNA, 1027 bp, Oryza sativa
catcctttaaagggtgtcgaaggcatattttttggcctaggcctaatatgtctgcagcccatattttcaggtgtggcctgtcacgttcttttagggacttaggcactttttgcttaggccaaagtgcgcgtgatcaagtgcccaataccttaaaatccttttataccgcagttactcaactttttaggagttggtacaatgcatcttaaaaggtgtcaaacagtaaagctttatatagctgccccgctgactttttaatatagtcatggtgctgtttgggtttttaagcaattgattggatacaatatcgttgctttttgccacgtaagtgtgcatttttattgaccaatattatggcttaggctgattatatattgtggtcatttttcaggcggttggtaaatcctttatgagtttatttactcggattttataccacatatgccatatatttccaggtgtggtggaaccatgtgtcttctagggacttaagcacatctgttaaagcagtgtgcgcatggcgtatgcccaatactttggaaatttctttattcacaacatacaagcttttttatagttgttttgctatgtgaattttcaataatgtagccaactttaggttacactcatcatattttacaaagcagtcggtatatcactcggatcatgttatttggaggattcacaccgcatatgctatatattgatatcaagtcacttggttgattacgattatcaaaaccactcggttggttggattatttattccttggctatatgcttggtttgttcaattaaccacattgtcaggggctacacctattaggtgcatctagtcggtgcacctgactttattttccagccctccacagtcttcagatttggtaaaagtactcgggagaccatgataaagatgattgaagcactcggctttggagtaatctggttcgagagaagattatcttttcgactgcgaaggtctcaggggctactgtggatattatgggtaccccatacccatacggca

SEQ ID NO: 43495 - DNA, 2078 bp, Oryza sativa
tgtttgagtatgaagttttgagtcttagttggaagtttcatattttgaatagaaaatcatgcaacaacaaaatacaagttaaaaacatgagcatccactaatacagaaaacatatgtgcaaggaagttcaaaacctatttacacatgcgtttttttaaccgtatgcaacttacggcccatagaaatcgaggatttacacatgcggattccacaacaaactaattttcacggaaggttgtggaatgaattaatatccagtttttcatttttgtggacgaataaaaactgaaataaatatttcatatttttaggcatctataaacacttgcaagtcgtgcgatattacgtgtgcgtgtggtatagaggattcgaacacttgacctcactctacatatatccttcttaccatctcacctatgacactcagtgattgtggggtgaatgttattcttttgacttctctaaaacttgtaacacagtctaagtgacatcaaatgaaaaagtcatcaactacaaatttgtgtagatctcatcgagctcaatactttggtaaagagaatctctatccaagctcactaaaaaactcaaacattcaaaaaaaatttcaaataatataaatgagagtttgtaacaaatatttaggctcataaatgatcttagatgaaaaaacatactcaattataaattgtagatctcgtcgacagctataatttcatataaagtttatcaccatccgactttatataaaatatctactccctaggttgttatatatccgacaaaaaatttaaaccctaaaaagttgttttatttaagaacggaggaatgtgattttttttaaattttattagtgctcatattttcacaaatggcagttttattaacagaaatgcccacaaaaatcaaactttacatgtttcccttatcagaactggccgtaaattcgccccttttttattggcagtttttcttaagaaaccgcccgcaaaaataggcctaatttggtaggcagttttcctaagaactcatctgtaaaaataaattttcgcaggtggtttatgacccttagttggccttgcttctatagtgagttttccttttgcaccacatgtgaaaaagcaagtcaagggcctacaaaaaacattttttatagtgcactgagtaggaagtttcgatgatctgagttgaaactgtaacatattgaatttttgagattttagattgagaattctaaaatcctattggaatatattaactcggatcagctcgcatttaggtgcgaaatgaagtgtctatttgtgcactaggatttcaggaaaaacaaaacgtgtggagcgggaagaataaagcacgtcaatgcggtcacccattagcttatctaaaagaataaaggttcgggggatacacactacacatagaattcagatgaattgcagtcacatgcatattcatttaccactacatgaaggttccactacaccaggatatattgcaaatggtatttcactgtcaatcaaacgccactagttcttccaagaaacgaaaatcaagcaccaaaattaccataaccttgtatacaagtcagtcaaacactactccaaaaagcaatatacacgattgtttttttccactccagagcacccaaacatggcagtggcaaattccatttggagattcagatgcatatggacggagatggccaatagcatatctccagtaacgtccgctcagtggtggccgtgaatcccctttgcagttcttttgaataaaacagttcaatgcaaatgggttgacacatatatgatcaaggtgagcactttctgtaacaaccaggtgagcaatacatttgacaattaaaaggatatttttatttatggcatactatgtcaaattttgttttatccctagaagaaaacgcttaatacacactcaaaatgaaagtagaacaaacaacaatattaccattgttgtttgcttctaagctcttgctcagttcaccggatgggtattattctcgccatttgcacctcaactcctcaagcttagaaagtaattttagatttgtgacaggtatgatc

SEQ ID NO: 43496 - DNA, 1068 bp, Oryza sativa
gttggagaatctaaacgagtgatatacaagtttagggaccgggatgacacagtcgaacaagtttgaggacctgaacggtcgatttgcgagtttaaggaccaggataacatagcgatactagtttagggactgacgatggactttactcttttttttttttaccgcccaactagctactgtacatatccagcttgtctttctggagtttaatttagttttccacaagcacatgcaacaattatacaagactaactgatgagtaattaactaaactaaaagaatataatattgtgatcactatgcaagattgtgtacctaacttaagacaagtcgatcggccagtcccaatcatcttggaaattggaatgggatgtatatatagaatttcttaacacgtactacgtgcgaggcagaaataatctttgggctataatgtttctagctagcaacaaaacacaagcaagcaagcagcagaggagtatacctccgctagtaaaaaggaattaagtttaaccaaatatctatctatgtaaattgtactccacactggtggagaaaccatctttcgtcggtcggccgaattccacgatagtcccggttgcaacaaaaaccgggactaaagaggttcaaatgctgtcagggcttgtcaggcacccccgggatctaaagatcgtaactttagtcccggttggtgttaccaaccaggactaaagatctcggtgatctttagtcctggttggtaagtcccacccctttatatatgtcttcttcctcctccagcccgagcaagctataaaatttcttcaaaaaagaagggaggtcatgccaaaatttatagtgaatttactttggtgattatatacaaatcggaggtgcctaaaaggttagcaacttcatcctccaatgtttttttttctcatattacatttggagctatgttttgcatacttttttgtctccaaaattttgttgtaagttgatgagagagaaaatgtgtgtggggaagaaagaatatatagaaatttagttcatttgctaaacaaggttttataaaatagttgagaagga

SEQ ID NO: 43497 - DNA, 1568 bp, Oryza sativa
agcttgggcaccaattcgtgtatatcctatatctttcgattggcgctaatactctttattggtctatctggctttatcacaatgatattgctttcaaaaaagaagatactccattcgttttttaatatatgacaccattgactattttagatacgtttgaccatttatcttattaaaaaattagtaattattatttattttattataatttaatttatcatcagatgttctttaagcatgagttaatatattttttatatttgaataacaattttaaataatacgaatggtcaaacgtttgtcaaatagttaatagcgtcatatattaaacaacagagatattatttctaatctaatgcacgttacatattttaccaattgactccaaatctgtatgatgcatgcttttaaaataggagcgcactaggcctgaggcccgacaacccggcccaagcacggcatgggttgtgccggcacggcccgacctttgggttgtgcctgggcctcttcctcggcacgatgggccagcccggtccaatgatgaaggagtcaaatagatgagggagacaaaatggacttattccatccatataacacctggtccaaagatatgagggatgataaatagactttattagccatagtagagatggcccatagaaatgagggagccaaaatggactttttcctaggagccgcataatagactttcgtgccttcagactggcccggcacggttgagtcctattgggccattcctatgccatttggacgggcacgagccggacgattcatttggccatctataggtgtcaccggggtctcttttcgtattatgatttgcgtaataatagtaggctaatatggattagaattttattgtttctgttactctcagaattaccaaagcaactttttccttttcatatatttcagagatatatagcctgttttggagagctattagctgttgtagtttcgtttagaattagaagcttctttaaacaatccagcttttgatctaaattctgagaaactgtaattataaaatctagcaaataaactagaagtcagaagttagaaattaagcttttttagattcttataagctgactatcaatcagttgcttatcagaatcttaaactcgttatgctttttattttataacaatcggctatgtacacctaaatcattacccgatacagaggccaaaaaatataagacttttaattatctcaaaagtgctgaaggcctggcctgtcgaattcacttaattaactctgtgttccattcgacataaaactgggacaaaagtaatagaattttctgaccacagaaaccaagacagataaaattctactagatattaatcagtgaaacttaccagcggcccaaatgagtgactgcaaccaaattctgacaggcccgtaattaatttgcttttagaggaaaggccgggaggccttgctttgccaaaaaaaaaaatggtgatatctgtttgcaaaaatgagcaaagttcaggaatgtggcactggtggagaaatcgtttgtagtcccggttcgtaac

SEQ ID NO: 43498 - DNA, 1180 bp, Oryza sativa
aacgaacgcgaacgaacgcgaacgaaacgttaaagaaacgtgaacgaaacatgaatgaacgtgagcgaacgcgaacgaacgtgactgaaacgtgaacgaacgtgagtgttagtgaatgaacgcgaacgtaggtgaacgaacgcgatcgaacgctcaacgaacgcgaacgaatgtgaacgaacgcgaacgaaacgttaaagaaacgtgaacgaacgcgaacgaaacgtgaacgaacgtgaacgaacgcgaacgaacgtgactgaaacgtgaacgaacgtgagtgttagtgaacgaacatgaatgaacgtgaaagaaacgcaaacgaacgtgattgaaacgttaacgaacgtgaatgcacttgacaagtgtgagaacgaacgcgagcgaaatgtgtacgaacgagataattaaactattgttgaacttagcatatatatatgattatatatacttgaaaacgtgaaatacattatatgttcctttgtatttagactaatacattttttttgcatgttgcagagaagacgtcgtcgtcgtcgtccctcaagccgaagtggtagctagccctcgaacgaattcgcacaggcaagtgatgtagagatgtgattattagagatataatataagattgttagatttctaatataagattattagattattagagttagcatatgtgagtgttagagattattagattattagacctagcatatttgagtgttagagatagttagacatttaatataagattattagaggtttaatatacgaaacttaattagacttagcatatgtgagtgttagagatttaatataagattattagagatgtagtattcgaaacatatttgattgttaaagatttaatataagattattagagatgtaatattcgaaacttaattagacttagcatatatgattatctaccgtacaaatacacgacacttagacttagcatatttgagtgttagagatagttagagatttaatataagattattagaggtttaatatacgaaacttaattagacttagcatatgtgagtgttagagatttaatataagattattagagatgtaatattcgaaacatatttgattgttagagatttaatataagattattagagatgtaatattcgaaacttaattagacttagcatctatgattatc

SEQ ID NO: 43499 - DNA, 647 bp, Oryza sativa
tttgaacactttttgttccatggataattgcgtgagttaattaaaaaaattatacagtgataatggagtctaactagagggcgatggtatattatactccctccgtcctaaattataggcgtcctccttttaagaaaaatcaagctcagtaacttttaactaacaatcatactaaatatatatacgctaagtattatacatgttacttcctccgtttcacaatgtaagtcattctatcattgcccacattcatatagatattaatgaatctaggcacatatatatgtctagattcattaacatcaatatgaatgtgggaaatgctagaatgacttacattgtaaaacggatgaagtatatcactagatttatattttaaagtagtttcatgtgatgctaattttatattcgttggcaacaaaatatagagtaaattaatggttagagtatgtcagtaaagaccatgtaagaaaaatacatgccttataatttgagacggatggaatagaagttaagcaaaatacgatatcatattatataacgagtcaaaatcagtgacacaatgaattctctttgaaaaataatatagtcgaatcgttttttttattttagtcataatagaacttttttttacctaaacatgattg

SEQ ID NO: 43500 - DNA, 712 bp, Oryza sativa
tccagggacataactttagtccttgtctttagacactaatttagagtattaaatatagactacttacaaaactaattacataaataaaagctaattcacgagacaaattttttaagcctaattaatctataattagagaatgtttactgtagcatcacataggctaatcatggattaattagactcattagattcgtctcgcaaattagtccaagattatggatgggttttattaatagtctacgtttaatatttataattaattttcaaacatccgatgtgatagggacttgaaagttttagtcccatctaaacatggccttactgttaacaagagggccctcactgctgttgagtgttgacaagatgtggagtggctggtgcatgtacgtcttcagagtctctttcgaaaattactgacaaggaaatgtttgtctcagaggagaatggtctctctgtgaaccaaagacgggaagcaccgaccaatcgggaaacggcattagccattgacccccttggtttaacgcactctgctgcaccatgtatgacgagacgtacacgtaagggaacgtgcggtaggtagtagtagcaggcaagaaaatatcaggaaaaattcttccttgtgcagtcttgcatgcttgcagggggggtgtgcccgttccctgaagggagtagcactatcgataaatttttcctcagacgtataaatata

SEQ ID NO: 43501 - DNA, 627 bp, Oryza sativa
caataaatttcaatccccctattattctacaatcaactggatcaaacacttacagcgggtggcggtagaggagccaccttgggcgatgccttgggcggcatcggcgtcggcgtcagcgtcgtcggcggcggagacgccagcccgggcagcgccggccatgagtcggcgtccatgatggggctcccaggcgccaccacgaccggcaccgccgccccgttccccggcctcttccacgctgcagcggccgccgccttcttcccggcaggggggctaccggtcgcagccggcgtcgtccccccaccaccgttcgccgccgcgtgctggtcggcgttggaagccatcacccacaaaccgctgtaaacaggatacggcacgagctgctgcggcggcggcgggtgggggtagggattcggtaggcgctccactcagcacggcatgagaggcgatcggcggtgagagatacttccctggggggttccaaatattgcccgcggcgagggtggaggaggaggagccccggcgacgatcggatcggggacgggataaaccgtcgcgcgcggcggcggctgtagccgcgatgccctcgtcgctcgctgcactcttcttcccctttcgttcccttccacg

SEQ ID NO: 43502 - DNA, 1126 bp, Oryza sativa
cagtgtcggatgtgtgcttaggccatttttgtagccccctccctccctctcccccaaccaacatatgtaacaagtcaagtttcagaattgtgtatgtagctactatttttgtcttgaactggaaggttgcgaggggcacaacaatcaaagacatgaactctgtatgtggctactgttttcatgtacagatatgttggtaaagaagtggattatattgggtagaccttttctgtggactatatatagtttgagtacgttgtacacaatgaaatcgagttcagtatcatatgaaacctgaggaaatgatactgaggaggatcatgatacctcccagagttcacatgatcctactcaagtatcatatgtgaaaccagtagggaaccactttacaagacatcgatattggataggatcatgtgatacttcacatgtatcaatcataatgaaactcatgtatcacatgatcctacctacccatgtatcatgatagatgattttcctgggtaggatcatgtatgatacttcacaggtatcacaccatcctactaaagtatcatatctgaaacctcacagggatcatgttaccagagatgatacccaagtagaatcatgtgtggtacatgtaaagtatcacaccatcctactaagtatcatctgtgaaacccatagagatcatgttagaggacatgatacctaagtaggatcatgttagaagacatgatacctaagtaggatcatgtgtgatacctcacatgtatcacacttaatgatacttttttgagtaggatcatgtgtgataagtatcacgccattaagtagcatttgtgaaacctattgggatcatgttagaatacatgatacctaagtaggatacatgatacccaagtaggattatgttaaaagacaagatccctaagtaggatcatctgtgatacctcacatgtatcacacttaatgataatatttttagtaggatcatgtgtgatacttgtaaagtatcacaccattaagtaccatctgtgaaacccatagggatcatgttagaagacatgatacctaagtaagatcatgtgtaatatctcacatgtatcaaacttaatgatacttttttgaggagaaccatgtg

SEQ ID NO: 43503 - DNA, 665 bp, Oryza sativa
tggaacaaacatgtttatatgatcagcacatgtattaattgataattatgtctcataaatcgtggtatagagataccaaattaataatgtggacacatgatggggaacatgttgttggatagacccaacatgagacactgcaagagtcatatgtgttgtgtcatcagtgatcttatttagtgttagtgttagtattgaatccttagacctgagattatcatggttctcaacatgtgtagtagcatacttagggactgctaaacgctactccgtaattgggtagttataaaagtagtttccgggtatgctataaaacatgtagtgggatatgaataatcaatatgggatttgcctctcctatgaagagatatatctgggcccctcgatgttataaattatggaagtgcatggccatgccaaaggtgattgaggagtcaatcacaaattatataatatatcataagttcgagtgaatgattgagctattagaggatggcacatatctagccttgagcttaatcgatattgtgaggcaaaagggttcatacaagtttacactagaggttcaaccgatatgatctttatgtatgcccggtgggtcaatacgttctgctaggggccgctgttgacacgtggaccgaaaaggaattttcgagttacagcct

SEQ ID NO: 43504 - DNA, 605 bp, Oryza sativa
cccccggctacgtccgcaacgcgctcgccgacccggacgccgcgccgctcgcccgcgccaccgaggaagaggagaagcttgcctccgccttcagcgacgagaaccccaactcctgcgccgtcatgtagtatagccattatagttagctagtcatgcacccatgcggccatgccatgtcttattgttttttttttttaagtgtgctgctttgttttgagcttgtagtctcaagtgtgtctgtgtgcagtctgttcgccgctacgctttgtacactgattattagttgggagttgtaggatgagtccctcgtggctgtcaaagttttgcctaaaatttttgtatgaaacgtgtttgagtacgatcgagatgagcaaatgtttctttggctcataatgctgctattacttcatccgtttcaattataaggcctttatagtcttcgacgatatactttaacttataatttatttcattttatatttcaactaatattaaattgccattccctccgttttaggttacaagagttttgactttggtcaaagtcaaactgctttaagtttgaccaatttatagaaaaaaatagtaatattttttacccaaaa

SEQ ID NO: 43505 - DNA, 663 bp, Oryza sativa
cccatttctgttatggtacaaaatttgataatttaccggttttaaggactggaaatatgatattcattaactagagttttttgttctcaaatactctgtttgatcactcattttggtggaatggagttatgcataagcttgtgaatttttttatgaaaatgaataatggcgcttaatatagaggactatatacttgtaatgcactaactgtatgtttgtccatagagtgatccatcgagaactatatttgttaattttttttaaaatttctgtgtaagttgtagtatactaattgcattctatatgtatattttcttaaatatattatatgatagtccctgataagatctttcaagtattgtcgctttaggtcatgaattccattttacagcaggacaaataatttaggtatgtatgatatgggcaaccagggataacacagcaaaactaaatctggcatgtaagctattcttgggttaatcagacacaatgttatgaattgttttttaaatccttgtcaaacatggttgtatatctgaagctcttagtatttactgtacacaagatccctactactatttgtcttgaatatccatactattattgggcgtaatctcaacaactactgtagttttctttatttgtattgttgcattgtctttc

SEQ ID NO: 43506 - DNA, 1470 bp, Oryza sativa
tcgacaagggaggcatagacttttgctgaaagattttgatttggagagatttggagtttgggttttgaatctaaatttgatactttgtacacaagggttcaaggagtcaaggaaggaaacaaaacaggagtttggatattttgggattcggaaatgtatttgacgaggattcaaaggaagggattgactttcggaattagatttcggagacttgaattggaagaggaaatttgaggcagaggattttgatttcgatgagagggaacaacgggattgaattgagatccatggcacgacttagactctcactcaaaaaacgaaaattttcgcaattaggattttgccgaattagtttttaatgtctcacgaaaagcggagcgttacactaccctatcaagaaaaccccaaaagaaacaacaccagttaacgaccatagactctagaaccactagtaccgaagagagagtaaacatggagtttcgttccttccacaattgccaacataccagaactaaaatatttgtcttaaaaatatagagaccataagtgtaaattagacttcaaatgtacatcaataaaatcatatatttgttgatatttttatgtatattatatagaaaaaaatggtcaggattattttttgagatcatgttcttgtcaaagacgataagtactatcaaccttgaaagtgtattaatcgatggtttaatacttgttgcctgttccaaaatataactatttctatgcgttttttttttaaaaaaactagacgtcctccttcagatatattttaggaaacacacggaagtgcttatatttggagcaaatgtggtataaattgattatgcaaaaaaatgataaacattgtgctatattactcaaataattatgattgcaatggcgggtgcagatgtgaatcggatacccataatgaacaaaatggttagttatgtactcaacgaagcaaggtataacataccaaccggtatttccgagtatgtgcagaatttgtgctcacagcgtatgccgtttaattactagttgcactagaactcatcagaacaagaaattcataaagaatgttgtattttactatattgatcatacggttcttgttggttgacctcgagcactgaacaagatgatgcaaattatttgactatttcaatgtctcgccagtagttggaacttttttttagataatgagtagttggaacttggaagaggaaaaagaagctgcggttgtaaaagggttcaagggagttgagcctgtagttaattagacagcactgaaagaacaattaattaagaaatgaaatattcctactttctttccattccatctacttgcttatccaattaagaacttaaaatatccggtactaataaaaaaatcaagaaaagaatttaggtagccagtaaatgagcggatgcatctttttggcgtgaaatatttctgattgaggattt

SEQ ID NO: 43507 - DNA, 622 bp, Oryza sativa
  unsure (1)..(622): unsure at all n locations
atatattattattgattaagaagtggtggttggcgagaaaaattaatagtgaagggttgtgattggttgaaaagaaaatgttggtatataaattgttatattttgaaataattataggtgtagttatattttagaatgaagagagtatgttttttttaaatatctcgtcaatatttcgtaataaatggagcattagagtgcattaaccaagaggtcaaagatactacccagtagtaccaatcagtactggcaacgccacgccgtttcccgattggtcggtggttccggtcttccggttagcagagaccattctcctctccggacaaacatttccgcgtccgtaacagtcaggaaaagactgtgcaggcgtactgcctactggagtggagtacatctacatgcagtatnntnnnnnnnnngccagccacagccacatcacatctcttgtcaacaatagcattggggccgttgctgatactttcatcctcgtcaagattaggatgcttgttttcaaaaataaaaaaaaaattaaaaaggagattaggatgctcgaccgctcgtgtactcgtgtttctcttcacgaatgatatatggtaatcgttgcactgtgtgacgacagtgt

SEQ ID NO: 43508 - DNA, 1715 bp, Oryza sativa
aggcggaaccggacggagggggtgcggggagggtttaaatagagccggggcgagagagggtggccggggaagggaggaaaccggcgcgggaggtcggccgccatcaatggcgccggcgggattaggggagcggtttccaaccgaatccgagggagagagggagggaaaaatggggggaaagagagagggaatcacggggagtgattttcccctctttattgcgcgcggggacggcgggaggcggcgggattcgcggcggcggcggcgctagggcacgggcgaggcggcgggagcggcgggaggatagggatgacaggtgggccccacccgtcagcgagggtggcgggcgggcccgcccgtcagcggcgcgcgcgcggggagaggccgagtgggccgcggggaggaggagagagagggagggagatgggccgagccggcccaagaggggaaggggggaaaaaggactttttagggtttttctttttataaaacctttttaactttgtttatttcttaataattattatttgtgctctgaaaattcaagtaaaatttgagggctccttttagaccaaggagaatttaacaaaaattctccgggccgcatttgaatttttcttgtacgtattttagtgtttgccaatttcttttcgaattttaattaattctattattccttttagcgaatgatttttaattcgggatgaatttatcaggacgtgacacctacacaatcttacatgctaagtctagttacaaatctaataatcttatattaaaactataataatcttatattaaaactaagtctaagtgtcgtatattaaatctaatagtcttaattgcattacaaatataacaatcatatatataattacgtcacttgcctgcgcgaattccttcgagggctagctaccactccggcttgagggacgacgacgacaacgtcttttctgcaacatacaaaaagatgtattgggataaacgcgaagtaacatatattatatttgacgttcacgtttcgttcacgatcgttcacgttcgcgttctcgttaaggtcacgtttcattcacctacgttcgttcgttcacgttcactcacctacatatattgcatttcacgttcacgttcgttcatgttcacgttcacgttcgttgacgttcgttcacgctcgttcgttcacgttcgttcgttctttcacattcaattctcgttcacgttcgttcgctcgttcatgttctcgttcatgttcgttcgctcgttctcgttcacgttcgttcgctcgttcacgttctcgttcgttcgctcgttcacgttcgttcacgttcacgttcacgttaattcgttcgatcacgtggcggcagcggagcggcggtggggcggcgcggcggtggcatggcggcggcgtgcggcgcgcggcacgcggcccggcggcggcgttgtgcggtggcggtgtggcggcgcggcggtgccgtgccacggcggcgtcgtggcgtcccggcgtgtcgtgccgccgcagcgtcctggcgtggcgtcgtgtcgtgacgacgtcggcgtcggcgtcggcaacgaggcggccggcggcaaccgagagggagagagagatcgagatcggagagagagagctgagagggaggcggcggcgtggctctcaccccagagatgcggcggcggcgccggaggcggaggcggcgacgacgacgagcgcgagacga

SEQ ID NO: 43509 - DNA, 959 bp, Oryza sativa
cacggatataccattgtagcatttcacccgagagtaatccaagggtatcgtatttattttatcccgtgggaagatcttgtagagagaactcaactaataatttatatattacttatgataatcatattctaagcaggggttatgataatccaagggtagagtgacacacaagcattacctactcatccttataaaaaataatctaagctaggtggaaagaaaagagaaagtaaatctattcctatacttctaaatacatagtatacatacattctagttaactgatatactagctaataccctctattcgatgccctcctggtagttcgagaagccaccccgactgccaagttccttacgacagcccgtcatgaccatccaaccggggctaaatacggaggaataccctccccaggaaattaacttaggattatatataggcgcggaggaatacccgtactgagctgtcaccatcagcggcccacctctcatccacaatatataaccccaactaatgatatcccgtaatctagacaccacgtctaaactaccagatactactctaatatcatcgtcatgacatagagtaattgcataagcaaacactatacccgcaccaaagcatctcccagataagccagccgtatactcagtataacaagattataatgtaaagttggtactcatatacttggaaagtatttcaataccagaaatgtatatagaagagtattctaataaaagtacaaagcttacaaaagaggaaaggaaagctactagagccatacccgaactcttccgaagacttccggactcctgattcctattctaattctattccaccagctagatactactaaactaaacttgagaggaatgagagagctcttgcttgaggtgtgtgttgaagtgaagagagtgagctccttatatagaggtggttatgacggttgtggaag

SEQ ID NO: 43510 - DNA, 1971 bp, Oryza sativa
tggcgccagtggcgacgattggagcagcggtggcaggcggctggagccggcgaacggtgatggaagctcggcctcgcggtgggaaaggtgctgcgggggtggaaggggagaacggagtggatgccggggtgcggcacgacgcggtggagcttttggcggcggcgccagtggtgggagtggcggcggcggcttggcttggtgaggggagagcgggagagggtgcggggagctcgggaaagagggggaaacgagagaggagaacacggggaatattttaaaggcttggggaggtcgggattgtggctgattggggcggcaacggccgacgacgtgggttccggcaacgtgaggagatgggggcacgaaacggcaccaaaaattggggaaaagtgggggaagaggtggaagaagtggtgggaaccgattttactcggtttgggagcaagggcgcgagcgggaaggcgccgaattcgacgggacgtgggcggcaaccgtcggccatggtgagttcggcctgggaggccagaggaaagggatgacaggtggggcccatgggtcccacctgtcgggagagagagggagaggaaaacgggcaagggaggcaaaacaaacttaggggggaggacttgggccgagcccgaaagggaggaagggtaaattttattgctttttttattttaattgattaaaggatctttgtgactttaaaattatttctcgagctccgaaaattcacggaaaatttcagagagttcattaggacacaaagaatattacaaaatattctcggccaatgatttttaagggaaaattttaattctcccattatttcgcttgattaaattgctttaaattttattaaatttctagaaaatgtattatttcatgatttttaatcccgaacgaaaatcggggcgttacatctagcaaaccacaattagatcggtggcttaagaacgacgcctagctgtctagaagtcctcaacctctaagcgtaaaggatgacgcaaagatctcttggggatgaatccaagcttgaagaatggtggagagggaaagtgagaaaacaaggctcaaaatggatatcaaatcaatgtaagtcaatggcacgaaatattcaatggagcagtagccaaaacttgagggtggaggaaactatttataatcacaaccttagatctacccgttggaaccaaagattccctttttcaaaaattccaaaagttattttcaaaaatatataaatctcaaaaaacaaggctaaataaaattttggtaattacgaaaattcattttgaacatatccgaaaaacatcagtaccgaattttcaaattttttgatttcagaatttttgagagccgtcttcggaaaatccaaaaactcaacgaagagcaaagcatactttcggaagtggatcgttgagattgtcttgccctaaaaatgagcattgccactcataacctagaatcgtcgcacaattccttttaaatttaatgttctaatgtatgggtaactaataaataataaaaaatgctcactatctatacttatataaagttatagcccactaagtctaaagctcaacatgcaaccatgccacaggcccccgttgttaattttggtaattaatgacaagtactaattatggactaaccgttgctattgagatatattttaagttaggtccacgttatgtgtgcgcatggatgactatcgatggattaaaattgacggcgcaaggaaagaagacggtaaaactagtgctttaatttagaattgatcgaggtgtagggcgatcaaatttgctaatttatttttagtttcgccgtactatcaagcggggtaatgacctagcaatgagatgattttaattgccacattaggtcattatgcatttagacttgtgctcacatttcatctcacacacacaatctctttatttttcactgggttcggcctgaccagggcgg

SEQ ID NO: 43511 - DNA, 1250 bp, Oryza sativa
taataactatggttattaataattgatcaagcttaagttagttttgctcaccttggcttaagttagagcaacagctagatggaattataaacttggtctgagtatacttatagtttgagaattacaagttcatactcctgatgtttgcactagaaaccagaaaatccagtttgtattctgaggcaggaggaactggtcaaatgatggctgtagccaagcatagctatttcaaaataaaaccgtagaattatatcttctcttttaaacatatatgattattctcatatcttttagaatgataacacgcatcactgcaaacatatagtttgtactaagaaatagatttatatgtcagagtgacagtgcacagttatgcaaatgggctaagcaaaagatgttttacaagtcaggaggatctaacaattgaagcttagtagtttgatgtaggcatcaatggttgaatcgatctggaggatggaaaaaagcatttgaattttgtgaaataattgatgatatactatttcattgaatgtgtgattttgcaattgttttcgagtatgtcttactgttgatcttttttgggcctattgccaatgtttaaatctagaaagtactttttaaaaatctcagatctgatcggtttatgtaaaacttggtcctgatcagaactactgataagcagtggcccccacatgagtttgaaaaatatggatatcaatttattatattttattggaaaaatgaaatatgccttttatgatgtgcatagaggcatatgcttgcttgcatttgttcaattattcttgctgggttttatttatttattttagtgtacattggaacatgcaaagtacatgcaccacagtcacatcaccttacacatgtgattgtgcacatgtctacacacttggaaaatgccagaagaactgaaaatctctcagaactctagcaagtgtatgcccattgagtgcacacatgtgtaatccaaaaatttgctaggtgctgaacttccctgggcttggtgctcatctgcacctctatccatttggccacatgctagcttctgttgggtttaactttttttttttttcgttcaagctaagtgtttcagtaatgcacgatattgttattgtgctctaaccaatattttatttttttacaagaaacaggagtggttcctactgcattaatatattaataatataactatgtacagaatattgacagagtatttacgagagtttttttat

SEQ ID NO: 43512 - DNA, 2238 bp, Oryza sativa
gccatatagaaaaaaaattcaaaggtggtgccggtgattgcaaagcgagcgctcggggcggggcggggaggggcgtaccttggagtccgcgacgaggcggacgtagtcccacctgaggacgatcttgtggaagcggtccatggtgcaggcggcgacgcccgacgaggaggagcaggcgccgcctccgcctccgccgccgccggatttgtccaccgccattggggcggcggcgcggcggcgcggcggcgagagaagggggttctggggtttagtgagccgccggcgctgcagcggcaaacagcctcgctctggaaagaaggaaaaggaacgagatgagagcaaacagagagaaagtgcgatgctaatggttatggccatgtaatgggcctgagcccatttctgaagtacccccaacgaacatggggcaactccgatgcaaatccacaaacgaaagtttgatgaaatggggcttcaattacttgtgctgtggttagcgcattaatcattgtatacaaaatacaaaaattcgctgctggacaccgtatctattaaaatatttatttctaatttaatagaagagagaaatcataaaaaatttattgctggacaccacacttattagaatatttatttacaattgaatagaagagataaatcacgtataagtctccatctcctctctctctttctctcagctttctctctcgttctcggtaggataaattagcctaaagtatataagtcacatttaaggtttctttaataataaaatatgtcacagtaaaataaatgatatcctatatacctatacaaatcatcctcactgttagaattctctgcttcctggtgcttccatgtcaccctttttgtcctcaccgttggatccgcatcggccgttcctcccgcatcgctcctctcctctcatctcccgcatcttgctacggcgccagccccacgcgcatcgctccccacctctcctctctcgcatctcgctgcttcgctggccccacgcgcatcgactcccctctcccgcatcgctctcctcctcgatcgtggcgggcagccaggaagcgcgaccaccgcgcaaacgtcgtgcctcttccattcaccgcgccgcttgctttgctgattttatggcgactctcctcctcccagcgctgttgtgcgtagtagttgagggatcacgacatcctgtcgttccctccccattcacccagatcccttcgtttacacttcgatctccttcctctcacatctgtatatcattggcaataagcataaaagccatcgaatccgtttcctccgactatcaaatcgtcgcccatcttctcaaacttcccctccactttcatctccctcacatgtatgtatgtcggggcaccaggttgagtccagctgcacatcgcctactcctcttcgggctaaagaacgcacttttttttatcaagggtggcccttgctgtgcccagcgccatggaggtaagcaccaccaccgcctttctaatccatgaaggtaagcaccatcatcgtcaattttgcagcccaaatacagaacagaaggaggtcgctggcactgggcaaaattgctcaacttgccgattattcagagccgattattcagagctgaaggagcacgccaatagcaggatgatgccttctgattcatcactatatctatgtgaccaggtctgaccgtctgaggcattgtccaactttcatatgtaatttttgcatactacaaatggattcagaattgaagacactattcctaacacaaaggtaaccatatcttccagcgtttaaacacttatttacatggatgcttctgttaagaaaaaaataccataggtacaaattcaattgctggttgattccaaaaatatatcatggaaaaaacattctcttccataaaattttcaggctgcaaaactgcaatgctaatcttctctttgtaactcatgacacatgaacaacctaccaacaacggttcttctcctcctagattgtaacccatgtgtttatcctccagatgtgttccctttcatattattgaccctttatatgaccatcatgttatcccttctcctaacacaaaagttgcactaccgcatctggaggatcctaacataaaacatcatgacactaacaaccaaatttagtatcctcatactattaattgccaattttgtttgatttacgaaaaaaaatcctcatagacatagcactcttgaaacaaca

SEQ ID NO: 43513 - DNA, 1206 bp, Oryza sativa
tgtcatatgtaaatcgatcggcggttataaatagataataaagaactaaacctactcgatcggctgtagatatcgacaatatatagttttatatcgatatatacttaaatcaagtgattgggatagatcagtcgccatgccgagacaatataaatcacttcgattgaaatatatactaataacagaactatatatgtttatagcatagccgatcagatagatctagcatgtatctgctagtactccaatacaactctatgttaaaatattaaaacaagcagaatataccaaacagaagcttaatatacttaaatgcaaaaatatcctgacataaagggcagatttaacatgtcaatgaagcatataaagcaaatatagttaaatcagataagatcgactgaaactctgatactaccctaatcggcaaccagaaggcagggtagagattgatattctaagctcgacttaatagatcaaacttaactgatgcagcattaagtatgaaaagaaaacaatatctagacaatcaagccgctgaaagtttcatagagtggtggatatcttatataatctaaatcaatgtcaaaacctaacctaatcggatgccctctattaatagatgttagccgattgtaagttagatagtgatatcgccaaagattatgtaagatatatgataattcaacgaattacataaacaagattagagtatcatgaagatggaagcactaatcccgataacgcaagccgtcataacaagttttacctcttgttgaagatcgaaaccgatgcagctcaacccaaaagcaagaactcgtcgaaataataactaaaggaaaagggtggcgatgcgccgaaattgtattgaacgtgtgttaaaaactatatagggctcggggtctattgatacccgaaaattgcaagatatgtccataccagacacgactattatctctaacaaactctaagataccataagtctttacggcagacttttgcccatatttatctctaaggaatttacataaaatatcctaattaatagatacaattgccttcccaggactttatccatgtatggcaatcatcttgaagtgcgtcaactcaaacccgatatcggatacaagtcgtattgtcagaatcagttgtatcacttaacccagtctgactcggacttagccgatcctattcatagccgacccgaac

SEQ ID NO: 43514 - DNA, 875 bp, Oryza sativa
cagattggtaattttcgcatcacattatttgttcttaattgcagctgtctccactcagaatgcacattgttccttggttttctatgttatgaggttgaagccggttaatacatatgtttgtgtttcagacttttttctcataatcaacaatgtcgtttagtgacatacattattttcccctatgctcttttagtttgatatgaaatacatttctcatatatgtctttttgttcttagagataatagtacgctgacaaactgagtaggtcttcttttcgagctcttttgaagtggttaggtgtttctatgtgatatctgcgaattactgattctttaatgagttacgtaaatatgaagttataatactctgtagattccacatacattgtggaacatagtaaatgttttgattgctattgtaggccatagtatgtagattacactcttattacccttatggttcccttcctttcctccaacccaacaggatcctgtgcatctcttctttctggagttcaattatcacattggtgcttcatctgcaacaccatatggaccaatttaatatgccatgtcctaagaaagtcgtgcatgacaagaaggtatctaagataacactctttcggtaatgccaattgttaaacatagaaatcaaagtaatttattttgttaccgtttccttcaagtggcactcgcatattgttcaattgtaacggggacattaggttttcttactctgctggtttcctcatggctgtgtacacaaacagttatagattataaaataaatataatggacccatgtttgcagctactacttctagtctatgtcctttttattatatgctacttcagatttggtatttgttctaggg

SEQ ID NO: 43515 - DNA, 1293 bp, Oryza sativa
taaaaattcaaacaatctcctatcgggctcatcttctccaattttctgagaacaaactacacataattttttagtgcaataaaataaaatggaaactatgtacattcacctacctccagtaaaatccacatgaatttatctacaccacaaattaatctatgaattaacaaatatggggaagagaaataatcctggaaataaatgaaaaacgtctttcactcatgttcctacccatctagggatgataattttacccatggcttcgggtatccgtggatacccgacccgatggtcatgggcgtgggtgtgacattttacccatggacacgcctgctcgagacccgaagacatcatgggtaatagccgggtttcattttttacccgtgggtaacccatgccccacccgatacatatgtattagctaattttgactcatttcttaactcttataccatttctcttggttcatttgagatgctaactgatactaagttgtgatgtaattcaaattattgttgataaacgataatttggtaaattattaattttatttctctttgttaaattacatatctttcaaattattattcatgtgagattcattgggtaccagccggacatacccgcgcccgccgggcatgggtacgggcacggagttttgcccgctaactctagtgggtagggtacgggcgggcaatgtcgggcattgggtcggccgacccgacccattgccatccctatacccatccctcacacccacacctagcaaccatcgccctggacccacctttcatcgtccctatgtcaccccatctctgtgtctattccccagccgaccaagatacaccgagggaaagagagagcgaggaggaagcggtgccgaccggcactggacgcgcgcgacgcatggcctcgacgtggcaacgccgagccgagtcttcatctcctcccagctgcatcgctcattcccattcctcactctagtgccgaccaaaccgagagcgaatgacctcagcctctccgacgccttatctccgctgccggctgcgaagaaagacgaccccgccaattgtcgtcatgccgtcgtcgttgctatattttccctgatccatgatctcctctcgacgccggttccatcccttctggcctagccctctatcgtgcagtgagcgcacgggaacgcggacctcgccgacaatgctctggagcacgcactggacgccgccatcgggacatcgtcttcgtcgacgtcgaaccggagcaagccgagctgagccaccgcgccataaacat

SEQ ID NO: 43516 - DNA, 662 bp, Oryza sativa
tttcagagatcatcacagatatgcatctatggatacagggcccataataccgtgacaagttatcgatttcttcataaaccggcccaaaacctgtgacgttatagcaattttgtcgcgatttaaatacttcaaaactatataagagatatgcaaattttatgaataatgttactatcaatttatgggatgaagaaatgaccaaaataaaagttatatatattgatgagttatacaactttgatgttgatgacttttttagttgaaatcatttagtatttgaaaatattgtttacagttgtcataatttgaaattcaaattcaaactattcaaacaaagtcatatagaaaaatgactaatactaaagctgtagatattgatgatttatacaactttgttgttgatgatctttccatttgaaatcatttagtatttgaaaatgttgtttgaagttgtcataattcgaaattcaaattcaaatttttgaaacagggtcatatagcaaaatgaccaaaacaaaagttgtagatatttatgatttttacaattttgttgttgatgactttttcagttgaaatcgtttagatatttgaaaatattgtttgaagttgtcataatttaaaattcaaattttatatagatcaattaaactcagatggagaaa

SEQ ID NO: 43517 - DNA, 915 bp, Oryza sativa
tttaaatagatggggtccctagagtggtgaagatggaccctagagtttttgaaatcaacccgcgcaagtgtggatttcagtttttttaagagtctcaaatttcaaggtatttgctgatagatccaggtcccagaacacatttacagtttgaaccttgcatgtttgaaacttttgctgagtgaaatccctgggtgctaatcatgagggtgaggtagaggctgggaacatagcattgccccgatgagtttctcgctggtgccgtcagggaaccatggctcagttgggagcgaccaaaagagaatttgtagaagggcctgcgacgaagctattattggttggcgcgatggctagggtggtcggaatgggtggtggcggcggtgcgagtggtgaagatcctcggggtggtgatgcatgtgaggctagagactgatttagcttaagagggtgcatgcatgtgggttcttgggtcctttgaaggctcaccgagcagttggggagaggtggcgaagcttggtcatcgatgtcggcttgcggaacatctcggtggcagcgcttcacttcgagatgttgggtcccaaaattaaagatttggtcttaactgatgcgtctaaactgtatcaagccctggattggtagattgatacaggttcaataatctggatcatcattgcatacatttgaacaaggctccaaaggagattttattacagaatataagggtatttacaaaactgtggctaattcctttgctagataacttaatcggctaggtctatacccactcgagaattgccgtcgtactcattcgttcttcacatgtacttggcaaaccctatgtcaatccaaaaagtactagcaacccggaaatctttctagcgtattgttccaatctaagttcattatattttatacaaa

SEQ ID NO: 43518 - DNA, 1323 bp, Oryza sativa
agtgatttggatgtcgaggctagataagttggccgatgaggtgatatctagaccggtgatcatgatgatgtccagaagagttggggtcatcggcccttgggagaataggaaggcatacatggccgtggaccagaaatatgctgctgctatcatcatgggttcattccttgccatatttgctgcagttagtgctagagcttgggatatgccgatctctaaccagtgatctaatttgctagctcgcatccttttgaaccaagcaggccaggtaatctcggccgatggccaagatttgaaggtgcctttccattggctgagatctgggttggcaaatctgaagaggattctattggtttcaccatttataaactcggtagggtctaagttaccgattgggccaaggaaaagctgaaggttgtcggcgatactaggaacatcaatttggtgggcaagatgctgtagtagaaggggaattgaagattgagagaagaagaagaaccaatctagtgcggaaaaagaggagttttagccgatggggacttaactcgacatattctgcagttgatgtgctcggggggctggtggaagatgacatggtcgcaggcagaagttgacgcttgcagggatcgcttttggatcgccggaaggcttgaaaccgtcgtcggagagctcgaggaatagattggagaaagttttggctagagcagttaaaacggaggtgacaccgtgaaaaacgagaagagcggtggttactatttaaaagaacgcggtaacggccaaaacggaatcagttttggaaaccctagatcggctcggaaaagaaatttggacaaatctaccacattacaaatatagcggacttgggggcatgtgttgacgaccaaaattggtaaattatgagccaacttgatacagagatcgatttgaaaaacagagtatgcatcggctgtgaaggcatcagctggagtgtgcatcggctgagatggatcggacagagggtagccaatacagccgattctgataaagatggtctcgaagatgtttctagaattgatcaaggtgcttcatgaggattgccgcgatggagataaagctctcggataggcaattgtatctattaattaggatgagaaaatcccctgtgtacccatgaaagttcacctaatcccttctgtacccctgaattttgctcaatcccttacatacccctgaattttagtttggatcccttccattccatttccgctagttgaccgttagttgaccgttaaattcttatgaaaaagtccattttgccctttgctatgaagaagcatataaatt

SEQ ID NO: 43519 - DNA, 1726 bp, Oryza sativa
ttcctgcagccccaatgttattatgatctatttatattcatgtttaaaaatgctttacaaattccttttgcaaatggttgtgaaataaaacttccctttatgctaaaaagaaaactacaaccagcctccctttgattataagattcgcatgtagtatgttaggattgttctcgcttgctagtacattaagttgtttagtgtactgacattgttctttaggttgagtgtgcgggatcattgcttcttcaagaaggattctactagaggcctacccctagtcgcttgtttgtaggttatgggtaaacaagcttccataaatctctaattatttggctagttggcctatgtataattaaagtagttgtaatctgaattttaatctttatttatgccttattccatagtctcccatagtctctactcgatgctttggatttttggattttatattgtgtttcctatttggcttgttaggacagcgatgaggttagattgttactttttttatatgggttctattgagaccccatccaactaaatattttttgttatcacgcgaagtagcttatacaatatatagcacggatgtctcacaacacactactacaaatgtgattgttctgtacgagaccccatcatttttgcaaacgaaccataactagtggcgcttgcaaaaatcaagcggcattttcgcagacggctccttaagacgtccgtatggattttcccatacgggcctcttaagaggtccgcgtgcaaaaatggcctcattttttcatgcggctcacttaagcgcccgatggaaaaatcaatttgaaaatagaatttgaaaaaaatttgaaaaattgaaaattttgaaaaatttgaaaaaataaaattttaaactagtgtatctcactcatatgaactccaaattggatgattatttttcctaaaagtttctaaaatcatgctctatcatgtcattgtgttcttactgctattattttggccacttttgaaagagcatctatgcccctagtgggttttggtttattgatgacaaacgattaagggactgatgcacttattgagtgtataagcaagtgattagtccgatgaagaagctaggaaatggacttatcgatggatgagaattaaagagaagatatttaagatgtgagtatgaagtgactacctatggcaagacggtgaagcgcaagcgacgctcagctgcaatggaccatgcggtggtgaagggccagcaagaggcttggtgacgatgaaccgaaaccggtggtgaagggcgagtgaagactttgtcgtgatggaccgtgcaatgccatttgaagccatggattatccttatcaatcatttgagaaatggaagatgaaatgtcaaagatcaacaagatgatattttcccgatgatcaaatgaccttgacgccggtaatcctccaagtgaagaaagaaattggtgtgaaggtattcctattggtataactttcctttttacatttgagtttaggatgccgtactattaagggggataccacatacatataattggttgaatactagtgctcaaaataattcatctttgtgttggttgaaaaacctaagccaaatttcaactccgagttgttttacatgtcacaacacttgtaccgggtttctttgcaagtttttcaacatctcttgaaggttttggctcatgttttatggtggatttgatagcctatgaaa

SEQ ID NO: 43520 - DNA, 664 bp, Oryza sativa
atagcaaataattagcataatacacatcataatttgtaaattatataggaaaaatcatattaacttcaaatcatatgagatcaatctttttggacttataagatcatcctcagtatcactggaaatctacgtggcacaatctgtacaccaaacacctttaaaattttgtatagtaaataattagcatagtatgcactataacttgtaaaatgaataagaaattcatcccagctctaaaaataatgaatccaattatgtcgaacatacagactacaagaatctatttaatctatgacgaaaaaaattcatcatggatcactgaaaattcgtcacaggaatttgtccgtgacgattatacttatcgtcatctattgagcgtcacggattaaatctgccaacgttttctccgatatcatcacggatcagcacaatctatgacttttttaaccatcataaaactcttatgggctcgtgtagtccagcccaggcccaacctttgtgatgaaattaaacgtcacagatggttaccacgtggcggccaacatagcaggtgacgtggtcgttttgacacgtgagtgatgacatgtcattgatgacgtggcagctgacgtcagcaatttttttatacagcccattatttttttgacggcccaatatcccatta

SEQ ID NO: 43521 - DNA, 1170 bp, Oryza sativa
cccaaaatataagtgataaaatagaaattttttaacctaaattaatattaagatggtacgaacttgctgagaagaaatcatgcattttagagcattttaatttttttgcattatttgctatttattgatcgtaggttattcttgcatgtgtagcgagtaagtcaatggtgagaatttggactaggtgttgtccagagtatcgaagagcaaggcaagtgctcccctctttgaatacactgaaactcatgttttggggaatgaaatatattgttgcaaaattgcacaagtatttaaaactatcggtatttaaattgtggtaaacgatagctatgacctatttgccgcatgaacccccttagaatatcgtactccctactgtttgtatccataggattggttagagtacttcatttgtgctcatttaggtctaagatagcttgatatgtcgctatatgattaaccatgcttagaaacttgctaaataactaaaaaactaaataaccatgtgagcactttataaataaaattttgggtactattttacttctggacagaaatgaaaaccatggttatttctgaactaaaaatggaggaaaattgtttttttagatttggacagcaagtggtgtgtatatagtagcagttgcacgcctataggtaagtgtttacctgagtcaattaagcgctgaactctatggcatcatctattgtttaccgtatatcgacatgtgctagttatgtggtagccttagctgattaagttatttaatgactagccttgcatttggtcggctgaagtagtatagcaattattcaaaggaactacctattgccccacattttatttagggtagtatactagtatagatgtctaagtttgtccaatacgatgatatagcgcctcatggggaaacagatgtatttgccgccacggtgttaggtttaaggcatggcttcctcacctaacgtctctaggtcatacctagggtggagacacacttgctgtcatgcaatggtaggctttatgtaatgtaaaggctgcattatgatctctagactgcatccaacgtgtagagtgtggtggtgctttgcaagcacaaaacaaactagagtgcttatatcatgtggttcacattatacaaactttgtatagtctaaaactaatcgatt

SEQ ID NO: 43522 - DNA, 706 bp, Oryza sativa
aaaatcgtggacaacaccactaatcgatcatgggaattaacaacaagtataataaataaaataatgtacttccacttagtaggtagctagagagcatgcgtagacccagaggttggtgcttaggatggtggcggccacctcggcgaccttcacctggttgccctcgaagaaggcagcgtaggggaggagatggtcatagcagaagctggagccgtcgcggtcggcctgcagggcggtgtcgcagcaggagcggacgaacgctgccgcgtccgcggagggcgcctcccctggcgccgccgcaggtggcagcaccaccactggcttctcctccttcgcagcggccgcacatggtggggataagccgccggcgctgacgaccatcaacaccacgaggacggtggccatgctcgagctcgacctgctcatttctgtatattatttatctctctccctctctctctctctctctctctctgcttgtttcgttactacaggatgaattacttcataacaacgaggtacaatttatactagtaggctcgattggtcgttaactaattaaccacaacctttctttctaatttattcaatggctgttctagcatcacggcatgtctttttggtgttgtgatgtagtgccatgcttgcaattataaactactatattaatgcaactaattgcccatatatagacagcctgctcgct

SEQ ID NO: 43523 - DNA, 2257 bp, Oryza sativa
cggtgaccggaggcggcgaagccacgcgcgaccggcggcgcacgcggccggcggaggcggcgaagccggccgcgcggggccgctgacgcgacgaagccgcatacggccggcggaagcgcaaagtggccgcggctcgagccgctcgtggccggtggaggcggcggatgcgcacgcggcatcgctatacgttagccggcggaggagtccgagccgtgcgtcaggtgcggagctgcgcgtggccgcggaggcgacggaccgcacgcggtcgcgacgtcgactcggcggggtcgcgggcagccagtggagggtgtcggagactcggagccgcacgcgaccggcggagtcgcgcgtggcctcggaggtgatggagcctcgcgacgctccacgcattgccggaggaggcggcggagccgcggctcggcactgaggcggactgccgcgtcggccggagcttcgcagcgctcgcggagtagcgcgtggaggctgccgctcgctgcttgctacgggtttatgttagtgatatgtcctagaggcaatcataaagatgattgtatcacatactatgtttacatatttatccgacattattcctggaaatagataactcattattggttaatctatatgtgattctttcatgggactctttatgttgtttgttactatttctaaaggattctgatcaaatatcatatgtggaacaaatatgtttatatgatcagcatatatattaattgatgatcatgtctcatggatcatggtatagagataccaaattaataatatggacacatgttggtgaacatgttgttggatagacccaacatgagacactgcaagagccatatgtattgtgtcatcagtgatctcatttagtgttgctgttgaatccttagacctgagattatcatggttcacaacatgtgtagtacactggtggagaagtgctttttagtcccggtttgtaaccccccttagtcccggttttaaaaccggaactaccaatccgggactaaaaatcgctatctttagtcctggttcaaccgcgtaatctatctatctaatctctttctttttcgttcacgtccggttggtgttatcaaccgggactaaagaaagggaactttagtcccggttggtgagggaagcggcagtaagatggtccccttttctttttttttcttttttattttctcccgaattgagtgggatatatcccaaatcaaacccaaatccccaaatcaaagtaacatcccaaatcttaaagttacttatacatacaattcaaatatatcacaaatcctacaaaaattacaaacatatcaaatacatcacagatccatacaaacgtgcaatgaatcacaaaattatccacacaaatgtgcaaatgggatgccgttgccgccggccgccggccacctgccagccgccatcgggtgcggccccaccggccgccgccgcccgtccgccgcccgacaggcggcctcgctccgccgccgctgcctgaccgcgcggcggcctcgctccgccgctgccgcatggccatcgccaccgtctgccgcacggccgccacgcggccggctcgcttcgtcaccgcctgtcacgaccggaaataacccaacgggcgttccttacgtgggtgcattattccttttcccaggaggcaaggtacactaaaagttgatacaattcagagtttaacaagcggaagcgtaaataattaatttattacatgggcggcgaaggcccagcacacaaagacaaacgggaaacagcgaaagactagggcgacgaccacaggcgcttgacggcaggcacgagctagacaccaaagccttcatcttccagaaactcctcttctgggtttgggaaaaattgagcaagactgagtacaaccaccgtactcaacaagacacacccacaagtgcagaataaatgtaagggagtacaagggggttatcatataaggggttagggtttgtagtaaacagcactaaaagacacttagttgctcaaagctatattgtaaatatgatcctagagctatacaagattattaatcaaggccgtgaacccacacgaacctgccttaacccaaggcctacgatgattcagaccaaactggcaacccgaccctgggtcccagctcgtcccaagccaacccaggccaaccattccacattttaattgttaagcaggttttaaggattaaaacactaacttgggtacattgctcggcttgcccataaccgagggc

SEQ ID NO: 43524 - DNA, 1364 bp, Oryza sativa
tcgttttgcgtgttagcttgtcgtttccgtcgttgcgaaggttcgtgagtgcgtcagaagtgttcaagaagactaattgaagaccgattattgtaaggcaagtcacacagatcacaaataaccctttcagcatgttgaaccgtttaaagctattgttttatttcaacttatacattattttcgaatgtcatcggtggattgtgttgtatgaggggtactgtcacagtcccgtttcgagataccgtggtggtactgagggcatggtaacatgttttggggttgtgtcttgtggttacagtggtacatctctggccagggtaaaactattcgaatagccgtgcctgcggtcatgagtgggttgaacaatgtttttcgtgattagtctcacacttctaacaataattattgatgctataaccggtaataatttgcttagctcctgatttggagttagatctgtacacctgactatgattgttcaggatggttgggcctgtgcagcatgggtgtgctgttcagtgttgattaatattgatgattaattactctattgttttgctactcctaaaagtttgctaaatgctacttttgcaaatgagcttatatcatgccgtccttcggaatccttgtgcacttgtatatttgctgtgtggcttgcgcagtattccatgtactcatcttgcaataatcaatcaacctcagttgaagaaaaatgatccagaaggagaggacgtttggcttataccccagttgagctgcctgtgggagtggagccggagcttcgttagtctgtaattccgctactgtttttcttttattttgtaagtatgtaacgatattattataatagatttgtatattaaattgtcagttttttacctcggctgattcctggatgaggattttatgcacaaataagtttagaaattaccagtgaatttccgggcgtgacagtctcgctgctcctttttatcttctgattccatccagttgtgttaccacacgacaggatatggacctgttctgaaacaacagtttcgctgtataatttaattcgttactcctctctataaaacgaatagatcaatgggtgcacctttttttgcatatcctacacaacctgttgtatttgtgtttgatctgagtgaactaatttgattcctctctatgatctaaataagaatgaaatggtcatctctgctcatgatgaatgggtttacagtatcttcctacttcccccatcttaatcgaattgctggacttatggcctcttcttgcacctaatccacaatgaatgtataagagagaatgtttctttagaacactcacttctgtatatatacagatctatttaaaatttccaa

SEQ ID NO: 43525 - DNA, 811 bp, Oryza sativa
atatatatatatatatatatatatatatatatatatatatatatatatatatatatatatatatatatatatggagagagagagagagaatcacgtgaacagtgccatgcattcgcatgcgcgaccattcgagaagggcgcagctgcgcgccaggctgtggaggcggcggggccgcacgcacaccgagcggaaggagccggctggcgcgatcggcggaagcaagcggggccgtgcgggggcggcaaaccgcggtcgccgcagaggtggtgacgaagccgcatacggcaggcggaaccactcgcggctgcacgtggccggcggatcctcgcctgtccgcggtggtggcgaggcgcatggggcctcggaggcggagctgcgaagccgcatgcggctacatgctgcggcgtggatcgcacgagggtggggaaacacttttaatcacctaggtggacatccacctatttgttgcttgtcaactaaatgggtataaaaaaaatttaaaaaatttgacaagatagattcatatacaatatatcaccccacaaacatgcaaatttaaattcaacttctacaagttgtaacaaaaataacaaatcaaaagtttgatttgttactttttttacaacttataaaagttgaattttaagttacatgtttatgtagtgatatattatatattaatctatcttgtaatttttttaaaaaaaaattcatgatcatttagttaacatacactaaatgagtggacatccactcgagtgattagaatctacgtcccacgagggtggtcatgccgcggacccatatgta

SEQ ID NO: 43526 - DNA, 506 bp, Oryza sativa
tgctgtgtggcttgttgagtatgtcatatgctcattcttgcaataatcatcaaacctcagttgaagataaaggatccagaaggagaagacgtttggcttataccccagttgagctgcctgtgggagtggagcttcgctagaccgtaattccgctgcagttttcttttcttttgtaagtatgtaacgctattattgatgattctgtatattaaattgtcagtttgtgtacctcggctgattcctggacgagggttctatgcacaaattagttcggaaattactagtgaatttccgggcgtgacaccagccaatgaaccctcggttgttaatgagggaacatccacaacctactgggcagattgcgaatcaaccaacccaagatcaagttgctgccatgcttttgccacctccacctattgttgatccagtgcagcagcagccgattcagcagacatcaccaatccagccagttgtacagccgatccaacaacaggtcgtacaaccag

SEQ ID NO: 43527 - DNA, 790 bp, Oryza sativa
ccatgaatagagtatccactagttggggttttgttattctagggtgaacaaagtaataataataacaatagcaataataataaggtcataacaaaggtaaataggcatggctgaataaaacagtgataacgcgggaatttaaataaagcgataatgcaataatttaaatcaaaataattttataaagtgggattcaatatgttcaaggatgatatgacttgacttcttaaggaaaaattagagacttgaacggtccaattctgagttcaaatggccaagttatggccatttgaagtttatatgctctttaaatgaatatttgcgaatttcttcatttaaattttaatttaaaaagggtttattgcgtcagccgagggggaggggcgcgcggaccgggtccacgggagtgggtcccacgcggcagcctcacggtccacggtggaccaggtgcacccgggctcacaccggccggcgccgtgggccccacatgtcagtcgcacccgagggcgcgggtggctgacggccgggccccacgcggcagccacttggcatgcccgagggcggccatgctggcgcggtcggcgggaggcggcgcgcccacgccccgatggtcgccgccggcgaccaccggcgcggcggagcggcggccgagagagggaagggaagggggaaaggaggcgacggtccacggctcaccccggggcgacggcggcgacgggggaggcggccggagcggagggaggcggtggcgcggctcgggtcgacggggacgacggcgctctggcggtcg

SEQ ID NO: 43528 - DNA, 525 bp, Oryza sativa
aggatgacgaatgggccccacccgtcagcgagagtgacgggacgggcccgcccgtcagcggcgcgcgcgcggggagaggccggattggccgcggggagaggagagggagtgggagggagctgggccggaccggcccaagagggagagggggagggaaagggaactttttagggtttttctttttataaaacctttttaactttgtttatttcttcttaattattatttgtgctctgaaaattccactaaaatttatttacgcattttaggcttttaggaaatatacaaaaatcctccaagccttatttgacttttaactttgcacattttaattgtggaggctttcacacggattttaattattctcggcataatttagaggatgtattttagggtcgttttgggacgcgacatcggccatcatacatcggcaaaacacaaccaattaagataataaaaactgctaagggcaatataacttatatcggccatctctaggcggtgtcaacacatcagctaacatgt

SEQ ID NO: 43529 - DNA, 2412 bp, Oryza sativa
aagatggtttctccaccagtgagtatatataccgctatttctagattagtaacacaccgttattcctgattagttgtaacacatttttctggatttttggactactaatatatatcacttttcatacattggtagtaactttttttcatactagtatatactgttatttctagtgtactaagtatataccatttttttctagattttcagtatataccacttttctaaattagtagtatgtactgctcttttttttttgtcagtatgtactcaatgacgatttggccagcacgtatatactgcattcctcattgaagctagattgttttttttttttttgcataatagtagtatatactgattttttttcgttgacggagtatatatatactgcccccctttttttttcagtatatatgtagtattctttggccagtatatactacattcctcattgaagatatatgtacacgattattaaaaaaaatgtactcgtagcagatttacccagcaaggggtgtgtatagaattgtacgagctgcagaattgtcagagttacaacaactactgagtatatatatccctggagaaagaagtatcgtttcaatttttgtacaagaattgcatcgcctcaattatgatcgaggctgtcacctggccggaatctctgctgcacggccatacaggctagccgatggatcgatgccgtcgtcgtcacccggacaccgcccgggaagcggcgagatgaatgatggcgccggaagcaaaaatcagtatatactactaatctgcaaaaaacaatctagcttcaatgaggaatgcagtatatacgtactggccaaatcgtcaatgagtacatgctgatatttagaaaagtggtatatactgcaaatctagaaaaaaaaatagtatatactctctatatgagagaatctcttaatgccactagaatttcaccaattcccttatatgccacttaaaattggcttctcccttatatgccactagttcaagtttttccacccttttatgccacttccaccactatagtgttagttgactgttagtcaaaggttagtttttttcataaatgaccaatatgccctctcaactaaaaaatgtgtaaacttcaaaaaaatcataactagtttattttaaatcttttttaagtgaacaaaattttgtcataaccagtgaaaaatgctctttatattaaaaatattgttggaaaactgcatgtttcatgcttacattgaaaatttatttgtgatggtaatggtaatggctaaaattgcatgtgatgcagaaaaaatcaattttcatatgttatatccagtagctatattagtactaaaatacctattattggttgtatactaattctcaagggcaaatgcatctttttacaatcaagttaacggtcaactgacggtggattgacggtaatggcataaaagggaagagaaacttgaaccggcggcataaaagggagaagccaatttaaagtgacatataagggaaccagttaatttagagtggcatataagggattctctctatatacttatatacttagtacactagaaaagcatatactggtaagaaaaaagttaccgccgctcaggaaacggcgagatggatgatggcgccggaagcaagatctatgcatgcatccaaagaaaattaattaaacagaagttcacaatcatatttggaaacgaatgatttggtgcatacctatagagatctaacaagaaaacaaaaagaaaacagatccatcttcttgatgatcgatgacgttgctgtatgattcagcgagcagatcgatcacgccgtcgcctccggcttgccgatgggctgcgctgtggacaccattgccactggatcgtgacgtcggctccggcttgctaatgtgactgcatcgtagatgcagaaacgccgacagatcacaccgtgaatgtacgccgaattgccgccgcggacgccgagtcgcctatcgatctcacggtcaccgccgaattcgtccgtaaatcaaggtctcgccctgggatcgatctgtggtttgatttggcaccaccgtctacgaacgagagtttttaaaagtggttttcacggttgttcggatcgctatatccacgaaaatcaaaacgggtccggtagttagacccagtaccaggtttgatcgggactaggccgctgatgtacggtggatgagagcaggagtacgtacacctgggtgtatatatatatatagaatcggatctctcttttgtactcccaggtgtatgtactatcttttcttaatggatatccattagttcaaaatgaataattagattaaaaaaagaaaacaccattctttttttcaaattatctgcatgcaacggctggtgcgtaggactaggttaaaaa

SEQ ID NO: 43530 - DNA, 639 bp, Oryza sativa
tgggtaccacatacccacatggcacgtatatccgactggttataggtgatagcttgtacagatagaatatgtttaggaaatgactcgggaattatgttaacttgtatgtcaagaaaatatccaatagtgccagttagttacagttgtaatacatattcgttagcctagtacgtaagccatatgggctgtacattgtaatcttggctcctccccctatataaggtcgggtccaagtgtacctaggggcataacttttctcccagatcatcagatcaataatacactcggtggaataattccccggctgtataaacctttgcctcctacgtcctaacctatccacttttccagcttgattgctaccccttttagtattgccggaatcttgttttgacagttggcgcgtcaggtaggggttgcgccatgtttttcgccgactagtgcgatgggattcatttcgggcatcaccgacttcgctttccctcccgggcagacgtgctggttcggcggcccatggacctcatcagccacccgtacatgcatgcaaagaagacatcgtacgacagatcaatccatgattataaatcaagctaataatattatatagattggaaagaagttaaaactgtatatgtgcag

SEQ ID NO: 43531 - DNA, 776 bp, Oryza sativa
aaaatgtggaatggttggcctgggttggcttgggacgagttgggacccagggtcgggttgccagtttggtctgaatcatcgtaggccttgggttaaggcaggttcgtgtgggttcacggccttgattaataatcttgtatagctctaggatcgtatttacaaaatagctttgagcaactaagtgtcttttaatgctgtatactgcaaaccctaaccccttatatgataacccccttgtactcccttatatttattctgcacttgtgggtgtgtcttgttgagtacggtggttgtactcagtcttgctcaatttttcccaaacccagaataggagttcctggaagatgaaggctttggtgtctagctcatgcctgccgtcaagcgcctgtggtcgtcgccctagtcttccgctgtttcccgtttgtctttgtgtgtgctgggccttcgccgcccatgtaataaattaattatttacgcttccgcttgttaaacttttaattgtatcaacttttggtgtaccttgcctcttgggacaaggaataatgcacgcacgtaaggaacgcccgttgggttatttccggtcgtgacacagttcttgagctcattcacggagacccgcaagggaacacttgttcagaagtacaaagtaaaagtaattgctgatgttcctgggacaggttcttctaaagatggagaagtgaaacaagctccagatggctcagctcaacccgagtgataaggtgctgcagatggttttcaaggagaccaaggtgatg

SEQ ID NO: 43532 - DNA, 1615 bp, Oryza sativa
aggaatctgtaatttgtttttgttattagtctacgtttaatacttcaaatgtgtgtccgtatatgtcaaatttttttttttccaaaacaactgaacacggcctaagtcataatgtagaattgtagtaccattccacacataattgacttgtgttagaaaaattcacactgcataagttctattccaaatttagtaagtatgaatgttggtcaaaagaagtgtccttgtgtgtgttctcaactgtactttcctaacttctgtttcgtcgttttcacgcgagtatttctcaaacggttaaacaatatgttatttaatattttttatagaatgttatttcaaaaataatattagtttatttttcaagcttctttctgataattaattaatcatacgttagtgagctacctcgtggggaaatcaaagttaccaagcagcactatccaacacaccaatatctgaaaatgaatcagcagttgaccgattaaccctgctaaggctgcattcgattgtctaggtaactaacatctccttcctcgttttttgcgtacatgttttccaaaggtacattaactttaaaaaattctataggaaagttgtcttaaaaatcatattaatctagcagtttttaagttttttacatattaatctattttaagtcttttttacaaacacttaattaattatgcgttaaaccgtcgttacttaattaattatgcgttaaacccccacaattgatcacagcctaagacaagagctgagctgtgacttactggaagtcccctaaaccacccaaatcagtaacaaaagtattccaggtttggttccatattagcaacgattatgaaggcttttttagagtaaagtgtatgggcggtccttaaaattgtagtggtgtgttatctaggttcttaaactctcaaaatgcatatccaagtcccagaacttgttatagtgtgtcatctagatcccaaatcaccacaatcccttcaggatcctacgtggcgctgatgtggcataattttgactgacaaatgggatccatttaaaaattttctttttcttttttttcttctcttgtattttcctttctctatgacccgagtagaagagggaaaaaaagaagaatgagaagaaaacggaaaagaaaaagaaaagaagaagaaaaagacgcgtcacgtccatgtggcaggtcacattagcaccacgtaggatccaagaggggatgtgtcggtttgggacctagatgatacctttgacaagttctaggacctggatatgcattttgagagtttggggacctagatgatacaccgctacaagtttaaggaccgcccgtgcattttacacttttttttacaatcaccagacttataactcaattgcttagaaaggaaaggaaaagaagtttgaatggacacaagcatgccaacaaaagctttaaacttgctgatgtttaaaacaaatcacaaactgatcgatgctcagtgcctccggctccctcaagtcccaatagaaaggaaagcacctgcccttatcttcacgttgatgtactgttgttgtgctacctttgttcctgtgtgttcgtacgtcctgccccttgaatcagctgatcgga

SEQ ID NO: 43533 - DNA, 1113 bp, Oryza sativa
caaactaatagttacaaatcatctatagataatttaatagctaattcataccatagttacctataaatatattctacactaataattacatatcatacatatattatgttttgtagtttatgctgtaactggttgcaaatctatagtccgctactatcctctctttatatttatctccttgatatgtgtttatatttagtttttagtttgttattgtaccttctctactcgactagtccctcccaactactagtagtaaaacggaaacctcatcaaagaggaggagagaggtgtgaggaggtttgaagcctttttggtttgcaggcaaaagtgcgcacagctttttctcgttttgtgcaattctggggctttgctgcttttgtacccggcggctcctctcttccgtaggccacaggaccaacctttacgtgcatgcatcatcggtctgttttactccgcacttgaaggtacttctgccactttaatctaaccgctggtaccggcagatctctcaccaccaacattgtacatctagagggactagggactaccaatggtactccttgctccgtccgtctaaaaacaagttaaaagacacatcggttgatctaataaattaaagcaaaaacctaaaatttaaatttgtgaattgattttaaagttgattttaaaatatttttaacacaatttattttagcgttggctatctttaattgcatcacagggaaaaaaatagaccaaaatatagtttccaataggtataatcccttacttatttttcttgaaattggttataggaatacaatcctgtggaaagaaaatatgagttaaacatgtctataggacaaaaaaaacctaaagaaactaaatcctccaaaaatcctttgccaatcctccatttcaaagggaccttaaagtttatcccaaaataatttgatttttactccctccgtctccaaatctaagggattcaaacatttaagatttatctcctaaatataaggtattccacactttatctttcttctttccttgcactagaaatactattactagatcaatcactataaaagtgctctttctttgcacctttgtacatgacaatcaacccgg

SEQ ID NO: 43534 - DNA, 1855 bp, Oryza sativa
aataatatgttttcttttaaaataactctatataaatgatgctttaaaagtcatattaattattttttaaaaggtttttaagctaatatttaatttattatacattaattaatccgttgcttcgttttgtgccagaaaggaattgaaggattctcaatggaatgatctttagtttgcgctttctagcgaaaccgggtcaatgaatgatctaaggtctaaaaaaacaacacagggttatttgtacagattatctagattcaactgccaatgacgaagattatgaactactgtatgcatgacttacttgtggcaactaattactccctccgtttcacaatgtaagactttctagcattttccacatacatatagatgttaatgaatccaaatacatatatatgtatagattcattaacatctaaatgaatatgagcaatgctagaaagtcttacattgtgaaacagaggaagtagagtatactgaatcggtcggtctgtgatggatggggagtggttattgtgatcagccacgaaagcgctagctagcctgcggataataagcggattagttggacgtcggcgtctctcttacactttcagctacaaaattggagcatgatttgataccgacctacatacacaacgaaaatttcagaacgaaacttgctacgactctcactcatttttttttaaaaaaaaccacgctatatatcttgtacagttagctacagaagtgagtaaaaaaaaaggtgacaaaaagaagaggaaagttgctgacacatcacgcattggcgccacacgaggcagagacgacgacgacgaaggaagaggacacagtagcagccaacaccagcagtattggactattggcagggtggtgatcgatcatgcatcgagcagatcaagagagctcagcagatgcgactgcttcttctctctcacacacacacaccatccaatgacgacattgaacatgcatatgcatgctgggtgttgcacttgcacaagcacaagactcctttccctttccctttggcgccacactatctaccaccttttggaaggtggccagccagcagcagcagcagcagcaggattgaatgaatgagcaagttaggccagccaagctgctgtactggtagtagtggcctgtgatgagtgagctagccatccatccaatccattccaaccatgcttagtttaccttttgatgatagatttgatccctcattagcttatattgcacatgcattttgtaattcttggggagagcttggcagttggacctgacaacaccaccaccagtgcatacatgcatctatggagaaaaggaaaagaggcaaatatttcaattccaaaatggatctagtcaccaccatgacaagcaaaggtagtactatgtgtgatgaggtgaagcatcatcatgtcatatactagcagatagctccatggactgtgggtaaaaagagagatagatggatagatggatgtgtagattcccaaagtgagaaaagaaaagatttaagagaggggagaaggaaaaaaaaacatatagtgagctccaacaaagctatggggtgaatgaaaagatgaaggtgctcatgtccttgtggcatcttttgcactcatgatcacaagtccaagacatgttcaagtgggtcatgcatgcacaaccttggaaaagatgagatctccttcatctcactttcacattcttttttctccctcccttgcacctttcccagggtcaccaaatcaagatttgtttgttttagttaaggcagctagggtgttgtactactcaaactcactcatggtcatggggggttccacaaaaagtgcccttttatttttcc

SEQ ID NO: 43535 - DNA, 1453 bp, Oryza sativa
acgaatgacagtatagtgcccattccaaagcattgcatattcttgtacttttcctttacaattccttcgaaactttacaattcctttgaaacgaataagccctaaggtctactccctccgtcccaaaaaaaggcaaacagtaggtttccgtgccaatgtttgattgtccgtcttatatgaaaattttttataattagtatttttattgttgttaaatgataaagcatgattaatactttatgcgtggcttatccttttaatttttttcataattttttttaaataagacagacggtcaaacgttggacacggaaactagggtttgtctttttttggacggagggagtaggttgtccagtgtccacccaaataatcacattgaaacaacagccacagcccacaggccatccaattatgcaattagaacatagaacatggtgccatggtggtatgaaaagtcactggaaataaaagccattcacatcttctggctgctgcacaagtagttagcttcgagtttgagaatgaaagggacactggggtaaaagggagtggaggaaggatgcagaatctgtaaaatgaatgaacacgtacagcacctttctacgacagaatccagtagacttgtagccaacccttgcatagaatcatattattgaatctccatcacgcaacgtggtaatctataagatgtcaaaaatgctcttactcttattattacagtatcaagtgtcttgtgatgtgtgcttgaaatctccaagcgcaggaaggagcaaagcaaaatcacaaaatagatgcaagctgatacttgcttgaacctcatttcaaccaaaaacaatcacgcgcacatgcaaagtagaaaagaagtcaattctcaatcccttcttgaacaaacaaatactacatagtggaaagtggaaactttataatggtgcacacgcacacttgcttgattgttgatgctacacaccaaccagatgatattatgcttcagcaatcaacaaattctacagttggtgaaaaatgatatgcaatccaaatacaaataataggctcccaaaaggatatcctatgggggaaacattttgtcactaagtgacttcacacacatctcagttgttttccaacttgtccaatggaagatgtgcaactatcatattcacaaaagaaagaatacaactaagtagaaacacaccactagaagagaactaaaacaaagccaaagatgatacttaataaagatgcacccataagcaccaaggccttattgttgtggcactattcacagaagacacaaggtttcattttattttatgttttgaaggataactcacggcatctattcatttgctgcagctacaactgttacagaaagccagaaaaagccgattctatttgaccacatggcatcaataactgtcacaagctacagtgaatatcaaaccacccacac

SEQ ID NO: 43536 - DNA, 3822 bp, Oryza sativa
taagaaacctaactttgctaatagagtttatgcggattagctagagttcaagttatatagagacgaagcagctatagctagtccacaagctgcactactggacaacacgaggggccatacgttaatcaaagatgctacaaaaacaatgtgaactttactactactgtactacctactggctatactgcgttgccgccagtagataactggtcaacactttggactagctaattgcgcgatttgacttaggtggtgtttagatccaggggtttttaagttttgagttgtcatatcggatattatatagggtgtcgcatggaatgttcgtgtaataataaaaaaactaattaccgaacccgtcagtaaaccgcgagacaaatttattaagcctaattaatccgtcattagtaaatgtttactgtagcacaacgttgtcaaatcatggagcaattagggcaagtactataatgctccatatgttgcccctaaaaataccacattttattgaatgatgaggtggaggagataagtgaggagagagatgatgagtcacctctaaatcaagaggcaacctccacacaaattttaaaaagggtatgagagtattagagatattgatatttatgtactagaggtgatacattgtatgagctgcctcttagttaatgagtgaataaaatagataaatttagaggtagtagtcacatccaccatagcacttgcccttaggcttaggtggtgtttggatgcagggacttaactttagtccctgtatttagacactaatttagagtattaaatatagactacttacaaaattaattacataaatgaaagctaatttgcgagataattttttaagcctaattaatccataattagagaatatttattgtagcattacatagtctaaccatggattaattaggctcaatagattcgtctcgcaaattagtccaagattatggatgagttttattaatagtatacgtttaatatttataattagtgtccaaacattcgatgggatagggacttaaaagtttagtcccatctaaatagggtcttagaagatttgtctcgcaaattagtcgtactctatgcaattagttaattttttagcttatatttaatacttcatataagcatttaaacgttcgatgtgacatgtgaactaaacaaggccttaactcgacgatcgtcatcgcgctttgcagtaagaagaacttaatgaattaatcttgatcgccattgaattaagggtagttcgatcacgtactggatggtaatatgcatatcgtcgatcatttccgtcaaaactcaaagggcaagagaataatgtagcatcaatatataatgttgtgtctcaagttaatatgacttttgtgtttgttgtagtcgatcgagatcgatcgtcgtcaaggttaatatctgagtttagaagctaagtactaggatgaaccggttctgtctgtaataatatcttaattctgtgcgcgaagcttttcttctttggttgtgtttagttcagcacaaagtttggattttggttgaaattgaagatgatgtgactgaaaagttgtgtgtgtatgataggttgatgtgatgaaaaatgactgaagtttggatctaaacacagcctttattaattttaggatcagttcctggtgaagtgatcggagttcagttatttagtatagtcctgtcaaaataaaaatgaaaatgatgatgccattaacaagttgcctcgcgtcataagaagccgtcatcatgtacatacgtaacgcctttgccccgaagcaaatggatttttatcctctaaatattgtagctctccgtcgtgttattattatacagataaaaaactgcataactaacaattaatcgagtcaaagtcaaacaaacgaagaatacttctcgtctaggtcgggcccacgcacactggcttctggagtagcaggagcaaattaaaaatccaactcagctatagcttagaaaaattgaagatgtcgtagtgaaaccgaagaaaaaaaaagtaagcagatcaacaggagatcgaaaatgcaatatattttcatgcattgcccaatctttttgcgaccagtgacatgccatcaaattggcaagaggagggcagggcgtatatattagtgcagcggcaacaagctataagtcaaggctttcgttgtctctccaaaaggtttatcgactcgtgcagaaactgacattggagaagatatatagtactaaccagattcgattcccaagctaggagaggagctggatttagggtgatatgtccgacgacttctcgtcacgtaagtacgtttatatattgcgtacgtattaattggaagaaattaatcgaagcttgaaagctccagctagccgaccaccaccagcggcacacacaaaaagaaaagtttttttcggtatacattatacagttgtactccatgagtccatgtatatatacgctatcgatggccaatgtggaaagttgtgaggagcaaaattagtttaagtctggagctgtgttgtctcgcgaaaagaaaagagaaaaagagttagagagagaggtggcccatatgtggtcgttgtgtcgtggcaagtggacttttttacgtacgtacgtgtgcacctgcagctagcgaccgaccaatcggtatataaaattaaaaatggcatcatccgagaatctcttgggttttttctttcttttcgtttattattgctgcgcacacatgagtacatgacacatgcgcaaatcaatttggtgccagccgccgccgggccgggcgttcgggtgactggcatttttttatccgctcatctcatttctaataactcattttcttttgtaaattttgtagtgttatgtaaacagtaaactagcaagtagggttttatgtgaataattgacgctcagttgtatttcaaccagtgcaaggcgggacgaacgaggggtaggcaaatggcggatttagagggtgttccgggtggtcctggaccacttaaacaaacggcgaccgatcccacttttttgaaaaaatagtgactattggaaaaaaaaagtagcgatcctattcctcctgattcccggcaccaaccgcgcacaggccccacacgcacgtgtatcgaattcagaatgtcgcggcgttgcacgactctgtctctctcctctcgccctagcccctagcgtagcgatgcgatctcatctcatcttatcacgcaatagcgttgcgccgccgccgtcccgcgcgcgcgcaacccacgcccactccgcgccgcgtgcgagtccgccgctgcatcgcactagcactgttgttgtgctgtgttgcaggctgcactctgtgccgccgccgcaaggtgccgtcgtcgagccgatcagccgagtaaaactggaaaacgttcccccaatctacgccttctgataaatgcctgtaattttgacacgccattactttaatagatataagatagagtctctctacctttttgcgtaaaaaaaaaaggagagggggggggggggaacggagtcatggaggcaggcaatgcaagctctatggccacaattgcatgcgtaacctgatcttgtccgttgacattttgtatcaaagacattaattaagctaagctaacaacgttgtaatagcgctagcccgttgacaatttgatttttctcaaggaatacaattagccgttgacaagtgatgaatcgtctataatattgctggctcgctatagggtgtcgtaatgtcaatcgagaggcaatttaagctgtaacctgcaagcaattgcaagctgatcgagagatgcaaa

SEQ ID NO: 43537 - DNA, 1643 bp, Oryza sativa
atctgttagaatattgggctaggcccacttataatattaatctcaaaggcccataataaatgttgaggataataataccacctctggatttaagcgagaaatatctcaacctaaatagggagttattagaggctccctgttgaccagttgaggtgggggtcggaatgccacacgcgcgcgcgccgggcgtggcgtggctggctggcggcgtgcgtgcgtcacgtcactatccttttgcagccactaacccacgttcccacgattccctccgcaacagcgcgtccacgttctttctcctgatagataaggaggccgcgagtccgatccgagttcctcgcttctttcccggtgttagtttctccttctccgcgtctgagttgctctcgcttccctgcttctgatctcttgcgcgcacgagagattggaagaagcagtgcctccgaaaccacaccttcgcctgagatctgcaccgggtaggcgggtgagcgggtgatcaggtttttggggagtgcctcctgcacgactgctcatcgccatgtctggagttgctgccgccgctattggcggaggtggagctgcgccgccgccgacgccgacaggagctggatccggagctggtgcgccaggaggaggtgccgtgaacgactacaacaacggaggcaattctgcctcaccatccagcggagggccattctcggggtataatcttctccttctactgctgttagcgctactcctgttcccattgttagcgctatactgtgtgcgctatgttcttgttcctgttctacatgatgcctctagcatgttatcgcattactggtatgttcctgtttctgacattcatgatgcgcatagtatgctactggttatgttaagatcaccctacactgcttatgccatgatcatagtttcaatttcttggattaaaatatgccgaataatgactatatttctaacataatcttcacagccatgtgtttttggaatatcatacagctaccaagtcatagtattattgaattttgtgtttggttgtcggtataaatcaaacagtagttcacctcaatttgcccaccgataaaaaataacttcaaatgatgcatcagtataatactcgagtaataaactaataatgcatcagatatgtaaattcaagtgtcaaactcaaaatctgaacacaattgtgcatcaaggtgttgagccagcagccctcatgctcctaaaactgaaccttgtttaacacgcaagatttctggattgtaatgacaacgcatgatgatgatctcagttttggaaaacagcaaggaccacatagtcaagtttggatcactttgtttaattagttaaacctaacgagacaaaaaaacatcacaaattcatttcttgactggatggatgactttggatgaacaaataaaactgtggatccatgcatcacagaaaatcaagctagattacctgctaatgctaagctaaattggattgcaatggtgcgtcgtggcttatatcattcaatgggatggcagtaattaactgagttgttgccaaattagttaggagatgatggtgatagtggcttacttactattcattatacaacaactgttcatgaatgcagacaattgtttgacctagttgtt

SEQ ID NO: 43538 - DNA, 2352 bp, Oryza sativa
tcgggcataaactacggctcatcacttatatgtgtcatccgtgacgggtctgagttatctcaatcgggtgcttttttggccgattgagatgacttccttgtgacggccgctaattccaagtatgttagaggccgtcacagatgtaaggttctgtactagtggaaactacaatctttgcattttattttcccctccggtttctatgtagttatattaaacctcatctagaaaaaagatcagatactaggagatttttgcatggtgacgaactccagctgttcggtgtcggtgattttgacagatttcatttaatttaaataatgtcaaacccttccctgttcaagcaaatatcctggaaatttctcgtagacgtggttttagcatacatgcaatcaaacttcaaaaatatataactatattaagaaaatatttatatatgatatgtaaaaattatattaataaaatcataatgaagaaaaatactctcacaattatattttcaataaatctcgtagataaaaatgattgattagaaagagtttcgatcacaactataaattttttagatgtttttaggggaaattcatgtgctgccgttatgaatttataatatatacttcgaaaaataaattttctaaaaaaatcacgaggataaaatttagtaaggtcagaaacttttttttaaaacatagtgtaaatgtaaacgctcacaacacgcacatactcacatttatgaatacacatatgcataacctacccctataaatatctccgaaagacctggttggcttataaatatctccgaaatttgacacatactcacatttatgaatacacatatgcataacatacgctcgctatgggtatcactgaatgaatagttagccgtaaatagaaacacatgtgtcaaatttagaacttgaatccaggtgagctagttccaccgcaaggaagctaactcattgagctacgctcacttcacggtaatgtcaaaaatatgggtgcgtgggctaaattacgtgaacctgtgtcaaatttgatttgacatgtgtatgtgggataaattacgtatgtgctgactctgacttgggctatatattgatgcaaagtttaacgatagaaaggccatggacaaccttggtggcaccgccaaacttatatattgccacgaatcgttcttctacattagcaatgacaaaatattattgcgaatgatccttgatagtaccaacggttcccagtatttgttgctatatctaagactcgttgcaatgattcaggtcgttgcaatacctaagacagctttgcaaaaatatcgtttcgtgttgctatatacaagagattcattttgcgacactacagttttgagttggaataacatagactcttttgcaacacatgatgtaactaataacaatgatttatattcattgtgacatggacaactcttgcaaccattataaaagcgccataatcacgtcgccctaattacaaagcaaatatatttgttgtgatatatctgacttattgcaacatgcgttgtatatattgcaacgttgcgatatatctcacgacgacggtgtgggttttgcgaggtgtggatgcagcggtgggcgacagcagatgactgcggcagggaggaccgacggcattgggcttcaggccatgggggatctggcgctggagagagcttgccgagcgaagatccgacggtcgggatcgatctagggtttccagaatgcttttttgataaaataaaatgcaccaaaaaatctttttgtgtgtcgtgtgtcgtaacgtgcccgcttatggtggtaagtgcgacccccaatctcgtggataagtcttgatttccccctcaccctattcctccgctagtctcatccgtctccatgccatgccttgcgggagatttgcaataatgatactgcaaacattaatctttgttataatgacactggacccatatttcatagacacagatggactcatttgtcacccactcaaagtgttaaaacagcgaagctccaatgtttgcagtcctaatattacaattttctccatgccatcatgcatggggccactggtggtgtcgctctgaactccttcctccgcactgggaggatgccaagcatcgctccgacggcagtgaagaatgtatttttaccgacgatcatcataagcctgtccgcatgcgaagaatggatctcgcaggtggccggtgttccgtcagtggaaaggctctatttttactggcggtggcaggttagtcgcatgtggccggcaacgaaaaccgtttcgcccgtcagtgactggctttttggtattagtgaactacaattagctctcatg

SEQ ID NO: 43539 - DNA, 866 bp, Oryza sativa
cccattaacaacaaattaattactggagaagtcaaaacaataacgatgtcacataaaactgtctacatactttatctagctaggagagggtaaattagatgggtaattttagcatctttgaaaaagtatcgagatgtattatatttttagtgtaaaatcttttataccttcagctattatatatcttgaggtattaatattttggtatagtacttacatattcttcctaagtactgtaaaatttcttagatagatttttgctcacttgattttgctccagcacctcccagctgctggcttttgctactgcttatgctgttatagtagtactgatctgcagtcttcgacttgtaatcagaagattgctgcgcaggcacccttcctgtcgtgcttttcgatgatcctgcagacgcacaaaattagtggtgtgaaaaaagagagcttaaaaacacctggaaagttttctgattaccatcatattaattatatactctttatatataactaggaaggtagcccgcgcattcgcacgggcatgcttgttatttcttttcgaaaacaggtctaacaaaatgaatttaaattaaagttatgtatttcccttcttaattgaatgctcattgtttattttttcttaaaaaatcttaagaaactttaatttctcataaatatagttttctaccatcctgctgtctttaatttattgattttgtattgataccttagaagcttatacatgcaagtcatggaatttagtaaattcgtttaattatcattgacattcatttattgatgtgtcaaagcgaaatatggcttgtatgtagagaagcataaaaaaattgggaaagaataaaaccgggggatcc

SEQ ID NO: 43540 - DNA, 730 bp, Oryza sativa
cttaccactaagttggataccatgttttatttcattatatgcaggtattgacggttagatattatgatttaaggatcgtcaacaccatgctgaacacgtctccatttctgtagttgtgacaagacccctcgcataactcaactcagagaggcgcaactttcctggatcataatcaccccattttagccaaggtatggactccccagcgacccccatgggtttatctctggcacttcatagtttggcacaccacaatgagccttgctatacaaagtgtcaagttgttgcccatgctagcttgtggttggcacggttaatgtttcacaacagtagctcacgaaccggtccttaattgccatgagcacaactatccaaacttcaaaccatctactcacaacccaccattaatcaagttttagttggcaactaattatccaatcaagattgaccaccgtgatcgaccattaaatatctatcattaggttatagtgaagctttagttatcccaatagtttgctaatatttctaagcatagctaagaaattatatctaatatctagctgaaccaatatataaggcccagactagtcaaattataacccattggaaaataaagttgtcgatttctaggatcggtatttgttggcagtatgtcatgagacccttcgaccagacctgccgaaaccatgcgaccagtcaggatcaggttaaggtgttaagtcaacggggc

SEQ ID NO: 43541 - DNA, 1116 bp, Oryza sativa
catcaatgtgagtatgaattcagggacatgtaaaaatttgatttgaactataaaaaaaaaacaggggtaagaaggcgcatatgtacttattgtagccatgcatggagaatattttagtattttatttgttagatagatctaactgtctagaaccatcactttattagaaattttgtgaaaagagcattaaatatctttaaactactgaatctaactaaaaaaaacagggcaaaaacggaatgtgataaggaaacggctacggttcccggttttgtcccaatctttcacagtgctctgtatgtctccagcgataatatatatactgttatctccatttgaataactcaagagcagcagcagtattaagatgatagagatctcgtccagcaaagtatatagggtcagacacataagatcgataactccagataaactaaactgaatagctccattagatcaaatttaaatagatagatgattaggtttacaatgaataaactaagcaaatctgtagataaactccacccgtgcagcaagaatgacacacaatcagagcaagaagacttcggcagaaatcagaacacgcccaggaaattaattcccgatcacgctcgtccaaaccaatgcagcaacaatggtggcaaaacgtcaggcagatggaatcaccatctccttcctgacctaggcggcggcggcggcacaatacaaaggaaaactaaaagccaatctcctaatacaaggaacatggcatatataggtggcacaaaggcctagccagctgaacggactaaaacccaacatgggctcctacacaacgatccaaataacagagaaaaacctcattaatgtaataccctgattacttggtaatcctgccgctaagcatggaaggaaagcagccacatgcatgcatacatgcggaggttgtgggagatgatttcgttttttgtctgtgggccctcatcttctctcctcgcatcacgtggcagcttgagagcgtttttaggatgccacatggtagcttgagagcgattttaggaagtttaatggactgttagtatataatagataatagatagatagatagatagatagatagatagatagatgagcaaa

SEQ ID NO: 43542 - DNA, 654 bp, Oryza sativa
cgatgtgaccataacaatactggatactaaagaaaaaacactaggagaacacaaaaaaaggaacaatgggtatatcaacaaataagtatattgtataacgacttaatttgtagatcaccaagcagcaggtatatattatttactacattcattcagcaaaaatagggatataatattattatttattactagtacattcagattcaaccaaataaagatatttttagggaccagccggcgggtcatttcttttgctacagctaccctatcgtcatgtacacagaacagtagaatacatcctcactcattccatccccagcctcccaattccgttagagcagtaataatttaccctaatggccaattaaagcaattaacaaccccatggaaaatcattacctaacggaaattacatgtacatgcagatttttagaacttatcaaatggtaccatgtttttctcgcttcaattaattgacagctggtgatattattttgaaacaagataaatactccttcaaaattatgcatgaatataatgtaaaataatttgcctgccatatatattgaacagttttttaaggaattttacagttcttgaggaaagtatcttaaggtacctaaattttacaagatatgctcacgtccaacaaaa

SEQ ID NO: 43543 - DNA, 1284 bp, Oryza sativa
tcaagaaactcatttttctaagtagaatattcaaaaggtttaatgagctgtagaaaaaaaacactaactatatatttattggcatatatgtatgtaatggtgataggagctgtatttatggggggggggtgataatgtacccaacattttagtctacaaaatatgaggactgagcctgaaaagggttaggctaagatttaatagatttttgagttaaaaatatttaaaggctgaggtgggttgtgaaagagcccatgggctctgacccattaccttccctagctgtattctacagagattctaaacttatatatatcttggcttgcacatatgcagaaattctgcagaaatttgtgaaaggtaatctttaagcaaccaacttgtgcacatatgcaggacttgaaggttttagtacacctcctcctcggaacaatggtcagggtgctcacagcctcgtataccaaatcaaaacactagcgcccaaagcaagtcaaatggacttcctattccaggtaaggacttacagggaattctttttttttttgtatgttcatgttaaatatatggtgcatgcatggtaaataattaaggccatgttaaaacacattgacaagtcgaattcttttcccacaccaggtaaggacttgaccggattggccatataattaaggcatatgacagaagaagatgcagtgattgtcaacaatggttcatcgttcgagcctgtgtgttactacaatatcatgtacatatgtatataagtagtacatatagtaaagaataatgtaaatagtagttgtcaaggtcaacgcatgcatgggaaggaaacaattgtagaagtacatgtaatttgtttatttaatttgttcaaatttgtttgtatatataaaatgtgaagctgtatatattgatacctttgacaataatgtacagcacaataatgttgaataactcaaagtgaatcattttatgtttccaaatataccaacgaaggctgtattcgaaactctagtttggctcagctagtcaatggcacgcaaaccagagctagtgattagcgtatacttagttaagtattactccctcggttccaaattatagtgcaccttattttaaaaagaatcaaactcggtaacttttaactaataatcaaatttataatagtaatttttgtataactttaatgtgataataattttatatttgttagaaatataacataaaataattaagagttaaagtatgtcatttgaaaccatgtaaaaaaatataggttttataatt

SEQ ID NO: 43544 - DNA, 1436 bp, Oryza sativa
  unsure (1)..(1436): unsure at all n locations
gactactaaaatatatatgaaatattttttggggatttattccctaagcgataacaaatgtactggaaatttattttcacaaacgattcttcgaagagagcgtcgtctgcaaatttacttcatacgtgattgtggaatccgcatgtacaaattgttaaattaattnnnnnnnnnnnnnnnnnnnnnnnnnnnnnttaccctcctgtgaaagtactttttgatggcctgcataaattatttgaagtgtattggctgtcataataacttttttatatgtaaatgtgcaaaggaatatgcaagtttggctgtataaattattttaagtgcattgacagtcgtgcacatacatagccatgtagcacatttgatgggtcaacttctaagatgcgtgatcactgaaaaatatatagaaagcaatgacttccaggagtccaggaaaattgcatagaatatagattgggaagtgaagtaccaatatttatttctgcaggattccatatactttctttatatgcataaatcttctacagtgcattgcaataattattttttctgaaccgggacggcgcaaagcaatagccttgtcgatcaattattagtcttagaactcagctcagatatagctctacttcaacaggggcacatcggatctgttaacattttagtcaacaggggcacatcgagcaagtataatagtagactataagccggctaaatgctgaggtggaggagagaagagaggagagagaggagaagcgggctgtaaacttactgccgtctcgaacacaagaactaagaaactctgtgagatagataagtggaccctatattaatggtaaaaagctaactattatatgggtaggctgagagaagactacaaagaacattatagccaacaggtcggctgtattactaaccttgctcttatgggtaggctgagagaaggctacaaataaccttatagccaataggtcaactgtattattagccttgctctaagtttcgaagagcatggttaataatacagtcgacctgttagctacaaggttccttttgttgtacacctctgatcagagtaaaactattcgaatagccgtgcccgcggttatgggcggtcaaccagactcatcgtgattagactcatcttagtttagtctaatgaaattggatggtataggtgaatggttgggcctgttgcaacgtggtggaacgttggacagtggatgcttaatactgcttaattattacaactgttttcgcattcgacttctatttataaatgctagtatttatgcaaatgaacctgtttagctatcccttggtaaatccctgcatcatacccttccattccggtatgacttgctgagtacagtggatagtactcagtcttgctttattttcccccccaacctcagagtatgagtatgtgtccgatg

SEQ ID NO: 43545 - DNA, 1531 bp, Oryza sativa
taatttaacaatttgtacatgcggattccacaatcacgtatgaagtaaatttgcagacgacgctctcttcgaagaatcgtttgtgaaaataaatttccagtacatttgttatcgcttagggaataaatccccaaaaaatatttcatatatattttagtagtcatatgtgcacggttttagccatgaaatatgcatccgtgcaaatatatatatgggattcaaacttgacctctcaattcacatgtagcctcccataaacatctcacctacgaaccacttcattgctaattgctatggaattgatgctattgttttgacttcaccattctaaaacttgtaacacatatatttaacactctaaatgatatcaaatggtaatgccatcaactacaaagttgcatgcctcgtcaagctttatactttctttatatattatgtcctcatctgatatcattttaaaaactcaaaagttcatttttaaaactagatctgagaacttgtaatgaatatttgagtccctaaatgaccttgaatgaacaaacattaactacaaagtggtagatatatatcatcaagacatacagttttcatataaattttgtcatcatccaagttcagatttaaaaattatgaatcaaagtcttcaaggctcccgccagggttcctaagtagccacttcaccacggatcgaatcgggtagcgttggctgctgtgatagagatttggtcagaatccatgaagttggagtggcttgccttgggaaaatggcctggagctaaaaccttgttattaataggtgttcgcaaaaatacaaactacggaggacaggatttctagttaacatcctacaatggcaaggcccattcttccaaacaaaagactttctatacatagcaaaaggattcctgtgtcacatctagaacgtagcctaccacaacaacagttctggccttcgacctcacatctccaaagtcccttgggggaatttaactatttgccacttttaatttaccaattatccaaatgcccctcttaggtttgcacttaataatttgccactggagagaggtaatttcttaactatttgccactttttcctatgtggcgtgccatcgtgccgtgccagcatggaaagcaacgtggaccccactcgtcagcccctctcctctccttcttctctacctccggtcgtcgcccacctcccgctggccccacatgaaggagacggagagcgggcgggaggagtccgggcaacggatgcgcagcactctccctagcgaccaggagatggagagtgtggcggcgaggaagcccacgaggccaaagaggaggcaggcagtggagaaggccggggtggagaggaggcagcaaaacgtggcgcgacgggaggtggtcgccgaggagaagaccttcggcgagctcggcatggcttcggcgaactcgtcggctgctgccgcgtgggtcggtgaggcgtgccggatcagagccgagggagatgaggaggaggagtggtgttggtggacgctgggtg

SEQ ID NO: 43546 - DNA, 2482 bp, Oryza sativa
actaacggaggctaacagatgatgatggtaaatagtagaagttatgcaaaaattgatggcatattatagaacatgacaaaatcagtggcaaatcgtagtgtgtgacaaacttagtggcatataatggattctctaaaaaaaaataatgccactcttgcatgacgagtttagatagaattaggctaagcttataaaatacttcctctgtcatattgttttcttttccagtcaaatcttttttttttgagaaacagtcaaatctttttatgcttgattaagtttacatgaaaacatagttttgtagtatttttaagacaaaaaaaatatactataaaaatatatttaatgttagatttaagaaaactaatttggtgttgtaaatgtgatattttttgtataagcttgatcaaattaaatacgttgactaaaaaatcaaaatggcttataatataaaatggagagagtatatgcgtttcagcgatacaaatttcaggttaactattctacgtatagtgagaacttaaataggacgatatacattacgattgttcgcttgatgtgggagcaaaggctaaggacattcacaatgtttatctcacaacgtttgtaatagtgtaggcccattaatcaggtgtagtagttgttaccatattccacaatgtatataagcctgtggtgagaaaacaattggggctcattggggctagagccccagctccatcccggcagaacccccagccctgcatgcagagcagcagccgcacagcttcgggagaggagcagcctgaagcaaaagggcagaacgaacaggtcgtaggtaagaaggagcaaacaaagacaacatgtatagtccatctaggtgattaagtggactaattggctactaagccttccttattaagttattagttttttgcttttttttgtctacttcaatggatggaacgatcatgggattagggaagcgagtggtttttactcacgaagtattaatccaacaattatcaacaattgtgttattgaatttgtggttgtgcctttgtagtattttgtcttccattaagtgaaagcattttcatccctcaagagatatcctctatcccctcattttgtgcatgtcatataatcataaaaaaactaattaatataaaatatatcgcttcacaaacatgcaagttaaaatttaatttctataaattgtaaaaaaaatcaaatataattacgaatgtacgataattgttttcaatttattttgttatttttttgcaacttgtagaagtcaaatttggccttctatgtttgtggagtgatatctttcatatcaattaatgttgtcaatttttttttcaaattatttagaactatttagatggtatgcaagcatcgatcatactttgtaaaacacattagaaatgatactttgtaaaacacattagaaatgagcaccccctatatttttattttcgttctagattcacccccactatgtgggaccatgctagctatgacgggcctaaaccatcacctctgacggattcgacccctcatcagagattagtggtcagtgatgactctcttcacctttgacgggtgaagagccgtcaatggtgaccagcccctatgacgggccacgtatagaacccgtcgcaggtaactattatctcaaacggcccattagtttgtgagccgtcagtgatgtctataatccagcaaaaaaataagaaaaatagattgcaacccgtcgcaagtgtgaaaaaaccctagtaagaaaattggcgcacgctgccatggtgctgcttgttgtcatcaaacagaccacatcacaaaaaacttcaaactgaccacatcacaaaaacttcaaattgaccaacagttcattgtcctccatcaccgcatcaccatctcatataccaatcattcacaaagggggatggcaagaatttatcatacaacaatatcatatcattcacaaaaggggcacgctggccgacagttcgtcgtcctccatgacgaaccagcgaagggagatgcaggtggaggcgccgcaccaccaaacaaaaatcaagaaacaagaaaccaccattagagcccacattctcaaaccaaacacctcaaatcaacaacaacaacaacaacaacaacaacaacaagatttaagtaaaaaaaacaacaagaagaagaaaccccaccgaggtggccggtgggtggggatggaggaggcggtaccaggcgttcagatctacgcatccccagcctcgtggaggtcggatccggcggctagcacggtcggtggcagtggtgagggaggcgtcggtggtgttggcgaccgggagtcggggggaggcgccggcggaggtggaggcgtaagtggcggccagctagcacgggcggaggcagaggcgcggctggaggcgtcgccggcagaggcggcgaaggtggagaccgctgccgccgtcgggcctcagccgcctcccctcccgcc

SEQ ID NO: 43547 - DNA, 1586 bp, Oryza sativa
acttaaagccatttgaggtgagtaaacctcacatctgacgggtcgtccggctgcgacctgtcataggtaactagtcacctgtgacgggttctattttcaacccgtcacagcctcacaggtgactagttacgtgtgacgggtcgcagccggatgcctcaccaatgacggcatcccgtatgacccgtcaaaggtgacggtcatcagtgaccatttcgtttactcgtcacaggcatcctgtcagaggtgtgagcatctggtgtagtgcactgtgttattcttggtcattataattgtgctgccagctgcaattacttgtcatcatcttttatttaaaaacaaggaaggtagcccgtgcacatgcgcgggcatcttatttaatgtgttcgaaattttattacgaatgcttacacgtagttggtttttttattgaaatatcctttgtactttcaaacttatttgggatttctatgaacgttggttatgattttattctagttacgcttgcaacataaaaaattgttaactaaaattatgtgaaagcatgccgttttgaatttataagaaaatattgtatcatcaccatgaagtttctatgaaactatatattgtactatgggtattattatactttaagtaatactccctccgttctaaaatataaggtacaaccacccttaactcaaagaccaagaaacaattattatcatctcctagtttagatcaccctaataaatgtagtacatgcatccaatagaattagagatcttaagggtagatgatttaaaaaagtaataatttaatgaagaagaggtcctagttaattgcatgcaagcatgcatgccttatattatggagcatccaaagaaagtagttgtgccttatattatggaatggagggagtaattgcttttaaactctccgtgtctttttggattttgggataaattaatttaagattttctattaaacatatagctaatagaactatgtcatataattaaagatagatttatacttcgtcgcataaatccgagaaagttaaattttgtttcaaaatataagggattttagagcagtactacttgtcctatccaaacaactataatttattgtttacccaatcttaccctaaccaccttcccaccctccacgtctattttaattagtaaggggtatcatagtgtttttttcttcctcattagctatggaaaattttactataggacactgcgatttcgtggttttagccataggacaccgttcgaactcacttttaggggaagacactccataaacgtagtaatttgccaatggacaccgcgccgattataataataatttccggttgaagaggagagagacatcacgtgaaatgtcaaaaatgcccttgggcccacatgtcagctctcctatctctcctgtctccatcccctccttccggcgtctaatgcgcggtgtcgggtggtcgtggtggcggaggacgatgctgactccgcgatggcgacggcggacactacgggctttcacgcttcctcctcctccagcacctccagcgccgctagaatgtcgagcctgacacacccgcc

SEQ ID NO: 43548 - DNA, 2842 bp, Oryza sativa
ggcgggaaggcgagggctggcggtagtaacgggcggtggtcatggcatcccaccgccagatttccgccgcatcccggagttccgccgccagaactcacccgagctgtcccgccgtcgctgtagctccgaccctcgcccccgtgtcgccgtggccgctctgctccgcgcatcagatgtcgagatgaggggatagaaagagagacaggagagaaaggagaactaacatgtgggcccaagggcatttttggacattttacgcgatttctctcttctcttcaaccagaaattattattctaattggcatggtgtccattggcaaattaccacgtttatggagtgtcttcctcctaaagtgagttcgggcggtgtcctaccgctaaaaccacaaaatcacagtgtcctatagcaaaatttgcctaaccctaaataccttacgatggttctttactacccatgaaatacatcttggtattttttccaatttattaacacacttggatgattgttttttaatctaaatgcttatctataatgtagaaataatccgatagttacgaataacatgaccacttgtgtaatgataaattacacgttgaatgttgtgccttcataaataaaatttttaataatttcaattattgattatatgctttaatataccaataaatacgtaggttatatgctacatagattagtcatattttttcaataatatgtagggtgtgtattattgatgttttttaatttatgttttttcatattgcagtatacatatatattttttgatttaaagaaaagtcatgaggatgtagtttttattttgttccatgagattgtacacgtaatttagttatttgtgtttatgaacgacttattagattgtcatgtgacgacgtaggaacgtttgtaggagtcccacgtaacttaactgcttgaggcgttttagaaagtttaatggacttattctatggttaatggatttttattatataataatagatagatatatagatttttaggatttgtccgattttatagagcgtcacgcgtgatggtgtaggagtgttttacttttagtatataacataatatatagattataatcagtttgttatctaatgtttgattttattctcatattaaattttgctaggtagaaaattaaaaaataaaaagaatgatagaagatatgagatggagggagggatggacggacaaatgtaagtatgtacattacgtacataagggggatcagagtatccctgggagggtatggtggatatttttaaatctaacggtgacaaataatgggtccaccgtattaaatgaaaatcaagggtagaatgttttgcttttttctcagaatttctttaatttctctaatttattagagtgccaagtggcggtttaggagcgtttgtaagaagtttcatggacttttagtatataatagaatagaatagaatagaatagaatagaatagatagaagatagatagatagatagatagatagatagatagatagatagatagaagatagatagaagataatgtaaatatatagatagtgcccgaaaaaaatgtttatatatatatatatactgttctttaattcagtatcgtttcatgcataaagaaaaaatattttgtttgccggaatggcttaagaggggccatccaatggtattaatattgagagggaaaggttaaaatgaaacttttgaacaacataaggttgtctagattgatcatacgtactgtggagcacacgtacactcaagagccacgtgccaaccatataaacacaagcccctgaaataaataagcctagcaccaaatctatcgcccctaggccaactaagaaaaataggctttttatgccgattctatttgctaattaattaccattgtagtacgatgaagccgttgattgcgagtcagtagctccataggaggttccatacaatgttgttccctgctgggcagggaccgagttccgaaatcctgcgtggattcatcaatttggattttagaggcaaaatactaattaggttttatgcagatgcatataaaaatatgatatgctagttagtattccctccactccaaaatataaggtatttttagtggcggacccagtgataaaatttagctatggtggattgatcgatgtgctagatcaaagaacgttgtactttcaacaaatatgataaaatttgtatacataaatcacactatatttgcattcattagctagaaaatatagcactacacacgattaacaaaggcaataatcctgaatttttcatgtaagttttacgagtgaaataattttcacaatgtgttcccattttacagatgtgtgcttactcttgtttcttgtttttttttttttctgttgttgctttctgctgtgccttttggttagagcattggacggtcagtccaatcaacagttatgcttaacaaagataatgcagtaaacatttaattcttagactcttcattcatttttagagacacaagtcaattctaccatagcccttacatccaagtaatcaaacaaatagagtttctaccaaaaccaaatagtcaattaatcatctaagtttggctgtggcatagctatggaagctgccataccatgccacaagagaggtccaccactcggtattttcattggatactagaatgtgttacgtacatccgatcaaaatacattattatattttagaacagaagaagtaccatgagttggtgtaatggtactcacctgacccgtacgacgacatcttgatcttgtcaggcctgtgaaatctcttgcttctgatcgatgctca

SEQ ID NO: 43549 - DNA, 640 bp, Oryza sativa
tatattctatgcaattttcctggactcctggaagtcattgctttctatatatttttcagtgatcacgcatcttagaagttgacccatcaaatgtgctacatggctatgtatgtgcacgactgtcaatgcacttaaaataatttatacagccaaacttgcatattcctttgcacatttacatataaaaaagttattatgacagccaatacacttcaaataatttatgcaggccatcaaaaagtactttcacggagggtaagcgaacagcctgtcatttacagtctgcgcaattaatttaacaatttgtacatgcggattccacaatcacgtatgaagtaaatttgcagacgacgctctcttcgaagaatcgtttgtgaaaataaatttccagtacatttgttatcgcttagggaataaatccccaaaaaatatttcatatatattttagtagtcatatgtgcacggttttagccatgaaatatgcatccgtgcaaatatatatatgggattcaaacttgacctctcaattcacatgtagcctcccataaacatctcacctacgaaccacttcattgctaattgctatggaattgatgctattgttttgacttcaccattctaaaacttggaacacatatat

SEQ ID NO: 43550 - DNA, 708 bp, Oryza sativa
attcctgcagcccatatgggtaggctaagagaagagcggggtgcttgtcatctacgttgctagagtctttgtggcagagttggagctgctgcatcgggttcagccgatgagccaggcaacgataacactcaacactccggctctggcttcttacaggctctacaccttttgagggagtcaagcctagtctggtctcctaggatcggcgacatcgacgcctgcgggcgccgtttcctccctggaggtgttgccatgtggactctctcccctttcgggtgaaaacccagcccagatgggtgggtgtcggcagcggcttctgtcgttgttcacctccttggaggcttcgccgaaggtcttgctcctccctcggtgtctactgtagtttgtagttttgtcacaggctttttgtgtcttcagtgtaaggttttgccgatttccctttaacaaattgtgcagttgtatggtttttaggcccggttttccttataaacagggcgaactctcttcttctaatatatccggtagaactcctaccgtctactgtttcaaaaaaaaaagagaagctgataattactgattgtttgtaactgaaaatgcatgagacaagattcacatatatggtgtcacgcccagaaattcccgaatagaattccaagcagaatgtgcattaaaacccccatccaggaccggccggggtacacaaacgac

SEQ ID NO: 43551 - DNA, 1062 bp, Oryza sativa
tttgaatgcacttgggttttaaacattgtcttttgcagcactacaccgatcccattaaaaattatgtattccgtactatgaggtcagcagcactataccttgaaacagggaaagtaataatacgtgcctttgttcaaaagacaagtgtccatgaggtgtactcttttgaaaagttcacacatttggtaattgttcttcacaatttcttacacttcatgcttgttttactttcgataaaaaaatcacacaattgagtgtaattatatggaattaccatgttttatatctttagatattctgaaaaacgtataagttctaagccatctactttaaaaaggtatatccaggacactcctaactatagttggtctctatcatgatattacgaccaatattcttaatagaatccttctacaatatactgcttccatgtgttattacaatatgcttttcaatgagttgagaagtaaaactataacttaagagggacgaaccagctgtgcacacagtcgtcaaaactccaaaagctttcactgaaagaagagattcttagtgatgagcaaggttcatctagcggtaaatttgttcctgaggaacaaaagttcatcaggtttcttgtgttaaatcaatttttagacatatttgcttcttataatgctctcttcaggttgtgctatccagtataattttactacaataatatgcttcaaattctatgttataaaaaatgataataattaatatagcccaaaaaataagacatattgatcctagctagaaggccaatatcattttaggtgacaattttgctataagctctgataactgattaaatagtgcacctaagaagcaaatccgtatgaccccaatcatacaccattagtttaattaattttcacatcctaacttccacgcaactaaactctacattttggctaatattttcatttttttatataaagtagtactattaaaactaggtccaccttatttacaattagatctagcattccaaatatttgcaaaaaggagagtcttgggggtgacatggttgtctatatc

SEQ ID NO: 43552 - DNA, 632 bp, Oryza sativa
aactagcggtaagttagttcccgaggaacaaaagttcatgaggtttcttgtgtaaaatcagtttctaggcatatttagttctcataatgctttcttcaggttgtgctatccagtacaattttaccacaataatatgcttcaaactctatgttataaaatacgataataattaatatagccccaaaataagacagattgatcctagctagaagaccaatatctttttgggggataattttgctataagctctactaactggttaaatagtgcacctaagaagcaaatccatatgaccccaattacaccattagtttatttaactttgacatcctaacttccatgcaatttaactcgacattttggctaatattttcaatttttcttacaaagtagtactattaagattaggtccaatttttttacaattagatctagcattccatgtttttacaaaaaaggagagtcatgggggtgagatggttgcctgtaccatcgtactaaaataatttaaaaattgtcatgtaacattagtttctcaatcttttgacttccttaagcattgtgcaaagtaaaaatacattatatattttacctccttaatcatcatgcaaaatcacagtgattagaagct

SEQ ID NO: 43553 - DNA, 2231 bp, Oryza sativa
gacatgcctttgctcaaagaacgatcttctgaaacttcagcgcagaaacgaaccgcacttcaggatccttcggaatgacatgaactacatgaagcacacaaaaaaaaagataaaaccctattcaaaaagcaaagatcagtacataagaagcacaaccatggattctttaggttataattaagaggcttgaacagatagattcagagtttgtatgaccaaaatatggtcatccaaagcttatttgttgtttaatggagatctacaaattattgaattaattttgcaatataaaacatgtttattgctcctagaatgtcaacctcgagaccatggaggaccaagtgcacagaaactgctcacgggtctatggaagtggacccgcgtgtcaaccgaagccagttgcccacaagcgggccccactagatgcaatgcgcgcaaccacgtggcactgacgtggcctccacacgtgcacaccatgacaacacgggtggcaaccgatgccagcagcacggggatcaaagccctctagaaaacggtggtgaatagcaatgccacaaagagagaagccacgacgagaggagaggaactagcatggctagaagagagcggtgacgaacttgacatggagaggatggcttgggggacatagacaaatgggtcggtaattgggagacaacttcggtggtgacttttgggtgaagacgaagcagacgaagcaatgttagcgacgcgtagggcttgatgacgtgaagctggcgatgatgacgacaaagcctgatggctgcaagggcttcggcttgatggaggaaggggcgacgcggacaacgttgttgcggcggccttcgggtgatgggagtacgaggccgtgctagagctcactgttatgacaaaaaatgggatgttttatgacaaaaataactatagaaatttctttaaagaaactcaaacaaatcatttttttaagtttataatggttaatactcaattaattatatactaataatccatcattgatatgtatatgctagaatcggctcatcagtcccagctgtctcgtacggctgcgttcgagctagcacttcggctagcagtttaagcgctaccagaagcagtttaagcgataccagaaaagagagaagtcattaccacatgattaagtattaattattataaactgaaaaactagattaatatgggcttttataaagctttaatatatatttttttttgcacataatacaccgtttagtagttagggatgagtgttaatagaaaacgaggaagttgtttagagttgaagcttataactcagccttattcacaggctgattaagatagcttgactgggtcgatcgactggccgatcgaatattttgttattcctaactggctaaaaactgttaatacgtttatataggatcttgcgctacttgacatatacttttctacctttttctatcattagcagatatatgcatgaaaactccattttgagcaaacaattagaccattacctggcaatgtttaggccctgttttagttccccaaaagtttttccaaaaacatcacatcgaatctttggacacatgcatggagcattaaatataaattaaaagaaaaactaattgcccagttaaggagggaaatcgcgagacgaatcttttaagactaattagtccataattaaccagtaaccaatatttgctaatgacggaataattaaactcaaaagatttgtctcgcggtttccagacgagttatgaaattagttttttgattcgtgtccgaaaactccttccgatatccggtcaaacattcgatgtgacataaaaatttttatttcgcgaactaaacatgctcttattgtacagaaaacgaacgctacaatccaggtttaatgaaaggacacagctagcgtattgagctagcaaacatgaattatactgtcatggtatttaagcggcaaaaacacgcagagcaaggaaggtcgtcctggaaaacatgtagcaataaacaagaagatgtaagacaccattttgcttctacctttgctgtggaatatagtaagcagtacaactaaactacaaggaaaaatataatcttgcatcattactcatgaatgacccttcttggtctagaagacaatacctgccattaaattaggcatgttccaagtaatttcctcggcgagctataattggttcagagggtatctgcaattctgcctagaa

SEQ ID NO: 43554 - DNA, 1826 bp, Oryza sativa
ttggtcatcagcgccaacaatatcggtgccgtcccttttatattagtgacttagcttccaccaaggggcatccaccaaggggatatggggatgacgcaaacgtcattggcaccgtcatgttggaccacggcgccaatgaattggctccatgaaaatgatcatttctaaaataagttttctaaaaggataaaaaatgtgaaaaatccaagaaaactaggcaaccaaatcaaattaaaaagaatcaattaatgatttttccactgtactgacaaatgaagctgctcggagaatatagctttttagtttaaatcataatgactctttctttaactatctctaaaatacaagttttctctaaatcagcaacccttccactttcattatcaaaaataacaatccttcctctttatgcagcaacttggaaccagcactgacgaactccatcgagctaaaaatggcagcataaaaaatacggggatggatagccaaatctagttgacaggatacgctcttatgcaggagatgagcatgaataccaccgagaagacgcaaagaacaaactgagatgccttaaggagagtctactgacaatccaagaagtgagacacaaagatgggatattacaagctaataaggaaacaaacattggaaataacagatgctacttatacttatcaggctgaggatgttctggagttatatggttaccgagttctaaaaggacaggctgaaatcatgggctgctatacctgggatttaagcggcaaaactacgcagagcaacaaaggtcctggaaaacgacaggattacatgaaacaataaacaagaacaagagaccattttgcttctactcttgttgtgaatatactatgcagcaagcaactacaagaaacccaaaacgaaaatgagtcttgggagacactacctgcaattttttaggcatgttccagcttccaagtagtttccacatcgaactatcattggttcatacagagggtatctgcaattcaaccacgacaatactgccactccaaaagtacctagttattagaacgaatgtgagcaccagaagtcagaaattcataaaaaattttcacaaagatattagtcacctgagcattaaaaaatggtccccttgtaatgaatcaccaaaactttttttacatgcaacaactatgtttcaatacacataattaagcataagagactatgtggcagctcaatatttttaaaaaaaaattgcagtaactttgtgaagaaaaccacaatcagtgtagtgagcatacacagaaaactaaacaacgaaattacagtaaaaacaagcaatattttttctattctaccataggacattagaatatgtagtgtatgaagctgctcggagaagtaagacagctttttttgtattataatgattctttctctttcttgactacatctacatacaagctctccacatcaccaatctttgctctttatgcagcaacttggaaccagcattgaacaacttctcaaagttaaaaatcacagctacagaaataaggggggtggatcacctcagcctgcatctcaattctcaaagctcattgattgatcagtattaatgaagacacaaaggacaacctgagaagctttaaggagagtactggaagtccaagaattggtagacagagctgagagattgaacctgcatcgaacaactccttggggaacaatggcgactacagcaatagggggatggatcgcctcagcctgcatatcaaagctggttgataaggtgtgttcttatgcaggagatcagtacgaataccaacgggaagacacaa

SEQ ID NO: 43555 - DNA, 1969 bp, Oryza sativa
ccacttgcaagcattgagtctgcagtctcggtatgtgaatagactaaaaataggactcgaaaatggcatcagcaggttgacccagttaagatacttagatgctccaccaggaataatttcaggcataaaattgattggcaagctcacattcctccaggaattcaaccatggcaatgcaaagaaaagaaaaagaacagcatcattatagaaaaactgtaagtatgacaagtgaattccctccttaatcatgaattatggattaaagaaaaatctataagcaaatgaatcatgtctagtttgtgggtacaatgtatatagttgtaacaaaaaatcttctgtgagaggcacaatggtacacaacaagtggttagtagttgtaaatcgtcatgcaattaatttagtaggtggtcgaattcctaataccccgatattatgattacatataacagaagatcgggaaacaacttcatgctctggttatgacaaacatacataaaaattcaattagttaactgaggattatgtaggtcactacatataacgtctaaccactgttctaaaattgcatcatatcatttgattttggctaatacttctcttctgattctattacagcaatcaagaatgcatatgcgtgcactcagccttttatggacaactgggtcactgcaaaaaactagtcagaccaggaacctcacaccagaaaaaagttcatactgtatgtaacgaagaaatcagttttttcactctcagttgcacatgatactctaagaagaatatatatcgtgaataaataactaattgtgttttctatcttgcaggcaccgtgttatttctaaaaaggaaacgacatgttttcaactgctaacatggtgagacattgtcattgcaattaaacttaaggagccggagacatcagtacatcgggagcagataggttgagctacggcagctacaggaaaattgaaggtagaccatggtccttgataatatgtgtcatgtgcaaaagctaaattgtaaataatttagctgctaagttgtgaaactcactaggccaacatgcaggaacatctcaaacaactcaggatttagatgattcggttcacatgaacaatcttcacagtgcttgttatttttatgtgaacggagtcatctaaattttccctgttcgttatcggcttcttctttatgccatgatatgcaagtcatttgtgttttccctaaaagttcacatgaacaatagtacttcacacgatagaatgtggaggacatttgagagcacaatttccaagccttttcatccttccacttctttatttgaagttgattcacctttccataaagtttcaccattcataatcttatttctacttgtccaaaatgttcttccatttttggctgtcaatttcagtgaggaagtagaggtgaaggagaactttcgtccaaaaagaatattgtttcatctagatgatgttttgttatttttctcaatttgacacttatacagcataattcggtgatatcacacattacaatttatttacttttccatgctagtaccataaaggattatttttcaaagaatagggagatatccaaggctccggtaatcattcaaaatatctgcatctcaagattacaacaatctggtactctgtaacaaagtaattcttggatgacaaaagcttcaacgccctattgtccaacacaaaacacaaacaatatgctaactaaatggaaatgcaatgaagccatatttgtgcaatcatatgtagttacaaaaagaattagtaggcccccacggacggagccaggattttgagtcactggagtcatggctttcacttgcaatagtgtcgtttttgaggggactccaactttaagtatctttagctcaaaagtcttttgtagctagaactgtgagcaagttggaattatttcattttactaaaaataaatacataaactc

SEQ ID NO: 43556 - DNA, 2307 bp, Oryza sativa
acataaaggcaagctatggatgtagcttactgccccctccatctcaaaatgcccttcttttttaagagattgggggagatgaagaggtatatggaaagtactatattttaaaataaattaaaatcctagagatagctatatttcgagatggagtaaatagcttaaagaaacacacctaacatctagttattcgattagcagaactactggcctaatgcattgatatgcatgccacgtagctaaattagatcattaacagcccaaatatgtttaattgaggcattattggtgctgtggtggattgacagtagcataacaaataagctactactatattgttttagctttcatgagctccagcagattagcgggctgaccgaggtcatcaaactttgtttgctggggtcattagctataaaatactgagcaattcatttggttggttgaatgccatcggggtcatctgaccccggtgatattactgtggctccacccctgatatgtgaatatcatgtatctggggctccaagctatgtctcagaaaccccgatctgagccccaacctccctgattgtctcatctgttatgagatccaagggaaaagaattcatccggattggaaccaaccaaaagaaattgaaactgggggtaggacttaggaccacaatcattcacaagaacacaaacaaaaaaatttcaccaaagaaaatgtagaaatgcatcaccaaatgaaagaatattaattggccgctggcggagagaaggcttttacttagatgaaggtggcgagtccagaaaccagaaacatcggggcatctccgccaccactgcagactcccttctctcatccagacagtagacatcgccggtgagggcggccttgtcttctttgaggttttgacaaagatgatctgactaggacgaagagcatcaaaagagcagcttccaattagaacaccttatagaatatatgactactcctagtcctagctaggacaacaccatcttgaagaaaatttcatcaagcactgaagatgctctgaacttacttgattacagaatccatgaagccatatctgaaaccatggacaaggtgacacctgaatttgttgattcttcaactgctggttatccctcttccatgatgaccatcatcattaccacttccaccactacaagcagctcaacctcaacagttaaacaaccagttcaagaaaatagatgcaaaagtgagattgtgtcttgtcaaaagttcatgctgcagcaccaaatgaatttcaaaattttgtagatgaaaccataggagcggtattgtccatcacaaatcattcagagtagtccttttagataaaggtcataggaccttgcttttcattgaaagcaaagcaaggaactgcaggtatttccaacatacaggataatatcaggttttctggtcagaccccagtcatctaacagacataactcaacaagttttaacagaacatcctaaagacagtaaactaggactataaaccttcccctggcttcacctagtcaaagtgatagcacatacctaatagacacaatgtacaactccagcaaagataaaacaccaagcagctacatccagcaagactagtatcaggtcagccaactccagaatgtggtaatcgccaagcttttcatggcatcatgtagcgctgaagacaagagttccacccaactgacttcatcagataacagatgggtcttacactgcaaatgtaaagacaattcaaaaggagataatcagaggggatgaggcaagtttatttctgaagattgtaccatttctggtcaacaagagttgccagcaaacaacaataaatagcataaagtcaactctagcacttttggacccaaaccaataaccaaaagaaaaaagtcaaaatttgaaggaattctgctccagttcagagcatctctgcaaatgcaccacaaagcaacaggccaacagcaattgggaatttgaaaaggatatgattagcagtttcaaattcccaacacaactaataaaattcagagccattgcagttccttttctcaactggactgcagattggattctatctttataagccaaccagagaaaatgtttcattttcatggagaaaggagctgatcaaatatccttcaacctcagatcagtcacatcagcaaaagaaaaagaaaaaaaaaagaggctatcaacatgtcctgaagtggtaatttcatcgagatgtaggagagtatgcattataagaccataggacactatgaagaaacaattcatgcagcaaaataggg

SEQ ID NO: 43557 - DNA, 3149 bp, Oryza sativa
cagatcgagaagcggacactggaatgggcaccgatggccctcttcctccagaggacaaggatgccgtcgcaggaggcctcctccacgcagaagacggagctgtcgaaccgggcgacggggtggaggagccggcgccggcggtcgacggcgaggacgtcgccgtttctgcagccggtgacgagggggagggagggctggtggcggtggtgggcgaggaggaagtcgcgggtggaggtgaggcggcgccatgcgcggcacaccaggcggcagcggaggaggggtttggggggaagccgtaccaggatgtcccagacgacgaggacctccgggagggcgacgccggagctgagcggcggcgggagtcctgtcgccgccgccgccgccgccagtggagtgaagtgacgaggccagagacgggctgacggcggagatacccttttgggcctttggctttttctttcttttttttttttttttgaaaattcgatcagcagcacagagaaaccccgttaacagagaaacccttttggcctttggtaccgttttctttgctgtgctatgatcgaattttctccacagagaaacccgttaacaaatttctcacttcgattggaagcacatatcatcggttttcctactatacataacactttcatcacattttgagctaacggtgttagattaaagtagaaaaatttatcctgtaataactaattttgagttaacggaagtgctatatattgaaggaaaatcgatgacatgtgcttctagtcaaagtgaaaaattccttgtgctattttttcgtactggtttttttttcctatggatcgaactctctcttttttgggccggtagagccacgactcattaaacgttcattttcatcttgaacatcagagacaatttcttacgttcaaggcattaaatttcaatcaccttaaaatttcaatttcatttctaaaatttcttctaactgaaatgtgacttcatacatctccttatcatcatcctccttttgccttttccctgtactttactattgaaccatttttttaactcaaatgtgacttcatacataagcatttcaggggtagtcaaaacaaatattaagggtagagcaatggggttcataacgcccactttgatcctcaccatatttggagttgtgacaaacagtccctcaatattcaatatcttgtacagccccaaacatgacccaacttcataaaatgccaaatgattcttcatttcaaggcagaccaatcatgcacatccacccgcacaatgtgtaatttgccggcagcagcagccccttgagtccatttcttgataaaaaaaattctcatttcagctcctttaagcttaaaatcctcaaaatctgctagtgcacctaggttccctttgataggaagtcccattggattgtgctttggctttccaattccaattcgatttgaattgcatattaaggctgtgttcgagaggaggggttgtctcccggcacgcaaaacgaagcatatattattgcatgattaattaagtattgttttttttgaaaattggattaatatgattttttaaaacaactttcgtattgaaattttttgtaaaaaacacaatgtttagcggtttgaaaagcatgcgtgcaaaaaacgagagaagtgagttaggaaaagtgggggaagaacacagcctaaacccctcttccacttgtttcgctactagtacaccaccaaaaaggattgacactatccccgttggattggcatgctctttactcacaaccgcccttgcgttttggatgagaatgtaacccaacccatttgctgcacaacccacaaatttcttactctccaaatagcattctaaagtacgatgattgtccctcccacatatgacacaaagaaacttgaacattgcaatctctaattgtatgaccatgaatcttacacctactgcaaaaacctttgagatcagcttgcgattttaccagttgagtcagctcatctgtcgcctgctcttttccttctagacttgctttgcccgatctctgggtctccgcttgcgactccgatcaggatgccactgctgcggattcgtttgtttatgaatccgcagcctatatgtgcccctgcattagcttctcttgatgtgcttgagcaaccccctctattttgcttctgctgcacctcaatagtcattgccttggtatggtgggcgacatggttgccacctattcggcatgagtttctctcccatcagctctcctcgtgctgccttcaccgccgagacgaaatcccttgaatcaccggattttgtccccttccagatcccacccctcccaccgatgctctccctcggccactttcttccactactcgccaatgttctccatcccgccgccaaatccctcatgaaaatccggcacaaccctcctcagatgatgaaatgggttcgagatgtgggggaatggtggcgtgggagctaggtgcctaggtttacccttgattcgagtggatcgagagaggaaaaggggaaaaggggtggatcaagtttttttttactcaacagctgtgcttccaaaaacatgcggccacagctcacagcagaaaaatgactcgttgttttgcttcaaaatgaaaagttggcctctgctctctacctccagtacatcaagatacagggcaaaaacattcacaaattcagtcaccacgtacacgaccatggttacagttaagaattcacaaattcaagttatcaacagtacagtacaagctgatgcacagctctaaaaattcaagcaccacatgattaggttactaagatttcggcaacaccatgtcaccatcactaggtctgcgagcgtgaaattgaatttattccaaggaacacgtaacaattctggaggccgagtgagctatgccagtatgctcttgtgcaggagatcaaagcaaccttaggtgcaggtgcaaccgtgcagctgagagatgtcgaaacaagaattcaagcatggaagactggcaaactacttatcaagctgaagatgttgacttatttgattaccgaatccatgaagctacatctgaagccatggaacactgaatttgttgattcaatccctctttccatgatggctagtccaccaagca

SEQ ID NO: 43558 - DNA, 1493 bp, Oryza sativa
attaatagaatatgaatattactagctatgacaaaacacccgttgggggaagtttcagacgacaatagtaccttcttttgcctattcagattgtttctttgagacttaaccatgcccacttagctaaattgcagtacttttacatgtatgaaacataactagaaaccagcccatgtctgctccttagacaatcaggatggaagcctcatttgacagagtctgcctgcccctatgcaggatatcagtattactaccagagggatgatgcgacagatagactaaacaaaaatgctacagtacagcttgtgcagtatgctcttatgcaggagattaaagcaaccgtgcgtgcagctgagagatgtcaaaacaagaattcaagcatagcaaactggaaaagtacttatcaagttgaatatgttccgtacttacttgcttatctaatccttgaagctatatgtgaagccatggacaaggtgaccaatgaatttgttcattcttcagctgcttgttctccctattccatgatgaccaccatcatcaccaccacttccgtcgctaatagcagctcaaactcaacagttacacattcatcttatattctcaaatgcattttttctccgatgaagaccttaatggcttaattgatttagtaaacatatttgatagtattgatgaacatatgccaacattcctggagatagattaataaatgcttgcaaacactagcttcgatggcacagaacctctttgccaggcgaatccttttttggtaggatccatggaagtaaagaaattgaaaggaaaacttttggataagaatgacggtagttgaaattgcaggtgctggcatgactgctttactgcgccaaatgtaaacagccctgctgtgaatgcgtgcttcaaccatttaacagttcaattttttcaagatatcaactattgtttccaactaattataaaaatcactaaacaatataacttcctggaagaagacaaacatgcccaacaattgcagaatgcaatggactctgtcagtaactaccgcgaactgttcatttcattgaacactgggctctaccgtaaccatttcattaagagtttttagagcattagagcactcccttgagtgtaaaaaacatagcaaatcaaatgtgcacaacatcccggttcaggaaaatacaagcaaaaaaccaggttaatgtttatagtgcaacaccaagtaagtttcatttttttttagataaaaccatgtgagcagtattgttcatcattaatcagtgagagttgtttccaccttggaccaaaagactatcgacatgtcgtatttgtaattcaatcaagacgtagtaggttttgcattataagtcacaatgaaccaactattcatgtggccaaatacaattattgtatcctggttgcacattcatctacaataagttcagctaagaagttttcatacataaaagcacaattcagaaaataataagtttgtg

SEQ ID NO: 43559 - DNA, 2443 bp, Oryza sativa
tgattgtattttaaaaattaggaattgagctatgaaaaatccgagcaaattctagagtgtaattaacctcggagaatgtaataaaaattaaatccagccacgttttgtttaggaagttttactttacaagcaaattaatgcaaattaatgtacacttcaatataaattctataaataatttataaatcaccgaaataaaaattaaggtgtgataagcagtcgtagcagcagccgcagtagctgtgcacacaaccgtttgggaccaaccaccgcaaacatataaagaaggaggctctccttagcaaagcgcgagtcgtggccaccgggagcagcctagcagacgctaggacaacattaccagtgcagaccactcctctaactataatggaatacccccgtcgtttggtgcatgctgctctttctcaggtagaggttatcatgaccttgaatcgagggtttgcggacatcacccaacagctgagagcgagtataatagtgagctataagcctactataaatttagatggaggagagatagtgaaaaattaagagtgttggagcttatcataaacttcaaaacaattacattaaatgtataagaaagagatagaaagaagagaaaaaaattatagccaaccttatagctaatatattatatatgttgactttaaaataagctaatagtaagaagtgagctgtactattagctctgatacagcttgatctctgaaccgaccagaagcagaacccaccgaacagcatgtccatgagacccacacatggcagcagcataccgatggccagtcggtgaacatcagcgccaccgtacagaaaagtcaggctaacatgttggcctttccagtcaaagggattcaatccctagcttggaggaggatccccacactaaggtaatttggatatatatttcaatgcattgcatttaaaaagaaaaacctataaaaatttgcaaaagttaaaaataccaaaaatatgtgctttccatattcagtaaggctgtgtttgctccttcgggttgggaaccatctctaccacacaaaaaacgaaacggtgcattagtgcgtgattaattaagtattagcaattttttttcaaaactgaattaatttgattttttaaagcaacattcgtataaagaatgtttgcaaaaaatgcaccgtttatcaatttgaaaagcatacgcgcgaaaaacgagagatgtgagttgggaaagcgggagaaagaactcagcctaagaatgctctagttctaatagttgaaataatgaatagtttctctattttgtttcctccagtgcttagtttataacttagtctttgcttaagtttttgagtttgttggataacaatctttgtcttgaacttgaaacttgtgggttgcacacgcatgatctatgtctaaattgttacgggatatgagatggtgaaatagagactctatgatatttctccaagcgatacttgaactccggagtccttattttcaaaagaatgaaaaatttgtaagttcctcaatgatgaaaaattcctaccaaaaccatatgatgagtacaatgaaaaaacctttacaaatatgctacatgttattgcattgagttttttgaaattgttgtgacccttgtgagattgttttcgtactttattaatcaaggtcacacatgcgcacccaccatatatgcttgacctctacattggaggttagcaaaaaatgtcatacacccaccatagttgttttgcctctacactggggattagcaacattccatctaccaaataaatgctccatttatgtcagtaaaaaatgtctcacatggtagtttgcaaaagagatgactgtgatagaagaggaaaaaaaagaggagatagaaaatagaaaatgttctcaagcattatgagaaagaaaaaaaaaagaaaaaggagtgtatgcgcacgattgttcttgagcagcatgggacaaaaaatagaagaagaatagtcatgtctccgattaggaataaaagagagtctatgacaaggattaccaccaaacactttccaccatatagccacacagttgcacatcttgatcacatggtatttgtgttctccatggatcctctttttgattttgcaatatatgtgtgatacaggtattgcctcatgtttttttccaccttgagctcgacatatgatccttttatacgtaggatgaaaacgaggcaacataatgcattcgtgaggaattatacacattaagtgatctgagagtaccatttgagaaacttagattttatttgcaaaattctttataacctccggaaagaaagttgaacaaagaatactcgaggactaagaaaactattataattctactccactggcactagaacactaaactaaactttgaagagagcttgattgttgacggtccttaaatcataatatct

SEQ ID NO: 43560 - DNA, 2874 bp, Oryza sativa
cattctaattctaaatccactagcactagagcgaaatatgtaaactaaagagagcttcttcacttgatttccttcatggtgtttgttggaatggaggatgagaagtccttttatagcttcagaatgacggttgtgggcgttaatttcagtacaaccacccttgggaagtcggttacaaccgtcattggtagggatggaaatttcccccacgggccggaggcgggttccgtttctgacctgtgggggaagcggggccggggccccgcatttttgtggggaggggccaggggagacagttcacccatgggtgacctgcgaggccccaagggtgtatattaacccttaaaatgtagcccatagaatgcccaaaagggcccaacccaaaagaatagtgagggataaaaacaaaccctagccttatcctctccagtgtctccccatctcggcatctcccctcccgactcccgtccgcatcacccaccatctaggcggaggcggtgccaggatgcacggcgcacttctctagatcacgtcgtcgccggtcaccctctcccctcccctatgggctccggcctctcgtgttccatctctccagtacccctctccggctctccctcatgtctgccgatgaggcgagaatgtagaggcgcacaggcgctgcgcggcgagggtgcggtcaagcagcgagggtgcagcggctggcgagggtttggcgcacaggcgcggcatcctatgaagggatagatgtggcgtccggctgcccgtggcggcctcgaggggacaggagcggggccggtgaggggacaggcacgacggcctgcttcacgcactgacagtgagagtctgagaggtataacactatttctcgatctatatttctgtgtatatttatatgttgtttcatatatttggtagttttacattccgatgatagagaacattagaacaagatttgctgatttgttggagttgctactcactgtggggccccgcaggggccgagggcagggattgatttgcacccgcatgtctactcggggctggggccgggtggagagtttgggggtcggggtcggggccgttccagcccaacccgcccccgccccgccccattgccatccctagtcattggcttgggcctgggccagcagagccaggccggtgttggctgaaccttagcagacttccctagcccagtgcttcctcctgggcattgtttgatggatcctcagcccagtggcttggtggttgggcccagttgcagaagtttcaatggggttgtgggcccatcgatccatatgtcaaccatatgtcggtctctgattgatttaaaggtgattttccatcatttctcctccatttatggtgtgatctcctgtattcaaatactttgctaagtacaagtggaactaaattatttttaaataaatatgcatgcaagcattgctagttccccattattttaggatgtattgatggttgaaattggtctacaatgaccgtaaacgattaccaaaaatatttatggcattacgaggtgggggacattaaaagcaaagaacacatgtctccaaagaaaacaaggaacaagacacccaaagaaaagatgttggattgtctctggtgcataatggaaagaaacaatagtgtttgtctacccccagtgtttttagccagtttatcctttgttaggattactttgttattaaggaaccacattagttttaatatacctttaaatctcatataatccacttgccaatcctaacactagagttcatggttgcgatatacatagagctaactaaaaattgtccatttttcagaattgaccattcaaagtaatccttgttttgcagggttacgcgtgtatctctagtcggatatgtaggttgtttgtgtatcagctagtacccgtattcttcataagagggtagaccaaatttattctattgaaattacgcagcgaaaattgctttttttttcatctcctaggtgtcgtgcagccgctcctaaattagagagaggaactctgaatttctgccatagattgttcttgcatttccttgttatgccatagattgggaatttcttgcatttccttgcaaggaattgaggggggcaatagatccacttgtttgtgtggtcgagtggatcaacctatcatagcgtgtggtttcacgaattttttattgaaaggaatgcagcagaggaggcccccactgttaaaaaacttttattgataaaggaagaaagagaaaaattacaacaaactgctccagtttaggattacatccttatctctttcacttattctaaacagcaaaaggaggagatcacccttgaagatttgtctccatgaagacagggaaggagttttttgttcaaaaatgaaaccattcctctgcttccagatattccaagcaccatacaagaatttttccatgaagcaccgaccctgatagagagtgtttgcctgaaccatcatactatccatgctcagtgaagtatcccaggagaaaccaagagcattccaacagttctttgcaaaggagcattgaaagaagagatgaagcaggtcctccatagagttaactgagtaaagcacacaacttaagtcacaatgaggtggagcacaatgattatggtccaatacattaaaccgagatttgggacctatatgttcattttacatgtttataaacctagatgacaccctggtccaagtttaaggactgacgacgtttattcaattctggaggtggcatcggatttaattaatttgatacattttatcgtttatagtaggatggatagctacaatgtgataaatagtataaattaatttcgaaaatatgttcgatttggcatcag

SEQ ID NO: 43561 - DNA, 1055 bp, Oryza sativa
agaggagggtgagagagagagagagagagagagagagagagagagagagagagggcgagggagggaggtagaggggagagagttctttgatcttggtttaaccatgggcaagtcaccatctgtcgggatcttagacgacgatgatcgtgatgaagtcaaatcttctgaggaagcaacaaagaatttgcaaagtgacgacgatgatgtggatggccgaccaggttggcttccagatggctggataatggaggtctattgtgatgatgatggcaccatctaccgggtattaaaatatgtagatggcaatctatttctttcgtggaacttaaattttattgtttgttctaaaagatttttgttgcaatgctaattttgtttgcttttgtacagtattacatatgtcccttgtccggaaccactttcacaacgaagtcagaggttttggattatctattctcagagatggatcagtgtttcttggaatcaaagaaccatgctgtaggcagtaaccttacggtgagttatatatatgaccatatcattcaagattttagttggtgtttagaattagtacgtctgagttctaccatgatttatgcagaggacacatgaatggcttccaaagggctggctggttgagattagagctggtggagacaacatggacaagatgtacaaggtagcttttgattgtattctatattaactctatactaattcgtctatgtccactagtagtactctaatgagacaatttatcatgaaagcttcaactgttgaatgcaacggtgctaggaaattaaaaacaaaatgacaaaactatttttgcaaatgtcccccttgtattgctcaagtggtccataagttaaatcatatgtgcaatacgccagtagggtgtagttcacagaccgcctctgtacagacaagctcgatggtaaaatgacattcaaactaggacctacctttttacaaattataaaattgtttattttagtatgttgtaacaaagcaaaagattaatttcatagtcactacaatacagggtgccccattcg

SEQ ID NO: 43562 - DNA, 524 bp, Oryza sativa
aattgcacgtcggtatattagaagaaaacagggttctggttacacgacgcaaatggctagaaggccattgccaggggattggaaaaaaagatttgtctgattttgcagtttgttctctagttcagggaaagtatcaaaaccatggacgtacataagcccatgcatttgaccatctctagtttagttgcaagtatatatctgtacatggatatccctttttagtgttactgaattcagggaagtgaggttttgtcaacaatatcattaagaacgctggcagctagccctagctttttgtgcaacatcacaaagctctatgacgaacattgtcgtaatatttatactacctactgtatttgatattgtcgatattgtcagtttgtgactttgcagtgtaccaagctaggaaacttaattacgtggcaaaataaactgaactacatgtctacatgtgcagtgttcttgtcagtcaccccatgcaagcgctgactctccaacatgattagaccatgcacgagtcctta

SEQ ID NO: 43563 - DNA, 674 bp, Oryza sativa
tcctagtttggaggtttgatctgtacgaccggggttggttgttcagatttggttgggccagtgcagcattggagtgctgttcagtgttgattaatattaatgattaattattctattgttttactactcttaaatgttttgataaatgttgcttttgtaaaatgaaccctatattatgccatcctttgttatccatgtgcacttgcatatttgttgtgtggcttgctaagtattccatgtattcaccttgcaataatcaatcgaacctgagttgaagaaaagttgtgaaggacaagacgtttagcttataccttgcctgtgggagaggagctgaaggcattgctagaccgtttatccgctgctgtgtttttcttttcttttgttagtttttgtaatgttattattatgatggatttgtatattaaaatgtcaatttgtgtacctcggctgattcctggataaggattttatgcacaaattagtttggaaattactaatgaatttctaggcgtgacagttgcatgcatgaaggatactgtttggaagagagattgtttggctggttgtatgatatgagtgtggttaccttttactttagttgggtgagattatctcaacaaattcatatgaagaaattttaaatttaattgagtacttagattgaaacaacctat

SEQ ID NO: 43564 - DNA, 1137 bp, Oryza sativa
taggtccttttctatatttgcataattattcaagtaccaacttaatttggtttacacttatctcgtattaattatatggttagcttgccagagatatgcaacggtattggcatagtgttcacttatttgattgttctatgtcatctgcagaggtgtagagtagtatttactaatgtaagcatggtgcttagattattaagtatcattaagtggtgctatatgccatggatctatagaggtaggccgctgatgctgacagttcagtacgagtaatcctccacgtgcgtatatagggctaagaaaggttcctgttcgtgtactcctccgtatgtaaaactggttggatagtcatgacggattgtcgtaaggtactcggcaattaggggtggtttctcgatgtaccacatagttgtacaatagcaagtgtatcgcaaaaggactatatactagaagtacataaatgatgcttttcttatttcttctctacttagcctagacttataatttagtgagagtattctaaactgaaccttctatgtgtcaaatctatccttatcctcaattgataaacccatgcgtaagactttgatttgcataagtgtaatatgaatttatagcacatcactctcttaccatatcttcccttgggattaaataaatacgataacttggaagtacttctaggtgaaacgctacagcagtatatccgtgcgcttgcagatttatttatgtaatccattatattaccatttaatatttctagcaacattgcttgggattaacttcctagtaaagaaatatcaacactaaatggtttagaagagtacctaggtccatgaaaaatatgatattaattggaacaagtgctttatgttggtcaatttggtggtgccgcaatgatagttctcaattgtaaacaattgtttaacccgatgcaagttatctttatgtcttcctattagctctccttttggtttactatgctatcatcaaaagagcatagtacaatgcacaatggtgctatatatactcttgaaattggtagccatggttctctgaatgcaatatgggtggcatagtttcattaaaatttgttggctaaactatgtggtttaacactagttaataataaggagg

SEQ ID NO: 43565 - DNA, 1057 bp, Oryza sativa
aggacagcaataacacaagaactaaatgcataaataggttctacccatacaccataaaccgacaatattaatatctaggcaatgcatgcatatatatacgtatagattgcaaccaaatcatttttagagaaagtataggttctatatgcttaggtgcttgccttgctgctgtatggaaacacactcaacctcagagtctcgctccacgaactccgaattctccgaatctaccgataagaggcaaatatgcaaataagattcaaataaacatgcatatgcaacatgctctataaatcatggcctaattacagtaggtagagagtatgataaactggttttagaaacaagaatcatttcatttacatttgtggtttgagagatataaaaatgacaagccatatacactgaaaatggcatttctgtaattacatatgaactacccttggtcatatgaaatgctgacattttctagttagatttcacaagtgctatcatttttaattcaaaaatcataacccactggttctaaaaaaacttggcttactacatttggagttaaaatatttagttatgaattttacaactttaataaaaagaggattacttaatcgctttagacttactttaggaggtagttttgtcaaattattccttttcagataaaagattatatctttataaggtaaccaaaagtggtttcataattttaggatatagcataaagttcctagagattatacaactcctcggtgcaaaaataagtgtttttatgaaactcacaattttagtgactttttcagtactgaagttgtaatgttttaatttacaaacataaagactacaaaattatgaatacatagaaatttggttcactcgaaaatgagttaagatgaattagttatggatttttgaagttttcctagttctcatatatgttttcaattattcttttggactgtactttttcatgtcgaaccctgggatttgtaaaacttgcaaccaggtccaggttcttctacactcgagcaggaagcagcgacagccatggctgagctcg

SEQ ID NO: 43566 - DNA, 674 bp, Oryza sativa
gaaatagctttaaaacttccaacttttactaaggatataccccgatttccacttaagttgattaattaaaactgcaggatgttacaattttgtgcgatcgttatttcattaacgacagtggcattgtgccatcgttatttcattaacgaccatggatttgtgtcatcgttgttttttttaacgatgacaacactgggtggtcgttattttattggcggcagtattatcgtttactaatgacagtggtatatttagattcatgatcacattcacaggaataagatgttaacagactaataactgaaaattattaacaaatctttattgatcaaatgcaaataatttaactcatttgttacataattggaaatgtatgtacataatctaattaaatttccgtacaactacaagagagctatatagttttatagtagtcttcaactaaaggttgtacagctcttggcttgtttcatgcttgttgtgagccctgcaaaatacaagatttcaacaatcaatacataaatgagctgtgatagcaatatagagttacaacagagcatatagctcagcctgaataagagagcagtctgcatgcttctgctgtgaataagatactgatctaacagcaaactatgataaatgtaaccctaacatgtaagttgggctgcaggaat

SEQ ID NO: 43567 - DNA, 2864 bp, Oryza sativa
catcaactgtacactttggtgatccttgttattggaacacactctataggagaatccgacatcacacacttggttttggatgtcttgcgacaaaaagtccaagtgtggggggaaggtcgacgagcaaaatgacgagttccatcaaccaaggccatcttggtttgaagttggtgttagtcctagcttgctaaaaaaaaagaaaaaaaagaagataaaaaaagaggagaaagtgagacataagaaaagaagaaaaaaaatgggagaagaaaagagcaagagagctgacgagctacatttggatcaaacaccgcattatgtgcatgtctttgaaatatggctatgcaccttgcttgtagcaatcatgctgcctggctacacctagcccctctctcgagctcatgtgccgccttggtttagcctttgtcaactcctagccgtgcacagcttcttgctcccgcaacacctacacgcatacaagcaagaggagatgccctcttcttttctaggtgtttgctgctccgctccaattggcacttgcatatttgctcggaaatagatgcaccctacatctctgtgccaacggaacgggcctttaaggaataaagttcgtgcaccagaggtgtgtgcataaccaacccactcgcctgagttggcatggttaaagtgccttcctctgctacaatccacatcaagacggaggagagatcaccaatcatatgtgaccatgacactgttccagagattccaatatatctatcatgctggcaggtaagtacactcaggtatgtggaagataaaacaaggttcaccaaacctttactcatacttatctctatgtgaatatggcttgatcatataggttatgcttcttatatccattttttttgtatgacatggtttgggtgtattatcgatgtacatccataggctttttaaattaagcatggtacttaggttaaaataagtctgtttaatcaagttagacatggtgtcaaatttgattaatgaaccatttgagctagtacttccatggatattagatgtatatcttgtatggactaacccctacaggggaaagttttcaaattgacgggtgagtcctcgtgtttaattcacactggagataagtcagggtccgacaaacaaatcaataaattgcaaacatgcaaaggagtaaaacatcgcatgtcaaggtgcacggtgcatatattactaatcgctccttcagcatgttcatgcaaatttacctcagctctgtatgagttgtgctaaaacgaaaatttggtgaataataaaaatttgaaaaaaaatgtttcagaataaaatgttggcaaccttatgggatccacgcttcttaagtttttgcaggaaataaaatgttggcaaccttgtgggatccacgcttcttaagttttgaatgcaatttcattttagcgtggatttgaacaactaatttcgaggctatgataaaatcttttcaaatctttatagtccctcgggtatttgttatccactaaccttttgcctgaaataaaaaggcaatcaaggagcagtgtacaataacttcaaacacttatatcatgctccttatccacgagaaaagatatgcacattgaaccaagtagaacaaatgcaaaacttgttgcattcttgcattcggctcaaatcttggtaagacctatctggtaagaatctcatacaccatgtgcatcctcatctcatgtgtccatcctgccaggatacccaccatatccattgttgccataaagagataaaataaaaaaagagaataaaaaaataaaataaagttggctccttggtcttccaaccaagtgagtcatttttgcttcactcgtgtctttgtttttctttttgtgtccaataaagagccaatgtacaaagacaagtgtgggggtgatcttgcacatcaacgccataaccaaagcaagattaccccagaagtgatgagccatgacgagccaaacaagggaaattgatgcagtcagacccaatgaatcatcctctgttttatacagagccaagtttgcacaatttttcctttggacatccattctatcttgagtttaatttgattatcaattctaaaatatcgaagataattaaactcaagctagggatggtgcaattagagttcatggtctccttaaaaatggcatgcatgcctattattctttgctcatcacttgttgcttgtggtgatatatccaatagggaccccatgctatctgggtaattgatgaatgagatatagtctgatgatagaaatcctactcttcatgttgcacacatgggaattttataaaaagaaaaaaatataacgatgctaaactcctcattgatattttgaattccgactagagccataggttgatcattcataattagcttgctacatatgctgctcgtcatttcattgagcgttgtcaagttttgtaaccctagtgaaatgcttttcatactttcatggtcaagatcacatacactccgcatacacccaccaatgcttaacttctacactggaaattagcatttctcatttaccattcacttcatgcatagtccatcaaataaatattccatgtcatttatgcctcttcctccaatgttctttcaaaaaaaaagtgagagaggcatggctatgcaaaaagaaagaaaaaaagtgctcatacgagtatggagcatgatgatgagaaaaaaaaggagaaaataaaaagatagccatgcactctccaaaatatcaaaagaaacaaaaattataaatggaggaggagatatacaaaaggagttattcttattttcctttttccacccacaaattcaccatacacatacacatgcacatt

SEQ ID NO: 43568 - DNA, 2025 bp, Oryza sativa
ggatttaaaaacatttttctatttaaattattcatgaaatgcaattccattgattaaaaatacttccttggctcaaataaatctcagaaaaatctaggaactatagaatcaagtaaagtatttaacaaaattttatctagcccaattttatattgagatttaacaaattaaaattagatcttctcttttaagatcatttctaattattccttttaaacaacaatttataatttaaggatttttaaacaagaaaagctcttaacaattataattagatcattattgatcaaataattactgaactattctttgtatcatttaggaattgagctctgaaaaatccgagaaaatttcagagagttgacttaatcatggagaatttaataaaaattaaatccatccatgctttatatttgggaaattttatttcccacatttaacttcacttgtaaattaaagatcatttaatataaattctaataataatttattaaataatttataaatcctgaaacaaaaatcaggatgtgacattagcgtagataattaaaacacataaaaagtcctctctagcctagcctacctatcatcagctattgtccttggatagtcttagccttaggtagtctacacacgttccctgagttcgatatccttttggggtcacccgaaggtgaagtgctatagcggtattccgtgcgcttgcagatttatctgtggtcataagaaataccaacaagggggagggttacaaggaaagtatctactagatctctattcaatctataaaagatatgcatgatcgccgaagtttatatcttatctcggaaatgtctttttctttatttacaagatagacacgtgagcctaggctgctggcccaccctatgccccatggcccaaaggcctctccttgatacctgggtaccatgtaacccacaaaagtcatcttcggccataatatagggaaaaggctcaccacccgatgtcatttgaaaataaatgcatatttgaaataaatagagaattcaaatatcggatcaaaatgatcaaaagaattgtgtttgggatctgtgtgacttgccttgcaataatcggacttcaattaatcttctggaacacttccgacactctcacgaacctccgaaacgatggaaatgacagctaacacgcaaaacgaggaaaaagactaagaaactccaaacaaacagtacatacaaagtaaacaaacatgtagatcatgattttagattaatttagagcgttgaacggcctcattcggactttaattcaatatgaattagttacaaattttacaagatttaattcaattgaacctattaaagaaaagactattcaaattaattaaaaaatttacaaataatttataattgagataaaagattaaaagcaacctccggaaaagattatatcatatttggtagatgacatatagtaaaaaggactaatatgccattgaaaagagagaaaaggatttatattgattttggacggctgcgattaatcttgaccaagagttgacgagatctaacatattagctcgatctgatataggtgggattagtttttccgtttctattttcataatcttcttagtacagctcttggagaatttatcccctcatatgccagctaacactggccccacacatcacatggcactcacacctactccttttacaaagtacgctttctcttccgtatcgcgcctttacactttacgccttcccctgttcctcttctgttgtcgccgccgttgtgtccatcagagtgtctggcgtgacatttgcccccccccccccccttccccctccgagcaggagcttgtccccaagcgattggctcaggaaacctggcacggaccacttcataatcttcccatgtagcccactctggtgccagagagccccaacgaacaagctcttgaaccaccaaggcattacctttttttgaacatacggtgatccaaaattgcagagggaacaattcagtaatgtccagctg

SEQ ID NO: 43569 - DNA, 1234 bp, Oryza sativa
tgtttgtagagattaacacaaatagaggacaatcgatggaaattaacagaacaatcaatcaaaatccatcgagaggtagacttatggtagataggactctaaacccattaaaataatattaaagggcccaatcactacacaactagaccgaggaatcaacgaggagcgcactgaccaatttctaggccatttgggccaggccagggttcggccgaaaccccccccccccccccccaagcaccgttgatctccccctttggcacggatgtccaggatgcattatcaatgaaggttggagggcatttccggcatttcaaaccgtcgtaaccatcattgaaaagctatatagaagggtcacctcactcactccctcacgcactccaagaagaagatcattgttggtatttcttacgaccacagataaatccgcaagtgcacggaataccgctgtagcactttaccttcaggtgaccctaaaaggatatcaaactcatggaacgtgtgtaatctacctaaggctaagactatccaaggaccactattggtagtctagctaggctaaagaggactttctatgtgttttaattatctaaagtaagtcgaaggtaatttcctatctattgcttcgggcatcgacccctgctagtctgctagcatggttccagctatagctctatgatgtacccgaacgtggaggattactaggacagggttcagggctgtcaccacctgccgtctacctctgacaaatccgtgggatacataacaaacaaaggtaatctctaacctagacatcatgcctaagttattaattactactctaatacttgtgcagtaacttccttgtttatccagagtcctattactggagcacttactatgaatactcaacaatgaacccgcaaagatagaaatatatcttacttgaactaagtaattaaataacataagaaaggatcccgaatgcttactttatagaaaaagtttctccgaaccttgagcagagtgtaccgacagctccactactcctccagaattcctcctagagagctacactcatcgaggtggaattcagagagagcgccaaactttcgggcactcctccagagcttcccctcaccctctacctatttctaatgtataaaatatacaatagagcctcttataattcagctcaaagttgagtgtgggtgtctgggtgaagtgggggagatgagctctatttataggtgga

SEQ ID NO: 43570 - DNA, 587 bp, Oryza sativa
aggccacgtgggcgattgcgtctgcctcaagcctctggtcatgatactcctggtcccatatcaccgacaaatattgtttaatacttaactgttttattaaattctcaaatgtttgctaaatgctgcttttgcaaatgaaaccctactatgccatcctttgttatcatgtgcacttacatatttgctgcgtggcttgctgagtatgtcatatactcaccttgcaatcattcattagaggaagagttctacaatgatgctgatggtgtggaggattaggtgtagccttggtcaagctgcctgtggagtggagccgtctgcgccgtttatcttattttccgctgcttagatctttattgattgagaggaactatctacctctgtaatgacattttattcgcttattaattagagtaataattgtactctattatcaatttgttattgtgtgcctcggctgattcctggacaagggttcacacacatgtaagcgtttggaattttggatagaaattccgggcgtgacacctaaatagtcattaaagtttttattaggaaaagtgatttcataattcggggggctgcaggaa

SEQ ID NO: 43571 - DNA, 954 bp, Oryza sativa
tttcaactcgagattcgaaaaccttcaaatcaagatttgaaaattttgaaaattttcaaaatcgagatttgaaactttcaactcgagatttgaaaactttcaagttcagatttgaaatttttcaactcaaaaattaaaaactttcaaactcaaaacatgctaaagataaaaaaataaaaaaaatggaaaaaaaggaaagaaaatggaaagaaaacgaaaaaaaaagtggagacgcgcgcacgtcggcgcagcggcgctaggcgttctgggtccgaaacgcgcgccggcggcgcgcgcgtattaggtttttcgacattatatgggctgtacacgggccaaatgcagaagcacatggacagtgggctcattccacccagcgattatggacggcccacggtccatagcatcgttgagaagtactacagatttacagctccaaagtacagcaactcgttgtccatcaattcctttgcttcaatttggaagatcattctgttgcttcgttcgttcaatcgataatattatttcatgaatgccatcttattcagatacaggtttctactttgtattttgacaagctacacgcatataaatgacatcgttcatctacttgccaagttttacagaatcgaagttgcacacttacacaaaagatgaaacagaacacagattcagaccacatgagaacaccaaccatgcatctctactgatccaacttaatttacttggatttagaagttattagaaccttcatctttgtggataaatcgcttcatgactcggattaactcgttggctggctcgctccatggctgcagcgacaagaacaggtgcttctcctcctcgaaggtgacgagctccaccggcttctccatctccttcagcctcgccgcgtagtgcacggtgcggtcatggaggatgtcgcgcccggccaccacgacgagcaccggcggg

SEQ ID NO: 43572 - DNA, 2420 bp, Oryza sativa
atggttacttcttcagtgtgccaacgcttagtgcctaattaaacacggttgtttcgtttaagtaagcagatgggctaattaattaattagataattaatcggttgacacgaagcttcctaatcctagtcgttgccttgatcgccaaaccatgactttggctgtcaagacttagtagatatttttctcttttttttttgagaaaaagatggaaggagtgttacttttcagaacgggacataataaaaaaaaagttttataagaaccacttggtacttttctgagtattatagaagaacaacttcactgaacaaaaactatgtagccatgcacctcttggctcttgcaacgaaatttacatgaccgtacttattactagtatagactatagagctatgattttatccggaaatttgagatacagtttgaatgttcgtgtgatgagatcagactcttgagtgatccaaagaagttattgagtccagcatcagtgatgctctgtctcagctttcgacttacgttatgcgtaagcgggtgatacagagtgcaattctgacattcttacgcgcatgaagctctttttctacaattttgctgccatttttacaaacaaaaccatttttacggcatatgaagggtgaggtctggagtcaatacttttgtttgtaagaatttctggagaactaacgagtctggcgttcggatgcacatgcgatacgacacaaccatacaatattttgatttcaatacgtttaaatcatgttattttgcgtttcaaaaggattgagaaatttacctcaaaattgcaaaagtgatggacgaagcctattatgagtactgttcgccgtctagtcctttttcgctgctagctttcctttacatttttggatttgtcccatttccgacgaatgtcagatgtactccttttcctactagtatgacatgataaatttttgtgtgttcgaaaaaagatggccgaagcccatatttccccaatcaatgggccgtgcagccgagagcctgagatggcagttattcctattgggccagaaatatggtccaatacccaattgaaaagcacttagcccaggcccaagcgcatgtactagtactcccgaaaggaataagtctgcattgagtcccttaaatatacatcggatctatccctcaacggcaaaatcaaatataatgactccaactgttaaaaccatattaagagaggaggaaacattgacatgtgggccccacatggtgactcgactattttgaccaagttaactagccacgccaatcgaccaatgaaaaccactgtcaaaacagtccagaaagccaaactacaccagtttttaagtagttggggatcaacatatctagtattgcagtcgaggatacaaattaaatcggacctatattgagggagttagagtcgacttattccttcccgaaaggccaatctgcttccgtccacgtgactatccaacggctgagattccgtgcagccggttttgcttgcaccaaaaggcgttttctgtgatttttcacaatacctttacaagttgtaaaaatgttacctataccttttctaagttgcaatcttttcatatccttgtaaaatactccgtatttcatatgagcaaatggataagtcaaaccataggctaaatagtaaatacatgggcgatagatattaattcggtccaccagtttcaccagactggtaccctcaactctccatcagttgctggccaaatggcaaaatatcattggacacttatagttgcatcatgcctaatccagattccagttaataataaaccttactttctgagttgacttagtctctatccccacaacaaaaagagcactaggtaagtagatataatggggtagtataaactagatacaagtcgctgcaatgatgcatgcaaaatatcaacgccatatcatgttgacctagcataaacaaaactcaaatccggcgaagtacgcttgtttgctatcaataatgcgagcaaacaaatgaatcttaatagcatcacactaaggaagaatggataatacatctcatccacgtctgttaaataatttatattcagccaggaggagaaatcacagccaagacctcgtctcattcactgatcatcaatcaggtccctgaccagtaatttttttttagaaaatagattttcattaatccggtctctatatccacgaaggatatacacatccaaatcatgaccagtaattgatctattcaaatattgatcgcggcaaattaaccattctaatcaattctaagcaaatttcgattggtttggacgttcatattgcaagatctctcaggtaaatcagccactggccggcctgaaccaatttcctttcactatgaacataagatgcccatttttccaggaaaaaaaaa

SEQ ID NO: 43573 - DNA, 735 bp, Oryza sativa
aatcttgtgtttttcctattcctccgttttttcaatcctgcgattcaaaaggccataaaaaagagaagaaaatggcattcttccctacccaatcccaacaagcgaagctcaataatttcccaatcccaaccaacgaagctcaataatttgctggtgaaatggactaataagaaattttcgccgtgtttagttccaaagttttttttaaaacttctaacttttccatcacatcaaagctttcctacacacacaaccttccaatgtttccgtcacatcatttcaatttcaaccaaactttcaattttagtgtgaactaaacacacccactattatggacacattactattaggaacacgacagttcggaggaaaggatggtagatgaggctgtgtttatttcagcgcaaagtttggattttggttgaaattgaagataatgtgactgaaaagttatgtgtgtatgataggttgatgtgatagaaaaggactgaagtttggatccaaaatttggatctaaacacagcctgagtcactggatctggacttggatatcatatcaccgatatgatctcgctgctgcgtgccagcgcggtcgatcgcgtgaggaaaacggcaggaaaagctgcgttccccttgaccggctagacagataaacgttcttcgcctgagcagaagatcgcgtcaactcgttcaccggcgatggagatggaggacgacggagaggagaagtgttcg

SEQ ID NO: 43574 - DNA, 787 bp, Oryza sativa
atttaaattattcatgaaatgcaattccatttattaaaaatacttccttagctcaaataaatcccagaaaaatctaggaattatagaattaagcaaagtatttaatgaaattttatctggccccattttatattggaatttattaattaaaaaaaattagatcttctcttctaggcttttaaaaataaattctaataattccaattaaacaacaatttatatattaatgattttcagggtgtgacattagataacatacacgacatgaggggatatcccctcgaaatagtatgtgcatgtcacaaattttaacacatttgttaatccatgcaccaaaattcctactttaaacagaaacttcatgctgaaatccctcccactatggctccatcctaatttaatgatccacaccaagaacaaggacaacaaaacaatgctccgttgattcagtccaacaaaaaataattcactgttgcatggcttgaaaccaataaaaaataattttgattagtactttgttagatgatgattatactaggaaaaggggtaaactacattttttttaagacgaatacaggtgctccacaaaattagcgtgaccatatggccaaaatgacttcatgccttcatggacaacaaggtactacaacgttggctacttgtttgctctgtaatctgatcatcttggcctcaaaccagcataggatgacgtcggtgagcagtccgcctcgcaccgaggaagacatcagtgagcactgtctttgactgcaacgaagccttcagcaca

SEQ ID NO: 43575 - DNA, 586 bp, Oryza sativa
caaaatgaaacccctcctccatctcatattactcgctttaagtttctgtttgtaacgaaaatgtttgatcattcgttattcactctattatttattttgtttgtgacttactttattattaaaagtgctttaattgaattatctatttttatatttatactaatttttcaaataaaacaaatgattaaacgtcgaagaaaaagtcaaagcgatttttattatcgaagaagatagtacgtcaatagaaatatttttttcaaaccatcaaaagcgtttatttgcattggtttttaaggtgcgggagatgttattggctttgaagatgccggagatgttatttccggttgtgtggtttagaaagacaattcaatgaggaagagtcaaaatagactttttccctccgataacgtgggcattcgtggtgggccgttatgtaaatgggccgagaggagtggtccgatttactacaggctataaaggaagcaaacctactgctcgtgctcatcgtcctcgccgtcgattccctcctcctcctcgccgtcgtcgcaggccggcggctgcggcgggcaggcctgggctgcaggaa

SEQ ID NO: 43576 - DNA, 1262 bp, Oryza sativa
tattgcgctggttatcacgcttaccgcggggtacggtgggggaaattggcgattgatttggatggattttgaccaaattcaaacttttggagaaaaaatgaaaaaaaaacatggatgtagttcttgatttataattgccaatgggaagattttttaaaaaatagagtaaactaaattcaaatttgagggtaaaataaaaaatagtttacaaattgaaaaaaggaagacaatattgggccttaagtatcctacatattctttcaattattctcaatttctagttttctacacatattcaaccgtattttttattttttccctatttatttttcatttacatgatttcaactatacagaccgcaataaccgtgcaaatatcgcggttatcacggtaaaccgtgcggtaaccgcggtgaaaccgcgaaactgccgagttttgaattcgaatttttgaatgtgatttctgtacgattttagacaattatcgcggttatcgtgctaccgcgaggtggcggtaacctcggcccaaactctgttgaagatctttatttatcggcagaaataccttcttaagtgacagcttctaagcataaaccactacaatgacgtgcatctaagctttatttaagataaaataatgaatagtatcaactaagcaaccttgtattcctcaatattcctggtacaatcatgaacactacatatgtatcttgcgcaacgcttagctcacagtgctatgttcttcatggccaagcatccaagacctgagatattcatctctgatacagcttctgataacactattcgttctctggttgttgctttgagcacgatgtgccgagcctaaaaacagacaccaagcactgttgaataattattgtttttatgcttgtgtgtttaacatctgaatcattttcttcttcttgcagccagattgttggatcagctattctagggggaattgagatcaatcccagccctttatttattgatccaatggtccaaattgtgagctacagtaaaattagagctgtacattttcttcttcatgcagctagattgttggatcagctattctagggggaattgagatctagtgcagttacacaatcccaaccctttatttattgatccaatggtttaaattgtgagatacagtaaaattagagctgcacattttttcattaaaaaacgctacactaatttgctacagtactaaagaggcatctaggccatccgttttaaatccaatgatactcttg

SEQ ID NO: 43577 - DNA, 555 bp, Oryza sativa
ggcccggcacggtcgggccggcccggcacgatgggccggcaggccaggcccggtacataaagtatggggactaaaaatagacatataaatgtaactgtctaaagaatagggaccttaaatagacttattttagctatttatataccccagcccaaagaagagggaggtaaaatagactttttgtagctgtacatatgtcacagcccaataggagggaggaaatttagacttattctgaggaaaagcacgacggcccatcgtgccttcgggccggcccggcacggcccgaggcgtgttgggccgtgcctgggccgtgagtgcggcacgtgggctggcacggcacggcccggtgcgtcggtcgggccgtgccggcccgacaagcctcggcccaggcacggccgggcctgggccgtgccgtgccgggcggcccacatggccaactataccagtaaccatggaaccttgtatgcagctgattattccaggtacagtcatcgatactacacatatgcatattgcccaatatttatgaatgttgctctactgttcattgcc

SEQ ID NO: 43578 - DNA, 733 bp, Oryza sativa
cgcgtgcccttggttaaaaaaaatacttgaggctattctctcgctaacaatgtgacgacctagcgaccgagtatactaccctgagggagtgtgagcgacaagggatgggcatgccgccaaagggtggtttcttgcaccatggctgcaacaaaaccaacaaccttaggccataaccgtatgcaattgttgaatacacggttgttcctttcgttccaaatggaccaagcatcaaggtgtacatattattgtttcgcaagttcaatctagctaatggattatgaaggggtgtaactgtgctacaccaacaggcttgagctaatcttatcgcatacattgccataactaatccaaacttcaaatttaagtgattttatacctagcagtttgaaaaaatagatgtctcgaaaaaagaaagaaaattgtagcgaattactaaaatattgtcgcatgtaaaatggatgtcctaaacaatactaaaaccacattgtttgttattggttattagccgcaatcaaaatttgaattttaaagtgaatttagaatagattttgaggctttttatcatttttcacatgcacatatatatgaaagacaattttttttctaattaataaattgttttaaaacttattaggtcaaacgatgaaactagtaccatacagtcatacacaaaaatgctatcaggattcaggacatctgttacacacagagaggcattcaatggctactttct

SEQ ID NO: 43579 - DNA, 601 bp, Oryza sativa
  unsure (1)..(601): unsure at all n locations
cggaaatggnntatgtgcatttgcggtgcctttaagcagcgaaggtcgttgacttcggtgagtgtgcattgaaagcgtgtatagctcaatacgatatataatcagattaatcacggaacacgagcgcatcggctcgatgtctatctaatcttacaacgaatctggataaagatatatccagattcatagtgggtcggctgttttgtaccgccgcactgtcacagccgagaaacaatatactgtgtttgttggctgcaccacagtgaaaataatgacagccgaatatagccagtattaaaaatatgtcacatctagaacttggttgattttttataaaatagagggagtatttatagaataaaatcaggagagaatcaattaataacccatcaagagaggaaaggatataattcggaggatgaaatatatcctaatataatattcttntgtactaatgatatatggacacaattttttttacacccaccattaaatagttataacaaataaaaaataagtaacatcaattgggatcatataaaactataaacaaacatgcaaagcatctagatctagcaaaacagaaacagggctgcaggaa

SEQ ID NO: 43580 - DNA, 616 bp, Oryza sativa
ccttgatgctgcccacgcgggagaagatctggaggaggatgtcctccgtcagagccgccatgtcgtccatggcctccatctgcgactgcgattcctgatgcgtaggcgcaaaggctggatgttaggatgtgaatataacgcgttggatgaatcaaatcagtgttcgcctctctcatcaaaacctaggttcctccccataaatcatcacaaaaatacggtatgatttcagcaggagagcgagagttcagtcacctctaatccgtcaaatccccgaatcccccaaaccagcttcgacaagcggcggcggcggcgacggggagtggcggcgagttgcggcgcggcgtcaggggaggaatgattggggatcgggggacggggaccgggaggagatgacgattagggaggaagcgtcctgggcagttattgggccggtgagtcgggaggaggcccagcagagtattaggcctaagaacgaggtattaggcccagcaaagtatttacttatgcagtatcattatatcttctagtatttacatatagtatttcttttcaagagaaaaaagtttgggtgaattcctataacctacacagtgtccgctcctgaagggctgcagga

SEQ ID NO: 43581 - DNA, 604 bp, Oryza sativa
ttcctgcagcccataaaggcttgtgcttagctctagttgatagcattatgtatgtaaatctctgaaaatgaaaactgaaaatgtcacctagtggtctactctttcttgacctctctaactgcttctccttctaatatatccggcagagctcctgccgtcttttgcttaaaaaaatatatttcatcttttttagttaagttattttaggtcggagaaaatatatatctgacgtgcctatcaacaagacaacaacgtagagttgtcagcattagcttgccacaggtttgacttgcaagttgcatgtgagtgtagcttcgacgcagcaacctggtgacctggattcgtggagagcaaacgaattgggatgtgcgagccgagcagccacctagcaaggtgtcgcgtcagactactgacacatggcccaaacagccaaacgcacagtcgtctcagcccacctaacctaacgatggtcggcctacgggcctcattgctctccatgctcacggcccacggtagagggaggcatgggccgccccctatctacgccggcctttacgggatcaggtgggctctggctctgaagatcgagctcgacaggcaccgc

SEQ ID NO: 43582 - DNA, 597 bp, Oryza sativa
cctgcagcccaaatcacacccgtctcttttgcatgtagaaggcacacaggtacatttttttagataatgacacaaaaagaacacaaaaacatatttctagtgagacacccaaattgatagtagaaagatttcattgggtggatactgcataattgcatatcactaccaaactagtaagccaactatttgcaagactacttttgcttcttttttttttttgataaaaagaggccgcacctctcccgctttcattaacgaaaacgaaggaaatactacttttgctaaatggatacaataagaaatgcaaagtgacacttcacaataaagacctactgaaatctactgtcggcttaataacaagctgttgtaattttcacttgtgatgcctggtaaaactgctcatgcatcaatgcatcataactaagcagatacctccctcttgcaactttctttcttctttgggagaaaaacatcagtcagcacggtcttagacttcagggaagcaaggagtatctccagcgcctaaatttgaacacaaaaatcatcaaccatgccaattaataaaaaaaacgactaagatttttttttctttcactt

SEQ ID NO: 43583 - DNA, 596 bp, Oryza sativa
tcctgcagccctgctgaacaaaggatcagacagtcaaaaaaaaaaggaaaaaaaaaaggtgacaccaattaccaaaccttaataacacttgaagaatttatcaatgataataatatgctgttgtccttaaatcaaaacttacttttttttcccgcacatacccctattctacaattaaccctctttttctactgcataacatgagtaattttcgcggggccataaacatgtgtaatcaatcaatcaattaattaattgattatcctgtagatcacctctgctgcatagagccatagaccaccaagctggagcagaaagaactccaccaagtccatctcgtacggcacaggcggccgatccagtgaatggtccattcgcaggggcagcaagcagtccatggccttctccatcaccttcttgtcgaggtcgaggacgaacacagcgccggtgctactgtacatcatggccaccgatcccctgcgtcccaatccatgcgccatcgtgtaacttttggggtagttggacacctccgttggcatccaaatcacgtcgcggcgccacgccgccgcaccgtcgccatcgccatcgccgcgtcg

SEQ ID NO: 43584 - DNA, 740 bp, Oryza sativa
cacgaaattccacaactgcacttatattgggacagaggtagtaactatcaaagactcaagggtccaatatgtcacgatcaatcataaagacaaccttcttttttttaatgattagtattatttattgctattagatgataaaacatgaacaatattttacgcgtgacttctattttaatttttttcaaaaaaatttaaaaagacatacgattaaagttgaacatggaaacttatagttacacttaaaataagacgaaggtgtagttccattcgcaagatgattacgtcatcatttccaagctgataaagtcacgtctcacgggaaaaggattgatgtacaaaataatattcagaataaattcgattgaaatgtttaaaccattatggtccaaacaagaaaataactatgaacaagccagctgtgtactctttgtatgggggcatttaactatttgccacttttagatttaacatttaactatttgtcacccatatgtcaataactcattagtgcatgattaattaagtattagctaaatttatttttgaaaaatgaattaatatgactttttttaaagcaactttcgtataaaaattttataaagacgcatcgttagcagtttaaaaaacgtgcgcacgaaaaaaagagaaatgtgagttggaaaactcagctgctgaacacagcctaagagtcacggcaggctgtgaataaagagcagcaaagaagagaaggaaagctg

SEQ ID NO: 43585 - DNA, 522 bp, Oryza sativa
tccaaagtagccctaattcatcttgctatatactccctctgtcaaaaaaaaaatcaacctaggagagctatgttgattctttttggaacgaatgtagtttttttagataatggaagaaatattctggcctttgctcattagagttacagccaattattacaaggaatcacacaaacaacgagtgaagtcactactggagaatcgattattaacgacgggaaatgtggtcattaaaagcttaaatgtggtcgttaaagatcattaacaaccacaaaagtgtggtcgtcagtggttgttaaaagctttgtcgttaatagtactaacgaccacacaactttttttggtcgttattttattaacgacggcatttttatgcgatcgttatttcattaacgaccgtggcattgtgccatcgttgctttcattaacgatgacaacactgggtggtcgttattttattggcggcagtactaccgctattttactgatgacagtggtatatttagattcatgatcacattc

SEQ ID NO: 43586 - DNA, 677 bp, Oryza sativa
catcggctgtcccgttcaaaggacacatcaaattgttttgtttaatttagtgtggacaagtcaatgcatgcatacgcaagcgcacaaaaagaaaataggactatagcgtgtgttttctaatagaaaataggactacttaaccaaccatatgtactaatagtttttcctctactagctctaatcattacacactcacatgagatactcgtgtcccaaaaaggtttataattttattttgcaatttttttcgacgtgctctcatcatgttaatttgattttgacattaaagtttgtacttgtctattgtatatgaacatggttagcaacatagtactcatcaattgatcaagtcaaagtccgtgataaggcatgatttattgtttattaagacgtttttttttaaaaaaagcaccatagtttagttaaaaaaagttatttgtagtacgagtagtatttaatttgtgggctcaatgatatgatttgatagtatatatatacaccatacgacagcacccgatcgagatatgagaaaaaaataaataattaattaatccactaaggtagagggttggacaagcaattccatctagtacgtaattaagttgtatgttaatttcatataatttatacaacatttcactttgaagttattgcaaactaatttgattattaatttg

SEQ ID NO: 43587 - DNA, 2218 bp, Oryza sativa
ccaaatttctaagaccaaactcaacttcgtttggaagattaaaagaagacaaattctgcatgaaactttcctatcactatccgttcaaagtttgtatttcttgtatcttgcaagcaaatttgaatttggtgttgaaatcttgtggagatatagaccatgcctatacctacctctaatattttactcacaatttttttcatgattgtagagatcttttacgtcctgttttgagaggtttgtatctattattttcacttgatcctcttaggatatgtttggtagggctccaaatttagagctagagttgtggaggtgggaaaaggtatctccacccttcctatgtgtattacggagcagattcattgtagtagtgtttggttcggctccagctctactgaacaaggatctaggagttggagttctgccaaacaaccccttatactagtgtggaatatgaaaaatgacactattttgccttctggatgaattagatagatagtcaaatagtatgttaatgcagctatgtccaaatcgatttgaattatgtagtgagtttctccctccatctactttttatagtcatattttatcttagcacacagacaaacgataagtaattctacctatcatctagttaaacattctactagtcattcctcgtaaacaagcgattaattaatatttacatttctcaatactcatgtagccaattatgtgtagaagaatagagagtcacgcattaaatctgagaaaaccattaagatgataagttgttggattaaaatatgcctatcaaaaataaatttttcagatttaaaaatatgactatcaaaaatagatagagggagtactatgttttatgtggtgcaggtcggaagatgctttcagaagaggcatgaggaatataaggtttgtcattgctgttaatgccgctatatggtgttccaacatttactatatgatcgtcagcgctgccatggtgataagccaaagatgaaagtaggaacttccaggaaccatgaggtgggctagtttgtgttcccctaattgtgctttagactgcactgaacaactaaatattaagtctgtatcccttgaactccgtaccgatcaaatatggagcctggaatattttatttgttttatatgttgaagtgatacgtgcaatatatatatgtattattattacaaggcttctgttatggatattacagagagtcatctcggtgggatgtactagaaagcaggggtggtctgttttgtttattttgaatgaatgggtttattgttggcttattgtaaattgcatttcagcttattccatttttattcacccgcgttgcattttaagcatattatgtcgttatggttgctctattgtttttttttctaaattgggccctttcccttctatttcctccatcccacaatatcataaattttgttggacattaaacatgttcagattcgccaacttagattgttatattacagaacaaggagagtataaaattgaactttacatcattacagacggacaggagtataaaattgcatcagggagagacgaaagggaggaagaggctgacgagtggaccccacactgttttccacctaactttgccacgcggacaaaagtggcaaatagttaagaccatcttttaagaagggcaaaaaattaagtgtaaacctaaaagggtatttaaataattaccaaacctaaaagtggcaaatagttaaattcccctgtatcagcatacagttactggtttgtctctgcctctctgcacgttatcaacaccgttcgaggactttttttttttaagataataaatagataaaaatctagcctttggttcaacagaagctagctacattagagttggataacttaaggtgcttaattatacacaacagctgcccatacacattaccaaggataatcataaaggttggttgcatgtttctcatatcgatcgccggtgcttctaaacctcatcttcgtcaattcgacgcgatcatgccggcaacgaagtagcctgaaacaacggctgaaataatcacagccaagttcaaacgtctgtttgctgtcttgagccttaagttgttatatgtcacataaaggcaggggcagcaaaatgaatatagtcagcatatatatcatagaggagacgttatcaaagtatatagatagttggaatatgtatatataccctga

SEQ ID NO: 43588 - DNA, 555 bp, Oryza sativa
cctttggtgcttggtgtgtgttattaagtgcagttcattccattgtgttttatagtaaccagttccagggcatcactaccacgaactctttcctcatctgtgacgggttgtaaccatcagttccaggacatgcacagtgaatgtatttttggttcaaaaattcggaaccctctgccccaccgcaaggcatttttttggccgaaattttccatttctcaaacttttgtgtattttcccaaaatttattgaaattcagtcaagttgtgctaaaattttcaataatttcagtccaaaaattgcctaaatttcaggagtttttgtgctatcgaaattacccaaatattaagcgaaaatcgaaagtgaaaatcctgggcatgcaatcatacatacaagtcaagtcgtcggtgtggatgtacagttttgtgtcaactggaattaatactgcgtgctagttaatgatcaaggcttctcaacaaacaggcaagttgtccactagttaccactgtaacggccacaggacatccttaattatgcccgaaatccacgtcttactgg

SEQ ID NO: 43589 - DNA, 718 bp, Oryza sativa
ttcctgcagccctgtcttgagattgattaatattatttagtgagtcagaagaatcctcaagacctagggttaaacatataaaattcaaattcaaaaggaattcaaataaaatccaaaaatggagaaaataaaataaaatacaaaaatagcaaaaaggggctcaatagatagagaatgattttagaagatattggtccaagtttcactggaattggatctatattttgaaaatcaaataaaagtgaaatggcactgtgtgtgggtcccacctgtcagtctctctctctctcttctcttcttcaacctccggccgttccccaaaatcggtcggcggcgttagggtttgggattgcagtggcgctagagggagctagggatctctggcgatggcgagcggcggcggaggagctaatttgatgcgtggacggcctagcggctagggcggcggtggcacagttaggccgtgatggtgatcgaggtgacgagagttagacatggttaggggagggattctagagcatctatgaggtgcctagatggattccaacagcttgccgacctttggcaaggcgcggagaatacttgccgacaagcgcctccattggcggcggccgtgctcacgtcggaagcccagaaggtggcatgatagtgcaaaccgattgcaaaaatagactctaggtagtatgtagatggttgaaacggaagaactcaccgagat

SEQ ID NO: 43590 - DNA, 655 bp, Oryza sativa
atattgatggggcgcctctgaacgaacgatcggcagcaagggtcgtgccgtacgacgagcgtggcggcaggtcggaaagatctgcgttgtcgagctgctcagggcacgccgcgtcagggaggaggaggggcgcgctcgccactgtcgcttcatccagggatgcggtacgtcaatttctttcaccgagcggatcgcagcagtcgtctctatctgcatggtacgcacgcatcatgattggggagaggttcgagagccgtgacgagttcttggaggagctagctctccgagaaggtgaagctcctcggtgtgttcagcctcgactgttagacttgaagtaatccagtgccggtgtctcaaagttatcctaggaagctatctgtagcgtttcatttcttttctcgcacaccgtttattctcttttgtcgagtctgtcgtgcacactcgcctgcgcgcgatgtgggcgtcgtgttccagtgatctagcgagtctgtagaagtagtgtactagtgtgcgtgcctaaacttcgacgtgggggatggcacacgtcacaaggagtggtggcacgcactgcagagtccctttcgtatatgttataaaagttagtcgatatagcgaaacgacgactaaccttctcgatcgcttcagtcattgatca

SEQ ID NO: 43591 - DNA, 750 bp, Oryza sativa
  unsure (1)..(750): unsure at all n locations
ttcctgcagccccttttaatctgttgatgtatataaaaaaaatctgtcgaaaaggctacatgaatgggagtactggaattcaaaaataaatcttttcaatgaactttaggaagacgtttctaaaataacatgaacattggaaagttccaacagagtgcagtttgatataaatcctcttgccagtcacctgtacctggacgtccagtttgagcagtggagtctacaaatactgcatcaagagcaaggctgtcaaaatttaacaaaaagaaatggaagtcatcaaatatcaagccagcaaaacatagcgagggatgccactaataagtggaaaaattgctgtatatgttagagtttgtgtcgaatatgtgtatgtagtcggttacagtttaggacttggagttgtaataggtattatgactagagtatgagtcggactctatcttagtatttctcataaatagagggtcgtgcctgttgtaaccgcatggtgacttagcatagcgagagggagcggctgccggcgtcaaccggctgtgagtcgttgtaaatctgatatactgtatatgctggatctgtgaggagcgcccataatcagtgctccggagatgtaggctacggctgaactccgttaccaaatatcgtgtctcggtgtcgtcatcgttttggatctcctatggtgttttcttccgcgtttagctaccaatgtcgattttggggttggttntataacaagtggtatcagagcctgcg

SEQ ID NO: 43592 - DNA, 694 bp, Oryza sativa
gctacgagccgatccgagccacgaatttcgagctttttgtccacccttaggcggctcctcacggggtcggcgcaggtgacggcggcaggaggcggcgacgccctaggcggtttctgaggcaggaggcggtgtttcttgcggggccggtggcgcagagcggcggcatgaggagcaggaggtggcggcgcatcgggagaaggggagcgagagagggccgaaggaaggagagaaatcgatctgattcctttgaccgctcggtttgactggttttttcaaccaaaaataaaaccgaaccggtttttttggagaaaaaaggggttggttttgtccggctggtgactgtgcaagtttagtcagtgggtcaattaaatcagggtagatcaatttaatcagggcgacagctgatcaagttgattatcgttgatggcggcgacggtggtttccaaatttgaggtggtgaagttcgatggcactaggaatttcgttctctcgcagatgaggctgaaggatctgttggctcagcaggggatatccaaggctcttgaggagcgatgccggaaaagatggatgatgacaagtgggatgagatgaaggcgcaggcagctgcaacaatacgtttgaggctctcggattttgtcatgtaccaggtcatggatgaaaaatcaccaaaggaaatttgggacaagttggcaag

SEQ ID NO: 43593 - DNA, 610 bp, Oryza sativa
cctactggctgcttccctctacgattgtatcgtacaatatctgttcctcatcgcgatcagccaactgttcatagaagaaatatttgctaagcgtaatattaaaactctactaatcttgtattaaaactcaaataatcatatatgctaagtctaagtgtcgtgtattagaaccctaatatcatatatgctaagtctaattaagtttcgtatattaaacctctataatcttatattaaatctctaacaatctctaacactcacatatgctaagtctaattaagtttcgtatattaaacctctaataatcttatattaaatctctaacaatctctaacactcgcatatgctaagtctaattaagtttcgtatattaaacctctaataatcttatattaaatctctaacaatctctaacactcaaatatgctaagtctaataatctgataatctctaacactcacatatgctaactctgataatctaataatcttatattagaaatctaacaatcttatattatatctctaacaatcacatctttacatcacttgcctgcgcgaattccttcgagggctagctaccacttcggcttgagggacgacgacgacga

SEQ ID NO: 43594 - DNA, 638 bp, Oryza sativa
attattaaaagattctgcctaagctcaaccaattagatcgaatgtagcctaagtaggagataaattagattatttactataaaatttaaaattaaagaatcaagttaacttcattattaaagattcattactttggatcatatatattttacggactagcttttgttcactaattcatacatttttaagaaaaaagcaaataagttttgacgtctttctcgctatttcttagatattaaactaaaatagaaacaatcaataatattggatttttttttaagaaacacgacacgcgcacagcctgctcctttgagtacctctaaaagactgagccaacacattttgagaatgacgatgtcaccacaggcgtctcgctgttgacgggtacgccacctaccattgaaagaatatttagccgtaaatgcgagcacccgtatcaagtctaggacttaaaccaggtagacaagttacaccacaagaaacctaaccaattgatctgtgctcacttcacaataacattggataataaaacaaccataatttttaagctacataactggaatacttttatgccttttaaaccggtgaacaatttgttataactgttagatctatcttatataaaagttaagcatgta

SEQ ID NO: 43595 - DNA, 1415 bp, Oryza sativa
ctgttggatgagtcatcgtcatctgacgatgaactcatcgctgcagcagcaatagttacacaagatgaatatgagcattcgaatgctccacgacatggttttgctgttcctggtagtcaggttgttcgtcgtgatcgtcgagcgggccatatgataggctgcaccacaactacatctcggagcatcctacgtacaacccagtcttattccaatgaaggtatgcaattaatctacatattttggttggtcccgttttgtgtgccacttctcttaattcacataatcttaaaaacaatattctttaagaaagctagacgctaactcaattaaatgattacataatcttgaaccgttattctactttaaggtctattaagaatttgctcataatacccatagaacttgtgaacttactcttgaatggtaccccaatgattgttaattgaattatggttacgatctgaaagataattactaaatttataatagatgaagtacttttcacaacaaatctacatgtactgtcttcataaattcagtctaggcatcataaaaatactgatgctaaactttgaaaaaaaaatggccacacatgtgctgccgtgctctgaaagatacttgtgggtcgagttagtgaaactctaataaaacagcaaaacaaagaaacaacacatgtatgcttgatcacttatttctataaacagaagaatataccgtggatatcattttgtcgaagtccaaaactaacaacttgatccgactaaaattaatgtatcaatccctggatcagtagatgttgatacatacaatataactagttcttcattgcatacgttaaagttttataatactaagggttttacaataataggtactcacctatttgattaactagaattaatatacagcggaagtttttatacattctgactagggaggtaaaacctttagggattctctaaattatcgtggtcatcgtagtaatagtcataggggtcctcctcttgacccaaatcttaaaaggggttatgagagcaagaatgagtattcacaatactcagcaagttatcatggaaatatgttatgcattagcatatagcagggttctttgcaaaaagcaataataaatattctggaagagttatagcaagaatttataatcatatagattttagatttctaaccagggtaccatatgagtcctggtactcaactccatgagtacggctattcgaatagtttcaaagatattctactgcagcagatgtacgctttacctgcagtccacgacttgctgataatcatcggctttagtcaaggcccagtattaagttattaacaattgtggcacctgttccatgaacttgtatcctcatatgccctgaacgtaatgttaatagcagcaagaggagttg

SEQ ID NO: 43596 - DNA, 1203 bp, Oryza sativa
tcatcgccatggatgagctcaaactttggatacggctggggcggtagaggctgtgagagggtgggcaagatcaatttgagtggcgggaggccacgttcgaatacttaccggcgaaggattggcttgaccgcggttgaaattggctggcgacgtgttggcgccaatccaggcgcgacgcgcggcggcggcgagggtgaaaatggctggctcaggggtgaatggtttgaattgtgagaggggaaaccaccgtctatcttcaattcaaccgtgcggcaaaaattggcgcgattcaccccggatagaaacaaaatcgcactcggcggcggcttggatgggagcgcacggcgtcgagtgtcgattccttgcggcggaggtcgtcccggctttgtcgtcgtcaagattggtgtggcaacggcgacttgaaggcgttggacgggtgacggcgcgccaagacgatcgggcacgcgcaagcggccccgaggctgacgcgcggcggctcggcgcgcggcgaagtcggacgccagggcggcgcgcgcaaggggaggagaaggtcaactaaaccacggtttttgagtgggatgtggtccccaaggatccaacatagactttgcacaagattgggtggtaattgggctgctctagctgggctgggcattttgtcgagcaccttcagtgcaatgaacagtgttttcaggaatttttgaatattttcctagaaaagaatgaatttaatctatgaatttggaagagtttcactagggtttgaagtatagcaaatcctcactaatattggagtaaactaagaaaatattctatagtttgagatttgagagaatttgttcaaattcactaaagtttggaataaagggaataattatggtaaattagtagggctctaaggaagtaatacttgaaccaattaaaaaatcaaataaatttttaaaacacactaaattaatcaaaagccagcatgctgcagtcaaattttaatttaaaatttgaggatgttacacatttctagatctctgagcttttttttttcatcgctaatggctaccggctgtgacgtataaaagctcaaaataagttttagaaacaccagcagttctgtatacgcaggttttcctaatgattcaaatgcatgttttttcctattagaagtctgttgacgtgataaacaacataaaggcggggctgcaggaa

SEQ ID NO: 43597 - DNA, 718 bp, Oryza sativa
taggggaaggggttcgtattacaaagtacagaccatatccctaacggaataggtaattacagataaaatacaatcgtaaccgactaggatcctgggtgtttccttgacatacaagtttggtacttaacccgagtcctcttaaagatattctatccatacatggcaccccatacccagtcggactatacatgccgtgtaggtatagggtatccataatctccacagtagcccctgagacctttatagtcgacgaaacagccttctctcggaacgtaaagtgataatccgagtgcttcaatttctttcgtactgatctcccgagtaccaaaatcaaagactgtgaagggctgaaagtaaataattaggtgcatcgactagatgcacctaattaggtgtagcctccgactatgtgagtagctaaaagctaaacatattgtcaaagtacatcaaaacgtccattcgagtggtttttaaccaaatatcccaaggccaagcatatgcagcatctgataaacctcccgccgactgctttaatgtgccaaagaaatataaagaaaaacccgagtgagaagcactccaaaggtttataaatcaacacaggtgataaaagtccaagtaaaaactttcaaaagacctatcaaatgtggcataaaatttgataaaagacgagtcaaaatagcctaggctatgactcatcccataatcagggctgcaggaa

SEQ ID NO: 43598 - DNA, 725 bp, Oryza sativa
  unsure (1)..(725): unsure at all n locations
agaggagtgaacctatgattcctgcaccctgccccttagctcttcttgttgctgcggctcatcccgatcgagaggtaacccacttgcctacacccccataaaaacgttcgttagccggttggtcaaatggaaacttttgcacgactgtcatatgaagcttagaggtaggagaagacatggcgatggcgaaggaacttactgttgcgtatggccggtgagacgtgcagatgatggtgattggagacgatgaaaggggaggagctccgagcgggtagaattgctcggggtcttcttgctgggtggtgtggttggacggagaagagatggcaagtatttatagggggatgagatgggtgagggtgagggggaggtcaattggttttctttaatgcagcattaagagtatagcagtactactactacttcatgtactagaggctaaggaaggacgcattttattaccaaggtattcatggctggagagtggcatggtaggggttgaataatctgtgttgggtgggagagaagtgcgaggtgagaggctttatggttggtcatatacacaaggcaaagaaatgtttttttttcatttatctgaaagaagaaaatttccagtgatgaatcttctctttttttttcttacttcngcggtagttttctttagccacatgctagatgactgtggcaatctcccaacaatgagcctggttgaaaattgtaaccca

SEQ ID NO: 43599 - DNA, 610 bp, Oryza sativa
taggaaaattttgaatggaaggctttaaatagattttaaaggagataaaatttaaaagagggatgtttgagggtcttttgaacttttataaaaggaatttgaatataaggtttttgaagcaaaagggggattgaaatatttttaaaataaaatcaaagatatttattttgagatataaaatttgataaggggtaaaaataaagatgctccaattttataaaattcaataagaaccaaatataaaacttgtcaaaaaataatcaaatgggaaggaaaagcaataacttaatttctaactttggatgaatttgggatggtggcaaaaatagatggaggtaaataactaggattttagcctccaaaatatgtggtatggattctcagtgaattatttgtggctaaaggaaatttatattgtctgaatgaaaaggattggaaataggtttcttcgcacaagagcaatcactctaaatattgtgataatattattcttgtgccgaggaggaaatcaagccataagaattaaattggtggcttgattaaaataggagagtttgggaatattaaaggggtttatgaaaggtattgtataaagaagaaaaagggggat

SEQ ID NO: 43600 - DNA, 547 bp, Oryza sativa
gatgaataaaatcgacgggttttccgttaccagtcaacagggaccaatggacatcttatttttcatgcacattttttgtccatctttatttaatattgctctgtgcccttctgatatgatcttaatcaacttgtagaatggctggtctctatgtgtgattatgatgatctagacctaatctgttatgtctttataatatgaacataaagttattaactgcctcataataattataaatataatggttgataattgctctcaatgttgtgcgtgatgtaataccgatataaataatgatgattgatctactgaatcacaaaaccatttgccatttttagcattttccatttttattctatacagtgaacacattcctcaagcctgatcctgaatctgtacgcaacatcgcttttccaataaattacttaataaattaatcactaattaaatgattggaacgcagggatgccaatcaacactactgaatttgaaccgaatgaatcacactcgttacattataaaattcaagtacatgttttttaccatt

SEQ ID NO: 43601 - DNA, 609 bp, Oryza sativa
agagaaaagagatgcggaccccacatatttccttctcacttacatatggggcccatatattccacgttagcgaaaccgaagaagaattggatcgatactgctcgggacttttttttttttgcacggtttgtgatagttgagggctatagataacccgacgcgaagttgagggacggctgttgaacttattcctgcggataaggattactttgatgggctaaatcctatcgcgtgcgatacacggatctgatgtccttgcattttcagcccatttactatctagaagaggttgatgccttgatggcctttctctccccatggccacgatccgacgaaccctgttttcctaccacaaataggtcggatggccacagacgaattgtgacgatggttcgtggtagcatactatacgagtacacacgacgcatcaaggtagtggctatagagaggcacacgacaaaacgtcacagctatacaacaagagatggcaacaagcaacgccaatagatggcagagccgttgcctgctttttttttttctggccttggtgggagatgatacattagatacgacgagggaaaaaaaaaacaacaaacaagccaaccaacg

SEQ ID NO: 43602 - DNA, 732 bp, Oryza sativa
agagtaagctgatcccaatttgatacctgcagcccgtggagtctcatgaaaaaaacctcccctttttttatccatcgtcaagtatggtattgatttttttatccatcatcaacagtataatattctttggtttgtttccattatgtattcatcacaatgatcaaaaggtttgttagtgggggttgcatcgcatgaatcatgtagtctagtttgttagtggggtcctccgcgtcgctctcgcgcgtgcggctcgggggcaaaaccctagccgcccgcgccgccacccccgcccaccctaaccacctcgccgccaccggagctcgccgccggaaagccgtgcggccagtcgggaaggcggcggcggggccaagagaactggcaaagctcttcctcagcgcgggaggacggatcggcgcgcgacggtggggggctccggcggccggcgacggcaagggcgcggcggatccgacgcccctggaagcggatcctgcgaggggacgcggcgatgcatatgcggcggtggaggatggccgcgggagggaggtggtggcgacggtggcgatggggcggcgcgtcgtcttcggctaggacgcggcggcggcgactcatcccggcgtggaggcggcggatccggcgctgcccccgccggatccggcccgagacggcagtcggaggggagaggagcggatgctgcgcgcgcaatgagcgcggatgggcggtcggcggcttgtg

SEQ ID NO: 43603 - DNA, 734 bp, Oryza sativa
agagtgaagctgattctacaattgaattcctgcagcccagaataaggcggggtgaaactgggcaaggcatagcaggtgaattagcctggactgatcaccagttgcgtcagatcttattgccatagcagcacatcgcgaccgcatgggttggaaagtaagaccgactgttgtttttgcacacgggacctagcaacgcaccgtcctaagaattctgacgtaacagagcattatattaaacgaacttgatatgcatgcatacgcgatcagacattgacctcttgctatctccatccacgttctggatgatatgatccatccatgtcttcatgctgtgtagccacatattcccctgccatggatcgatctgtttcctgctccgaaatccatccttctgtgtttgcatgttttgctacttggaatatgagtgaatgctatatatcggacaaacacatatgcaattgatcagcaactacaaataatggagtgtgatgaataggcctgaaccatccgtgtggagagtggatttgcgtttttatcagtacatcgacaagctggtcagcacttagacacactgttcttgttacgatcccgatgccaaacataccctgcctcctgtaaaagttgcttgccaacagctgccgatggctgtctgtatttatgtgtgccatgaataccttcacagctgtactctgagacttgaacgaactcactggtggttatatatcccaatacat

SEQ ID NO: 43604 - DNA, 1166 bp, Oryza sativa
ttcatgcttggatctatcgccaaatgctgcaggttcatgcttggatctatcattttatatataaaaagagtttttatctatttaaacaagatttggaattggagattaaacacgagacattggggttgacaccatatacctcttgccaccgcaacatcaagtgcatctcaaaagcttttatctatggtatgttccttaaaaatgttttaaaaatacagtcaattgcaagatgtagtgatggcttattttgtgatggaggcggagagattacacaccaaagcggcacaaaatattgaaaaaaaggtatatattgaaaaaaatccaaatagtttgagcttggagcctaaaatatgaggttcactgcttcagttttgtttaccacgattttgaataagaaatggatgaaaatgatcaaaaacttcttctataaaaaactgaactctggattatgaattttggtgtagcatcagcctatttgtcgcaaagcacaaacattccaaataagggcctataccacatatgaaaattactacattcataatttaattccgggtgtgtttggcgctacctttcccaacctcaacattaacagcttttcacacgcacgcttaccaaactattaaacggtatatttttataaaaaatatagaaaaaaatactttaaaatcattttaattatttttcaactttttagctaatacttaattaataatacgttaatgagctattttgttttcaatgcggggagaatgagttacaaaactgcactatcgagcatacccttagaaatcccactgctttagtaggaattgttggagaatttttaaagtttattgttacattcgttctcaataaatgatgtcctaaaatatgtgcgatcaaatcttgaaatcttatatcatttataaatagaaaaagcattagaattcaatatgcctagcaatgctaatagctaggggtgggcattcggtccgatagaaaatttcggtttcggttttcagtttttgggtcattggaaagtgtagaccgaatttcaacgcaaaaatttcaggaccaacaaattcggtctcggtcttggtcctgaccgaaatttaacaacattttcatatatgcaaagaaataatcgaaattttcaacacaaaatcaaaaaaaaattataagcacgt

SEQ ID NO: 43605 - DNA, 709 bp, Oryza sativa
  unsure (1)..(709): unsure at all n locations
attcctgcagcccggttcttcctaggaacttccgggcagttgtaaattgctatttcaaacacctcacaacaagtaaattaaatcacaaggaagcctaaactatagagaggtacaacatgtctcaaacaagagtaatacacatgaagatacacaagatagcacaagtgatcatacaatgggagacatgatagaacaactaggcaaataaagagataagcatcacaatcacaaagataaagagagtgagaggagacaaacgatttgtttcccgaagttcggattctccaccgagaatcctattcttttgtgtttccacgaaggaatggcaagtgagggaattattgtacagttgctaaaaactaattgatgctgatcattagtgtagattaattaattaattaatgctgagatggctaattgatcactttgctctgctgtgatctctcttcctagcgtagtgtgggtcaagatgtcaaattttcaatggctgacaatttttatcacaattttgtgaagattttgatgacaagattcagaggaatgatgggtcaaaccctgttccttggtctgcaggtccatgaaggcaatgcaggttatctgggatatattaatgagtcaccaacagctcataaatatgtggccttcatgccattggtttctttggagtaatgcggtaccagatgattntaatccaagagattgcaatgtt

SEQ ID NO: 43606 - DNA, 1141 bp, Oryza sativa
attcctgcagcccgtgtccgcggtgtacgaggaggacgagatctacaacgtcgaggaccagccgccggctatgaacgagtcgagcgtgcatgagtgggggaggagagccgcgacgccgaggcgacccgcatggccgagccgagcagttggagaagcaggtgctgaccttcaacaccgccgcccgcgcggaggggagcgcctcgtgctcgcgcacggcttgcggctgcggtccgacctcaccctcgccccacgcgcggcgcgcctcgatctgccgcgtccctttcgacctcgccgacttccgcaaccgctcgtcgtcgccggccaggacaagacgtcgggatcggattctccgccttcgtgcgcgcctactcgcacttcctgggcatccgcttcctcttcgccgcacaggacatggaggccgtcgcgatctagcaatggcagcggcggaggtcacgaaccgagcaaggagcaacgacatcgacaggacttcgccacgacgcgtagacacggagggcgcggggttctccagtatcttcagcgatgggtgaatccgtggatcccaggtagatgacgatgagcagcgcatccagggccaaatcgttcagcggccaaactcggcgcgcgacgcgagtcctaaacagaaccgaaccgaacctaagctacttccgatgctgactcccgtttcttcgattaatctactataagtatcgcacctgagaaccacctcctgcaatcagcaaccagtgaaaaatatcatacaatcgcttatttgtttatttttttgaaaagaatacaatcgtttataattattcgcttatccctttcacagcattgagagatttcaggaaaaataactcatggagcactccaagcaatccatccatgagctccaggaggacggtggtgcagattccggctccggctccaaggctgaagcgaagacagatttggtggcaggcgggaataagattcaagaagaaaacaatgatagcactgcgttttgccgggggtgtcgtcgccgcctcatccggttcgccatcttgaccatccggttcgttctcctagcggggttgcaccgcgaatatttagggatggtggccaagtatcgtggaactggttagcgcctgttgggctgcaggaa

SEQ ID NO: 43607 - DNA, 713 bp, Oryza sativa
ttcctgcagcccctcgccagctttgattttgatgttttgggggatctccaagcatcctagcccactcctaagcaacctgggactaatacaccactaggaacatcttcttgcttcaccttgagggttgtctatgtcaacaccatttcactattgggactattctcacctacactcattaagcatattagtcccaaatcaattatacctttgccttgatcaatgcccactttggattttgacttgatgttcatcgaagaaccacatcctcttgatcctcggcattccatcttgcggtcttcttataattgatacggattactcatagcttcaaatggcctcatacggtccatcatgaccatcatgacaaagccttcactcgcccttcaccaccggattcagtccatcggcgccaagcctcttgcttgcccttcaccccccacatggtccattgtagccgagccttgcttgcccttcaccgttttgccataaatagccacttcataccccgcatcatcaatgtcttcacttgctcctcatcaaggtataatgtccatcttctagccgagccttgctttctcttcaccggtttgccatagatagccatttcataccccgcatcatcaatgccttcacttgctcctcatcaaggtataatgtccatcttctagcttcaatcttttaacttgatgctgaaacttaacctaatctcacca

SEQ ID NO: 43608 - DNA, 713 bp, Oryza sativa
tcctcattcttgctcaacttcctctctttcttccaaggaacttccgggcagttgtgaattgctatttcaagcacctcacaacaagtaaattaaatcacaaggaagcctaaaccatagagaggtacaacatgtctcaaacaagagtaatacacatgaaaatacacaagatatcacaagtgatcatacaatgggagacatgatagcacaactaggcaaataaggagataagcatcacaatcacaaagataaagagagtgagaggagacaaatgatttgtttcccgaagttcggattctccaccgagaatcctatgtctctgttgaggagctccaaagagccgggtcttgattaacaccttgcctcgccaagaaaaggcctaggaagaggtctccggtcttcaagccaacacccctaggtacttctctttggtttcaagtgaccactaagatccccaacttaaacaccaaaagaacaccacaagtgaggcttgctctaccaagacgacctcctaaacctcacctctgttttctttcggaggtggaataacgctctcacaaacttgcccgggtcaatccacaaccttgttggaaacttgcgggcgacacctaaccgtctaggaggtcaccctccaagagtaacaagcttcaagtgatagcccaacgagatacaccaagtgctcaagtcatcctagccttcaaaagggctgcaggaat

SEQ ID NO: 43609 - DNA, 772 bp, Oryza sativa
tttttggtaataatacctagcccaaaatgaaaagttgtgctaccacccagttcatcatgcaacaaaggtaataaaaactagtccattataaaatttactcttttttataggacagagtgagtggagtacctagagggagtacctagtactcccttcatctacttttaattgtcatatttccaaatctgaaaattttatttttgataggtatatttcaattcaagaacttatcatcttaataactttctcggatttaatacgtgactctccattcttccatacaagattagctacatgggcatcgagacatgtaaatattaatgaatcgtttgtttacgaggagtagaattacttatccttcatctgtgtgtcaggataaaatataacaatcaaaaatagatggagggagtagcatcttgcaagaaaacagatcagtgctacctatggacgcattgcagcactcctagacaggctaaacctcccgtacgtcatgcttcacacaaatcttcggtcgaatctactcctatatgactgcacatgtgctcgttagtctcacacttgacccgagaaagaccagctagatacagtactactagtcactgcccaaggcatgtctgcgtctccctcttggaccatgtactagctccccttggttggacccctcggtgctgtgtactcactccgtcaaaaaaaaaaaaaaaaagacaaatcctactttccgtatccaatgtttgaccgtccgtcttatttaaaaaaattatgaaaaaaatta

SEQ ID NO: 43610 - DNA, 2526 bp, Oryza sativa
ttcctgcagcccttgaacgaacatgtctcagcgagcagtctagaagctgcaaacttgcagtgttgcagggtaaaagaacaacttggaatgcttgaacctttaagcatcataaattaagtttcacaaggtggttagggacaaagcttaagctagccttaggagctactactacgagtgttgtctaagctaagataagatatggcactcagttccactatgtttctgcttgatctaacctacaaatggcacaaatggcttctgaattctgcaaggttcataacccagttactactccattttacataaactttaccgaccaaatttgcagtctctactccaggcagtgaaaaactcttgtcccttgattagactgtcctggtaactcctgaagactgctgaacatgaggcttgattagagtaagtagtcatttagtagtagatttaaaaggactctgccggggcctagctgatattactagtctgtcctgttccgtaagagttaagcttcatgataagcactgataaattcatggacccactgtgttattactcgacgcattcaagtcgaaaacactgaaagggacttatgatcgtggaggactgtgggtaaggcttattcatggacaaaacttaaacagtcctagtagtgtttgtactgactatgctcgcgaaaatggaagtatcatgcttgcaatatgtgcgtggattaatgtgtggatatcctagataagaatccaaggccaaacatttctcatgaaacagacattttcttgtagaatttcgaggcaaatttcaacatgtttttactcaaactgaacagaaatccaactttcatcaactggtatttggaaggaacttccaactaaacaccaataatttcagccaaaataccagaatctttgaagcggtttctactatagcattttactaccagtataatcaccaataaaattatctcagtcgttgatatatgagttctagtagcagtaaaaaaaatctacatagagatggtagtataaatatatatgatctgttgaattagaaaaaaaataaacggtctaacttaattctactttcattaaaaaccattgtaaaacatctcgaaaattaaatgtggtttaacagctttttaggtttgaccatagtatataaaccgtgtctagcttggctgcacgacaatagcattcctacattcgttataaaattatgtagtgtgcgttttttaaaatctgatatttatcaacatattatgttattatgtagaaaatgggaattagtggtcaaatagtgccttcttgaccctagccgtgtttagttccctgtccaaatttttttaaaatatatagacacacatttgaagtattaaacgtagactaataacaaaataaattacagattccgtctgtaaactgcgagacaaatttattaagcctaattaattcgtcattagcaaatatttactgtaacatcacattgtcaaattatggcgtaattagactcaaaagattcgtctcgcaatttacatataaactgtgtaattggtttttttcgtttgcatttaatgttctatgcatgtgtccaaagacataaacatttgatgtaacagaatttttggaagtttgaaaagaactaaacacacagccccctgtcaatgtgaccaaaataattactaatacttgccgcagggtagagtacgtgacagcttgataacattgcaatctcttggattaaaatcatctggtaccgcattactccaaagaaaccaatggcatgaaggccacatatttatgagctgttggtgactcattaatatatcccagataacctgcattgccttcatggacctgcagaccaaggaacagggtttgacccatcattcctctgaatcttgtcatcaaaatcttcacaaaattgtgataaaaattgtcagccattgaaaatttgacatcttgacccacactacgctaggaagagagatcacagcagagcaaagtgatcaattagccatctcagcattaattaattaattaatctacactaatgatcagcatcaattagtttttagcaactgtacaataattccctcacttgccattccttcgtggaaacacaaaagaattagcacccaaaaaaagagaaaaagagattgtcatctcttgatgaggctaaagaaaaacaaaacgtggtcgtcgtcttcctcgagaacagcttaattagctctcctcctccatggtcgccgacgagtagtcctcgaaggtgatgcacgacgacgagggcgactgcgacgggatcggcgaggacgcgaggctcacgagcatgtcgatgaaggcccccacgatgacgccatggacgcccttggcgttcagcttgaggtaccacgccaggagctcctccaggccctcccagtcccgcagcccgtgcgccgccaccatgtccgccatcgacgacctgaagtcgccgtaggggtcctccgactccaccgtcagcaccaccgcgccgcccttcagcgcggaggcctccgccgct

SEQ ID NO: 43611 - DNA, 1138 bp, Oryza sativa
ctttcccaagggaatctgcacacgattgcacgaggcccctgcagccggtctgcgcatggaatgaccacccaacacaaaagtcgtccgattgcacgttctctcgctcttgtcctgttgcacaactgttgagatttttcacagtttcactttcacaggtcacaccgtcacagctactgtaactgcttacgcatcgctcggaccagcagcacaaaaaagttaaaacaatggagcgagcgagagaggtgatttcaaaatggggtaccgtccaggagggaagtaaaagctttttgataaagcaagaattcacatatgctgcaacctaacgtggcgtccacagtgtgcagtgctacaaaattgagcgaatatgcatgtctccgtaggctttatggaagaaaaaagaccaatagcagtgccagttggtgataacacagtcacagcccacaatgtctgatgtcagacgactccgtccaatgatctccgctttgcaaaaatgcaaatttcaactcgctgttttcaacacaacaacaagggtgtgctcggcaccctttttcccaactcatctctctcgtttttcatgcacacgctttttaaactattaaacggtgtatttttttaaaaaaaattctatatacaagttgcttaaaaatcatattaatccattttttaaaaaaataataaatatttaattaatcgtgtgctaatgaactgctctgtttttcgtgttactgttccggatttggaacaagcatatgcgaacacaccctaagtgcaccaatgagcttgtcaagactaaaacaacctgttccagtaaaaaaaacagactaaaacacctgttgattttctttttgaaagggtaaaacctcttcctgcagtctgtggctgctcaaaaattcctgtggtacgacacaaaaaggttgtatttcatagatataatgcaaataagcggtgacgtactgacgtcctaccacgaaaacaatatgcaactggacaaaactgtatggtcttgggcaaaactgtaccgaaatggcattcttcttcctctacgttggttgccattaccccactgtccatccacgctctgcaagcacttcacgaacccgtgccgccacatcaatggcatcgttcaggggagggtagc

SEQ ID NO: 43612 - DNA, 699 bp, Oryza sativa
attcctgcagcccttttattggctgggccattccttttcagttgtcttgtcattaaaatactagaatacagctagagacactgttgttttcgttgattgatgaataaaattgacaagtttgccgttaccagtcaacagggaccaagggacatctaatttttcatgcacattttttttccatctttatttgttattgctctctgcccttctgatatgatttgaatcaacttgtagaatggctggtctctatgtgtgattatgaagatctggacttaatctgagatgtctttatcaagtgaacataaatatatcagcttggcaaagttgactagagaagcaattaaggtaggttgctgcgtcacacagcacgtatttcagatggatgtatattatgaagagataagaatgacggatgccaaaattaatcgctattcattgcatggcatcatcaacagcgtttttttcaacaatttcaaatactatatctcgtcctaatttgaaaattgcatacctttttcaattacataatgtctttttcagagatagtagagtgtccatggaaggcgacctcattatgttgcaacgtgggagcagcagtaccaattggttagttcagctaacctgtgatgacagactcgtaaacatcccatttatgtgattgactgttcttgctgtgattttttccccattttctatgct

SEQ ID NO: 43613 - DNA, 636 bp, Oryza sativa
cctgcagcccttgtttaaaataataaacagctaaatttctggaaccaataacaaaaaattacaagctcattcttatagttcagttatcttacactgctatagcactcaataatagacaaattacttatgtggtagactctaacccatgatatccttctacacctttgcagactgatgctgattactggcttctcaccgatgatgatatcagcattactcatatgtggacaacagcatgtatccttgatgaaatatagtcattggggttgtcgttggtgatgtactaccagaccttcctcgatgaactggtgatctacctgtgtgccactgccagctagatactcatcttatagctaagagatcagatggacggggacgacattttatccgaagaaagaagggacacatccggtcccagacgttacgaggctgaagaacgatggtatgttaccagttactctctgtcccatatcgtaaggtgttttagtttctgctctaagataaaaatcctgtaactttgaacaattctataagaaaatatattaacatctactcttccaaagaaatctatcatgacatatttcatatgagtatttaatgaaactaatgtgatattggagatgtgtagcacttttt

SEQ ID NO: 43614 - DNA, 1473 bp, Oryza sativa
cggtttggttttcgtgtgtgtggctttcgcgataagccgccatgcgtgcggccgatcaggctcgctgcattgcgtttcggtgctttgcattgcagcgcaagatttgaccattggccttggcccgaaaagctgcgcgtggcatcttaaatttagagcctctggcgtggtttaattctcaacttttttttcaaacttttagacttttttatcaaataaaattttttttacacacataaacttttaactttttcatcacatcgttctaatttcaatcaaaattctaattttttgtgtgaactaaacacaccctctcggagtctcggagtttttgttgtgaacgcaagcggcgaaggcaaatctcgcagactgaccgctcaagctccgagccagcgaccaccaccagtagtagtactgttgcttgtctcgcccaggggtgatggaaataaaaggattaaacaagaggtcccggacaaggatgcttttcgacgcgtaattaaaggcctgatgagatgagaaagaaagaaaagaattgaaggcagccaggcaaaggacgtaaccacaatccacaagcgagcgaagcgaaatttcttcagatttcatatcatatcctgtctactgtagtagtatatcctacgtgcagtgcagcgtaggcccattcttctccgaccaacaatacctgcgctttccatcctatcatcctatccccgacctcccttgaaacattttttagcctctcatgtcaaccaaaacttcgagagatttacagggattttcagataaaaatacaggcagcagcagtaagtacagtactgttgaaataatctgtaatggaagaggaggcctcaccgtggcgttgtctcactgatgagagctgagagagtgaagccatgcgaggtgggggcccacgccgcatagagaggagcgaggacaaaaggcgcctacgtcccctcctctccgcctcgccgatcccccactctattacccgcccttttctgctccgcgccatctcctcctctgctcgcctctgctcctcctcgtacagagcaagctgcgcaacagcagcagcaagcaaccaaacgcagcccacacaaagctttgttcttcttgctcttcttatactcgagcagccgcgcattctgtggagctcagagcgcagcgcggcgccatggggaggcacaagttcaggctgtccgacatgatcccgaacgcgtggttcttcaagctccgcgacatgcgcgccgcccggggaggtgcgggcgctggcggggcggggccagccacggtggggtggtcacgcagtcttcggtggccgtgtcgcgggcggggagggcgtgccggccgctgccgaacacgcccaggcacggcgcgttgtcgctcccgcacagggcgtcctactactacacgccgcgggccggcgacctgctcgtggggtcgccgctccatcccaagtgctccgacacgcaattccctcct

SEQ ID NO: 43615 - DNA, 678 bp, Oryza sativa
attcgattccatttttgaattcaggattttttttattgtgattcttaaaaagatttgaaaacgaaagcggtaaaggtggtttccatccatttctgagtcgttttcgccccttgaaaaacaacatattaccccaatctacgtagttctactggtaaataattcatacttgagtcatattaagtaaaaaccatcaaataaaacctatgaaaatcaaacataaaagttttttaaaaaaatattagatataggtatagtcataaaatacattatgtctaaatatcaagtctaaatttaacttcgtttgagtgtaaaaaaaaggatgaatagtatcagggtaatattcacatggaatttgtccctttttttcctcttggagatcggatttaagattttgtgtaaaataatttcaaaactataaccatctctgcatttttttttcatgaacttagagaaatttagatatagttttcatgggttttcaattaattggtggtttttattgcacgttttttcttggtaccaccagtcacccaactcaccacgcgaagctccatggccgcctctcctccccaactcgccgccgccgcggcgatcgcccccgactccgtcgacagaattggttggtgacctggtgcaccgtccctttgtaagtatctatctcgtcatggccttcgcatg

SEQ ID NO: 43616 - DNA, 716 bp, Oryza sativa
agagtgactggaactcaatgattccgcacccaatcgcattatatccaactattttgcattggagctcattgcctttgcaaccacaacaagaaggcgcgagaaaactcagtggagattatttttcactcataatctctaattaagctccttagatgccaccatggaattaaagaagagcacatgggtttggcccccatacaccgactaatggcaatatatacgtgcaaagatacatttatataccatatcctgtactaagcaataacctagtggcacagttatgagctcgcatttgggtcaaccttgccttcatagttgccttcaactccgagactttacctgcaattttagacgcatcatcgatgaatcatgatgaatggtggtgaaatattataaaatcaggtaaactgaactcaaacctttgatcccgaggccgatagcgttggctctggatcccaaaaccatccattactgcttctatttgcccaaaacgggagcattaatgctagaattagtcctaactgaggcaaattattttctctacaggtggctatctcttaaccttgatgagtagcagcattgaccaaacccaatgcaacacacaaaccaaaacaactttaagtgagttgtatgtcatcatcattaatcaaggtgggatatgtaagcaatctcggggattacattagtgggttgatactagtatgactttacaaagg

SEQ ID NO: 43617 - DNA, 674 bp, Oryza sativa
ttcctgcagccccacatcagatactgatcctgccaaggcaaataatcagcaaccttttcccccatgtaaccatcctagtttgcatgatgggtagtagttcagtagaaatcacattataaaaaagctcgaattgatgaacaataactaagataggtagtaaagaagattaggaatgaccaagcgagcactcaccgggagtcgtctcatcaacaattgaaaaagtggatgagactcagcaacagaagtggatggtatcaaaccagtgtcacggaatcctctggttctcataaggtatcaacggcagaaagaattcaaagcactccgaagagaacagtctacttaagatggtcccgttcctcttattaactcccatacagcttgttaacaagcacatcatttatgtcatgaagccagatttattgtaggcattctcaggttgagtgtaaactcttggtttctattgatctcataaccatcatgagtcaacatgcacagcattacagcacacatggtttttcctctcattcagaaagatgttcactgaactttccagtagggccagtaaacatatggcaaaataaatccctcactcatctcaaccatgctactgcaaaaccaaggtacagcctgcaattttcgttatccctcttcctgtcatctcagctctagtttca

SEQ ID NO: 43618 - DNA, 675 bp, Oryza sativa
gagtcacgtcgcattacttggtgacctcgtcgactagctggatcggcgtccgatgggtcgatctctagcggggagcgatgaatttagggcgaattcagggaagggggatttgggtttaaggtgtttggttgcttggtggagaggtgggttgtcatggtcgccgtcagcctcatgttcaccgcctccttcttcatgtatggcgggtccaggcagtcacaaacgtgtggctggtagctaggcacactggggctgtggatggcacctgggtccatcaccacggtgtaggtcatcgacgccggtagtagcagcaaggtgacgtctaatgcggccacccagtccatcgcaacaacgggacacaatagggcttgctgcttgggaggacgaggcgcttggacagcttgaggccatccaccaccgccaccctgaagtctaacacaacttgtagccttcacatgctcttcggtctctgtctcctactacctctgtttcaggttataagaagttttaactttggttaaagtcaaactgtttcaaatttgactaagtttgtagaaaaaataataacattttcaacccaaaacatttttttatgaaaatatatttaattattgatttaatgaaactaatttggtattataaatattactatatttgtctataaacttagtcaaattt

SEQ ID NO: 43619 - DNA, 693 bp, Oryza sativa
gatctacgtttcttttttgtttttttttgccaggaaatggaccttttttttgtttttcctgttttaggtgggaatcggatctgtttttttaatctacatttcttttttttcgccagttatcggatttttttttgctttttcccgttttaggtgggaatcggatctatattttttgccagggaatcggattttttaggttgttttttcgctgttttttttatattgacggacggtggaaacaagttaaattttttaagagaaaaaaaagtagtctgaacataactaggtagaaatatttttcttagcaagtctattgatgctgcttgcacatataaaatcttattgctcctatatatattggtgattcaagatttttaagttgaacgtgtgattccaaaacatgacgtccgaacaaaaatatttttatatgaacgatattcccactggtcataaatatttaagtttaggatgaaacttggttacattttaaactttgaccattagtaacttctcaaattattagtttaaaagaaaaggcaaaaaattgtttagatttatcttgaaaagtactatataaacttataagattttagaaacttactatgatataaaactgatggttattttttaaaaaaaattgatcagatcatgtcttaaatgtcaaatattcatttattttccaaggacaaacat

SEQ ID NO: 43620 - DNA, 1597 bp, Oryza sativa
ataaataggtagaaccagaaacggtagaaaataataccactcatatggaaatggtgctcggtcgacccggaatttccgtgactgttttcatccccagtggcaaaaagggaacaagaaaaaaaattaatttgatttttttcatatagtttgtagattagcaattgaaaaaaaaaatactacagttttagttgaactgagcagattattggctatgtattggtcgcaaacttgcttctcatttaccattcttaagagccccaccgaccgctcccttctccatctctgatgagtatgtcgctattgatgcatcttctccaattgtctccaagtacgacacaatcccccttctccttcgtctccgatggttcatgccattgccgcctgcttcctaacaacatgaccttctttgtttccgcggttgatcctatgcactactctcgttcatccctaagcctctggtgctaacgcttctgtctttccctcaccggcccaccgtctctgccactcattgctattcctccatccctctaaacctgctctcatcgaagtcctcgccatctccctcattgacgcctccacctcttggcaggccatggattttgatccaatgacatccattagtggattcagaatagcaaagcataaaattaaaaccgtttatcatgttgtctattcgtaaacttatgcgtgaagattgatgaactgaaccaaatgtgaaaaccccatatacaagactacaaattacagcactattttttttttttgaaaatccctgatatgactatgcctatagaaaatcctatgacgtaaatatgaggtggctttgcagtattgagactctgaacagaacctctctcaaagaaagaactaaaatacgtacttcaagagaactcgattgaatcatggcccaaggcccaaagcccagtcgacgcacataaaatccaatctctcccggttgacggaccgatccccagtggaaaaagtctttgactgcttccactatcgcccgagtatgatttatttcctccaaccacaaaaccggtatatcgacttctctaactattaaaaccggtgcaaacaatatccctcggtagttttggaggtgggtttggctgatgtggtggtattgactaagtctttctcctacgtggcgcttacgtggcattaaaataaaaacaaaaataaaaaatatgtgggatccatatgtcattaaaaaacaattataggacccactgatatgtgggacccacctgtcatcctccctcttcttccctcttcctgcccctctctcccttgtctctctctcctccccggcctttctctcctcgggaagacgacggtgtggagaggcggtggggagcggcggcgaacgagggcggcgcgggagaggaggtggacgaggaggtagtaggcgcggagggagtgggggatcgacgacgacggcgacgaggaggcggcccagtagaagaaggtgagcgcattcctagcaacgagctccggggaggaggaggagtggcggtgcttggcaagggagaggaggacgacgtcgacttggtcggcagtggggaaggcggtggagagcgcctcccatgtcgct

SEQ ID NO: 43621 - DNA, 615 bp, Oryza sativa
acagagagccggagagcgagagagagttcaggctctagcccccattcgccagagtcccaacccctcttcctctttttctcctgtttttttctccctcctctccctctcctaggcctgggcctcctttttatctggtcaggggtcaccacatgggcctccagctgcctaagaaaggaaacatgctttttacaatgagggctagtctacagccggaagtgacctctgacaagcagagcacacgcctcctgccccgctcgccagctttcccggtggacgcccatttcaaccttcattcaatggccagcgacttccttgccatgcttgcgctgaagcctggaatggatctgaccgggactgacataccaactccaagagttagcacgccggctccggctagggacgagagccaggaagctctcatcatttcgacgggacggggcgaggcgtgtgacaggccgcctgttgccacctaacccgcgatctgaccggtctgtgaccggtcacacaccgcgaccggtcacggaccggataagcgtgcgctgcgccgcattaaatgcggcgtggcgcgctcgtccaacccgctataaatgcagtaggtgagccccgctgtgctca

SEQ ID NO: 43622 - DNA, 791 bp, Oryza sativa
ggtcagcaatgcaggacgacgcctcgtccagggaggagcgccgcgggttgaagtgctccagcgacgacgtgtcgtagacagtgttcacggtgcggtacacggagccggcggcggcggcggcgtcgtcgtccgcctgcccctgctgcggcgccgtcggccacctgaacgagctggtgcgcgggtgccggcacgacggccacggccacgacgacggcgccggcgggtagcagagctgatgccggccgtggcagtgcggggacgacgacgacgagggcgacgtcggcgtcggcggcgcgcgatggtgcacgtcgcggagcttgtacaggataccaacgagccccttcttggccatggcagcagccggctggcgtccgccgccggcggccacggcgcgcgcccgcttcctgagctttccaaagtggaggtggggagggttcaggggaggcattgcgccgccgtgtttgacggaggcggtggcgtggcgtggcgtttattttcgcttgtgttttatagagagggagaagagaaagaggaggttgcagcacatttacgagagggttggagagggtttcagtagaggaattgaataccgccattgaatggtctattggccaatgactagcacaagatttgatgtggtgtgtctttgggtgtgtttagttcacgttaaaattagaagtttagttgaaattaaaacgatgtgacagaaaagttaaaagtttgtgtgtgtagaaaagtttggatacgatgaaaaagttgaaagtttgaagaaaaattttggaactaaactt

SEQ ID NO: 43623 - DNA, 1457 bp, Oryza sativa
aaattgcggggctcgtattcctttctctttctctctatccgtctgaagaagatcgtcatctcgtcggtctaattttcccggccttcctcgctggctctccggccgcgctcccctctgcttgcagccttacacctgtatcgtgcacgccaacagttcatcgtccccatcaaggtcacacctttccaacagagggcccctcaatactttcgactttctcctttatgattttcggaagtattagtaccccacatttctaacgatgcatatgctaatccaatgtatattcttaattctgcactatagaactctacaagtctattatagatgcttgctttccgtgtggttgtgcccaaccgcatcagcactaacggtgattaaacttccaggtaggaacactactctatgattacgaggcggcagttttctttatttttttttgccttttcttttctctctgttggatgctgagagcccgagatggcagttcgagctcgggggaggtaatttctggcgacgtgcgtccttggcgatttgtatctgaactgtcagtatttcgatctaacatctgctttcgcgcgggcaggctgtatcgtctgcttgccgtaaccgaatcgaatttgccccggttgatgatggcaacgagatcgcttcgcgttcttgaatgtctccatacaacaccacccatcttcgaagtcagatcgatgcaagtatcgaaaaaggtttttaatctcactactggattaaatcggcacgataacatgtttttccatcgtcgcttcacagaagaacggttgtttcagcaactgacaacagcctcacagggaaacttgaacgtaactcgggtctgagaaatacggtgggttatgcgtccatgtcgacgaagacgtatcatccaatgaaagcaaacacatcccacaatctaatttcgcaactagaatgtcacagtccgttgatggaaggtcaatgtgccggaaagggagggccaatgtttgcccgtgacagattcagaacaatcccttaattaccttgctgattcgggaatattttgctttcagacagcaccctgaatcacaaagcttatctatataaaatgtcgcagcgatcatcaactcacacacgtgaacaagcataaccccgtttttcagtccaaggttccaagttggttcctttgataatccgtaacccaccagcaacaccgactcctccatactcaaaccttttagcatgaattggctggattctttggtgaaagagctatcatgtaacacgagtaacataagggttcaggcccatcagattacgcaatctgcggcacagtcattcaaatcaaaaccaacaatggaataagacaggtaacgcatatttggcatagaaaagtaatatcacgaggtagcagcagtagtagtatagtcgcacctggtggagtaatctgctggggcaagaagcgaatgtacgta

SEQ ID NO: 43624 - DNA, 730 bp, Oryza sativa
aaattggtagtttatatgtgtagtaaagtttttgatgtgatgtaatgtgatgaaaagttaggaatttggggaactaaacacggcctactagtacatactccctccgttctataatacaagagattttaagtttttgcttgcaacgtttgaccactcgtcttattcaatattttttgaaattattatttattttatttgtgacttactttattatctacagcactttaagcacaacttttcgctttttatatttgcaaaaaaaaaaattgaataagacgagtggttaaacgttgtaagtaaaaacttaaaatcccttatattatggaacggagggagtaatttttttactgttttctttagccaggaagactttttacagtgtagtgttattacgactgggcgctatatttgctatagcaaagtgagtagtagtactgctgctcgctgcctttgcacaggctaccaccgcgatcgcgaaataccggagtgcgggcactgtgcggcaggtgatcagcaggcaggggcgcagggcattcacgtttcacagtagtgggcatgagcgcgctgcggaacaactgtcacacactcgcacctgaggacgcgatgccaaccaaaatgcttcgacgatgccaaccaaagtcgcatggcgcaccggctgcgtcacaactcacgactacaccgcgccgccgtcgcttgtgtagttgtgttgaggatgaatagagactataga

SEQ ID NO: 43625 - DNA, 516 bp, Oryza sativa
ctaaatcgtccatatgtgaagttctgtaacattgagctttcaactaaagctgctgactaaaaatcaagatactaggggagttcaaaattatgcagctagtgcagcatcaaaattttcaaatgtgtgaattgggatgctgtttttagctcaatgacatgatcatgagttctgccaccctgcacaggaatttatttttataaaacgcaaaatccatataattctaatttaaattgcataaaaatgttttagaacataacttacatcaacatctgaaggagtaatcttcttcatccttccaaaagcacgtgaagcattaagctccggagtttcctggatatcctgctgaacattcaacggcatggtctgcttgctgctatgtccagcttctgttgctatggagggaggctctacaacacttgcatgccttggaggtgttgcagtttcacctagctcctccattttcttatattgactgataatatagtaagggtgttcatcagataatttcttttgagg

SEQ ID NO: 43626 - DNA, 1468 bp, Oryza sativa
taaaatatacttcctcgatcccaaaataagcgcatcaatttttgtgtccaactttaatcgtccgtcttatttaattttttttatgattagtatttctattgtggttaaattataacacatgagtaatactttatgcgtgaattatgtttttagtttttttaaaaaaaattaaataagacaacgattaaaattagacacagaaattcatagttgcgcttattttggaactgagggagtagcaattttgcacacgattggacacattcaaataccatgaatatggataaggatgtatcctaagccgagtttagttccaaacttttttttcaaacttccaactttatcatcacatcaaaactttcttacacacaaactttcaacttttccgtcgcatcgttctaattttaaccaaactttcaattttagcgtaaactaaacacacccctagtatcatgaattagatagatatctattcatattcagatttatagtattataataagaccaattcagtactaagttgctttttttaagatggagtgagtatctcattagtcgcttgacgcatagttataaatgaacagttggtgtacttaatgcgaaatttgttaggaagcaagtgcaagctgattgcaatcagggagcaaagacatcgcgatgaaccattcagtaatactccgtccgtctcatcataatatagtgatttaagataagatgtgatattttatactacaataaattttgtcttaggttgctatatactatatccatctcaaaatatgtacatccgtggatatctgtgtccaacgtttgaccattcgtcttatttagaaaaataaaaaaaattagtcacacataaagtactattcatgtattatcatctaataacaataaaaatactaatcataaaaaatattaaataaaacaaatagtcaaacattgaatgaacaatgcaaaacattatttattttgggacggagggagtatattatgaaaagtaaccacgctagtgtgtatggtagccgcggaatgggctggccttcgggagttcgggatctttacggattggaataagtgcactttaggtctctctattcgtcgctcagtccgattttcgtccctgaactgtaaaaccgggtacaacccatcccccaacttacgaaaaccggacaaacgaggtccctcggcagtatggagggcagttttggccgacgtggcgtctatgtggctaatttgacttgatcttcatctgacgtgatattgacatggcgctgacgtggcaattcgatccagaaaaatattaaaccccgtggcacccacatgtcagtttgacacacaaattaataaaaaatagtggggcccacgtgagccccacatatcattctcacccttctcttcttcctcctccctccctctccctctccctctccctcccctctcgtggaggagttcagggccgcgcatgtgg

SEQ ID NO: 43627 - DNA, 661 bp, Oryza sativa
cccctttttttaataagaggttctggacgctcgatttttagatggtgttttttttcttctgaagataaaaataaaaataaaaattaagttttatatgcaaaataaggtggtattaacgtatgattgagttttaattattacaaacttgaaaactagatttatatgatattttaaaacaactttcatatataaaatttttgtacgaagtatacggtttaactttcatataaaaagcgtgccacgaaaatcttttcaacttttgcttagagaaaagaacgggacccaatgatcttgcaagattcttcctgctgcctttccaaatcttcgccaccacacagagtcagagagatgcacagcacaggtagttgccgctgccacagtgctacctccacacatgccacggtgccaccctgcaaggtcgttttcatattttcagacctccacatggttgatgcccggttgaatagaccttagcggtatttctttacatgatttttacatgaaagattaatgatccgaagcttcttttctgacccgaaaaacaatttgagcaagtttaatagtatagcacactactaactccaaatcatatatagtcaatataagagcaggtacaataacaaactattagccagctacaaacatattttaatgagataaa

SEQ ID NO: 43628 - DNA, 684 bp, Oryza sativa
attgagtgttgggctatttttgcatagaatggaagcaaatcaaagaaggatgttgttgttcagtttaagacatggctgaagggtctacacaataaggctggaggtatgaagaaaagcatttttagggtgtagtttgtttgttgtgtttacttaggccatcgttgctattttgtcctacccttttagtttcccattttctctttttttttctactatgtcatttctgataatagaaatgtgggctcttagtcctagttcaaaaaaaagtttgaaaagttcatgaattccggacatgttttgagaaatgagaagtgtcggtaggatttttgtcgggaaacttttataaacataaacggatatgataaggcttctatccgtcgaaaactttaagaaaacaaatttgaaaactttttataaacgaatttagtttttttttctcgtaatcgaaaaaaagagtatttctcatatacaaataattagcttcaaccttctttattctaaatatttagatttatactatgtattgagttacttaactaaatagatgtattattttagtcaagtactttttaatttttttcctaatgaatatttttatttttattaggacacgccatactacttataactatagttatagattaatatagttcttttttttctaataaaataaaatgtacaact

SEQ ID NO: 43629 - DNA, 680 bp, Oryza sativa
tcacaaatatatatgtttaaatttaaattcaaaattaaatggacgggaagtgtccatccatttttttgcaaaacactgcctgctgttaggattggtgagtggcgattgggagttttgcgcgaaaaaaaaaaactcctatgatgaccgttttattgatagcggtctttttgtgtagtccgcttccccttctgtcttcgctagtacggtaggagtaggaccctgtcaaaaccacgccgccggcggcggcggcggcggccggagagcaacatggccgcgtgttcgctgcagagcatcccgcccggatggcgttccggggaccggggatatcattacgctcctcagcctccggtctcctctgcgccgtgctcctcagccgccggtggcgccgactggtcgccttcgccccagccctcggtctcgttccaccggagatctccccgcctcgcgctcgcctacctcggttctatcgatcaccctcttgaacctacctcgctcgcctactttgcgcttaaaattccgcgcacatatctggtctgtttgctctttgcagagatcttggtaagtagatttcgagtctacgaacatcttattcaattcccgcaaaaaaatcctttaaattcaaccattccaagggaggcctaatactattgttctatttaatgctagcatctagcactctg

SEQ ID NO: 43630 - DNA, 1118 bp, Oryza sativa
ggttttgtcaggcttaaacgggcattatcaggttcgtgcgaacagaactaattccatcatgtaccataatccatttcgttatcttctgatggtaggtgattgctactagtagtactattttctagtactcctgctcgagatatcaatcaatagaaattaggtgcaagcctttagtgcaagactagtacatctctgaattctaatgcaccgataatagccatgcataggtgcagaccataccgtcctcttctcccaacccaaccgattgatctgacagtgctcttgcaacaaactcaaaatgttcagggtagttaacaacatgatctcctggctgtcagtatgcaggggatggtcctttttgctgacatgctctccatatgaccaaatcaacaagtataattcaagtctgcatattactagccagtaacttttgctgatggagtagtttatatgtagttatgtatagtactgatcagtattcagtactagtacagtagtaaagtttctatgatccgctgtaagacacatcaaagagatcagaaaagagtacagattgaacaacctgctactctgctagtagtgctgcactctgctctgcaccgtcgccgacgtcgttctccagtccgctgttcactggatccaaaatgacgagtttcgctattgcattggtgcgagctgcgaactgcaacaccagactatataaatggaaggccaacggcaaaatcactcgtgctgcgtgtaactgtgccgcctccaactgatcgtctggtagctgcccgtgggccgtggccaagtcgtgggaggccgtcgcgacgtcgccgtggggcattttcaaggtgagccgctacgcgttgaattatctagatcgatcggcacgacgcccgtacgggccaccgacggataatcggataggcaacggaagcaggatgatataatatggtatcttgaggtcagaaatatgattcctggtcagattaagttctccaagtaaggaattgaatatgtttgctcatgtatcgcaaatcagctagctggaatattatactggcatttgcttctcaactaaaggtttcaatattgaactaaatctctagattccacattttgtaaagctgtat

SEQ ID NO: 43631 - DNA, 654 bp, Oryza sativa
agtttgctccaccaccagtacaccacacccccaatgcgcgatcacgtccgcgtgaggcacggacgccgccacaatcccgcacgcgacgacatcggagcgttccgcgccaaggcgatcgagaccgcgatcagcagctgacgcgacggcacgggtgggtggacggatgatggtggcctccggcctcgggctcgcgcgcgcgcggccacagtggccaacgccgctccgggacgcggcatccgccggcatcgtcacgtggccgcgcggcccacggccacggccggcccgtatcaaaaattcgatgtgacatatctcggccccccgtcccctccacccaattcgcctcgccaccgcgcggggccgtcgcccacgtgtggcgcgtgacccattccccgcggcgttacgtgcgctctctctctctctcttcctcctgcagtagcctgtgcggtgcagccaacagtagacgaatcccctgaaaaagaaaaaaactgtaggcgaatcccagggtcgacacctgtcccatatccttggcgtgacacttcacgcatggctttttctgatgccatttcatcattagttagggttcccaaggtttacttatgaataaagattagtaagtactagtactactcctgaacaaacaattatttatgtagt

SEQ ID NO: 43632 - DNA, 504 bp, Oryza sativa
cttcctcccctctctctcttcctcatctctattcaggcctccatggcacgtgcctgtgtagggagaagggcggtagtcggcagagaggagctagacggtggcggcggcatcaccgagctctatcggtgacgaagacggggaagctcaggttgatgcttaggttgtcatttttgctgtcgtgagggcctcaggcctcggcgtcgtgaagataggagagaacataatgggaagatatgggaaaggagagagagaggctaggtgtcatcacctttggcgacacaatgaggggaagcgtgaacttggcgagaagagtggcgaggctagggagcatggcgtcgccccaccaccacgggcctcatctgttcccgtgtcggtccacccgacctctgaatctgtgatttctactttcgaattagtgtagttaggaattagttgttgatattcactaaaaaaattcgaatgacttccgctgtcttataagatacatatgtgacctcgattttc

SEQ ID NO: 43633 - DNA, 656 bp, Oryza sativa
taggttggctaatgaactcgccacccacatgcttccaatcctgggaggataaggcccatgtctttgccgtgaacaaaataggcacattagcatacgaacaattcgatgaaatcatgacatatggatcgtacctactcgacaataccaaggcaacaatgacagtcttactaaaatgattgctcatcttgagtcttctggtcaagaagtcgcaatagtgggctgcattatatagtggaccacatgaacaaaaccgtcatgcatgaatgcatgatagccatgtctaataaacacaagctccagatatcggcggatcttagataaattggattgagcttggagctcacttggcacgtcatgtggctccccttgatgtcctaaggatcagatcattctgaatgtaattccttctgctctcttcattccacaagacacatgggatacccctgaaatggttccaggagctgtagctccgctccgtttgtccccgagcagcataaggttccacagatgacgatgtccccatttgcatggcctctaactaatagctcgtttccttggcaaatgttgcagcatagcacgatacggccatacgggaatgattggaaacaaccaccgtggcgttcacatcttgcaactatgataacagccactgaatt

SEQ ID NO: 43634 - DNA, 729 bp, Oryza sativa
tagacttgctaatgaaagtagcacatagaatgtttgcttatattgccttcatgcatgcaataagtgtgttatttgcaggaaatgtgaaaaaccatggatgttattttgcatcaaaccaaacatactactgtgtgtctctaccttaccaaatattagcaatgccaaaattttgcatgacaagaattcgttagggttgatttgggcgataaaccaaacagccttattgtcacatttatgctttgaaaaccattaggtcatgtgatcacagtaaggatcaaggttttagttgattgagtttacgaaacattacaagagctcttcttttcttggaattacttcagtaataacataattcatttcaattccaatcatgtttcaaaattctgttgcacctgcataccccttttggtgttgttatcagccattaatgataccaatgacctatcaactcgagggcatatgctcacagaaatataaacctggaaaagtcaattatggcttgatgaagtctaatgagtaagctatgcttacagtaatatttcaggcagtttccattaaggcccacgtgtagcgtgtcacctctgggttaagaggcgcgatgctttcagattcctccatttgcaattcggtttgcaaatgtggtaactggtaaggtagtaacatgtgctcctattaaattgtgtcccctcatccgggctgcaggaattcaattcgagttcaatgcactgg

SEQ ID NO: 43635 - DNA, 657 bp, Oryza sativa
cttcgaatgaggtctaaattaagatgtgaaactagtgggtggattgacgacactcatgtcttaatacacatgaggatgtaattaacagggcgtgaaatgtgagccgcataatctgaatttttttgccatgctcattggttcaagatagatattaacacttgttttccaactgccatctgtattagagtagaccttaattttgtgtgacaaaatttttcttccacgaacggccgtctagccgtccaggtccatgggattttattcgatagaaaaggacggggcaagaataatacaactgaatattcaaatacgtgttaacgtttcagactgttacagatatactttccatgcagcgatttccttcaaaaaaaaaaaactttccatgcagcgtgcatgctctctctttttttaatggtgcatgccaatttctttgttctgccgtgtgagtgtactccattttcttctgctgaaagtaagtgtcgatggagagtcagtttgacgatatctgtctttttttttggcaaaaaaattaatgcatgcccaaatggatggggttaatttctcaccaattacagaaagtcagaaacacatagctagtctggccaaacaaatctttgcgtctcacctgttactgatttttcttatcggcttaatttg

SEQ ID NO: 43636 - DNA, 672 bp, Oryza sativa
attatatgcagcaaggctgcacataaaaattattaatcatatagtattatctagtagaagctggtggtggcaagctgctccatttgggtgggtagagaatatagagtgaatacgaactacaaagtcttttttgcccaagttcggtggattgaaaaggcttggagaaaaatgaagcgaaaggttgagatttaatccgctttctccatatgtatcttcacttactgaaactaaataaagttcgcatagcaagtaaactatgatctctgatcctctatgatatgtatctccctatattttattactattttctaagttcagtagccaacaaatgaattttgtactatatatttgatccctatgtccaacaatagatccaggggtaatcatgagaaaagaaaatagcactaatgtaatgggccgttatggtaactagaaaggagacatacttcttgtagtaaggtgcttctctatcaagtcgagcaagtgttcccgccaaaattgacacctgcattcggtgaatgaaaatcagaaaccgttgcagtatgaaacacaatctatcggataatttttgaagttattatgctgatgtgtacccatggaatgtaaaggattaagtgattaacctccacatctaggtccagaaaatgtatatacatattaatgcatcactat

SEQ ID NO: 43637 - DNA, 706 bp, Oryza sativa
atcgcaagcgagagcgatcaagtgatgttaacaaactagagctcaaaaatagagtttgtggtgtgacgacacaagcaaaatcatgtcggagtattaggattcgtggtgcgatttgcacatacgtggatctgcaaatcttgctccttccgaccagcttcattcagatgaggcccgcctaaaaaagaagggcttcattcagatgatggcgagaaatagtggcttccatcttttatctttcggatggaaacccaaacagatcgatcgaaacttccgctgcgtgacacagccaaagtgaatcactctcttcccatcactacttccactctccgtgcagtttcgttaagataatggccagtacgtgcgccatgtttatttggatttggtcgctctaatgatgatgaattgatgatgatgtgctcctccattgctgcattacctgtcgagcttttcaagattcaggcaggagagacacgagcacaggaacatgctgccgactgcccactgctttgatcctttttgttcatgcagccgatcaaatctcgctttcgatccctttgctgtaaacaaaaaattcagaggcagcgtttcgtccaaacgaccagaataaacaacactagccgctggcccatgagcagatttttttctccaccaaatccacgatactaattgtagcaacgggcttttctactactacccgtgggctttt

SEQ ID NO: 43638 - DNA, 945 bp, Oryza sativa
gccgatcgatcgagccgcacgcaacgcaggcacgggggctcgcgcgatccgcaaagtcgcgatcgatcgatggtggccgcgcgcgcgcggttaggtacgccgtgagccggcgaaacggccggagccgaacacatggcgcgcgcgcgtgcgcgatgcgagattgcgaggaaataatcgtattctcatgccgaggctaccacgggagacggagttggtcgtacgtgcgcccggtgcgccatgcggaatctcctggctcggcacgagggcggacggggcgtggcatgctcgcccgttcacctacgaccgcgactgtgcgtgcgtgtgtgtgttgtgtgaaggagacacggcttcgcatggaggggaaagggggcgtgagtgaaggggacacgtgtggtggactgggggctgggactgacggccgtgtgggtgagtggcgtggcgccatgtcgtttttgcctttttgtgtccgtgttgggccgatgagtgaaaagcaggagtagcacgttttgtttggagcacgagccacaaggtgtgcgtataattaaagaaaaggggatggtttacttttggactttttgagtctaatggcatttgagtacatgcagcactgagtaggagtacgttttaagctgctgattagtagtatatactttgctcttagagcaggtacaatagcaggatataagccagctgcaaagatattttaaagagataaataaggagagagaagagcagcgggctacaaatttgtagccagttatagcacggactccaaaacgcagtgtgtttatgataggtgggactagatattaatagtgtagtatgtaaatattgtatgaataaactactagattggctatagatgaattagagatagtatttggctacactattaaacttgtcttacacggttacacccattgtgttcttccggaaacacggaag

SEQ ID NO: 43639 - DNA, 961 bp, Oryza sativa
gtgctcggcgatctcagaaaggtgctcgttattgtagattagagtgtggtcctaactccggccctgaggcgggtactcgcttcgcgcgcgcgtgcatcatgctgcagagggcagagcccctctgccccgtggacgagacaaacacaaggatgcaaaaacgttgatcaaaaccatattattattttttttagtttttcacacgcctgcttaattaacccatatgcattgcgagtgcgacacacagcgacagtcttagccaacaagtgcaatataaatacttgaactaactcattctagcgccggcaatataatactgcaaccggtagatgagatgagatgaggatggcccgcgttttgcccagcacggaatcgcgcttgcgcgcacggccggagggcgagagggcaccagcgatgacgcctcatttagcgcgcacggagcgcataatataggtacttaagccgcacggttcgtcgtcgccgtggccccgcgcgcgcgcttaattttttcgcggcctgtcgggcgttgcgcccgccgggcgagcggcatcgccgactccgtctccacctactcggctacacgtccttcccgatcgatttgttaaccgcgcggaaacaaaagcgcgccagcatcttggttcccctgggccatgcgtggtgacactatttgcttgccttcttttccgggctcctagttacctaaactgcttattatcaaatgttaagagtgtctctctcactagccatgcaggcaaatggagtgcgtatcagctggctggcttcctttgacttggaggcatttccgtgctagttgcagttacgccaacaatggatgggctcagctcaaagaaaaaaaaaactacgaaagggctaacccttcacaagttgtgtctgtatcgtggatggaatgatgatacgttgatcctgtttgaaactgaagcagataaagattttttagagaaaa

SEQ ID NO: 43640 - DNA, 650 bp, Oryza sativa
ctttgaggtatttcaaatcccctatgttgatgtcttccgccatcgctctgagttgaatcctgcaatagagggaatggaatggccaccgtcaacatcgttctgcatgttttctcaacaaggacaaggcaatgggaggagagatcatttgttcgagaaggggaggctgcaggatctttggctatcatacgacgagattttccaaattttctgcacaatgctgtctactgtcggggagtactttatgtacgctgtcaaaccaactttgtaatgaggtagtctcactgataagtattataatttatttctttattaacaaatagtatcactcaattttatcatgttttaatatttctaagttttccaatatttgcagaatatctttgtcagatggcaagtatcgaataattaaaccaccagtagagattgaacggtacgaggagtcaaatatttatatgggactatcacagaagagggtgtactgtacattctttgatgatccaaacataatttatattcttgatgaatcgtacggaaaaatggagtgggtgcagaagaaagctattagctgtctggtcatacatgcatttcagcaaactgatgggccctggaccttacaagatataactatcatgaatatcctgatgagtacg

SEQ ID NO: 43641 - DNA, 627 bp, Oryza sativa
catgagtagtaggcatcccgtgctgggttttcgaggttagcgaagacttttaagcatcggcgttggtgttgagtgcggacaagcaagcaagcaaggatgcccgccacctcaagcaagcacgacgctggaccaaatccccatcacaatcacatcccacacgccaagctcccccaacccaacccattttagcttggaaataaacaaattaacgactctctctctctgtctctctctctctctcgctcgcacacatggacgctggaaggagaggccgtgctggttgctccagtttttaatacgaggccgggtgtgtgtctactttgcctgcttggaactcaaccaagtacgatcgagctgagctagctgcaaacactgcacgtcaaggaaaggcccctagtcctacaggggttttagtaatataatgcaattagctagtagaagctggcatagctatgcatagaacagccgactcacatcacttcagcatatgcctgcacacacccacattgctttctacgtaccaagacaatatatgtaggcaaattaacgatattaaatggtctcgaaagtatgtgcatgaagtaatgtgtatggactgggagcttcctcgtccatcggaagtctgaa

SEQ ID NO: 43642 - DNA, 514 bp, Oryza sativa
aatggtttgagtttaggtcatggaattaactcagaatacgggatcacaagcttgaggctggaggtgctgccaaagcactcttctaactcttcacctgtacgccctattcaatgaaaagacactctagtgctgttttcagtttttttttaaaaaaactcttcacctgtactgaatcagaattatagtataattcagtactgcacaacgtgcaaatagaggatcgatgaaggcggcttgaccgctgaagacacggcgacatgcaaaggagaggcttgcgagcgcgcatgagacaacatggggaatcttaacttggatgtcaaatgtggcatttggtccagatgaagttcctacattcattttctttacctaatcgaagctttccacgattccacttctagacttgtcctagttcaatgactaattgtccacaaggaatatgcgcgagtcataaacaagctgcgcagaaaacagcttctctctccgttttacaccctccattttatagggtaagtca

SEQ ID NO: 43643 - DNA, 546 bp, Oryza sativa
ttaatgggctctgcagtaagagcaaacaatatgagactatgaaagagtttatgcaactacagagaagggttaaaatcctatagcaacatatgtgttacagttacctgtactataggaatatatgtgaatcggacgattgtacatctcagcaaatgcctggatctccatattgttcccatataccttgagaatcaagcatgtcaacataaattatttgcagtggaagaaggtaaggttctaaatttttccttgtcctaagtcctaattttattttgaagttgaaaaacaagcgctcagtatctacatgatagcattatttttaataaaaaaaagaaattctgaaagtcagggaaaatgcacagctgttgtgtggaagcataaatggttaaaaaaattaaatgcagacgttcattaagatctgcaaaacaagattcaaacagctgaaaaacatgctttccaggggcgcacatgctctatagtagattaaaataaaagacaagtcagctgactgaaaaacattagtttcataacattttcaaaaaaaaa

SEQ ID NO: 43644 - DNA, 1929 bp, Oryza sativa
ccgttattggtgggtaggaacaattgcttaggaatttctcaaattgcgtgtatgcacttctatttccaaaataaaatttctaaggaaacaatttctcacaacatgttgagtcatcatgatacggagaaaagctcattcgaatccaaatactccatggaatccgaatccaaatgtgatactcgttgtcattgtttctattagcagcactcgtccatgatcgacctttgagaccgcacatcgatccggagctgactagggcaatcatctagtccctgatcactatacactgaatctcgggcctaccttctcctcttcatcatcggtgggagtgccgttgtgtctatcatcgtgctatcttgtccaattcaaccacattttagtgtgtatctctgtaaatagcaacttacacatgtattatgacgtcgcataatcgcattgtcacttttcatatgagaaatgttgctcttgttacacgttatgacattacattgtcacttttcatatgagaaatgttgctcttgtcacacgtgcattataacgttacattgtcgcttacaaatgcatctcctcctccatgtgtggattgggtattttggtctataccaaaatatggtagaaaaaaagattcaaagtatatctgtggcatataaaatgacatgatccatacggttacaaatagataaatagtaataatattttttcgatacaaaaagacatgatcaaacgatgtctggctttggttctagtgattgtgtttttatcagtttcagtgtttcaaccaccatttcctcgatattgcattctaattcagaaactgttgttttcttcttgatggcattactcgttggctgaaatgttggatctttctgcaaagaaagatgtgtgtgccaagaggctgccgattttgcaaagtgtgtcagaaaattttgtctgaatttattgtggtgtttgtttgtagcaacggtaatggtaaaagaaatgtacttgtattttatagtgtaaccggtgtgaattcattcggttcagattcagtagtgttgattggcactgctgcgttcaatttatttatttatttatttatttatttatttattttttggaaaagcgctgctgcgttcaaattcaggctcaggctcgaggaatgtgttcactgtatagaatacaaatggaaaatgctaaaaatggcaaatggttttgtgattcagtagatcaagcaaaactatttatatcggtattacatcacgcacaacattgagagaacttatgaaccactatattgagaaatcttatgaggcattcagaaacacgagcattatattgagaaacttgaattgagaagttttaatagatgatctcatgacttagaattacttcgttcaaatgaaatctcatggatggcttgacaaaaatacctacaaaacttctgctgtcaagtgcaaataaatttggttattagaattacgccactctccgtgcgtaaaactacaaatatactgttaagtgcaaataaatctggttattagaattacgccactctccgtgcgtacaactttgagatacacttaatagtgcaatgacaatgggtgtgtggttttattctgtattcaatctccaacatgttcataatttatttttaaaaaatgtttgaagtgacatctctccctctaaatctacaaaacccagtgttaattaactataaatactttcagttatgacgtccggctgtttagagggacatctctccctccaaatcttgtgttatttagctataataaatactttcagttatggcatctagctgagaccggagcctgcaggtaatactggcatactgctagaactcatgcgttaatccctcaacgtccacaacttccttcgcaacctttggttgcattatacaatgtttggtaatactggcatactgccaga

SEQ ID NO: 43645 - DNA, 1367 bp, Oryza sativa
tcaatgtacagtactagtagtacgtgccaggtgcaacttgctaataataaatcgcttaatcgagcatgcgcaacggcacggcgagacgagacggacgcgcagctgcagaggtcgtgcgccacatgcatgcacgttgcaaccgcgattattttgtggcgtgctattcgatgtagttttccgtgctactcctatatttgttggagaaatagggacgttacccgtgctacgagtcgttctggaagaactgttctcggtggatggagccatggaggccagctagctgcagacgcagctggctcttccgttcacctggagagcatgcaccaagaggcacccttcctatacttgctagtctacccaggtgagctgtgacgttacacgtaacagctccgaagtttgcaattttgagcgttgctgtgtttgagttccttccaatcgagcaaccacgttatatcgcctctagtcttacgatccataggaattaatgggaggcgtgaaagtggcctgtccttgtatactctgttgacttgctatatgtgcacttctccaatttgtgcgtcctcttgtttcagccagctagctccgctgctccgacgtcgttgggcaacccaaaacaaagttgcagtcgaagaagagatctcgcagaagaacggcaggatctcatgccggactggaacgtaccgaggacgagggacagaacagatattggggactcctgtagcggaaactctaaatgcgcgatcgatcgcggctgcgatcggatagcgatcaccacccctcccccctccatccctacacgtttccttttttttttcaccgcattaattttttattttagtaaatttatgcacataaagtttatacacctaaagtttatagacccaaagtttataaattaaaagtttatatatccgattcaaatttaaatttgaattcaaatattttttatatatagtatttctatacatctaaagtttatacacctaaagtttatagacccaaagtttataaatcaaaagtttatatacccgattcaaatttgaatttgaattcaaatattttttatatatagtatttagatacatctaaagtttatacacctaaagtttatagacccaaagtttataagtcaaaagtttacatacccaattcaaatttgaatttgaattatatccaattcaaatttgaatttgaattcaaatatttttatatatagtatttctatacatctaaagtttatacacccaaagtttataagtcaaaagtttacatacccaattcaaatttgaatttgaattatatccaattcaaatttgaatttgaattcaaatattagtttatagacccaaagtttataagtcaaaaat

SEQ ID NO: 43646 - DNA, 1224 bp, Oryza sativa
cagcggcctattgggagactccacttggatatgagtggataaggccagtgccacggctgtttctgccgtccagtatgctgagtactcagctagtagttcctaccgaggcaaacttaatttcgtcagtagaagactatggcagttttgtggagattatggataccccatatttacacggcatgtatatccgactggatatggaatgccatatataggtagaatatctttaagggactcgggttacattccttaacttgtatatcaaggaaatactcgggattctagtcggttacgactgtattttatctttatttgcctattccgttaggaatataggctataccttgtaatacggactcctctccctatataaagaggggtccgagtatctcttgggacataacttttctcccagatcatacgatcaataatatactcggtggattaatccccggacaggagtagggtattacttctcattgagatggcctgaacctgtgtctctaaacccatccacttttctagcttgatagccaccctttttcgtattaccgaaatctttgtttcgacaagtttaactgcacgtagtagtgtacccgcaaatcatactttggtaggcgatggccggcactatgtttttccagatcaggtactctgttttcgtgctactaccttggaatgtgatcgaggtctagactctagactatgcaattggtgaactggagctgtttaacgaggtaaagtggtgaacaggtagataacttgtgtggatgtgatgagccaccggcccgcctagttcgttcacctcacaaggcatgataccgggcttcgctgcagacagcagactttaccaattcaccgttgcacacgatcagaaacagcggctcgtcgtaagttcttaacccagcgggcgggagacgcaaatccgtaaggaataagttcacttcaggtcccctatttgtcgctcagtccgatttttgtcctgaaccacaaaaccgggtacgacccgtcccccaactttcaaaaaccggacaaatgagatccctcggcggtatggagagcggttttggccgacgtgacgcctatgtggctaatttgactcagtcttcatctgacgtggcaattcgatctggaaaaatattaaacactatgggacccacatgtcagtttcacacacaaattaataaaaaatggtggagcccacgtgggccactgggccccaca

SEQ ID NO: 43647 - DNA, 819 bp, Oryza sativa
agagaggtaacccctctcacaaaaccataagtactcgtttctgccaatcgctagggtgaggataacaactgttggagagtttgacctgacgtgacaacacacgtgtgaagcacatcaaagcaagcgcagggtagggtatcgcctctcgcctcgccgaggccgtagaactagctattcaatgacaaggacgccgcagcgaaagcctctggctctaacctctaagcccctgttaattttttttcatcttatacccgtcttaattggaatccagctcatgatcctaactggcccattgtacatagactagggtcttcttcaaccggtcgatcagtttggtctcaggctgccagccattgcattaatccaacaagatttgcagttgccgtagtaggttcattaagcgaggtccttggaaagaatctcgacctactggccggctcggctctcactggtgcgtactccatttttgcacaaatgcacctatgccctgacgacgatagaaaaggattggacattgttgcatcttgggactttggtttgaaaaaacaggagtcccccctacaaaaggtacgtgtcatggcaccatgatgatgattatctccgcgtcgataccgcaatctgatggggaaataaagctgcatccatggtgatggggaggcaacgttgctaccaggccatcatggagattgcggcacctgaggtccacatggttgttgcattgttgtggatcgatccatccattttgctcggctttttttttttatgtttgtttttcgaaggctttgtatttataatggcaatgtgagagcacgttcagcg

SEQ ID NO: 43648 - DNA, 600 bp, Oryza sativa
cattgccaccaccactaccttcttttaaaggagtatagatatactacttttagcccaggaagcttatgcttttgttctaaaattgcaaggtctcttatttaataagaccaacgaagtggtcctgctagttgaaattgatacgagtcataaaagcacacatgcaattaggttaacatctatactagacatcacaagaagagagagagagagatagaaagaaaaatataatttggcattgaccgacatccgagttcatacaaaaaggaatagcattgctgtttaatattgattaattgtaaggtctcttattgacaggaacaacgaagtggtcctgctagttcaaaatgatgtcattataaagcgcacatgcaattaggctaactttaacatctatactagattagctggcttaatgattttcatcaggtaaaagtatggtatgaagtatcctattatgcactagacatcacaaggagagagagagagaacttatagtttggcactttggcattgaccaaaatccgagatcatacaaataggaatgccattgctgtttaatatttattgattgcccgtggcacccttatgtttattatattg

SEQ ID NO: 43649 - DNA, 1494 bp, Oryza sativa
caagatgagtgattcgctattcaattacaaaaatagtgaccaacttaaataagaaactcaccgtgcaagttgcaataccaatagtataatttgcactttaaacaaacttaaataagaaattcaaatgcgatatactactgtaatactccatccacgacatactagcttcttagcgatcttcaacattatagtttgatcaatgatttattttaatttataacatattttccataaaaataaaactaacattatacaaaaatattttaatacgaatccaaaaataaggacgcgttatattttagattgatgaaagtaattcaaaaaagttgctactactaagcattagacaaatacaaacaataataactataacttgaaattaaaggctattttaatctaattattgttatacagtttatgttatggttatggaaaccacataccacctccgtcccaaaatataacaacttttgactatgaatctggacacatagttgtccagattcatagctaaaaatgcttatattttggtacggatggagtacctaatagtagttgactaagctcggcaggaccatcatatattaagtcttatacggaattatatctcgtatatagaaggagttctggataaggaatgacgaatacagttctatatgaaaacgagaaggactactcgaattgtatccatattggtctccctagttctacttggacaaaggggtatctatgggtataaatacaagaccccttaataggaggggagacacaacaacagatagacacacaatatacaagccaacatatgccgtcagacatcaacattagggttaagcctagaaagaccaacaagagggatttagcgtcaaatctgatctcaagagctcatactcgaggaggaagactaccatgtcgtcaactatgtgttggttatccatgccgccaagttgacgacagctcgataggttatcccaattattgtacttgtgtgatccagatgaataaagagtaacaccggcttcggccgacaggagtagggctattacctgtcaaataaggggtccgaacctgtataaaaatccttgtttccatctcttttacctcaatctcgcataccctggtaccaactatccctatttcatgcaaatactgtagtcgagacctcaaacgtcgacagtttagttagggtgaaatttactctggaaatccgctcgattttttttagaaaatcatgagctacaattaggagtccgactttcgtctcaagttaacatacaagtttttttaaaagatatttcttatacggctccttttgtattttcaaaagcgaacaaacataaaaactaacttaaacacgaatctatatttctaaaaatgaacgaaattaaaaaccgactcaaacaaggataacgtaccttgtattggcaaaaacattttcaacttttataatagtcgagattaataaacagataggcgtgaacttagaaagggtct

SEQ ID NO: 43650 - DNA, 667 bp, Oryza sativa
cgaacaactagaaaggcgacagatatagtggactagggtggcgacaacggcgaacggcgaggcacgaaccatgttcctccccttgggttgtgtgtaacaacccgccttccagaaccgcgtagcccagcccatctgataggcaggcccactcacacacaccacccacttacactttcgtcatcgcatcgtgtaaaagggttaattcaaaagtggcacggttggaggaaagaggcctataagttggtccaacccttaggctgtgtttggaacctagggttcccaacctctctccatcgtattccacgtgcacgtttttcaaactgctaaacggtgtgtttttacaaaaaaaaagtttctataagaaagttgcttaaaaaatcatactaatctatttttttaaaaaatagctaatacttaattaatcacgtgctaatggatcgctctgttttctatgctcactgtgcaagtttggaacggctgattctgaacacagccttagtaaactaacaagattaaactaaacatgcgtacacaattctcataaaccacacaggtcaagtcatagtttggtcaggatgttatatacaacccctccaaatacctgacgtgcctatcgtctaacttacctttaacaatttctttactgattggtttgttttatgcgcac

SEQ ID NO: 43651 - DNA, 1462 bp, Oryza sativa
tcttgcattctcgaagtacaaatctggaaatagggtctcggtcccttaatgggaaataaagaggagagggacgtttcacactttcgcataatttgtggggggagagagaaggcccagagctttggaacttgctcatagctttgcaacctttgtcctctcggagtcctggagatcagatgccagagcatccccacaccaatatctggtggtcaagcctctccaaatccgggatactaagctagtgccatactgtcatagtatctctcccccctttatttggagcatcatcatgtccatttgttcagtacactttagttttcagatgtcgatgtgttcagccacctttccaaagcaactgtttagattatgaagtatattttctgaattaaattagctggagtaatccaaaccagcacaagtgttaattaagtttttgcacccatgcatgcatagcactagcttgttggcattatatatctttcaatgttactagctagctagtactatatgcgagttatagtagacatgatttggtctctaattggatatattattaatgaaatgcaagttgcgaaaggaaaacttaagacgaggtctaaccgtctaatagtactagctaagtgctaataacagtgcatatatattagggtaaattgtattagcatgcaccttgtctctagttgggtgctgccatctacaagactacaactaaatcttgtggaattccattgagtggcattggatgttgtgtcatctacaactaaatcttgcagcaagcgagcaaactgtatttgctattgtctagaggcctagtattcagattaaacataaaatatcgatgcagaacatgcaaaaacaggattaaaatatgcagtcggcaatagttcaacctacattcatcttatgaatgataactgtaccttgcaactttgccttaaacagaatatttttgtgatgaatgaaatacttaacttggtggttaaaaaaccactatatattattgtttgttcaccataatgccggccgtttatttgcttggtaatgggtggtagtgataatcatgtggattaatttttaattttcatggctttaatcagcttatgttttaaagagatgatcatactaaataatgtactgtttcacctgatttgatcccgttaatttatatagagttttgttaacatttctatgttatttgttcccggtacattgacaataatgtaagactaagatcttgctcgattttctacctgatgatgcacctcttatgacttctttcgtcaagaaggcctttgtcaaatcacattggagtcaagcatcagattgccaagttttcctaatttggtcctatatatacatgttgttctctatattatggtacattaaatttgaaagaaactaaaggaacttagtagcaagggcagatccagaataagactataggggggacttatcttctaag

SEQ ID NO: 43652 - DNA, 1806 bp, Oryza sativa
  unsure (1)..(1806): unsure at all n locations
gaaattttgtgcaccccactgggtaatggataatgtgagccagatgacttgggtagagaaaccatctttgctcgatcggtcaaattccacaatagttctggttctaataaaacctgggattaaaaagtatctttagttccagtttaaaagttgaggggtactttttgatctttagtagatcatttttagtatcggtttaagaagttgttgagttcaagacagaccccgattatttttactcccggttggtataaacaaccggggactacaaatagatctttagtnccggttgtttataccaaccgggagcaaagagtaccccgagccgtgcaccatctcgatattatccgcgcgtctcctctcgatttcctcccctcttaatatctcctcctccatcccttcctctccccttcattcccttcctcacccgttcctccccttcccctctatttgtgatgtgatgtatttgtgatctctgatgtatttcttttcaatctgtgatgcatttctttccagatctgtgatgctatgatttgtggatgatttggggatatatagggagcagatcaatttgagcaaagaaacaaaaaaaaaaagaaaaaaactagggatcaaccggactgcttccaccattaccaactgggattaaagatacccggatttatagttccggttgtatagggggttcccaactaggattaaagcccctttttccactagggtgaggtacgtttcgtagggtctaaaatttcagcaacgctatatcaacgcacgtacgtacaggtagcctagctacccggccattacccagtgagcacacaaaatttatcatgcccagatgatcaggcgtacgatgggaagaagaggaagactgaagaggaaagtaggaacttaccgcgtgtactgctgcccgcccagatgatcaggcgtacgctgcgggcgcaggtacggaaactccctcccccagaacgtacgccgggccttccgccgtgcagcttgccgctaccgcgacgagatgcgtcgcacactcgcacgcgcccgccgcgccgggatgcctggtatagttgtacggtgggcggccgccggccggcgctgcgcaatcacgcagaaatccggtcggttagattttgtagggggcaccggccggtgtccggtggccaagggctaaagccagtagaggccgcgatatgatctgggctgagcgtacccagcctgcgagccctgtaacataggctggctgggccgcacaggtagttgggccgtgaaggtgaagagaagatgtccatgcagaggcctctgatagccccgcaagcaggtgtacactgttacatacatgtctagactctagagatggcaacagggtgctatgacccgacacctgactggtttttactctattagaagctaattatctattatatgctaattatgttttaactcttatacccatgagtttaccgacgggcgaaaattcttacctattaggtacatgggtatgggtctattctttatctactcgtacctaccaacccgagggtgaaaaaacctgtagattaagcctaaatccatgagtaacataaaacttctttcttatcttaagttctattctagttatatgaaattattatttgatttcttgattatgtaatatggttgtagattttttttactcgactttagcgctaatgttaatagcattgttgccagaagaattattgatgggttacggttcaaaaatagctaattatagaacaaaactataaatggtatgagtcaattatatgggtatgggtacccgttacctgc

SEQ ID NO: 43653 - DNA, 1269 bp, Oryza sativa
tggtaattcaaatgttcttgtcatccatgtttgtatccttcttttatgtctttgctgcttgtttctaattcctctggaattgcaaagctgtacctgtttgtacagaagtgcaatgcacttcaattttggaaactacaaaggaacacctccgagtgttactcctgaattttcgaaagagaaacaatcattgatgagaagtattgaaccgtagaagtttttggtgatggggacgtctttggatttttccctcttcactgtgaacagttttggagttttggtctttggttttaatgagcgtattttaggtttgttgaaaattttgttgactggtccctttatttcttccttggatagccgtctactcgcttatgtctgtcatggactgttttcaataagaaatcaattcaacatttttgcaagtgaatccacataactagctttctttcttattctaggtggctgttctttgcaaaggagaatcgacattatattatttctatacgtagaagtgattataaatccgaggaagaaaacatactagtaggttttactgaaaatatccatgctttttgattgtttgagaaaatctcatgtggttttttaagaggttctgaacatcatacattcgcagtttttttatgtagcagaaacctttattacctcatgaagaaatctctacaatggtcagaatttcaaatacattttctatttagcatctagatttccatcatctatgtgaagcaggtcaacgcctcaacggggaatcacaatgaccattggttggtccattggttgatgatgaaacctttcaggtttcctgtgagctttcggagaagaccctgctcaagtctccccacaacagactagcattgtagtcaacggggatcccaactcttagaaaagctccggtaagccattacacaagatcattttagtgcacccatagacccactctctccttgctggcatcgacgggcgcagaagaactgattcgatctatatttgcaacatgagcggggaagtcgaattaggacagccgttgcgggtaattaccttgacctctcttttaagttccattcttgttgctccagtaaggaatgcctaggctacggacaatttagagactagatttcctataacaatggatattgctaatcagtatgttgtgaggtacaatttccattacagcatatcaatttcaccatgtaaatgccatgttttttctttgacttcccctgttgtgcttaatttggtggggaataagactga

SEQ ID NO: 43654 - DNA, 2092 bp, Oryza sativa
catctactagtatagattttctttttttttatctctattttcaaaaatccggcagggaacagtgactgttcagaatgaaagtgaggttcagaaagtgatttgatcagtttccaattaaaaaaaaaagagaggatactgcgagcaaaattcggaagagatataaatgtaagtgctccaataagaaacggagtgcaatccaaaaataaacaatgaacccaatgtgcattagacttatgataacaacactgcaccagcacagtgcacagctattagatttgatgctgttttcttttcaagtatttgcttatagcacaaagccagaaacagctatcagataaaatatcagaaagtggctttgcaagacataaaaaataatcaggaaagctgttgatccagccagagagcaaggaacatgatgagcataccacaatcctcgcagcagacatggctatctaaaaaatgtcagttgttaataagctttcctccaaggacttctaaattttaaaatcttctatatataactgaagattaaattgcaacgttaggtggaagccatgcttttggcaagttatagcatacaaatgttgcggtggttcacaggttgttagcaccaaactctaattttcttctgtttaaggttatgatacagtattacagtgcataacagtatgcaaactttgaacagagacggcatatgtgttgttttctgaactcgattttgttttcttcataaatggacactgcagataataaatatttaacattcatagataagatttagttcaatttacggaactttgaccatcaacgacttcccaaatgcttaatttgaaaaaaaaaaggtatacgtatatttgaaatgtacgactatcataatgacaaaaattctttatattttgtacactcaatataataaattattagattttgtaaacctattataacaaaagtagtgattacagtttttaaagttttgaattttatcctaaatatccgagaggagtacctaaaacgcctattttattttcaacggcaattaatggaatgaggggtatgtttctagatcaaaatcttgtttcaaaaaccattagttcaaggtgttctgatctcttttttttttagcagcggccacaaaattcctaacttatatcccaatgatgtgtacgtagttaatactcctttcgtctacaaatataaggaattatggattcaattttatctgcaaatcctatatttctataaagttcatcctcaccaagtgtagttaatgctatttttttctcattgagccacatcatcttaattatttctaacccttgaatgattgatctatggttcaaattatgtccctcctttccttcttctaggaaatcatatcatctttcttttgtctttggatgattattctatatcatttcccttcttttcattccgtcattgaggtatatcaccttagttttgcttttgaataatctatttatatatgatttacattgttataaaccatatcattttaattgtttataactttttttcttccatggttgatcacagatgaaaattatataaagtatataaagtgatgtcgtgtagctatatgcatgttatttatactattatcatatataactcccacagcaactcgcggggtttcattttgaagtggagtactattttcccatttcatccaaccattgcatttattgctactaggcatgacctttccattcaattaaactcacatggaaattacttcgaaagtaatttcacctcaacacttaactttgctaaccaatctagagtctactccttatatttgtagatggaaggagtatcatcagtgatgatgagtagaaacactcctttcaagtaaatattacagtactattttttagccttttaatggtcatgataataccattttttttctactctctctatccacaaaagttacacatattacttttgacaccaagaccaataagaaattaaatcacattggatgttaatcaaagagcgaatataaacatgcaactaataagtatttagatgactccttgagttttaatgaagcatgtaatttatctcttca

SEQ ID NO: 43655 - DNA, 1510 bp, Oryza sativa
tccggtgccggagagcaccgccggcactggcgcgacgcgagggcgaggacgtcgagcacgtcgtcggcaagccccagctcgacgaccggcaacaggtcgagcagcgtggccaggtcgtggttgagctcccgcagctccgcctccatctcgtcggactccagcagcagccgcatccggctgcgcgccgagcaatcggcgacgatcgccttgaaccgctgcagcaccaggagcacctcccgcaggcacagcgacgccgaccgcggcagctcccccgcggcgccgcacagcagcaggtcgtcgaacgcggccgccagtagcttggaccgcctcgagatggacgcgaacgcggcgcgcaggaacggcgcgggcgtgtcgacggcggacaggtcgcgcgccaggcggtgcagcggccggagcagctccccgtcggacggcgacgggggcggcaggaacaccgacgaagagccagacgacgacggcgccgccgccgccggattaccagccattggcgcagtaaccacaaccaaaagaaaaaatccttagcttattagtggagtaaaaccaaacggaaatggtggacacgcagcggagagctcgaaaagagagagaggtttataaacttcggaggcggtaggcgtggcgtgacgagttggttgagagctggaaggaatcccctagactgattttgcctttttccgtttatttctattgtgattgttatgcatcatgtgcttagtttatttgtgatggtattaggattatcttatatgcatactatagtattaatgtattatgatgcattggctggaaaggggggcagggtcgtcgcatggtggccgttggatgtggcgcgatggacggccgggatgggaattggatgagtgatgatgagtcagcccgtttcgtttttgatcggatcgcatctcgctctcgggtgcggcggctgggtaagactttgggacagatgagggacgagctaagcacccgagtggagttaaaagtacggtgagagtggcttttgtgagaggacaggcgaagatgtggaggactagatatcgtcagaacctaaggatagctgtaaagattactttgttcaaatccaggcaattttcacgtggaagtgggagacctgtcacactaagaactggagtaactgctagatctatacaagagccggctgctggattaaggtcctgtttggtttatagagacttattccaagtccctgtcacatcggatgtttggacacttttttaagtattaaacatatactaattacaaaacccattccataaccttggactaattcgcgagacgaatcttttgagtctaattacgccatgatttttacaatgtgatgctacagtaaacttttgataattatggattaattaggcttaaaaaattcgtctcgcggattagctctcatttattaaattagtttttttactagtctaggtttaatactccaaattagcgtccaaacatccgatgtgacatgggctaaaaa

SEQ ID NO: 43656 - DNA, 940 bp, Oryza sativa
ttatataatgtggacatcatatatgatcgacctacagaagttgcattgtcctgtttccttcatataagttctgtgcatgtatttgtacagtgtaacctatttcagaacaatgatcaattgccaaattatgtgaacaaggctagaacgttgagaaatgacaatgacgtgactatgtaagtatcaagctgacttatttttcgaatagtaagaaccaatcaattagttgatgcattcaagcaaataatatccaaggagatgtcactatatatacgtgtacatcagcgaatgacctattcttttaggtctcgtcaccaatctagtagtaataatcagttcaaggatcacgcatgctctgcaggtactctggtaccagatcattctagcctgcacgcaaattcatatcaatcattgtaaaattcgtgaaaaaatacgtaggacgaaaacgatctatcttattcagtacacgcataactaactctgaaattaacctgcacttggactatatatgtacatatatacacgcagatgtgttttttagttcaatttcacttactacaaccactacttcattccggaaccgaagaaaacttccttgagctaattcgatcatttagcacgcactcaattaattaaatcaaccgcccaatcacaatggacaatacaataaaattaaggattgatacatccattggacaaattcttttcttcacccaaggtatccacaactatatctatttctagagaaacatatatataactaatctcgcacacagatcttattttccccggcttaattgtgatcacaccaaaatgttagataaatccatgcaagtcaaccaaagtatgcagcatgctcacttgtgttgagggagctgtagtcagtagtacttgttgatggctgcccggcaggatacaccggcggagacgccgacgagatcac

SEQ ID NO: 43657 - DNA, 678 bp, Oryza sativa
aaaaacaatatggaaagaagtgtccatataggaacccaataaatccaaaattagaaaaggaaaggagagtccaagtagaaatacaatttaaaaatagttaaaattcagaattaaaaataagcaatattgaaagaaatttccatataagaacccaatacgagattaatcaaaattcaaaataaaagtaaaataaaatccaaaattagaaaaggaaaggagagtccaagtagaaatacaatttaaaaatagctgaaattcggaattacaaataagcaatattgaaagaagtttccatataagaacccaatacgagattaatcaaaattagaaataaaaataaaataaaatccaaaattagaaaagaaaatgagagtctaagtgggaatacaatttaaaaataactgaatttcggatttaaaaataaggaatattaaaagaagagtccgtataaaacccaatacgagattaattaaaattcagaatcaaaataaataaatcaaaaattagcaaaagaaatctaaaattagaaaaaaaagatttcaattaggaatacaatttataaataactaaaatttattataaaaataaagattattgaaagaaaataccatctaaaacacatgacaagataaattaagtaacatgcctataaaggagtagagtggtggcggttgatac

SEQ ID NO: 43658 - DNA, 669 bp, Oryza sativa
tgatgtgtcatttttctttaatttttggttcaaggatattctgatgaggttgtatttataattctaacaaaattaattacaaacatgtatattagagtatatataacatgtaacttactagctatttctttgacttaccaagtcatgagaaaggtgtttttaaggattaattaactatctctatgcgaaggagaaaacatctccatactaaagtggaattgagatgttgaagtggtgttatgctaagataaattactaccacattttccataaatatagggatttctaactatacacttagatgaatttttataatcgtggatagatatagtacattcaatatatctttatacatgatagtgtggttgctgcagtaaacatagcttttcctatagataaattatcttatccgtagaatgacatgaaaaaaagttagggctaaaaattactcattttatcttatccgtagcatatatagagtacgttccatacatccatcttgatacatgatagtatggctgctacagtaaatatggtagcttttcctataaatgaatcattttgtccgaagaatgacatgaaaaaacttagggctaaaagttactcatttgatcttatccgtagcatatcctattttactcactaagttgtcgcaccctttttacgaaa

SEQ ID NO: 43659 - DNA, 1088 bp, Oryza sativa
cggtacagccagtgacatccttgaggtcacatgctcgtgtgctgctagccgctactgcaagcaccaccacgacgtccctccagcatcgagctcaccagatccaggatgagcaacgatagagctaaggaggtggctacgagctcaaggaaggaggagcagtgagtgtcgccgatagtgtgggctctgaagaggacgacagtctcctcggtgaagaagccattggcgacgaagtggcggagcatgtcatcgagggaggagaagcgtgcgaaaaggtcaacctcccatgcgttggactagagtcgcggcagccaagcacaacatcataagcggcgcaacaagggacaacaacagagtcctacaccatgagcgacagcatgtcggtgcaggagatgacggcggggtaggcagtcttgacggcaccatgaatccctaataggcgccagggccaggatgaatcgactcggcatgagggccgtgacatcaccatcaaccccggccaccaaaactatggacacacctctacctccccaacctcgacagctgcggctgcaagaggaagttgatccccatcatcctgtacctccataacggtaggctcgtcattggctcggttgaggatgcgctcgagcacgagctcgccaaccgcctctacaccctggcacgcgtcctcgtgttgtccttcaattactgcctcgcgctagagcaccccatccctgcctgctacgatgacgcgtggtctacaccgcagtcgccgtttgccacagagccacgagcgccgacccgaggtggtgggccttcgtcctcggtacaatgctgttgagaaagatggaaaagaggagtgaggaggggaagagaaagagtctctgattatgtgggtcccaccagtcatgtcagcaaataatgcttcccacaccatcaaaaaagttgattttttgcacccattttcgaagatgggagagacattatacccggttttgcggttgagggatgcgattcaatcaggaggaagaacgagggaggtaaatagacttattccttcaacccccagctcaaaattaagcggcctagcattggcacgacccagaagg

SEQ ID NO: 43660 - DNA, 645 bp, Oryza sativa
aatggtccaatggggagttcaagaatgctgttggtgagatactatttgagctgactgatgaaccaaacccgttcatttccctggaactcttgtactcaccgggtcacctgcgtcttcctgatgttggtcgacacgcaagatgcattgaccatcccaagactgtttctttcagggaccagattttggttgctctggttctgctcgttttcttctacctcttctggagataattgtacccaggtttgctcattaatcatgccctcctttgtcaaggcaacgaagccgtgaggtcaagtgtcctagaaggcttatttttacagcttttcttggacttagcttcctgtacttcttcattaatcgtgggggagagcaccgcacgggtggcggtgatgacaggtagtttgagtttttgcctctgtggtttcaaattcagattttgttgctgttaaacaatacgtgatagagtggatatccaacttgaagaaaatgatactgggtggattttgatttgttgattgaagcttgattttgctgttgaggtattgtttggaggtgagatttttattctattacgatggaggagttgtttgtaaaggtgcaaatgtttttatgcttcacaaaaatatattacaatatatgatatta

SEQ ID NO: 43661 - DNA, 674 bp, Oryza sativa
attcgattcttattcgtattcgagataatccgtatttgtttccgtattcgagctatccgtattcgttttcgtatccggtaaaaaaatatgaaaacgaatatggtatgagcattatccatccgtatccgctccgttttcatccctagctctaggcccgagtgcttggctggcagggaggccaggccgagcaggcccaagagaagacgacggcccacggcatcggcaccatgcgcggacacgcggcgacaagcaattcggcgcgcgcaggcacggggtccacgctgttttgcacggctcggaggcaggagccgtacgcgtgggacccacgtgcgatttagcgagcgcgcgtgggagcggctcggtgggacgcgtggaggcttcggactggatgcgtgcagatgagcgcgggattcacgcggtggagcgcgcgctctcgcgtgctgaggcgcgacgtggcggcgtgttactggcctggagcaggagcacgcggatcgtgcaagggagtgcagcgtggaggagttcggattgactacgtggcagcgatctggagctattcctttgaggagaaggaaaagcaagtggctgagattgagtccagggtgggtttcgccctacaggtatgaggtatttgagacaatgtcttacggggtattaggctataaatagagagatgg

SEQ ID NO: 43662 - DNA, 3479 bp, Oryza sativa
taggcttttgattggtaagggcttgtttacttttgtgtcacttttaaccctactaattttggtattatcaaatttttgtaaggcaacaaattatacatattcttattaatgttaccctaccaacctttggtagggcctgttcactttgatgctattttcaactttaccaaattttggtaaagttaacaaaaaagtggctacatttagtttgctgctaaattttagtaactatataagaaatcctaccaaaattttggcaagttgtcaaaattttgacaacattgccaaaatttggtaaggttttttttcggcatcaaagggtctattcactttgatgccattttcaaccttaccaaattttggtaaagttgccaaaaaaagtggctacatttagtttactgtcaaattttggtaactatataagaaatcctaccaaaattttggcaatgccaaagtgaacaggcccaaagttaacaggcccgtagttttataagtttccactcgtaaaaattccatcaaaacttgataaggcttcaaacaaaacatatctagcactaaaaatttggtaatgtaaaaatgtgttaaaatttagtataaccaaattttggtaaggttaaaagtgactataaagtgaacaagccctaagccaaataatttggcaatatcaacatttattttttgattggttaattttggtctcaaacaaaagaagcctgaagcctgaaatctgcaatctgaaatctttagacagttcccgtgtactatctccatcactaagacttcatttttagcccatttctacccatgccaatacaaaggaaaaaaaaagaatgttcttactttagcaaactccaatataattattctccactttagcaaatctcaatacgtttgtctcccaatactctaatgcaatgatcgctgaaaaagatggcgtctctgtaagacaaatagatggaaaacaaacttattctgagatgaaggaagtaataccatagtagcatccaaatctttggtaaaactatcttttctcttaaaaacatggtaactcaaaacattatactaatgtaaaatcggataacttagtaccatcttaaagatactcgagttgtaacataacatcgtaacatgataatgacatataaaggctggatctctggatctacatactaatgacgtactccctccatcctataatataagacgcacacgtatttaaagatttagcatttaaaatatttcactaacacttagtataatactcccttcatctctaaatgtttgacgtcattggtttttttaaacatggttggtcattcgtcttatttaaaaattttaagtaattattaattcttttcctatcatttgattcattgttaaatatacttttatgtatacatatagttttacatatttcagaaaagtttttgaataagacgaacagtcaaacatgtttaaaaaagtcaacgacatcaaatatttagggacgaatggagtataaaataaattttatttgttaaaaattatatcagattgatatttaaatttactttcatatggttatagttttgtggctaggaaccttatagtacatggaaaattataggttaaagattagttttggagaccgtgtcaattttgaccgcgtcttatattatgggataaagggagtagcatgtattttttagctcgtgatttttacagcggtaataaacaaatttacccatgtaaaatagatccttgccatacatattgcaacgtcatgcagttatatatgaccatatgaggatttgggccccgaaaccctgatgctagttcaggcaacccatgacggccggccgagccaaggcttcagaaaccattatgagaaaagaaatcaaaggatatatatgattatcttattgcggggccaatctgaatctactccaatatgactttatttaatcttcagtttaattgctctggcaatcatgaccgcgactctaccgacatgctcagactgatcgcccaggctttgaaagctgaggaacttcaaaaatggagcgcgagaaaattgcattatgcatataaacagttctaaactctgaatactattgctctgctttccccagctgaagcacaatcacagaacaacagcgtagcattgctgtgcatctaaactactcattccgtctcaaaatacaataacttctctttgaatttgttctaaaatataacaacttcttcaccagcattctctttccaaccaatcacaaacctccatcattcactttttccatctacctccatcttaataactgtgcataactctaaaatttcttatattatgagatggatagagtagtaagcagaaagttaccacatttgtttctcattttgattgcttcaccgaacaccgaacgagagatcatgcagaaaatcgcaagatcaggagaaagctcgtgtgctaaaaagaattattaggagaggcttatcgtgtcaccgcgagaggataggaacgacacacacggacgtacatatccctgtatcaatgcgcctttcttgacgagaaatctgcaagagcaacagcgcagcagcacacggtagctgtacgtacgcaggccaagccgtcgtacacgtaacacgtccagtagccctcgatctcactctcccaggacattaatgccggtgagccgcccccatcgtcagcatctcagcggtatgcagatgccgtgccgatcgttcgacggccttctcccccccgcgaggaaaacgatatccttctaaacgcaattaagaatcagatacacggacacacggtacaccggtgcacaacagatttgctttgccatcaagccagaaaaaccggtcgccgtgaaaggcacagggaaacaaaacctgtttttcttttggttctctgtcacgtcaagtgcaacgaacggcacgtctcgcttgcgtttgcggttgcgcccgaccaaccagccgatcgcacgacgcgtaccgactcaagagtcaggtagacgcgccgcggcgtggcacggaggagacacggcgcgccacgcgttcgcggcctgagatgatacgccgaggcgagccgcgtcgcgccgtaccacgggcgccagcgcggccctggcacgcgccaccgaccccttctcgtcggctgccacgccggcgccctgcactgcaagccgcgcccacacggccacaccggcatgcgggttaaaacgaaagaaaattgtgaaacacaccaacgcactgtacaggtactggaccacgtcgcagccaggacggctgtggttttgaccagagttcaccgcgcttactactagtagggcacacaaggaggagtgctatataaaagccggaccacggcggaggcgcagtagttatcaccggttcatcgtacaaaagaggagagagagggtgatggcgccagggagagaagaagagaaaatggtggcgactactacgatagaggacctgcacggggctgcaggaat

SEQ ID NO: 43663 - DNA, 2262 bp, Oryza sativa
tttgctggtacacaacagaggtcaaacacgaagttttaatggattcccccaaccaacttcataaagcccttttgaaaattttctttcggagatgcgtcattgttagtttaacagtacaaattacttctatgtcatcgtaatttagtaaattatcactaccatgcaacaggagaagttttatactagcagcacagggcagcagctgatcgctcctagcaggcggaaatgatagcgtgatgaattcggaaccatcgatgtttcaaagatcacgtattggaggacaagaaaacaaaatcgcggttagctttcccgtcataatccgttcctttcaaagagaacatgcgtgccaatctttcaaaaagaagtagtctatcaagtgactaattaaccatccatttcgtgcccccacgccatgttagctgcacatgggcatgggccgcccggacatcacgggcaatctcctactagctaccatgcgttgattcgccttattttgcaagcgtcccgagctttcagctccgagcatcataaggttcacgccacaattcctttccctgtttacgttggttacttgggctgtaccgacggatatttgagctagccgagcattgagcaagctctgcaatctgccatcactcacgttcgataaagtatgtaggaaccgcgtagagcgtacacgagtcttaaattctaaggcacttctaatttgaaaaggggcttattttcactccagacaatagtacaacaaagactcttttatggcaacttctactgctaactgcggcaggattgtactctatccgtcccgtaataaaaaggattttgaaagaatgtgacacattatagtcttacaattttggacatactctttgtccagtttcgtagtattagaatgtctcatgtccatttaaaatcccttatattatgtaatggagggagtataatctaagtgcgtgattggtttgagaatgaggtgagataatctatattttttatgaatggaatggtttagtcatatgtttgtcatgacagatagaatcgttatattttctttacggagggtgtggctcatttgtcaataagagagaggaggtgggtaggattgattagtccgttagtttctgaggtgtaaaactgacccaaatcttatgggattacgaaccatcccatgatccgatgtcacttattcttaaatcaaacaacttgaaaaatggattcgcctcatctcaatctattccgttctttcaaccaaacacatactaaatctaattacagttgatcataagcatttcatacaatatgcgaatttaccttggttgtgtggtttttggtagaggcggattatgtgaaccacttccatcataaataagttaaaaataccatataatataaattttaaatccaatttttgctcgtcaaaatttttaccaccgacattagcatgtacagtactcccttcgtctataaatgatggtattaacatgcgaagtgtttcttttgtccgtaaatattaggggttctaggttatttaacagtagtatagtattgagctggggtgaaattgtcctataggtttaccagattagtaaagataacgccaactatgcaaataaaattgagcaacaaatgtaatggttggatgaattggaaaagtaataatgtaggatccgttatattataggcaaaatttaaacatcaaataatttaattatttgtagatagagggagtataatagaaccaggtctcacattgaaggcattgaactattcacgccatgcgctgaagaggccatgactgtttggaagatggagagagagcgaggagcaagcatgtggtgagtacaccaaaacggaccacaaaatcttgccgtgatggcgactgaagcccagggaactcatctgcaggtcgcacccaaacaaaaagagattcatcatgcacgaatggaacaccacgcctactcgtctgaagagaatctctcgtagcagtagggcgctgcaaaatcttcttcatccatccaaccggctcgatcatcagagacaccatcatgcatttcgtggttgttacagcactggttaatgacggttggaaggaaggttttctttgccccggtcggtggttgtccatgattgtcgaggagaatcgtgctcttcgctcgcttaaacatctcatcaattgcgttagctagggcacgctcaatcatacgagaaaaaagcaatttgcaagcggttcgctctcatttccaaagaaagggagctagtagt

SEQ ID NO: 43664 - DNA, 777 bp, Oryza sativa
atgtagtttttgagtttgatgtgaccggttacctaaagtgtctggattagggaaattccttcgcatggacccttctgcgaagcctgctggataggcattatctttcgaggtagctctcatctggagtccggacctggaggtgcctttcactgctctggccggcaaatcctgcgtcagcaagctacaataaaaattgcaaatctgacgtatatgatcatgacgaatgattatccattttcctaaggccttgtttagttacaaattttttcttcaaacttccaacttttccatcacatcaaaactttcctacacacataaactttcaacgtttccatcacatcgttttaatttcaaccaaacttctaattttggcgtgaactaaacacacccttttctagcaagtatgctgggtaaccacaatagcactagcattgtcaagtctgtcacacactattttttacacctatttaccctgaagctgtgcattttactatccacttaacagttcgagtacacacatacgggaaggccaactgcacaggcatcaatacactacggcacatgggggcgtcaattgtatgagttcatgcatagctgttactatctctaagaaaatagtgccactcaaaccccgacaggcacggttcggccagtcagcgaaacgacttcttctagtaagtgaagcagattttagtagaggtaagttctaagtaaagtgactgcaaaccttggtacgagaacatgaatgtaccatagcccagaaattcagcaggtttt

SEQ ID NO: 43665 - DNA, 674 bp, Oryza sativa
tatgcagactggaatactggattcatgagtactaaatgagtatgtaattaagggcaacaaagttttttttatctgttacaaacatctattaattttttaggtatgatgggttcatcattgactgtttcaagagtaggctaaagagctgccaaagtgacaaattgtcgttgcagttcggccgttgtgatgacaacgatggcgatatccgctaaattggcctgtgcacggcgcgggaatctgcatgtctggtaggtcgtcaccgtcatcagaaatcgttaacttgtctctccttatgccaaatgctaatttttcaagcctaaaattgccggggcggacggtgaaatcaaagacgaacttgaatttttagccgcatcgtttgacagtaagccaagcattcaagttaagttagatggactttttgatggatcgatgatcgaccaacagactgacgtagctctgttcactccaccaaactccttcgattgatcaaatgactgtttgattatggagtagaaactgtatatgcgtagcatccgacaataagcaagccagtgaagtccatgaatctgcagtgcggatttggccgcattctgaagaactggacgagaaatgctgacaccgcctgagaccgagaggcatctgtgtctggccagagttggttgagcccgaacaaa

SEQ ID NO: 43666 - DNA, 610 bp, Oryza sativa
caatcggccttgccctcctgtgcaccgacctcctgcagatagtgctccgcgtccaaagcagccatgcaccctggatacaatgatgagttagaagtctgccacaaaaattttatgctcagcagtagccatcaatgatgagttagaattgatcttgtcgacagagtcatgcatatagacaatttctctctttttttgaagtgcatgtctattggatcaaactcctgaaacaagctagcacaaaataatagtaataataataaggcttcatcatgtactaaccatactgaccatgtatcaaccaacatgaaaatcacaaaggaaaaactctgtatgctgcttctgagatgaaaatcttatcatcaggctttttcctttcacacgacaggtaacaaggtagttctttctgaagtatatagaaatggcatactgctttcattctacatcagcagtactggccttattccctgattccaatttttgctaaacaaccagacatcaggattaaaatcagtctcctatgactgtgtccatcaaaaatgccaatttggattgtttctgaccaagaccatacttggtaacattattactccctccttccctaaatgttgac

SEQ ID NO: 43667 - DNA, 669 bp, Oryza sativa
ttttcagtagggtacatgcgtgatctcctcctctaattgctgtacctaacagtattgtcagtgcagcatccagtgacaccctggcgattgatacggggacgactacaaaagcgtcgtgcttttattatcaagaacctgccaccggctttgctacttcacaccgacgccgtgccggtcttatccctttgttaacacagtatcgtcactagtattttagcataaaatggcgattaattaaggagtaataacatattgttttcagccaaagttttgatgcattatgttttatttggatggctactgttgaagatacatgataactagtcgacattttgctggaacttttggtgtcatttggtacgagttctacttatgatatactccctccgtcccaaaaaaaaaaggtaaaccttgggtatgaatctggacatacatcatgtccacattcatatctagggtttgtactgaaagcatattaaaaaaaagaagaaatgcagtgcgcacatttgtcatgattaggtggccagttgatgtgcttaactagtgaatcttaatgatagattaggtgcagcgttgtatgggccctgatttttccgatgtacgtctatctctattcttatactttattcgtcctaataaattttataatggtatctttcagtatatatt

SEQ ID NO: 43668 - DNA, 676 bp, Oryza sativa
atccggaacacatgttcacagcacgcagggaaagtgaacccagtctctgtttattccaattcattcttttatgcaataataagttcaaactccatctctgacaggatcaagaagggagaatggcgaaacatgaccaattattgaagtttgagcatggagaattttgcatgtgccctctaaccacatgaaaatgtaacttgcactctagtaaaaatacttgctgcaacatcagttagcatgtaaacgcttaacaaagttaactcacatcacaggagtgacagagtgatgtactgaccatacttctgtttttgatttttttgcaaaaatacagtccgtactttgtagtgtagaaattgaaatgcactcttctatactaaatgggaagtagcacttttttttattcctaacaatatttggaatgccttaactatgaaaatcccagaatagcttgaaagtcacttatcccagttcaacaaattccatgattaactaccagctacttattagtcaaacatatgaacctacatggtactttggaagcattaaccggcctcaaatacacctaactttttttaggactaatacacccaatcctagcttggaaacagagcacgcattcaacatgcccaaaaggtagttagtatatctaatcaactatgctagatacataatgaaa

SEQ ID NO: 43669 - DNA, 661 bp, Oryza sativa
gacggcggcggcagcgatggacgggcgcagcggcgacggcggcagcgggcgcggcggcgacgacggcggcggtgagggacgggcgcggcggcggcggcggcaagggacggcgacggcagcggtgggggcgggcgcggcggctgatggcggcggcgatgggggacgtggacggcggcggcgggggacgggcgcgcgttgatgccttcagccgcgtcgcatggatgagaatcgcatctgtggaggaggagtatcctgctaggggacgggataaccctagcattcccgtttataaattgagggatgccatatatctggttttgtggttggggacgttttgtaactcgatgacaggttgagggaccttcggtgtactttttccacaactcgcagggcgacagggtctagcagatcaagcgaggccgaggcccaatcgagtttgacgagccggggacgcagaatccaactcctcccggtggaagtcaggttgggctaggctggctagccaagagggcttgtataggtcctgggacgcatcgccctgcttcggccagtacggcgtcaacttctccgcggatttgttcgtctctcatctcttccgcacgccgctgctcctctgcctgttcgtccatctccgaattctcttctcctttcgactctcttt

SEQ ID NO: 43670 - DNA, 849 bp, Oryza sativa
agggcgaggtccgggacgcggagggaggcctcgaggaactcggcgaggacgagctcgtcggccgccgcggagcgcgcgccgcgcgccgtccggatcggggtcggcggcggcgcgcgcgcgggggcgcggacgcggggccgccgcggcgccctggacgtcgccgtcatgccgccggccgatcggcagatcaactcggctgcgagcccgcgacgcgacgtgctctcttgaggttgggtggtggttgcgtgggtgtaaagaaaaacgtggggacgggaggtgaccgtgggatgcgctggtggacggtccagatggagtccgtggtttggaatcgtgttaaattggtgggaaagtggaggcacgacggggcaggctggctggctgacgacttgacaagagagatgggaggcagtatggcgcaaaggtggcggtggccgactgaccggtggggtcacaggctcacagcctgaggcaatgtttggctaaattggaaatggaaatgatttcccacccacaaaaaggcatcttatatggtgtctgattcaagttggacggccggatcagattcacaatccatcgctatcgtcggattccgcgagataaactgacataagccagacaaatctggacaaaaaatgtaaaattcagttacagttttttaaaaagcttgaaccaaaagccaagcggtttggcccgatcagcagagtttcgtgcacaaagatggcctttagagttctggattttggtcaggaacgtacattgagcatccattgtgtttcacttggctgaatataaagaaaaagtaacatactcgggatttaggagaacatacgatgttgctctcacaagcat

SEQ ID NO: 43671 - DNA, 1092 bp, Oryza sativa
cggtacataactacagtctacatatatacctgatgatattgtttaggatgcctggttgagagttgagacgggctcacgcttctgctgttgcaagccaccgtgtctggctggtaagcagagggaagagcttgcaagtgggttggtccaagtggtgtaaagttttggttctttttattgacatgccattctctacaggagcactgctgtttttgctccattttctcctttctcttttctccttacccccacatctgttattatagatctgtgtaaactgtaaacttatggccctgcctttttacagtagattctttgatagatctccctccggggttacatgcagtgtttgttgttttgtgtgtaaatctggattgcacattactcttctgtactatccattaggccatcagcaatgggtaccttcgacccgtcccctcacaaacggccgtttccctcccgtcctcttttcggcgtgagccgtctccccagctaggagcgcgtctactccttgggagacgcggctctatgcaaggagcgctcgcttttcgcggagagccggccctcgcccctgcgaggagacccgctgcgaactcccgtctcctcaccgctccccccaaatccccttcctaccctcgccccctcgcctctctcccacggcggcgcccactcgtcgatccgctccaccggccgccatcgaccggcgggcggggaggtccgcgacggcagggaggagctcggcggccttgaagaggaggagggcgagccagtcgtcggcgaggcggcgctgggcggaggtgccgggggcggcagagtcgagggcggagtcgatgtgggagaagagggtgtgggagatggcgatgtggatgaggaagaggagggagagcgggaggacgaaggtggcggcgatgcgggcgaagagagggcggtcggcgacgatgatgatgagcttcgtcggcgacggctggagggagagaggggagcgggaggagggcgaccggcgctgacctcgccggcgagccgccgccgtcgctgcccgaggccagatccggcaagcccaggccggatctggccacctcgccgccactccgacga

SEQ ID NO: 43672 - DNA, 677 bp, Oryza sativa
tgctgccttccacgccgcgacgccccagcaacacatcgctaccatgccatcgccgtacaaaccgggggcgcatcgtggcacccccggagcaaacaccgccgccgccattttagccgccgccgttgcatagccgtcgtcgcccgccgctttgccgccgtctcccattgcttccaccgccgccgcacgacgccgtgccaccgcccgccgtcgtctctctctctctctctctctcttcctcccggccgcctccctcttttgcctccccggccgccgccgttccattcccggcgtcgacctccggccgctgtcaccgacaagcaccagccgccggggctcctccctctcctctgctcacgccctctctccttctccctgtgtgcaagaagaaagaagagatgaagaggaggattaaaggaggaatagagctgaaaatccttcaggggcaaattagtcattttccccacatgtcagagctatggaactgttaagttctaacagaaggtggacggaatggcacacgggtcaacgaaagtttttctcatgacatacaggtgactctaaacttttttgtggcacacatgtaagtagtaacttttttttaagttgcataggggtcttggttctccttctcctcgcgccgcctctactcactctggctcaccgcccccctggatctg

SEQ ID NO: 43673 - DNA, 752 bp, Oryza sativa
cttgttgggtgtttcatttcgtttggttctgtatgtttgtcgtcgtggttcatatgttcactgctcatgctgatgcgagttcttcgtttctgaaattcaatctggataagttcattgcaggctttaagttgaaaatactgctataatgtttttgtttcactgtattactcctatatcggtaccatatagtatatcggttgaaatgttcaaatcactctgtaataatccgtgttatcgtgttttctgcagatttccggacacgagcaacagcatattttggcgctaatcaggtgagttttgcatctcctcccccttgctatccactctacatgcccgctaccataagttcgcatcgatcaatgcagttcaacttcaaactgcaaaatgatgaaacgacgcgatttattgttgtttatctggccctcaatcatctttcatcagttgttgattcgcgatcgatgacaagtcgaaatcaacacagaacactaggcaacctcacagggtccgcaatggcagtccccattagcgcgcacagtcacggccatgaaagctggcgtccttctccgacagccgttcaacgccggcggtcccatcgccttttgaccatacgtctctgccgatcgatgcgtagtagtacatccaaacgtagcacgccggcacgccgcgcgtcacagcgatacgtgaaaacggtgaaaggttgaaggacggtgatacgtaaatccattgtgttttgtgttgtagcaggatcacag

SEQ ID NO: 43674 - DNA, 630 bp, Oryza sativa
caacggagaagagagttggagaagaataccggttcaatatataactattgtagatttagcaggcccaatgtgaaaagatagatttacctctagtccaatgtgcaaccaaggtaaatattagtggtccaatatacaattaactctaaaaaaaatcaacctaataatatatgtaatatatatttgtttaaatctgttgtattatgtggtgtcatataataatagattcgtttttttaaatggagggagtacagtttgagtgcacagtgtgacttaattatcgtctgcacatcggaaaagtatgtttgcaattatagctcagcactcgaattatctgtttggactcttggaattgaattgatcaatcacccgtcaattgatgtttgatcatgttttcaattgggttctaatccctcttcattgtacgaagatgcttaaacagagagcggatcatctccacaaaccataaggagcccggctttatttggagcgaaacattttttttctcagaaattcaacgggattgtagagagaatctactatacaccactgactttagtctagttcaacaatctgccactgactttgtttaattccataatatatcatcactttttgtttaacttctatgat

SEQ ID NO: 43675 - DNA, 1527 bp, Oryza sativa
atagaagaaaatgagccgggcaacctctgtaacatgttacagtatgatatttgtgaattttcaaccaaattctgaaagttttcatcttaggggtatttttgtcattagaacaaaattgtatggtactaacggaggctaacttgacggcgatggtaaattatagaagttaaacaaaaagcgatggcatagtatggaactgaacaaagtcagtggcagattgtggttccagggcaaagtcagtgatacaggatagattttctcattgttttaagacaattcaacaggaatacagagtatctcgactacttaggtactgttaatacaatataaaagcatgtatacaaaccagaaatatttagggcctgtttagatctcctggcaaaagtttcatcctgccacatcgaatgtgtagacacatgcatggagtattaaatataaataaaaaataactaattacacaaattacgtgtaaattacgagacgaatcatttaagcctaattgctacatgatttgacaatgtggtgctacaataaacaattgttaatgacagattaattggacttaataaattcatctcgtagtttacaggtggaatctgtaatttgttatattattagtctacgtttaatactttaaatgtgtatctgtatatccctggatattattaatctgttatattattagtctacgtttaatacaggcggtctatatcctatgtgacacgtcgaaacttttcatccctggataaacagggccttactatatttgttaaatagtacataaggtgtatatttctatcctatgttggcaccatatcgacaccaggccatcagctaatgcctgttggtaccggatcttatactgattaaattacgaaattgctagaattgtatcgacacattttctcctccatcacagtcggcgttttgaagcgtccgatttcctttatcccgtgtcaatgcgatcctgtccgtgcatattgctatggcaggctaacgttgaggctgtcaacatgattaattgattaattaaagcttaacgtcttcattagttcaaggttttacacgcatgcatactatactttatacaaatttacaccccacttaaatcccacttacacaccacttacacatataattactgtgtaatttttagacttacatatgtaattttgaaacttacattataaatacactaaatttacatatgtaatttagggacttacaatgtaaatacatgctaattattttttgatgaaaaatatgacgtcacaaatatagctactcccttaaattaagaaaaactaaaacaccttactcgtggtcaggcaccaaaaggactcacacgagttggtgcacaagcacaactgcgcactgctgtaaggttcaggcatccgaagacattttgtgtctcctcagctaccgtaccgtgggtactttacttccccgtcacttgctaatttttacagctcgctcaacgctctttaaagtttacactccgactgttcaacggcggggagtgcaagt

SEQ ID NO: 43676 - DNA, 557 bp, Oryza sativa
ttcgccgttcttttcgtgccggtgctgctgttagtcggcatggctgtgtacaccggagcatcgatggaggagcagccgccgaactcgccgcacgacggcgggtacgatgaggcaaccaaaagcacctttgatctggccaccgttagtacaatggctgcattgggtttgcaggggaccatcgtcttcggctacctgaaaacgcccgagaagaagagcgaacatgatgaccctccactggacctcgccgtctgctacatcgcctcgacggtctgcctgaccgtcatggcggtttgcgccatccgctggctcttctccccgaagaaaagcggaaggctctggtcggaatcatcggcagcctcaggcacgtcctgctcgcctctctggcgctgatggcggtggttgtctccgtcgagttcttggacggcttcgtcgtgctctccgtctggccggaggccgtcgcgctggtgctgtactacgcggcacagctctgctcggggcggcagcccgggggaggagtcgggagccggccatggatcgaatttgtcttccggattgtc

SEQ ID NO: 43677 - DNA, 585 bp, Oryza sativa
cgaggtaccatgaggtaccatttttttattgtaaatttgatatctcttgatacctaggtactgtgaggtatcatgagtgaccaatttttacactaaatttttagtacctcatggtacctcctcaagtaccgtagaattactctcagaaggactcattttgatcggttgcaaacacgtagtctcgcagttaaaaaaaaaaccacgtagtctcgtgaaataagcctagaattgatcgagtcgagtacagttcattcagaggggaaaaataaaaggaagattacgatcgtcgattgggaccgaaattccgaacggaattgcaattgctgaggtttgttgacaggcgactgaactcaattcttgtccggtgtttccggctttccccacttccttgaggcacaactcagcccgccgtcaattccgagaacttatcaaatccatgatgaacaattgcgacgttcgctttcgagcgggcaggtccatggagtgtaacaatgagagaataaaaatcgacagtgtaaggcaggaaggcgacgcgttactgtgcacgatgcggacctcgaaacgctctagtacacagcacacgca

SEQ ID NO: 43678 - DNA, 1326 bp, Oryza sativa
ccgtcttatttaaaaaaattataaaaaaaataaaaagacaagtcacgcataaaatatttatcatgttttatcatctaacatcaataaaaatatgaattataaaaaaaatttatataaaacggatagtcaaagttgaacacggaaaaccagagtttgtctttttttaggatggagagagtacctcagctttgtcatttccagattcagcacaacagtattcaatgcagaatagtagcagcctactgtatgtttgcttgcgttccaagtgctcaccagacaagctactagaagagaagcacactgctaagggcatcagcaatgtgagccactactagaagagtgtcctcattaaccgaggagggcactcatagagggctatagagtacaacctcacgatgtattatccccctgagcagtggctgagggcactcatagagtggctatagagaacaacctcacgatgtattatctccctgagcagtggcttcaaaatccaaagcaaccgggtgggggtactcaggccacagtgggtgtcctagtccacagtagccccaggtggcaaattcccgaaataccctggaaccctctagtcaattccgatcgagacgagcccaaccgtacctgtgggttcgttcgttgccgtttcaattcgacaccaatcacaccacacggcgtcggcgacgaccgttctctctctcgctcagtgtctcccccaaattccaattccacatcatcaaaaagcagagttcaaacacagtttacacacaaaaatgcttaactgaaccaaacatagtactacatgggagtaatagtagtacacaaggaaggaaggaccaggcctaatacttgctgatccatccaacaacttatacgatccattatctaagaaaacagcttatacaatcaaacaaaaactccttaagaccaagccaagaactagaagaaaatacagcaagcatcacaaactagtaagtaagctacaggaggttcttacttaaaaaccttaacaacctccttaacctgaaaggctaatacgacttacttaaccacgcgaaatcaagatcgagcaagaagtatggatggattagtgcttactctaatatggcaactaatccaaccaagacaggggcgagaggaagagatcaacaagagatttttaagtatgaatgtcttcatacttagaactaatccaatcctcgtggtggtgttgctcctcgccgtgcggttgcaggtgcgggtggtggtggtgcttctgctgctcgcggtggtgggtcggcgcgaccatcatgccggtctggagcgcgtcgacatgggagccgacctcga

SEQ ID NO: 43679 - DNA, 659 bp, Oryza sativa
tatatgaattagctattccgttagctatagatgatttggagttagcagtggactatactattaaacttgctctaaaaggcataaccgttctcacaattgtaaattgtaatgcgccagcagagtaggctgaagattgaagccactattgcaccatcaggcaaagtgactatccccagatttttctgtcggctatgtaaatcatgtaggactaggagtatacaagaatcaatagtaggactagccgcgagtaactttacttggtaggactaggtaatatagattagtgcagcaattaatctagtgcatacatgcttgatgccaaaattaccagtgcgaactcccaatgataagctcagatactattaggatttaggactaggatatagcctgacgcccatgggtgcttgcaagggttcacaccttcacatggcaatatggcataaacatggccacgtacgtaggcgatcaaaaaaaggtgtataaaaatcgaaatcttcagacaaactgcaggcatgtttgtccaagttcacgttttttgctctgacaaacctgaatgggcattcttcgttcatctcctctgcatatagtactgttctttttcctgtgacatgtggcagagtgacaggtggctgcaataacacgtctctcgctgactcgct

SEQ ID NO: 43680 - DNA, 637 bp, Oryza sativa
gatgatgcattagcaggtccatgtttgagggggagggcaacggctcaacctaaatccgaatagtctcgtcactaagagtgggtttagcagggaccaaaccaactgatctatcatccacctttgtatttttgccggtgtagttagcacgtaactggggtggcgatggagcatgacacgaaccaaaaaggatgggtgctcacatcacattcgacacaaaatacttttagaacgaggtatccatcagtgtgcttctagaaggccggagttaattaagtttagcaagaacccttgtgcatgtcactgggagtgacagggtaaattaagctcacgaagtgacagggtgataagtgacatggacgtcgcacaagtgcagaacagaccggccagtaggggattaggtcccgtgtccctttgtgtaggcctataaatggtgcgcgaattgcgtatgggtttggggggcaatcggtccagcccggtctaagtttcgcccgagattgcgaaagatcaacagtccaaccggcgaccggtcgattgcttgcgcagcgcgctcggagcaactttgggttgggtccagattagagaaacactttcgatcattccatcgatcggcgacgtgcaaccaacctcgcatgcacgt

SEQ ID NO: 43681 - DNA, 1390 bp, Oryza sativa
ccccgggacgccctgtgatttatggccgagtttagtttctaacttttttaaaaaatttctaatttttttatcacatcaaaactttcctacacacataaacttctaacttttttttcaaactttaaattttaacgtgaaactaaacacaacctatgccaatatgccatgtagcggctactgtagcaatcgataccgtgcaatgctgtcgcattgattgctcggctagatcagatggctgtggccggcacatgcatggatggccggctaggggaggaatgcagattttctcgcacaaaggtccacacaactgtctcgtaaaaatggatcatgggcaaacagatggtagatttgtagtaccacttgtactaaatctaggcgtccagcgcgcaatgctgttcgattgggtaaatttaagcctttagaattgcaggttatatatgatcatagccagggttaggtggggaaaaaaaactgtcacaaccaacaagctgttaaaccgtgttaaactccccccggtttgaagaacttcaagaattccacccatcgaaaatgacctatacctaatccttctatgggtattaacgccaatgattgttgtacacttgcacgtaggatgtctgtactagagctatgacggtactttaataaataggagtattatggaaatatgggcagtccttccggctgcacgctgcgaactaaagtactaaacttcctgaatgctcgtcacacaaatgaggaaaaggacttgtggagttcagaaggtagcaagagtgtgacacagtaatactattatgttcagctggactgcctggacctggacacaataatactatgttcagctggctgatggaagggaattcttgaagattcaaccaagaggaagaaaaatgggtaaaaacagagcgggcttgtttggtttagtaccctaccaatatattgttagtgccaaactctaggcaagttaaatgagtgtctttggattgatgccaattgagagccaaattttaaattgtggtgaagaacattctagaattgtgctaaattgagtataggcattaccaaatatttggctttaaaccaaatcatcacatttactatttaaactaccaaaacattggtatggcaatattttgatatcaaaccaaaacggcgcagctttaccaacaagaacctcatcttggaacaaaaattaatatttcgttaattcggttcaaaggttcaaaactgagtgacaggtcctctcctttccctcaacaatttgatgggctaaccagcgtgggtttgaggacttactcattttatttatttgataggaaaaaatgatattaggtaattttttaatatttgcatttttaacctgctctatgttttaccattccaaggatta

SEQ ID NO: 43682 - DNA, 501 bp, Oryza sativa
tcccctaaatcatacagctgcccaatttcaaccaatgttttacctcatgcaaacctctccagaattgagagcatccctcagtactagactggaaaaagcctcccccgaagcagataaagattaagttgatatacgtaaaacgagaaaactattagcatagaattaattaatttttaatattacaaacttaataaatgtatatttttctcacgtagtaatggtgttagatattgcaacaattttataatccattgcaacaaatagaaatccttgtagtgaaaacaatttctatatagaaagttttcacaggaaacataacatttattagtttaaaaaacgtgctaacagaatcttaattgatgtaatgtgtatgtgaccaggccgattgatccctgtcgcggatgttactcatcctgcatgcgctgccgatcgatcgacgagcgtaggtacgttctctacgtcgttgcctcgtcgctgtttgttctccatcgatcgggttca

SEQ ID NO: 43683 - DNA, 519 bp, Oryza sativa
gtggtaaaaaaaagggagaaaagaaataaaaaaggaatctgtccgattccttaaaaaaggggcgcaaaaaaaaccaggtgaaaaaaagaccggccaaaaaaaacgaatccgcgtggatgcggtaaaaaaaagagaaaaaaaaaacaaatctaaaaaaaaagaattatatgtggtgcagtaaaaaaatcgaatcctattatatttgacatggtactatatctctattttctctatctctactacttaaaaaaattaaaaacgtttccgttgtccgtaataacgaaagaagggcgaaaaaaacattaaaacagaaaaaagaaagttcgattcaatttacttccattgtccgtaaaaatcttatcttatcttaatctcaatctttccaaggggacgagcagcaccctccatccccgcccgcgcgatgaaacaccagccaaagaaaaaaaacaaaattaagcagagggataaactagattgaagttcccaaaattaaaagaggataaacgatattgaaactcc

SEQ ID NO: 43684 - DNA, 727 bp, Oryza sativa
aaaaagtactaacctgctctgaggaaaagctcttatacaaggacggactgttcatcacttaaagaggatgaggaccaggaactcgcaactgcatcggtactgaatactgatcgataccaggtctccaagaaacagaaaataaaggaagagagacaactgtgaacatttacttgatggtactaatatgttgacctgtactgtgcttgagaagcaaagcttgtccaacattagtacgcgagtcaaggttagtatcctgattcgtatattagtatattacgatactacgattttatcaaaccgaaacgataccgcgatatcctaattttgatagtatctcgatcctactattcattaccacacgatcctacgtaatcttatatagtatcctaattctacaatccaacaaaatattatttaaaatatgatagtttgaaaataatgaaatatgctcaagtttatatataaaaatcaattaaatatatcaaaactaatgtggtttttcttaataaatatctctatttgcatgacatatattattactatattttttatatagaatggctatatgtaattaatataaatattaattaaacttttaaaaaaagaaaatctcttagtatcccgatcctacgatacgatactactttgagcaaaactatattaactaagatcctaatactgacaaccttgtcgcgagtaactcaatttcttgtaaacacacacagag

SEQ ID NO: 43685 - DNA, 683 bp, Oryza sativa
agagtttataattttgttgtttttttaacttgttgaaattgaatttgacattgcatgtttatggaatgatatatatcgtattaatatttcttgtcaatttgttttaaaacaatttgatagttatttatgtgacatgcaagggtattctcccgagggataaaaatccatctccttttagtagttttagtagttgtacgtgccatgttacactaccttttaactatttcatctaaaatttatcatttgcatataggacgcatgaatcatttgaagaaatctagtgggcgtgttttaaaatcttatgcacagtacaaagtgatagtacaaaacaaggctctgtatgggccgacatatcatttcttcacgtgctcttattttagtatttccctcaataatactatgaccctgttccgaagtctgaataccagggtattggtcatgtagaaatgataggacatttcctatgtaggccagattacttgttcttaatttgtagctcaatacttcttcagatgcatatgagttattctagttttgtattaaattaaactcatccaactcggcagagtttataaaaaaaataaaccaacatcaaatcagttttattaaatatactattaaagatatcttgatagtgcatttttttaagatattagcagaattttttactacataaactcggt

SEQ ID NO: 43686 - DNA, 670 bp, Oryza sativa
aaacttcttaaaagttgaccaagtttatagtaaaaatatagtaacacttgtggcaccgaattatttacattgaatttaacattgaatatatattttgatagttgttttctttgtgttgaatatattactatattgttttataactttggttggacattaatggtttgattaaaaaaaatcaaaacaacttctatgatatgaaacagaggtagtactactaaattgagagtgcaagatgagctcatcaaatcatcaattaaacatcacctacgacttgctaaatactaattctgaatttaaagtgtgattaattgataaaaatactaaaataaaaatgaaattcaaagagtgaaaattgatatttatattaatttaaagtttgagattactaagttgcagtagaaaataataattaagacacatattggatataacattttattgcaaattttaggatcattaggtgcttggcgcggctggccaaagccaaagccaaaaataatatgtactgaaaataatatgttatttccatgcaaactgtgcaattagttttttgtttttatctatatttaatgctccatgcatgtgtttaaagattcgatgtgacatttctgggaaaaaaattgggaactaaggcctggtttagtttccaaatttttttttcccaaaa

SEQ ID NO: 43687 - DNA, 647 bp, Oryza sativa
agcaattcagcatacagaaaaaaaaacagagagatacttaccgccgacgagaggcagcaattaggtagaagagagagtgaaaattaaaaaaacaggcgccggatacgttggattgatcttaaacgattctaccttgcctcgattcaactgaatcaaatcgataatgtcgaaatttgggttggagactgttactcggtactagcagaggtagagggacagatggcctgatttagcttggagaggtggtcggcgaccaggtacaaaggccccgatttagcttagagagggaaggagggaaggtggcggactagcggcggcgagtagcggccgtcggcgaccggagagagcaagacgatcgttctggcacactcacatctaaacaaatttatgaggcaaaatttcctgcaggtattacctcgccaaattggaagttcacctggagcagcagagcactgttgaaggtaaaactgtttgcttggctgctggttcgaaatagactgtccacaatgaaaaatctcttgaagaagaagattgttcagtcagcgtcttgcgtgatctgcaacagtggcgacgagactgcaaaccatttgtgcttcacttgcccttttgtggtcagtttctggacaaatattggagtgcaaccctca

SEQ ID NO: 43688 - DNA, 670 bp, Oryza sativa
tgttgataaatgataatattaatgacaaatctaatggagtcaaacagtagtatttcttcgctattggctctgcctcttatctgtaggatgtagtagtgtccaatggtactacaccactactgttgtacgtgatgtagagttgaagacttcagtacaagtatatgacgacgtgtcaagttagttgagcatccgagacattgtggtgcatggattaatcattaatcaaaccgtaatttgacaagcacctaatttggagtctttgattgatgctttttttttgacagtttgattgatgcttattgaatgcgcgcttagtgtggtaccgatgcaatgtacgtactaccgcattgcatacttaaactatagtcatatttcatcttggcacacagaccaaagtaattctacttatcatccatttaaatatgctaccagttattccttgtaaacaagcgattcattaatatttacatttctcgatgcccatgtagccaatcttgtgtggaagaatgtagagtcacgcattaaatccgagaaagtcattaagaggataggttgttggattgaaatatgcctatcaaaaataatttttttagatttagaaatatgactatcaaaagaagatggagggagtagtattcatcaatccaagccttgtggacccatcgtttta

SEQ ID NO: 43689 - DNA, 1125 bp, Oryza sativa
tgcatcgaatagcagaagtagctagcacccggagagcaggaaagctaatatgaggcagttggtggcaagttagaagtaaaagacaagcatgatattctcatgatgacaagcatggtatcctagtaatgacgagctgatctcgacgcataacgtgaaatgggtaacttctatgaggttgacgccaaaaatataaactatgcgaagttctggaactgaagcaccatcttcaagtgccgcaacccagtcgaagtcagctaaaggttcaaccagggacaagtcgggtgaagagaagattccatctgcaacaggagatcgagccaagcagtccagagtggagaagttttgttaggcaagtttgttatagaagacggagcggaagaagtcagacaagaagagaagaccgcccaacctatcttcatgctagcctcctcgaatctcggggacgagattcttgtaaggggggtggatttgtcacgtcctgataaattcatcccgaattaaaaatcattcgctaaaaggaataatagaattaattaaaattcggaaagaaattggcaaacactaaaatacgtacaagaaaaattcaaatgtggcccggagaatttttgttaaattctccttggtctaaaaggagccctcaaattttagtggaattttcagagcacaaataataattattaagaaataaacaaagttaaaatgtttttataaaaagaaaaaccctaaaaagttccctttccctccccctccccctcttgggccggctcggcccagctccctccctctctcccctcttccccgcggcccatccggccttcccccgcgcgcgcgccgctgacgggcgggcccgcccgccaccctcgctgacgggtggggcccacccgtcatcccctacctcccgccgctcccgccgcctcgcccgtgccctagcgccgccgccgccgcaaatcccgccgctcccgccgcccccgcgtgcaataaagtggggggaatcattccccgtgattccctctccctttccccccatttttccctctctctctcgcgttcaaacgggcggatttgcccccgcaaatctcgccggcgccattgatggagcccgagatcgccgcgccggtttccttc

SEQ ID NO: 43690 - DNA, 730 bp, Oryza sativa
ctgggtggcttgggacgagctgggacccaaggtcggggtgcccagttcggtctgaatcatcgtaggcctggggtaaggcaggttcgtgtgggttcacgcccttgaatactaatactgtgtagctctaggatcgtctttataaaatggctttgggcaactaagtgacttttaaatgctgtttactgcaaaacttaaccccgatattattaccccttgtacccccttgcattaatcatgcatctgccagtgtggcttgctgagtactgtggttgtactcattcttgctctatctttctccccccttcagtaagagaagcttcggagaagatgtcttaggtggagtcttggcttataccccagttgagcgcctgtgaagatggagccgtaggcccgctagtccgctgctgtttatttttgattgtcaggcctgaagtgcctttgtaataatgtaaatattgtcgatataataaagatgtgccttttatatcatgtttgtttggtgtaccccggcttttcctgggacggggattaatacactagcgttcgggaaaaggcaattttctcggtcgcgacaagatggtatcagagccatctcgactgtaggataagccaagtggataaaacctaaggacatattttataaataaaactatttgcgaaagttccttttttctccttcccctaatgctatttgcaaaaggtttactcccttcttccttattcggatttc

SEQ ID NO: 43691 - DNA, 985 bp, Oryza sativa
catatggtggtaagctggaaggtaacgccaagcgtggtattctcccgatggcaagcatggtatcctagtaatgacaagctgatatcggtgcataacgtgaagtgggtaacttgtatgaggttgacgccaaagatatgaattatgagaagttctggaactgaagccctgtcttcaagtaccgcatcccagtcgaagttagctcaaggtgcaaccaaggacaagtcaggtgaaaagaagattccatctgcaacaggagatcaagccaagcagttcagagtggggaagttttgctaggcaagtttgttataaaagacgcgacgaaagaagtcagacaagaagagaagaccgcccaaccaatcttcttgttagcctcctcgaatctcggggacgagattcctgtaaggggggtggttttgtcacgtcctgagaaattcatcccgaaacaaaaatcattttctaaaaggaataatagaattaattaaaattcgaaaagaaattggcaaacactaaaatacgtacaagaaaaattcgaatgtcgcccggagaatttttgttaaattctccttggtctaaaatgagccctcaaattttacttgaattttcagagcaccggaaatatttattaagcaacaacaacaattatcaaagtttattaaaaagaaaaacctaaaaataatcctccttcctcctttgggccccctctctctctctccctcggcccgcggaccaagtcctctcttcctccctctctttctctccctctccttctctccctccttctcttgggcctccccttcccctcccggcccattcccttttcctcccctcccgcctgggccgcctcccggcccaagctgccccacccagccgccccagcctcctgagccgccccccctcacgcgcgctgaccgcgcgccccgcatgggtcccacgcgccgggttgtcgtcctgctcccgcccggcctccttcctctctctcccgtga

SEQ ID NO: 43692 - DNA, 1347 bp, Oryza sativa
ttcccgatggatcgattgctaggaaagtgcgtagaacgatactagtgcaattgcttttattctggtagcatctgatacagagcccaaggttgaactgagttttggattccaactgtttaggttttacttcttgacttcttggtcatgtcacaaaagtttccatccttgtccccatagaagtacttctacctatggtcatctcgcttactcgtgaattcacctactttaatgacagggcaactgttgtagggttgattgctatcgggagtcttcttcgagtgacacaaatcatgttcctcattatcctttatcaatcacctttcgacctacttcttttcccagcaaccaaacatcttttccaatctcttccattaatcacctttcgacctttctcaaccaggtactcttcactccgggtgttgaggatacttctggggcgatgaggtccttgggcgtgctgtctttcagagaaaccttgaagtagttcgtcaaaagctagactgacgattgttgcctttgatccgaataagacacatctgaaactcttagtccaaacaaatgtctctttggttgatcacttgattttcttcgccatcaatcgtaggttgttttgaacagattatgagcttacggaaatgagaccctaggtctccttaatcaacaacaaaatgtacacaactcacagtacttgcaatcttaacatggatccttcataaacttgtcaaactcattcattatctcatgttcctctgttattacatgattgacagggaacagctataaaacaaaagtacttgaacaccgatataagagtattatggttgctattgactagcactaggcttaacaggtactgcatttgctccagtgaccacttggcgattggcatgtttgcttcctgtaaattggcgaaaatgtgggggccgattttgccttggttgaggacagtccctcgagtaatgcccttcttcactacagttgtaacaaacaataactttcttacactcgggttcttcatcttgtacttgatttatcagctgctgtattggaacatccaaaggtacaacgcagatactggcctctgtctcgtcagcaggtggatgggactgaaatggtgcattgacaccttgtggtagtgcactcgttggagttggagctgttgcaacgcgtgctataggactgcttcgggatgcatggatgacaattcgctgaggagcaagcttctgattgcggggagttgcgtggactgacgtgctggcagccatgtttctcggttttgggcacttgtcagcgaaatgacccatttcttgacaactgaagcaacagatatctttccggactcggcat

SEQ ID NO: 43693 - DNA, 608 bp, Oryza sativa
ttgaaagtttaaaaaaaaaattgaaagtttatctgtgtaggaaagttaagttttaatgtgatggaaaaattgaaagtttgagaaaaaaagttgggatctaaacaaggactaaatttcaactccaaattattaagtcctaagttggaggcgattccacttaatgtctacccaaaattgatgcgcctcgtgctcagcgattccattatactccctccgtcccaaaataagtacaaccatggttttttgcgcccaactttaaccattcgtcatatttaaaaaaattttgaaaaaaaaaacataagtcacgagtaaagtaccattcatgttttatcatcttataacaacaaaacttctaattataaaaaaatttcaaataaaacgaacgatcaaagttggacgcggaaactcatggttgcacttattctgggacggaggtagtaaaatttagggctgtgtttagttcacgctaaaattagaagtttgattgaaattgaaatgatgtgacggaaaagttggaagtttgtgtgtgtagaaaagttttgatgtgataaaagagtcaaaagtttgaatcaaaagttaggaactaaaccagtccttaaagcgaaact

SEQ ID NO: 43694 - DNA, 1334 bp, Oryza sativa
tgcatatttccctttccaattgcattctataaaacttgaaaacaacataaaaatttgtaaaatagaaaataccaaaaagataggataggtttgagtcatgctaggtaagacaagctagttctctttgttgaaatgatgaatagttgctctgttttatatctctgatatataggttcttggtaaatactctctcaaaaattgaataaaagtagccaacaattatctgggaacctgagataaatgggctgcacttgctaatctaagtctaagctgttgcgagatatgagatagtaaatatgagttgctatgatcctaatactagtttggcttgaattctggatgttttgtttttcaaaatgataaattgaaagatcctcatttgatataaattcctaccagagccaaaaatgtgctatcatgattaaaccatatacattttggttacttgccattctattgaactttgtcaaattcttgtgactagtgtagatacttcccatgctctatgatcaagatcatacacccacttttatgcacatgctaaactcctacactgggagctaagcaatattccattccatatccatattaccaccaaaataaattctccatgcttttatgtgctttcttctcctgaaaagaaaaatccttttgaaaaaaaagaaaaaaaaagagaaaggagagaaaggcatggttgtgaaaaaaaaataaagctatgctccatcaagcatgagcatgatgttgaataaaaagaagagagaaatgtagccatgccctctcctaatcaataaaagaaggattttttgggagaagaaagtaagcacaaaggagaagcatttttcttttatttttcctcatacaccatttccactatataccacacacattatgcacgatcttgatcttgagtatgtttagttatctgcattagtctaagttttttacttagtaacaaatgtgaatgcaactatgccatgtttgatccctaccgagctccacatataaaccttagagtaggaatcaacaaggcaacatttggtgaagaattcatgttgatacacttagagagactgagtgaatcacttgaggaacttggttttcttttccaaaatcatttgaaaacttccagaacaagagttgaataaagattgggtgaattggtactctaattgctattctgtctttcaactgcccaagacaaggagaagcagtgtctcgtgggaaccaggggtaagggtaagccaccgtgccaaagattatttaatccgagagagagtacatataccttgcacctgtatctttgagatatgcagcatagtagcaactcctgatca

SEQ ID NO: 43695 - DNA, 793 bp, Oryza sativa
gaacgggtcgattcgaagctcgtatgaccaagatatgatcatccgaagtttaatgctgtatatggagattggcggattattataattgagctttgcaactataaaacaggtgtaagcgctagcctggaaaagacaggaaggctgcgccgttgacatgcggaccccacatgtcaacaaaaaggaccgcggtagaccgagtacacagagacggtccaagggtcgatggaagcggatcccgtgtgtcaaccgaggcgagtggccgacaaacggactccactagacaccacacgggttacacacgtggaaaccacgtggctaccgagcgggcacactaacacggtcaccacacgcacacatggacgactactgacaccggtgcacgggtaccggggccgacaaccgcacaacgagcacgggcgacgccgaaaggacgaggacggggcagcgagaggacggatccttaccaccacgcgacgagtcgtgggaacgacaacgacgaacgggcgcggcggagacagacgggcacaacggagacgaacggcgaggggacggcttcggcggcgatccttggacgaaggcgagacgcggccggcacgaggcttgacgacgcggagccgaggacgaagacgacgacggctacagcgaccttgatgaaacaccgaggacggacgagaacggctcggcggagggacgaacgccacgacgaccgggagcgacgagaggacgacgacgacgacgaccggggccggcgaggaggcgacgagggcagccggcagcggctgcacggaggcga

SEQ ID NO: 43696 - DNA, 784 bp, Oryza sativa
gcaccgcatctgtctcccccacctttcctttctaggcaacccctcctcccgtatcgttttcctccctccccatcttttttctgtttttttttcagccgcccctagcctcctcctcctcctgtttagccgcctcctccaacaccctagccgccgctgccgctagccgtcacccttcgccgtcgtcgtcttggtcgtcgctgtcatcttatccggtgagctttcctctctcccatgtcatttaccggtgtagtttatccctagggatttaatctaatctaatctaatctaatctgttgtttggccctagcgtcgtcatcgtatccgtgtgttgtcgccggatcgtcatcgtcgaccctccctctcctgtccctttggtttggtgagatttctattcgtgtcccctcgggttaggtttagatccctcggtcgtgtcaccgccgctgttgctctaaccctagcgcagctgttgccgtgtcgcttgccggctgtcctgtgcaccgccgctgtgctagctgccttgttgccgctgcgtcgctatttagtcgctgtacgtcgccgtcgcgctgctgctgtaggtgtgccaccgcaaccgctgttgtgccgctaccgtgtgtcaatccaagccatccgatcttggtcgactcggtcgagattaatctcagccgtccaaaagcgatataaatccgttctctcttttcaatggcatattattcctttttaatatatgtcatctaccaaatatgatctaatctatttcccgttttaatcttttgtctcagctata

SEQ ID NO: 43697 - DNA, 1495 bp, Oryza sativa
cccattgctccttgcaaaagcttttctcatcctcccttccccgtctttcaacttgctttagatgaatcccttcaaggagaggttggaaaagatgatggcacactttgatgaaatttggggtgatctgcagacaaagattgatcagattaatgagaggagagaagctctggaaagcaaggcattattctaaaggaagctgagaaatatgggaacgatggttttacaagtgagctttgtcgtatgacgtatgatcttggatatgaggttccaccaatgtacactaaagtatctacttatgttggagaccaattgcattgaaagacaactgttactctcgtttctgacaaggaagatcttctccaactatcatttactagtgaggccgattgtttcttctatgctcgtgaaggagttgtttacgaagctttgtgtcgtctccggcatcatctcaaggatcgtctggggaatactatatatcactaccatctaaaacatggtgatgatttttggatgatttgtgcacatagtcgaggagaagagaatcaaactatggtacctatgactacaaggttggatgcactttatgacctccacattgattacaagactcaagccttaaatcagaagcatgcccaacaggagaaaattgccaagctatagaagatggttgaacaaatggaagatatgtctcaacctgaagatagtgacaccgccaagatgttgaaatatacagaagctcgctttgcccggtatcgcaaaggcaccaatcgtaagctcgttcttcgccagaagagaatcttcgaattagaagatgcactatggaagttgaaaggagaaccttaatcggaaagacgattatgaagatgtgaagcctattcatgttgtcaagcatctctgcactagaattatttttctcatggaaggtcgattcccgtgaagatgagtcacttgagaagcccaagttcaaatgtaaaatgaagaagtcttaaagcacctatggcagaacctaagctttaccctcaagagtagtggtctcttgtttagttagatcgttgtgttagcttgcttgcttaagttttgtttgtgtgtgtgtgggttttagcgtatggagtatatcgagggttgtgatataaccatactagtttcagtgttcagttcagtgttaaagaacaacctacctcacatcaataaaagttaaagtttagtaaaaaaaaaagtctattctattctgagtctcctatctactttcttaacccttcctttctctctcttacctcctacctaagagaatggatttaaggaaaggaagttttgtgctcattagtgccagtggttttaacaagttaacagctaaggaacaatgtgtctggatctccaaataaaattcatcctgaagctaatgtggacaacacagtctgtcatccaaggaaagtaaaaagtcagaagctcaagggataccattgaaaaaaaaatcaagagaagggctgcaggaatt

SEQ ID NO: 43698 - DNA, 1053 bp, Oryza sativa
cgtcgcgtggtggtaaggatcagtcctctcgcttcccccgccctcgtccttccggtgtcgccccgtacccgttgtgcggtcgtcgaccccggtacccgtgtaccggtgtcggtagtcgttcacgtgtgcgggtggtgaccgggtagtgtccgtgttagtgtgcccgctcggtagccgcgtggtttccacgggtgcaggccgtgtggtgtctagtggagtccgtttgtcggccactcgcctcggttgacacacgggttccgcttccgtcgacccgtggaccgtctctgtgtactcggtctaccgtggtcctttaggttgacatgtggggtccgcatgtcaacggcgcagccctcctgtcttttccaggctagcgcttacacctgttttatagttgcaaagcttaattataataattcgcaaatctccatataacagcattaaacttcggatgatcatatcctggtcatacgagctccgaatcgacccgttcaagtctcttaatgtttgttataacctaaagaaccctgtgctttgtttttatgtattgttattgcttctttataggcttgtagctttgcttgtgtgcttcgcgtagcttctgtcgttccggaggttcccgaagcgtggttcgtggtcgtcgccgaaggttcggaaggccgttctctctgagcaaggcaagtcacatcatccttgaacatattgaatcccagtttataaaattatgttgatttaaattattgcattatcgctttatttaaattcccgcgttatcactgttttatttagccatgcctatctacctttgttatgaccttattattattgttattattattaccttgttcaccctagattaaacaaaaccccaactagtggacactctactcatagtaccactagtataattttaggtagatgcttcgctgattaattaggtaacattaggcggttttacaactctagactttgggatattcatatcacctggacactttggaattgttggtttattgtggaattggattcacaccgccccctctattcaaaatcccc

SEQ ID NO: 43699 - DNA, 557 bp, Oryza sativa
tttgtgcatttgataccatggtgcccgggcaccatggtgccccatatgagtgtcatatatatatatatatatatatattaaatgttagatttaataaaattaatttaaagctataaactatatttttctataaacttgatcaaaattttaaaacgtttgacattagaaaagccaaatcgactttgtcgttgttttagatcacgactacggtatttgcattgtatggggatcgttggtatcaggggatatacaaggttgaggtaaaatacatagagataaagatttttatacaggttcgagccccttcatcggaaggtaacaacactactcctgttgggcgaaaccggtgttactcttattcatcataatcatacaaatacaatatttgggataacctatctagtcgtcgtcggcttggcagcatggaacaccaacacatagtcgatgacggggtagtcttccgcctcaaatacgtactcggtgagatcagagatagcgctagatccctcttgtccgcgtttgatgcgccagattgggtatgtataggctaatctctg

SEQ ID NO: 43700 - DNA, 916 bp, Oryza sativa
tgcaggtagcccaattggattacataacttgggcggcttgatctcaaggtttaggatcaaagacataatagagggggtgaataggattcctaagaaacatggtgtaattagaagttaaacttgctaaacaaagactagcctatgtgcctaggtttatcgcaagtgcaggcatgttttgtaccctagttgaagtcctaacaattttacagcaaactaagtattgaaaggaaatacaaactaaagagaggaaagtgataggaaattaaaacacacggcacgatgagttcttcccgaggtagtggggataggaaattcaaacacaagatacaagagtatagctccctcccatagtcatgaagtctatatgcgctatcatcatggtgattcttttttgctccagaaggtgaacccaaaaccttcacaaccacataaggtttcccacaaccttcttgagagatcaccggattgcctctgagactgactaggcatgccggaaagccaagagtagtaggaaaaaaccttcactagaagcccttagaaacaagactcttggatggtgcacagtaagctactctcaactcaaactagcactaaactactgaagaaaattataacaactagctcaatggtgttcttggacacgcccttcaattattgagctaaatagggtttccagaaacattagggagtcctagaaaagtgataaatatagccccaaccgagctcacttatagccattcgtagccattggagatcaagcagccagccctcctggtgaatctacacttcaatttgatgaaagtagaattggagatatctctcaagtatctcaattagagaatgaagctttaactcaacatttcactgagaatgagattaaagaggctgtattccaaatggaacataacaaagcacc

SEQ ID NO: 43701 - DNA, 788 bp, Oryza sativa
ccctgttatcatcggtaatggaatatcaagtgaaggctcggttcataaaagacttgtctttcaattaatggaatggatcaggagataatgattgctagcccaatttagtaatagtcaggctcgtgaatgatggcagaagttgtaatcgatcattcgatggtttcttgttgatggcagtaatcatgacattatttctgttaatagtaaccatataatactatcagatgtgatcaacaaaagtatcatcaagaaaggtcgcgctcatgacaattaaggaccggttcgcgagctattgttgtgagacattaaccgtaccaaccacaagccagcgtgggcaatggctttatcttttgtatagcatgattcattatggtgtgccagactgagaagtggcgagaagtccgtgggggtcgctggggagtccattgcctctggttttgagggggagattatgatccaggaatggtgcactgtggtgagttgtgttgtgcgaagggtattgtcacgatttcccccttagcagtgccgtggtggtacttcggggcatggcaacatgtgtggaatcgtgtcttctgggtacagtggtacatctctggccagagtaaaactattcgaatagccgtgcccgcggttatgggcgagtctaacaatgtttttcgtgattagtaccacactactcattaatgttaataatatgatgattaatttgactcctggtttggaatggataattcctggtttggaggtttgatctgtacgatcggggttggttgttcagtttggttggg

SEQ ID NO: 43702 - DNA, 665 bp, Oryza sativa
cctgtactccccttcattttatcatataagtatttagaaaaaaaaactaagatagagagaaaatattctttttagtctctgtagtagtcaaattttaaattttaaataacttaaattctctactaagcatctcatttagtggtgacaacggggcacatcaaggaaaaccaggccccatccctaaccccgatgggtcctcggaacccggtcggggacccaggtgaaggagagggggcatacatgtagggaaataaggtcggaactcgttgacaacgagttagggagtgtgagacagtggtaggccggcctgttgagagaaggagacgcaactgagcataacagagctgcgaagccgaggcagtgaagctcaatagaggtgggcgagctaggaggcgcacttcttcgacaagctagaagcagtgaggaaggtgatgctcggtgtgttgtactaatgtgcgagtagcgagctgggaggcagagaattgcgcatccaggaggatgggtggaatcacgtgatgtcatgagtgaccaattcgcgagcttcggggagctcaaattttgactttttgagaagcatatggtgaaaatgtagaagagctggatttctcaacttctgttcttttgttaattttttgtgtactctattactactatatattattaga

SEQ ID NO: 43703 - DNA, 2866 bp, Oryza sativa
tctgggctgcctactcaaaggcagaatttttccaagccaatctcattgtcatccaaagtactactgccaatgaactgacaaaagaattgatgaaccaaagcagtgacatacttctagacaaacaacttaggcgaactgagagagctcccatggttatagcatatggaaactgatcctacaataaataaaataatttacattgtaatataagaaaccaacttttctgctacttgaggtttagaaactgaccttgaaaccacggttctggtttgatccacctgaacatctcacggttatccataagtacaaggcaaatatgagtagatggctaattcgctatggagcaaaataatactggaagactggaggttaccttttgttgtttgcatgtaatgatatatgtgacacagaagacctcaagaaaagtttctatgtacggataagggctatggcttataaacatgttcatgttttttttccggtttgcaaattggtattctaacctggaccaggaacctaccatgagttttaatattaacataattgttttgcattggaataatgaatgttatgcaaacattatgcagtctcctgaaatgaatcatccgataataccaaagtaaatgaagcagcaccgcatttatagagaaaaaaatgttttccctaagtaggcctacacttccagttgtaagaaggattcaaactaaagaaaaaccacccttccatttgtattcatgctttaaaattgtaaaatttatcttatattcttttctttttaccaatgctttcatacagtttggggatagacggtggagatgagacgaacatgggttgggagacgccgcagcaatgtggtggtggcggtgcgtgtggcagcgccggtgggtagtggccacggaggagatcggcgtggtgtcactggtgttgtcctcgacggtcggtggcggcacggagatgtcgagggtgggcttcggcggcgccggtgtggccccccgaggtggaggttgccggatgttgtatcaataatccctaatcctatacagcaaaataagaaaatcatgaggaagattacggtggtgcaatgtttcatgaagcttattgcactttgcttaaaaatgaaccattcttggggtttaaacccaaagggaaaaattttaggttccaaaaaaaggaccctttttttaaacccttgggaaaaaaaggtttcataatcatcttgaccaaatctgtcaagaatccagaaacaattggattgtcctaacatatgcatggtgatggtgatttcattaatcaaggaatgaatctctactatactgataattgacatagatggtgcatcatcttaaatattctgtcattgccagtgaaaatcgaattttaaggtttgacttctgaaatgtgtaaaatcttaaataaccagatactattgttctttggagatgtttagacatgtgcagacagttatgcgttgttcatagacatagatactttagttatcattatctaaaaacatgaattctttagataccaaaacgatgctttcggtttttttttcttttgattgattctggattatattaagaatcgtatgatcaaatcagcggcgactgatggggggagaggaaatatatatagtactggattgtggattaaaaaaaaggagggaggatgatttctgtaccttaatttcggcgaatcagatcgaggatggggcgacactgttctgaaagcagagattggtggttgcacggagacagtcgacgagccggagattgggggcggcacggaggagaccgacgaggcggagttcctggtgaagatcgggggcggtgcggaggagaccagcgagaagggcgatgaacggcggagtggtgagtggaggggacaactggcggggtgggagggcgggtgtggtgtgcggcgtgcgacggcggagtgggcgatgcggtctggacggcgggtgggggcgcgagcgccgggagacgacgggggcggcgacgtgcataggcgcgatgggcgagagaactggcggaggagatggatttcgcgattggaaggaaagtgcgacgatttcgggggcgtaggggtgagggaaggcggatgctatcccggacgttagatctcttggggataatctggacgttgagtgatgaatgaaagaatgagtgaaagtatttgtttaactatagggtagattgaagatcgctgaacagcaccatcttcattgtgttcttcgggggtcataatagttgactgcattggcgtgccagaagatacagtattgcatccatctgttgatttggccttctttcttgcacgccattcacgaagatacttgtttgtatcctctctctttttctttgcagaaagttcacttgtccctaccacacccccttcactctggtttatttcagatgtagttgttgcttgagttggattgacggatgttacagtgctattaacaacactcgactttgctctatttcttgcacgccactcacgtagatagctgttatttttttccctctttgttgaggtggcaatttcagcaacattgacctcggcactatcacattcttcatactctgacacatgcgttgtttgcataggacttgtactacatttcttcttagcctccagatttgcacgatatatacgttgtttgaagtttctttcctttttacgctgagactcattggatagcccaaattgatccacatgacctgcatttttttattaacactatagtcatactgaaaaggacaagacctgcgttgtacacaacgaactatccattatatgtacaccttgacggtggtttgttatatctccgagggatttgcgagctccaccgtcgggcgcagga

SEQ ID NO: 43704 - DNA, 871 bp, Oryza sativa
cagagaatcaagagaataattttataattactaataggaaaatagttatatttggagcggtacatgtacaacccaaacttagcagttaatttgaggcaaattctcgaagaacagtggcatttcatataaaactcaaaacatctatccaatcaaggtgaaatgttctgaaataggagcctaaagcttattatggctgatatgcaaaatgatgaatccaaactgcctaacggtacggagtcatttaaaaccaagtaataaaaaaaggacctatcctctaacaattaggatcacaagacacgttaggacgaccgaaataaccttgacagctgaattacattgttaactcttttttcacatcgtaagtggctagacaaaattaatgtcgcaccaaataaaacataggatgttaatcgccaatggcacctgaatttggcaatgttaaatacacgatttcctccactgcatttacattcccctcaccatgtttaaactcaggactaaaagaataactcaagagcagattcgaccacgtgaatgatgggtacaattaactatcatgtcgccaaacaatattataatttaaatgttataatacaccacaatatggttgtgcagcaaggtttcttctatactcggattattgaatcttgattactatatattgtacaaaaccatgccaatatataagcaccaggttatgttgaagagcgaattagtagtaagcgatacctccttggtttcctgcacttcacactatttgaattcttatcacagtacttcggaacatctttctccaattcagtttagccctgaaatagttttgcagtcgagtatgtcagtaattgaaatatgatgctgctcgtacattgaa

SEQ ID NO: 43705 - DNA, 657 bp, Oryza sativa
ctctctctctctctctctctccgttcacagactgtacagcactcggcgagagcaacgaaacgacacacacgggagccgcctcctacctgaacttgaagagagaaaacaatcctcgaccgtgcgcgtacggcgacggcgtgggggtcgggacatgggactccctcgctggcgtggcgaaccaccgctagattggcagcatatgcgcgcgaggccggcggccgcgaccgcgagcgtagtgcgtcttttttccggcacggagacgagggatgccgtggatgcgcatgcatgattgctgggccgtaacggcatggccatgtgcgccgcgagaaaatgcagctgcgttgtaccatcagggctactgtggagtggtggggcggcaactcatctgctgttgggagcagggtttactgtacctaactgtaaaaagtcagacaaaatgtatgaaaatttaaattatttttaaaatctgtttggattggtgggatcactgcatggttaccgttaccgtaccctgacaataaacccgattaacgtagtaaccggtgtttattgtcaaccctgattggaggcagagaccagaactattaccctcgggtgaaatccagtagtaaccggcctgttacgaaattccgttcgacaaaatttcaaacttaaaac

SEQ ID NO: 43706 - DNA, 1237 bp, Oryza sativa
tattacagtgcaagttgcttcgtgtgggtcccaccattaccagcttttaccacctttttctctcccccctctctctcctggcttctttccccaccgtagtgactagcgagcgctgagtgcatcaccggccaagcagccaagcggcggcggtgccaaccggaggggcggcgaggcttggcgctcgcccgcgcaccaccctcctcctccccccgaagaacggcaagcgccagcgatggagtagcttggtggcggagggcttgatggcggaggagctcggtggcgagacggcccgagcggcgacggcgccgggcagcgacaacgacggcgacgccagcctcctcttctccttccccgctctcgcctcctcctcctccagcccgtcgactacctcgcccctttcccctctatcctctagcatagtgtgggtcccgcttgagacgtgaagaactcgtagccaaagttggctactcggacctgagcaagctgcacggtttgacgatgtggcatggaatattcgtttttgggtgtggaggctgaatgccacttaagcccactgtgaatggccatggcctaggaggacatgtctaccgcagcggataatcgaggccgttgattgctgatcccaatgacaggtggaaatatttctctggtcgatgattgcgttgattcgtgttcaggcaaaggccgctgaatccaaagcggatcacagaattggcacgcacagaaagataacagttaaaaacgaaggagaaaaaaaaagttgggagaaaagcggagcagggaaggagacaggggagaagcgtcgagaaacgcaccgccccctagccctaggcttgcctccttccgcgccggtgggtgggtggataggggagtaggagagggggatctcggccaccgcccaccgccaccgccgcgccgccgccgcgcgcgcgcgcgcatcgcgtcacgatctcgcgagaccccgaaccccacgaaccctcgccgcgtcgccgcgggccgtcgcggtgggggaggaggaggaggggtgggtactcgttctcccagtgggggagggttttgccgcggcgggaccagtggcgctgttccggggctgcttctccttcgggtcgggggggcggaggaggcccgccgcctcgcccctgccctcgccgccgcgggcgccgccgctagcctcctccgcctccgccgccgccgcggcgctagcggcagcggacgacggcgccaagatgaagggcct

SEQ ID NO: 43707 - DNA, 675 bp, Oryza sativa
ttctgggtgagtctaatatgcaagtaaacaattacagaacattatttcatttccttttataaaatatttggccgtatcatgtttgtttagctgttcttgctctttttgcttcttagtggcttggtgccacattgcctctcaggcgctttctttggcctctgtatacttgattggccatgtgttccatatttagcgcgctggatttaatgctcaataatagttaaagtaaaactagttgtccatatgaagacatctagatggatattccatctttaaattacgaaactggatgcacgtatgttacagtatttcattagttagttaaggtatatcagaaagtacttacaaaccatttcccctgggtttctttatggttgatattgtacataatatgagtcagtatataacaagtgacgttattccaatattccagtaacactactgcaataactattatgtccagttcttgctttatgccatttctagtggggataaaaaaaatcaaaccgtgaagggaatggttagcattcgcaccatgcccactgggggactcggaccatggtagtggaagaaaaggcgaaactaagtgttcgtttgaacaaacccaaattcaggacatggtaatgggaccagcttctttgatctgcacacaagggaaatgattcatgtattcaa

SEQ ID NO: 43708 - DNA, 1169 bp, Oryza sativa
attttagagctactagtagttggctatattattaaacttgctcttagctatttcatttctcataagagttaaatttagaagaggactataagtgggtcccatcaaataataaaaacaatatattagatattccctccgtttcataatgtaagtcattttagcatttcccacatttgtattgatgctaatgaatatagacatatatatatctatctagattcattagcatcaatatgaatattggaaatgctacaatgacttacattgtgaaacggaggaagtatctcatatgcatagagagagagcgtaaggagagaagtgagagattattattttatcccttatggctaccgatatgcatatggagagagaacttactatttatcatcctctcaaatatatttttcatttccgtttgtcagctgggcccacgtgttagcccccttctcattcgttgagtttgtggacccgtgtggacccagaaaggaggctaacatatagctatggactaccaataaactatatgcggtttatgctatctactattattacattgtggatgtcctaagaggtgatttgtgtattaacagtgtagtaggctattagatttgttgtaaatgatatattaaattttacataataattaattatactattaaatatctactctatagttcaacaaatactttcactcattcttccgttctttcattcatcgctcaaggttcagatcatccgcctaaaatccgaacggtccagatcgatcctgcctccacccccctcaatcagcgcaccgctcccgcacctccgccctccgccagaacaccgctcccgcacctccgccatcaccgctccgctccgtatcagccgccgcgccgtcctctgcatcgcctgtcctccgccaccccgccgcacgaggtgctcccgtcgccaggtagccgccgcgccgtcatctgcatcgcctgtctccaccgatcccctccgcacgaggtgctcccgtcgccaggtcgccgccgacgccttccgcggtgatccgatctgccatcgaatccccgccgccggctcgtcctccaagatccccatcggcctgtcctccgcctcctcgccgcacgaattcctcacgtcgccaggtcgccggcaccgatctgctccaccgatccccgccgcac

SEQ ID NO: 43709 - DNA, 688 bp, Oryza sativa
ttttttacagttagttcagaaatatttaggtttcagcattgaacgaggttgggtttttcttcccattgaacaaaaggcatctgattacaatttttctaaaaaaaattatttaggaagttctttgctttttttttcctcaacaagaaaagatggttagcattgagtcataaacttagaggtacaagttgctcaactgctaaggtctgttttatacaggtataatggcaggagaaatgtcaccaaaagaaaattctttctgttgattcacattattttccagttaaatgcgttcatcatttacccatttatttggatcacgtgcattgtcatttgctgtaatttactcatgtcccctaggtaactatattaaacctaccatctttccgaattgaacctgtttcatgtgtagttttcagtggtcacctgttggttgcttccattatatcacacagatttccaatctgactggtaatattgtgagatcatttttttttgtgtgtcatgttctttttatcagatgtgtcattgctgtacagaattaatatataattctcatgtgaacccgttggttgttgttcttttattagttgtgaatttactaaagaaaacatccaaactgaatgacgttggttactgccaaactgagatcaagaaatacatctactccagtagatggggctgcaggaat

SEQ ID NO: 43710 - DNA, 672 bp, Oryza sativa
acttaaaaaactctagtccgtgtgctttgcagcagtacgatgcctacattcactggttttactactttcatagaggtcctgctcctcttgcatcccttgctgatgctgcctccacggtaacccccgctctattctctgcttatctctatgaaatcactacgaagttgctgtgttgggtcacgaaactctattcggaatttgtatttcttttaataaagaaactatgctaaaaaaagtaagtcattggatttgcccaatacaaattaatttagtgatgactctaatacaaaattcataccaactgtcaagtgttaacaaacatgattttaactgttgttaacgtacttttatgggcacatgatgtaaccgtgtgatccattttgtgcctcttcgtgaataaataggaaccaaataattataattagactgtcatgagaaaagccctaatctgggtacagtcaaatcttccaatacggaatactcactgtacaaaaacctccaatccaaatggggcttcactatgaaacaattctttgggtattttcacttttttaagcgtttgaacctatgcccagccctgttgcttcattcatttggctgactgctgtgacactaactgcagcctccgtgggaggcggtttttgtaattgctccgtagctccttcctttata

SEQ ID NO: 43711 - DNA, 666 bp, Oryza sativa
  unsure (1)..(666): unsure at all n locations
ttatgcgggtttgtttgcaggctgattaatgatagttatttatgtcaaacaaattgacgaagttaggctggtcaccaattgatatatagtagtacttgtgattgcgccctgacacgacacgacgntagtatgggagacagggtagctgtttaattagctgtccgcctatgcaaaattcatttttagataatatctacaaaattcatgaatttgccaggacagttgacgtggcctgggggcttgattgtgaatttgtgatgagtagggccgtaggggaactaatcgtgacccatgaggacaaccaaagccagaacaagggttggtcggggattaagccaggtttaaaaatttgaccggaaacgcaggtctttcagtttaaaaaaggagaggtctcgaagaaatgtttaaaatgctcagcaagagcttgggtcttggtcagaggttgagagccagagagagcctgcctcagttcaaccataccgggttggcctaccccgcgcttattatggccatgttgccgaagcgcgtattttctgctctgttccttagccgcgtcgcctttcgatcttcgtctgctaataacgtctcaactaccagccgcagcggcacagcacaactgcaggtcagttggacgtccgtcatcgacccgtgcagcgcacgtacctg

SEQ ID NO: 43712 - DNA, 522 bp, Oryza sativa
tactatggatagagaagaaggagcaagttcattttatgtctcgagctagtgaagaaatgatttattttcagtgttgaagatcgcactataggcaaaccaagaaagaacaaaccggtgagtcttcagttaaaaaagaaggtttgtcttcagtcaaacaaaaggaaagaaagaaagaaagaaagaaaacggtgagtcttaactttctttcactctgactctcttaaacaaaatctaaaagagaaataccagggagatcaactttccaataacaacacaactttcaaacaaaacacaaagcatatgattccacaagacaagactgatcatacaaatccacaacagagaagttccaatttatgccgtccacaaccacatgtatgtacatcacgcatcaccaacctgcaaatctgcaattcatagtcaaagatgttgtgcatcacaatcatcatccactccactagcgcaaaacatgcccggatctcttgaacaggaacacggcacatcctgtttactgtgcttatc

SEQ ID NO: 43713 - DNA, 670 bp, Oryza sativa
agagaaatagtcacccctcctataaggggtaaccttcacataaattataataaaaaagggaaaaaaaaggaagagaagattgatcaaacaaataaaataaaactattagggttagtgcactacaataatatatgtgtgatttattgtatatgctatcttttaattgatgaatagtctacatgaataaaattaggggtgaaatctaccttttccataagacttgctcttgtgccaagcgcagctaccagtctatttcaaccaatgatttgtatggatcttagtccagacaattatcaaaattttggtaacttccaaacattgcccctgcgtaagttttttgtgaggataggtattggcattgatccaaacaagcctcgattgctttgaggtactgttccttgtctacataggaagccatatccgtttgatcacaatagaccaaacatacgagaaactggactgaaattgcacatacacataataacagatgcagattattatactttaaaaaataatcaggattgttagaatacggctgtgtttagttcacattaaaattggaagtttggttaaaattagaaggatgtgatagaaaagttggaagtttgaagaaaaactttgaagctaaacacggcgtacattgaaaagtagaaggtgacgtgccatccat

SEQ ID NO: 43714 - DNA, 965 bp, Oryza sativa
ctaacatgaaattttaataattattaaagacaaatagaattgcaccgtaacgtttagcacggacatattactagtaatctattaaaatacaaatctaacctgccaactattatagctcgccggcataatagtaggtttgctgaattccacgtctgcgcctatccatctttttcttcggattgagaccacgtattcagcatcagcaatgctaggaaaattcaacgctgggcttttcttgagagggacagcatccgttgcaaatttttgttgtaaactacaccctctcaaatatgtgcaaaattctgaaagcaacttctaaccatctaaccattgtgaaatgaaaaaaaaacaaaaccaaaatattttaaccacgcaatgtaattttacttccagtacatatttttaacatatcaaacattcttattattgtttaggacaacagtacctttgggataaggagagagaaactccaataccataatgtgtgataaatctctgttttatgggttcgatatacaagtggtacatctctatcgtttgaaagggacatatacaagaagatttttgtattttcctagtcttttgcctaatgagttcttagcaggccacccttttgggcccaatattgtaagaggtccattacaaagaattagggcaatcttacatggctaacttctatggtcttcgccacttctgatggtatcatcggagacggcgtttctcgtcacttccacgtaggatcacgggcgggcttgttcactttgctactatttacaatcttattttttttcttggtaaagttacctaaaataatagctacatttaatttgttgctaaattttaataagtacatatgaaatcttgctaaaatttgacaaccttaccaaaatttggcaatgccaaaacttgataaggttgaaaatggtagcaaaatgaacaagccccatattcatgtttttctaaat

SEQ ID NO: 43715 - DNA, 526 bp, Oryza sativa
gaaccggtctccttggccctgcaatccaatccaatccagatcaacaaccaacccaaccatcagaacccccaagggctccaaaattccaagctctaacactctgtaccatgaaacgaccctcctctgcaggagcaacgccgtgctcgggctcgagtaagggctaaacacggcggccttcgccgccgccggcgacatctccacctccacctccacctccatctccggctccatccctcgcagattaccagtactagtagcagtagagactagagactagagagataggaggagtataaaaccggagtggtggagtgagggaggaaggaacatcgggaggagtggaaaaggggtacaatggctgagggcgcacgaatgggggacgttggagttgaaccccagttttaaggctgggaaatcggatcgccctccaccccctcgtgcaagtttccttattccctgggcgcgcgtgcgttctcctctgcactgcactgctctctcctcgccaccacagggcacaggggggctg

SEQ ID NO: 43716 - DNA, 654 bp, Oryza sativa
ctctattttttaatttttaagtttgtaataatactgcccaacacggccaggatgaagcgtcgatctgaatttctttttcaattttgagggcactctccttctagagacactcccttatgaacggagcatcgaatttgggattgtggcaaatggcaatgcaccgttgctgtgcacaggtgccggccgggcgcgcttacacggctacacctaacacgcctacactcttttttctcatcagtcatcagaatacttacacgtttacatttgtgcttttgacaatcctagtaggttataattagtactaagtgcttagccgatgaacgaaatgatgaccaacaccaccgacacaccaccaaaactcttgtatggatgtttttctgttgtttgcatatcatttaaatagttacaaataaattaataaaaactagaagatatattaatatgtgatatatcacttcataaacacgtaacttaacatttaatttctacttgtaagtttaatttattttttgttgtcatatacagaagttaaattttaagttgtatgtttgtagagtgatatatcacatgttaatatattttttaaaagctttttataactatttgagtagtatgcaagtaaggagtggaagtaaggagtggacgttcaaaact

SEQ ID NO: 43717 - DNA, 730 bp, Oryza sativa
gggcacaaatttctctatcacatataggaggtgcagagcaaaatgatggatccaccaggccccgcgtttgctgcttccgctgaaaaacaccgtgaaaacaaactaaaatggggcgcattgttcacaaaatttcgctgctttggcttcaaacgaaatatagggcgatactcctacaaaatcgcaaacttgttgtgtggtgtacgtataccactcttagaccttgttcggtttagagaggtttaaagaggattggagggggaataatttcaaatcccctcaaattctttcctcatagggattaaccgaataggccttatgattattcttttccccaattccggaggccattttgtactaacattgctaactaatatctccgtaccttatatgtggttaaattatgagaacgttcgactcgcatgcaacaaagtatcatgtgcattagccatttggcctgcaggtcatcacataaggcatacttgttagggtgcacagtacacacgctactaattaagcgaaggtgtgtcacaccctcacacgttccttgtgttaaacatagcacacgccacgacctgccacacttattttgtgcacataaatggcttgtcctaattttaagtcaaattaatgttgtgtttactgttaaactctcgagtattagggactgaactaaaaaacgtgtgattagacgaattgtgaaagctaaaacacaaaatataataaagtctgg

SEQ ID NO: 43718 - DNA, 851 bp, Oryza sativa
tttacgattaacttagtactatcagtactatttcataaacttcttcggataattactcagtagcatacccttcgaatgaatcatgacaaattatcattcaaatatacaaataatgaaactaaataattcaaatattttaaccaacaaataaatactacaatttctgaccaaacattatcaaaaccctaaatcacatacatataacattacaaaaatattttcctttcttacacactaaaataaattacatattattaaaaaaaataacttattacaaataaatggagaacgcgaccctgtcgaactgcggcagttcgacagcccagcctatcgaacgggggctgttcgacagccctgcctgtcgaacgggggctgttcgagtcctgtcgaacggcagccttccgatctcctcgccagtcgcgctatggccgttcgataggtgccctatcgaactgcacccgttcgacagagacctattttcgcgattttccccggttgaccactacttttgcgattttccataaaaataatattaattctcaaaaaaattcctccccccactcccactccctcggtttttcaccgcacgcgcacctgaaagaatcaaagaaacgcctccgatgcgctgcgccatgatcaaccaccgactttttgaccacgcgcgcgcgcgcgtgcaaagcgcccacctcctcaccgtgaacaccgtcccgtccccactcctcgccgcgctgccaaatgtacgtcgctgccacctgcccaacggtgaaaaaaaaaccccaccgaaacgctcccgctgcctccacgtctccacctcgcaccgcgccaaggcggcaacacccatgcccattact

SEQ ID NO: 43719 - DNA, 745 bp, Oryza sativa
tgatgttataaaagacataaatcacaagtcataaaattataacttttatggatttataatgttataaaagacattgacttgtgatttgattttcgcagcggaaacagtgccaccattggtgccatagttctacggtgcatatgctactgtcttcagtaacgcgttcggcgttcggccataccgtgcaaattactttacaattcttgtcttctgaacattcgatttcgaaattttgtttttcagactgagaccgatcgatgtaaaagcagatgggatataaagtttcatcaagattaactgctgattttcttaaaaaaaagaaagaattaattgttgattacttccttcgtctcaaatgtaagcatttttaaggtagtcacagatattaaaaaaactagttgataccccgcacgttgctgcgggatatatagatatataactttgaagaattatggctccagcaaaggttttaatattttgcaattcaagatatgagctttcttaacgaaacaggcatagctgcaggccttagcaagcatgcagatgaagttaattactttgacaaaaacgaactgcaccagaaaagtctgaacagaaacttgcaaatgtaagctaccaggggccaggcaaagtaccgattgtagctaacatattgcatttaacccacaagattagtacagtttgttgacaaaaggaaatgaaattctataagagcatttgaattgtcgtgtctgggctgcaggaa

SEQ ID NO: 43720 - DNA, 660 bp, Oryza sativa
aatcagcttatgataaaagctctgacggttgctgctttacatttaatatatccacatacaaaccgtgtctagaagccaaaatcatcttggcgcgtgcaaagagtgtacaaaatcaggttaccggttttgtgatgaaccagtcgctagtctaactgactggtaagtggattttgatccgtgtatgctgccagccctggggcccctgccatgtgattaccaaactttcatggaagaccaaacccgaaatgtattgccatcaaacggtcttgcctggtctaaaactatggtagtagaatgcctccaggtgcacgctattggcgtgcgtgtgaggtcgttatcagcatcacataaatagggaacctgacgtaaaatattctctttttgccggttactcccacttatcagaagttccttttcaagctttcagcctacttatatagaatttctccaggtatgatctactctgattctattgtgcaacaaatttcctttgcaaccatgtaaataaattaacacaacatttcaaaaatcgacatcactaacagttcctatgtttctctccctgaaatcctaatttagtacaacataccttcaaaatttggtggcgtcagaggctcagagctgatatagtgttgaactgcaccaattccatatgcgtta

SEQ ID NO: 43721 - DNA, 1323 bp, Oryza sativa
agccgggcgtccagtagctcgtgcaccaaggccatcgccgatgccaaggtgctcttccagcgtcgccgacgcctttccatctcctgacgcggttgacgcacgtgtgcatacgagatgatcgatggctcgaattgggatactttttttgttcttctcaatttttgtgggacttgcacgaattgtgtggcgtgacatggacgatggcacaaaattgcaaagaattgcgggcatcgctgtcgtcctgtcgccgacctccattgtcagttggtattgcttccggggccttggctaggccgcccggcgatgctccttacatgtgtggtgacagtagccagatgatggccggtgatagcaagcaggtacagcgctggccgctgcagccttcacttcgccgctccgatgaggacgacgccctccatcagggaagactagaagagcacaaatcttcaaaggaaaggggaaaccgagcaagagcaagcaaagtaggtggactgaaagaactcgccgccacctcacttgcagcatgccatggatggatgccctatcgtccagacctaggaggggtaaaggaaggaagagcatggtcagtgggtcactggcgggtggatcctacaggatgactcaacgggctggacaattcaaagcgttgtatcggtgaccaccttccaaaaatgccgagggaggcaagttatacctgttttaatattttaagtgtctagatatccggtaccacgattcaaggatatgaataagattggacatatattgagggactagaagtagacttactgcgctgtataaccatctcacagaaatcaacccagtaccccgatgccgtgaagcccaccaacaccccgtggattgagattctttaacgaattaacgtgaaggtaaaaagacgtggctcggtcacatgttagcgatcgtcagagggaacgtagcatgaggctcttccctcacctcgtttccggcctttcagttttggggggcgcccgccggcgcgggtcgcgtcacacacacacaccgcaccgtgacagcggcatccgtagaatcgccggcggcttggctcacctgagagaccccgacagcttgggcgccgcgtacgcgctaccgtggccaacccaaaagagggagcgagcctgatcaagcagagcagtgacttgcctagcgtgtcgctgccattcaccggttgacgaacggactgcgatactgccagccaagtaaactgtactatgggatcgcgaccgtgtagccaacatccctttctgttgtcacttccggcaggtcactttttttttcgtcatttgtaatttacgcattttt

SEQ ID NO: 43722 - DNA, 744 bp, Oryza sativa
tgcactgttttgagaactttttttaacaaagatatcctgggacatcttatttctaacttatattaaagaaaacagaaaataccatatcaaaaaggaaaattacaatcaaatttaacaaagtcttctttttcaccgcatccatcacaaccatggctgctctatgttgttccacatccccgtcgatcctgtcactagtggcagagaggacaaacagagaacaagaaaaaaataatgaacacttgtattttttttagagcttgaacacttgtgtttcagctttttttttctctctctcccttcatccatgcttattcataattttgattgttatatttgtatattcatagattttccattgcatacacatattagcatatgttatcccacattttccgctgcatatttttcctattttaatcttattattctctatgtcttaaattataagaagttttataagattatagatctatcaggaaagtgggtggaactacacagtgaatggttgtgctaggtcaagatgagatagtagttaaagaaattaaaagtagaggattatatttggttgaaagaagagagtaggtggagaagttctattttatgacaatttttgaatacgagaagttattggatcttagaataaatgaagtaattttctcggtcattgaaatatcgaaaaggaaccgacaaattttaccaacaaaacgtaccatccgagcggagctgccatgcggggctgcagga

SEQ ID NO: 43723 - DNA, 538 bp, Oryza sativa
gcagcccatgatatatcacatattgatgtatattactcccacctttttaaatatttgacactgtcgactttttagcacatatttgaccgttcaacttattaaaagtaacttttgtgaaatatgtaaaactatatgcatacatataagtatatttaacaatgaatcaaatgataggaaaaataatgaataattaaataagacgaacggtcaaacatatttaaaaaagtcaacgacgtcaaatatttaaaaacggagggagtatatttttttaaaaaaaatatgaacattttaggcaacatgcataaaataagtggaaatcaccttgagggacaaaaattaattatagcaaaatatgttttccttcttactaatctgtcccaaaaaaccaaactctggctatgaacctggacacgcatatgtccaggttcgtagctaggattggatttttttttgggacggagggtacatctgcatgtaaaattcccttgcatatttgcagtgatatacaacaataacatttgtatattttgagtctatt

SEQ ID NO: 43724 - DNA, 632 bp, Oryza sativa
aattcctgcagcccgatatgaatattgtatattgttttctggttcctaatcctacggcacttcaattttgcatgttaattttcttctcatgccatggagaagcggccggcgacagcacctgaccctcgactctaaacggttcaagctctagcctggcttgtttggcaaggggattgggagtttacacgagagaattgatagtgagattaagatgcgaatttgatttttcatgccagactcttgtttggtagaggtggtgaaaattgagagggagtttagttggagattaggtcattaatgaaaacggatggcgatttgtttaggcgaagtaaaggaggaattccctcccaattacctgcccctacccaggtattgaaaaggagggagttcattcctcaattccccatccccatctcaccaaaattctcatctcccaaccaaacaaaacagttaatagcatcatcctctaaactcccaatccctcctaaaaactccctccaatcaaacaagatctccaaaaaaaacacaagcacgaagagcacatcagaagcgatgtcggtggtggagcacggcacatcggccatggtgctcccagtcccatatatgtcagtctcagggacgtctgcggcgcc

SEQ ID NO: 43725 - DNA, 681 bp, Oryza sativa
attcctgcagcccccctccaccactggagtatgtcaaaatcatcatcagggaaatcattttcttgaggaatatcttcgagatatctagttaactcagtctttactttactcttgctttgatcatgaagatattgcctcgtgtgcgggtgaagggggcgagaccttgtgcctgatatatttggtctcaagtctcaacatgcgttcatataccaagtttcaagtagtcttcgtcatagcaaacctggcaacaatccaaaaccatacatgtgagtcagctatatatgtagcatgagattgatatctccattgagtaaaatcaagagcatatttttcacaacatacaccgtaccatatagtcgttatcattgctttcagtgacatcggcatcactttcagaagccatttcactttcactgctctccttattcttatatgatgcatactcaccaatcttttcccacacaaaatccaaggcaaattgtcgaatcttcatggaggtactaatggattcaacaggaaaacgcttcaagttctcaatcaaccactcagcctcctttctgataccctgatggtgcaaataaattgatcaaattcaagtgacacaaactttagacaagcataccagaatgtggttaggtgaaggcaggcatgcacataccagaagggcagaagcaatatcaa

SEQ ID NO: 43726 - DNA, 669 bp, Oryza sativa
agatccagtgcacgataaatttgtcataaatgccgtgtggccagtgaggggtcaacatggatggcagtggagagtagtggaggttgcgtcaactgggagttggaggaagtttgttagtaaagtaagggagaaaggctatagcctggcaatagtggtgcagaagacaacatgtgttgatcgatcgggggagtcaagtcatgcaggtattccaaactccgccttatgttcacccctcgcagggagcatctgggtcggcacacttcccttacatgccaacgggggacaacgtgttgaacacaccagcatggggacttcatatcactccgcgtgcgccagagcagggccacacacagcacacatgtaagtcattttaaacaataacacgctttagtttctaattatatgtatcgttactaactacgccatattttttggtttctccctcttgtacaaacagacgatgagtacggttcggcgtcgacgcatcacggagtgcctgcttactcccctcgcacagcattcattgaggacttcttttccactgatcctccccaggaggaagtagggatggattactggcacgcagcacctcaggtcacacagccgacgcaggagacggaggccggtcaggggccagacgtgacaccacagcagacagctagagatagg

SEQ ID NO: 43727 - DNA, 706 bp, Oryza sativa
cgatccgtaccagatccggccgcgatccgccgccgatcggacccggggcccgggcacgcaggcggatcggatcacttaccgatcggctgctgcggcggtcgtcgtcgtcgtcggctgctgctgctccggcgccgccggcggcggcggcggcgaggaggagggatcgggggcgcccgcgtcgccgctcctccctctcgatctccggcgcggctaagatctcgatgcgggcatgggaggagggggaggaggaggaggcggaggttggggggatgttacttgggcttcgacgcttcgtctcctcctctccttttatcgaacttttgctctccacctccctccctccgctcgctcgctcgcggtgccgcgatgcgctggtggatggttgttttgggttttttacttttttgcggggagaggccaaacttttttattcggcctccggaaccctgcaattgcggtgctcgcctcgattgggaaagcgggggaggagggtggggggacgcggaaatggtataaataatggacagcgggggcggggcaggtcggcctactggcccctttgccgcgctggacgcgacgcgactctacgtggctggaggaagaagacgacctcacctactgctgcttccgccgccgccgtcgccgatgctgccgtgaagcaatctcgctcgctcgctcgctagcggcgcctttaaagcaggggagg

SEQ ID NO: 43728 - DNA, 885 bp, Oryza sativa
tctccttctttatttgcttgctcaatctactattatttctatttattcttcttggaacctttaaaaattagattttatagtttttagagtttattgtcacgttgagtttcgtatttataatttctagatgttccgtcaaacgttgccattatactcctctacggcccatccattgtttcttctctttattgtcattgagattttaaaaatcgaacataattatcgtttgggttcattttttactttctagaagtcccgccaaactgtcagcggctttgccattgtactcctctacggctcgtccgctgcctcccttctttattgtcattgagattttaaatcgaatataattatcattgggttttttttactttttggaagttccgaacctttaaaaattagacttgtagttttattttttataatttttagaagtcccatcaaacgatgccattatgcccctctatagcccgtccgccgcctactctttattgtcattgtgattctaaaaatcgaacataactatcgttggaattcattttttattttctagaagtctcattaaccgtcggcggctctgcaactatactcttatacaccccgcccgctgcttctcctttttattgccattgagattttaaaaatcgaatatgattatcaatggggtttatttttttttactttctagaaatcccagcaaccgccttacttgtttgctttacggcctgcctgacatccctcctttttttttagaaacacagtacaaatataggcgctcacaacgtgcgcacactcacccctatgaatgcacacacgcacaccctacccctatgagcacctccgaaagactgggccggcatatcttgacatccctccttttaatcg

SEQ ID NO: 43729 - DNA, 682 bp, Oryza sativa
attcctgcagcccgaatgtgacacattctagtactacaaatctgatcatacctctgtccagatctattatattataatatgtcatattcagttctagattcgttttttatgggacggagggagtatatactttcagtggaatactgcaagtttaaccttttcactacttctatgtactttgaaatctcaattcatcaatttaacttgtgtttactgccctgttgtgtataattgagcatttgctatctgttgagttcgtctgaaagacagagttcataatagctgcctgtaaaagtgcttttctcgttaagatttagattttaccttgattttcgttagcatgttttccaaactactaaacgatacgttccgcaaaaactttctaacacaagttgctttaaaatatcaaatatatcaatttatcaagtttgtaataattaaaacttaattaatcatgtactaataattttctcgtttgacgtgcgtcaagttaaacttagtcttcgttagttccaatctcgcaaccaaaatatgcttgttgcttcgttagattgaacagcattcaaacggtttggatgagcaggtacaataaagattcatccgtcggcgatagtgtatctacgttggctcgcatgctgtgctggaggagagaaggatagtgagagaacgctagcgggtgact

SEQ ID NO: 43730 - DNA, 561 bp, Oryza sativa
ctgcagcccatataggaatatatttttcaagttcatatgtattgtttacagaataaattgacccaaaaattcataatagttaataatattgaagtaatcatttgaacatcattatgccagtgcacgtttcatcaataagctttatccataaaggcattattaaatgctaagagaacattccatcaactagcttttacaggcaaacacatagcggtaagtagtgccaaggattaaacagtctacatagtcgaggaggttatgaattttctcagcattatttaatttgagatggcatcttagtaccacggataagagccatagcttaatccttgtagatgaccaccgacacactgagaatcttacactgagttacaactgcaggccaattgattatctatccaattatcataattgcataaacagtcataattaagcagcctatgggtctccgtggaacagagaaatttcctgttcatgctgaaaaagatctgattcatatgaaattaatatcaacttcctatgaactgaaatgcatgttttcgaaaaatgccgtaattgtgt

SEQ ID NO: 43731 - DNA, 837 bp, Oryza sativa
ttctccttccccggccccaacaaatcgagatccaggatgccctgaaccgtcaatacacgatacttacctcacttgaatgaagcaatccctaaccgcgagcagaggtgtgtgctgcgtgcgctaagctaggggggtgcggcatgcggcggcggcggcggctccgcggggcatggcgacgatgcggcgcctcggcggcgtgcggcagcagtagtaggcccgcattgcaaagtggtggctctacctttgcctcgctccagaacgacgacgccgttgggtaggaaaagatggacgcggcgaggattggtatcccgtgagaagttaggattagatcgtaccttgtatccatgcgtatcagagaagtatccctaattatttcatttttctgaaaatcagaaaaatagaggatacgtacgggcgtatcggagcgtatccgaatacgtatccgtattcctttacgtatccgatacggatacgctcccagccgtatcagggtatcctaggaggtcagtattgcagcttttgctcaacatatgcttgaggaattggagtagttagttcaacccaaatctgcgtgacgtctcgttccttccttaaaagaataatcttgtttagaagtaaagcgttttagtattagaaaggggccaaaatgttcgcttaacgagagggggcttattttgctattgtagtgttgtgcacagcaaggtttcgtaagtacaatgtacatatattaacaacctgtaatgttgttccccatcacgcaataccatactccgtattagattagtgctgaaccgggaagccaatgaagcctagttttacacggtaatcaaccaatat

SEQ ID NO: 43732 - DNA, 674 bp, Oryza sativa
attcctgcagcccaacagttagtaacggagcttgagcatagaccacgtggcatggtcgactgctcagcatataatatagacatactatagtggtatatatatacctccctcatatatatattaagctttcttatgtgatgattagtctaagagaaaaaaaaatggtcgctttcgagtggattgaatgcgtatgctatcctcgcccaaccgttccggtcgtcgcgattgtcacagctggtcgagtgacaacaaatcctgataatgcaatgcaggacgcagtcagtgagtcagtgacgctttggcttgtagcctcgttagtcttttgcttacatggtttggtctctgcactcaacggaagaaaatgtgtcctgcttctaccttatcagattcacagtactaatacatcacattatctattatgacagtattattacagacaccaacgtataaaacaatatatagaaagatataacctatgtaccagtaattgtaatagtattaatattattgtagagtatcctcacccggttgctacctgctagttggttgtataaggggcacgcagatggtccatgtgtacttgtatggaccgaccttaatttgccgatactacaaaataaacttattaactgcttgatcaattaaacgtacgacaaaaaactgaagttactgtt

SEQ ID NO: 43733 - DNA, 1021 bp, Oryza sativa
tgtgtcagctcacggtgctcctgtgctacatcaagacggtacttggctttttcttaatctaaccatgctttgcatcaactgaatttcaacgaagatgaattgcatctcttcagaggatccaagcagaatccttccaacgggtgctacaaatttcatactactacgcagtccttttcacctgttcataacttccaatgggttctgaatttactgataattaacaatgagatgacactatatacaaggagtactaatattgttcttaagacttgctattacaggtattctttcagcagtactctatagtccatagcagaaaacgcttctgaatcagatttacatgaatgcaattttatatctgatctgatgaattccatgaagtcataaaattgctattcatgacatgaattgcattagcgcaacattgtattgctgtcagttataatgcaatttgaaaatgtgctcaattagcagtgcttaatttccaagatagaagcatgttttgcatgaaatgtatttgcattgaaggtgaattattgcttctacagcctgctttcagttgcttgttaactgcccaagatgggactgaggctggctacagcctctcttttgaaggacatggattgcatatatttcataactcaactgctagtcttcttcacttgttcataattgtgattccaagcttctcaaaatatccgaactgagatattttcagcatcagtttgagaagcttggcatcaccgtcgaactactactcactgccggcttggtttcccaagtaagatgagctttctgccgatcgatctggatgagatgtgcttgcctcacatcgaggcgtccgtgtgatgttgttgtcgtgctgatcagtgaactgtttttgttgtttccgttccagctctgaaccttttctgtttttctttgagccaacttctgaagttcacatatttgcagttgttgattgtccagtaatcccagttagtacaatgtacttgcaatgctggacctatcataacatctt

SEQ ID NO: 43734 - DNA, 1346 bp, Oryza sativa
ttcagtcatcatactgacataactaagccgcatcagtttcagctagccgtgcaacatgctgaccgtgctacatgttcagaaaagtgagtgggaatgcagagacagatataaagaaacacgtctttcggctagctccacaaggtggtggattagacgatctgagttcaaagtctcaactcttctaattatttgatattatttgatattatgtactttcttaatattcgcgtcttgggaatggtcttgggaatgcagagataagcatcctctccatgattcccaaatctaccgttcacgtgttactgaaagcttcaggtatcttcagataaataccaactcttaactgtttaaccaattccactgctactaaattgtactcaacattacatcatgcacataatataggaataaatcgtggcacgttactattaatagttatgagttttctatgcgatacattatttatgacaaaatttatttttagataatgaaataaaagaatatgtatttgttttatttttagaatgtcataaaaatgaggagcattcataaaaagataggactaccaatgctcacgatattttaaatgcccccataaaaaatctactatcatattaaatttcaaataaaaaatttaatttattacatttgttttatttttaaaatttatgtcaaaattttccgtactaattatttagtctcattagttacataaaatgcacatactgtgcactcaaatgaaattttcaatagtttttgaagctaatattcaaacctaaatcatcaagatcattaagggtgtgttcggaacccttggttcccaatactaagtgcccgcacagaaaatggagcagcgattagcgggtgattaattaagtatttgttaattttttttcaaaaatagattaatttgatttttttaagtaactttcgaatagaaacattttacaaaaaacataccgtttagcagtttgaaaagcgtgcgcgcggaaaacgagggagatgagttgggaagaggggctgccgaacacaacctaaagacatttgccaacaaacttaatagtgaaatgaaggaaaatgtaatggcaggggcatgtaagggggtcaagttgaaatttcaggagtataaaagagattaagtgagttttcaagggtatacggtgaatttactcataagtataagcgagaaattcattttatcttttttgtaaactaatttcaaaacagtttgaaaggtgttgttaagctttaaacatcaacatactttttgcctaacttttaatcgacctcagttcgactttcacaacacagataaattaattcgactgcactatttgcccgagttg

SEQ ID NO: 43735 - DNA, 545 bp, Oryza sativa
atcttccatagttggcttggtggtttacaacgtagaataaatgttaactttttataggtgccgtagctttgtgttggacggtaagactttgtagtaatgatataatcttcaatggcttaagtactaactcccctctttgtaggtaattttcaggtgaacccactgcgctagtggtcattgttgcttaacgaggagaatagcgatgtggttaaacacatgcacaagttaccggaggctagagtttgggatttcttttccagatttgcgtggaacttgagtaagcggttggagacctagtatccacttttgtcatcttttgttagttggcttctattcacgagacgacttcgttgtgaggtgttgtagtctaagtacccttgttttatttggtcggtggtgttgttcttatgcaaggtgtgatgctaagtactattgacaatgtatgtttggctatgtacgtatagtttggatgtagaggataggtttttaatcatttttttaaaaataaattgacattttctccctctacatgtttatctatgttt

SEQ ID NO: 43736 - DNA, 621 bp, Oryza sativa
gagcttacaacgacagtatgctgtcgaaaacagattggggcaaaagcccacacccggtaagccagaaaacttctacaaattacaatgcatattacgtgatctcgctattgcacgttgtgaacactcctgccgtcttccagacgatgacctcttccttgatattttgcacaagctgttctatgcttcgaaatttctgttcaaagacacgcgcattgcgttcttcccacagcagccaacatgttagcgcgaatacactgtcgaagatgctcctgtagcccgtccgaaaagccatcctcgccttcatccaccaatctgtgcttcaaaagatgatgaccacattggacaaataaccatctcacctgttactaatactcaactttttacatcatgtacatagtccaggaataaataatgtcacaggaaaaataaatccagtggtatcaacaatagtaattgcaaaagaacaaatagcacaggacagatcatttactactaggtaacttgagtaacccccatataacttatcttaaagcagctagtgctatcaagaaagctttacttcttgcacaggtagctcaaaccggtgcatgatgacgatgttatctcagtataacaaattaa

SEQ ID NO: 43737 - DNA, 1940 bp, Oryza sativa
tcgcggttatgttagaatgtgcctctagcaaaagaaaaatattgatttttttaacttagcaaaaaagggtttcaaagtcagtaaaaccctgtttaaattctactattttcttttcaaaactttagtccctatttttgcattacaaaatgaaaaatcatagtccttaaaatgctccttaaggtaaaaaaaatattgatgtttaggaccagatttgattctcaaaatattataagtttaactaaatcttattctgaacattaaatatttatttatgatagaaatcaatgaaaaggataagtagtcaaagtcaatggacttgtttgttcgagcctatttgttgcggttcatattttcgttagtcgaaggcatgatataaaagtttacatttctacttttattggctctaaactaaaatcgaataccgggaaacctctaatgatgttatttcatctatcagagtttaaatcttgatgcacacgaatattacgcatattcaagtgagttttcaacaggattgcagttagatcagggatgtaacgttggtttccatttattagagcatgtgttaaggggacatattcgtgggagtgtgagtgtggcgttggtgtgtgtgcacgcgtttcgtgtaattaaaaaattaaatcaaatatagaaatgaacggaaaaaaaaatccaaaaatgaagtttgaaaatcttaaattgactacggcgccggatctgctacaccccaaaatcctgtggtgcacatgaacccaagagagtctcgaaccggcgaaaagtcaaaaattctctcgcggaatcggatagaaaccggaggggcggcgcggcgtcgacgcgtggcgcgagggggatattcgggtggcgacgatgaggtagacgacgcgcgtgggggcggcggcggcggcgtcagcacgcggcgtggtcggctggagattacgatggctaaacatggtttttattaggggagattattattattattatcagtggaagccaaggaaatgatcccatcaatcgactcgtacacccaatcacagtccgagatttatatcgttagctgaccaagaacgggtagtcaagttgcgttgatttttttctgctatttaggtgcagctctttttattattattattttagattttcatttcaagcttgccaaccttgtaaaaagttaattcttcgtttatatattttctgtataaaattatctggaaatttttttgaataatatctttttagttttgtaaaagttacttcatacggtcatataataacccatcaattattcataaatttcaactatatcaaacttgtagtacaacgatatgatacgagtttatatcgatcagaaatgcaactgtcatagctagcagaggggcagagacaaaaataggatagctagggctgcagccctacacatgaatctaaatatccattagcactgtactttaaaacttcaaaaagcagaaaattaaaggcaaagctacgtaaattacattagttgaggcttagacttaaaagaatatggcagctggtaattcgtattttatcgggtgaagctaaatgaccaatggtctagtcgtccaatggtacgaatccgcgacaacaaattctggtttaatttcttctaggaatttaaaatatttttatttttctctttttttatgttttttctttcatgtttatgttttttttctcctactagagtgtagcgcccgttccgtcgtggcgcctagcgggaaaattatctcctaaaaaccctaattgcgaaatttgtttcttcgcttgttgtctagtgtccgtgccatctcaagatctcaatccccgatctatcgtcgagttcaattccgaatccaaatccttccaaatcattcctccgcaaaagtccattttgcctcccccggggtcgatgggccgaatcccgctcggcccatctctcc

SEQ ID NO: 43738 - DNA, 510 bp, Oryza sativa
tgtgtcgtgatttatctccgagttctacttggaaaaaagatgatatgatccacgctatatatacaatgcccctgcgtgcgaggaggggtattgagttacaagccatagccaaatccatactgagaaataatccgaaggaagtaagagccatattcaccgaatagatcttgtcgggccgttctggcatcttgaacacccccattgtgtatgtgggtaatgcttggaccacatgctcttgaccaaggcttcttttcctgctgcagataaatacctctcgttccaatcatttaatctgatagcaaacctctcttaattggatggaattgcatagatttcattcttccttggagagttggtagccccaggtatttgtccttaaaacttgcacggtcgaccggcaatatagcttcgattccctcctactccctccgttccttaatacagggcgtgagtgttgtattgcaaagaccaataaaactgtttcaacagtagttacaccgtgtgatattt

SEQ ID NO: 43739 - DNA, 620 bp, Oryza sativa
gacaggttccgccggtcccttcgcgtcagccaatcgacgtttcttcgactgaggagccgactacaggaggcagccaggccaacgaggagtagaggaggcagtcttcagcagccgtccgtgtgttaggcccttttgttccgccgccaactcttttggagtcgtggcgaggtagtgcgtgcgtgtgtttgttgtgggtgttgtttggtagtctggttctcctaggtggtgtgcgtacagtcaagctcggcgtagctctgtgacttgtccacacccgttgtattaggtgtttttatgatttgaaaaatccagtttaagcctagtgtgtgctatctgagttgctatttactttgctccttgcccctccctaaggtgcttatctgaattcttacctcgccatcttctgggagtttagatggctagccgcccccgccgtgctgctcgtgcgccagcccgcttcggttttgaagaaggtagagttgagacagaagcaaatcatgagtcagctaatgagcagtctcaccgcagcaaccgttcgcaccgtactgcttcccgcaacgcagaagttgagcaaccccgccgcagcaaccgctcgcatcacacagcttcccatagtgcagaga

SEQ ID NO: 43740 - DNA, 2677 bp, Oryza sativa
ttcagcaatgtataggcagctgtaccagataagcagggtgctttttttgtactccatataagcagctgtacctgggttcttctccagtctgaagtttgctgtctgtatactcctgaaataagcttccagcgtgagtaagtgcttgatgctggaatattcactgctaactgctcccgattgatttacaaattacaaatgtgtgaatatatgtaaagtaatgtaaactattttatttgtccgttcatcttgtcttttgtcttcagtctctttcactaggttgcgtaagcatgatatgataagtatacaaccagatctgggctttggaagagtgctagactgcacacatggttaacatttgccacgttttttctttgttttgagatcacgttttcattttcttgttccggtaagagaacgcatatactttcactttgatgcaattttcaaccttaccaagttttgataaagttgccaaaaaaatgttaacatttagtttgctattaaattttggtaactatataggaaatcctgccaaaattttagtaagttaccaaaattttggcaatgccaaaaattagtaaagttttttttttcatcaaagtgaacatgcctttatactatcttgttttttttaagaatactttcctgtttcatagtatttttgtagtcattccgtgttggtttagttgcaaggtttggtacagtagagatgtttggttccgtgcctaattggggtaataccagaattttggtaggacaaataaactttgatagccctctttactcgcctatcttgttcatcggaagcattaacgctgaacttttccgtggtggagatcaaccttgcagaaagcgaagcggatgaacgattgatcgatctcgtcctgtcgatcaaattgctcgcatttttcaactttctgcaagcaccgatcggccggctcgtgcgaggcgtagtacagtacaaggtgtcagcgcgtagacaaatacttcttctatcccattttaaatgcagttgtgagttttttatctaacgttaactgtcagttttatttaaaatttttaatgattagtattttattattataagataataaaatataaatagtattttatgcgtgacttatttttaaaaagttatataatttttttaaataagataaatggtcgaatgttagacacacaacctataactacactataaaatagaacgcagggagtaatacaattacctctggacaaaagattgatggtatgtgtgtatgtctgccttggcaaccgaaagtcttgcactcaattgacttccttgccttctggtttgacatagctacacgttgcagagaatcagcgatcttgcgttgtaacatcgggctcagatgtggctgagcagagttgagctcgcagtgttcttcaaacatgacgacattgggaacagtggaacgtgatcacgacaagcacaaaaaaaagtgagagaacggcagaatattaagctcattcccaacccaaaaccctaaacatagtttccataaactctacatcatcaagaaactagtactagatactatttttccaatgcaaacaccactatttcatatttaactttaatactacttatctcacatgatgtcttggatattgtgtagaaacaatgtctcatgtaagacatggttttcttctctttcctcatttattcacttgccacatcattttttattctaggtggcagcttattcaatgctatgaacactatctatttattgggttgggaatggctggcggttaattcaatttgctgctgactattagcccttgtctgcaagtgttcctgacctgttagcatgttgcttttgctggagtagtacttctatttatcttcaaactttagtcatctctttttttcaacataaaatttataaatgcttgaaatggtgttataggagtactatctaatggtcagtgtgacaaatataaccatgcgactttaattcatcataatctaataaccgaaaatttagtagtagtgtagtactactactctataatacaattactcttttgtgcttatatattatgttactctataatacgatgaaaagtagtattatttgtggttagatggcaatagttaaccatgacaattattcgagtaatctataacactgtactactctgcattgcattttgtgggcctaaaagattgctgtaccagagagtataatacaccatacgtacacaaataatactgctctttaaggaccaaacgggagtcactaatgagcttttgtaagctaggaataatcaacgcataataatgatgaaacaaagtgcataattaatcattctccccaagaatcaaaccaaagctccatctgatgacaaagatccaaaccttttgccatcacccaaattaaagtacaacaacaacaccacacaatggaaagccgggcccactttatgacgagcattctcatggtcggcgccacgcgtcgtgcagccattggtggcacgtcagcatcatcgtcaaggaatggaatcccccgggctctcacctcaagcaaagctacctccattccatcgctttcgccttctatataaaccccttcttctccatgagcttgcaagcatgtgtgtagcagtaaatctgcacaagaaaaagattcaagaacagtttagatttcag

SEQ ID NO: 43741 - DNA, 730 bp, Oryza sativa
agatcaaacgtttctcaaaaaattaacagcggcatacattaaaatacggagggagtatttaataacctactgtctagaacattctttgctaatcacatgcaccgcaactgcaccatccaaagctcagctcatgattcagctagcgcttaattaattataataggagtaattagattgtcttcttagacagatcccatgcaggcactcttatcacaaaaaccgctggtccgatccgttactgtttgtgtggcccggtacagtgttttggtgagtggttccttttcaaagattggatctttttcaggtgtctcaatcttaattatgtcttgaaataaagacccgatcttaattgtgtcttgactcttttttttttcttttgaggaattgtcttgactcttgagataactaattaaaggaacatgtcccttcacgttttgcaattactcaactaataatacagtttcagggagaaatcgctgatgaatcacatttcgtagttagttagtatttctgaaaattttgtaaaatcaaagatgtttttcccagtactgaggcttcgacttctgcttgtgtgtaggctttggtggcaaggaaggagaacgtgtgcatcgtggattccggttgttcgcggcacatgaccggtgataaaaattggttctcctcactcaagaaggcatctaagactgaatcgattatctttggtgatgcttctacaagtgccgttctcgct

SEQ ID NO: 43742 - DNA, 9536 bp, Oryza sativa
ccccgggggagatgggccgagagaaattcggcccatcgaccccgggggaggcaaaatagacttttgcggaggaatttgattggaatgattggattcggaattgaactcgacgatagatcggggatttgagatcttgagatggcacggacactagacgacaagcaaagaaacaaatttcgcaattagggtttctaagagataattttcccgctaggcgccacgacggaacgggcgctacagaacacgaatgaaaaaactaatttcataactcgcctggaaaaagcaagacgaatcttttaagcctaactaatccgtcattagcacatgtgggttactctagcacttatggctaatcatggcctaattaggctcaaaagattcatctcgtgatttacatgcaaactgtacgattagtttttctttttatctattatatactaaaagtccattaaacttcctacaaacgctctcaagctgccatgtggtgctctaataaattagagaaaatcttataaattctaagaaaaaagcaaaacatctaccccttgattttcacttattttggtcggtctaatattatacaccgttagataaaattgatcttaaaacaaaccaaatactatgggtcccacctttcctccttctcccgtgcatgtgtacgtgggtatatatatatacacgtacgtaccgtgtacgtacacccttcttttctttttttcttctttttccatttatataatatggatatatacttttttaaataaccataaatttacaacataaagaatctaccatcatataactcactggtaactaaattagctctacaatttttgaaaataaaatttaaaccattatatgtgaccattaaattaataatgtaatatagtttccacttaaacatgtgtactcattatttttactattattttcaaataatgcactattttaaaataaagtttacacaattatattgtgtacctatcaaataaacagtttaagatgtatattaaaccgatggacccattatttaaattatcggaactattttttattacatcggactattattctcaaataatgcatggtttcaaaataaagtctacaccattatattatgtacccattaaattaacaatttaaaatctatattaactaatgtacacttacactagaaccggtggacccattatttaaatcatctgatatattatttgctaataaataaaacgtccgaagttcttttttttgcccgctgcacaatgcacgtctgcacctttactttttgcacgcgtgacaaagcatcgtgtctgaggcatctaaggtgatcacgactaccgcagcactaccattttgctacatatcaaatcatatatagagatgatgcagcgagagaagaattaagcactgtgggttgtgtttttttccaacacttggctttgtttaagctgaaaccgagagttgattacaaaataattataatgtattgtgttatgtcgtatttggattttgtactatttgtttgtatagatgaaagaaatcattatgttataaatgtgagcacaatattaacgaatatcaatagcactcttacaaagactagggtgttataagggagtttaagatcctctttttttttccgattccatagtttgtaaatggtgtcttttttaaacaacattttaactttttagaagtcaatttattcgtttataccctcaaatagctatcacataaatcagataattcatcaattttagctgtcctaaaccctaagtagtacatattttttttatgcaagtcatggtgatcagtaaattggggatcaatggataatcaaagtcgtaagatgaatatgtaagtgctactatgaacaactgtaaataggtgtcaaaattaattgctactaattagacatctaatggcttgctagccacataattaatttctctcaacatgtatataaacatgcacgaagctggaacaaatattaccatatgccctatacatatatattaagcggttaatattctaattacacgtgttaagtcctttaaaatttcttaaaacgctctcaagctgtcacgtattagaaattctaaggggaaaagagtatcaattacttgatttttcacttaatcgctacgtccaatattataaaccgttagattaaattgatcttagaaaaaacaaaatactgtaaggtctcacctctcgtcccatggcataggtatgcacctacatacatgggtacgtacgcttcccctcccttttttcatttttccctttcttctttttttccatgcatacacttccctccctttcttactatatcatacaccttcttgagatgatttaatcataagaattttgagtatcttgctcttgtatttttcatttgtggccatactacacggtatgcatatagatggactgtatgatacttaactagcaatagtttcttatttactcgagaaaaaaaatgatttaaaagtcataccttaagaaaaagtttgtaaatggttttttaagataccttaagaaaaagaactttagtttgcccttcatctataagataaaatttttgaataaacaataattttacctttcaataatataagtgcccgcgcatgtgcgcgggccaccttcctagtttatatttaatgctctatatatgtgtctaaaaattcgatgtgatattttttaggaaaagtttttggcaactaaacaggacctaagtactccatggccacaatatacatgtgaaaacgtccggcggagaaatgaccctgcagttccctcccgacatcgtcgacgtgatatgtctactttcagcttcttgtcaggccacaagcccacaacaagctacaaatagatcactttcagaatcctacttcatgcggcagcaggagaatcttgcctgctttcttgcaaatttacgagtgcagtggacgtcatgcatgacccatatatacatggcggctcatcgtgtcatcgtaattaagtgtgactacgcgttgcgcccgagccgtgtttagttggagaaatttgataattttgacagtggggaccctagcggatgcacgtgtcatgggctcatggcgataacgaactctcaagacaaggaccttgatgtgttagacaatagtagcatatatagttaattacttactttttcgtcgaaacatgactaggttaattaaactttactgctacattttgactggtgtacagatatacagtacaatccatgatcccaaagtctccattttaggtaattgaatttaaagtttacgtggattttatacggtttaccacggtaaccataataacaatgaaatgagacgtagataactcttactcaaacggtataaaaaccgaaaaccctgattcaaactaacatggcccgacccagactatccgataatatatcaggccaagatcaggcttatctaggtcgggctcgggctcgggcctagcgtttatgtcaccatcgagtcgaaggtggtgccatcgatgcaccaccatcgccattaattagggcatcctgattgccgttggataacttggatgttgcgacggcagtaggttactaggctgctcatggtggaggagtccaacaccggaagggtggcaatatggaggcggccagcgaagatgagaccaccacgtaggcccctcggtcacccctctcgccagctgggtagagaggaggtgatggctacgagtggcttgggagagaggagttggcggcggtgggaagagaggcggcgggggcaacgaagctttcttgtgctcattggggagaagcgagagaggagcagtgtgtcttgggagatagatgtggaggagaagagataagatcgacaaaggacttagaggagtagataagatctgttggaacgtggcttggtttggcttgatttttatggagaccgattttgtaaaaaaaaaaacagcacctatatataatatagatgttggttttttaattaacaaacacatataatatattaaaggtgtctttttttgaaaaaaaacatgatgcttatagctgctcaaaggtgtcggttctatatttttccattccatgggggtaaaaaaatgtctataaataccaattttagcattaatttccagacctaaagtgccacccttttgtgatgctttttttatagtgtgattatgtcctgcaacctgtacgggcttggacaattcatgtccagtcttggttcctaggacaaaagcccaagagttggcccaacaagactatatatgatggagtaagtccacttgccatcccacatatttacgtagagtttaattggcatccataaattgcaatactagaaatcttcatccctcatcttggcaaaaccgtttaagtcagatcccataccggtatgatggatggtttcaatgacactgcaagttgatccggtctaatcgtgttgactaggcatttatgtggcaaaagaaagtgggctccatatgtcattctcactcgacctcgacatgcatgctagacgacatgggtgacacactggccacgatctcccgaggagaggttggccttgcattgtgccatggcatacacctgctagtagctggtgccatagaacccaccgttgctcccgccgatgttggcctccatatgtgcgaaggcggtgtcgcagtgcatctcaaagtcagtcccactattaccgccctttccacagttcttgaacaaaatttgggtgtcagacacctacgggaactaggatatcttgtatagtgcaaggcagtggtgagctggattcgcgcgaagacaaaggcaccgtagatgtcagactagaaggacatggggcaggagatgcaggcatgcagtcaaagacgaagaggtccccacgacactcgaatagagatggaggcggaggaatttgacgatgacaacaaagtcttgtagatcttggtggaggcggactaggacaggagcatggaggatagcaccacgatagttgggagagggggttaccatgccgggggggggggggaagctcttgttggagcgccctcatcagcctgggcgactcatggtaggcacccgttgcggagatgcgtgtagtggtggcggcatgccccgcatttgcacctccacgtcctcattgagcctggagagggtggaggcggcgctaccgtggtaggagggggtgcctccgccgttgtcagagctcaatgcccaccttaccgcagtagcttgcctcgcgcaggcctcgagggcaaggagctcgtcaatgtatgctgcggcgttcggcaaggagggaggccttgtccatgccggacatgctagcccgggttttcctccctcaccgcttcattggccttgttgctgacctccaaccgccgttgccgcctcccgcaaacaggttcgtctgctgtcgcccctctccccattggtgagctcctggggaagagaggatgggtcccacatgtttttatttattttttctaactaagatgccacgttaggcaaaactaccattcatattaccatggaacctcacttggacggttttgtcaagatgagggatgacaagtggacttattcattctttgtgacttaccatcctataatagccaccttttttttcccctgatatgagcccaattagctccttttataaaggtacctgcaggctgcagattctccaggcagaaaaaaggcggcaatacgaaattccatcatccctgccacaattttttttttgactggatgccgcaaaatgcattgatgccgaaagtgcttattgcctaattagagctggaaatggaacaaaccctttagggcaatccttcatctgagcatcaaacaagagtgtcctcatatagttaggcagaatgtagcaagagacaacacgcatattcagattacattattattatagcttcccaaaaacaaagaccacccactacagcagcaaaaaggggaaaaataaagtgccaaaaaaaggtgtgatcgatcaggtgatgttcttgtgcagatactataatcccattgccacaccatgctggacacaacaacttacagatacgaatgacaccatatcatgcaatctctacttagtactagtaaatataaatacttcctccgttttatattataagtctatttacttttttctaaatcaaacttcttaaccttaatcaagtttatagaaaaacataataacattttcgacacaaaacaaacatatcatcaaaatatattcaatgaaactagtttggtgtcacaaatgttgctatattttgttaaacttgatgataagtttgacttagaaaaaaaatgaaacgaggagtagtaatttatgaccagaaatgaaaatagtactatctgaatatatgttggatgattgactcttcctatggctgcccgatgctcgatcactcgctacctgaacagcagccgcagcagcagagcgcacaaaggaaacgcttcagaatgtgattccgcatttcgccacggcggcagaagcggacccgtcgacggcgacgttcctcgccgtcgttgtggccaccggcgacggcgacggcgacggtagcctgtgcctccatgtagatcgatgagattgcgagtagtgtgctcagtatatcgaagtattctacgctgtagttagttacctgatacaaaatgtgtgtgatcaaggagatgatcttatatagggttcagagttgagagttcagagtgactgaaacagcgtaactgaagtctgaagaccgaataaaggcaataggacacagaaaggtaacaccctttcggcagttatatatatatatatatatatatatatatatatatatatatatatatatatatatatatatatatatatatatatatcatgcatgatactactgagggaggttagttagttagttactactagttaactaatcaataattgccgcactgaaaattcctaataaactgtacttcaaggtaacaacagtagacacgttaaggcttaagatactgcgcgcaaggaatttcttgtggatacaaaggacagagcaaagcatcttgttacggcttgaaaaagtgatcttttttttttctggattgggattacttcaagcaaatatgtgccttgtaaaggtcatataattattcaaaacagaagagatgatatggtcaagattaagattgtttcaggtccgtatatggtaggataccaataccattgagctcatctaaaagctgaaacttttgtggaacagctactctttcagtgtataccatggaggcatttataccgaacatgggtcctacagtccaactgagtcacatagtcatcaatagcatctaatcttttcataagaccatcactagcatctaatctacgctttagtcgctgtattggcaaagttacaacattaacaattcctatggttgcggtatagtatctgaagaagagcatcatcaacttaatgtcggccagcttgtgattaacgagaaccccactcccactaaccacagagaaagagttaattaattatcttgctctttccaatgttccagttgaactttgaatgctaatctgaattgcctagtgctcatacaatgttcagaaaggcagcagttgattcaaacgaccagaaaggaaagactcaaagatgcagtacattcataatttcatatgcctttgtacaaagaatatttgtaagacccatgctatgattataatctgactaaatcaagctgttccaggtttgaacgtgtagttagcaactacgggccacagaagagaacctctctttcagtcacaagtcagtctcacagactgagtcagtgatcagaatatatgcttttgctggcccaaaatcagttgaagaactagaatctttctcagtgcattttaggcactgaactggataactactctcatttgtcttctggtttatgcagagaacatagagcatttgctagagtatgcagggaagaaaacctttttcagtcagaagtcacaaggcacagaatgagtcagagatcagaatatgagaatagatgccttgcaaacccaaaatcagttaaagaacaagaatctgtgtgggttttgagcacatatcataggtattttaagcaccgagttggataagtatgtgccagtcttctggtttcactggaagaatttggggaaaaaaataagtatgatactcctatttatgcctcttttaaaacatggaatgttttcaattcttatgagactaaacttactcctctgaatatctttgggtttcacaagaagtcttatctattattcttcccttttttttctctccgttagaaatagtttcacgggatttagagcaagtccagtttatgtattaaaatgagcatttcatgaattaatttacttacctacgtaacaatgtgacttggtactactccttgaatgcataaggtgcttgtttatcattgcataacaaaagtttgttaaagccaattaacaaaccgaaatggtactccatctatcccataatataagtgattttcttcataaatttatccaaaatataaggggtttaggatcctattacagtactataatcttcacctacaaacttttatactagtttactccactaccatatacttttatactaatttattctcccacctactaacttttatattactttattctttcacccatcaccctttgtcacatcacatgtcctttactacttccttaattcttgccaaaaagggtataatcgcttatattcacggactgagggagtgcttactaggctatgttcttcccctccttctccaactccactctcatttttcatgcgcacataaacagtgtgttttttcaaataaattatacaaaagttattttagaaaaaaaatcatattaatccatttttcatattcttttagctaatacttaattagtcatacattaatagttcatcacgttttccatgcggggagaaactcttaccttcccaaagcagccttagagcaggtacaatagcaagctataaacatattttaaagagataaaggaagagagagaagagcaacgggatacagatctatagccagctgtagcacgggctccaagacataatgtttgtatgacaggtaggatcaattattaatagtataataagcatctattgtatgattagctattacattgactatagatgatttgaagttagtacttggatatactattaaacttgctcttagagcaagtacaatagcaggctataagccagctataaacatattttaaagagataaagaaatagagagaagagcagcgggctacagatttgtagccacctgcagcatgaactgtcgaactccaagacataatgtgtgtatgataggtaggactaggtattaatagtatagtaagcaattattatataaatcggctattacgttagttatagatgatttggagctagtagtgtgctatactattaatattaaacggcccattaggccgtgcacctagggacgcccgggggtgcggggg

SEQ ID NO: 43743 - DNA, 687 bp, Oryza sativa
agtattcaacaaatgttcgccacctatatgtcaatgcaagcaacatattaactgtgtatgcaagccttgaagaaaacatagaaataaagaaaaatttgagaagcttaataatatgcaaggcagatgttgcctcctggagctggacccgcacatctaatttcaactatgctctggaagaaacactgaaagagttaggaagcttacgggtattagtgctccgccatcctgctggtgttctgccaaacaacatccagcatatggtccaccttaggtatctggacatcaaagaaagcagagaatttacctttctgcctacatcgttatttggactctaccacttgcaagcattgagtctgcagtctcggtatgtgaatagactaaaaataggactcgaaaatggcatcagcaggttgacccagttaagatacttagatgctccaccaggaataatttcaggcataaaattgattggcaagctcacattcctccaggaattcaaccatggcaatgcaaagaaaagaaaaagaacagcatcattatagaaaaactgtaagtatgacaagtgaattccctccttaatcatgaattatggattaaagaaaaatctataagcaaatgaatcatgtctagtttgtgggtacaatgttatagttgtaacaaaaaatcttctgtgagaggcacaatggg

SEQ ID NO: 43744 - DNA, 1250 bp, Oryza sativa
ctgagctggtcactgtcagtaaaatctatagcatatctatatagatttttgaaaagaaaagagaaactacttgtgaaccaccagagggacgagttaacaagcatgtgaccattgtacccagtggggcactgggcggcgctgctgcacctacaagggaaatgtcaaggagtgtcgtgccacggcgagggttcacagatatataaaatctagtgttctcatcattccactcagcagcttctggcatctgcactaataaaatggattatattctgcactttaacatcatatagtcatgatgtaccatttgtgtcagcaagaagcagtagaactcaacacgaaaacaaagattgaatccatacactatgtttcagcttttcaggtttctccctgaatgacaaaaacaagaaattgaaggagatggaaggtcttcctaggccacattttcaaacctgtacactcttggaaccaaaggaaagaagaaccaaacaactgtaactaaaaaatgcaggtatttcctgttcagatcaattgagaacaactatcagaacttcattccttttacaccataatctgatctctatcgacaaaggtaattgagccaactacgacactatcatataagcaagaaagaaaacacatgagaaatgtaaatgttaaactaaatccaaaaggaaaatcctgaaagtaatcagcatttactctttgaaactgaatccaaaaggcatggactgtgataattctaacctactagcatcgctacatgcaagcaacatcaagcacatagacgaagcatccagtacataggcgaatcttttcttttgttagaaacaaagttgtactagcacaaaaattatcttccagttatgctagaaatttagggtgtgactcaaaacgaggggaatttaggtgtgggatgaatagatggataccttccgttcttggtgatgaggaggtatcgcgcactgcagatcgaggcggcagccgaggagccggtgcagcgctgcgaagggggaggtcgtcatggtggcggccggcggcgctaggtcaggaggagcgatggacacctgcagcggcaataggtcgagacctagcaggtgttgggctttttcactttgttactattttcaaccttaccttttttttggcaaagttaccaaaaaaataactacatttagtttgttgccaaattttagtaagtacatatgaaatcttgccaaaattttggtaaccttaccaaaatttggcactgc

SEQ ID NO: 43745 - DNA, 555 bp, Oryza sativa
caaatttctctctatgctgaaacattctgctttatgggtgagctcacatattttggtgacagcagaattctgttattctgaagcataaattttatgtcatgtgttcaacgagtccaatgataggaccataggaggctacataactgaataaattgaatggcatcatagttaactatctccggatggcgctccatccatgcgttcatgtcgttgtgcaagtacttatcattgagtttcttagcaatcatgtcaacatttagctatgctggcaaccatggttgtgtacttgtgttagcctgtaatgtaaagattcatttccttttcatctgaatcaacatgatcaactcttgggtagattctttgtcaaatgtacatatgattggagggaccatgtgtgatttatcattcaatcagactagcaagatgttggtcagttagttctcatgaatactgtcatttagctatatttcttacctcaggaccatattcctgtttatttgtcactacaattcacacttgcatgtcataaaaaaaaactttgatatcatattagac

SEQ ID NO: 43746 - DNA, 6418 bp, Oryza sativa
caagctctcttccaacaatattgttccagatgagcagccaacatggcaatgatggtgagaaaaccctacatgtgcacatgttttgcagtatattttcattgatcaccctcatcagtaatgattcataaaatcagagtaatatcagttggtggtgatacactcatatgccacagttcaactgttataagtgactttataactaaattcgtaaccaacagttaaagatggcaagctctcatcgctaaccaatgaactatgttggttcaacgaatggggcaccctgtattgtagtgactatgaaattaatcttttgctttgttacaacatactaaaataaacaattttataatttgtaaaaaggtaggtcctagtttgaatgtcattttaccatcgagcttgtctgtacagaggcggtctgtgaactacaccctactggcgtattgcacatatgatttaacttatggaccacttgagcaatacaagggggacatttgcaaaaatagttttgtcattttgtttttaatttcctagcaccgttgcattcaacagttgaagctttcatgataaattgtctcattagagtactactagtggacatagacgaattagtatagagttaatatagaatacaatcaaaagctaccttgtacatcttgtccatgttgtctccaccagctctaatctcaaccagccagccctttggaagccattcatgtgtcctctgcataaatcatggtagaactcagacgtactaattctaaacaccaactaaaatcttgaatgatatggtcatatatataactcaccgtaaggttactgcctacagcatggttctttgattccaagaaacactgatccatctctgagaatagataatccaaaacctctgacttcgttgtgaaagtggttccggacaagggacatatgtaatactgtacaaaagcaaacaaaattagcattgcaacaaaaatcttttagaacaaacaataaaatttaagttccacgaaagaaatagattgccatctacatattttaatacccggtagatggtgccatcatcatcacaatagacctccattatccagccatctggaagccaacctggtcggccatccacatcatcgtcgtcactttgcaaattctttgttgcttcctcagaagatttgacttcatcacgatcatcgtcgtctaagatcccgacagatggtgacttgcccatggttaaaccaagatcaaagaactctctcccctctacctccctccctcgccctctctctctctctctctctctctctctctctctctctctctcaccctcctctgctccctccctctgtttctatacctctctcaactttgcactagcttgtgtatatgtagaacaggatgtttagctgcatattaatagctgcggtttttagtaaatagtgtgtttgtatacctttgagggacaacccacaaggcgtattggacagctaatgtttaatataatatgcatttaatgtgatgagttatacatgtttggttaagatatgttctagatagtatcatatctgatgccaaatcgaacatattttcgaaattaatttatactatttatcacattgtagctatccatcctactataaacgataaaatgtatcaaattaattaaatccgatgccacctccagaattgaataaacgtcgtcagtccttaaacttggaccagggtgtcatctaggtttataaacatgtaaaatgaacatataggtcccaaatctcggtttaatgtattggaccataatcattgtgctccacctcattgtgacttaagttgtgtgctttactcagttaactctatggaggacctgcttcatctcttctttcaatgctcctttgcaaagaactgttggaatgctcttggtttctcctgggatacttcactgagcatggatagtatgatggttcaggcaaacactctctatcagggtcggtgcttcatggaaaaattcttgtatggtgcttggaatatctggaagcagaggaatggtttcatttttgaacaaaaaactccttccctgtcttcatggagacaaatcttcaagggtgatctcctccttttgctgtttagaataagtgaaagagataaggatgtaatcctaaactggagcagtttgttgtaatttttctctttcttcctttatcaataaaagttttttaacagtgggggcctcctctgctgcattcctttcaataaaaaattcgtgaaaccacacgctatgataggttgatccactcgaccacacaaacaagtggatctattgcccccctcaattccttgcaaggaaatgcaagaaattcccaatctatggcataacaaggaaatgcaagaacaatctatggcagaaattcagagttcctctctctaatttaggagcggctgcacgacacctaggagatgaaaaaaaaagcaattttcgctgcgtaatttcaatagaataaatttggtctaccctcttatgaagaatacgggtactagctgatacacaaacaacctacatatccgactagagatacacgcgtaaccctgcaaaacaaggattactttgaatggtcaattctgaaaaatggacaatttttagttagctctatgtatatcgcaaccatgaactctagtgttaggattggcaagtggattatatgagatttaaaggtatattaaaactaatgtggttccttaataacaaagtaatcctaacaaaggataaactggctaaaaacactgggggtagacaaacactattgtttctttccattatgcaccagagacaatccaacatcttttctttgggtgtcttgttccttgttttctttggagacatgtgttctttgcttttaatgtcccccacctcgtaatgccataaatatttttggtaatcgtttacggtcattgtagaccaatttcaaccatcaatacatcctaaaataatggggaactagcaatgcttgcatgcatatttatttaaaaataatttagttccacttgtacttagcaaagtatttgaatacaggagatcacaccataaatggaggagaaatgatggaaaatcacctttaaatcaatcagagaccgacatatggttgacatatggatcgatgggcccacaaccccattgaaacttctgcaactgggcccaaccaccaagccactgggctgaggatccatcaaacaatgcccaggaggaagcactgggctagggaagtctgctaaggttcagccaacaccggcctggctctgctggcccaggcccaagccaatgactagggatggcaatggggcggggcgggggcgggttgggctggaacggccccgaccccgacccccaaactctccacccggccccagccccgaatagacatgcgggtgcaaatcaatccctgccctcagcccctgcggggccccacagtgagtagcaactccaacaaatcagcaaatcttgttctaatgttctctatcatcggaatgtaaaactaccaaatatatgaaacaacatataaatatacacagaaatatagatcgagaaatagtgttatacctctcagactctcactgtcagtgcgtgaagcaggccgtcgtgcctgtcccctcaccggccccgctcctgtcccctcgaggccgccacgggcagccggacgccacatctatcccttcataggatgccgcgcctgtgcgccaaaccctcgccagccgctgcaccctcgctgcttgaccgcaccctcgccgcgcagcgcctgtgcgcctctacattctcgcctcatcggcagacatgagggagagccggagaggggtactggagagatggaacacgagaggccggagcccataggggaggggagagggtgaccggcgacgacgtgatctagagaagtgcgccgtgcatcctggcaccgcctccgcctagatggtgggtgatgcggacgggagtcgggaggggagatgccgagatggggagacactggagaggataaggctagggtttgtttttatccctcactattcttttgggttgggcccttttgggcattctatgggctacattttaagggttaatatacacccttggggcctcgcaggtcacccatgggtgaactgtctcccctggcccctccccacaaaaatgcggggccccggccccgcttcccccacaggtcagaaacggaacccgcctccggcccgtgggggaaatttccatccctaccaatgacggttgtaaccgacttcccaagggtggttgtactgaaattaacgcccacaaccgtcattctgaagctataaaaggacttctcatcctccattccaacaaacaccatgaaggaaatcaagtgaagaagctctctttagtttacatatttcgctctagtgctagtggatttagaattagaatggtcttccttagttcttcaagttttacggagaatttgggtatggttctagtagctcttcccttttttgtaagactttatccagtaatgaaatattcttctttataggtccttttctatatttgcataattattcaagtaccaacttaatttggtttacacttatctcgtattaattatatggttagcttgccagagatatgcaacggtattggcatagtgttcacttatttgattgttctatgtcatctgcagaggtgtagagtagtatttactaatgtaagcatggtgcttagattattaagtatcattaagtggtgctatatgccatggatctatagaggtaggccgctgatgctgacagttcagtacgagtaatcctccacgtgcgtatatagggctaagaaaggttcctgttcgtgtactcctccgtatgtaaaactggttggatagtcatgacggattgtcgtaaggtactcggcaattaggggtggtttctcgatgtaccacatagttgtacaatagcaagtgtatcgcaaaaggactatatactagaagtacataaatgatgcttttcttatttcttctctacttagcctagacttataatttagtgagagtattctaaactgaaccttctatgtgtcaaatctatccttatcctcaattgataaacccatgcgtaagactttgatttgcataagtgtaatatgaatttatagcacatcactctcttaccatatcttcccttgggattaaataaatacgataacttggaagtacttctaggtgaaacgctacagcagtatatccgtgcgcttgcagatttatttatgtaatccattatattaccatttaatatttctagcaacattgcttgggattaacttcctagtaaagaaatatcaacactaaatggtttagaagagtacctaggtccatgaaaaatatgatattaattggaacaagtgctttatgttggtcaatttggtggtgccgcaatgatagttctcaattgtaaacaattgtttaacccgatgcaagttatctttatgtcttcctattagctctccttttggtttactatgctatcatcaaaagagcatagtacaatgcacaatggtgctatatatactcttgaaattggtagccatggttctctgaatgcaatatgggtggcatagtttcattaaaatttgttggctaaactatgtggtttaacactagttaataataaggaggagttgggggctctgtcccatcaaattatatctcattttaatttgttgaatatgtgtaatcaaagtgtgtttggattattattttgtgatgattggtttttatgtttggtgataattggctgctagtgattttgtctttggacaggccggtttcactagggtgcgtgtaccagtcctcccttttatcaaattcaactgaaaattcaactgagtgattgtttctttgaacacgacctctgcttctaccatgacactactggagaattgattattaacgacccgaaatgtggtcgttaaaagcttaaatgtggtcgttaaagatcattaacaaccacaaaagtgtggtcgtcagtggtcgttaaaagctccgtcgtaatagtactaacgaccacgcaactttttttggtcactattttattaacgacggcattttttgtggacaccccgagtattatatcatccagtgtccaacacgaccaccacatactattgaaggaatgggatctatacacgcataaatagccactcgtcctcaatgtgtccatgatcgcggttgacaaccttctattataataaccggaatgtcgagtagtgagcgcaagagataaccgtaagacagcttgccagtacactccgtcatatgcccgtcaaccactcgaaggtggcgaccaaaagtataccccagtgactcgatccaaagcgctatccccgattatctcaagcgatcaaaacccgttactcatgcttagctag

SEQ ID NO: 43747 - DNA, 2284 bp, Oryza sativa
gtatcgcaaaattcgcgagattcctggctcgtatactagacctaccaatccgttcgcgtctggcgcacgttcgcgcgatagacttacccgagagcaagggggcgaagaaggataagctgtcacgatgttccaacgtgtcggtatttctctctatattcaaggtgggtcccacgcgataaaatggtggaacacaagtgtgagcaagccaaaggcactgccatgtgggtccaggtcgtggtaggctacgtaagggtgacgagaatggctaggaacacaggtaaacacatgttttattcagtttacaggattttcagagatttttctgtttctctttctttgaagttcaaattaaccaagttagaatgatgttaacaatttggtgatttttgtggttataacctatgctacctagattccatttctcaaagtttcactcaaaaatttgaaacattttaattctgacaaaaagatgaaaaggggtatgctgagaactaaattgaatttttaggaggtcaaaactaagggtaacaattcttgaaaaattatattaactcctgataaatactgtagcatttgaataaattataaaacctatatccttctgttcaacttaggcacatttagaagttgcttcattttgccaattaggtttctaattaatttagtttgactaccttgactattttacttgaggtagtaaaaagtttgatacaatcacaaaaccttcatagtggtcatcttaggttggctaagtgacaagaggatattcattgattttatgttgcttagatttgttacatagtctctaggtttatttaacatgcatcaaccaattatgaacgacaaaaaaatcactcaagccaataaattggacttcactacaaacaactacacaagcacacaattattagttactaattctactaaccaattactaagcatgattgggtagattatcaaagagcaaaagattaatgactatactacaacgtttcttaactaccgcttgaccatttaatttggttatatacagagaggcttggacaaagcttggaagctacaaagtagaagacactaaacattagagcttcatggattatctattgttgagtcagcttagtctcttgaaacattgttcccctcgtggaagggaaaacacaaattagtcgagctacacctagaatgtgttggtagattttattagcgccaaaacactctctgaatgttggatgagtctttaaaaatagttttcatttatctaccataaggttgtagggtcattagtctacctataatgatcattaaagtttcataataactcaaaccaacagttatggaaaattgtttcaatttctacccatttttttatatatacacaaattaaccggatgaggttttgaaccgaaatagctttaaaacttccaacttttactaaggatataccccgatttccacttaagttgattaattaaaactgcaggatgttacaattttgtgcgatcgttatttcattaacgacagtggcattgtgccatcgttatttcattaacgaccatggatttgtgtcatcgttgttttttttaacgatgacaacactgggtggtcgttattttattggcggcagtattatcgtttactaatgacagtggtatatttagattcatgatcacattcacaggaataagatgttaacagactaataactgaaaattattaacaaatctttattgatcaaatgcaaataatttaactcatttgttacataattggaaatgtatgtacataatctaattaaatttccgtacaactacaagagagctatatagttttatagtagtcttcaactaaaggttgtacagctcttggcttgtttcatgcttgttgtgagccctgcaaaatacaagatttcaacaatcaatacataaatgagctgtgatagcaatatagagttacaacagagcatatagctcagcctgaataagagagcagtctgcatgcttctgctgtgaataagatactgatctaacagcaaactatgataaatgtaaccctaacatgtaagttattagggtcaactttagtggtccatcatctgtttattattcttttttcattccaccaaagcataatgagctgggaccatatatgatatccttgttacaaaactaggggaaaaaaaagacaccgaagtgacaagagatatatcggaatatcaggacatatcatattgatgcattacttagctagtataagaatgcataccaacatataactaatcctggat

SEQ ID NO: 43748 - DNA, 3158 bp, Oryza sativa
ctgcctctagcatcttttgcgattcctaatatacttttatttcttttcataggtgaagatagcgactctgattgttcagataaactgcatgagccaggacaaaacaaggtcaatcatgtgaagactactctaaaaggcaaagaagtaatggcctcaaccactgtcaagcgccctagagggaggcccccaaaacgaggaaaggctagaaagtgaacaagctgcattgcataaaacaaatcaaactatgagaccaaagtggccaagagggagggtgccaaaaattataactagctcaaactaaagaaatcatcaaaggaagtatgttgtgtctttacaaaacattttccattaaatggtgaactcgttaatcattctccaagaaaatattttctagtagacatattttgaactagctaatacattgtcgattctcgtaacccaaaagtttgatggttaatgtgtgcttattttattctgtggtccaaattatcgatatctattttttgaactggaattgactatgctggttatttttgaaaaactttatgcctacatagattctagaatcagacggcgggtatgtagtcatcttcctttagtccaggttctctatatggtgtagaataaaataactggatgacttgcaggaaatcagagaagacggtggtagtgaccttaattggatgtttttacaattgatgtgcgggattggaaaagtggaaccaacctgttagattttactcaaaattcacagaactctagaataaatagcagggaatggggatagattccgagataggaagacagccgccagctagcttaattgtcatctcaaccgagcatttatgcatcccttcatgcataggcaccagtctcaggctttgagcccatgcactatccattctttttgtctttcctattgcaatttgtcttgtgatgttacaacaatcatgtcacacagtggcgtccgtccaccgtgtacttttgcatcccattttatcgccttgtatctttgaccgtgctacaccacatcccctgagtttggtcctagtctgccatctatcaaggttgacgtcaagtacttgcgtagtcatagacagacaattgtttccatgaacaaatgttacaaactaaaaaaaaagcatctaggccctcccttgatcaaggttttggtgactaaccgtatttactaagtctgaaaggagcaccatccatattaggaaatgcgctataatggctcatccataaaggatgttggtgaatgaatggcttcaacaattcatccataaagaagtatttcatcccagtgattaaacgtccataaaggtatttgtgtggtattcaacaaacaaagcaaagattagagggcccgtgttcactagtttaccacatcaaaggggttgaggtgatgtggagatagaatatgggaaggaattggactggaacttaccgaggtgagagttcccaaatcaaatgcacagaggcgttcggtcagcaccaagaaaagaagatcaggcagtgacaagttgtaccatggaggaggaggaaaacggattaaggtgggagagaaacacatggtgaagcttgttggataccgagatacttaccggggatagagtttagcgcttgttaggtcatggtggtgccaggtcagcgtgggagtacacgatggtgctgcggttgtgctcgctatcaactgagtgcaaaaatggaatcagtgggtaaagggacacgaggtgacatggctgggacgagaagatagacaacggtggtgttggaacggcggaggcatgctagccggcgccgcaggtggcacctcttgttcctggcgaaccaaggggaaatcccttggtccttggctgcctgagaacaagggggagatagggagataggaggacaaggtctcggttaaggcggaagccagggaaggaaggggagagatggggccggtgcttgctctacaccctcggtctcgagatggtatgtgtgcgggcaagcatgcggcaaacaaatgggacagggcagggtgttgcagaggctcgtagagggaatctcgcgaggtcctgaggcaggaggcctctctctcgtgcacactcgagtaaatgaggaggtgctgttggcagcaataaattatggtggagaaggacagatcagccaatatcgcctagggcgagtgcaatgcgactgaagcagcgtggcgtgtggtctccagggcggtctggtgggacgtggcccagccgagacgcacagtcacgcacgagggctagcctggcttgcgcaaccctgcgcaggaggaaacagctcgtgtttggctgtgctgtggcgcccgaattggaggtggggaccaacaggtcaacgaaacaagagaaaacgagaagaagagagaaaggactccaatttcggctgagcgtttgactaaatggttagatgggcagacttgcttcaatctgaatgtaacttggagtcaaggttggtagtaaggtatggaagttttaggaatttaaccataacttttggagaagtttcaaaactgaaggttggttagggcagtgggaaccgtttagagcgatggtacaaacattaatctgctcagctatgatttttcatgcacgaaataaggcatgcggtgcaatgcacatgaaaaaagtttttatgcaacaaagaactaaagtgggttgttacagagtgcattgatcagccttttctgtgtaagttgtttatgaggggatgactgtaatgttctacctcacatttatttatgatttgttaggggacgactgtattgttccgcttgaggggacgcctcactgttccacctcacgtacaacgttcagcgccacatagaggtgttaacatgaaattcatcacgacacacgaaggcctgggagatccacttatctctagtgcaggccctattaatcaggttcagggcgtgccagttagtttgatcctgcaactaacaagatgaataaattgactgtacaagatcaatgagccaatcggacaataggccgatgtgatgcagcgaggccagccaatgtcgatagagttttgatcaatcggctataggttcgacgtagattcaaataatcaaataaaaaatgaagttcattgtcagggttacggataaggtataccctctacccttggatatatgt

SEQ ID NO: 43749 - DNA, 2560 bp, Oryza sativa
gtatctaattatctctatggttgggattgttttctctgcagaaggacaaaatagtgtgctagcgtcatagttgagcactaaaccttaacttcacactgatactttttgctcaattgttgtatgtcattttatacaaatgtttaggatatatatatatttggcatttagtagagaactttgcgagttaagcgaattttgctatttgatttacacatgttaatcctttctgtcttgatgtgtggagctactgcacaagaaatagcctacagatgtttctctgtcatttatgttttgtctattaatatacttagttttggatgttggatgaattactcttttcttgaatatcgggatattactattttttgtccccgtgttcaaatgctaagtgcagatatcaactttgatatatatttgctcggtattatttacacttgtgtgtgacgttccttgggcaataatattattggtttaattttctttatgtattgcgtaagaaggtttcgtatatagacgcaggggttcttctaaaaatagcactggatacacacacattctagcattcagtctaagtgccttctccaacacaaaaatatgaaattgtagtcgtagcgcacataatcctgctcaagttgccgcgtatgcgaccatgtgtaatatttaacagatattgagccaccgtataaaaagaaaaacggtgcacgacagctaccgcgcggcgttacgccgtgcttacctgtctagtatgtccagtgcatgtgcgtttcgggaccgcctatccatcactcgggtctagattttttcttcccttggatttgtatctaacggactacaaaataaaataactaatacaaatttatttacacaacatttttatcaaaattacagtgcatttacatgtcatatcaactaaatttacatatgtaattttagttatataggattgtaattttatatttgaaataaaataactaatacaaatttacttacacaatatttttatcaaaattacagtgcacttacatgtcatatcaactaaatttacatgtataattttagtttcaattgtcttaatttttcaatggttaaagaaatcgatttttacggagaaaatcgagaaaacaactcaccgggaaggagatttattttgcgagagctctcactctctccggagcgaacgagaaaagaaagggagagagagaacgagaaaagaaagcgcaggcgagagagcgagaaaacggctaggacgacacgagctcggaccagatcggcccacgtggctccccacgcgaaatccaccaccaatctagcgcaccatccgacggccagaaaaacgtcaaattttcgatgagaaatcacgcgacaaacgtttagcaaaatcggtgcgtttctgtgtcttccgatcaaggggggaggctaatgggtgatcgatcgcaaccccctatactcctccctcttctcctccttcctcctccccttcttctctttctactacagtacaccacacaaaatttttaaaaaaacaaaagttagaaaaatttatgtatagatatactatatataaaaaatttgaattcaaattaaaatttgaatcgggtatgtaaacttttgacttataaactttgggtttataaactttaggtgtataaactttagatgtatagaaatactatatatagaaaatatttgaattcaaattcaaatttgaatcagatgtaattcaaattcaaatttgaatcgggtatgtaaacttttgacttataaactttgaatctataaactttaggtgtataaactttagatgtatagaaatactatatatagaaaatatttaaattcaaattcaaatttgaatcagatataattcaaattcaaatttgaaacgggtatataaacttttgacttataaactttagatctataaactttaggtgtataaactttagatttacagaaatactatatataaaaaaatatttgaattcaaattcaaatttaaatcggatatataaacttttgacttataaacttttggtctctaaactttagatgtgtaaacttgagatgtataaactttaggtgtaaaaatttactaaaatagaaaagtaatgcggtaccaaaaaagaaaaccaggtgaagggaggggatcgatcgctgccccatccccagagcgatcgatcgcagaacagcatttccgagatccaagcacctcatcttcggaaaccattgacctagctcgccccactataaattcttcattgacatggtttacttttccacttctccagttcttgctttgcctcttccgatcaactgtccatgttctttttatttgctttcttaaactgccacgtgttatattcccaatctttgtttcttttgggattatgtttccccattattgcatcatatatcatgtaaaattatgctaattatactcttctcatattaatattataatatagctttgtcatcatatattttctcccacactacttaaaaaaaacgatttttccctgaggtcgaaaagggttttcgcggcagatctcccgcccatctg

SEQ ID NO: 43750 - DNA, 901 bp, Oryza sativa
tacacttggcttgtactgctgtaatcatgacaagacgattgtaaatatctgggctctgcaggattacgagcaagaggtctggtccatcaagtaccaggttgaattgccggttacatgtatcaggggggaacttgacgtgggtgattcttggagtgtgatggtttcgtccgaggatggggatgaggttgtggttgtgctggttgattgcggacaatcggtgctttgctttgatactgacggcaagctgttggcgcgtctcgaacatgatggtaatgacatcatggttactcgtatgaagcttaaacaaagccttgttccacatgcattctttccgttgctaaaaagttatgtcgtgaatgatttgcctttcatctgatgtctgctaaatgaagtttgagcacacaaacttattattttctgaattgtgcttttatgtatgaaaacttcttagctgaacttattgtagatgaatgtgcaaccaggatacaataattgtatttggccacatgaatagttggttcattgtgacttataatgcaaaacctactacgtcttgattgaattacaaatacgacatgtcgatagtcttttggtccaaggtggaaacaactctcactgattaatgatgaacaatactgctcacatggttttatctaaaaaaaaatgaaacttacttggtgttgcactataaacattaacctggttttttgcttgtattttcctgaaccgggatgttgtgcacatttgatttgctatgttttttacactcaagggagtgctctaatgctctaaaaactcttaatgaaatggttacggtagagcccagtgttcaatgaaatgaacagttcgcggtagttactgacagagtccattgcatctgcaattgttgggcatgtttgtc

SEQ ID NO: 43751 - DNA, 1235 bp, Oryza sativa
aggtgaccctaaaaggatatcaaactcatggaacgtgtgtaatctacctaaggctaagactatccaaggaccactattggtagtctagctaggctaaagaggactttctatgtgttttaattatctaaagtaagtcgaaggtaatttcctatctattgcttcgggcatcgacccctgctagtctgctagcatggttccagctatagctctatgatgtacccgaacgtggaggattactaggacagggttcagggctgtcaccacctgccgtctacctctgacaaatccgtgggatacataacaaacaaaggtaatctctaacctagacatcatgcctaagttattaattactactctaatacttgtgcagtaacttccttgtttatccagagtcctattactggagcacttactatgaatactcaacaatgaacccgcaaagatagaaatatatcttacttgaactaagtaattaaataacataagaaaggatcccgaatgcttactttatagaaaaagtttctccgaaccttgagcagagtgtaccgacagctccactactcctccagaattcctcctagagagctacactcatcgaggtggaattcagagagagcgccaaactttcgggcactcctccagagcttcccctcaccctctacctatttctaatgtataaaatatacaatagagcctcttataattcagctcaaagttgagtgtgggtgtctgggtgaagtgggggagatgagctctatttataggtggaggtgccttgggagtgtggagatcctccatagcatccaaagagcatatttcttctcctcttgtcaagtgtctagctgatgacagtttccaccggtgaaaacggccataatcgtcattggggagtggtttgctaccgaactggacttgggcctgagctagcggcctctgtcagggttcggccgaactcatggacattgattttgaggctctcagtccattggcatggtggttaggcccatttgaaggtgtttaattgggtttttgggtccaaaactccataagtttggatatgagtttgattctcctccttcttcatgtatatttcctttcaactttggtagtcacctgcatccaaatatataccaacactagtagaaatgattagtaataaaccctaccactaagttgaatatcatattttattccattatatgcaggtattgacagtcagatattatgatttaagg

SEQ ID NO: 43752 - DNA, 970 bp, Oryza sativa
cgctgaagacaagagttccacccaactgacttcatcagataacagatgggtcttacactgcaaatgtaaagacaattcaaaaggagataatcagaggggatgaggcaagtttatttctgaagattgtaccatttctggtcaacaagagttgccagcaaacaacaataaatagcataaagtcaactctagcacttttggacccaaaccaataaccaaaagaaaaaagtcaaaatttgaaggaattctgctccagttcagagcatctctgcaaatgcaccacaaagcaacaggccaacagcaattgggaatttgaaaaggatatgattagcagtttcaaattcccaacacaactaataaaattcagagccattgcagttccttttctcaactggactgcagattggattctatctttataagccaaccagagaaaatgtttcattttcatggagaaaggagctgatcaaatatccttcaacctcagatcagtcacatcagcaaaagaaaaagaaaaaaaaaagaggctatcaacatgtcctgaagtggtaatttcatcgagatgtaggagagtatgcattataagaccataggacactatgaagaaacaattcatgcagcaaaataacacttgtagcttcctgaatacaaattcatgtaccatcagttttcaggcaagaagtttaattgcatacataatgcatactgcaattaagaagtttgtaagcttaaacctcatccaatacatagagattgcaccatatataattcagaagcaggcaagggcaatagaaagaagtcttaaaaagaggaaccacctcattcagcaggcatcacacgaaaggcgaagcattcacgacatagtccagcagagatggaaagaatgcatgcggaacaaggcttgctctaagcttcactggagtaatactgaggccgtcattatcatgtggcaaactgccaacagcttgccatc

SEQ ID NO: 43753 - DNA, 2040 bp, Oryza sativa
tgcgactccgatcaggatgccactgctgcggattcgtttgtttatgaatccgcagcctatatgtgcccctgcattagcttctcttgatgtgcttgagcaaccccctctattttgcttctgctgcacctcaatagtcattgccttggtatggtgggcgacatggttgccacctattcggcatgagtttctctcccatcagctctcctcgtgctgccttcaccgccgagacgaaatcccttgaatcaccggattttgtccccttccagatcccacccctcccaccgatgctctccctcggccactttcttccactactcgccaatgttctccatcccgccgccaaatccctcatgaaaatccggcacaaccctcctcagatgatgaaatgggttcgagatgtgggggaatggtggcgtgggagctaggtgcctaggtttacccttgattcgagtggatcgagagaggaaaaggggaaaaggggtggatcaagtttttttttactcaacagctgtgcttccaaaaacatgcggccacagctcacagcagaaaaatgactcgttgttttgcttcaaaatgaaaagttggcctctgctctctacctccagtacatcaagatacagggcaaaaacattcacaaattcagtcaccacgtacacgaccatggttacagttaagaattcacaaattcaagttatcaacagtacagtacaagctgatgcacagctctaaaaattcaagcaccacatgattaggttactaagatttcggcaacaccatgtcaccatcactaggtctgcgagcgtgaaattgaatttattccaaggaacacgtaacaattctggaggccgagtgagctatgccagtatgctcttgtgcaggagatcaaagcaaccttaggtgcaggtgcaaccgtgcagctgagagatgtcgaaacaagaattcaagcatggaagactggcaaactacttatcaagctgaagatgttgacttatttgattaccgaatccatgaagctacatctgaagccatggaacactgaatttgttgattcaatccctctttccatgatggctagtccaccaagcagctcaacctcaacaattaaacatccatcttgcattattaaacataatctaattgaaattatgagttactatatatgcacgaaactttgaatagctgaattttatgtataacaatgcagtaaacaaaatggcaacagcgatcacatcatgaaacaacagtataccattgtgatttccaattaaaaattaatagaatatgaatattactagctatgacaaaacacccgttgggggaagtttcagacgacaatagtaccttcttttgcctattcagattgtttctttgagacttaaccatgcccacttagctaaattgcagtacttttacatgtatgaaacataactagaaaccagcccatgtctgctccttagacaatcaggatggaagcctcatttgacagagtctgcctgcccctatgcaggatatcagtattactaccagagggatgatgcgacagatagactaaacaaaaatgctacagtacagcttgtgcagtatgctcttatgcaggagattaaagcaaccgtgcgtgcagctgagagatgtcaaaacaagaattcaagcatagcaaactggaaaagtacttatcaagttgaatatgttccgtacttacttgcttatctaatccttgaagctatatgtgaagccatggacaaggtgaccaatgaatttgttcattcttcagctgcttgttctccctattccatgatgaccaccatcatcaccaccacttccgtcgctaatagcagctcaaactcaacagttacacattcatcttatattctcaaatgcattttttctccgatgaagaccttaatggcttaattgatttagtaaacatatttgatagtattgatgaacatatgccaacattcctggagatagattaataaagcttgcaaacactagcttcgatggcacagaacctctttgccaggcgaatccttttttggt

SEQ ID NO: 43754 - DNA, 1705 bp, Oryza sativa
accagatatcaacctttgagggttaagtgtcttctgcaatgacaaaaatcaggattccacttagtgttccacttagattcctagatgtatgcatattaacatgatgaggactgtctgagtgtcttatgtcaaagactttatcaataagcaccctatttgtgctcatcacaaggatttattcggacacaataaattattccattttcaattttgatgatgctttttttttcaacactataacactctctacaccttggtctgcaattcaccaacgcaatgctggaatctgaattttagtttatctcatgaagtactgcttgaaagtctttctgtaactgctatatgttttccattctacagatgggctctccatcagtgaattcatattttcttctttcaaggccagaacgctctggttcccctccaaacaaagcagcacctgacattgtccctcaagcacctgctgaagagaacccaactccaattagagaacatgttgatttttttagagcagctattaacattttgggaacagataatggtactaaggatgttagtctggcagatatatatcctaagcaagtaaataaaatggatattctttcactaggtctacctaaattaagcacaggtataaaattgtgcatgcttcattttgttgtgctcttatatatattttttcgatacagctccactgaatctttgtcagatataatgtccctgtaatcattatcattttctctaatcttgtttagtaagatcaactgcggattacctaatttgttttcttgaacttattgtaaacttcttttcactttttaagaattgtcagatgacgatataagagaaacagcttatgaggtccttcttgcctcactatttgtcaggtaattttcataggaatctttctgttggccgattttatatgtaagtggtgtcaaaattgcattatatattgttgtttaaactcagcttctttaatgatgtgtaaccaacagcggaaaaatactgttctccgaagagaagaaagaaaagaagcctaaattcttaaaaggtctaaggtctaaaacagaagtatcaaatccatctcctcagccagaaaatcattattcccaacttcttgatttgatccgtgtacaaatggaggcaaggtctctttcaccaagttctgtactgtttatttttcactagtttaacaaaaaaaagtttcattctatattcttatttttatctgtgacaatgatagcaaagtatttatgttcacatgcttgccaaatgtcaacgcacgagttgtactctcttattgtttcaactagattatttttcatatttttgttgttcgttaatcatttggagcctttttttttgtttgtcctgattacaaggcaagtgaatactgttaactgtggagcaaactcactatatcaaaatgcttttttttccccagatctctgaatctatggatacattgacaaggcgagctttaagacatatcagtttgaggatcgtgcaagggcaacttgacgtgccttgcatatcattacagctcttaagttctgttgggaaatctgatttccctacagaaagactgcgagtgcagtggcagagaagacaggcaagcaagtttatttattcgtgcctatagcatgggagtttgtcctaattattgtttataattttgatatccaggcaaatgttctcgaag

SEQ ID NO: 43755 - DNA, 679 bp, Oryza sativa
tacattacctaatcagccatgcaaactgcttaagcttgtggcattaagtcattgttgggtaccacatgaaagatgatcagtcatttgatcactcttgccaggtcctcaaaatttccaagagttgcttgttgacccagggctgtcttatgattgaatcaatattcattccactctaaaagaagttatatccatgttcagattacaagctttatcactgatcaaacatgcaatacaagtatgattcatcgaattagagccattggtcatcggtttctttttttctttttttggttatgcaaaggtataaggcatatgtgcagaacttgcaagacagtttttgatgtaggtagaatatccttcattatttgtcttatgacctgactatgttagcgacctgctgtgcccatacaagtcatgaactgaaaaaggttaatcgtcaactgtataaatacataaagtgatatgtgacatacgtgtataactagtatgactagtatgcagtctgcataaccaagaaagcatgaaggggaaatttattgtgaactggaaaaagacccatgattgttcttgattgaattaacggtgcaaattattttattaggatcaatttgcaatatttttatttttttttgcaaaaaagttaaattctaccataaagcttttcacataagtttctttg

SEQ ID NO: 43756 - DNA, 698 bp, Oryza sativa
ttaattgaacgacaacaaactgtaactctttttcttctgaatagaaagaccctgtcaaacaatgtgctattggtatcaaacatgttggcacattatcggattgcatatcagcagtaccacttgtccatataaacaaatctaggcacttcagcaacaaaggaaatgtagaggacttgataggaagtctatctattcacaatgtgctcattctgaattctaaaaggtaaaatcgtaaaacagataaaacaccccaattaaagaagaaaaggatgatatatagcagtaaacagaccttcttgaaaagcacccaagcaaagagtgtgtcatgcaatttctgggtgatacccaatatagtccaggtcagctttactgtttccagtatttcatcagcctcctggatgtaaaatcaaataacaatatcagcaactcaggataaaaccgttgacttactgtcacaaggcagtccaagaatgtttcagatttagtcatttacttattcaacaaaacctagacattttcatttttaagctgaccaacaaggaaataatgatgtatagagagtaaagaagagcaaacctccacaagctgcccatcttcgagaatatcgaacacgatgcaaagtaatttctcatatagtctaaagttgagatgatagctctggatccaatgataggtctcgcctttaaggttgaatttct

SEQ ID NO: 43757 - DNA, 1319 bp, Oryza sativa
ttcaggggtacatagtgataaatttgcaacaccttgcgttttcgttctcacaacgcagaaagttcagacctaatgttatagtcatcagggctatcatcctatttaaactactatatctccagccaaaccacggatatggtactaaggctccgttcaaacagtacatgattaattgaatattatctattataaatttgataaactgatttatttattaatctttagaaaaaggttctatatagaaatcttttcacaaaatatatcacttagcattttgacaaagtgttatcaaaaataaaaaaaagttatcgtttaaagttacggaaaagaactcagcctaaaagctagctacagcatgccagcagctgttggctgctgcctttgctgccgtaacgtaagctctaagcaccaccgctgcttgctcgccatggaccaagcaaggcccaatgccgaccactacgctagctagcctgctttgctaggcccacaagcaaagaaaccagcccactacctttttctcttatctcttttttttttcatcaatcaattattccgggacgttacatcggtatcatggcctcatgggaactattctccttaaatccttgagtattctaaaacttgagaaatattcaaccgtgtttgtttggatgcaccacaaaaggaatggtttttttagatccacaaaagaaatggtacaggactttggaagaattatagatagagattttctttcacaaggttatctctctcatgtcagaaatctacttagaaacctactgtattaatttattttgcgaaaaaaatattaggaccaaaaaagcacgggttacatcggaaaaattatgttactaagtttttttaaatagaaagttcaattttactctcccgaattatttcattggagtacttcactcctaagcaattttttgggttattttacaccccaaactatttaaaacggttcaactgaccccctatctgtatttctattttttccctctctatatatgtcgtattttatactaaatctaaaaggatcgacagatgcattataacttatctctcaatattttttgaattttttttatcattgtttacataggttggaaacactagaacatatttaaacatcgaggttttaagtttaaagaaagtagttatgaaaatattttagaactttaataatagtgccatctctgccttaagaagtttagcttaaaatacagcttgtataaaagagaaataaagaagagaaatactattaagtggtaaagtgaagcatcattaatagtttatgaggcaaaagggctgcagga

SEQ ID NO: 43758 - DNA, 675 bp, Oryza sativa
cagagatcaacaaaaagcaaatgacaatgaagtcttcattattaacccaagaacgttatggacaattgttgaaaaaatgaaagcatcaagtaccttttacggatgttatcgttgggagagatacaatcttgtttcatgcataattttattatatcatcaacctccttcctagataactcatttaagtcacgaatctgtgcaggataaaacagacagttaatgcatagttgcactgaaatcattatgttctgctaaatgttcaaatgaactcctactgtggatcaataattcaacctcaaactttagatttagcacatactttcaaaacttgaaatttccccaataataaagcatacataatgaacaggtaaacatattcgcatcggataccttatttagcaacatatatttttcttcagctactctttccatagcaactgttattgagtttagaagatctgaaatcagttgtagtgttggttgctgctgaccttcagtagtatcatcatacgaaatctgcaagttcaagaagctgattatgcgaacttggatatacaaaaatgaaaatatcaacaaacagttaacagagaaattgcatgcagacataattttatatgcaacccccacaaccacttgacaataagagaaattgcaaaggtaaattgggggccatat

SEQ ID NO: 43759 - DNA, 3125 bp, Oryza sativa
aagacgaacaatcaaacatgtttaaaaaagtcaacggcgtcaaatatttagagacggaagaagcatatagcacaagtcaagatttatggttttgcttatacatgtgcttataagataaaatttaaattttaagatgtaatttcatggtcgattttttttttcattgtaagtatattcataaatatttgcttttgaatcgttaaaagggacgtatacctataaattatactattattaataagcagtacaggtaggcataaccaaagcgaaacacattgaaagcgacaattggctgagacacacaaaaatccaaaccaaaataaagatcatcacgatccaactctatgtgaacggtcaaaaacaaacaagatattttttgtggaagactacaagaaatacaaacaagtgtagattgtcctcacgagactgacagctagggcgttcacagtgcaatgggttggcattcagcccaaacgatccacgtcggtgaagcgaggagaatctactggtatcatcttttcgcttaggttgctaatcagctaatttgaatttttaaccggtcttatcttttcgcttatactgcttatcatccaaaaattgaatttttaacggtttttttcaatgaagtttatttttcagcatttacttttagatcactatgaaaacgtatatacaagttttattcacaaattcttttcatttgcaaatatgtcattatccgtgaataagccaaacaatagggctcaccaacctgaagacctcgcgttcaaaaaaggtcacgagttctttggcaaaatcaaggacgcgtaggatgaggagagagcgtcgccgctgtgccatggagcaagtggtttctccattgttccttagcgcgcgcttgcccccgatcccatattcaccgcgagatggaggcatgccggcgacgaggatgggagcgaggttggtcgattgtggagcgacatcccaagtgtatctcgaggacaacaacgatgatgcggaggttgcgtcgccttgaactgctcgttgcttgccggtattgtcccgatctcctcgtcccactccacatccggcgtcgccgccccgctccacgtccaacgccgtcaccccgtgcctaggccgtgccgcccctcggtctactccggtcgaagctcgtcggtcacgccaccccctcgatccgtgtcggccagagctcgccggccacgtcgctcctcaaggagcagccagatccgctcagcagcggaccatgccggcccgacctcatcgtcggagagggtaggggagtggagaggcgaggaagacgaggtggttctgttgcccgtgtttatatttagcagcagcatttctcaggggcaagcgccagcgccggcgactagtacgacgaggaggaggttgggctcgcgatggcgcacgtcgtgacgacggtgtgcgacaccaaggcgcggcggcttcaggactttgcatgggcgtgatggcaaagcttcgaggcatcgacggtgatcgcggccgtgcggcttcgatgcgatcgatggaagagatgggggaacatgaggtctcactgacatgtgggtctcatgctgactcagctgccacgtcggacaaaacagggtcaaccagagtcaatattgcctaaggatcttgggtgatgtcatatatccgattttttgatttagggacgattttgtaattcggtgaaaagataagggatctcggatatacttttccctatcccagtaattttgacccggctaaatttcacccatagtgaatccccatagtgaatttcaccctagctaaaccgtataacaataataagattacaatatccttcacccattgcaatgcacgggcatttttctagtataaaaaaacagaagagataaaagaggaaaagagatatctatcttctaactattcacctgtgttcgagagaagaggaaaaagataggattaagaagatacgtaaaacgaagtgagctattagcatatgattagctgattattaactattataaattaaaaatgaattaatacgatttttaagcaactttcttatataaaaaaattataaaaagtaccatttagtagtttagtaagcgtgcgtgtgaaaaacgaggtacttttctactctatccatccatctcaaacccacatacgtctcttctcgtcttctcctcgtgttacacatgaaaatatgtagtttaaattagtgaaacttagatacaattgttggatcgaaaaatagacgtctgagattcgtctacgctaccatgagtacttatgagtaaatctgtgagtaaaatttttactcgtgatgacgtgaacattccactttttcaccacttattttcccgaacaatcttgctctattgctgctgttgttccacccatgctgttacgcctatataagccagagaaggggagagagacaaccaggggaaggtgaaggaagagggcaacatcaaaatcttctcagatttgtatttgctatgaggatcatcgcctccctcaaggataacccttataaatgacactccagcctgagctgttttgacgctttgacactccagtagacctgacatcacgcctgacgagagctgaattggactatctacgcaacatttgtaattcggtccaagaaagccttcaaattatgatcccacgctactaaaaaatcattttcgcctatggccgaaaattgatttttgcaggcgaccaaccgctctgcctacgattaaaggtcagtgaaaatcaaaattttagaaccgttctgtaagtcacccacctaaaaaacctaaattttcaggccgacaaacttcttttggcataaaaataagaacagcatatcatcacagctcaatggacaacagcatcacagatcaacagctcaagaagtgaggggaatcaagccgaggccgtcgtctccattgctgcaccgcctttgccggcattgttgctctgccgaggtggccggatctgaagagccgaagacgacgagccccattagatctagatgtcgctgccctccccccactactgccgacgtgccaccccttgaatctggacagggcagccaccctctccccgcaccgttgccgtcggcgagccctcctagccccactgctgca

SEQ ID NO: 43760 - DNA, 1216 bp, Oryza sativa
tttttggacattacatgctcgcactgttctcttttttcttccttttttctattacagaatatgtctattgctgtaaatagaaggcgttcaagtatgctttcccatgatgtttttcactttactaagctctaatttcaaggacatcacttatttgatatttatgtgctctcgccagaaagaacctgagctagtgcatggaaacgaggaactttggacctttgtcatatctgcaggagaagatcacaccaatacactaactcttgtggcattccttggacttcttagtactttggtatgcaaaatgttgcataacactgctgcacattcaatcttttacaccgtttgtaacaatctggtcttgtaggcttccagtgaagttggtgctgccaaagtctacgaactgctccagggaaaagtttaccgttcacttggttggagcactttgtttgattgcttatctatttatgaagaaaagttcaaagaatcccttcaatcttctgcaagcgtgatgcctgagtttcctgaagcggatgcacaggcacttgtttcgtatttagctgttctccagaaggtcttcacttctcagcatactgtcatattatcttggttccatccaaacatattctagcaatgctgtgaaatctttaaggactttgacctattttttttacacaatgcttttttttttttgcccagcaagagcattgtattccaatggttattttcaccttacttatgtgctcttgtggtggatttcattattttgatctgacaagttaattatggcctaacactcttcttgtgaagaaatactgactatatagtaaagtaaaaaaagctagagaaactgtactcaaaactatagctaggaaatcatacctagtcttgtaactccttaaatggttatgctatttccctcagaggttatcatggtaggattcttgtcaactgttaacatttatcttagctatttattctgcttttggattcttaataactagcatgttctggcccaatttgtgcttaggtctgacatatgttttactctctgtattttggattttagctagatgacttttctccagtcttgtttaccttttgtctcagatgcattcaatcgtaaattggtctgtgtcgcttttgtttctaacattcatgcatattcataataatctgttcctgtttcttcttttgcccatgggtatgttctttatga

SEQ ID NO: 43761 - DNA, 1091 bp, Oryza sativa
ttacataactagaaaggttgagcatcctaatagaaacagtactactatacattggattatggctggaaaatggacatcgagcgcagttgtcaattggtggcctatgagctttgtttccacgtattccacctttataacaatgttgtcagtttgaaaaaacaacaattgacaggaatttactacctgttgattctgcattgctcagctcatgttctcaacagattaaggtcctctttgtttaggcttataaaccagcttttgagccgaaaagtctaagcctaaacaaacaaacggctttttcgtttggcttttttaaagccataagccactcttacactattaagccaaaagctaggttggagaagcttttttagcttatgtgagatagaggtataactacaccactaaacttaggatttcaaatccattgccttgtaaatcatataagccaaaaagctaacttaaaagtctaagccaatgagcctaagcctaaacaaagaggccctaaggctcctttgatttgaaggaatttcatagagttgtttggaagatttcatttattgggaaaagtttatgcagcctttggaagaaaggaatagaatcgggaaaaaccaatatgggttggtttcttatgcctctatttcacaggaaaataaacatgagcttatagctctttactttctctttttagaagtcctgcactctatccctcccacatgtgattttgtctgcaattcctgtaataaagcataatcctgtaagattcagataacacgtgacaatcaattcagtttatatgaatcttatgtgatttcttggttgctcttgctttatggggtatatcaatctcactgatacatctaatattctgatgtttctaataatgtttaatgatatgtatattttgtttgaacttctatatgtgtctatgtgttctgtataaatattgggttgtaaaattccaatgcaggatttcatgagtgggaaagttgctttccggaatattatgaacatcgtatcagtgggtgtggacactcttattaatgagcgaactacccaaacttatgggattcttctggagaaaactgtcc

SEQ ID NO: 43762 - DNA, 688 bp, Oryza sativa
ggcctaggcggcggctagtgggtgcctaggtcggatagtcagatccaagaaattagcaagcataacatgaaaattagttatataacaccaaaatagcaactaaataccacccaagcaagttcagctacctaatgcaccatatagggggtgcctagcgccaacttttagaagacagtctccgtatattagggatgaaggggctagatggctatgttgaggtctttttggagcaattatgatggcgcaacattcaggagtcaggacatcacaaactccataaatatcccacttggcaaataagacaatgttaactatgtttccgtgctgcaaatctcatgtgttatttttttcacccaggttttggatttgcttgaagttgtccagttcagatgtccggacacttccattaaatacccccagatgctttctaacctgagacttgaatcaaaggtctgccctttaaacatcaactttttaagttcgattagttatcatctgattctttctgctaatagattgaagagatcctaaggaattccgcgacatctgaatttggtggtgtatattattattcagagcgaggcgatagattgattgatcttgatgcatttcatgaaaaacttctccaggtcattttttcagccttattcgttgttattacacttttatgtttcctatggtttttttt

SEQ ID NO: 43763 - DNA, 670 bp, Oryza sativa
tagaaaccatggcatacattcatctgtgctgatcatttgcttcaaaaccacaaaaaagttgggaccaccaattgactgggtaacctgtggcttgcagacagtgctcttgggactttggatagtagaattgctattctatgtaggcatgttgaatagtcttcttatagtaatgtgctaagaacctgcatgatcataatattgtgaaatgaggttcattacccattgcaaagtgcaatttactctactaatactagaatctaccacgtgatatgtaatgctaacttctaacatatagctaggtgtaatcgttcaaataactttggatggagcaccagataaacatggaaaatgatgagtagtttgctctctgtcatgtgcatgaattattcatgattatttaccagcggcagccgccaatgatgagtcagttggcagggcatggtagatagaagatactctctccatcccaaaatataagggaggttggatgagacacatcctagtactgcaaatctagataggcaaaatcccttatattttgggacagagggagtgcataaatagatgttatatgaattttattttgtgtgttcaaatcttttatagaacttcattttttttattaaatgttatgagatttgttgctgtaaagatctgatagtttgaacaa

SEQ ID NO: 43764 - DNA, 692 bp, Oryza sativa
tacaaagtatctcattgtttgaatatctaactgacccaaaaacaaagtttagaaaaggaatcaaggaatattagaagcacatagtctgaattttgcaaatattcatccaacgtaggttctgggttagaaaaaaagacagaacaactataatgggggcaaatccaaaagatacagatatagcatatctgaactaaatccacaggcataccatcacctgaatagtatgtaaactgggtattttccattctactaaatccgcatatccactaatatacaacaatggagcgaggtaagtaacaatgtttgaaggtaaccaaccacaaaaaaccttataatattacacatttaccattgttgccatcaagacggttgttcattccacccgagatacacaacaagagttagaaatgttcacccatcagcaagttcctgcaaagaaagaagcatatacatctttcagttaaaaaataaccgagatagccagtgacatatctcaatactaaaggctttcttgttactattgtacaagtaataagttcagagcttaatgttctaagcacaaagttcttttaagaattaagagtattatcatctatattgctctaagcacatacattttcaagacttcttgtaagaccacacgcataacagttctaatctgtaccaaaatgtcatattgtaagatttgctgc

SEQ ID NO: 43765 - DNA, 648 bp, Oryza sativa
ctttatcattagcatatgttattatattatagtcctataaaccaccttagctgtggtatttaccctatttttttcattcacgccaacgtttcctagactacttaacaatatttttctttaaaaaaatctataagatacctgtctcaaaaaatcatattaatttattttaaaaaatactaaataatatttttcttaaaaaaaatctataagatacttgtttcaaaatatttttttaaaaaaaatagctaacacttaacgaactaatcatatgttgatgatgaccgtagagacccttagggctactattggaaaaaaaaattcacaaaactataaaaagccttgatcgggaactattccatgaggctgttgaacatgcttacgcgaggtaaggaaacgtacggtaagagatatgagcgtaacaatggaaacggaaagaaaatagacaagcgaagggggataactcatggatccaggccagctggtgtgcagccgtcagccgagaatgattgacaaaggagaaatagggccgaacaatctcaacaagatatgaaacaaatccgaaatcctaaacaaatggctcaaaatctatttagggcttaaacattttcaggtaactgaaaagtcgacctatggccatgccattgactg

SEQ ID NO: 43766 - DNA, 623 bp, Oryza sativa
tgaaatcagcgagctcgatatatactccattaagctaagctggttgatctctcgtgtgttccaaattaatccgcgtggttaattagctctagctagagatcggtagctctcgactagttggacatggccgccacgggcgtgctcgtcgtcgttgtggcgctcgtgttcgccgtgacggtggctggcggcggcggcgccggagtaggaggtgatggcgggttcatcacgtgggaggacctgagcatgccggccggggcggcgcggagcagcacgtgggacgacacggccggcggtggcggcggcaagaggagcggcggcggcggcggcggcgagcagcggacgacgatcgtggtgtcgccggacgggacggggcactcgcgcaccgtgcagggcgccgtcgacatggtccccgccggcaacacgaggagggtcaagatcgtcgtcaggccgggcgtctacaggtacgtgggtgttcgaccgatcgatcgcctccccactacctgtccctctcgtaaccgccatggacgagttaatgtcgtcctatctcgcgaagctttttaagactggaattgaagctgcaatggcgctgacctcgccggcgacggcgtgccgtgcatggagaa

SEQ ID NO: 43767 - DNA, 783 bp, Oryza sativa
tttaagggggaggaggagaaagagagagagagagacagagagagagagagagaggcggcggcggtggtggtggggggtttggtttgctagggttttgggcccgatggacctcaactcacatatgggccctgttgggcttttgtctcggccgctggagtgagatgctgctgtgtcagagtgcgctcacaatctttgcttgtagaatgtttaactatgtactccctccgtcccataatataaggaattttgaggtttttgtttacactctttaatcacttgtcttattcaaaaaaaattagaattattatttatttttttgtgacttgttttattatccaaagtactttaagcacaacttttcgttttttatatttgcacaaattttttgaataagacgagtggtcaaagagtgcgagcaaaaactcaaaatcccttatattatgggacggagggagtagtaatgtagcagataggggtgaaaatggagcggattcggatggatagttgtcataccatattctaaattatattttttaagcagatttggagcgggtgcggataatgtacgggtgcggatgagaagcgaattgtttcggatgtcggaaatggtacggataaaaggaacattaatacaataatcaataaatgactcatcgtaataattagatgattaagtgctaaacaacatgaatagatgatgtccataatataaaaatttagctatgcgagtgtgatataagatgataaaagccttagactaaaaaaatctatgttaattgatga

SEQ ID NO: 43768 - DNA, 667 bp, Oryza sativa
ttagctgtaagaattttgctaatgaaatcacattttctttttcatctaggtcttaaggtatcaaggactgcagacacctgctatatgctatcgccactaagttaatttcaagctagttggggattgattttgcaactgaatcaaactacatatcttggtctgaatccattcctcaattttcttcttggtccatctccacgctcgttctggcgttcctttgttggtcgatctcaagtttgcacctcagcatttcctcactcccaatattacttgtgttctttcttggcagcaaactcgatattttttcttttttttgtgggctgggcttgttaagtaacaaagagaattgttgtttcattgcgtttttagatggatccctaggtttgttttctaatgagccaaataaccacactgaggttgtactatgtttgaagcccaacagacaactaaacacaacgtgcctgcttatatgtttgaagcccagacccgacctaataagaggtgtattttggacctgttaaaatttactcctatttactaatgttacactttagaccatcttatctcttcatctcgctcaacctgtttcttcctgaactcctggtgaatagcagcatggtgctcctttgcgagcgtggcactgctgtctgctcagcactcgaatgga

SEQ ID NO: 43769 - DNA, 3362 bp, Oryza sativa
agcagcgggctacagatctgtagccagctacagcatggactccaagacataatgtgtgtatgaaaggtgggaccagatattaatagtataataagcaactattgtatgaattggctattgatgttttggagctactccctccgtttcacaatgtaagttattctagcattttccatattcatgttgatgctaatgaatctagatataatatctatctagattcattagcatcaatatgaatgtgggaaatgctaaaacgatttacattgtgagacggagaaagtagcagttagctatactattaaacttgctctgaagagaatagaaggagctaggcaggcacggtggatgaaatgcaattaatgcgccagcatatatcacatgtaatccgtggaacgtgtgttcacgatacaaatatttgcattggtcccggtcggaaacgaagcaaattgagtaaattttacaaaactacaggtattttgaccaagttatcacaaaactacagatttaaggagttgtatcacaaaactacacatttagcaccaaatttatcacaaaactgcggattttaggttaagtatcacaaaaatgcatatttaatattgaacttatcacaaaactacaacttttggagtttaaatccctagcaccattgttatggtggagctataaacattattactttgtgattaaattggttctaaacctatagttttatgataatttagttactaaatatgtagttttgtgacacttcatcttaaatatatagttttgtgataaatttggtattaaatatgtagttttgtgatacaccaagttaaatctgtagttttatgatagtttggtcatagtatccgtatttttgtgaaatttactcaagcaaatttaaacgtacaggtccagattacgtacgccgccagccaatccatcgagacgacacggtggcatgcagctcggcgcgcgttttgttgcgcgcgcgcacgtccgcgtgtgcactaaccatacgaccacctgttttgcccgaaagaagatcgagttatcaatgattgcccaaaagggaaacccgtgtgcttcatctttttcttttttggggctctcgaattatttctagaacagtataacctacctaaattggtcaaagaccaacaccggcgtgcaacagttctcgatcagacgtctctcctgcttttctcaaccctttaggagaccatgcatggctaatccatatctgctgctgccaagatcgatcatatatatcttcttatttgggttaacttgctaattaaatatccgtacttttgctacagataaaataaaaatatattaatgtcttatatacccatttttttatagggaatatttatcttagtttaattttgtatacggatatccatttagattttttaaaaaatattaagagctcaaggagtaacgtaaaatttataatgggaatagatgccaccatgcgcaacactaccagagagtggaagactaccgtgtacctcagttggttaccgagagtgttatatggaacacggtaacatttaaagtatatcgtgtgtgaacaaggaaaaactcgggaagtggctaaaaatgccgtgtgacgaatcgagaaacacggtaaagcgtgggacccacggtttctgccgttacgcgtgcggaataattggtctggcgcgcgggatcgccgttggcgcaggcggatggcgcgccaagatttccgttggcgcggccggctggcgcgcctgattttcgttgccgcgcgagtaacaggagaatcccgcgcgagttacagccgaaggcccacatgtcagcccaaaatagagaccaacaaaaccctagcccttttaatcgatcccctcacttccccaccccctgccgcctcattctcctcgccacttttcccctttctgatttttcccctctcttcttcgcacatggcaggatagctgtgcaccccagcgtcagtccgccgcacggccgccgagcaacgctgtgcattcttggccgtacgaactccctgcatgtccacgtccatctgctaggctccccttcgttgtccagcttgagcacacctcatcttccatccagctggtggtatgtatatgttgagttttttcttgaatcgtatgtaaagttgggtcttggttctagaaaacccatccattttctcccaggatctagaaatagttcggtgtatgatttctaggaactgtatctcattttaatttcttgtaataccacaagtaccatatgaataagttgttgtgctttgtaaataaaaacaatattagactacaaaatgatgtgggtgagagtccttgcacagtcagaataatgtgttttcatatttgtgtacttgttgatggatacatattggttaggaaaaacttgccctcttttcagaagacataatggtgagtgtgagtgtttgccacagccctacttgtttagatcgttgttgaatggttgaatcgggttggaatgacagcaccatgttgtgtgatgatctgcaatgctatggtgtactacatctttgtatcgacattttataataggcattattataccatgttgctactatgtagtttttgacctgtttaatataatactgcatatcttaattttgtagcaatatgcggcgattgagcttgggctgcagggaggattccaatccttcagatcaggctgtgagcgctgctaccttgccgagatgtagaacaaggtcctcaggttcccaacaacttgataattcttctgatttggatgagatattggctgacgaagaaacagacgaggaaatgttttttcgtggtcccacacggatgccaccgcgacctacccgagatgaggacaaacctgtgctgactccaaaaggagataggtaaatagggtaattttggtatgtttcattagtcgaaatatgaaggcttgatctgtttgttcattgatttgcacatgcaatggcaagctgacggagctcgtggctcctcaccgggagaccgcgcaggcccccctttgccagttcggccgggggcttagggtgaaatctcaagctctctcggtatgtggaaagatcgcgagctaggaagaaacgcgagacacgggcgatgtatacaggttcgggccgctgagaagcgtaataccctactcctgtgttttggtggatctgtgtatgagggagctacaaagtgtgagccaacctctcacttgttctaagttccgaatctggaaaagatcatccccctttccctatgggcaaggtcctccttttatacttcaaggggataccacatgcaccccttctctttccaaactggacttttcttctcttcataaatggacagatatttgcacgg

SEQ ID NO: 43770 - DNA, 1820 bp, Oryza sativa
cagctcactttctaccttagaaagacgggaaataatttcatctgaaggcacaacgggtatcttcagttctacggatgagggaaccctttcaatgatatactttctgatagcaacataagaacagtaagcctcccagtctgactttggataaaattctctcctaaaaaaatgtagaattctctctttgacaccaaaattattccaccattcttgataatcacgggttccagtgtcttgtgtgatgcacgccaccaagtccttcccaaaaccacgaattcggttgtccagtgtaaggcactgaagcgaagttgcgttctcaaggatataaaatatcagctccactagttcctgcttgtggcaaaaaccggttactgtcacatgcttgatgctctggtggctatgttctggtgacaaatgtatttttaggtatttaggattaaaaaccaatggatagggttctttagcagactcctccacctgcacagtaaaaaggaaaggaaaacgatatcattcattcttaatgataaaatgacaagggaaacaacttaaggatgaaagaagacaaaattttgctttgagagataaaatgtcatacgtgcaagataaaagtttccagcacaggagaagctctgaggaaagtaaccagataagcgtactgatagccaaagccataatcccttggtccaacaatcgcaagctccagatacttgaggtgcaggaatcttccatgcggttgaactatgagtggatagaaataaccaacctcattcgcagacatcaggaacagagtttcaacgtttggggcaactgttgggagctccttgcgagcatattcaaacaaattaaaccaagggtagattgatatgtttacatgcttcagttgcagtgaatctccaagtgacaactgtattaggggcccttcatagtaaaaggtggagagatttggagcatcactcattattaactgcagcaagttgcatcgtctgacccgcaagaaattaagcagctgcagtgtgcaaggtattttaaacaatctatctcatggcaaaacccaagttccagatgctctagactaagagaattataaagaaaggtccatagttcttctgtggtgatatgcaccaagctaaaataagctctcttcaagtttctgaaggaacaagctcctagatcagggcgaaaagcgcaggagtagagacacagagactgaattgagcatcccttttcaaacaagagtttacatgggaatctatatttcattttatcatcccggggcagctctagggtgagttcctcgatcccagggatagctgcatcaagccaatggttgatatgatgggcagacaactcatgaaaaaattgtagttcaaacctaaacctcttcacccaaccaccagtgtggttttgcagagcaatatcaatcctcttgatatatgaatccatttgaccttgtatacaattgtgttgtccatccatggataatgttttggcactgaatttgagctcaggataatgtctccaggaccgtaaaagttctcgtgaggcacaggcaggagagcaattatctgatgcaacacatcctgagcaagagatacataaaagacaacttcaacaacaggatggcaagaggacgaagttgagttggacaaagtgataatgcttataagagaaaaacaacagatagaaaggcatgtcataaagttgatagtgctataacattcctattctattattccagtagcattatttgtttacttatttgctgaagtagctatgccctgattcagaagagctgaaacaatgcctgaatgtatgcatat

SEQ ID NO: 43771 - DNA, 727 bp, Oryza sativa
ccctagctggaaaggaatctgaatttaaagaaacaaaagttagatgtttctttcaatgaacaggaactttgcataacaaactgttgtcatttctgtcttttcaatagaaatcagtaaaatcagcatgcaaatcattgtagcatgtaaccccaccacctcaaaaagcttgagttgtaaatcctatccatgtggcaatagacagtgttgctaaaaacaggcaacaaactaagctgctggcttgttataaatctaggactagttcagacaccactagcctacaacttttactgttatacagttgtacccactcatcaaatgaattaattataactagcaatgtgcccatgctctgtagcagacaccaaataaaagtactaacgagatctagagttaaaaatgcattcaattcagaaggatatatatacatgattacctgagatcaatcataaacctaaaaatacacatgcaaagaatgacatcttttactatagatagcataaagtcgcatgtctacatatatgtagtaacaaaagatctccaaggagtgatgggtgtattggaccatcacctcacatcctatggagtaaagaaatagttcaaatttattacaaagaacttcataaattgttgcctttaaatacagtagacaacctgaaacaatttagaatgtgaactgtttgtaactcagtctcgtaccaaaaggcactatctgctggtctataaacat

SEQ ID NO: 43772 - DNA, 2190 bp, Oryza sativa
aattagtcataaaaggtattttagtaaaattaaatatttaatttccattattttatatgttataataaaaaattatagtcaagatatgtttcaaagattggcaggttagttccacttctactcctaacaaggtcttctttgtcgactctgccgatgatttaaaaaagggcgaccgaagtgtatctctgctttgcctatgttgctttaacctccatccttcagagggccgtttgggtttgcaactaggcttcatcttgtgcagcttgccatggtgtttttgttcccattgttgttgtataagttctggctgttgcagtttgcaaaagatgcaaagttaaggacctgattgctttttcctcttgttattgagtctttctttacattattactacaatcgatgcatttagatattgtagtaggtaatggtcacggtaatatatgataaattatttgttgttacgatgataatcttaatgacaaatcaaggcatataaatccattaatgttatagctacactttttaaaaattatgttagaaacatatttattattaattattattaaacatttatgtccattaacataaacaacatataaacatatttaatagatggagaggtcatagtcgtgtgaacacacgacttaatatgctagtttttcaggactaatgtgtaatttgcacattcacaaggaacctctatgtaaaactggctatattcccagtttgcacatatatatattattgtgctgaggtagtaactcggtttatgcttaaaaaattgtagaatactctaaaattactaatgcatgcgtatgagagttctatataaattatgattatgtctaagcgtctccttaatcattcagacttatcatagattatatccatatactaaagtagtcttggctagaaactccatctcaaagaccataccatgaagtaatgcgtctcaactccgttatacacaccttcttaaccgacgatagataagggtaatatagtacgatggaccaaccaacgacccatccatctgattcataatactatacccttttggagaagttgtttgaaaccaccatcacatcacgaatacgatgacaagaggaaaagaagaccctatagagagatcatatcaggtacccaaccagaagtgtgtgtgagttccacacgcacacgtgacaccatgcctaaaacttgaacaactcgaattgcatgcacatcatctctcgagaaaccatatgtcatgaagtgcatcacagtcccattaaatacgggcttctaaaatagcggtagtagatatagtatgataatataatagtagaccaaccaacccatcccattcataatgtgcataagatactactccctctgttttttgagaccttttcccctagtaaaacttttttaaatttaataaagtctataggaaaacacaatagtatttttaatacaaaacaaacatattatgaaaacatactcaatgttagatttaattaacatattatgaaagtgacttattataatataaaacagaagggtttcctagtgcgtcctttgagaaaagttgcttgagaattgaaaatggtacaatattagagcaagtttaatagtatagccactactggctccaaatcatctatagtcaattcatataatagttacctataaacatatagtacacaattaatatttggtcccacgtgtcatacgtacatgcatcttgaagtctgtgctacagctggctataaacatgtagctcgctgttcttctctcttctctcttatcttctcaaaatgtgtttatagctggctttatagtctgctattgtacctgcttttacgaacacattgataaaaattaataaaggagatccaacggagaattggagagggaataaggctatcttatgatgccataattagagcaggtacaatagcaggcttatagcatgctataaatatattttaaagagataaaggaagagagagaagagcagcagactacagatttgtagccagctgcagcatggactccaagacgtaatatgtgtataacaggtaggaccagatattaatagtatagtaagcaagtattgtataaattggctattacattggctatagataatttggagcaagtagtgggctacactattaaacttgctgttaaaataccatcataattgttga

SEQ ID NO: 43773 - DNA, 661 bp, Oryza sativa
ttaatcacatcttatcataaatgatgaatatttttgaccaaagggaatagtttagacaatgttgtcatttaacattttgctgtggcagccagatccaacaacatggctatttttgactctccatttgtctatttggccaattagacaaaaagattcctttccatatctgttgcacacactccaacagactctccaaatcctaacgactagttccctctcgtcaggggatggcggcggcctcgggaggggatgacggtggtctcggcagcggatgacggcggcgtcggcaacggacgacgacgcagcggcctcggtagtggagggccacatccggtcttagtaggggatagcaaatggtctcgactgtagacgatggggcgttgacaatggattacgatgcgtcggcctctgcagtggacgacgacggcggaggggcagcggccttgggtgcggacgatggcaaccttggcagtggggcggaggggcggtgtctgtgctggcgggggttgcgcgccgacacgctagatctatggagtggggagagtagttgcgtgatatgacaggaggaaatcgctccatttgagggagagagagtacgggacgggaggggagaggggaaaacgcgtggggccatgattggcaaggtgattttggctgctca

SEQ ID NO: 43774 - DNA, 707 bp, Oryza sativa
tgcagaagttggtgactagaatattccaaaaaaacaatcacatataaaattaatgtccgggttgaaaatgaattatgctattaatgtcacatcaagtgatctcagttgtttgaacaagacttcagaccaacaaaagcctcaaatgtataaaaagataacaatatgtaaaattgataagacataactggaattgatctatatatcagaggatagttgtccgaaacataaatcatttttaaattcttaaaacgcatgcacatgtactgctagtggatagagacattttatgtcactcctgaaatatttttgttttttgacacaaaacagtgtgtcaatgttaaatcacacgtatattatcatcatgttcaacggcacaatcattgtcattgcaacaaaaaaatccaaaacatgtaagaatgaacacaactaatgtagttcatagtatatttgataacatagataagctaggtatgatgcttaatttcatataaaaaggtatatttaccacttacaaatgcatagtcttggaaacaagatgactgctttacaaatgtacactagtgcgagaaaaattggtcctaccatataatctcatatcctgtccatagtaaacactgaaccgaaaatgttcccctttcccacttagcgtccttgtgagtccctttaacaatatcactcatcaagtccaattaacatgagctgtgttt

SEQ ID NO: 43775 - DNA, 1151 bp, Oryza sativa
cctaaaattgtaaatatgtgatgcactctggataaatcataccaatttattcatagattttttaggcatatgttaatatagctataaattaaaatggagaagacgataagttttttttattatatgtttatttgggttttatcaaaaaaaataccaagttgatatatctcttagtttactttagccccaccttaattaatttatatcctggattcgccactgggctagtaacatactaacatggttcacataatttagcgcgcacacaagttgtactacatacatagtgccgatcagtcaaatggaagagtttaaacaaaacggaataagaatagcaaaatatataagttcttaggcatgcccatataccaaaccgtcacaagcaactgactaggaatcaccctagaaagaaccttcctcgaaacctccggtacctagtacaaagtactcctcactaaacatctcatttcttgtatcaatgcctaaaaactgattagtagaaactgatttctcacatgtttacatgtttatctcagcagagacccgtgctgataatatgttaggaaattggtctattctaccaatcagcacacaagaaagcaaatatagagctttggaacgcagaagtaggaacgagttcacactttatttcttcttggatctgagtacggaaggagacaggagatatccgagagggttgacctatccctggaccttctgggttctatttataggcagagaaggttgacggcttccgtcttaagcttgcttccgcggcaagcttgcttacaccctaagcttccttccatgctaagttatcttctcgtagtaagctttccactaattcctttaatttgtccacgtaaaacatgtttcgtaacaatcagagccaagtatgtgaattaagccatgtaagtatgcgaaccttgtatataggcaactctaagtagttgtgtgagttgcagagagtataactatatctcgtagattgggattattctgaaacgcgactacccaggctgccaggcacgaccttgacgatgatggtagaattattcatatccgttgtgcactccattgaacacacatataatagatttatactgtaaaaatatattcaatgaactaatatgttactacatatattatat

SEQ ID NO: 43776 - DNA, 696 bp, Oryza sativa
aattcctgcagcccagcacgtcaacatagttcagtttgcagagcaatgcatcagtaaaaggatgctgctagttcagttgcttttgattttagatattgatgccatatgcataatatcactcctagtttattttcgttcgaatttagttttgtagtactacctaaatgccttctgatatactaacttctgaaagtgaagtgcagctccgaatctctgacgagaactataaaccattcaccctcttgtggtgtttacacactaaaattcactcgttctaccaaacgcttctcccaagtgacccttgtgagctcttgagttttacttaccacatagatatatcacataaaacacatgtgtccattagaaaactagcatggtcagtcaccagcttcataaatcaaaaaaaaaaaaaaaactgacaagagaacaggcagtaccgtgtactgttaccttctccttcccagcaactccatagcccagaatactagaggttatggtggtgttcttgcaatagaaaacacagaaaatggcgtggacatgtctgaatattgatcacagatggcggccgtctaccttccctgccaacagcacacatgatgtgaaggaacctgacctgaaccttcctgcatttcatttgctacgtacaaaacattagtttgtttgtttctttggtagaacaacacccaaattaatcct

SEQ ID NO: 43777 - DNA, 793 bp, Oryza sativa
tctccgcccggttaatcatttcccaccatttcctttctctcccggcgccggtggatcgagctgcagtttctttttggttcttggcacctactaggctactaccattgttgctgttgtccggtgtacatccacaacttctttgcctgcctgctgttccttttagtttctccaagctcctgccaacagcagcacagcctgtgtgtcaccactcaccagggaggaggccccactcctcctgtcttgttgctcactcactctgctggcagcttcccctaggttgtcctttgcttgccctgggtttggttcttgggtccatccatcttcagagttttcctttttgctgaatcctttgatctcggatggatgatggccggttcttgataagccttgctgcaggttctcctcccgagaagatgtggtaacatttcttggcttcttgcgttttggattggaggcaagattgcttgtgaggatcttggttagcctgaaacttcgtttgctgttcagaattcggggggctttgttggttcttggcctcttgcctgttggttgggtttgaaggaggctgaagagagtttgccaatggagccaccaagtgggttctgggcctccctggggagcttcctcaagttcttgccctacttctgcggcctcctcatcctgggggtcatcaaaggtggcttgctggtcttctgtctctgtccattttggtaatttttgaactgattccatgtgtgttaagtctcatttgggaataattgtgtgtgtgtgttttgggggggggggggggggg

SEQ ID NO: 43778 - DNA, 1283 bp, Oryza sativa
ttccacgaaacaagtaacaacatctccggtgtgatctgatctgttcatttgatttgatcgtatacacgcacttgcatatcgcgtctccttgtgtgggggcgagtggcttaggaaggacgctgtccggcttgacacgtcggcgattttcctagctggctgaaggaggtaaaggtaaaagcacctttgagagaatgttcctcgttcgtgtcaaacagtcaggtacgcccctcaccacatgcacgaaagttgttaacaccacaactagcaagagcgacagatgcaaccaaaatatatgggggtgtgcctgattttgtgtttaggcggtgttcttccctcaccttttccaactatctctatcgtttttcacacacatatttaccaaactactgagggccgctttgaatcgcagaaatggaaaaacgcaggaatagaaaaaatacaggattctgataggaatgcagatgtaaaatagaggaaaatacaggaaaaacataagaatgaccgtttgattggaccacaggaaaaacgcaggaatcggatgagagagatagactcaaataaatttttccaagaggttggacctcttgctaactttcctccaaaatctctgtaggattacacattccataggaattttaaaagatagtataggattcaatcctaatcctttgtttcaaaggctttcataggaatttttttcatagaattgaagtccttcaaatttcctacatttttcttacaaattaaaggggccctaaacggtacgtattttataaaaagttatatcgaaaagttgattaaaatagcatattaatccatttcgtccgggccgtcagtaaagcctccctcttcctagtccatttcgtccttcgcatattctgaaaccgaacagaatatatgcacattttcacatgctctgcttgcacattttgaccgaccaaaaagtttgcattgttgttttgaattatcaacattgataactgatatgtgtatactgcactattattgttgttcaaagtgagatcacaactagtaaacggtacgtattttataaaaagttatattggaaagttgattaaaatattatattaatccatttcgtccaggccgtcgataaagcctccctcttcctagtccatttcgtccttcgcatattctgaaaccgaacagaatatatgcacattttcacatgatctgctcgcacattttgacccaccaaaaagtttgcattgttgttttgaattatcaacattgataactgatatgtgtatactgcactatta

SEQ ID NO: 43779 - DNA, 1357 bp, Oryza sativa
aattcctgcagcccaggcggcgggcgggctgtagaggggcatagtggcatcatttgatgggacttctaaaaattataaaaattaaaactacaagtccaatttttaaaggttcggaacttctaaaaagtaaaaaaaaacaacgataattatgttcgattttaaaatctcaatgacaatatagaagggaagtagcgagtgagccgtagaggagtacaatggcaaagtcacttacggtttgacgggacttctagaaagtaaaaatgaaaccaaacgataattatattcattttttaaaatctcaatgacaataatgagtagagacagtggacggaccgtatagaagtataatgacaacgtttgacaggatatctagaaattataaaaataaaacctaatgtaacaataaactctaaaaactataaaatccaatttttaaaggtgtggtagatcgagcaagcaaataaaggagatgacataaggggtaataacttgtgtgacttttaaaaactatataattataaacacaaggatgataaggtttggtctttcaaagtcttaagacaataagatagctatttaataaattttaagtaaaatcatatcatacttaaaaaagtatatgattttgtttgggtgctagccgcgcaattgcgcgggccacccgctagttttctattaaggcaaattgcactttccatccggtaaaatgcatctggtttctcttggcaccagtttaacacatgcttccactttacattagggtatattaaaataagcttcgtactaagttctgtcatacaattgaagaaaaaaaagtaaaatatgagtagaacatatgacactttttgaatctataccatgtttcataacgtttctttcagaattatgaaacttttattggtttgatgatatatcataatgttaagtgaaactttttgaaagaaaacctatgctctgttcgttctggggagacaggggagattgattctcgttttccgcgtgtacgcttttcaaactactaaacggtgcgttttttgtaaaaaatttctataggaaagttgctttaaaaaatcatattaatccatttttaaaatttaaaatagttaatactcaattaatcatgagctaatggctcatctcgttttgcttatctccccaatctcctcaatccccttcccctcaaacacacccctagttatgcaatataaagtgaaagatatacttaatttggtacagagcaaaacacaatgcgttttatctggtgtaaatactccatatgagttactagtatgtatacaaactttcacttggaacttgagaataaaatatcttgttccgaaaaaaaaaaactctaata

SEQ ID NO: 43780 - DNA, 1617 bp, Oryza sativa
ggcccaccccggccagcgccagcgcccacgccggctgcgcggacagcgcgtccatttctggagacggggcgggcagcggcggagaccgcggcgaaggcggcggcggcggcggcggcgaggagagtggcgagcgtgtgcgagttgcgatggaggcaagcgcgatccgttcaactgcagatataatagcgcgggcggggagagagagaggaggggacggatggggggcgggccgggctggcaagcggcctgcatcgccgggggagagttgggtggggttggcgtgccacctcggctggatgaacacgccaccgtggaacggctcaagaaaaatattttttaaaaaaaaaggtaaaaacgcataggcttcatcctaccgctatgaatttctctgaaagactttgccattaaggttcataaagtcattctatcgcatctctgaaaaactaagtcgatatatattaagattcacaaagttatatgaacgtctcgttgccaacaagtatgttgcctatcactaaaaaatagttagtcgtaaatacgagcacatatgttaagtctaagacttaaacccgtgtggaccacaaggaagctaaccaattgagttatgctcactttgtgactaaagaaaaatatgggtgagaaactgggaaccaaggaacttaaaaagtacaggcatggttgatagcaactgtgatagccgctcgtgaatcatggtaatggagttgatttccatttaaaagaaattaaattaagttaccatttcatctataacggttagattaatatgcttagtgatgaaaccatcggagaggggtttatttaataaatggtttttataaccctatggagaacatgcgaattcaattatattttttacactctccaatgattctataaccctacaatttttacagaggataaattcatttcgtacggaggagaacaactgcttgctctaaagtctaaactctgcagccatgagcaccttgcctcaccttcaccttgggtgcacgtaccgttcaatttcggtgccaacggcacattaggtgccatgaacacattaggttgcatgtatggttcaccggaggcgtggtgaaccgggaccagcaggggttgggccgttgggcggacaggtggtgcagttatggttgttgaggtttgatgagctgaagtaaatggtgtggtcaaagtcccacacagatgacgggcacggcaggatattaaaagcccccccgcctgatttctactcctctcctcgcacaccacacaatcaaccatcgcacatcgcagcgcacacaaaacgcaccgcacgcacgcgagctcagcttcttttcgtgcgaacaaaacgggagctcgctgttggtgaggtgaagcgcgtactcgcttcgttattgtggttagctgtcgctggacgatcggttgctcgcccaccaccacccgctcaccaccatcacggttgcatcacctcaccgcaggtagtatagtacccatcactggagcagtggcgccatgggccaccgtacaaaggtacaagatggacgtttcgacctaagaacagtagcacgagcgtatggggagaaaacttgatcgatatactctttttttttttctggaaca

SEQ ID NO: 43781 - DNA, 636 bp, Oryza sativa
ccccacaccggttgttcctctcatttcgacctcccaacagtgttttctttcttttttttttctcctcccttgcaagttactgtgctatactgctatatgctgcttcacagttgttttgtatggttcacattgtgtcattgtgaaaaaatcaaatgcgctcgctcaccccctatgaacacccccaaaacgctcccgcacacgtgctaactcagcgtttctactatggaactgtcaactacatcatttgctattaagcaaataaatattaaattttcaaagttaaattagagttgattttgatttttttttatcgtagtttgttttcaatataggcttttagtcgctaataactcatatatagaagttttctgtaaaaattattacattttatctctaataagtgttacggcttactcataccgtttggtatttgactgtgtttggtactcataccgttcacgaatacttatccattttagagataagatatattttcaagaaacacagtacaaatgctgacactcacaatgcatgcacacctacccctatgaacacatatacgcataccatttctctatgagcatctactaaatattggtccgacatatcttgaaaatgacaaaatcaccacgggct

SEQ ID NO: 43782 - DNA, 650 bp, Oryza sativa
aaaagttttaaacatgtctaaattctgggctacacatccaccaaacattgtaaagatagccaatggcgaggcagaaaatgaaaagacttcttgttctggtacaaccgtccgggctccgtcgcttccgcctctactaccaagaaccgtcgatgtatataaaaattagtcgatcactaggaaaaaaaactactaatcattcaagttcgacggtgttattgtctctgttaccggttaggcatgccaaaattagatattacttgaagattgccttataatgcataaaatgactaagagcacaaggggggaacttaaaaaaagagttaaaacaaaattatggactactttatgaattagtttattgttgttgtacatgttttcatgaatcagaaggattattaatttcttttaataaactgacttgataaatcgcaacccaaagactggtgaggaggatggtggaggatgatctcctagcctttggtgggtcccatccatgagggtctgccggtgtaatgtgggcccacaagattgacaaaatgctgttattatttttattatttgcattggcattatttcaaccggtagaagaattaagcatctctctctctccccctttttgtccttataaaaccgtgtttaattaaccgaag

SEQ ID NO: 43783 - DNA, 535 bp, Oryza sativa
ttaattccgaatttcaactatttctaaattgtatttctatagggactctgctttttctttttcttcgattaatgtgagaatttctaggccatgtgagcaaacgtggaggctcctttttctattcctttaataatactagtaatcgtgcacgtgcaaggcacgttttttttaacatttataataggagagaataaaatatagagtaaatttcactttcaatcatttttatcaccattgttttgttttggaccaccctttaattaacgtttttgctttggactgggtaatcttgcatttgttccacttttgattacccgattctcttttaacatatatgaaagattttaagtacgttggctcctatttatcaatgaactcccacagcaatatatagaccaattcttttgacatatgacaagttggattaggtggttgaaaaagttgagggtattctaaaatgccacaaaggtaaaattacctggtacctggtcgaaagtgaaacatctcatttcatggattatctcttaaagagtgg

SEQ ID NO: 43784 - DNA, 674 bp, Oryza sativa
attcctgcagcccaccatgtagtggaaagaaaaatgcacttggctgattctcatgttaccacacggcttttctgctccttgaactaaatgttttgccagttactaccgtggctatttttgataaccgagtgcagtgtgcaacagctcgggttttgtgtaacttacaaaccccagttaccaccaccatatagtagtaatttatccttcaggtatcgtaacaatttctgcacagaaatttcacaaacttttagagtctgatctgacctgactccatggaacatggatttaacggactggttgtatttgcaaaaccaggcgttgcattgtcatgacgcgtcaaaacctgcatcaaatcaagtgacaagcaaagaatgtcccatcctgacgaggtaggttagcgagcgagtttgccttatcatgacgagcgatgttgcattgcaattgcattcacatagtgttcaaaacatgcaaaattaggtaaagaagaatggttagggttagctcatatagctgcagaatctactaatttgtacaatgtagctggtaattacagggaaaggttcctcttcactagcatgtccggtacaaagtgaaaaaacagcactgtcaaacattatatcacggagtgcgatcatggcttgtcatttgcgcttctggatcttcatctctgacgt

SEQ ID NO: 43785 - DNA, 1709 bp, Oryza sativa
atactcctccgtttcaaaattagtacaattttacaccgtttgtctaatttaattttttttataattagtattttatttattattattattattagataataaaacatgattagtattttatatgattaatttttttatatataaatttttaaataagacggacgacacgtgtaaccacggctaggatggagatagtacttattaacacatggttcccacagatacatttttttcaagtgctacattaacgccatgtggtataaaaactcagtcaaacaaaacacttaggctgtgtttagtttagtgcaaagtttggattttggttgaaattaaagataatgtgactgaaaagttatgtgtgtatgacaagttgatgtgatggaaaaggactgaagtttggatccaaattttggatctaaacacagccttagacgtgttgttagcaacatctaaatcaatccgggttgcaccagtttaaagagatggacttgaatgtggcatttcggttcaagttcaaaagtcagactctgggtaaaatcgagggacgtaaaataaactgcattatctcatcatgtaggttgttaagctctactgaattgattattttgttggtgaaacgaaaatgtgatgttggtcaaagaaagtagagaatctgatgcagatcgacggagcatacgttgcaatgatacaaacaaatatgaagttaacgatggtcgaggttaaaatgtacaatgaaagagtgtagattctaagtacgaactatcttcgatggctgtgaagctatgtatctgtggagctttatatcgaaaacaactccaatcggcaatagcactatagcagaaaaggtgatttcgatggctagaaaaggtaggtttctagtccaatgtggcatgtgctgttcttgctatggacttctccttgccgcaaatgacctcactttctatttcaggccctgcaaaaacagttaatcagacatgaatatttaaggaagacattaaaatttctctattttgctatattcttgcttctaaagttttgtatggactagaatggatcgaaaaaggtagattaagcccaattactttgttttgtcatttacttcaagacccttcactgtacatagaaaacacataataccagggaccaccactgtacataattatggaccagcaagttcgtcactttcaggataatgtaggacaaatataacacagtaggaaaaacagaacaagaaaaaccttgaacagaactaagaaaacagtgacaaatgtgaagattaacggcacagtttttttgaaaaccagagctaattagagctaaaatgtgacatacaggtaaagcaacaatcatagaacatcaaaacagaagattcagcatgatataatcactagacactttaacagacctgtagtaggctgtaccaagttttccaccttccagtcctaccaggcctcccgccttgagagttctcttactgaccctataataccttgcatcaacttcttcatattgaaaatcctcatcagaaaagtcatcacacaacacatcaaaaacactatcaaccagcactccagaactgtactcaaactcatcatcggagctaaaattggtaaaatcatctaccattgctgcaaaagcggtaaaatgtggttaattttcatgcaaccgataataatgtgtaataaaaacagtgaccacattagatagcc

SEQ ID NO: 43786 - DNA, 2807 bp, Oryza sativa
attcctgcagcccccgtttgagtttattttttatacggttggttcctatgttctcctaagtgtgaaaaaaatatcaaaaaaataaaataaaaataaaaaaattgcatctctatgtactgtttaacttatatatgtcatttcatgtggttatattttgaattagattaagtaatttcatatagtggtagagtgcattatgtttaacatgctgatcaaagggttttactaaagaaattatggtctaattttagtgaaggtgcaaagtagactaagtggtatgctagctattttcagacttagctaagtggtagttcgagtttaaattttttttgtggttggttgtatcgtgatcctgagtgtgaaaaaaatccgaaaaaataaaataaaaatgacaccgttgcaactccatacagaaaaacagaaatggaggcggcagcgcagccatgctggcgccctcctcccttgggcggcgccagcatggctggcgccctcctcctgccacatcggttcgcgtgcgccacggtggcagaaggacggcgcctctcgttggatgacggcgccagccactctagcaccccaaaaagaaccatttctgggataagttttttcaggagtctatttgcgaaataaatttttcaaaatgaccaaaatgtgaaaaatccagtcaccttccccactttgaaaaaagaggagtagtagcttgctgattggtgttttacatttaggtaaaaaaaataaaaatcgttgattatgccgatcttctactgctgcctaatttgggtacattgttttaagaaaaaaattaaggcgcctgcttggctgtgttttgacacgtcgttgttgcctagctagcctgtctcccatgtgtgtcgccgacgtgttggacccacccgcatttacggacccacatgggtaacgtgaggccgtgataaactgggcaccacaaaggcacaaaccgaccggaccaaacaaatgtgactcgcacggtcgcaccacaaaccgaccggaccacaaaatgtggcccgcacggtcgcaccacaaaccgacggattcgcctcctcctcccccgtccgagagttgtggttggattggaccgaaggaccaaacacgatcaagcacggtatacatttttttttgtgcgaatttattccctcacgacttttttagtgaatgaccaccctgtcatatatgtttccatgagacactgtacgctcgtggacaacgctgcgaccgatagaagttcttcagctcgatgcctcgatacctctctaacacgtgaatgctatattttcatagtatattggtagtgttatttattttcatacaccaaatgtttccatgcttaattgctgatattaaaagttgccaggttctgaaaatcacgtcacacccaattatcgatttccatatgtgctaactccatacgagtaaatcccaattactcgtatcgatttccttatgtgctccagctgtagtatatacttccaaagttccaaattgaggctaggctggacccaaatactagtataaggaaaaagaaagcagtatttatatttttccttatttttctattttttttcctttctagggagatccagccaattcttctggcaccgtttctcttagctgtagctgtaggattgtcttgacacgtccttgtttcctagcccgcgcccatttgttccaccgacgagtgggacccacccgccattagttggaacaatatgggtaaggcaccacacccacaaacgggacccacacgtaacccggtgaagtgtgttcacgctttttgacacttcaagatgatacttcttcggtctcaaaataaacaactcctacaccttcttactattagagcaagtttataatagtgcagtcaattatttgttttaaatcatttataatcaattttcatataatcgtttcatataaacatatactccctcctttcaaaagtctaaatcatattcgtagttagtcactatgtgctatattattttttttatcggaaccaaaaaattattttagtacttattggttacatgtttattggttttggattaataagttaattacacattagtcttggtgaaaaagaaacaggactaaacttttggaaggagggagtactacacaatcaaactacgtgtcatacacacatgcatgttagagtccgtgctgcagttggatacaaatctgtagcacattgatcttctctctcatctcttatctcctcgaaatgtgtttatggctggtttatagtctgctattgcacctgctcttacctacccccaatatgcaaattgagaaattttattactccactaccctcacttagccatcaaccaatataattttcacattaattaaggatgcagtggtctatccttaccggtaattgtgcacggcacaatgcacgtttcccacgttagctatcgtaatcacataaaaacacttaaattttgttgcattttcctgtataatatgtcacgcgaaatatacaaatatactaaaattttaagaactatatgtactatgggagaatttactatttgccactttaccaaaataccagtgctcaaatgattgcttaaattaataaatgaacaagatgtgtggcaagacttattggaaaggaaaaatcttaatagtaaatcaataactcatgtagagagaaaacaaggggattcccatttttatctggcctgatgaaggtaaatagttacttctaaatatgggttctattccgcttaatgtttctttcaggagagctttagttggtcagaatttggtcaattggcataatt

SEQ ID NO: 43787 - DNA, 2568 bp, Oryza sativa
attcctgcagcccctattctgtaagatcattgtatttagccttgattaataatgggtatatagaaagaaatagatcatttggaagcttaagatgccccttaagattaagatttttatgtgtatctccttaaaggaattgtgttgataaaagataatttggctaagagaaattcaaatggtagtttgagatgttgtttttttatgaaagaaccttatgaaaggtgaaacctaaactgaaacataaatgagccacatcatccaataaatattagccattggattcatgaaaaacaaaagagggtgaatgaatcaagaccgttggattagatggatgataaaaaaaatattcaaataggttttcggaagctactagaagaggaaaaaaaggaaaaatgaaagagagccaggaaataagtaaaggaagataaaagattacatatatatttttacgatctgcacctatagcaaattattttttcaaatgagcccttcatcttttaggtaagattaattggtagggattgaaggtagggattgaactattaagagcatattcaaaatgtatactcgtatgataaatttagtttctataagttaattgttaatatgtttgataagaaaaatgctactgggacatacatattccttccaatgagaggtcattatctcccaaatatagatttaatgattttcacactgatttaaaacaaaacaaaattattccttataaacagacaaaatatatgtacgtaggctacataaagggtgaacaccaaagtcgaataaggggatgatagagggggtcatgtaacgatgaaaacaactataggatgagatgtaaagtttacaataaataggaagtcatttattatatcagcataatatcactcatcccacccatattcttttacgagcaacgagaagcccaagagagatggcttgccactctaatgtaccatgttacaggattttagagtccggcgaacgcgcgacatgatgtgctagttttttatgaaaaacggaacatttttccatcttttcctatattgtcatttttctagatttctttggagatcaattcaattctcatttgaattatacccaccacatagtatttctcatatgtttgagaattggctggtgggagttaataaaaaaattaagaaacttattcttgtatgggctttcaccgtatgttagactatttggcttagtaaaaatgatacagtttatgataaaacaccaacaaaatattatttgcaagtacttttcaaggcaacggggatgggctcaactacaaaggtatgataatgatatcaagctaataaatgatgcatgtcgtaaacccgagtcgataattatgcacctttttaccaactttggatggagattctcgaatagaattcataaattcagggttcttttatcttgtgtggttgggcccaactacaaaggcatgatgatgatatcaagctaataaatgatgaatgtcgtaaatttgagtcgacgattatgcaaatcgggattctcgaatagaattcagcaatttagggtctttttatcttgcgtttgtgttttctttacagtgtgtgctaagtttgtttatgtgtggactttataataattggttgtagctcgttagcaaaggtcgaaatgttactccattatcttcttataaaaggaaaaaaatacgaattaccccctaaactatcgtggtcgaccaaaatagccccttgaactcaaaaaccagacatcgctcaccttgaatttttaataccagacaacaccccctagtactattgcaagcggtttagggttcaaatagcacatgtggcagtccagtcatccttttttttaaaaaaaaaatcgctaggacccacttgtcagaatccccacccacctctttcttttccatccccttttgaagcgtgcgacggccggggagagggcgtgacgctaccggcactcttctccctcctcttctgaagcgcgcggcggcggggggagacggggtgacacagtagggtgcgtgcgatcggcggcggcatggaggcagaggtgagggcagcgcgtgccggtagcggcatggaagcggatgtgagggttgtgtggcaagcacacagaggacacggcgacagtcggagtgctgctaaatctatcgtctatctttcttccctttggtgcgcagtgagattggggagggcgcgttgcgacggggccagaggggtagcgccgtcagcgagggcgtcgggaaggagaggagattggagcggaggcggcggtgacagcgatggagcgggtggcggaggagcaaccgggcgcggggatgtaacaccctgaaaattcgacgacaaaaatctaaactctaaaaatacggattttcaaaaactttttaaattaattgcatcatgccgatcttattcgcctatttcatttgaatttgatctcgaagtttattaatcgtgagtaaagattagttgtggataggaataaataaagtattatcgcgaccatatttggatcaattaaatttaaatatgatggaataagaattaaccctaattaaaa

SEQ ID NO: 43788 - DNA, 657 bp, Oryza sativa
acacgcgtatccataaaagggacgagttgctctgaaaactgctgcgagagcatgtcggcaaagctctaaactctcaactcctttccccaagttgttaggcacgagtgactgagtgggtgggttatggcgccaccgttttacataaacacggcacggtgatagtctgatagaagcgtatgctaatggaaacaatggcccgataatatgtaataatgtaaacattatacaggcgtggcgtgacagtaaagcacaactgctgcttttacaacaggatcccagtcaaaagtccttcatacttttacctactaaaaaaaatgtccttagcactcgatccagttgttcatccgtgagccccgtccacgacagtccaaatcagtacttcgttcgtctcaaaatataagcatttttagaatagtgccaagtcaaactttaaaattttaactattaatagcgataaattaagaaagattaatcatataaatttgatgttactatatttatcattaaacaaacttcataatatgcaactctttttatttaaaatattttacttttatagatattattggttaaagtagtatattagacactatatccagatttaaaaatacttatattttgacacggacggtgtcattgcaagcgaattttttcaac

SEQ ID NO: 43789 - DNA, 668 bp, Oryza sativa
gcccccctttgcgagatttctgtgatctgaacaaatggtaagaaataaaaagaaaacgtgtcagcggtcttcaactagagcaaaagaccagaaggtagccttgttcttctaagtgattctcatgacagatatatcaggtgattctataaaattttggaaatcgctattgataatgtgaaaaacgttttgaaatttgcatcaccaaagaacgatttgccactcgatgaaggcccacatgtcactgagacaatagcgaaagatcctaaaccagtgtgcacctcattggagcagcaaatcctaaagtttcaatttgttgacgatcatcaacattcagtaccatacaatactgtacctgctcatctacattactccctctgtcacataaaaaaccaacatagtactggatgtgacacatcctagtactatgaatccatacatttgtccagattcgttgtactataatatatcacatctagtcctagattcactttttttgggacggagggagtacataaacaaaatcgaaggaaacgtaattcctacaccagaccattctctttgtaaattagagaacttacagtgatgcattgccatcgtcatcaggctcgccactatcatgggctgcagatgaaatacctgtcacatcaattagatcgggctgcaggaat

SEQ ID NO: 43790 - DNA, 924 bp, Oryza sativa
tgaaaatcaacacacaaaaaagcaaaaggccaatatttgttcagataaaaagtactgtatccacgattgaccctgcaacagatgatcgacgggcaaatcaaagcgaggcggccaaatcaagcgtccttcatcttcttggtggagatggagatggatggcgtgtcggtgggctaaggagtctgaaccatgagttatgaaccgagagattgaaggaagagcatgcgccaccacggccggcggagcagcaacgactgaggacgctactgcgaagattgaggaacaacaccgtgcaggacggtaagcaaatccttttcacatcggagtaggacggcaggaagggcgctcctacctcggcgccggtgggggaggctacgatctgcggtgggatgacgtgatttgcaatgagagaaggcgcacggcggcagctagcgcacaatttgcaggtaggtggtgggaggagtagcggcttccgtagcgtgtgctatagtagcgacagaagcgtgcgaggaggcgttggctcggcagcggtgtcatcgggttgtgtccagtggcggggatagcgcttagaggcggtgtttctgcgctagaatagcgcgtccgctcgtccgctcggtagggatggggatggaaaatcagtgtttttgattccaccgttgcattgcatcgtaagacagagtggccccacaaccgtctcgagccgttagatatatagatcggacggctgaagaaaggaatgaaaagatgttgatttcacctgtagaattgtaaggagacaactcctcctccattagtatagatagtatagataatagattcctaaatctccttacctatgaactgcgcttccgatttttgaacatcagaaccaaccgagatattagcaaatccctaaattatttctgatcgaatcttggaaatgcaatt

SEQ ID NO: 43791 - DNA, 4714 bp, Oryza sativa
tctgctaaaaattagaaaaaatgagcttggttggaggtttggagcttgtgctttaggcagctttaaaatgaatattaagcccctctgaacagatacacataaatactgaccaatcatggcctcgtatcatactatatcgaaagcgacaaatgcatgttaattgcatggattaaaagcgtggtaggacctaacttttctgagcccataaggatttggattccaggcaactgaaattattagaaacggtcaccaacggccggttttggcagctttaaactcaagcatagcccttccaataacgtaactacaataccaaccaaacatgaggtgcaaggacagtatttgcgtcacctagatcgaaaccagtaaatggctaaatgcgtgcgcaaacaaacataggaaagcaggaactagcttccaataaaaaccggtaaacgtcttttttggacatttcacaactttgtcggaatttgattttccaccttattgaaattagggtttcagcggttacagacaagaacagtacaacctagaactgctagaaacagtcacggatataccgacaaacaaacagagttcaaatgaacgccttttgctcttcccgccattcctacgcctcttgttcttcccgccattctaaactgcactacagagcctacaatactaaatagcataagaaataccagtgtactacttcttgttggcatgactccatgcctgatgtctccatggacatcaaacccatcaacagttagacactcttatttactaaacgctgtgcttcaagcagccaagcctatccattagcatgtatagcatctaacaaccctaaagacgaatcacatccctcacctcttgctacgcaccatatcaccctctagaggccataacctcaagtaaccctaagaacagtgaaaccaaacctgcccggtccgaattctccaacgaaaatctcacaccatgacataattcagtggtacagaaaatggataagacatgcacaggcgcgcacacagggatcgagcccagtcacctctcttagatgcgtggtggtgtgggaggtggcggacggcgatcccgccgtcggccggcgcgcccccgccggtggccacccgcaggtgcccctccgccagcatcctcgtcggcgacctcgccccctcctccgccgccatctcccccccacctatgcggtctcctccgcccgccctgcaacaccaccacgcacgcccacaccctcaatcaatcagatcaccacagccacaaaaacaaaaaacaaaaaattaagcaaaaccaaaaacgaagcatacgatgacgaatcggacgggatgagcagacgaacacacctgtggagatcggaggcggagacggcgagcgccgacgcggatctcaggcgagcggtgcggccgcgcgggggcgaggcgaagagagaggggggccaacgcaacgggggacgcgagcggagacgagaagggagagtttttattttatctttttttttttgcctcccgtctctctcacttattactatctgcctctaattacttttaccgcgctgtattaagctaatcttttccacccattttttttctctattttcttatttctcatcaagcagtagcactgtgtgaactgagagatcgctacgcgcacttaaatactcgcgggattagagacacctcttgtccctcgcgggcccacctgtcagtggtggtacgtcggtgccgtgtagcgagcggggggtcggtcggggagttggttttgagtagaccgggtgcatggaccggtgagtggatgggcgcgtggaacggacggcccgcgcgaggtggggcggcgtatggacgcggttcacgtaatccaggtggagagagcaacggggatggacgggcgtgagggggctgacgcggccacgtcgtcgtgttcggcccacgtggcacccctcccagatggggcgcacgtagcgtaaaggcgtccgtcaccgcgacggacgcatccgggccgtccgttggtgggcaaagccgctttctgctgattttgtccgtgagcaaaaccgccccaggtttcactggtcataaatctcacagtcttgcatgttgtcacttgtcatatgctaactactgtgctggctgatcagtcattcacatggaatctgcttaaggttgcctattagtaagatactaatccttcacgctttgttaagtgtttatctcgacccatacggcttggcaagctatagctagctaccttacctacctcgtcatgatcaacacaacacacaagagcgtcgacgtgtcatcggaagtacagggatatgaatgaggcgaagcacgcgtgccattaacatcgtcacaactctggcaccatgcgtgcaatcgatcgatcgattcactcctcgttgcagaacagcagagcagtgaacaaactaatttagtctctttctgttgctccgcctctgaatccatccagagcacgccatccttggtccatcacacaggtgttggcgattacagtgccagtgcttacttacagatacatatatacacatctctcatgacaaaaaaaagaagttgatcgatgtttaattaattgtactggtatgctcatgtaaatactggagtagtagtagattagatgcataatctaatcagatcaggacttgtcgaggaggccgtcgaggtagaggttgaggaggtatctgccgggtggagaggacgtcgaggcgcttctcgctgggctcgtagcgccccttgcgcagctggtaccggtgcgtcaccgcagacaccgtgtacgcctgcccttcgatcgtcacgctctccccgcagtggatgttctgcaccgtcatcacgcaccaacgtaaacaccgcttcatcacacgagatagcattaaaattcacagcaacaatacataatctgccaacaaccaccggccatatactctttttttttcttccttttttctttttttttctggtttttgttttgaagaaccatgtcagcatgacaatgtatcagttcaacggtgatagctggcacgcaaggaggaggaaaagcagcataattttttgtttccccgttggaaagtcgggtcttggtatctagaacaatgggaggcactcggcttggctttgacaatctttttattctcgagggaattactttgacaatctgacagcgctttcgtgcatgtatgatggctatctggcagagattcttgatggtagtagtaccaaattacgttgcttcgactttccagcaggaaaagagttcgttgtcttgcaaggttaaaactgctaaaacaggcttcacagacatcatcaggaccttggcgaggttaaacttgtctacttcctccgtttcacaatgtagaactttctagcattacttatatttatttagatgttaatgaatctagatatatatatatatagtatgtgtttagattcattaacatctataagtatatgggtaatgctagaaagtcttacactgtgaaacagagggaatactaccctaccggctgctcatctacacagcttcttcctgctatgcttatgtgcctttggaaccataggcatgaggtgacttttaagaatgaacaaccctgcctacgccgtttgcttcgccgctgcatcgatcatgctagcctctgggctgaacgaatgaacaacgttggtagatatgttatatctgcttgaaaaacaagctttctcccgtttcttatatctttaaaataggtaatggcgcgaccttatcgctacggcgccctacgtaacctcaaactcgttactttctccgtttcacaatgtaagtcattctagcatttcccatattcatattgatattaatgaatctagataaatatatatgtttagattcattaacattaatatgaatgtgggaaatgttaaaatgacttacattgtgaaacggagggagtattatcaatggaaaattcaagtgagggagctctttcctccggtgatttctaaaaaaaaactactaaaacaaggtttacaaacaaaaacacaactagagtaggatatatcactattatctaaaaagaaaaggatagcatggaggctagttgttgatggtcctagctgcgcacgggtgctgaattgttttttttttcgaaaaaacgggtgctaaattgttgttcttgaagttacaacaatagcataaccagtcagtgatcacttcagaaaacactgtaagggttcattcggtttaaagaatttacaaatgattattttatgaattgaaaccttaggttttttctatatgcattattagttgtttaggaataaatcctaccaaattcctaaggattatattcttacaatcctgttttatatgtttttttagtatgagatgagagctcttcgagaattttataaggatttgtggcattctaatcctttactctttatctttttttttcctatgatttaaaaatcctgtgaaccaaataaaccctaaattatttttttgttctcgcagtgctggaaacacttcagtaagttgtcaaagaacgtgtcctttttttccccttaatgaaaaaccactgcattactacgtgctacaatttaactagtagactgacgcaatctgtatttctccaaaagctgcgaagaatatttaggatcgaatttatacactgggagcagaccgtgactctgcaaccgaaattgtggtgcactgaattctggaacaatgc

SEQ ID NO: 43792 - DNA, 1051 bp, Oryza sativa
gtgagggacaaggacaaggtgctgctccttgaagaccctgccctcaaggacatgaagctccgggccgccctcgcggcccgggctaccgtccaaagcccgtatcagccttttatccaagtctaggtctagcccagtctggtccggcccatcttatcgtgctaactgctagattaatcgtaccatcagctgatcaagtctctaaaagcttaattcctgtctggaattgacctgatgtatggtgattttttactgttgctgttaatcagcagtgagtaccagtccatgggaagggcaaaggggccctcccatgtgagagctagagtacctgccacttgttatgtctctaattgcgtgatttgtgccatttctaggtagttaatttgcgagtgcttagtgtggttgtatgtcatgcattgtgtatgtgtgctccattttctgcaagtagtagtacctctaatgtggaagggatcaatgtttcatgcatgtaaggatgcaactgcgtgcaatcaactgagattactgctgcagattttattttgtggtctttttctaacaaactatttcgttgttgggaacagaaaagggcacagctctgaattcgctgcaagctcctatagaacatatgcacacaacaaaaaaaaatagcaaaagttaagtaatagcatgctattaaatttctgaagtcatctttgtcatttgcaacaatcaatagtacttgactggcataagtagtcttacaattcagaagtttatcaaacatatcatgaatgattaactagacgcaaaaagtaaagaagaacaagacatgaacatgcatgggcggatctagagtgtaacaagtggggcacccactcaattttgcagcgaatgggggcaaatgcatccttgacacacttctaagtctacctgagcggtagatccttggcctccacttatactattttctgtctccgcctctagttgagggttgtgttttgtcatggtgtttatttgagacatctacttgtgtgcacactgagcctcatcttttcacttatgcttatgcttatct

SEQ ID NO: 43793 - DNA, 1220 bp, Oryza sativa
atcgtcagaccgccatgtcgacaacagttagataggctaccccaaatattatactggtgtgattatcatgaataagagcaataccggcttcggccaacaggatgtagggttattaactgataattcaggggcccgaacctgtataaaaatcctcgtctccatctcttttacctcagtctcgcatatatcctagcaccgacgatccccatactatgcaaataccagaattgcgacatcaaacgtcgacactccctcagtccaacaaaaaaactcaacttctagagtttgaattttgtctcacaaaaatcaatttctaccgtcctacctaccctcaacacgtgaaacggaaagttttatcccttcaataccttttactacgtatcactcttactattttttcagtgattaaaggcattttagtcattctctatctccactaattctcctttggaatgctaggaatgttttttttggacggagggagtataaggcccactttagttttcaaaaagttttttccaaaaacatcacatcgaatctttggacacatgcaaggagcattaaatatagataaaaacaaaaactaattgcacagtttgcatggaaatcacgagacgaatcttttgagcctaattagtcgatgattagccataagtgctacagtaacccacatgtgctaatgacagattaattaggctcaaaagatttgtctcgcggtttttaggcgagttatgaaattagttttttttattcgtgtccgaaaactccttccaacatccggtcaaacgatcgatgtgacactcgaaaattttcttttcgcaaactaaaccgggcctaagagagtaaaagtgcaccctgcaggacagtagaactactactcaaccctgtgaagaagattggtgctgttcgtttcaaagaaaaaccctgtgaagcagtgaaggagagtgaacaggaataactgtaatctgcatccagtaatggcaaatccgcctgctgctggcactgaccggccccgtcgcggccctccccgaagtcgttgcgccatcacgctgtctccacgcaggggttgacgcaatgcaaccacctgctcccgcaccagaaaggccggcccattaggtcactctccactcagccaaaaaaaagggggagagagagagaagcgatgatcaggtagggcgtgtggagtggtcgtgtcatttcgatcggtttggctttgccaa

SEQ ID NO: 43794 - DNA, 645 bp, Oryza sativa
aagtattaattattttaaacttaaaaatgattaatatgtttttaagcaactttttaatattttttaaataaacttaagaaacatgcgtacgaaaacaatggactttttctctctagcatctcctatcagacactgtttagtctacttctgctgagtttagtttcaaaatttgttttcaaactttcaacttttccatcacatgaaaacttttctacacacataaaccttcaacttttccattacatcggtccaattttaaccaaattttcaattttggtgtaaactaaacacacccttcattaagaaaaactcctgctacacgcctacacacacagcagaaagaagacttgagaaaaaggtccttggaaggaaacttccacaaatgaaataaagtctagggaccaaaaagaaacatggaaaagggcgcaggcaataatgaataatttgcggtcaggaaaggccgcgtcttttccccccgagcctacgcgggccccacatggcggccagctgggggctatttagtggcctacccccttgcgctttttccagggctcccgctcccacccccacacagcttgtggccgccctcgctccgcgccacgtgcacgcgatccacgccgtccatcccgcccctccccgcagcca

SEQ ID NO: 43795 - DNA, 700 bp, Oryza sativa
gtaggataagaaagaaacgttactagagataaaagggaaacataaagttcttatgggacactaaacacacttttcaaaagataaaaaagactttccaaaagataaaaggaaacaaatagactcttcttaattaatatataacttgccatgccgcatcctccttgaactcagtctcttctggataaactttcttgaataaattaatttccttaaccaaatcctctaagaacccaactggtagcgacttgataactcccattggccgattccagaactctgaaaccgatattgtttttagaccgatgacgtcttcgaggcttactaaatttcactgttaacacccttatgaagaggtgtctcttcataaccaggcacaattaatatgtgctaattgttcactaagccatgcctaatcttcggttgccaatcttttccagcagctagtgcccccctctgaaaaccccaccaccacttcgattgtacactacggcagtgttcgtttggaggacattgagggagaaagcacctcgttgtccgcacgaacgcttcccaaactactaaacggtgcgtttttttcaaaaattttctataggaaagttgctttaaaaaatcatattaatcaatttttaaaatttaaaataattaatactcaattaatcatgagctaatggctcacctcgttttgcggggctgcaggaat

SEQ ID NO: 43796 - DNA, 594 bp, Oryza sativa
ctgcacccctacagcgtctacgccgccaccaaggcgtgagtgcttctcacttcttcacctttcaactcttcatcagtaacgatttttctctgcgtgttcttgcttactactactacatagacgaggcagaaaattattttatgctttcagtgagatttttggtacaagctttttagtttttgtgctctctcagatcagttgttctggcatggaccacggaaatggggactggcacagttagagtcaattaaattcatacttgattatatactactagtataaaattatgcttccatattgtgatttgggtttattgatcgagagttagtggtcatgtggatacaaatgtccaccaacattttcaggggttttcagctagaagcctagaatagagcactgaggtttctcctgggggtttatatgtagatggagaacttgttggagggtgtaggattatgtatatagggcctgtgtagttcgcgaaaagaaaatttttgggtgtcacatcgcacgtttgaccggatgtcggaaagggttttcggacacaaatgaaaaaactaatttcataactcgtctggaaaccgcgagacgagt

SEQ ID NO: 43797 - DNA, 1645 bp, Oryza sativa
ttcctgcacccccagttgcacgatatccacaaacaaaaatagagagggatttggtaaagaaagccataaatgagggaataacatcacctatcaaaagcatccagttttttcacacatccgaagctggaactatcaacatcattgactgaccggtcttaaattgttttgtattatgttgcgagtttagtatggctgcaattgcaagttgtgcaatggttaccaaagaaacggcttcagtcaacagtagatttgatactcatgttcctgatatagtaatgtatatcattaatatataaaattcagtcttcttttcaaccttttcactatagttatatttgaaagtttttcacttaaaaaactatcgaatgtactcccaaaagaaaagctgtgaggctgttatgcatgtatatgtatagtgcaaagtaacgctgatggcctgaaatagtttgtgtgaatgcaaaatgtaaattgacaaaacatgagccagtagcccagaacatacatcctcgatgaatggcatggcatggtatgccaacctctcagattatatatgtcttatatgatatccttttgattcagaaaagaattagattaggatggattcttgtcatggttgattttatgagttaatttttgttccctgagtaaaaaactgttccttctccttttggtcactaaaaaaaaactcgaatattagggaaggacataatatcaaataattagaaggggtgaggctttgaacccaggtcgtctagcccaccaccttgtggagctagccggaagacccctgagcatttctcactccttttggtcactaactgttccctctcggcctctcctgtcatggttggtgttatttgttttggaatttgtatctatgggagaagcatttgtcttctgtattgagatttcatttgtatccagctgatttggtcacctcatgagtaggatcagcaccctttgaaggctctgcgagctgatacagtgttcaccctttgcacctgtcgaaaatcacgtacaccactttaggggcttgcattgtcctttgcatgctttttaatcacaggaaaacaaaacagtttgtttttcaaagctttaggcttgcttggaagcctgggtttagcttaaaaccagtgtaaaagtatctgccagtttttatttttagttggaaaagtgataggatgggctgtttatggaaaataaaaaatccctagcccacaaaaaaaatcgaacaaaagtcaggctttctcgcaccgaggtttgtcgagctggtatgagcccagcctcttgctccgctctgtcttcgttcctgtctcaatcgatttatttggagtaattttacggtccttgagaggtatcggaaggtaccaatatttttagtataaattttgatacctcctaacaaaagatgtcaaattttagacttaaaaaaatatggtaccttgtgataccttttcaaggacagtaaatttactcatctatctgatgccgccagcggccagggcatgatcgacccacacttccgccgccttggatggcatgtctgaaatgaaatttgtattatgaaaattaaatcttgagctctgaaaattccaagaaatttccaaagaatactttatgccatcaagaatatatttaaaaaaat

SEQ ID NO: 43798 - DNA, 710 bp, Oryza sativa
aacttttttttcccttttggaaggcagaggggaaaggaagtgaatcttttgtaacttgtccatacacaaatccacaaaaacacaggagtagggtattacgcttcgcagcggcccgaacctgtatacatcgccgagtctcgtgtgtcttgcgggcgagtgatctttccacactcggagagagagagagagcttgggattgcaccctaagcccctggtcgaaccggcaaaggggggcttgcgcagtctcccggtgaggggccacgagctccgtcaacgtgggtatgcacgtgttccgtcgttttgtgggttctccatgtctacccactcgatgaagttgcacattggacgatatgtctgcgtaagatgttacaattgtgtacgaagaagttaatttttttatccatttgaacttcgaatagatgaagcatacctgatcaaagttcgcacattggaagaatctcctgccccgagtttgtatcatgagggaagacttgagtatgcatccatccccacaatcgcacaaaggacggtcacaccatggtggaaaccaaccagcaaaaggatcgcttcgccagttgagacgctcaaggaatggcgcttccattttcattagttgtgtgctagtgggaaagaagatatgaagaggttgccttcagattgtcaattatatagcgtcgttttcagtgcaatatatgtgaactcaatgagat

SEQ ID NO: 43799 - DNA, 710 bp, Oryza sativa
tgaatttcatacaattgcacgatattattgtcagcctttcatgcgctcaacattcgctgttcgtgcacatgaatattttttttagcatttctgttatatgctcatggtgcagggtgtgcatgaacttatgcatgacaagaccaaaaaaaaaaactacttgagcatgaaatttcatgcacaccctgaacttcaacttgagctgtgtttttatttcgtgtgccaattttttttttaaatatacggacacacatttgaagtattaaacagcgagatgaatttattaagcctaattaatccgtcattaacaaatgtttactgtagcaccacattgtcaaatcatggcataattaggctcaaaagattcgtctcgcaatttatagtcggactgtgcaattgatttttttcgtcaacatttgatgctccatacatgtgtccaaacatttgatatgacggaaaagttaagtttgaagaaaaaagttggaatctaaaaacggccttgaactccatttctgttatagatatgaccaaaaaaattaccaagctacaagcctacttgcacgattgcaatagagggtacctgctgttagtaagatggagctcagcatcgacaagcacaacccaaaataattactgttcttacaattcatcaaggactcaatgagttcaaattttaatcaggaatccaactcaagttcatgttgttcatcact

SEQ ID NO: 43800 - DNA, 622 bp, Oryza sativa
aaaaatcaagcagcaacaacatcgttcgtctctgtggacgagtcgctgctgtgtgtcgttgttgctagcttgccacgccatgctgctcgcttctcaccgccgctgaggggcatcctgtagttgacgcacaagaggggaaagagcaacgagccccccctgctgaagcgtagccgaggcgccctgctcctcccccttctacatcatcgccgaagccgccgcttgcccgtacgctgccctctggagctgccgccttcccgtggcgcttcaccgcccgccgccgctaactgcttgaggcttgagccctgcaccggatttggatggggacggtcgaacggacgtggtgttgggctagttatttcttccaggggtacaatagtcctttttgcattttgtaaatatttttttcttctcttttgtctcacaaatttgggtctccctaacggccattcaaaacaggggcaaactgcagctacgtttgaaaaaagtaagggcaaaaacacaaaccctaaaaagtaaaggttaaatcacatttgtaacatgaaataggggcaaaaacacaattgtccctttcttctaatagttctaaatgtaaaatcagtgatgatagtgtcaataacaatct

SEQ ID NO: 43801 - DNA, 715 bp, Oryza sativa
gtagacctattaggcaaatgtacgagcaactgcaaaaagagatgatcacatggttttgaatcatgtgatccaataaagattatgaacaggaatagcacagttgaaacaataagaatgaaaagacaaaattaaacaattcagaaaaagataataagaacacggaataaacatatgtactatcccctctcatgcttcctatgcaaatatactcttaattccgagtcataatatgctagccatcccttcttcctatatagttagtacccactatagcaattaatactataaagcttgcaatacgttgcaccacgtcatcgttaattctcgacatttggattggtcttcatggttccagatcaacggtgttgatatcttgggccagctccccatcaatgttttccattggcgcagccccacctcgcccacgctccatacccacagcggtccttgtggggaaaaaaaaaagcacgctcctaaccctcactaatcgttttctttttgctttgtacatgttccaatcaggtggttgattttgctagatttttcttcatcctgatatatgacaaggactattagttaatcaattggtttctacctattttcacaggtatccgtccaataggatttgcaacaattcatcgaattggtatatatcattccttaatgaagtggtaaaaaaaataaacactcttcctctctctttcattgcttgctg

SEQ ID NO: 43802 - DNA, 1271 bp, Oryza sativa
acagttgttgtgtccactgcccttgcatttgtacctgcatagtaacctaagttcacattggtgggttcgactgttctccagtaaattcttgagttagaaatttccattttccatttcagagcaggttccatttttttgtgagagaagtaatgcagtgagataggggcctctctctccctctccctctccctctccctccctccctccctccctctctctactttgcccaagaaagcgcacgagcaagaaggaattcaccatccctccaagagttggagtcattgatataccctccaccccttaggcataatggttgtaggaaaaatgtgcactactcaataatttgcagctccattacgcctttagaataaataatattttgcaccactatcacagtatggattttggtttatgctatgtaatgtttactatttatcaaatataattagtgtcagtggctacttcaatttaaagaatgttgtgttatgtatcttctcgctttaagatatcagcgatatcaatctaatgttcttccactatttgttacaatgataaatagatttttgaagcaatcctgttgaatatagaagaccattgtagctcttgaattgttttcttattcggttgcctttctctaatctgttcttgtgccaggaatctctcatgtttcttatacatagcaattcatctatatggaaaaagcatggcaaccctttaactaaagttatttttctttaaaagaaatccttactgtggttagtcttttgacgaggctatgtgaaatgacttttttttttttgcttttggctatttctgtcattaacaaccttttcaattcaatagatgatggaaagcaagaatgttcagaaaatatgattatgcctgttctgacagtttattataccttctaattttaaatgtacttcctaaatttttaaacgtgccttgcacgtgcacgattcctagtcttaaaaaaagaagcagctggtaattggaggggattgtaattgaaattgatcgttagcagcaatctttttaccaggtatcctggaggaaatgccgacgacggaacgagaagccttccggatcatgctattgtctgctacgcttgcgacgcccgtgatgctgacggtgcgagggcccgtaggcttcctcctgacagtgcaagggatgacagtacctgcaggttctgaagaaatcgcgcaacaaacagagcaaaaaatttcagttgttttccttcttcctagtgacatcggctagggctgcaggaa

SEQ ID NO: 43803 - DNA, 1224 bp, Oryza sativa
cctgcagcccgcagacatgcattgacatgtggaggagattcaggttcatgaacaatctcttttattattgtattgtttctactattcttttgatgtctataaaattgtggcatgttgggtaggttaacttcaaaatttagataatatttagacatatgtttatgttggtattgaaaacatataatattacaatcctaacacgagtgtttaatcagcggcgaagccatagccccctgccccccgcattagcagtggcacatgtcaatctaaggatttaatggatattacaagtctcgtgtaacattattttacaataaaatatctttcttaaactgaaatcttcttgctgtagcagtgacggcgtcatcagtgtctcgccaaaactctgaccatgtcatacgatgaatctctagagaaatcttggcaccccaaccttcaaatcgtggctttacctctgtacagtggcggacccaggatcgaatcctgggtgtgcccacgtcaacctcaagtgcaaaaatcaatgtccagtgcttataaataccatgtgatctcaagagcaaaaagtcaaagttttagtgcacataaactccctattttccttcgcatatagttgattggttcaacttgatctctccctacaaataatagaaaacacaccttcaatttaaactctcactaattttagtttttaatttttcaatcaatctctgtcacctccagagagaagagagaagatatcagtatgataagagagattgagagaaaaaaaaaagtaagaatgtaaactaggacggctggacagggaagtcctagccacttcgctggtcgctatgagcctgcgacttctgccaacttcccatgtagccatggcccatgacagaggttcttgggctttgatttctgccagcttgtttgaggcaatgaagcaaccatccaatgtctaggtccattgtgcatactactcgctattttttccccaaaaaatgtgggtataccggtgtctccactcctgcccctgcctgtgtactatttcactgtcctatatgcatagaaatattcaatgcctggctctttaatattagctacttatgtttaaactttagttgttatacttggtatactttgtaagaaattccacaaattcttgacggacacataggtgtggcatataatattagcgaattgtctttgtctttaatagtctgtgtagctctcttttatatc

SEQ ID NO: 43804 - DNA, 1103 bp, Oryza sativa
ataaattattccaacaataatcaggagatatgttgtgtacatacactttctttatgacggggtctgttctctgcacgataatcgaagtaaccagttacagcatagaaaaaacatggatttatgtcctcctgcatggcgtggttctaagaaccttgaaccggtccctgaaaattgcaaaaaatgtggaactattccccatcaattaagctggtggaggaggacagagagggcgacgaggaggatcgatggcggcggcggcgcggggcggttaggggaatcgcgatgacggtgggtgagcgggcggatcgccgccgctaaactacccctcgcgtggcgaagcaaaaccccaaccccccccccccaacccccataagctaagtaccaaggcagcgttacgggcaagcaactccgggagaccaggatgggagatgaggagagagagctcaccggaacgcgtcgcgacagcttcccccgcggccttcgtcgccggtgatgatcgtcgtggaaaccctagctggagaggaagcacccgcggcagaggcggcgagaggcgcgcgcgtggcgtggcgtggagaagcgaagcacaccgcggttgcatgagctctgcccatggaggacgcgtcccgcgtccattctgtgtcattggcatgtgggcctgagtgcgttggatcatggcgtcatcacaaggatgccatcgttgttcaattctccgtttgcgttgtgcactcgacagcggcatatccggtttcacggcgtttggctgccccgtctggcctcgtatgaatttttttgaactgtggactgaccaaaatggccctaaagttatttgattttatcatgggccgatcttctttttttttcaccttcttctcgtagagtatgaattgagccggaatttattcggaatgagatagagacccacctagagtattatgtaataattgggtgggattcaaatggaacaatctaggatggtagcgacccacccaaaataagggcttgtttgcataatgtcggaccaccttctttgcaagaattttggattgtgatttgtgactgacgctcggggcgtcgggcccggttgttacatcagttgtaagcac

SEQ ID NO: 43805 - DNA, 1575 bp, Oryza sativa
ggggaggaggacgaccggagggtcttactagagccactgatgccttctggcagtcgatgagactagggcactgggcggtggtggaggtgatgtgaatcgcgctctcgcactactaagcggcggcaacatgagggagtcgagagaaaggggatgagaagaagttttttgggcttggttgcctgcacgaatcttaaagcaatcgggtggtctaaaatttacaagatttataggggctttcagtcaaatgatgtataggcagtcccattattttttgaggtatatcaattatttcatgttttgctgtgcattattttgtctctaactatttttactcttgcttgatgttgcattgtttgtatttatactcattttttgtttggtgtcgcataaaagaaatataaatgcattctacaacggtccaagaccttccacgcatagcatactccgtatttttcattgtgtgtatgtgatctcctacaatgaagtttgaacagttcatggacacttgacggcccgtttggttggagggagtttttaaaagggattgagagtttagagggatgaggctattaagtgttttgtttggttgggagacatgagaattttggtaggataaggatggggaattgagggaattggataggggcaggtaattgggagggaattcctcctttactttgtctaagcaaatctcagccatccgtttttattaatgacgtaatctccaactaaactccctatcaatttccatcacctctaccaaacaagatattgggattaaaaatcaaattcccatcttaatgtcatcatccctatcaattctcaactttttcttcaaacttttaactttttcttcaaactttcaactttttcatcacatcgagactttcctacacacataaactatcaacttttccgtcacatcgttccaattttaatcaaatttctaattttggcgtgaactagatgtgttttatctatataattaattacatatgataaatttcagacgaagtagcaccattggaataatctttgctattataaaaattaaaaattaaagatgttttcgtgtttcgtcatccgtatttgagtcggttttaatatattgatgtgtcaagatgtttccgcggtccgtcattcgtgtttgagtcggttttaatatatatatatatatatatatatatatatatatatatatatatatatatacctactggattttttttcgtcgccgttttcttcttgcgtttttattttcaaactgttttttaatggtccatccagttgtttttttgttgccgttttcttcctccccggttttttcattgcggtttttttctcgcaccagataagggcttccggtttttcagttttctttcgtcaccgtgtttttccttcactaggccgaaccctagctccgtcgctacgttgaatctgtctatccatgcgtttcctcctccaatggattacaaaaatcaattctccactcatcgctcatcatttttcctacgattttctccttcgattcggctaggacggatttaatcaccatttaaccttcaccgatgatgg

SEQ ID NO: 43806 - DNA, 1048 bp, Oryza sativa
cgcgcgcggccggtggcccgtgcgacgggggcgcggtggtcgcccgcctgcgcggcgggagggacggtggccggcgacgcccgcgcggcgggaggggcggtggccggcgacgcccgcgcggtgggatggcggtggccggcggcccttgcggcgggagggcggtggccggcgatgcctgctcagcgggagggcggctggacgacggcgcctcgcgcggcgagacggcggctggacaacgacctacgtggccggagggcagcgggacggcggcgtgcagaggccattcgcgtggaagaggatgagggagaagaaaaggggaactttagtttgggttggcaggggcattttggtattttctaaaaattctgacaacacaatacacggtttgagcaacgtatctaatggaaacttaacgggaggggcatggaagggatcaaagcgaaatttcaggggtacacagaggatcgtgtaaaattcgagggtatagaagggattaggtgagttttcatgtgtacacaagggatttactcttaaaagattacaaaattttcgtgaatttaaataaacgataagtccattttacaccctcgaacttttatgcttgtttaaaatacacccctgaactacaaaaccgggtataatacaccctcaaatctggggggttaagtgtccggtattgaaagttcgagggcatattatacccggttttgtagttcgggggtgtattttgcataagcataagagttcgagggtgtaaaatggatttatccctttaaacaatataaaaaaatcgggaatctgtagcggtaattttaggttgtttggtctcacgggtataggacttgtctggtttggagccaatttttaccctaccaaaatcttgatagtaccaaaatattggtaaattttgatactaccaaattaggtagtatttaatttgaactattattaataaaatttagtagcaaatcaaatatacacttactattattgaagttactaaaattttggtagggtaataaattggtaccaaaccaaacaaacctat

SEQ ID NO: 43807 - DNA, 823 bp, Oryza sativa
caaaagattcgtctcacggtttccaggcgagttatgaaattagttttttcattcgtgtccgaaaaccccttccaacatccgatcaaacgtccgatgtgacactaaaaaattttcatttcgcgaactaatcaggctcttagatcctaaaaaattttagccaaaaacgtcacatcaaatgtttggacacatgtataggacattaaatgtagaaaaaaatcaattgcacaatttgcatttaaattgtgagacaaatcttttgagcctaattacgccatgatttgacaatgtgatgctacaataaacatttgctaatgatagattaattaggcttaataaattcgtctcacagtttacatgcagaatctgtaatttgttttgttattagtctacgtttactacttcaaatatgtatccgtatacttcaaaaactttacaaccaaagaattaaacacaccctaacagcatttgtcttccgttcatgtaaattggcccattcctccagctgataggcaattctttttgcaacattagttggattctctggtgccactgcataacgactatcaatattacgaacagaccacagattataaagggtaacaaataagcctgcaattatatgattctcctgacccgataacctatcaagtagccaaaatgccaagagtttattattattacagtccacccccgggactggaaattcaagctgcaactcttcctctaccttgctccaaaccgatttagaatatgggcgctcccaaaatctgtgcaaagcattctcatttccatcacagaatatacaacgtactccctgcttact

SEQ ID NO: 43808 - DNA, 1426 bp, Oryza sativa
ttctttcatcataaaatataatcaacttttatttctttttacaaaatttatatttttagaattcacgtaagaagttcatatttgatgattcacctatactctaggaattaacaatctggctctgcccctggccctccgttttaggttattggattttttttaagtttgatcaaaatcaaactgttttaaatttgaccaagtttatagaaaaaatagtactccagattcgttgtactaggatatgtcccatccaatacaaggttgctaatatttttgaatcaagataaatttattataaaaatatttttaattattaatttaataaacttaatttggtaatataaatattactatatttgtatataaacttagtcaaacttgaaacaatttgactttgcccaaagtcaaaacgtcatataataaggattttgttatacaacggatggggtagtatttaggagtccatagtttttattcttaaggaccgaatgatattaatggttctttttcaaaaaaaaaaacacacgccttgcttgatttctacccaaactatatcaagagcatgaacagatgcatgcatgtctaggtatgcacgttaagtagtagtcctagcggtggagtgaattctgagagcacaatcgatcgatcagaattgatcagaagtatatataatgtgctaacttaattatagctgcaacggccatcgatgatcctgatggatctgatctgatgcaaattaggcataatatatgcaaattaaagcacgccaggcacgtatatagtacgtactacgggggcttgatggattaatcaggaaatccatcacaccacagtacgtacatacacacatatttttctcattcaatatcactcttctctctatctagatagtgagacacatgagagaatgagaggtctagagagagagagagatgatatcattgttttgagaagtgtatctttattcggcctctacatctaactggacaatatatgcaaccttttttttaattaggaacttagcctatcaaatagagaacttagcccttaaataacccaatctgaaattcgctgctatgaagggcttgtttggtacagctccaactcttaaatataactccaggagttgaatctggagtggagttgtggagctgcctaaacacaactccacaactctagtatattttgtgagagagcttcacccaactccactctcagttttggtggagctgaaactgtttggctgagctctggctccaggaggggtggagctggagctgtgtcaaataggcccaaagatttgaactcaggatcttaaggtgctagtcaggtcactgcaatcctctcacatgcatgtagtatagagacgatggagttgtggacttgtgaattggcggtttgctataaagtaaacccttgggctaca

SEQ ID NO: 43809 - DNA, 854 bp, Oryza sativa
tggtacatctcgagctggtaaaaagagaccaagaggttcaaagtccccaagtaagaagcagcaaccaaagcctaagaaccgtttcacagatgccactgagaaaattagcaacacaatggaccatttggtggatcagcttggtaatcctcctcctccacctccagtgccacagttttgtgacccttatgcttcattgtggaagaggattgatgcattgcccattagtactaatgataaggttgtcgttggaaattatttgggacgccaagagaatgagggggtgcggggatttcttgcttcttctgctgacacgactgtggagacttgggtgtaccagttcatgtgcgatcgagatggtgcgtaggaaaaatgaatctaactgtcaacatttggatatgttgttgaccttttgctcagttagaatagctgtactaatcagctatattaaaaccttgtgaaatatgtttatgtccaagcaaatagttacttttgggaaaacactatactagatgtgggagcactaattaggttatcttggatcatgtcaatatgtcaggttcaagctggtagcttcttttggtttctagaactgtcattatatagtgatgatgcaaaagtacgaactttctgcttcagtgtgctatgtaaatttctctagtgattgagtattgttgcccatctgtgatatatttcgaagctaaagttaattatgtggtttgtatatttatgtgaaagttgagtgttgccctccaatgatattttcatatacgcttctgcatgcacttctgtagtggctattgtctggtagtattttgatttatctcacttaaatgttgttgtctaatttgccaatt

SEQ ID NO: 43810 - DNA, 779 bp, Oryza sativa
tttatttcaatttattaattcgactccaatcacactctagagttctttctctcttttctttatcatcactcgacttatttatatttctctgtcttttgactcgaattacactcgaatttttttatttctatgtgcttcaccaaccgaaactttttttaaaagtgtggtttgagaaaagtatgaagtcttattatcttctttataatccattgtctcctccagccgggagattaccattcacccgacgcagcgacctcaacagttgcctatgtcctcaaattatctaacgtttgatcttgtatttctcttcttttatctcatgtgtgttttcctttcctctcaaattttgagacatttggaaacaataataaaaaaagaaaatatgaaaataaaaaaattcaccgtcgtcacaactcaagagcaatcactaacaaacttcggttgagtccatcataatcttgtttgttatgggtgaattgccgatagcttcaagcaccttcatattcatcagttttgccaatcaggccaatgtgtgtgcttcaaacatttgcaccgcaagatagaaagaccaacttgtattaggaccgtcctcttgtagcatgcaagtgtgccagcatgataggcatagaaaaaattaactttcacctctggatttggtgaactccactgtctcgattcgtagcaaaaacgactgtcggttatatagaagagtggctaaattgcaaaacaaaacgccatgtctagttgcttcctctcctgccaatgcctaccagcacata

SEQ ID NO: 43811 - DNA, 638 bp, Oryza sativa
tgtcattccttcgtgaaggtggctgcttgacatccccaggtcatcatttatattcaattgtttcaggaataacaaatagcttcagatgtagtatgattcttcctgcctgataggtggtatgccattgatgtactgcttgttcatatacactcaatttttttccatatacagtcaattgatgcaagcatgccctcaaatcgattgcaccatcctgattcttagagtttgcgtgccctaaaaaattgattgtatattctttagtcatacaggttgattcttccggtcatgggagttggttcccaagtaaattgctcattacatttttacatacaccatctttgcaggtgagatatgtggggtgcagcattgctggtgattcaagattagaaagactaaaatgaacaagaggccgcttaagaaataccatagaacaaccaaagacagaacaatagagtgaagacatgctgctttctgaaggaatttattctgggagctatgtgtgtggaagtagttagttttgcctgatgtatgtagtctttctttgtaatatgtactatgtatagcctgtacatggttaagagtttgcaaggattgtagtccagatgctataaatttgaaacccatttttttggttcaaa

SEQ ID NO: 43812 - DNA, 3797 bp, Oryza sativa
cacgctgaacactaggcgcgcgcatgcgagctagctgctctagctaagcttgtgtgtttcaccgtgttttttcgtgtgctatacagtaaattaaattaaaattcctcctctcgagttaagttaagtacagtagctagcaagcagtaattttatttatttccacgagtagtaattaaactagcaatatgtatgcttggacacgtatcgatcggctgcctacttgtattgtgaatttgtgatgtaagttatttgtgtttatgttactctatttattaccacttgtcatatatatgtggaatttgcatggataattaaatatacttgtttagcggattcatttttgtcgtgttcgtcataactagtcatttgagaccgtttaccttttgtcacgtgggctaagaggtacttgggctgttgcgcctgttgggcagttggtgtaggcccaggcctacggccgaccggcatatagggtttgtgttataaaaccggtcttgaaatcacatcggaaaccaaacgcgaaagaaacatcataggagatccaaacatgatgacgacaccgaggtacgatatttgataacggagttcagccgaggcctacatctctggggcactgattacgagcgctcctcccctatccagcatatacagcgtatcagagttacaacgactcacggccagtcaccgccggcagccgctccctctcgctatgctatgtcgccatgcggttacaacaggcacgcccctctatttatgagagattctatgacagagtccgactcttactctagtcctaatacctattacaactacaagtcctaaactgtaacggattacgtacacatattcgacacaaactctgacaaactccaccttgacgaatatgccacgccaacctgaattcattacttgtttgaacctttgtgtacccggacttgagttgatcctattttgccgctcacgtcgagcagccccgacaagtctccaccaggctcaccgtgaacaagagactccgctatccctataatttctttctcctgactccacctgcaatagtgctctaccttctctcatatcactacagtcgtcttgccaaacgaaattgaattccttcatagctgtcacatcctaaacttctcgaagaccatgttcaactccatctaccgtcttaaatttgacttgatctaatccatggtcagataacccacgtcatcaccaaatagataaatcaaactcaccagacacaaagagaaccctttcttccttgtcgtcttgtgaccgagctaaaaatccaacatccatgcttcttcgcatccgtagactgagtatccgataatttgagaaaatcaccattgccttgaatcatccgaagatattaccaccatagcgcttactcttctccttcagtaacgtagattctatatatcctcatcatgcaaaccccgcagattctgaatataccctgtgctgctaaacagaccgttgacaccctcaacgatttcccgcgctgttgcccgggaataatagaataccctgttcaaaaaaatactccacaagccttctgaacagtaacaagcagtgacagtgctttgccaaccagtgaacagtacctgggcgcatgaacagtacctcgaacagtaaccaacgtgaaaccgtgcacgatgctagcccaaaaacttgccggcccaagttcccccactttgttttctttttcttgcgggtcaaaaaagaaacgaggttagcagccatctcacgctacatttgactcctgttctcctcggtcaggtaccaaaacgtacatgttcgagtcgatctcctctgcgcctcgacccgcctgcaccaagaagccgtgtccgacctggaaagcacatccgccacatgatccttcaccgcctccaccccacacgggtacgtgctgcttcccttcgccggaaacagcccgcgacgacctccgccagcacctacacgatgacgacaccaaaccgtgttcctgccgcccagacttcatcgcaaataaatccgctccgacctccgattgaccacccgtcaatctagccacgagccgaagccaacaaatcacatgtcgtcttcctagccaccgaacgacccgagcgctacatctagccgtctccgtgtcgaacgcagctcatcgaaaggcctgggccaccccgctagagtgttcgattccaccaatcgagaacgccgatcgcctctagcttcaatcaaccctgagcgtcacgcctgactgtctccccattgaaagtagctcaccggaaagtccgagccacccgcccggagtgtccgacccaccgactggatcgccaatcgcttccgccaccatcaacccgagcaccacgtctggtcgtctccctgttgattgtagccatcgaacggttcagaccgccgcctgatttcaccaatcaaattccgttgatcgccgccacgctccaccttgcgtccatgtccgtccctggacaccctgtgtagtcgtcgcggcgtggagcacctcccttgtacctctaccatggatctcatgcaggctctaataccacttgttagaaaccggctccgatttcacgtcggaaaccaatctcctgtggcgtttcttccgcgtttggtctcctgtggcgtttcttccgcgtttggtttccgacgtgaattcggcgtttggtttccgacatgaattcggagccggtttctaacagtttgtttagttccacacgatcccctgtgaccaaatggcccagtatcatctgggcctgtcagcccaacacggcctatgaccgcttcagcatttcggcccgatatgcgctgccggattccgccggtttgattcattttgacaaaaacatatggaagtagagctcgccgggaaggatcaggtggagaaataaactgatcggatgcacatccattcttaatttcttagtattattcatagcagttatatctaaattcagcatccattccttgtaataaaaaatctaaacaaaattcaattacatctgcagcataatttctctgaccatgtcgccataagcagagcaagacaaccttgctactactactgctcactccactccaatccaggtattaatcgatcttgtattgatcatgcatatgagaattatccttggcctctctgtcctgtctgctcatcaccaagcaaccaatgcaacctcctgtctgaccctaagccatctaatctaattaactaattaacacaagatcatgagctcatcacacagatcagatcaccagagacaagctagcactcacatggagtactgcactgtactactgtcctgcccattcgtgtgctgaattgctgattataattagcagctctctcagtttctggagcagtaaccaccaaccaagctgcctctgctgtctgctgctcgtgtgcacggcactgtactacttgctcgtaccacacaaggacagctgcactacaacctctaatttgatccataatttagttaattaattaatcagtctcttggcagaattaagctgagctgagctgcatgcctccgagactcaaggttattcctcaacgatgtggttaatctaatctctattattcgagctgttggtttcactccagccatgagctctgcagactctgaactgccactctgtgatgcctgcttaacacagctggcctccctgctcacgtgcggataaactaagcgctaattctgcactaagtactccactgacactatcttaatcactttcgaatccattatgcttgcatcacttcacatgcaaattgtgtactccaatgttcagtt

SEQ ID NO: 43813 - DNA, 532 bp, Oryza sativa
ttgataattcaagaaacacgtaaaaattcaggagaaaacagtacaagggcataccatatgcattgttgtacgtgcgtgcaaaacttcataataaatattataaataaaattttgggatcggacacaggcaatcatttctcacaaattaaagtgggtctgaaaactcaactgcatgtactcctacttaattaaattcattggatccaaataaaggcgatacttaatgtattgatgtagtttaaaaggaaaaaacttgccagacaaaacatacgtaagatcaagtagcctgagaatatacctgcaaaaccataaatatttcaattactttaatcagttatagaatgatagtatgcaagacaaggagttattattagttaaaatggaccccatatggcatgcatggtccagcaaattaattaaaaatatcgatcgatccgcgttttttgctgcgtgcagaccacaaagatacgatagtcccctatttgccctaatgtactacacacgtcacagagattatatatatatatatatg

SEQ ID NO: 43814 - DNA, 792 bp, Oryza sativa
cgtacgtactccataattaattactgagatacgccgaggtttacccgacattgtacgtactgtatttatatatatgtacactgcttgtgtgtatagtgtacgtgcaagctatatatagtcagttgattaattaatcaacgactagatcgaatctcatgtagccagaatattactccctccgttttaaaatatttgataccgttaactttttagcatatgtttaactgttcgtcgtattaaaaaaatttgtgaaatatgtaaaactatatgtgtacataaaaatatatttaacaatgaatcaaatgatataaaaagaataaataattaattaaaatttttaaataagacaaatgatcaaatacgtatttaaaaagtcaacggtgtaaaacattttgaaacagagggggtatgttcgagcagagatgatcgatcatgcaagatatggtcattatcacatgcatgcatgcagctagcttatctcgagctactactcctgcttagctcaattaatttaaagagagcttattagatgccttaatgcatggcagtacgtacatatagctagagagatcagtatacaacgtgtagcgtgcaggtgtactttctgctcgtcatttataacatttgttttgtggctgccaacttgtagtgatattcaattaatttcgtttgctaactgtgatcgagctagcttagatatgcatgcatcagttattagcagttactgaggaacaggaggatttgttaattaattggagtactatacatgtacatagcgaagtacgtccctaa

SEQ ID NO: 43815 - DNA, 699 bp, Oryza sativa
ggatctaaatatttcatcttctctattatatattattaaaaaacaatagcgcttctgcctcaaatttatgtccatttctgcacgcagcagggttcggagtttaaaactccgacttcccatttgggtcactagtaaacattaggccatcaaagtggaggaggagaggaggaggaggtggagcgccgatgacctcttccggccaaccggtgaggccaggcaatagcttgatgggaggcggtggggcaggaagcggtggagcgcgtcgtggcatcgaatcgtcgggaaggagaagaaaggaaaagaaagagggggttaggattaggggagcgtgcataaatcttaaagcaatttaatgatctaacaattataagatttagatggtttttttaagacattcccttaaaaaaataaaaaccgaagatttagatggtttttttttaagacagtccctttaaaaaaaaggtgtgaccagctgagggaagagaaagtcattgtcgaccggaaaataaactgcttgtgttcttgtgtgttgtcgaccttggtacggctgcgttctggcaggcacatcatgaagctcagcggggtgggtcggagatcaaaatttccgaccctattagggtctctactggccgttggatcaagttatgtgactcagattgagtagatcagctgctcaaagcgtactcaacgaatcgcaat

SEQ ID NO: 43816 - DNA, 697 bp, Oryza sativa
attcacaaaatacaacagttcaggtacaggtacattattatccaacagtagaacatcagagtacatacaatcatccagtttgtttcagaaagttcaatgtggctaaaatgttattatgattactcttgaattaaattagtgattcctcgaacggtttatgtaagcttaaactgtgcaaacagaaactacttttaggccaattgtctgtctgaatcgaaataatcaaacatagtgaatacaaaaatcacaagaactgcgaatcgtcttgtaaacacggtcatgttgcttgagattgggagaaactgagatcgatcgaaaagtatcttacatatgaagttatgaacaaagaaggctgcgattatatactaggcaagaagaaacgctcttgataaagcgcactccaagttcttgctcgatttggggggtggcaaaatagctcagagggaagggagaggaggagagcttaccggccttgtaggagatcggggaggaggtcgtcggcggcctcgaggaggatgagctcatcgtgaggaccaaacgcctcgtggtagcacagcgacaacgaggcgccggcgccggcgaggccagcaccgcgtcgggccgccgccgccgccgccgccgtcccattccctctcggattgggccgccgcgtcctccatcgccgcatccatggatcggagattcggagctgtgggat

SEQ ID NO: 43817 - DNA, 736 bp, Oryza sativa
aaaagacccttgcttttatctccaagcattacttgactggtcaagcaagcataatttgatttccaaagttcatgatcataataactcggtaatctgaaaatacagcaacccacacagaagcacatactgaaacaaagaaaagctagggaataataatcgagcacaactgctgatctccctagggcctaaattcacaccaagcataccacattagcactaacaatgcctaaatcagctcaactgcaaagaacctgggctatatcgaagggaggcacccaaaaaaaaaacaccagcccacacgaatcagcctcctcaatctgttcttccaatacaaatccacacagaaacacaggtcgcatcacatccattcgacccacaaaaccggggaatccccacacggccgcgtgactcgaaaacagtcgagcaactactgcaaaccactacgcaatcgatcgcgaggaagacctcggaccgggctgaatcaagcataggagagtaaatcgaggagagagctttaccctagtgggagatccggcggaggaggaggagatcgagcgccttgcacgaacgggattgccgcggaagcgaggcgagcgaaggggattcccggatttccttccacttggtttggtatagcaaaatcgattagttaattcagccaaacaagcaaacaaatcgtcggggtgggaaggttgggctgaattgggccgaaaataagcgggccgtagttttgggc

SEQ ID NO: 43818 - DNA, 1155 bp, Oryza sativa
aagagttcattaactaatccatcacatgcatttcaaaatcatgcaaatctttcttccacaagcaacccaacctgacaggccaatacatacaggtcatcagaccaagagctttctcctgatttatctgccaaattaaacctgtcatattttaggcgtatctttatatgcgtatattcataaatatacaattgtgactaaaatgctagtatttgctattctttttcgtggcatctagcaataccttctccatgctgcctaattaacaagacatttcaaaaatattctccttaaatttcaatgttcaaggtcaacaaatggcgtcgagtatttgcaaacggagagaaaagggaattaatactttcttcatcgcactaacaatcttccaaaaaggacaaatgcatatttcttttagacaaaaaagacgacatatgtgcacatttggtgttatcttgtgagtttcggtgaaatttcaggtgaaagcaatcgctggaatgatgttgaacaaccatgtactcaaaagtactttcaaagcgatgactgatacaagaagaacttaagcaaattggggttcttggaacaacttgttgctcacgtcgacgaattgtcttttttgatctgtgatttgacaataattgaccatgcccaattatccaaaacttgccttttatctacaagatttgttgacttgacatagatgagaattattttagctggaccaaacaatattccaatggtaaaatgttaggcaattttcaccttttattccatgcatcaagaacaaggaatgtgcttaaaatcccccaaaattgaattgtttcatgtgaacaccctactttacaaacattttcacatggctatatttcagcgtatctgaaatgttagtacagtggcaaagttgacaataacatgtgttagtgtgattgctccataacctgtataaaggccaaaataattgtacttaaagaaagcttgtcttatcttccaattggtgattagtgctaatatcaaatagtgtgctccattatgctaatttaacaaacttgatagaatcggagagatccttgttggtgcaccggaactttccaggaagcagcagcaatcagatgagattaatattgttttaattttgtagagcacccatgattgtgatttggg

SEQ ID NO: 43819 - DNA, 1760 bp, Oryza sativa
cagcgagaggagagctcggagaggatggagatggagctccggcaatggctgcaggaggaggaggaggatgattgatcccccacgcagcggtggcattaattctgacgccattgatgcctagctcagctcccagcttgtcgacccagcttgtcgcagatcaaggtcttcttccttcacctcgatctccacctccaggcttggaatggtgaccaccaccgacagctcagcttcccggcgaggattcagcgccgccatcttagggcatgtttagttcgcgaacgaaaattgttgacgtgtcacattagatacatggacacacattcgaagtattgaacgtagactaataacaaaacaaaatatagattccgcttgaaaactacgagacgaatttattaagcctaactaatccgtcattagcaaatatttactgtagcaccacattatcaaatcatggagcaattaggcttaaatgattcatttcgcaatttacacgtaatctgtataattagttttttttcctatatttaataattcatgtatgtgtataaacattcgatgtgatatggtgaaaagtttttctttgggaaggccttagctggtagatgcatcttgcatgcattgaggcactggttgggattaaatacggatcggtaaaatagtaaagttattagtgtataattaattaaattttaattattataaattgaaaaaacgaatttatttgatattttagataaattgctatataaagtatttttgcatgaaacaccatttagctatttgaaaaatgggttaatggaaacaaagataaaatctgcatgttaataaaaaaagagttgtgcctgagagaagctatgatgtccacagtagctagaatgttttcgcacgaaacatcgtttagttgttccggagggctgaagttcttgaactgcaattcaaaaactttggagagctgatacattgaaggttctttttttctaattaagatgtggattgtaccttagttttcattagcactagcacgtttttttaaaatgctaaacaatgtgtatcataaaaaaaactttctatataaaagttgctttaaaatatcaaataaatataatttttaaatttgtaataattaaaactcaactataattgcgctaatgactttctcgttttgtgtgctaactttcgtttgatgatgtaaaatgaagttagtgcacacaaagcgaaaagtaagaaagtaaattttataactcatatccactattttgtcatataattctctcgcaaaaacttgcggggttcttatctagttaatacatgatgaggtgatcgagattagaaataagtatgggaagggtgcaggtctcagagggctgatgcgatgatggggcctatcagagttagtaatggaataaaactcatcttttttagctatatttatgacaaaatttacacctaaaatagctacattctatattctgtgaggaatttggtatgcaactttttaacttttgataccattaatattattgaaatttacatccaatagatttaaaatgtcaaaatggatttgatatataactcttagcttctttttccattgacacaattgtattttctatacaatagttttccaaagtgtttcacagatacaatgatgagaaaattccctatgtaacatcagaaaaaagttgctcttccctctatagcacccaaacttcaaaagttcccttccctatgtagcactttcattagtttttacacttgac

SEQ ID NO: 43820 - DNA, 853 bp, Oryza sativa
cttataaaccgttttgttaatatgctatatggagtagtatataccaacaaaagtagtactctaatattatatgaaaatacatggaagtagtattatttcatcggtttaattaggttttacatgctaagtatacttttgagtaatttttactggttaaaatttacaaactttgaccttttaactttgtataacatgccttaaaataaacatggagagtactaatatacagtactacatctgtatggaatgtgaacatgctttctatatattaatatataaactgaagatttttttatttaaaaaaacaaacaggtttcagcagctggctggtggcaggccggctgggtagctagattaactagctacagtagataaaagataatattatactccctccgtcctaaaataagtacagttttgcactattcacgtttaatgtttgactgttcgtcttatttgaaaattttttatgattagtatttttattgctattagatgataaaacatgaatagtactctatgtgtgactaaatatctttaaatttggtcaaacgttgtgcacggatattcacggctgcacttattttgggacggaggtagtatgtatgttgcagcttcagctagctactgtgtgaagcaaagagatactactcctatagctaggcttttgatttgcagtgctattaagtgtactttgtttgagatcaagcgtatggatggaatgttcttagcacgatatagcagctggatggtcctgcaccaacctactgtaaccaacaaaacacacacacacacaacacagtacacacactctctagtctgaatatttctcactactcctatgtacttgtca

SEQ ID NO: 43821 - DNA, 642 bp, Oryza sativa
tcctgctagttaacaccgtcaagtgtaaaaactaacggaagtgctatataaagaaggaaaattttagaagtgcctagatagggaactttttaagtttaggtgctatagagggaagagcaacttttttttgatgctagatagggaattttctctacaatgatcatacttcccatacgggcaattgcttatttgactctgttttgaagtctaataactaatttgaccctacttttttaggtttgctcatttaaccctgtttttcaaaattgaagataaaggttgaccctattctgtgaagtctagataacggtgttaactgagtgacgatttctcttttttgcccttgctcgtttgaccctaatgctacattttaacatattcgtaacaaatttgacatagatttgagaaaattttgacatatttgatttcaatttgataaatttagctttagtttgacaaatttgactttaatttttttaaaaaaaattaagagcatttctcctatcttatccatcccaaaatgtataaaataaagcaaaaacatggcaaagagcgctgcagtcgccgtcgccgcaatggctgccgctctgagcacgatagcaaccgacgccactcccttccaccttcccgagcacagcagct

SEQ ID NO: 43822 - DNA, 723 bp, Oryza sativa
attttaggtttgaatttgtaatttcaccactggtacaccccttatttctgcatgttacaaatatattgtgcctgctcagaactgcttgccacggccagggcttcgatctctactgtgacatctagtagagctctttaatttgtgtaggcagcaggtttgagtaggcccattgtgtctctgtattggcatgatctatagaatacaactctgtatagtcgctgatttattagtatacaaattttttgatttttaaaaatattattgttattttttgttggtactcaatcaaaaatatttaaacatatttgacacttaaaatttaaaagtttaactaggcatactatttatctggtattaattgttgagcaccgagatacatatattatatatatatatatatatatgaaaatggttctatacacctgggagtatgtacacctgttctcatccaccgttgatctatgattagcttcgatggaacctgatatcggattaacgagcggacccgtttaactttttgacgagaaaaaaattacgtactccttaattagccacggaaaccggaatgacctgagtacaattcctcgttcccaccagtgcatcggatccgaaaatcaggtcactaggagagaccgcgatataccagaactcggagaaggcggcgccgattcatcgtcgatccatggctgcgttgcaggtgacggcgtgatcccggcgcggcgg

SEQ ID NO: 43823 - DNA, 746 bp, Oryza sativa
ttgtgattggaggaaaaatagaggtaggtagaaaaactgaatggtggaggattgtgattggttgagaatagaatgttggtggagaagttgttatattttgagacaaattctaaaggctataagttattatattttgggacggagggagtagatattttctgctcctttgccctgatatgcatgcatggtcagttattcatttcttacgaaggccttcctctaacaagttatttggtttgttcattatcataataatggaatgacaaatctcacacctaatatatgctaaagcatagcatagcagtgcagagcatgaatatgcatgtgcaggtagacattggcaggagaagaagcaactagacatggtattatgttttgtaattcagccacttctatttataacccaccgtagttgtgctgtgaaattgtggagttcactaaatttgaaggcgaaagttagttcactctatgcctctgaagcacttgcacgctacatacggtctagttttgctatgagatagtggagttcacctaatcctcaagcgaaagttagttttggcgcaattgcacgctacaagcggctcgttctgatctgagctgttctttctctcattcgatgcaaatgttgatcacactcatctgtttgattagcgagaatgatgaggatgaatgtgcttggcgccatcgacaactcagtcatgagtcacaagcaacaagatcgtgatggactgaacgggctgcaggaa

SEQ ID NO: 43824 - DNA, 653 bp, Oryza sativa
caaccaaaacatctgatattgcttatgattgtattctcatttcgagtaaaagagttaaccaataggaggagtgcgttttctttttcaacacattgcactggtcgtaattgggctcaatctaaataataactgggctagtaaacgcaatatggaaagcccataacctgtgttgggccaggaggtcagatcagtagtaacaaatggactgggccgtattgagttagttgggcccacatcgaagataacttgtgggccatgtatcgcttaaaagacattctggggctctctggtctgggcaagtagtatgccgtacctaactaacctaacaactcaagaggcccacaaatggaccaacctttgtgcatcaatcaatcattcataagcacatattcaatccaagcaagtgatacatgtgtgcaaagaggcgtatatactcaagttctcagccaagtgcacacgtcatgatgcccaaaatccctattagtgtaggcaaggagctttcctgtctcaaaataaactaatctagaatagaatatgatataatctattttgagatagagggaggatatgttaagagcactcacaccatgtattttatagaggtagtataaagtttggatagctcctatggagatgagcccgttcctttttca

SEQ ID NO: 43825 - DNA, 728 bp, Oryza sativa
caccatgcatcctcaacgctaactcagtgtttgggtgttacttttataataattggttgtagctctgatgagcaaaggccgggatgttttattccattatctaaaaaaacgctaactccttactttttcttgattgaaaaatggttggtgggactagagggtccaaatgtcaaccgccgacaccaactcttactttaacttctgtgtgaagtaaaattgatagttgacactggtggagaaatcatctttgatcggtccagcaaaatccacaatagtcccggatccaaaaagaactgggactaaagattgtttttagtcccggttataaaaattttgatctttagtcccggttggtgttaccaaccgggactaaagatctttagtcccggttcatcccttgtcagatgtatgtcagggggccgaggatctttagtcctggttggtgttaataaccgggactaaagatcaccactttagtcccggttggtattatcaagatgatctttagtcccggttggtaatacgaaccgggactaaaattaaacacgtagtatataatccctatcccttatcctctcatccacagttacagatcgaatctcacccctctcctcagatctatcctttctaactctcttcctcatcccctcttctccaactcctccccttcctcctctcctcccccttctccccttcctcctccccttcccatccggcgggctggccga

SEQ ID NO: 43826 - DNA, 687 bp, Oryza sativa
ccacatcttgggattgttcagcaataatttcaattatgattgaggatttgttaatacttgggtattatctgaaaaatttagacatgattcttgagctgctaaccaccaacactgtttgctcataaaaccgctaaactttatttttagataatgatagaagaataaaactagtgacaagaaaattgctagtaataaaaatgatagtctggttctggaaaatttgaagatccaagattaattagcatctgattggctgctcatgtgcatcctttatgaacagatgtgactactgacgatcacaattaaaaagcatcgagtagacatgtgcagtgaggatgctggctgctgctagtagtgctagtacctaacatgatgagcagctagctagcaagcagcccatgcgttatttctgaacacaaaaccctcggaaccagaagaatgcatggtatggtgaagcaaattgaagcagcaaagaaacaaagaacacaatcttctcctcacccctaacccctacacacatacaattctccttaattaattcgatcgacatcgatcttgatgattccctgcaaaaccaagagataactttcatcattacatatacattcaggtgaagaaattctgacgatgatgtggtgaggtgaggtaattaagggtgagctagcatcgtcagcggacagggtaggg

SEQ ID NO: 43827 - DNA, 688 bp, Oryza sativa
cagccccactgagtttgtcagcaacgcagaaatcttggagctggctcgggtcagaggccagagcacgaggcaagactgaagaacacactacaagtgctactgctgcaaacactgcagcaaatgcacgagaagccatggcttagttagcttcttcttccctagctagatgagtgtacgttaactctgatgcttttgtgagctagctagctaagtgttttgagctgcttgtaaactacgcaagagtaccaatttatacaggcgtaaaaggcaacccctgaaccctgaagaagtggactacttgcataatatactgctgtagtacatgattatattcactgcattccactactactccaaattaatctgttcattgtgtgtagtttgagtaggaatccacaattaaaccacaatacgagctagctgtgtctgtgttaattattactcttacgtaagacacaacctatttttgcttgattgtcttgttacagtcccactaactgtttgtttatgcagtgtaatcacgtgcataaatatgcataatatatgtatccttggtctgtggaatacctgcacgatatgggtggaaaatttggggaagataacgaaaattttcatacgcagtttcgcccccaacatgcgtcgtgcgtccactagcaagttaaaagatttctgtaaactccactacctg

SEQ ID NO: 43828 - DNA, 1262 bp, Oryza sativa
ccagctcttccaatccaatctaacctcgggcacacgaaccacatgcatacgagatcaggagatcgccagcccccaccaaaattacacctcatcatcagcacactcccgagactaaacccccgagctccgtaacatccacaccgaacgaacaaactcccccaaaatcaactactcccgctacacccgagaacccaaatcaaaccccacacacaaacacatgaagccatcgatcgccagaatccgagaaaaaaaaaagtcaaaatcgaaccaaaaaaatctggcgagaaggggatgaagacgaggaggaggagggggagaggagacgtaccgcggctgccgctgcggcgagggtaggtggcgcggtggtggtgggagaggagacgagaagagagggaaggagactggaggggaggagggttgaaaagggagtcgagacgcgaggctgcgagggggggaagagaagatgctgccgccgctgctgatgctgttgctgctgcagcctccctatctatctctctctcgcttcatttcggctgtttttgtatataataaaaatatttattatttatttatttgggtcagcatactggtgctttttaaatttgtatttgagcggtttttttggattatcttgtggcgaggagaaaaaacatgcggactgtgcagggtgaatgattaggcaaggtcaaaagtcaaaaccatgtttggatttgtaggagtatgttctactactactatctccgtcccaaaataagcacagtcataagtttccgcgcacaattttagtcgttcgtcttatttttttttataattagcatttttattgctataagatgataaaacataaatagtactttactcgtgacttatgtttttaattttttaaaaaaaaattcaaataagacgaacggttaaagtttgacgcggaaaatcatggttgcacttattttgagacggagagagtaccacgggagtatgaatgcagtacgggttgaaatgttgaataggttgacgggtttgctcgtcacgttttaaccatctttgaaatgaatttgcatgattttctttcaaggtagttcaattcatatgaaaattctctagaattcttaaatcgagataatacagtatgagagtttttttttctacactacatgaaagacacatatgcatacacacctaaaaaaagagcatatagatcaatgaatatgttagctgtgtactcacttaaagaaatgaacaccaacgatagctccgtaatctta

SEQ ID NO: 43829 - DNA, 660 bp, Oryza sativa
catgtcccctaataaagtcatgaaaaataatattttttacaaaatatatcaatatgtgataatcacttcacaaacatatgcaagttaaaatttaatatacacaagtagaaacaaatgtgtatgaaccgaaaacaacaaatatatatgactatcaaaggtgtgcgtacaattcatggttgatactccctccttccctaaatgtttgacgccgttgacttttttaaacatatttaaccgttcgtcttattaaaaacttttgtgaaatgtgtaaaactatatgtgtacataaaagtatatttaacaataaatcaaatgataggaaaaaaaattaataattacttaaattttttgaataagacgaacggtcaaatattttttaaaaaaagtcaacggcgacaaacattttgggatggagagagtatttgttatttttgtttcttcttctataagtcgaattttaacttatagttttatagagtaacatatcacatattaatctgttttattatgttttgaaaaattaatatttttagacggcattcatgaaacgagtgtatgtccacgcgagtgggaagaaaaccactttccatctacagggctctttcaattacgtatgcaccatctgtatgtatacactaatatagaaagaacctggtgcag

SEQ ID NO: 43830 - DNA, 661 bp, Oryza sativa
aggaaaagtctagtttccctccctcttttcttttcttggcttttcttattcaaaaaggatttaattaaatcttttttcctttagacccaaaaatccaataatcttagaaattcaatatcttcccaaccgtaaatccgtttgactccgttcaacttccaaaattcctcaaatctcgagatctatctaatggcacgcttagaggtcattaatagggctttattttcgccgtttgttgagttttcccgtttcgcgtgtagtttcggagcccgaagacccgcagtgcgaggatttcgaggatcaagctccagatctcgagcaaggcaagccacctttgaacatcttgagcctatatttgaaattaattatgttgcttgaaaaatattatgcattgataggatcgcacttaatctgttgtcccgcctgcaaggcagattggcggacctacctaattggttgcatttgatccttcctttgataattgttatatcgtgtcccctggtaaccatctagttgcgtctcgatattcgtgcaccctgtgcgagtatcgacggacgccttcaaacttaaaatctaataaaaaacttcttggataaaacttgggttttacgaaagacttggaaaacccgacacctgggtcggtgcttgcgaactaaatgaattt

SEQ ID NO: 43831 - DNA, 1694 bp, Oryza sativa
gtttgattttttttaatcaaactttgataagtctaattaagtttataaaaaaatttagcaacatctaaaatattaaattagttttattttaataatatgtttattttgtgtaactgtatggattgcgagaacaaaatatcagttatagaatgatgtggcagaatgtatatcaccattgctaacattttaagtatagacaaccaccgatctgatccgacgtggcaggtgacgtgtgcttgagtacgggcaagtacattttcatctcgaggcttctccggatcaccgtcgttaacgtaacacgtggagatgtaacaacagtaaaaaggccaattattattcagtttaccctactgcctttctttttctcttctgattggcagattggcatacaggattcaggatttacctgtctgaagaattggactgttgttgtggcagctctcccatgcagggatgtctctgcttggccatattctgcttctgttcaccgaacaatgcagattttttgttggcttcagtcagcttcattttccacttcgtccccaacacattctccagtgtgggggcaaagctagcaactttacaagttagcactaatagcactttaccaagttgttatatctttgatgaacgattgttatattattaatacacagtgcactcaagcatgcaagatgctaggcagcagcaatgcagtagtaatatctgaaattaaagaagatgccatctgcccagcagatagatcagcagaaggaattgagcatgatgaagcatcagatgtaggcgtgtacaagtgtaacgctgctgctttcaggaccatcctgaaagaaacaccctttcttaggctttaatttgtcctgcactaactgaacattttgcaaatggaggctttcttactctcttctttcttctaggcatctacccacatccatgcagtagcactagtacagtacttgttaccatcatatcatatcatatcaagaatggcactgcatatatacacaactgattgagtgtgtactagtaacagaaatgttccaacccatgattggggtgatgagcacaaagatgagagcaatgagcaattgagcattgcttgctctcctgccggtttgtatcagaagctgacacttggacgacatcaccaatggccgatgcttctctcgcagcacgtacactccaaggtactagtagtagcagagtaggagagaactttacagaagtgtatacacgaagcatatcatatattcatatcattcctagaaaacaaaaagcgaaagaaattaaaaaactaagagtagtagtagttggtaggattgtaatttgtcaggtgaggggtgaagttggcgagatagctctacagaagcagaaggctttgcttggaggcgaaggccggcaacgcggagatgaactgaagaagaaggagaagaaggagaagatcgagccgtaccaagcaagcagcttttgcaacaaaccaaaccaccaaccgatcgatcgaacaaaccaccattccccacacagccacgctcaccaacccaaaccgacgcgtagtcgacgagttcgatcgattgcccgaccgtatccgtacaattgctgacgcaaccaaaccatcacaaggttaaatacagtaaaagaaaaaataaagaaattctcttcttcttgtagtagaagaagatgatgccattggagttctt

SEQ ID NO: 43832 - DNA, 767 bp, Oryza sativa
gtgtgattcaatcggagcctagcatgtcgctgagatatagggagaaacatccagacctttatcttgggaaatcagaaaagggggtacattgtgcacgcgttagtttcgaccatcttatggtgttgttccttagtgaatcgcatggtcagatgaagtgggtgttgaagcatcgtagctgaattgcatccttgctacctcgtcgcaccacctacgaagaacagagtggcgaatcatggatcttacatggtgctaactatcaaggagattttcacgctgatgctgacgatgtatcatggatgtttaattgggaatggcagagggactcttatgatgacgatgatgatcatcatgagagcaaccgccatgccaaacatgttactttcttaggattccatccttttgatgaagaggttgtgttcctcggtgaaactttcagaaggggatttgcctataatctgaacaactcagagatccaagacctgggtaacttgtgcccaaaattctatgatctcacttatcaccaggcgttgatacaaacgtcttttgtgtacacgccttgctggattggattagagagagctctctctctctctctctctctctctctctctttctctctccctgtaaatagctagtactccctccgtttcaaaatatttgacaccgttgactttttagcacgtgtttgaccattcgtcttattcaaaaaatttaagtaattatttattcttttcatatcatttgattcattgttaagggctgcagga

SEQ ID NO: 43833 - DNA, 694 bp, Oryza sativa
tttcttttacgcaaatgaggtcaatcatatcttttaattatttcaaactaaagagtaaataagctttccctggatataaaacaaaatttgagaaaaaaatgcaaatgaggaaatggaaacaactaatactgttaggttccggaaatctacctcttgacattttttttatttggatgaaacatgtgaagtgaatggccaataacaccataacaaaagttctgcaaggggattgaagcaggctaaattaaccaaccatgaagcaaattaagatactttttccacatactagattcggtgctgagaaataagtgaccgtaatcaactaaaaatatggcacatgttttcagcaaaactggttagaaaaagactaactatatttatggtgcatattttccaagaaaaagtttaaataaatacgtttacactataattacgttataaatttcaacttttacactaaatatatgtcatataaaagaatttgattatctacttgaaataggagagaaacttactacatacatataagaaaacagagaggtatcaattaattacatgagagaagcaatcggaaaatcaagagaaaaatatggaaccatatatatatagcttttaacaaaagggggaaaaagtggaattttggacacttctttaatgacgttactcattccctccgtgacaaaaacatgccgtt

SEQ ID NO: 43834 - DNA, 730 bp, Oryza sativa
ggtagccaaataaaccaaacattcccttagttttgcttgtggtaagaagccaaaagaaatagaactggaagattaaaaaataataagtttacgaaattgtgaacctaaacataggggtgaaaacggtaacggtaattaccggccgaccggcgttcgttttcgactttctaccggccgagccatatggaaatggtaatcgaccgaaacaaaaatggaaatggtaaaaaatatggaaatgaaaacggaaatggttttgctgttataccgatcgtttccgtatttaccgtattctcgcggaaatcaccgtttcttataatatggtaattaccgtattctaaatatgtcgatattataggacatgtctatacttgacccacagcttatagattgaatgactcttcaataaaatctctaacttttgtatatggctaaaatgaagttaatttataatttatatagtataagcttgaatttatgtatatatataacatacttatgtaaagttaaatatatgtttttatagtttaatgtttccgtatttgttaccggttttcgatctgtaccgacatgtttccgtccgtattgttccgttttcggttttccgatatttccgatatcgttttcgtttccgactttaccgtttccgatttcgtttccgagaaaaatatggttacggaaatggttgaggctgttttccgatcatttccgaccgttttcatgggctgcagga

SEQ ID NO: 43835 - DNA, 502 bp, Oryza sativa
caaacaactcgcaacttattctatatcagcttattataatccagcttagagtaatctgatttaataatctggattacaataatcttaagctgaaacaaacaagaccttaataacgttcatgaactgcacactgtacactagtgtctacctggcttgtatttataagctgatacgtaatgctatctggtattggtgctcactgatcagatatggaggagttcgacggcgccatagctcgccggcgagccatggcgcgccgcggcagcggcggcggcaacggtgacggcgacggcatcacggtgcacgtggagcagatggcgcgcgggctgatgcagaggcaggaggcggcggcgtcggacgagcagcaccggatcatggcgagcagccaccgggtgtcccgcgtcccggcgcacctccgcgacgccaacgccgacgcctacacgccgcggttcgtcgccgtcggcccgctccaccgcggcgacgcgcggcggctcggcgccgg

SEQ ID NO: 43836 - DNA, 556 bp, Oryza sativa
ggtggtggagctccgggagaggagccggcacccgctgttcatgatgtgggcggacgtgaagcgcaactacttcacggtgccatgggcggtggtcgccgagttcgtcgccttcgtcaccttcgtctccaccattgtccagatgtactcctccttcaagcagaaaggaggatgatctcgtccagaccgaccgccatggaattaatccatcgatactcccaccgtcccataaaaaaccgaatctaggaccagatatgatatattctagtacgataaatctagatatatgtatgtactgatttgtagtactaggatgtatcacatctagttttttatgggacggatagagtacgcagcgagctactccgatctttttagcttatttctttcttgcctttttttttcccaatttaatgacagaatttgttatatgttcttgacttaatatccccttggatttaattcattgttttatgaatctgtacatgttgagttttgctccattttgtccaaactggtttcatgcaacacgtacgtacgcaatgctcttcttcaatcc

SEQ ID NO: 43837 - DNA, 1179 bp, Oryza sativa
agcttaattatgtgctagcatctgatgggtaactggtcagtaatgtagttcaattcctgaataaatgttcaggctcaggagttgcatgcaaattaggtcttcttaatgcgagaaatcagctaaatctattacctaaatgcggagataaaataaatcttgcacctaatgttctggtgaagcttagattaagataagaaataaagaacttgaaacaaaagaaaattgagataagagccaggggcgccttggtattgtgattttgttggctttatggccgcacaaataaaactgaaattgggtgcctaatggctacaaaattcctcctccattttgctttacgaccatttgtcttgttaaaaagatggctagctttgctagcttaattaaaacatgatgcccatttggtgtcatgtcaataacccctctttttctcctcccctctctcttttgctgcacaaagcatctttacccaacaatttgcaatcccaaatgattctctgccattttaaatccctcacttgttagtgctctcacaaggttttcatctctatcacccttggcaaatttcccttttggcccacaggaaatggcataagtactcactgaaaaaactacagcttgaacttgagaggaatacattgacaaggcattctgtggaagagagtaccttgtccatgaaaatgatgtttcctcgtcgaaaatacatcctgacatgaacataaagtaggtttttatatcttacaatatgtatcaatataaagtggtagcagttctagaaaggtgcccttgttagttagctgagggttggagatggggatgaatctggagtgagtgagtttgtttgttcttgttttttcttttttaaaaaatgatgagcttaaaaagaagcacattgtttctatgatgagtcacaactcacaagtacagtttgctcgacatagtagattaaaaggtctttgatatgtgtcaacatataattctgttgtttggggatagcaacaaattctctcctgaaaaagaaattctgaattcagaactttgtgggggctcatacatctatataactgaaagtgcaaaccttcagatatacaggagtagtatacttttctgtcaatattttttttccttcaaaacaatttacaattgacaagatgaaagttactgcttactatagaaatc

SEQ ID NO: 43838 - DNA, 676 bp, Oryza sativa
cttttgtaataagtaaataaatattagtttttatgtcattatgtaaaaataaactttgacatgaataataccttgttcaataaaatcatgaatataatagttttatataacaaaattatacacttccaacaatatagctagtccaacaatatagctagtctacaatttccagatttccttcatgcataagggcaaaatggtcattttcataggaatttaaacattcaactaacggtcaactaacggaatatgtatgaaaatgatgaaaaccaaaattcaggggcataccaggaagtggacaatactcgggagcctaaaaggattggctaaactttcatagatatataaggaattttctcttagatcagcagatatcgtcaccaaagtgttgacagatcgtgtcagcaacgactatgtttgtcttttgctccactatatcaatcttcttaattttatttattgactgctgagtgcaagtcttaagtcttgctaactcacacgccgttcgtgtcaatttttgggttccatttggggcattaattgtatttttttaggctcattgtaggttttcctttatcacgcctttggcaaccacatcggctaaactaaagagatgattaagacaaaaccaaagagataaccaagacaggtcagatgcggagttactagtctccca

SEQ ID NO: 43839 - DNA, 529 bp, Oryza sativa
ggtagatgggccgagagtgattcggcccatcgaacccgggggaggcaaaatagacttttgcggaggaatttgatttggaaggatttggattcgggattgaactcgacgggagataattttcccgctaggcgccacgacggaacgggcgctacagaaaacaagcaagaaattgttatgcatgccttacattttaaaacaagatgaaaaaaaccatatgctttattaaaacacggattaaagaataaaaccataatgatatagccgcacttggaacattgcaaaccaaacgctatgttggctgtcaagatgctccatgtcctggagttgtgtagaactagtataaaatatatagaccagaacatgagactttgccatctctcagtcttttactacttcctccgttacataatataagattttctagcattatccacattcatttagatattaataaatctagacatatgtatgtgtttaaattcataatatctatgtgtatgtgggcaatgctagaaagtcttacattgtg

SEQ ID NO: 43840 - DNA, 2226 bp, Oryza sativa
ttactctcttaccatatcaatttttttcttacatgacaacatatttaatttaatgctatgaaaactagttgaggtggatggttggtactgctctaaaagctagttctgatatgctatcaaacaccctaattcaaacccagggtttgatttttttttgatagagtagtatatctttagaatactccattattagatataattaatattggatctcaatccagaggatctcttccatccttttgactatattccttctccaaaaccctgtgtattatattttggtgctaccaccttgccaccacactatatttgtttccacaacgctacctacttgcaagacatcatcaccgtcttctctcccatgcgatcggagatgagggtaagaaacctccaactttgcatagggttgacaatgagggagaaaaacaagttattataatataatataatatatagtggcaattctaacttaatgcaggattgacaatgagaaaaagaatgagtttgttagaaggtaacatggggtacggtggtagcaggctcatatatatctaggaggcgaaacataaacaatgggcaagaactgaagaagcaatggttggccgccgatatgaaaggttgaagaaatcagccatattaactgacataatcgttggacatgataatactaatgactagagattacctattggctggcgcacaaatcggatctcagctaatgatgcgtattctcaactcgagatgttgacattttgctcatttgtgatctgcggctgttgatttcctgatgagcccttatcatattgaaatttataattaggtatgtacttgattaacatattcatcatttggacatttggtcttggtctatttaaaagtgtgttagaggatatattaattcatgggtatgtgtacttgtagatcgagtaatgtgtgtatgtgtttcactgtaatcaaaataagacaaaacgaaaaggtgtcatcgaaaatttacacgcattcccatatctataaagttataacccactaattttaaaactcaacatatatacaaacatgctacctcatcatccactagcaataattacatacaaaaattatgcaagcatgcaacatcatctataattcattgaattctacaaatcaacatccaatcatcttcctttacattatttttcattatatatatatatatatccatcatttttatagtaattaacatatattcatccatataaccaaagtgagggatatcatatttcatctataatctcatacagagtttactaaatttatttctctcttaacatagtttgataaaccagatttatttgttgttaataactaatataatttatacttttagcttgattattaaaaaatattaaaagttactcagtaatttccacagcaaagcgtggggaatcacatagtattataagcatactggtgtttggttttaaacggttgaggaaacccggattaaacaaccttaattatatggaagctattgtcaaactggataattttcgcggggccatcgtcaaactagattgtgtttttaggccaacggcctagcgtcgtgattttatatatagaatgcaaataaatttaaacattagactcaaaacattttttttgactgaaagtatcctagcagtgtgattttcatttattgaaggaatatttacatggaataattacagggaaaaacaagagaaaatgaaaaagctctataaagattgtaaccaattaataacagcttgcttgaggggatccttcattctgcagagatgcagaagaatttcatttataaagagagactttcaagattggaaggttggctacaaattcctgaagatgaggccatttctttatttccagatgtgccaagcaaccacgaagaagatttctagaaaaccgggctgattgaactgccatcttgtgagagctatcctttggtaaaattcaagattggcattctatttaattcccagaaactgccaacaagcattagactcaaaacattactatctaagaagaaaagcttagctttagactcaaattgcattgttgacatggggatttcaaacttcgttgcaatatttgactctttcggtccctgtgcagtggagcataatgccggtcaaataataattccacgtatacgacggaaatttttttaaaaaaatatcaaatactccctctgttttgaaatgtttgaca

SEQ ID NO: 43841 - DNA, 2406 bp, Oryza sativa
ccaatatgctgccagatatcgacatcaaagataagcctagacaaacccaatatggtgtctacggaggccaacaagagggatctagcactatctctgatctcgccgagtttatattcgaggaggaagactatcctgtcattgattacgagttggttatccatgctaccaagtcgacggcggttagataggttatcccaaacattgtacttgtgtgatttagatgaataagagcaataccggctttggccaacaggagtagggctattacctataagataaggggcccgaacctgtataaaaatccttgtctccatctcttttacctcaatctcgcatataccctggtactaacgatccccatactatccaaacaccaaatgtcgacagttttttcatgagaaatgatttttttcagctttgttttgctctctttattaactctcttatcgcatcagtttttttcttacatgacaacatatttaatgctatagaaactagctgaggtggatggttggtactgctttaaaagctagatctgaaatgctatcaaccaccctaatttgactatatctttaggatactccaatatcagatataattaataattgaattttagtgttggatctcaatccagaggatctctttcatcttttaactatcttccttctcccaaaccctgtgttttatattggtgctaccaccttaccaccatgctatatttgttcctacaactttgcctacttgcaagacatcatcaccgtcttctctcccatgcaattgaagatagatgagggtaagaaacctgtcgtttcgaggcttgatgctactcttaggaacattattgatacatcgactttcaagcatcttgtagttgagcgatactgccatcaacagtaccattgtaccaagatgaaaaagactgctgaacatggatagaacgagagtcgaactcgaatgccactcttttcatgctagttaggaaaggaagccgatataaacagctccatgttagggaattgcctctgactttgcatagggttgacactaagagaaaataaaagttattagaagataatatatggtggcgattctaacttagcatagggttgacaatgagttgttagaaggtaacatggggcgatcgataacacgatatttccaccagagacaaaagaagagagatgatagcaggaggctcatatgaggccggaacataaacaatgagcaagaactcaataagcaatagttggccttgccgatatgaaaggttgaagaaatcagccatgttgttggatacacatcaaactgacataatcgttggacataataatactaatgagtagagattacctattggctggcgcacaaatcggatctcagttaaaaaaatgatgcgtattctcacttggctgagatgtgatgatatttatagtagctctcaactctatgttgacattttgcttatttgtgatctgcggctgttgatttcctgatgagcccttataatattgaaatttataattagatatgtacttgattttttttgagagggtatgtacttgattaacatatatattatatttatcatttggacatttggtcttggtctatttaaaagtgtgttagagggatacacattcatgggtgtgtgtatgtgttccataatagacggatctaccataggggctaaggggtcttaagcctccactactgtcattaggaacatgagagccccctctaaaattatttgctatacatctataggaaatggatatttaagttttatctagtttattcagccccacctgttatttcttatttctgtatccgcaactgttccgctgtaatcaaaataagacaaaacgaaaaggtgccactgaaattttacgcacacgcactcgcgggtgtattaagctagcatatgctggtgtttggttttaaacgacggttgaggaaacccggattaaacaaccctaattatatggaggctattgtcaaactggataattttcgcctggccatcgtcaaactagattatgtttttaggccaacggcctgacgtcatgattttatagaatgcaactaaattcaaacattagacttaaaacattactatccaagaagaaaagcattagactcaaactgcattgttgacatgaggatttcaaactttgttgcaatatttgactctttcggtccctgtgcagtggagcatagtgccggtcaaataataactctatgtatgtatatatggagacgcacttgagtgcagtggtaatagacgtgtagtttcaaccctgagatcccgtattcaatcttcaatatactcacaatttagagggacgtctttccctctaaatctcgtttttaataattctatgtatatgatagaaaaataatttaact

SEQ ID NO: 43842 - DNA, 1674 bp, Oryza sativa
ttcatatttagtgagtattatagtagttagtatttattattatgttaatacataataaaatgttaaatttaaaattattaatatgatattaagtcattaagaagatatagcttgttggcgagcctaacgagcttaacgagccagctcgcgagccaagccgagctagccttttagctcgttaacattaaagagccgagccttaacgagccgagctggctcgttatccagacctaggttgaactgataaacaattttatgataggaggaaacctcgttccgtgcatggttctctcacccgaggtgtatacctcccattatcattatttgagtgaaaaatattaaaccgattaaactgattattagaaaataagtttataattggcaatgagctagctaaacttttctggtccacaagatatagatagtgatatataccttctggctaatcaggtatagaatgcaactaaatttacaaaaacaagctttcaatactattctaatttgtaagtttagttttgatatctattttctatagctatgtatatcttaattatgacgaagtgtatacctctcccagataagagagaacgacttgtagttgtttggcacaaatccaccttagcaacatcttcatttgctaattaaaaagagtataacctatgatgacaatcgacgtaagtttaggggaatcataaaaagtaaaaaatgaagtacaagttcatacagtaaactagctaggtttttcaatgacgtaaaacacatttttctccctatatgttccatataatctatcatggttagcatagtcaacacacgcacttgattaacttaggccctgtttagttcccaaaataaaaacttttcacccatcacatcgaatgtttggacatatgcatggagtattaaatgtggtctataaaataaaacccattacacagtttgcgtgtaaaattgcaagacgaatcttttaaacctaattgcgccatgatttgacaatatggtgctacagtaaacatttgctaatacgaattaattaggtttaataaattcgtctcgcagtttacaggcagaatctgtaatttgttttgttattagacaatgtttaatacttcaaatatatgtccgtatatccaatgtgacaccccaaaacaaatattttttccatcaaaaccgagccttacagtaaaagtaagccggccgccaaatgaatctagctaggcctcaacagctaaattttccaacacaatatatatcttgtgtggagctagattttaaaaacaaaattaaatttcaaatacaactataattcgctttctaaaatacaattttatgattgtgccgaattcggaaccaccatgattaatgggatgtttggttggtagccattgaataccacagctacagtattttcgctacaacaccgtgttttctgaggcggggaaaaggtctgccacaggtctgtggcgaaccacgccgtggcgtggcaatgtttgtctgggatccaaacaaaccctaaataatgcacatgtttatctggttctctgacaaacgtggtcttctaaaccttccggactaaatgtggttgctcattatataaaaggcatattttgagtgggcacaaaggattaagaagagtatataaaccaagggaaagtttgagttaaaattaatata

SEQ ID NO: 43843 - DNA, 1065 bp, Oryza sativa
tggaccagctattatattgtaggatcagtacaagagtctcgttgcatagaatcaccgtggactaatctgcagttatactgtcatacaaggaattatgtcccatcttacaaccgcatttcacgaatgtccaaaaaacaactctatttttaatagtagttcaggttcgaacaagtgcacagtatagaagttcaagttgtttttagtctttgaaagttcagggttgtcaaatagactattcctaaaaaggagcatattcctgactggcttatcaacacttaacatatgtacttcatacctttgtcctattaatagtgcaggtgtaacttttcatctgttttcaactagtgattactcctaactttcaaaaaagttccatgtttcacattataagacattttgggttttgaatagattcatgcatggatctatgtatgtgcttcatatatgtgtccaaatttatatggatgttagtgaatctagggatggggaggccaaaacatcttataatgtggaacagagggagtagtactttatttgccataagaaattgtgaactaactctgatatgataagattgttgaaattgatattaaccatgatgagcagtagcttcctggtagtcttgttcataatatgaaaaatgagaagatttgagagttgagcctatagatttgtttgctgccaatctggtcttagctgagagtgaagcaaatctaccttgatatttatttgacagcaatcttataattctcttgcgcagatcagagcagcctctgaggatgcattagaggtggagagaactacaaggaaatggttgacaataatgaacaaagattgcaatcgcttttgtaaaatactggttggtatctgcttttaagtttgtatgctaactttggagtattgagtgttttcctgaactcgactgacattttcaatttaaatgttcaatgccagagattagcagggaagaaggctgtttctcattctgaagttccaagaaaacgaaagaagataacatttgccgatgaaactggaggaaagctctgtcatgttaagatgtttact

SEQ ID NO: 43844 - DNA, 1139 bp, Oryza sativa
ctgagtagacattttaagcatatttatatggtgatataatccatgttattaatttttttcatgatttttcataattctctaatgtcatgtaaagcaccaagataggccatattacttgtttgcattataaatctaatttagccgtgaatatttgtgaactgataatgagtatatagtaatatactccatattttactctctccatcccagaatataagaagttttagagttggacacggttattaagaaagtaggtggaattaaatagagagatgttattggctgagaagtggaggtaggtgagaaaagtgaacggtggagggttgagattggtttagaagtgaatgttgggccgagtttagttctaaaatttttcttcaaactttcaacttttccaacacatcaaaactttcctacacacacaaacttccaacttttccgttacatcgttccaatttcaaccaaacttccaattttggagtgaactaaacacacccttggtgaagaagttatattttgggacaaatcatgagtactaaaagttgttatattttaggacagagggagttatatttttcataattttcatgtccacttggattgcataagcgcaaacttggataacatgcaaaaatgtagaagtatggtacgtacacaagttattcttttatattgatatattcatggttgaatttattttttttatctgcttcgatactatcaatctaatttagacttgtaaaatgttcacaacaatatataatttctaccaatttaaatgttttattgctgtttggttgctatgcaaagaaagggttctatgtccaaactacgtattttcgtatatagcaaaataggagcaatattaatctcaaattattagtttaattataaatttaaaacaattttaaaaataaaaacaagagttattgcttaaagtttctgttcatttaactatctagttattcatagaagtgtttttcatagaagtgtttgatataaaataagagatagaaaagggaactgcccatacgtatagttttgtatatgcgtgattacgtacaggagggagattcgtacgtacgcggaggtagaggtggaattgagggattgtatatgcgtgtatatgcgtgattgtt

SEQ ID NO: 43845 - DNA, 3484 bp, Oryza sativa
tttgtaaacatgtttgaccgttcgtcttattcaaaaacttttatgaaatgtgtaaaactatatgtatacataaaagtatatttaacaataaatcaaatgataggaaaagaattaataattactaaatttttttaataagacgaacggtcaaacatttttaaaaaagtcaacggcgtcaaatattttgggatggagggagtataaaatagttcctactgaacattgtcggctacttgttgattctttttaggtggtgtttgttcctgtgcacaaataggtctacacatgcacatgcgatttctcttacagttattttggtgctttaaaatgctttacgtattggtaatattagagcctagaggtcaaaaactattttgtatagagaaaattatcccacatagccatctgttgtttattcaagaaaatattctatgtatcttcagggaaccatatgtgatacacaaattcaattttatgtccattgttagagaatccatttgcttgaatcaaaattagagaatcatatatctgatggaaaattgtctttttaccaatatgtttgccttgcagattggtagttcctctcgtcctccaggcaccagctatggacaatatctatacctcaaggaagcctcttcatgttcccctcaatatttctttctgggtgcatgcactctatgcttgctatgcaaaacccaatgtatgtgaatgtgatccttatgctgcaaaggtgctactataaacacttcgttcttttatctatttatttaaacattctttgttggtgtcggtgcattgcctctgaattttagatccttttttagtgcaaaatgcatatgaatgtgtggcattgatattcccttggagatgaaacaaggtattcagtgtttgcaaattaacatttacgagtaggatttacctagctagcatggcctctttcatagccacttttgcatgtatgaatctttgtgaattgtggtcctataggcaaatagaaaggtaaaattacgtgatcaactcgagctctttttcatatttgtgccactcatatttgtcctaagttttaactgtattttaatttaatcttaaattcaggccaactactcttgcggatgttatttaatgaatttggatgtgattgtactgcaagttaatctagaaattcatttccctgttttcataacaacaaaacttttaaagatgatatccctttattgtcattcaagtcagcattaagcttgctggttgaaaatttgaagtttttttaattcattctgaagtatgaagtagtatagaactttctgattttctattggtgtttagctcttaattgttgttttatctgagaattcactgctgactgctagcttaaccatctcaataaagctgatgaagacaaggtgctcgatattcagacgatattggtcaagtataacatatttcatattgaccagtgagaagcatccagaagaagtaaacgaatgagcattgagttccagaaaatggtgtatagtatagatggaattatgaaaagcaatcaacctcatgttttatgtatagtttttattattttgtgaaaggatggtagtgtcaatatgtagagtttttattaatttgtgaaaggatggtagtgtcaatatttagttccagaaaatggtgtattgtatagttggagttagcaagagtaatcgtctagctcatggttttgggaaaggattttggtgttaactattttttcgatcagattatcaaattcaaaactgcaagtattttcacccgaatgttgttcgtgaacccgtgaactttattagcttcaaatgtttttattttctgatacaactcacatgctattttattcaccaactttcgttgtttgtagatttgtattactaccatatgaaaactataaacatgtgatataattattattcgtgctatattaaagtttttattataaaggaattacacttaataattatttaacattatcttactgtgtgcttttaaattggtttataacttttacccgttgtaacgcacgggcatctatctagtgtgtgcatgttttcactattcgttccatcaatccaaggcgtgtgatcccggcggcacgccggcacagccgatgacccgcgcacatgcgggtagatgcacgtggtttggccaccagacagaagcgaacggcatcgctgcgtcgtggcgccgtgcggtagccattgcccatcggccaaatcgcgcaggaccgaaacaggcgctcggcatggcccgacctatccggagcggctgtgctcccgcagggcgcgccgcacatatgcgcgacagcaggggccagcgggcatcgaagcgcttcaagcgcacacgggtacgccgcgtctctgcggtcgctcgacttcccggcacttgtgtatggacgccatgcttgctggcgtagtgtcgtcccaccggacgatggccaagtccaagctcgggtcgacgctcggccacttgatccgatcttgtgcgcatgcatgttgccgcggccacatgtccggccggcgtacatgcaaaacaaacaaatccaattagattagcatcaaggagttagatatgtatatcgacacaatgatgcatattaaatccatccatccacttgtccaacgacatgcatgcatgccgatccatgcatggttgtagcgatcaatacatctcgtcgtgcggctgacacaccggcatctcgatcaccagcggtatatgcaaacaaaagcaataccggaacagatcaatctgtgaatagaaattaatctaataataaaaacagattggaacgacaaaccggtgatggaagagctgctgataacgtgttgtaaaccaacgcgcctattagcggatcaccggatccgttccctgtcccttccacagcagtagagacatgagatgatgtagaacacccgcgcccatcccgttgccatcaagaatattgcagaagtagacaatgaacgcagatataggatggagctctctcttcattatagatctcatctgtagtataagccagccattagccattagatgtcacaccctgcccctgtatatataggggtcttaggagaagatagatcttatctctactccggttcggattggcctacaagaaacttatctccaagagatttgtttcacaacaggacccacctatcatacctcctttccccttttcctctctttttctctctcttgggcaaaaggcatgcactgcagtgctggaacgggcagtggacgggcggcagcgcgcggggatggtcggctcggggatgggcgatggatggcggtgcgcggggatggtcggcgcggggatgggcgatgggtggcggtgcgtggggacggacagtgagcggcgacacgcatagcagcgcgcggacgtggagaggatgggggagggagagtggagatggatggggaaggggaggtcagcgcacatggtggcgtcaccgggatccgccatttg

SEQ ID NO: 43846 - DNA, 712 bp, Oryza sativa
ttcctgcagccctactggtcctctatactggactcagtacgccgaacccactctctatggcatagtgatctgacgcctgctatactatattaaacacctataccgcttgccgccattgattcacgatatatcgcgctacattcttttacgccacacatctgcttagcccaataaccacacaaccatagcagaacgtccacctgagagatcgccaccccattcaaaaaataatgcctctcttattaatataacactcatacctatacttactccatcccaaaatattgagactgccgtctgatcttttaaaaatgtaatgaccgctcaggattataaacaaaatcacagtggttgtgaaggcttttcctatcattggacttattgaggaatataaagttatgtatacatatagcagtacacattacataagagctcttgaatacaacgagcgggcaactatatttaaaaaagttaacggcgtcaaacatttagggggaaggagagagtattttgaaagacacatcattatcatggatgaaaccacaaatatgcataatcacgaacaattttccgtcgcccgcggtcaaaccgtctctcctacacattcatctgtacggcaagcaatccgtacacaccacggcattctgtacggccgctaatctcattccattccgtgcatccgatccttccccgcattgaagcgcgcgaagcc

SEQ ID NO: 43847 - DNA, 511 bp, Oryza sativa
cctagacatccctagtggctagacgacctaaccatgagcagtctccttcttccagatgaccacgcaaacgcttggctaaaaaaagaccacgcaaacaggaacctcacctcgaccaccaaatcatatgctgctgcctgtggatttcattgccagctactgaaaatcaaaccctttacaatcccggtctcatgtagcttattatccccatcgattaatctgtgtagaggctctgatttgaaacctaatccaagtctaggcagcagcaggaaagcttccctcgaggcctagagcccaagacggacgaagggcgaaggaaacgatccggatttgggagcgatgcgtgaagccgattgaaaagtaatgaattttttaagttgttatatatattaaggatttgttggtacaagataacgggtccatcaatttaagtgaaaatcgatgacaatatagatctaatctaacgatataaaataacgggtccattaatttaaatgaaaatcgacggtgagat

SEQ ID NO: 43848 - DNA, 2020 bp, Oryza sativa
agctcagtaaacaaacttccaggacagcctaagctgaacttgagcacattgaatgaaaatatgttagtccatgaagaagctaattaattaaatggaaggggacgtaaatttcgagtacgaacattgcaggtatcaatttcggttttgattttttttttttgcagaaaggaccagtaccaaaaataccatttgtaatttatagtctaacaattctttacccatcaaaataattctccagaatttctgttgaatttggtaaatgttcaccatcacactcctagaaaaagcattttcccatgcaggggaaatgcgtcatcctaggcagatggtggctccgcctgcacaccaacgccgatcttcgcagtcgggtaggaggtccgcctgggaagatcattttccctagcggactggagctagacacgctgcctgggaaaatatatcttagtccgcctgaaaaaatgagatgacgccgcctgcgaaaataggtaaaaaatttgaaaaaatgttacaataataatttgtgataaataatgttccaattaattaattaattgatgcttaaataatattagtaactaacaaacatttgatactgacaaatatacatatattacataagtgaatagtgtcatcaaaatgttaaaatattttttacattgtcacttcgagtacactatctaattatattatggcatcgcgttgttcggttgttccactcctgaagattcttgtaagcttcgcttgtagccagaatgctctctgcgtcgaagaatcgtcctttgacatgatagcactcatggtggatgaagtggtagaggtcacactgcacatttataatgcatgtatcgtcaaagcttgttcgaagttctattctaggcaactgcatgcatgaaagaagcacaatatattagtatcatctagatgtgcagttctccgatgcacttatacattgagtcaagagatttacatcctctgcattaaccatgtatcttccattaaccctgaggaatttgcatgcataatacccgcagaggaccgtgcctctagattgcttgtgacacttcatgacatatcatagaagaaaatagttaagttttgtaattagtaaaacaattgaaatacattaagtgagtggagtattaccggccaatatgtatatactaacagcttctcccttgtttgaatctactctccacccttcttcttgtagtagttgtatgcactgtatggattttttaccgtttcatattaagtaggagatttaattttaatacattattagtagacatgcaagagtattagaatcacttactattataagattgttagaaattgtttgtacgtcatgtgatgataatcaagggggtccaagattgtcacggtgccgtagttcgggtagataatgaaacagatgtaataatcgcttcatagtaatgacgttgtagttagtcacggatgaaataacacagatatgtacaaaaaaatctactggacttacttaaagttgtacgcggtcaggatgactcttattgtgaaagtgtaagtgttgacagtccttaaatcataatttatgaccgtcaatgcctgcatataatgagataaaatatgatatccaacttagtggtagggattattactaataatttccactagtgttggtgaaatatgtgtatgcaggtattttacaaagaaaacatatccgtcatgcgacaaaatacacctccgaacaatcaggacacgtttacacagattggaggcccaataagtcaataaaaaccacttagaattggaccaaaacatagtacataatgttaggggcccaataagcaacctcccagctgaaggagaggccaggaggagtgtttttgggttcgaccgaacccttcctagcgcatcatgccatctgctttcacgtggacagccctgattactccctaatgatggttgaagggtatttttgtcatttcccatggctataactgccatctggagcctataaaaggaggagaggatctcgttc

SEQ ID NO: 43849 - DNA, 1361 bp, Oryza sativa
ttcattctgataacttttattcataaattatactcctacttgaactcttataattacttttctatttttttaaaatttattctatttattattttgaactttaattaatctcatcatgtgttctagattgtattttatttcaatagtctttattttttttacaaatgttagttatttataaattgtattctagttgagctcttatttttctttttctatattctgaatttattttactttttattttgaaatttaattaatctcgtattgtgttctatataaactattcttttaatatatttcttatttttattttaaattttaattgtttcaaaattgtattcctacttgaactcttggattttatttgatttttaatttttaatttttaattttaattaatattatctccgtcccaaaatacctggcgctttgagtttttatttataatatttgatcattcgtcttattcaaaaaattatggaattattgtttattttgtttgtggcttgctttattatcaaaactactttaagtataacttatcattttatatatttgcactaatttttcaaataagacgaatagtcaaacattccaagcaaaatgtcaaagcgaccactaatttgggatggaggtagtatcgtattggtttcttataagaaatcttctttcaatatcacttatttttaatttcgaattttaattattttcaaattgtattcctacgtgaactcttattattttttttctaatttcagattttattttatttttattccgaattttaattaatcgcgtattggattcttatattaactcttatttcaatatttcttatttttaattctgaatttaagttatttttaaattttattcatacttggacttttttttctaatttcggattttatttttatttttatccaaattttgattactcttgtgttagattcttatatggactcttctttcaatattgcttaattttaattccgaatttcagctgtttttaaattgtatttctacttagactcttttttctttttctccgattaatgtgagaatttctagcccccacagcgaacgtggtgcctattttcaaagctgtttaataatataatactccctccgtttcgaaatgtttgacgccgttgactttttagcacatgtttgaccattcgtcttattcaaaaaatttaaataattattaattctttttctatcatttgattcattgttaaatatatttttatgtagccatataattttacatatttcacaaaagtttttgaataagacgaacgattaaacatgtgctaaaaagtcaatggtgtcaaacatttcgaaacggagggagt

SEQ ID NO: 43850 - DNA, 637 bp, Oryza sativa
  unsure (1)..(637): unsure at all n locations
ttcagtacaggtcgacaccctaccgatatcgatgctctatggatggaatgcttgcgtgcttggcgcctcccaagccgtgccgatactgaccatatgttccccatgcccccaactgttgcatgcaccacgccccactgctatcttccccttggccgcttgacctcaagttgctaactggcatcacctacccacagatctaccatctcaccctcttttacatccgctaccaccctcctacacgctagcccactagcgcgagcacaacaaaaggcggcaatgtgacatgggccatgtgcatggcagctcaaggaagctgcaggggaacggctgcacggcaagtgggagaaagcannnnnnnnnnnnnnnnnnnngactcgtgtccagccgtccattgaaatggtgacatttgctgactttttttcctcttttggttcctgtgttgctgccaggggattcaaacaaggaattgccttggataatagcattcagttatgtatgcatacaaggtgcttgagaaaatactccaagagtcaagactaacagattttagatcattcagtatcttcttaatttgttgggttgaagttgtcgggtctttctttaccaaatggggaggtggtctgaatggaaagaggcc

SEQ ID NO: 43851 - DNA, 513 bp, Oryza sativa
tggaaaataagaccatgctaactaagaagcaacacagccaggtcccccaatatatatgctgacttgcaaaacagagaagtagaagttaatgaatcttgtttattactccatccgtccctaaatatttgacgtcgttgactttttaaaacatgtttcaccgtttgtcttattcaaaaaaatttgtgaaatatataaaactatatgtatacataaaaatatatttaacaatgaatcaaatgatagggaaagaattaataattacttaaattttttgaataagacgaacggtcaaacatgcttaaagaagtcaacggtgtcaaatatttagggacggagggagtattaccattagtattatgacattgcagcttattgctggcttcctacttccttgagcagcagctagctccgctaatcggagcctttgctagtaacaaaatccaagaatcttacttagagcactcaatggtggaggagttcttgtccaagctgtaacattccgatttgtgcttg

SEQ ID NO: 43852 - DNA, 3196 bp, Oryza sativa
aattgaccattaataattatgaacttaaataatgaatttgtttaatttctaaaaaaagtctattaaaaattctatgaaaaacacaccgtttaacaatttagcgagcatgcttatagaaaacgagatagccactagccaacttaagaagctgcctcgaactcagctaaattgttttacattatttttataactatttacattatcatttaaggtaattagagacatccacttagggattcttggaaatggaggaaatttggagagattctgtataattaaactgaactgaaaaacgtgcattcggaaggaactcttgaagttaaaacaaaacagtttcccatgaattgaacgggaccatggaatgatcgatctgagcacgagcagcagatacgcgagctcagctagcagctagctgtagcgccaaacgctgcccttccctgcaacttgcgatgatctctggcccttttctgctttctaccacggcgacgcgtaaagagaggagaagacagaagacgcgttttgatccacctatagctatcaatcatcacgcattgcttgcagctgagctgtgatcgagtttgcctttttctctcctttctctgttcgctgcatatgctgttgctgatcgagtactgtacatgcatgcagcgtctgatgcgattgcgagaaagttcaggacatttttcggcttgtctcccattctgccattttcatcctcctcactatcgatccactccaaagtccaaaccgtcactgggagagtccatttctcacaagccaaattgggacaaagtccaaatcgtactactccctctgtcaaaaatatatataatatttatattaatatttaccattattctttatactctctccgtttatattataaaccgtgttaactttttcctaattcaaattcatttaaatttatagaaaatatagcaacatcaatgacactaaattagtttcattatatttattattaaatatatttttatagtacatatattttgtgttgaaaattttattacgttttctataattttagtcagacttagaactttgacgttaattacgatacaaaatggagatagtatcaaaataagtacagttttatctccttacctttattccgcaaaataatttcctgttaatataggatatttcagtctttctttgaatattaagccgttagtagagtaaaaatttaaacagggaaaagaactgcacagctggttggtatgcttatatcaccatattcgagtgcaggtattctccaggtacaatgcaggtcgatttcgattcgattcgatttcagcgtacactggtggaaaaatgttttttactaccaatttagaacgtgactaaatatcgctatctttagttccgggatcaatctttagtctcggttggtaacaccaactgggaataaagagggggaatctttagtcccggtcggtgggaagcgacagttcctcgagatcttttttttattttattgttgaattgctaatggctagtgttaatccctgtattttctcccgaatcaattttctcccgaatcaaatgggatgcacctccccaaatcaacatcccaaatattaagttacttatacgcacagatcaaatacatcacaaatcctatacacaaatcaaatacatcacaaatcctaaaaaactacacacaaattaaatacatcacagattatacaaattatacataccagatccatgcgatgcaatgaatcacaaaatctaaaaaattatacatccagtgaaacacaaattaaaaaaaaaaagaaaagcaaacaagccggcaccctaccgcagtcgtggccgccgcccgcctgcccgcgcgcggccgcgccgccgccacccgccgcccgcctgcctgccgccgctgcctccccccgcgcggccgcgcagccgcctcccaccgccggccggctgatgggagggaggagaggggaggaggagaagaggaaggggaggggaggaggaagaggattggatgtgagaagaggaagagaggggatgtttcaatcttatctaaatatctgtctgggacttaaccgatcagatgtgggagagaaatatttactcccggttgataactccaaccgggactaaagatcaatctttagtcccggttgataccgggagtaaaaatcaatcgatctttactcccggttggtatcaccaatcgggactaaagtggtaatctttagtcccggttggtagtataaaccgggactaaagattctcgaccccctgacatacatctgataggggatgaaccgggactaaagatcctggatctttagtccagatcaaaaaatttttaaccaggactaaaaatcgtttttagtctcggtttttaatggaaccgggactattgtgggatttggttgaccgaccaaagatggtttctccaccagtggtagtaggcaagtaaaaccaggtggttggttattcacagaagatggacacatgcatgggcagaacgaaagagagatgagccggggagacgacaggcgagaggtggtgaacatgcgtctcccatatgcgaatgttctccaactacacgtacagttggcacttggcagactcacacacgctagctagcagcatcataacaacctcattgtaaatttagctattatgtctatttcaaaatataattaattttaactataatatagataaattatgataaatattgtttagatttatagctaaaagtattatattttagaacgaatgtgtcaggctagcaactgctactgctattggtacgtcagctcgcttgccttggctagctagctgcgctgggctgggttggcttcctctagctaaggctgtgtttagttcatactgaagtttgaaggtttggttgaaattgaaacgatatgattgaaaagtcgtgtgtgtataaaaagtttaatatgatggaaagttgaaagtttgaaaaaaaactttgaaactaaacaaggcttaggttcaattcgttccttgccaagcatgctatactttgctttgatgcccgaaataatggcaccgccctccttcctgatccaatgatagatactccattcttcctaaaatataaaaagatttaggtacatgtgatacattatagtatcatgaatttatgatatatcacatccacttaaaactctttatattttaggacggagag

SEQ ID NO: 43853 - DNA, 684 bp, Oryza sativa
atacgatggatcacattgagataggccggcttaactggcgttgatagaattttgttgtagcattatttgggagccaaattctgatgagcttatttggattgtcaacatggcccaaagttttaatgggccaacgtggaagaggtcctaatttagccctgacataacaggtagagaaaatttgctactccctctattttcattttaattaacgttttggacaataacacggtctacaagatatatctttgaccttatttttctattataatatatacaataaataaatgcatgtttacttttattatagtgctttaaaagataaatttatatatgttgttctagtttctttaaaataaatatttttaaagttattgatggtcaaagttataaaagtttgaccttaatcatgttcaaaacgtcaattaatatagaaccggagggagtatataattaggaactactaggcttgaaattaaagggtgaatttttatatttttataagagcaggtttatggaaactgcacactggatatcatgatgtaacatgagaaaagaagaaaaccttggttggaattggcacaccttatcgttgcttttgtccttatccatgctttgcaagctcagttcttccatatctcaattcaatcaaagtgtcaccatcaaaacacgagtggcacattttac

SEQ ID NO: 43854 - DNA, 818 bp, Oryza sativa
ttgtgctcatgcttttaggactgattgccttactttgtagtcttctatatccgtgctgtaggaattctagcatagaatgctaacagcaaccagcgactgccaaatatgtttgaaatttactaccccccttccactagactgtagttatatccatatgacagttggagcatgctctccaagctttctgttgttttgaactgaatatattacaggagtgagaaactaatgctgacctggtgtcaaacaggcgctctgtatactttgacttttttattgattgtccatttccacatgtgcttacttttatttgtccatacaggttcaatgtctaacggttaccagcatctaactaccagtgttccattaaattcaaccacaagcagcatcccatctacgatgggtcctgtgggtattcagcggcaagtgactcatatgatccccactccaggatttaataatcaacagaatgtgcctgtgaatcctgatttttcaaatggagctggatatttcaatggtgagccaactgtgacatcacaaatgcaacagcagaagcaatttcctagcaaccaaaacagtcatcaaatccagcatattggggggcacagtaattctggaatgcattcaaacatgctggagaattcttctgcatatggtttatcagatggacatgtgaatggtggaatgggtgtacatgggtcaaacatgcagctaacaaacagaagtgctgcatcagaagcatacattaacatatccacatatggaaattcacctaagcctgtgcaacaacaattcaaccagcaccctccacagaggatacc

SEQ ID NO: 43855 - DNA, 524 bp, Oryza sativa
atgttcgcactcctcccccccttgatcatattcagcacagtgaggtcacaataaacatgcattagactgaaaaatgttccttttttctacaaaatcgtatttgatggcagatatagagataggaaatgaattattttgaacaagttacctggctttttgacatggaaaatatgtcttacgaaggacaaatggattatattttctgtttttcccattgcaacgcacgaacatttttgctagtaattaaaaaataaagaatattgaaagagtagtctagagtccatatagaaatacaatttacaaataactaaaatcctgtattagaaaacaattaataactatcacatgtatacaacacggaaatacaacacaatatgaacattacacgtttatagtttggtcaagttagtacaaaatttaaattatattgttattttaaggtgttttaataacaaaataaaaaaatatatttgctattatatgagagaaaacataaagatgctagccgcgtaatttgcacaggc

SEQ ID NO: 43856 - DNA, 650 bp, Oryza sativa
acagtttacatcttctatctctacgtgaaatggaatcctgctacaaataccattaatctaattaactaaacttagctaattaattaatctaattaatttaactaagctgtgatcaggcggcgcgccattggcgcgccccaccatctagtatagtttaaacttggtaactacgtaattaaatttgctgtataaaagcacaagtgtaattttaatagaatattttttaaaaacacagtgcgaatgtagacacccacaatacgtgcactcacccctattaacacgcacgcacaccctacccctgtgaggacatccggaagattatgtcggtatatcgctgtcgacgggtaatacaagcacccgtgtcaaatttagaattagaacccggatgagttggttccaccacgaggaacctaactagtcaaatttagaatttgagcccggatgagttggttccaccacaaggaacctaactagttgagtttatgctcacttcataatttcaataggattttagtgactagctagagatttttttttcaggcctccactttttttaagcgtttatttgttcggagcagattgacgggtatatatgtaaggacgatatgcgtatgttaattttagtagcatccgtgtaatgctggaaaaaa

SEQ ID NO: 43857 - DNA, 701 bp, Oryza sativa
tacacatacatcaccaaaccacaatatacatatgtagggtacgtttgatatatgctagctcctctccaatattcttgttcgagctggagatgtaactaacacttttgagatctacatctctagtataatatagagtggacttgccactccactctagaaaacacattataaagatagaacggcattctatcacgctccttacctccactctactcttggaggggctgtatcattcaaacgactctatatcatccagacatgtttaaaatgtttggatgcctaacggccgtagagcgccaatatgtacataaccactctaaatgtatgttggctaaattccctccataggaagcctttgctctcagcccattgcaactcaaaagcccaacaaacttgagccattgattcatgtcttgatcaatggtgaaaattgcctcatccttttatggtgcaaagaaaaaaactctagtctccattgagagagagagtgggagggagagagagagagagtagcagccattggagaggagaagcgaccaacaaatcacaagagagggagagaagagttgcaatttgttcagcttggtggcttttacccgatctttatcaagtcggcgattggaggctcaaagtgcctcaaacgtagttggattggcaccaaacttggtgagtttgttcgtaacctatagcgggcggcagga

SEQ ID NO: 43858 - DNA, 1416 bp, Oryza sativa
ccttgtgtactaggtaccagcccaaaaaaacagagaaaaaacctcgatagttataactagtaagcactcaattgttcatcatgttgacaaaaattctataggcccaatagttatgctccttaatttaatgctctcattgacaatcctatccctcaactatctaatccaaatgcaacttcagtgtaattaacgaccatattaactttagtccctactctccacttaggaaaaaaatgatatattagcttctgaaacggtctccaacgttaaactttgacgataacttttctttcacaacatatcaataacaactatgaaaataacatatgaaactgctttctagaacagatccaacaaagtctattgtgtggtactaaatacagatatatgtgttgttagcttattagtaatagcaactcaaaaagtttcaaaacaatgttaacttcttaaaacatatgctcgctttatattttttcaaaggagaaggaacactgagcatgaattgtgtcgaggcatatcagcagcaagcgaagccgtgagaagaggcgctattggaacaggatagcatggagaagttggagatggtgcagtgctgtccggcaggtggcagatcaccaacgttccgctgccccgtctagtggtgacggaagctgaggagtaccagcaccaatagtgtctagaaaggtgacggttcttataataaaatggtacctatggatatcaaataggtaccagttattataataaattagtacatatgaatgcagcataacaagtgttagtttttattgtgagctggcacatatggacgctacatatgtgctggtaggtatctgttgacaataaagacgggaacctatgatgataccatccatatgtttatattaagttttcatataaagtcagatgaggataaattttatattaagtttgtagagcttgacgagattgacaactttacagttaatgaccttttgatttgacgctgtttggatgtcaaaaggtattataagttctcaggtctatttaagtaaatttttgaaatttctaaacgatcttggattgagatctacaattttgtaggtgacaaaatttttgtttgagctcatctatggtgttaaatatggattgtaagtttcagatgagagtagtctaaaaagaatagtatttgcttccaagacaacaaatgtttctaggtgttaggatacaaatgttcaaacccttctaaccccgtactcatgaaaatggtgtgaaaatcttgtaagttgtgggaaccgaattgtgatcatgtgtagatgcttagtaaaatacaaaatattttttggtcttttttcgtgcctgcaaaaataaaaaataaaaaaagggtgcacctatataggtgccattcttagaaccggcacaaataaggtattatta

SEQ ID NO: 43859 - DNA, 759 bp, Oryza sativa
aactattgaacctatagaatttttgtcaacatgatgattttacatctttgtccacaattctggcttcttgatctatctactcttacaagcttgttcttaggagcatttctactggtcaaaaatgcaaatttatcaccatcatttgccacaacatgatattgggcatcattttctctgtcttctgggctggtaccctggtacacaaaaagatcgaccaatgataatgccattatctacgagaccatgacatgataacaattggttggttagtttgtcatctgcgctaggatcttccttcatttcttgtttatccaacataaatggctattttgcaagatcgcattgctcttgtttgttttttctcatctaaggtattaggtttacttcgaaggtataatcatatgtatatatatatatatatacgtatacgtatatatatacgtatacgtatattagatatacgtatacgtatatacgtgtatacgtatacgtgtatacgtgtatacgtatacgtgtatacgtgtatacgtatacgtgtatacgtgtatacgtatatacgtgtatacgtgtatacgtatacgtatatacgtgtatacgtatacgtatatacgtgtatacgtatacgtatatacgtgtatacgtatacgtatatacgtgtatatatatatatacgtgtatatatatatatacgtgtatatatatatatatatatatatatatatatatatatatatatacacacgtatatatatatatata

SEQ ID NO: 43860 - DNA, 4895 bp, Oryza sativa
caaatgttacatttaaagaaactaaatttgatgttttagatgttgctaaaattttatataaacttggttgaatttaataaagtttaactaggaaaaaagtcaaagcgactaataatatagaacagaggtagtatgtacttacacacatacttgaaaatatactcaatagccatatctagtatcctgcatgattctgattcaaaatggacaatctagttataaaggtgtgttttctaaagcattttctcccgaaacatatgttttttctcagaaaatgcaaaacataagggtttaacgttagaaattagaatgttagatagatacctcaaaacctgaacttttgtgaacttcgttcttaaaagaaaagagttcgcattctcatacgccatctattttatttcaaccatcatttgcctctaacaggaactgtatgattttctactgaccaccataatatatataatttatgttcactacgaaattctttagagcttcatggaaaatccataccacacagagtttgaaagagacatccattaaaagaaatgacatggaaggacagtgcggttcatttggtcttatccttttaacttttaactgaaactgaatatggaccagcttcaaccatcgcagttccaccaaatttaggagaggaaacgaaaatagacgatgaattttcctcgcaatatctccagcaaattggagctacaaaaaagatgagccacaggaggcaagagctcaccaccccacctcgtcactgtcgaaatccatataatgagtagcatttgttactatctcaagtattagattagaaggacatctaccttctgttcattttaaacactgcaacttgacaaaaaaaattaattcccatatgtttgcaaattgctaattaattaacatctacttgaatatttgtgatttgtcaatacttatcagctcacttctaaaaggattaaacgccgtactggcagtgtactcttccatccagataagattattctagtccatggttatcatcctacggggctctgactatatctagccgaccattatctgaaaatataagttgcgtatcatgcttatcactgatcagcatgacagcatgtagtatttgactttgcacatgctgccttgtcacttcccggccggaaggactagattgccttttggaaaaggcaaatattagctaaagatcaagttgacctttgtaattttgtcttttggtttcatgtagggtcttcttccaagaagaaatcagatatgtgccccaggtctcttccttcctccatgacatatatcgagattaacctttcttcagtgataatttttacggtccttgaaaaagtatctcgaggtacctaaattttacctaaaaaatttgatacctcaagatacatagtacctagagatactaaattttacaatagaaaatgtggatatcccgatactttctcaatgatggtaaaattaacctttttaagtagctttcccctgtttttctctactattcatgtcaaacataacatggctttattcagaggttgtgtagattattcggctgcgatagttcccaaggtaacactcccaacatgagacacaacacaatacatgacaatgacatttgagtaaaactaaatatagcaaccagaaaactcatgggatacattgactacggaaccatatcatttgggtgcaagtgctctgccttgcaacactccaaccccctacagggaggttcaggtgcttaaacaaacataccgatcatgctatgtaaccgacgaaatgtgttgctaagcaatatgagggtgcaaaggttctatttcttgatgtctcacattcctatatgttctccaatttgtaaatccaaccattccctccatttatcattagctacataatgcatatctaccaatcaaatgcataatactgaactctgaaggtgatgacatatctctagttgctgatggtcaagcctggcactcactgaactatgtatatatattgtatatatacacaagcatagccaacctggtgtgcttggtttggttggtgataagtttaattccattgaagcatttgaatgcatatcatgtacgtaacatttgaatccataccacaaagagtttgacagggacatccaatttataaaagaaaaaaaaatgtcagtgaggaacagtgacttctcattttggtcatatatatccttcagctttgtactgaaactgaatctggaccaggcaaacgtatgaccatcgcagttccaccaatttaggagaggagaaaagacggcgaaatttcatttcaatacatatctccagcaaattggagctataaaaacgatagccaggagctcaccaccctacttgctcttcctaaccttccaaaactctgaagagtttctccattatcgttggcttgttacgctccaaagctttcaacattccagactccagccaaaatttccatattattccaggtaaatgttaatccctgtgtttaccatacccgtgctagcttaatcttgtctaatttcggggtagaattgaccgttctctgacctaggggataaggagaaaaaaaaaacaagctttctagtgttcttcaggcttgttgctgtgagttcttgtttgatcgtttcgctcagcacaccattttgtttgattttgaagcctttgaatggatcgagttttttggtttccaaagatgcatttctttttctcttctctgcagatggttcttagccctgcaaaataattctcgtttcgtcaatcgtcgtggcgattagttgttagttttcgctgctatttggatgtggaagagggaatggttttttaccatatatgagatgcagggcataacgaactggaacttaaattttgatcattttgtttagttcaaaaaacatatgtggttttgttggttatgttttcgattttatcagcgagagaagatgccctgacgatctgattctcaaggtcttaggctacgaggcttcctttttaatttgtgattgattgtataggctttgaagtatcaaaaattatttaacatctatgtaatgtaaccaccaaactgtggtgttttctctactcctctttaagtgaatggcttgacaaatgttatccttagaagaaacgtaatatgttcattagattagcatgaactagcattctaggaaaaccattctagtagtatgttttatggtgtaaattgttaattactcctagtccctaaaggctttgacatgaatacaatcagtaaagcatcatggtgagcaaagaaatttctagcgtactccctccgtcccgtaaaaaacgaatctagaactagatatgacatattctaatactacgaatctggaacatatgtatacccagattcgtaagactagatatgtcacatccggtattaagttgattttttatgtaacagatggagtatgtgctaacgatatcctaacaatcaaaaatggtaaaaaaaaatatatttattaatttaactatccactgtcaacttcaatgtgacgctgaaaaaaattaaaagtacgaaattttgaaacaataatattattatattagttttatgaaaatgatatcggtatatcatgtctagaacttccagctcatgagctttaactgcctattgttgggtgatttctaataaaaaatcacccagattttttcaactcttagatttacatttaacggactataaaagaaaaaaacaaatacatatttacttacacaacatttttatcaaaattacaatgcgcttacatgtcacatcagctgaatttacaaatgtaattttagtttatattttattttagtttcaaatatcttaatttttcaaccgttaaagaaaataatttttatttagaaaagaaagagagagagagcgataaggaagcggagaaagcaagagcgagaaaacgtcatccgtgcttatttctccactaatctcggcgcacgattctacgcccaacaaaacgttaaatatcatagaagaaatcacgatgtttagcaaaatcgtttaaatatcatagaagaagtggcccgatagatgtttcctaaccgaacggccccccccccccacccaaaaaaaaagccctgctgcgacgtgcattgggcctgcacgaggcccgttttggcacgaagcagatgggccgtgccgtcccagcctggcacggcccaagtccaaaaggcctacggagctcggacttctctcgtacgcctcgtgaaatcgccggcgccactgccgcaaaccctacttccgatccgcccccgccgccgccgcaaaccatacttccgccgcctcgcgccgtcgccatgccgcccaccacaccggccaagcccgtccccggccggcgtccgcctcgcgacgtcggaccccctcccccaaggctgcctttcgagggcagcctgggccatacacccctaacccaccctcaccaccacacacacacggtaagtctgttaggttttcgatctagagtttgctgccaattacaaagaaactacactggatagatgttgtctactttgtctgtgccaactgcggcatactctgtgtgtcttgatgataaattgtattgtatatgtagtagtagcttattctgagtaatgtgtgttagtattattgatttgcctgcaagctgctgtggtgtggtggtacccatcccatgtaagactgttcttctgtttagagctgtgccggcactgttcgaagacttgcgcgatgtcggtagctcacgtaaactttggtgcgttgtgctttcgcgcttgcttacgtttgttgttgcttcttgagtcaacgaagctacggtttcgcttcgtatagcaagtttagtgtacttgtaaattgtaatccctaccattcatgcactgatcttg

SEQ ID NO: 43861 - DNA, 1022 bp, Oryza sativa
ctgccccccgagtacatgaaccgcttgctgaacggattaaattaaaaaaatcatactgaatttcaaatttctaatataatttgtctgaaatccatctgttcttagcggtttatgaaacggaaatctgagtaaaccacgcgctaagaggtggtttccaatttgataacgactttgtgaaccaggatgtagactcacgttggacattgttgatatactctctttccaaaacataaatgaagtactctcttcatttaaaaatcttaaacctattttattttctatatatttttaaataagataggcatatatgtagtctcaatatatccaacacttacatgaagatattatccttttatttttgtagtgctaaattaaactattgacctaaccaacatctgcataatacttattagttgcatgcatgaatatagttcttggttttgagctaatttttcttggtcttggtgaaagtagtaatatgccttcgaattttggatagagggagtgttattttaatcagtcaaagtatgttgataaaaaaaataatatgccttagaatcatatttgtatgcatagatgtaataatacttcatgtcaaacgaagagataggggttatatgatgattaatatggaattgagggaatactatttttctagtataattatatactttgaggcaccttttagctaattttgagtagcattttgaagtgcccttcaacttttttaataaatactacgaacattgttctccatcttgaaagcacacagacatcaagctcatgttcatccatcttgaaagatggaattaatgcctatccgcccagttcataaatttctatttaacttggtaaatgtgaacattaatttaaacacacatggattatttatattattattgcaccgtaagttacacaaacaaattccaactaaatcgtattagccaatactatcttctagatgaagaatatatcaagattaggtccgggcaagaagtttacatattaattttactctaaat

SEQ ID NO: 43862 - DNA, 884 bp, Oryza sativa
ccatccgaaccatctgaacttacgcgctcgttggttgtatcgacgatggtcggttgccctgcacccttaaaaaattgttcatgccatctgtacgcagctggttgatgcttgcttacacgattttgcaagtaaacacgcgtttcggactgcccataataaaagtcattttcttataggagtccacgattttgcaagtaaacacgcgtttcggactgcccataataaaagtccttttcttataggagtccataactttattagtctgccaccatgacactccaactaatgacgtttctcagattagcacgactcaagcaccttaatcttgggactgaattttcaaatggttcactcacaattatacaaaaaaagaaaaagaaagagctctgaaaaagggcttaatcagtttatgttttcccatgcttttactggtcatttcttaaacatctcatgcgcacattaataaatgtgatcagacctttacaacgtgcaagcttacaaggtggtcacccggagattgatatgctacgttctccttgtcatcaagatgatggggaggctggttgggtcaagtctagtcttctaagacatgctttgctggaatggagctgctacgaccgcatctctcgaaaaagaatatcttcaattgcatctacaaacttcaccagatgtcgacgagtctgaagctccaatccattggccagttcctgaatgttttgcagaacacaaaaatttgattaggttggtggtttgtttcaacgagatataataaaaattgtgaatgctggaaatgattctttctacggtttcagaatttgtacgcataattttactgctgaaaatacaagcattggggctgagatgaccatctgtacctttgtttt

SEQ ID NO: 43863 - DNA, 626 bp, Oryza sativa
cctaacaatagtatcatttttcagtatattgacttttaaattgctaagaacttagatataaaagttgtttcttttttttttttggaggcttatcagtgtttagcccaaaacactagctccttccaaaggttcgaaagtagcgcatttgaacgactactacaactaccaaatatagttcatatcatgggaataaggatccgttcagcttaattttgtatagttttccgtacgatttggtatggcccggtcaaagtcaactcaatcaaagtggggtccatatatatgcatacatgaacttagcaccatgaggagagctagcctgcctaacctggcccagagaggccataattgatcgcttgcaagtacttctgcactgttcgtgtgtttaatttaacatccacctactttgtatcatcagtctgtctgtattcatggcgccgttttggaagattccgtggtcatgaaaagtcctgctgcaaagaaatggattcttgagatcttggggcaatctaaaagatttttccaaatctaaatttggtataaggttttaggagattaataagatgacgggcacttaaaagaatactacaaaaggctcataagcactaaatacaaacattgtggaa

SEQ ID NO: 43864 - DNA, 1114 bp, Oryza sativa
taatcacatatctttccgaatacaaaaatatctattccattatactcttgcatatctttttgcagggcaagtaatgcataacaaaaaataaacacagtggtagcacgaacaaggtgataccttgatttcactcatcagctccttctccatcatctgtatcacacatttttcttttcaagaaaaaacacgagcagatgtaaataaacattgttagctgtttcacgaagtactatatcataaagtttttgttatctgattagtccaaagaggtgcaaatatgatgataccattctgcctgcaaatagtccacagagaaactggtctctaccatctgcaaaggcgcagcatcgatgttaagttgccataaatatgtcatgtgccacgcaccgctgataacagcagaaagagaaactctgtacagtaaagattcttgcaaaacaaagaattaaacgatttgcacctctatcaatacaatctacttctgttccatgatattacctggttttattggcctgcatacttgtcaaaagattttttttcttcacaaaaaccatgacaagaaatacctgtactaaaagaggaaaatcatagctcacatgtttcttgattaattaagacagctactctttcaagttataatcatatctaacttggcatttcagccaacaagctcctttgcaggatttggttcttcatccatgcttgttaaaatttaaccagagtctgcgtaagtaacacctcaatgagaagaacataagatgtgcacatcaatttatttgtttaacagtcagataaatccgagaagctaaaaaaaaaatgcataactaatatctacaaaagatgacaacttaatgcaatcattttggtgtctaaaaaacaattggaatccctttaccatctcagagaaaccactgctctgagaccaacacaggtctggccgaacatggtatcttcattcaccaatccaacatatgcacaaacggagatagaaaatgctgttcatatgagagctgtatacatatatatactcacattgccatggctgaggaaccacaatagccctctctgcaactgatatcttcattaatctgaaagcagtaaagcatagtagtgg

SEQ ID NO: 43865 - DNA, 8671 bp, Oryza sativa
aactagattcttttgcaattgatgacattgtccacaggaacacccacttacgctgtctaatgtatcaagttcaaagcttcaaatataataccctcaagtgcaatattttttcattcaagttcaacatggtttagttcaaccatatttgtgttgtcagcaatatacaagcataagcaacctctattatgaatgtaaaccatgcttaacactggttctttgttttttttatggttaatctgctgattgcttagcctttgatcaactgtgtgttaggaaggttgcctctggacttgcaatataaggaacaaaactaatgtatggccttacagtgggtcttgtgatttcattgcattaggtcaagtggctgaggaattgacctagctaggcccatggaaaagtgtgatgctgctacagatagagttgcaacatgccatttcatcccaaatcacatattgaaaaaagtactgtagcataatggatacaattttagatgacgatgaacattactgggttgagttgtctacaagtatatcatctaaaattgtatccattaaattattcggattgcttaaaaatatctccttgatagcatgcatatttttctctactagtcctggtgcaggtgccaagactaccgaaatgactaccctattggaataaacaagttttgtgcttctcacatgaaaaatacatattatagaaaaatatgaaattatatgcatcggtctgatttaacctagtcattggaaagttaagtattaaaaaacctagatggagtataaactgtatagcacattggcttctaatttcggatagttcattcttcggacacctgcatcatcctaatgaagttcatatggtatccacatattatgagaaaagttttgttttaaagacaagcttgttctaaattttctctgaagccatggtaaacaagtagagtatgttgcacataatttcatgatcgatgtgcttttgtttgtttggttttgccttttccatttatccccgcttctcttctcagagctttataatgttgaacacatacatgattatctcatgcattatttttcttttttacgccaatttattggtccttgaagtctcccttataatacatgaattgcgatttcataataccttttattgtagttctacaatcatcgggaatacaaaaaaacattccgctccaagcctgaagttgaactatttatggaaagaaccctgctgcacgggacagatatattcaacggacgtaaactacataagaaggtaggcgaacacttattttatgctcatactaataatatataagacatgttttagtacattgtttgatttacatgttgctagataaaaatataagtactaagtccaaacatccacctattatagtataattaggtatttccaaaaaaaaaaatcttggccactttacgtgcttgtatacatattgtactaaagttttttgtagaaactctaatgttgatatatatttatttttctttacagaaggcaatgggttcctatggtgaaggcagtggtatggatttgaaatatactatttcagaagcttacttcataaactaattaacattatatacatgttgtcatttggttttgtaacatggttttggagaatttacctcactctgtattacttgtgtaattgcatttgaaatgttctattttcaacatagcactgaagctagtgttttgtttttacccaatattttgcaatcaggtggaagtacatcttccatgggagagaaaaagaataccaatactaaaagacagaagccctcgagtattggagatgaccctatgatgctgaagccaactctgcctcacggttttgtttagtttcagttggaactgcatatgtgaactggtgagagggagagcaacagaaaataaacctaatactttgctacataccattttcatgttgcctttaagaataagtgcacattgcatcaaactattgatgatgctgcctagttatcggatgttttttacttgatgtttgcttatgatttcagttctgtacctttaagcttgatatattggctacattgttctgttcaagtttattggttggtagcaatcatgtgggttagtatttaatttatttgcatgagaagctattaccaataatgctgtttttttattggagatgcatacatcactttgcatacatgtggtcgcatgtactatatccatacttctttgctagatactatatccatacttctttgctagatatgtgttgtttgattgcaaggggctaaattataatttatttgaaagtaaattttacttcttgcaaacaactctttggtagaaagaaaactttttttgttttatttgttatatattcaattagtcatatgtattgtatttttacatagactcattctatacatttgatacatccaaattttgaaacctttttctatatactattattagagcgcacttcagtttatagactcattttatatactgttgttaccgtgcactcccattcgaacccccctctcctttttttttaacaaaagattcatgttgaaccccctatacaccatacaactttcactatgggccactttccttatattttttttttcactttggacccttttttataccatttttctcaagatcaaactcacggtgaaaccatgatcttttcttaaacatactcctcttactcccactactgtcagctttgcgggaaaagggggtccaaagtgaaacacaaaggtaacatggcagcagggagaggggtgttcaacgtgtattttctctattttcatctctgccctcctttttcaccattttgcttccttgcgttgcctgtcatgatcagtctcgttagccactcgttagttcatagcaaaacagtgcaagaaaagaccaaattgcccctgccactgattggctatattcatggaaacttttaaagcaccaattcactagattatttgctccacatatccaaaaatatgttttcccgaaaatttttcttctggtacatagcttatatcatttattcaaatctatatcttaagattatttttaaaatatttaatttatctctaagatgaagtggataatatgcgacaataatccagtgatagatctgtttcaaatgggggcagaagcattgcttgtgtctatcttattgataagttacaaaaaaatttaattcaattgtcttattcctctttaccgaaaagcttacaaaaaaaagaagtcttcttcctcctctgactgaaggacatcatctctctatccacattgctaccaaatccatagccagcgatggctaatcttgttggcaaccagtgaaaaccataccatcccgttgcaagtgctctctgcctggtttcccctataattaagcagcttgatcacatatggtttatccataggaatttaagcctcatttgagccaccattggaatctgctgccacaggggcactgaaccacttgagccatcatttttgctcgaatcatcatagaacatgaagggtataacatcagcattcgctaagaaaactagcatgatcttaatcggtaataatgaatggatgtgactggggtagcaactatggcatacactagaaaaaattcgtcgagtggcaaataagttatagccaattttgacaggcaaataaaggaagtcagtaactttggatgccatttaaggaattttctcaattaaatatgttgaatttttgaatgaaattttgataatggcattcattggtgttggttgtggatcagtaacatttcaccatcaatagcatgaaggtgtaaggagatattaatgcttgcttatttatttatcttttgattagaatggtggatgctctatttggtgtatgttaatgcttaattttttccttttcaattccacctccgttgacaattgtaagagtgcggccccattaggtagggctccaaaccccaattcctagctccaaactcctactctagtggaagctagctcctgttggagttggagacctattgaaaagtgtttggctagtttttagctctagatctgaaagaaaatgaaaaaaaaaaagctcgggccagggccatgtggcttcagttgcatgcatagacttttttttttagttttgttctgctgcaaagagtggtggaaaatccgaatcagttatgcgtgacctttctggtttggttccaagttatggatatcatgtaggcatcttggtcatgtatcctgatatctctataaataccgagaggccatcttgacgtgccagaagcgacaagcaatctagggttttgccatttccattgtgctgcggtctcgcacattgactactccatcctgctttctggtatgcacctgaggataggaagagcaggtctccaacaccttcggtttcaatgtcctacagcaggagatgatgaatagagtttttgggaagctttgcatttaattgctcatatttattcactatggctcgtcttcctttatgttcaggcgctgcgtgtcatcatatacgaagtctttgttttatgtaaaagggttaacctaggatatcgttgctagatcaggatcaaatcttgtaaattagacaccaaaatgaacaatgtaaactatgaaaggttatgaaaacctttaagtgaatcgtttgcctacaatgaatagaatcccttcagcttggcaattttgtagtcctttctggaaatttactatacatgcaattactgtccctagctctttttaagttatttaccagaggctcataaggttgtttagctccacaaattcagcaattcttttgagacttttcaggtggctgtacattactaaatggggtgccatttacaaggcctatataaatggatgtctctgttgtggatgggctcattatgggccttgcggtagccatcgtccagctgggtgatgaggtggaccaggcttggtgggggcaaaccttttatttgttccatcttagaaaagtcagttactcctcttgaaaaaagataagaaaagccagttgtctcactttttggtttttgctattgcctctagtgttcatttattcaagaattattccgttgggcaacacatcgctaggtaccacgcgtgtgctacagggctaaaaaaagcattagaagcttgctatagattattcatgctatcctttctccaagaggtacattcaaaacaagaaaaaaagaaggtcagaaaaatataacgaaataaatgtacggcatggacacttcctaatgtaagtgtattcgacatgcataatgagttatgctaaatttcgctctagttgttgggacaaattgctttgtaggttatgcctagcggctagctatttattgggttctaaagatgtattacaactagttccatacacaacataaatatacaataagattttaacactgcataaatataaaataatatatgggcatatattgtttatgtattttgtctaaacataattatttctaataagctatttagtgcataatattggacatctgtataagctaaacattgagtgtattaactgatatatacaagcaaggaaaaattatggatgaaaaaaaaatatatggtgactggtgatccatctattatatcttctctctaaatactagcatttgttagaaaatgtgttgcatcaaactatgaaaatcaaccatgtattgcttgaaggtacatacatccatatgaggaagaaaaggtatgattttttttaaatatccttttttccataatttgtgtttatatacctgtgtggaattaatttgcaaaaatatacctaacccgcttgctgagaatgcgagaacgaggattaagcgcatgccggatgcgcgagaccgagggtcggaatgatcatgcatcctggaaatgcggtacaccatggtggtatcgcaggacgggtctgtggcaatgcggtggttggctggaccgatcatcatcagcccgatcccgcaaagtgggcgcacgacaccggcctcggtcacatagaactgttacgcagaactgaatcggtaccgcagtttgggcctgcgggaccgaagcggcgcctctattctgcgcgatcgagggtgcgctggcccggtcccgcggtgcatagcgcacgcgcacagccaccgcgcgggactgactcggttccacaccttcggcctacgcgactgagccggtcccacacatccagtatgtggcaccacgttcccgcgctgccacgccatgctttcgtcccgtacccacgtttccaacgtgcggaggtggtatattttcaccaaatttccccacacatgtatataaatacaaattattaaaaaaataggtatattttcaaattttattcgaaaaggtatatcacattaaatggtatctccatataaggaacataataactatctcattaaatagcatatctctataaagaagacattatgtgtcatattaaatgctaggacgatgtaaggaatataatatatggcattaaatggtgtttccttgtatggagggtggaggatgatatgcatatctcaattaaatgtaaaaactttaatatatcattattatagcacggcactagctgacaaggttagctgccaaggtttggactacctaagatgtcttcacaacagttattttgaagcttatcatgtttacactatttatgtcagaataatatttctctgcagagcagtttgagagtagcagatagtctcgtcctatccccttctattgtactattcgttcgtagatccatgagtagtgaggccccgaagggcgtagcccccatgagtggatctgaatatgactctgctgaaactctgtcagacgtccctttcatagggagtgatgcagattcaaaggatgaaggaaatacatctgctatgaccttcccgcttggcaaacaaccattggatgttgcaccttaatgccattccatttaatgaagtgcaaggttcaaatcggaaagaggtttctagtaaagaagtagtttcgattcctcaatggttgaaggaacacaagctctacaaagatggagactgggaggtttcaatctctattagggccactggacaaaaagattgggtaagtgattcaatcttacttttctttatcaaatttgttacacaggcttcacttcctttctatttttctgtctaaagtaagtgttgatatacttttgaaaaaaagtgtttgcaacttatcctaagatctctagcagatttgttttttgagtttatgcttcttgattttctaccagaatttatgacgtactagcaattaataaatacctttttatttagttttctatatggacttgtacataacttccattgctttttcattctaccaatgaatatgtgctgcatctaatttggtcttgtcatatcattgcattagcaatatcaaacaaaacaggcttggaggaaattaaagctacttttattatcatttgaattttgcaagaaaaatttacacatctgacaatgtaatcgtttatactattaatataatcttgtaatctatttagaagcttccattcatacatgattattgaaattttaaagtatttgcaaggtacttgataagaacaatgctattataataattgcataataaatacattatttttaacatgtgcatttatgttcatggcactcaagaaagggttaatagaaatacacaaatgacatggtgaaatgactaatccattctcctcttagaaataagatcaacaattttggtccaatattagactcttcctactactacaaattgggacatgtggtttatttagattgattgtatgtctaatccatgccgttgctatattttgagaggagtcctaggtatggagaaagagagataagtgtaattaacacttgcccagagatagatagatagagagagattgttataaaccctagcaataaatagcatgtccaaattataccagagcaccgaaatctagatcttgttaattcacaacttgttatcaccattaattagtcattacgtcttatatctgaggtctcaaattagacatggtataacaatggtggttgaaacaataaggtagacaagctaatgcgcattgtcagacggttgatcatcgcttggattgtccggagacgtggacaattgcagttgttcagtctaatgccaattggattgttaagtcccttatagccccacggctataatattgtttgcaggaaaggttgggccatgattttggagctaggtgttacaaaatatttgggtttaggagccttgtacatggtacaaagcctcttcttatggttaatttatttggttttggaaaaaattacacacacacacacacacaaacacacacatataacttataattcttgaagaggttaattcattttgatgtttttttacatataaagttgacatcaatcctagatattgtggaactacaaagtttccattagcaatgaaggcgacctcctcgtaatatccacaatttataagccttgtcatctaattgcatctttaattgcacaaacatcaagtgtgaggaacacaaacttaagtgctttatttcttgaggaacttaagtgctttatttcttgaggatagcaagcgtgtaaagatcccaagcaaagatcaaa

SEQ ID NO: 43866 - DNA, 854 bp, Oryza sativa
cttgacctattgcaatgaacttacatggtccactctcaggccgttcattggttctactccttaaaaggcaagtcctaatgcaaccttcctatcccatagttgcaaggttgggcgcgcaatcaactttttttttaaaaaaaaaggaggaactcgcgttgagcttagtctagattcatataggtcgtttatgcttgcagattgttgacagccaacatgaatatgatcgaaccaagcagtgttgaagttgaggggatttgaagcttcaaacttgatcaattgggaaagaatctatagttaagatatgaaattggatcgatgatatagtcgtccaaaaattgagcatacttgttcactgggtggatcaactatcttaattttaaatgctttatatgctttatgcatctttattggccctatttgaattcaggccattttctcactttacttacataaaattcatctgagtggtaatgtgtattgaaaaacctagatggagtataaactcgataacacacattcttctaatttcatatgtatcaattcaagtgcttatagtttattttcagatatgtgtatgatcctaatgtagttcatatggtatccgcattatgagaagagttctaatttgaaaacatgctttttctattttttagaagccactataaacaagtacagtgtgctacacataatttcatgatggatgtgcacttgtttgtctgtctttgcttttctatctatgcctgcttctcttctcacagctgtagatgaatgttgaccgtggagaagattgtctcatgcattttttaaaaaattttcatgtcaatttactataccttgaagtctccctcataaca

SEQ ID NO: 43867 - DNA, 913 bp, Oryza sativa
acacccttttactcttttcctcaagctcgaactcattgtgcaaccatgatttcttcttggacacactcctcttacttccactactacactgttctgccactttcatagagccagcagattcacaggaaaaagtgtgtgtatgtgtgttgggagggagggggtgtgacccaccgggccaccacactaacctctattttgaggcaagctatttgttttaaattagatcattataactagcgtataaagtcgtgcattcatgcgactttaatctccctctatactaaatgtgtgtataatttggggttttaaacatatattgacggttcatttgtattattttcaaatgattcatatgtaaataaaatgttacggttagtgcaacggatatggttaggattcgtattcatctttttcgtcacagtttccctctacttattcactcaacaataaacttctaatttttcatttgcgctttagctgccgcttttccaccaaatcactaatggctatgtccatttttgtaggatccctttatcttccaattatactagcctatgatgtcgcgcgttcgcgcgactttaacagctatgttatatgtgtatattagcatataatttaaattggcatcagtaaagaacatttcattatgttaagtatcggcttaagaaaagtgtagttgatctttcattttaaaatttgaatataggaaaagtattaggcttttctgtccgtctctcttttctttgctcactaggatgacctaaagttaattgtttttacaaatcaaatttgaaatggtcaaatttcaaaattagcttcatttcttatttagccatgtatctaacatccagtataagtcacagtcaacttaactttgtatcaaatgagtaaatatttgctacctatgatcact

SEQ ID NO: 43868 - DNA, 530 bp, Oryza sativa
taatgcccgattgagatgacttaatctctatcgggcattaactaaagcccatcacagatgagtcatcggtgatgggctctatactaatgcctgattgagattactaattgagatgacttaatctctatcaggcattaaataatgcccgtcagcgatgattattttttcattttccatatgaaatgcttatattcaatttatgtggtttttttattttcaatttatgagaactttgttgttgacaatttttccatttgaaatcatttactacccgaaaaattattttgactcataaaataaattattatattgcagttaattattttgctacagatcaacttacaaatataaaaatttcatatgaaaactggaaaaatactcatcggtgacgggcattagttaaagcccgatagagattatgtcatctcaatcgagcattagtacaatgcccgtcacgaatgagtcatctgtgaccggcgattccatcattcgtgataggcaccaacttggggcccgattgagatatggaa

SEQ ID NO: 43869 - DNA, 2295 bp, Oryza sativa
ctggcaaaaggaatggaacaagtatgaaaagagcaccactcgaaaacaatactccctccattccaaaatataaggcacaaccacccttaacacaaagaccaataaataattattatcaccttatagattggattaccctaataaatagaatacatgcacccaataaaattagagatcttgattgtagaggatttaaataataatattttagtagaaaaaatgtgctagctaatgacatacatgcatgcacgccttatatcatgaaacaactttagaaagtagttgtaccttatattatggaatggagggagtagcaagtaataattaactatatagcctacaattgaataagcaatattagcagcataagtcatttaactttttcaacgttgcttgtccaatcctgatatgcgtgcagcaggagactttgacctctaaaaataattgttctttacatgtattttgaaacagagagctttattttagatttcctgaaaatgatcgtgaataggcatcaaggacatgtcccatagtcagagaacaaaagtatgcaagaccatgtctcagaataatacttatgacctatagttagtatcatgattcatggagagaattagtgcgagtctgcactacagtgtccatgcgcatgcgttttctctaagtataatttcagaggaataaatgggcagttacctatttcatacatccaattcaataagtgtaccttcatattcacaaatcacatgggtttgataaattcagagatatagaaaacattttatatagaacggcgaaaataatacaatcatttgtatacttctgaactacatgaatatctcaagtgagtccaattgcaacgcattttgttctcaagattaaattacccaaaaccaaattaaaataagacaagtcactttttattacagtatagaaaaacaaaaaatgaactccactttggttgagagttaaccacatgaaatacaggtacacagaaagctcacctagcattaaagatgatcggtggaagcaataggttgagaagatgtcctcagtgaacacaagtgtgtgaattcttccctcaactgacaagcagaatcacacctccagtgatcagcccctgcaagcaccataccacaaagcaaaattcaaaccactacataagcaaaaccacaaacacctggagtgcaacgccacagagtttacacgctggtttctttctagcagatgcccaatcggcaagtgcataccaacgctaggaagatgttgattgtgacaacaaactcatggtctgactcacggcaattgagaacaacagctcccaaatccagcaccatttcgatcaacatctgagtagatcctccgcacagcttccacgattccagcagcctggcagcatgtaaacaaaattttcaatgctcagtggatcttttgcttagtgtaagcaagcggcaaactgctcacgcagctctctttcccaaggagagacctccgttattattgcctaaagatagtagttttcatcataacaagttttgcacgcagaataacaaacggaaaagcgcatccaaatcaaaattaatttgtagacaaaaattccccacttgggagttgagatcatcgatgaatcaacaagcatatgaaagagcatgttgtaatgggatactataccacctgaccaaccctaaccctctagtctaggatccacagatctgagctccttgacggattagcacctagaacagcagtgattagcacctcatgttcttcttccctgcagaggcgatggacaagacaaaatacatggggataaacgaagacgacgacctgagggagaagtgacgagcagcaagcagccaaaagttccattgtatctgtaccgcctccgcctccccatcgcgcagccaccgtcgtcggctctgtgaccatcgccgtttcttcgacggcaacggagggcagagttgcggccgttggcgatggcgacgaaggacacagcggagacgcgcggcgacgggcacggcggtggcggtggcggtggcagagactgcttcgcttggcgacggcgacggcgacgacgcgaggggggagacggagacggcgaggcgacggcggcggcggaggaggaggtggccggcgatggggacggcgctaggaggaggtggctgcgcgatggggaggcgacggcgacggcgatgacgcgaggagggagacggaggcggaggcgcccggagacgcagcgaggcgacggcgacggcgacggcgatggcggaggaggtggaggcggcgcgagggggagtc

SEQ ID NO: 43870 - DNA, 1270 bp, Oryza sativa
caaaaggacgatgagatttttttaaatttttttgaactatattctcctaaagttgtactattgcgctattatcactaatctgcagggtcaatcaatcttaagtaatgtatggcacacatctatactccattaaaaagataagagtgatggtagcggtgaatcttccattgccactgataacccatcattcattttacagttttttacaaattagcttcttattttctgatattatggaatagtccagtatttatttcaaataaataaatacaacatatttaaataagcgatactaacatatctgataaaaaagatatatgttatctatgatatactataatacgtttttttttactcataacacagcatgagtattttgctagttatgtagaaaacgcaatgcaaccatgcaagaaccccaaggttatgtagtctagtggttacagtgatctgagtagctccccaaggatctgcgtttaaatcttcataggggtgaattttagattgggttatttgagggctaactttcatcaactaagtttctaatttaaaaatactgcatatatccggttggatgtagatgtcggttaaaaaaaatatccatctataataaataaataaaattaaaattaaaaaagaaactatgcaacggtgtacgtagcatagttaaaaaaaattaaaaattaatctagctacagtgcacgtagcgtacgacactgttacaacggccttgctttaaggccgcaagtcttaggtcgatccatccatccatatatattttgcaccgtcttttctcgatcgatctgcagtgaagggattcaacccaacgatccatcgggtggcgcattaatccgctcggaagcaagctagctctcttcgggtactgtttgaatgatacttttatcatgttttaatttttttttctcccatatgtactgttataatccactaacaaaattttttaggccgtgttggtttgggttatagtaaccattcggtacgtaacaacatgttagtatatgattaaaaattaattaagtatagattaaaaaaaacttgaaaattagattatataatttttaaagcaacttttttataaatttttgtaaagcacactgtttagcaatttgaaattcgtgcgcgtgaaaaacgaaagagtagaagttagctaggaaagtgtagtgaagaaagcaaccttaaatactcctaataataagaagccggcccatatatgatagcacgagagatcttatcaagaagctcagccaat

SEQ ID NO: 43871 - DNA, 1063 bp, Oryza sativa
atgtcgagcggcgacaccggctttcccaagtacgagtgacggtggcaactcgaccttgcagaggagatgggcaacaatgaagacctgttgatgtgccactgctggcgccgatagcacaaaactgactatgcgtgcagacacccgattgcacgccactcgtgaaaagatgcttccattgtcatcgacgtgaagacgcatttgcaacatgcgtctaccacgcgaagacactcggcaccatcgcatggggagacacctagccatcttgatcttggattcactgaaagtctgggctgctacctttccttgcacacacaaggcggtaatgtgcttgggcggcggcaaggccatgagattgttaggtttgtatgaaagcattattttgacttctaaattaaacttatatcttatacaaatagagtggtatgacttttataattttacttttagcggaccaaaggtaaaggccaataaatagaaagtgatgagaaacctcttaaagctcctttggaactaaggaattttagaggaatttgaaaggattgaactcgtataaaaagaattccagtagggtcctttggaatgaagaaatgactctcctaaatttatttgaaatatcttaggatggcctcaaataataggaattttgaagaatttttaacatgagattgaaatctattggaaaaaaattcagacgtgtatatctcttctaattccttttttcctttgtttttcttgtgttctatctaaatggttatttctataatttttcaatgtttcctatctttaggttttgagattttaggaacaataaatttctctgtgtttcaaaaatcatgcattccaaagcagctcctaagtcttaaccaactccgttttgccatgggtttcgatcataccattggctggaaggttctagatcgaccatggggcggatataatcaagggccgacctcaactaactcattgtcactttacttcactccaccatcatgtcgtgtcgtgtaactgctagttagcccaatctcaattcatctggaatagtatattcttgccaagcgttctt

SEQ ID NO: 43872 - DNA, 706 bp, Oryza sativa
gatatttgttcacaaaatgcatttggcactatacacatataaatttatcatggatctgaaaaaataaatattttcatgtagttttcattgattatggttatagaattctactattaatcatctgttcatgaatattataggtttatgtttaagtaaaattaggtatcataatcatagctataatataaactgttttgagatgttacttttttttaccatagttttgcaatatttaaatgtgggccggatcaactcgttgatggtcatagcgttgcatgttctttttcttttgatgttttggctatctcccacgtatgagggaatcaagatttaggcattagggaggctctagaaaactctagaagatcagaccaaccagttttgctttttttttttccaccgatctgatcatacggtatatatcctccctgctttttgataatcagatggcacacattttttgctgacgtgaatcaatagggtagagttttgagattgatcattcactgatagagatttgaacgcaccacacgtctattttttttctctttttctacgatcaattgcggatagcttactgggcattggctagctgttcttttttgtttaccttttttgggtcatgtttgttagatggttctggaggggatataagctgtgtttgataccaggagttctcaactccccctctagttttccacgtgca

SEQ ID NO: 43873 - DNA, 696 bp, Oryza sativa
cttagttttatattaataaaataatatataagtatgcttgttatggtggatcttgtctttggaaagttcactttccagtttcaataaagagttatattggaaactagcactggaaattcaactctaagatcaatagtcctcttagttatgctatgcttgagatctttttactgtcaagaaggtcgtactttatttttgaattgcagcttgagtaagttatttcatggatcaactcagttgatgtgtcattttattttatatacatattctgttgttattctgaccactgagatttaatattgagtacatgttccacaaaccttcatatctgatctctccatcttctggagtttttcttttttatattgcttatgggctcccaatttcttgcagccatgtttgattaagcaaagtatccttttagatttgctattagtagaatgcatatacttacaatgaagcaaatcttttggtgcagaataaagataagaagacacctgcattatttcttggccctgcagataaccctcatgtttcaaagtacaaaatggtactgaagcaactccctatgtctcttcagaagcaaccgtggtcagatgttgagaaagagaaacttgctaaaggaataaagcagcaataccaagaggcattgattttgaactcgatcaataaaggaaggtgatactgagttgttta

SEQ ID NO: 43874 - DNA, 796 bp, Oryza sativa
tccaaaataagatttaaagcggacttatctcctttttccttctttaatcagtcccacttactcttcattttctctttattttttacctttcatctccccttcttacaatgttgatccagtggggtagagaggactcgagttcacctaatacccacgctggatccacccctgcatgcatgcatctgtgtacctagcctgtacatgtcaaacctcacatccaatcaagcttaattatcaaagttctctagttctaattgcttctctcatttcgatacaaagacaagacaaagattcttctgcagtatcagtgcagcggagtgtacaacacattgattggtaccgccttatcaccatcgattggaaaaaaaacaacactgttagggtttttctacttaacaacaaccacaattcgaccaagaacaggcactaatgggtactcatcaatgttgcgtttgtaggtaaaccggcaccgataattagagcccaaaccgatcgaaatggaacagattcttaagtctattggctcgtaataaatggattattccagccacatttgcctcccgtcaaactctccgtggtcctcctgatctttcccttcttccttgttatctcttctatctcctggtcaccatttagagaggcaacggaggccgctcgggagaacgaagccacgaaggtggcacaatggggtgggtttcaaggggccccctgggggcccaaaaaaatgtgtcactgtgacaacaacggggatgttggcctccacctgtctccccctcactggtggcaaggccaccat

SEQ ID NO: 43875 - DNA, 1000 bp, Oryza sativa
atatacataaaaaaattagtactcccaaggatgttagtgaaaaagctgtacagcttatgtggctccgtcactgggtgccggtttctaaccggcattgatgcccccttatcagtgctggaatctagtgtataatttgtactatatatgtggaatctagtgttccaaagccggaatctatcatcaaaatacttgaagcatgtctagtgtatttatattatctatttgtacaaacacatttagaaaaaaaaaactgaatagttaaatgaattaaaagaatcaattacgttacatgttaaaaggcagaggtagaaagtacgttaattaaccactacacacttgcaaacaaaagaagataccacatattattacacgcatgcatacctagagctaattagggttagctttactcattaatcgatctcttcagttaacgcatgcagtatatatgcagctaactatacctatatacctctatcaatcgtacgttcgtatagcgcagtagtatagtagacagcctgttcatcgatcgatcgatatattgcacgcacgtgtcagaataggttgcacacgtgatgaattaggcgtgacagctacccacttgtgtagctaggacttgtttggcacgtactgtactgtactataaacataggagtcctctgtagatccagagctaagctaggtgttatatatcctctgtacacgatatgatcgatcgtatatatgcatgcgtgctacttaatttggcatcttgatgtgatttgtaccatcttatatatcaactccctccaattttaaatatatataatgccgttaaacaatttatcttattcaattttctctgcaaatatgtaaaaaatataaaccatgctttaaagtaattaatgatggaaaaacaccagactaaaacccgagactaaaaaaactgggtctgagaccaaataaaccgaactttaggtcattggactcttgttggtctgagccaacaaaagatcaccaatga

SEQ ID NO: 43876 - DNA, 1072 bp, Oryza sativa
agaaatcttgcacagtatcttgcgaatgcctgcttgctgtgacttgagtgccgaacaggcccgatggtatgcttccaccactctgggctttttcatcacaaatctatccagcccataaaattaggcccacgaaattgggcctaaactacagcccatccaaaaacagggactcaaaattatgatttctttaaacaaaatttattttcagaccaggaacacattctctaatcaatcaatcaatcaattaattagtacttagtacaaacaaaattatgacgattgcttctttgctctctcactgcatgcaggccccacctctgtgggacaatggacacgtgtcaccagcaccttaaatgtacagtcgacgacgtttcttttgttttttaaaaaagaaagaagaaaacatgcatgtgtacacaaaacgacaacgctaagttaggcaaattaaggccagtgaagtatataccagtacaaagggtaggtccgtgcagagtgtgtcatcttcagtagctcagtttgaagacgagcttaattaaattgcataattgagatgtgagacctaacaactttgacttatttggccaattttgcatcggccaaattaacaacacaagtagtagcttgatccatacaaatcatgaaaactatctagttatattaaacaagcgagaacatgttcctattatcttgcttagttatatagtgtcttgaacggaagattcatacatattcatttgaacatttaggttgttttgacttatttgacataggctgaacattttaaaagaaaaaaacatgttcattttagctacttcgttggataattgccacaaattatttgctccataatttgaaaatatattttctaaaaagaaattattttcatggaattgtttataccatgttctaaactatttgttaagattattttttattttttaatgaagtagataattcgtagcaataattctaggcagaactcccttctttcttttttcttccttttcattttttaaagaaaaaaatcgaaccgttttgctgccaccgtggaacactcacactgtcacacaaa

SEQ ID NO: 43877 - DNA, 937 bp, Oryza sativa
attcctgcagcccttcaagtcaaaaataaaataatctaaatatcatacaacagaataagcggtgaatcacatcgcattaccatgacgccaccgttgttggccagaggctgaggatactgccacctctgctgcttatcatggaagtactgtagcccgtgctggtgttaaggttgccaaggacatcgagaaggcaaaggaaggcaggtcggtgaggttagaggaggcctgatccggtggtccctgacctataagcgcccagatttgatcgcctagctagcgatgggaacggaagggagaggaggaggccaccatctcccaccagggcgatcgcccctgatgtctaggcggttgggtgggaggggaagggagagagggaggccaccatcatcagccaggttagtcgccccaggcgtctaggcgggcagatatggtggccttgccaccagtgagggggagacaggtggaggccaacatccccgttgttgtcacagtgacaacatttgccaggctgaccaccattgtgccaccttcgtggcttcgttctcccgagcggcctccgttgcctctctaaatggtgaccaggagatagaagagataacaaggaagaagggaaagatcaggaggaccacggagagtttgacgggaggcaaatgtggctggaataatccatttattacgagccaatagacttaagaatctgttccatttcgatcggtttgggctctaattatcggtgccggtttacctacaaacgcaacattgatgagtacccattagtgcctgttcttggtcgaattgtggttgttgttaagtagaaaaaccctaacagtgttgttttttttccaatcgatggtgataaggcggtaccaatcaatgtgttgtacactccgctgcactgatactgcagaagaatctttggcttgtctttgtatcgaaa

SEQ ID NO: 43878 - DNA, 3164 bp, Oryza sativa
aggaatgatttggtttttgacaaatcttcatctatcacatatatgcaggtaatcttcagggcaacatattagctccggtgttgggcccagctacaaaggtatgatgaagatggcgactttatgaaggttgcatatcgtaagcttgagacgacaattatgcaacttttgccaattatggttggagattcaccaatagacttcaataatgtgttcttcttatcgtagatgggttatttcttattttaggtgcgtgttctcaatgtttggttgaactacactctttttttaagtgcaactttataataattggctgtagcactttttgactaaaggccgggatattctattccattatcttaaaaaaaactgcaggcccccaagttcgttctcaagaattatagaattatttaaattattttatcatgtcatgattcttgttaaaaattaactgttacatccaatggaatatccatgtactttttgtgtgctttgttttcctcttcattcatcaactaataatgttcggccctttttttactgcaataatccatatgtacgtggtttgagaatcgataacacgtacgtatgtcctcaataattgtgcatgatgcaattatcaagtgttttgcatttcattgctctattaattgaaccggtgtttttttcaccaaaatattggggttgtgttttgctatatatgggcagagttcattctaactaggatagcccgcgcatttgcgcggtatgtgtattagtttgtttcgaaaatagttctaacaaaacaaattaaaattaaagtaacatattttctattttaaattgagtgttctttatatctctctttcatgaagaaatctcaacaaactttcattggttttttttaccatcctactagccctctctttaattacaaacttttattggttgagagcgtttgtatggagtttatttgatttttactatataatagatagttaacatagcatttctgtactgagatgcaagctagaaaacttggataaaaaagtgagcaggtgagataataggagataaaatgatgggtccaccatattaagtgaaaatcaatgatatgatgtttttctttttttttctcggatttttttagatttctctaatttattagaacgccacgtgatggtttagtagcgtttgtagaagtcacgtagcggctagtgcacttttatatataacctggttttttcggctttatcattttaatttccgatcgtaacgatcgtacgttacgttcatataaccataacatgtaatttttttgggtcatgtaatttttttttggtagtatacatacatacattcctctccatccatatgcattggacaggaaggatcttttttggtttttttttctgtttacgaatagtacatcgtaccttcctctccatccatatgcatcagatccatattagaaagaatgattttaatatatttaatctaatggcttgaaatatcgggtcatcaatttaagtgaaaattaagggctagatgtttttctttttatcagaatttggtggattttctttaatttattagagtgccatgtggcggcttgagagcatttttaggaagccacgtggctacttgagagcgtttgtataaagattaatggacttttagtatataataatagataatagattgagtgacaatgagattccttattatatcccataaaacttctaactatgtatctaaacataacttgaattttattttatagaacagagggagggagtagatgacttattggctctgtttagtcccaaaacaaaaattttcacgctgtcacatggaatgtttggacacacgcatggagtattaaatgtaggaaaaaaccaattacacatattgcgtgtaaattacaagacgaatcttttaatcctaattgcgtcatgatttgataatgtagtactacagtaaacattaactaatgatggattaattaggctggcggaatctgtaatttgttttgttattagactacgtttaatacttcaaatatctgtccgtatatttaatgtgacaaccaaacccaaaaattttcctgaactaattaaacaaggcctaagtgttgtgaataacgtactaccgatgttatagtacgtacgactggtgccgccaaccaacaattggagggagtgaggcccgtgtgaagattgcttgttggtcacttggagtcagggtttacaaaaccaatggtgatcacgtgtgataaccttatcagtttttaaaaccacgatgaaaccccactgtaaccatatggttaaaccactttaccgtaaggtttgacaacccaacccaaaacgattcggggagaagccatggatataggttattggcctgccaccaccagtgggtggacatcacctatgcgatgtgcgatgcgcgatgcgatcagaatcgtctttcaggagaggtggaggcgagcttgtcacctccgaccactgcagcaaccaccgccgccggaagctgccgtgcagagcacgctacctccatctatataagaagctgatctcctctctctctctctctctctctctgaccccttcgtccccaccactcctcatttcaaaccaaaccacgcccacgcggccgcctccatcgatcgagattcgagaggaaagctcgatcgacatgtccaatccaaacttcccccgcttccccgtccctggccatggtcgagagcctcagccgggaggcgccacctcttcctcctcgccgggatcccgcttcaatggcctcaactccggggcggcgccattcgttcctcggatggtggagggcgccgggctcgcaggaaggatgatgttcgggtcaggcgccgcggccggcaccggcgctactaccaggagcctcgccctcgccgcggccgttccccgcggcgccaccagtgtgctcgctggccctaccgccgccgccgacttcgcccccagcagccgcgacaccgtctacgtccccgtcaaccacgacgttcccttactccccatcggccaccacgtcaacttgggctccgcctccgccgccggcgacgccatgatcagctcctccggcgctcccgctggagctcaccagtacatgaccaacccatacgccggagacgccatgatcaactctccgccctcgct

SEQ ID NO: 43879 - DNA, 1536 bp, Oryza sativa
gacataaaaatgtttatattttgggacggagggagtggcttccttgtacggtcgtagcatatgaaaaaaaaatgcacctagacaaaatatccctgtaatgtgaacatgagacacaatgacttccgagcacttaaattgattggttaattcatctttgactgatgttttttttgcgagttaatcttctagcacttttattgtcagaactcagaagccattgactgtcctcaattattcgttctgctattcccaaaccttatcttacacctaagttaatttgattaactccgttccaacaatatgcatgcatacacatgcaggtcgtaccgtacgtatatgatgaactcatctacaagaaattatgactctggttagtacaagataacttcaatattgggacggtgaccaagttttttaacacatgcgccgctatgacgactcaccttattaattatggacatatatatatgagttggtgagcttggtaaagaaaagtttactgaagttagaaattcaaacagtttataggtcatcactagtaaaaactatttaaatgaatgtttcctgatgtcttcttgtaaagcctgtgtaactcagctagtaaagtttgctcatccggtcagttttagacttgtggtacagggtgcccgcatttacatctaattattctttaagtggtaaacgatctttggacaacaaaataaaacatatgttgtgacttcgtcgattttaagatatgacagtttagctttttagtatgctcattgaggtagagtgtgcgtatgtgattattttgtcgattttaagatatgttggtctggtattttggagatacttataagagcatgatatacatgtgtatatataaggatgtgtatgcgcacccttgagcgtgatactgtgttttttttttaaaaaaaaaaagaaactccaccagaagacattgaccgtccaggtcgtacaaagtacgtacatgatgaactcagctacgaatatgagtataggggttagtacaggattacattattaatgggatggtgacagtttttttaaaacatgcattcgcggctatgacgactcaccttaattatggacgtgacgagtttggtgagcttgtttaaaaaaaaagtttactgacgttataaattcaaactgcttaaaggtcatctctagctaattaaaaactaattaaatgtatgcataaagggtaggatgttctatttcattattaaaaaaaattaaacgtatgtatgaccaaatcttaatcgagatccttttcaaaatactgtaatacacactcttaccacgtacggttaaaaattaaacttcaccaacatgtacataccgtcactgacacgtgtatatatcaaagtttctgtacagtcggcatgttgatatactcgtggttttgctatttacaaagtcgccatgatatcctaacctgctacaaattgagatgtcaagttgtcaacagcgttcacggccatataagtatccacgtatacttcgaacttacttatttcatgtgtcagttta

SEQ ID NO: 43880 - DNA, 687 bp, Oryza sativa
attgagtttcaattctcaatctaatagtagagtgtgtagcacaaaaatatgataacttacttttatgttctgtttttttatcaatctcaatttaccagtgctaaagtcaggaagccccgaaaacgttctagaataccatgtgaggacaatgtactccctggtgacacatcaaattcttcaccttctatgaatctacctctttctgaatctattgatgctgaggctgctgtaaacacaaccacagcaaattcaaagaagaaaccatctaggtatgattcataacatttaaactttacatagtttagttgtaatgaatatgcatgttctgtttccttatcactagtttcttgtgtgcttgttttacagaagtagatcgaaaaagcaaactgatgaaaatcttgctgtctgtgatgtcaacaactcttctaattgttctagtggagccaggaagagaaagagatctattactgacaaaaatcaagttgtgcaaaagaaaatgaaggggtctatctctggtgataatgaggctgtcgtagagacagtgggcactatcagtgctgataatgaggtagccacgaaacggaagactggctctacatctgttggtgaagaaggcacaaccaagaagacaacgaggggctctctctctggtaaaggagaagtcaacaagagaatgaggggctctat

SEQ ID NO: 43881 - DNA, 690 bp, Oryza sativa
caagagagcaccatcaaggtaataacgtgttttggcatgtcttttccagatagagtttacgtgaaaactttagaattatattttcccttgagtttcaattataccagtatcattattttctctcgacaggaaatcagccgaagagaactcaaaagctgatagcatggctaatgcagcctttgggtcggaccttccaactgtggcttctgaagatagagatgctaataatggaaatgtgaaaaatgggagactcaagtcaatgccgaggtattttactcttccctagtccaatttatttttgtgtgggcatgtgaatgttgagttatcgattaaggatggctgttaagggtcaattgagctttgaattaaatttctcgagcttttcatttgcagacccaagcagataaacatgactgagggatctgcagacaaattttccacatccacgcggcttgctgattgcatgtcattcggccgaatcaatggatccagcagggttgcaagacacttatgtgtgaggtagcagaacagccaccttttcttttgtcatactactaaaacctaagtagttgacatttttttgatctgtttcagtgtcaagccgttaagcaacatgatccaatcaaatggaccttctgatgtgtcagctaaggatcccacttctgctgaaacagatcccacttctgttga

SEQ ID NO: 43882 - DNA, 960 bp, Oryza sativa
ctgtggtcacaaaatagatgctgcgagaatcagaccttaaccccataatcagttctttccctttttgtttctctctttttggatccgtaacttgagctgttatgcaaacactctattttatacaaagacacacaaatcttatatatattgctgaaaaaataaaactccaacgcccaccgagtgaatggccaaacacctccattccactctacctcccactccctcaccttccaatctaggctctatctacttagtccatccgttgcaaaatataacaatattttctctactcccttatctcaaccaaatcgcaatcacctcgatatcattctttttttcctactttcccatctcaatcagtcataattatttttattcaaagtcacatatttttttaatatgcatgagtatttttttctcttagaaaaatgtttatgttttgtgattaagaaagtagccttgtgtattagcaatgtgatgcctctgtcgtactatccctttccgatcttgaagtcgtcggttttctatgcgctgtgtgcagttgagaacagtagtgcagttgaactaaagtgaggatgatctggattcatattattttgacttgctaagaataatgaggtgattaaacaacaatggatgctgacaagaggatgctcgtcggcatttgctgcatttatctttccttatttcttttccccttcttgcttcttggcagcacgtgcattatacattcatatctgtcactagatgccaatcagaagcatcttggtttgggtttccatgttcactgctactactagcagtacaaaattgttattgtgcaaaagggcaaatagtggtcgaaccggaaacaaagcatatgttcgcgtttctaagttctgatcacgaagtattatatccatcatcaaatataagacttagctattccctttgttttaaaatattattataaatcagata

SEQ ID NO: 43883 - DNA, 1841 bp, Oryza sativa
atgatgatccctatataatttatgtgttagcattaactttgaggatcagcttaacagtacagttagccttgattagggtcatcactcatcactaacatatatgtattatgttaggtcttgacaaggagtagtttttctagaactccttgataagagtcactccgtccttaagaaaaaactaacctagatatagacatgcatattttttagtacaataaatccgaacataaatctgttaagattcattatactaggatacgtcacgtatttgtggctaaggtttatttttttgggacggaggaagtagttaattacatgtagcgtttaaaatttgtcttagaatatatatatatatatatatatatatatatatatatatatatatatatatatatatatatatatatatatatatttgattcttcaccaacttaattatctgactctaccaatcaaaagttcataataatcttttgtttaatttctctacttatttttatcttaactaatcacaaccatcctttatttaatttattctttccttaattaaaagacatcctctatttaatttcacgagtataaatcaagcgtaagcaaccgaccaatcatgtgctcaatgggagtcaactatggtcttagatcagcccactaattaaccggacaccacatcatcactcagatgaatgtattataaggccattcccaactcaatgaatagaattgtgttcatagcattaaataagctgccacataggataaaaaatgatgtgacaagtgaataaataagaaaagagaaggaaaccatgtcttgcatgagatatagtttccacacaacatccaagacatcatgtgagataagtagtattgaatttaagtatggaataatggtgtttgcattggaagagtagtgtatagtactagtttcttgatgatgtggagtttatagaaagtatgagtgtcttgggttgggaatggcctagatggttggcagatgcttattactactaactcctatcataattcgtagcttgtaagtaagtacctatgcttagttgtagccaaaataattgatgtacttatcaataacttgatgagttcatgttaaggaaatgcagctcgatccgatataaatttgtttactatatattgtgtcatcattggctacatgcatgcatgtgactgtacttggggttaactgttactatattaagttcctgagtacatgtgcatcaatgcatcgtcacttgatcagcatcaaagaggagcgacaatacggcatttcggagcacaaggacacaataagatcattttccatcactaaaagttaagatccaatttttttgcttctctttgttttttcaattgtcctgcctgcagcattccttccaattttatccgcgtgttttgacattattctcgtgttcaaaataagacatcatcagctaaatcattgagaaacgagtggttatatttttttttcttttgaacaagctaccaaacattggatgtttttgttagaaatatgaagaacaccttcatatatacacgccttgtcatacacaatcttggaaacacccgaaagttttccgactagattcataaggtagtgggcctagccagtctggattcgaagcctcaccccttctgtttatttgatattagattattctttaatatttgtgttttttttatcatacacaatctcaaaaacgtgtgaattttgcggtgtacgtatatatatttatataagacacgtatgccaggaatatccactatagtacggaatagggctagtagagacagttcagaactgccaattaataataacaaatttcgacctg

SEQ ID NO: 43884 - DNA, 2199 bp, Oryza sativa
ccaactaacaaatagagtattacttaaaaataaaaaaattgtgcatatactttcattagtattatacatatgtgtaaaatcttaaccttaaatttattatattttagtcgtaacaaaaaaaaaatctgacaaccttaaggctataaatccatcaatattttctttttcttttttactctataaaagataatttgaagaagagattttacacatagatgtaatactattgaaagtacgtatatatttttctagacttttttgtgatatttattatttgatatgcacggtgcgtagacacgagggtttgtgtgcatatggtaggtctaagatgctaagatgatattttcagcgcatcatccttgtaattcagccattcaggaaggaaggggcaacctgacgccattgatatgataatcagtgagtgcttgtttatttaccatttgaattggtggttttaagtgattcaaaggattttttttaaagagaagtgattaattaagggttgagtaaacggttgcacacttgcacgatcaaaatacaagctgaagggagatgattttcaattggttggttgcattacgaccaaagtaagaaagataatactagtaatgtataccggctttgacaaattatatactgagaggataattggaggagtattttgtattggtttttcctctctttttcccccttcccctgggtgttgcattggattcttacacctggattagattagcttcaatatataatgatttggataagcttacccgccagagtcaacaaattatcaatcgccgtatatttggattaccggttgttgcgatcatctcgttggacctgtaactacacacccatggagcccacatcgatctcaatcacctacccccgcaattgtctatgtgtaggtctaataaaataggcaaatgttcgcatacatttggcccagtcaatctacattttgcctaccacaaaaagttaacttaaaaaaaaactccaatatataaaagttattttacctatggagcttatatatacacacgcacctttgatatcaaaccattttatcaaaacattagagctcaaatcataactgaagtccgtattgaatctgatatatttagttttggtgcataaattaacttagcggaaaaagaataacgcgatgaagaaaaaggaaagagcaaattaaaaggtgttcagcgcaagttcgccgcatcgagtagatctttcgatttgtttgatccaactggagcagaacgctgcttgcccgaccggtccacctggcacatcaaacttagccacccgcgagcacgtacatcgcgcggacgacacgagctaaccttgaacaagtacccaactatctaaggttgtttttctgagagaatattgggagcccttccctcagtacacaaaacaaagcagcagattaacgtatcgtgaattaagtactccctccgtgttttttaatagatgacaccgttgactttttctcacatgtttgaccattcgtcttattcaaaaaaattatataattataatttattttgttatgggttgttttatcactcatagtattttaagtgtgatttatatcttatacatttgcataaaatttttgaataagacgaatgatcaaacatatgagaaaaagtcaacggcgtcatctattaaaaaacggaggtagtattaggtaaaaaaattaatattttttaaaaaataattttcctgtaggttttttaaagaaaagaagtaatgtttaatacttctcatattataagacttccttgcattgtctacattcatatatatgttaaatgaatctagacacacacatatatatatatatatataaaatgaatttagatatatatgtgtgtctatatattaattaatatatatatataaatatagataatgctataaagttttataatatgaaacggaggtggtagtactcaaaataaaataaaaggttgggacgatagatcgatccatcgagagcgcaacggcatgcagctggcagtggcaccaccaccgcccactgcatctgcaccggtccaccgcgccgcgcgcgcgctggaagtggcgccgccgatcggcctcactctcagctgcatcctgtcgccaccagcttgcgacgacgacgaaaatgattgcccgccgccgcgacagctctcgctcgctcgctcgatcgatcga

SEQ ID NO: 43885 - DNA, 518 bp, Oryza sativa
taagacacggacgcttatatatacacaaacacaactacccttctaagcactcatatacttccactgtaagaacatatgagtacctccaaaagttgatatatcttggaataatgaagttatcatagacgtctggttaccgatgagtaacgagtacgccatctatcactagaaaaatattagcataaatatgagcacatgcgttgtgttaagtcggagactcaaacttgagtgggtaatgtgtaggttccaaagaaagaactttcgatatatgattttctcataatactattttattcaatttttaactaattcatttggaaaatatataaatcagataatagtgccaagagaagaagaaagcataatagagatattgacattatcgtcaagtcaaaatgtcgttatgttaagacgtatatgcacgcacgtctcagtaaatgtttaacaaagtgagaaagcaaatatgctccattccacaagtgactaccacttttgattattggcaccaagactgatgg

SEQ ID NO: 43886 - DNA, 564 bp, Oryza sativa
gtgccgtgccgggcggcccacatggtctatagctgttcctggatttttgacaatctggcccttttagaaaaagcttaatgtatagatagaccgctgaaaggccttatccacgaaaacgagcttttaggagggtctatttacaaaataagttttctaaaaggggctagattgtcaaaaaccaaagtcttcccgttcccctcggcgtcgactcccccccaaactccgtctcctcgcgcgagttcgcccgccgcctgcgccgatctccatccggcgaggcgccgccgtccgcccggctgcttccgccggtaagcttccatcgtcctcttcctcatctctctctctacccacgcgctctttctgtttttctcccctcgaattcgcgtgaaccctagcttctgttctagatctgggaaggtttttttttctctcttagtttgcgttaaatttggtactaatattgtcacatgtttgatcctcccctccccgcccctgggagctaacgcgtacaggacagtttgctatcgaggggggaaaagttgggagaattaagtaataattccgtag

SEQ ID NO: 43887 - DNA, 647 bp, Oryza sativa
taatagatcacagcaagtcatatccctgatcgagttacatgtcatttactcaaagctaggccctgtttagatgggactaaagttttaagtcctatcacatcggatgtttggacattaattataaatattaaacgtagactattaataaaacccatccataatcttggactaattcacgagacgaatctattgagcctaattaatccatgattagcctatgtgatgctacagtaaacattctctaataatggattaattaggcttaaaaagtttatctcgcgaattagcttttatttatataattagttttgtaagtagtttatatttaatagtctaaattagtgtctaaatacaaggaccaaaattaagtcctgaatcccaacaccaccacgacagcaggattgaagaggagttgttttcgtcccagtccgacatcctggtcagcttctcgttacaagtctacggtatgaataaatacagtagtgtactacgaactccttttactgctaccactgcagcactcgctgggtatggccgtatgggtattggtacaccgtactacgcaagaattggtttgagaaacagggtatgcataactgcagcattagcatggaccaggaccaccagcattaactttgtttcctgtg

SEQ ID NO: 43888 - DNA, 608 bp, Oryza sativa
gatatgtttgaaaattaattataaatattaaacgtagactattaataaaacccatccatgatgtttgaaaattaattataaatattaaacgtagactattaataaaacccatccataatcttggactaatttgcgagacgaatctaatgagcctaattaatccatgattagcctatgtgatgctacagtaaacattctctaattatagattaattaggcttaaaaaatttgtctcgtgaattagcttttatttatgtaattagttttgtaaatagtctatatttaatactctaaattagtgtctaaagacatggactaaagttaagtccctagatgtaaacaccacctaagtcaccgaagctgagtccgcctgaacccgaccccgtgtatgaaagatcgtacgcctgggcccacaagcgctcggctcgaaacgccacgtcaccacgctgtgagatctcctcgggctcgaggagaagcccaatggggcaagacaaagtgggcctttggcctatttcccccaaagcacagacacgtggacagagagaagcttctacacaatctcgccgcgcttcactctcccagtctcccaagtctcaacgcactccggt

SEQ ID NO: 43889 - DNA, 1359 bp, Oryza sativa
ccacctacagaccaacctggaagttgcaactaatcataacaacagagcaaatatgtaaagttctccttcgcttaccggtctctgcagaggatacaaacagagggaagctcaagctctcgacaggagcctcgccatgagggcgagtttcatcttcttctccctccatagcttcttctgatgattgtgtgcatgttgtctggtcatcctgttcatctcttctagttgctcttactccaagcacaagctccaggtcttcttcatcgcccatgcatgttggtataagcaccggtgtaggcgcaatggtggccttcactggagctggagagtcccctagactaagctcaagttccatatcaaggagagagaggggtcatggagtgaggaggcaaagaggaagcaataagcaactatcatatatatagtggtgatgggccaatcatcagagattgaccagaataataaaataacagtatccaagatgactaagtaatcagaatatagttttagattactgtttatttaatgctagggaaggtgatcaatctaatcacaaataattggaatcaaaagttcatgtgccattagctcggtgattcttgaattattatatcagtgaaggtttgcttatttccaagaggattttccgcatggacattctatatttgagttgttccttcagtatatattctttctgattaacgaatgtaaataatattggagaaatatgaactctttatgtctcacagtagtttagtatttttcatatgcataaaaggtctttttattaccaaatcattgtacttcgttttaggcaattaaaacataccatttctttttgtagtcatagcttatatatagatgtctcaatatgcagaagttatataggaaatattaaagatttccaatggttgcgatagagccgtgtcaactgaccataatgtttcttgaaacagaaggaaattaggtggggaaaaaggagagattatttcctccagtacaacattttttaactttgaaagaaaaagcatggctgaaagcttccatctattcacagtttttgaattatcacttaattgtacagacagtgatactgagcataacaaaggtagaaattactttgtcataaaaattgcttcagaagttatccctcctcaaagattatttaataaaccagtggtataaaatgaatataaaataaaacaataatgcaataaagtctcattgaattaatcgtatatcaccaggtggtaagtaggaaagctgtggtaaactggtaatgtctagaatctgtatatgtcaaatctgaactggaatcatctatgaactgagttgagtggggcctatatctactgatataga

SEQ ID NO: 43890 - DNA, 2387 bp, Oryza sativa
acacaagcaaaaattccaatccttcttcgatttctaaccaaaattagctcacccaaaacagcaaaaatcccatccttcttccattattaaaccagattacactctactaaatgcagcatttttttcccttttcctttaacatgaaaatagcaaagtttttttttgggtagaaactaatgcggaaacagtgagctaagcatcacctaaccacacacgcacgagcagatacagcagaagagaacacctgcaccagtccacatcgaaacgcgatctcccgttcttaaaaaaaaaaaggcgatcttttcaccaactccagaatcccagatcgccatgaactccggaagaggagaaaaacaaatcttggcacgccaagtttttttcaagcagcccgaaacgccattggctatgattagaaagcttttcttttcaaactccaaatctcaaacgggtcgatctcaaaaaaaaagaaggattaatctcagattggtcaaagaccaggggagaatctaccaatgaccacccagagaccactttttttacccgaccaccgtaacaaggaaaccgcacggcgagatccgccgccgccaccggcgagagaggggaactgggagagggagagagacgcaccgatccgtgaagagcatgccgaggccgaagcagaatgcgcagagcagcagcatcctccaccgcgcggaggaccgcctgtccaccgcgccgcccttccccttcatcatcatcgccgccagccgagctccagcgccccccccccccccccccgggatcttggccgcctccaaatcgtcggaaccaaaaaaaaaaaaaaaccctgaccaccaacaagacgaagaacaagaagctccccccgttggcgcggcaaggcccaaacccgcgaggagatagagaagaagaacagggaggggtcagagattggcggtgagccgaccggagaagaggaagaggagagatgaggaggaggaggaagcagctgctggttttgctttggtttgcttggcttcgccgtctcaaacaaacgaaactatggagcgcgtgatggcctcctccttgtttttgcctttcctttttcctcacagcttttaaaaattattattcactattaacatttcagtttccttttcctctctttcttttctttttcttttgtttttgtctttctccttttgagctgtgctgctggtaagtacagtatatttcttctgttttccaactctgtttcttcctcccttttttttcttcaaaaatctcttccctcgaattcagtgggtgggtccatcatctagcaacccgggctcgtcgatcaatatgtaatactccctccgtttcacaatgtaagtcattctagcattttccatattcatatagttgttaatgaatctagatatataaatacgtctagattcattaacaactacatgaatgtgggaaatgctagaatgacttatattgtgaaacggagaaagtagtattttaatattgatataaaaatcgaaaatattatctaaaaaataagaactaaaaatagaattgtcgatttgtccggcctttaaaaaaattttcttggctttgcagctactttaattgtggcatgaaaaattcttcatttgaagtataaaagggagtatattaagaatgaatatacaaatgaagcaacattgcaatggttgtagaattaatacaaaatgtactttggtgtgctttggttggatacaaacccattagttgtttaatcatgtgatgttacgctgggctaaattattactattagccagagaggacgggagtacctgctgcttggttggattacctgggacagtgtgttgagttaggtcaccaatgcctctcttggatgtgaccacatgagctaattttgggtctccacatgttacaaaaccacattttgaaatttgaacagatgaccaaacataagaaaattcagtacaaacaagtaaaaaaaatatacagccaatttgatatgctggcattcagaattaaaatggataaacttaataactaggagtagtagcaaaaggggaataaaagaataatccaattagatgtgctggcgacattggagctagccaacacggttgggaatttcttttgccagtcaagccggagattcgatagtcaagacgcaagcaccactctgattaattaggaaacaatggttaagagaatcattagtgcatgctagttgttaggcaggaagaagaaccatggtccaaaagtccaaaccgccagcttagctcagctcagttacgtgcattcgtgcggcaacaccaacgtgccatgcacgatgagttggctggtagtgacattttacgcaattccgatggttggctggaaactcgtcgatacattgtatgaca

SEQ ID NO: 43891 - DNA, 3049 bp, Oryza sativa
gcttttagtataaatttacaaaatgtgaagtagtttgctagtgtaaatcatcaacatagctcaaattaatatatcgaaacaacccagcacagaattgaaacacgatgtgattgtccatgatacaagacaatacagtagagaaggcacagtgttcaatgaaaaaggacatggtattaaatcaataactataatgtatttactgaattttcctaaaaaaatttctcatgatcacatctgttcaaactgaatttggatattttattttttaaaaaaatgctctgcattgtaaaattagtgtcatactgaaaagcaacaaatagcgttcatgcaaagttgataaaacacaggcagtatacccaggaataatgttgcatgtcaattactatactgatctggtaggctggcagttgacatgtgctagcaaagaatctatcccgtgctatattttcatatggattcatggcatgaggttaggaattccaaagttctcatctgcacttcggcattcccacagaatcattagcaaccttcaaccaaataggatggcatgcttttactataaaaaattggatgtactcccaagtatttgaactgattggctggtgtgagtatttgatagacgacagataaggaagaccatataaaaagttccaagtgacaagcaaatttacaaaataaatgaatgacatcacattaatgataacaggcaaaagtaaccaaagagaactcttccttctaaataggaaaaaagtagtctatataaataaggagttagtgtaaaacattcttgccacatcaccaaaactactaagtgttaggacagatgaagcagagtagttgtgaagttcaaaatttaatatatctaccaacttaagaaaacatctaatggttttgacctgccagtttatagaaccttataactttcatatggaagagcaacataggaagctataggaagttggtgtatcacatagatcggacattaacagcattgtttgttacaagataatcagaattctgtgccttcattcggcattacattgacttttgagacactcagtatatctgtattggaattttggatgtacaactaactgaaagcatattttgaagctattgcatgaaaaagctcattataattggtagagattcccttggctaactaaatctcagaacaaagcacaggaactctaaactagcccttcaattagattgaagataaatatgaagcataattaaattttattaagtaaggggacccaagttccataagtataatttgcacttaatcaatagtagtaccatacaaaacatacacttgaacaattaacttccaaatggattatagtttttagtaggaataaaggcgctatggttcagcattagcacataaagttgattaattagaaaaactgtttagcttagcacatatatccaactgaaactatcgtccagttgtctgtttcatattttctagagttttacttttaaaaaaaaaacgactagagttttactttccatggtcactgggtttacgaaatctttgtagggcacgcaattgctttcttaaaccaaccagctcaccaaaagtcacatctgttcactgcttgttagctcaaattggccaaatcaagaataattgttgacgaaataattaattatcttaaagattctcaccagggcattatttcaactgattcaaaacagcatcaggagctattgccgtttactataatgtgacagtgagccattgcttatgcagctacaaattggtgtataatcccaaacactaataacaaatacaagaaaccgatcccatgtagttgattccttgattcactatgtagcaaattttctttctgtgatgcccctaaaacatattggtctccacagaacgaaaaggaaaaaagcgatcatatccgttgaagaatatgtcaattgcaaatgtacccagtatccatctcacagttgattctaacattaatagtcgcagcatcgcaggctgcaaacttatcttcatgggcgtcaagccatcaacaacttgagtcgctatagacgcaactgtgatagcccaattgcccaaagggataacaaccatcactccaaactcaaaggcttcattcctagaacagctaactgagtctggtttccaagtgaggttttaccactacacttctacctcgaaccctggactagtaagcatcgcgccgccgtccagcctccaggacggcctaggctacagtacgaagttgagaaccctagtgcctcgatggctagtccatggcagcatactcctctcagcctctcagcctctcaccctggccgctacaagtacaaaccccactctacactacaccaacccggtcggcggagagcgggcgccgggagacgctcgactcggagtcaaatttgaacctcatattggcgagcggaagcgtttaccaccgcgaggatgaatgcggaggaggctggccgtggccggccgccacgccggggatggccacggcggcggcggcggcggatcgatcatcggctcccggcgcccgggggaatccccgcacccagccctcaggcgcgccggccgccggccgccgggatgagacggagcaggtgttggtggccgcggcggcgcggcggggggcgaggcgaacggcggccgcgcgctcggtgggcgtgcgagtggggaagggaaggaaaatggaagagaatgttcgctttgcttgtgggagggggtagtgggccgaaagctggaggaggcccggcccaggaaaaattttgcattcgcatttggagagagtagagagatctacatcctatgaagcctttattattttgcatctaatttagctaacttttggtctgagatgcattcaaattctgaaatgtgtgtgtgcctacaagatttgaaggggggactacaaagtatttcgtcctcaccgtcactgcacacaggcaaattgccttgtagagcaattaaaatatattatattttattagggacttgtaatatttaaagtaaattttgtgatccaagttaaatcattggtag

SEQ ID NO: 43892 - DNA, 5020 bp, Oryza sativa
aaccataatacctgggattatgcatcacgtgtcaaaatccccatggttttgtgcaactttgaccataattaagtggggttttatgaaatttactcgttttttttttgcccctttactagaccagcttagcatatggataaataatataagatgatttcatggggttgtaattaaaggcctattatcataagaaatcttcttttctaaggacattacaataagttggtcatgacactgccatatcattatctatgctataaatacttgaaaagtatgcacaacctttgtactgttacaaaatattgaggcttctagccaatgttatcagcatatttaatccatcgtcacttcttttccatacatcgttgtacataaacacatcatagaaataatattatagagcttgtgtccctatttcatattggtgacattgattcatggtgtgagaggtcctatttgtatatataagtgtttcatagaaaacataatcaaataggccttactcatgaatcatgatagtcgtgtttaagtaaaggtgcattatgtgtctgataaccaaaaaagtacacaagccaacaaatctatgacatgtcattgttgccatgttctaattatgaaagaaggaagtaaaaatgacatagcaaacacaaccattgtcatcatgaattgactgccaaagtttataactaccctttacataacactgtttttttttgttatgttttgcttgtaataacctcttcattttcaaaagaataaatttcacaaaactataagtattttgtacaatttatcacgaactacagatttaagagcttgtttcacaaaactacagatgtaagaacttgtttcataaacttatagatttagtgtattcgtttatcaccgaactacacatttagtgtcttaatttatcacaaaactataggttttatgtctccattataaaacctatagctttgtgataatggagacaataaacctgcaattttgtgataaatgaagatattaaatttgtagttttgtgaaacaagttcttaaatatgtagttttgtgatatatgtgcaaagtacaagtagttttgtgataaacaaagacactgaatctgtagttttgtgaaacaagttcttataaatttgtagttttgtaatagatcgtataaagtatttgtagttttacaaaatttactcttttcaaaaatatattcttgcagtataggattcccgcatggttcaccaaccaaaagaccaaaggagaggtgtatgagggattgaggggagcattatgcaaatacactagtaagtgataattccataaaaaagctagaggttacttccaagcacactaaggccctgtttgtttcagcttaagattattgtaatctagatttatagaattagattactataagctggattataataagccgacatagaataagctactagctgtttgtttctctggattattatctgtttgttagttgttagtcacccaataatctaaaataagcacctttagagtggcttaccagattatagtaatctggcttatagattataataatctatcataataagctatttgtttatttcagcttactcataataatccagattataataattctaagctgaatcaaacagggcctaagtctctgaagattgttgttatgaaggtagggcttggcacgatgagtcgatgactagaaatagtagtggatgagctcaatatggttggacgacaagagaagagaactataggacggtgagaaggaggaatgaagaaaatggaaagggacaagaaggccacaatggtatatatcaaacacaatactatgttttaatatgttatttttacaattcagtttgtagattcttagtgcccttatttaaagagttaatttttagagtactataaattattttttcccttatctttgcttaccagtcttgacaaactaagttaaaataagaagtaaacataacacagaaatagggggaaaacgtatgtctagataagatccactttcacttcacccataaaaagggggaaatcaaattgcttagcattaccaataaaagcaatgtaatcataactattcaactcgatcaaccaaattgtccaaacacaaccaaaatggatacacatgaggactccggcttgcaaccgatgatgcaatcttagactaattaataatagcttttcgacacctaaaatccatacagagaattggtaacaattacatggaattcctaattacatatggtttctccccaaatcaattgagtgcatcagtgcaataggtagacaactcctataaccaccacaaatatatgcataatcttttaaaagttatctttttttttgtttgtgccccttttgaaacccaagcatcagtcacttcaattcaccaagttgatcttgagctatttctcaacagattcataggactatcgaccaaagaggaagtgttcctttgaaggagattggaggaggtggtgaccctagtatctattgcgtatgaattgtccgctatgtttagggaagccattgatgaccggtgaggatcgtagggtttaaggtggctactagtgaaaaggaggatgagaggaatatacaaaagtgaggagggagaggaagaagatgggcgatgacaagaaggttatagtagtatatcgactttgcttcttcttttttttttcagtttctagattttgagcaacattctttaaagtgacattttttatagtggcataaataaaaacattctctatctaccaatctttattcattcagttaatataaaaaataatattgaaaacaaggaagaacaactatctagataatacccactttcacttcaccaaccattaacaataataaaaaaaataaacatacaatatattatctacacagcaatatcatactaatttaatttgattagttaaatcgtaataagagaaaaataggcacaacacatacacaaccaccctgactctaagataaagttcatctagaagactaccggtagtaataacgcgtgagttttctattccaatgaaaaaaaaaggagaaggaaaaaccgtatctaactaagtatagccaccgtggtagccaagagcccccccacgacttaatcctataaaacccccgcgataataatccgcaacctagctccccccaccccctccctttttctctcttttctttttgttgttttctctctcgctcgctctcgcgttgcgcctgcgccccttccaccccgcagccgccggccgcttccaattcgactcctccccctcgccgccgcggaagccgccgggccgcgcgccgccgccgattccccggcggattcgagagactcgtccgccgatcagaggagaggagaggaggcacccgcctccaggagtagaggaggaggaggaggcggcgtgaatttgttttttttttcttttttggtgtgtgtgggtgtgtgaattgcggttcgtgtggttcgtgtctagtgggtgaggcaccccccctagggtttgagggcggcctcgctagggtttgggcccccccgcgcgaggggagggaggaggaggctgccctagcggaggaggaggtggaggtcgccccctggtgttgtggggaggaggaggcggctgaggcggaggtcggtgtggtgtggttgtggtgtcgcattgcggaggacgattgattgtgctggtgggcgctgattggatcggagggaggaggaggagccatccctctctccccgccgttgctaggtgggtagatggtgagaggcgccggctgccatggagcaggacttaccggcgctcaagccgcaatggctggtgcagggccaggtcaccaccacgggagccgccaacctctggaccgtagcttcgccccgcccaggcccaggtgagctccactggccttgccaattttgtgtttttttttcttttcctttgttgcacttgtgattgctagtatgctataaatgtgatatatatccccttttgggaattgctatgtgttatatactgtatagtggcatcaggatatcggtgtgaaaccggtgatagttgttgattcattccatagcaatcagacatgagtttagggttttttggtggttctgtattgagatgttcatgggagcaatcttctcttaatgtactctctaactcgtagttttggttgatatgattgaatttgttatgtagtttcataattgattattaggtgactgatatggaaaagttaagagtaatcaggtagatttcatctgtatctttttacaaccaatgtgtcctgtatcacgaaataatgcttattgtttgagtgctataaggtgtttctaggcacatgctctgttggtgtcactgaaatgtaacaaagcttaagatactactctcttcaaataactgtaaacatatagtgatattgttgaaaatcttatcatgcttgccacaacttatctacaagagagacatactttagttatatgcacaccaagcaagtgattactactcaatttatgacatgtttgcctctattaattatatacatgtcaatgtaataatatcaccgataacatttaacaaagttcatttggtgggcctagaaaaactgaagtgataagtatttgtaatctttataaaatgacatgacattttattttgaccatatggaatagagtacagagaagtttctttggctgtatcagttgatttattgtagtgcttagtttttttcccgataacaaacaccatgctttgcattgaggatgtttgtagagtacagagaagtttctttggctgtatcagttgatttattgtagtgcttagttttttcccgataacaaacaccatgctttgcattgaggatgtttgtgatgtttagtttccactgatatcactggatttatggtagtgcttagttttttttcctgataacaaacaccatgcttcgcattgaggatgtttatgctatttagtttccagtgatatcactggatttatggtag

SEQ ID NO: 43893 - DNA, 2164 bp, Oryza sativa
actgtgggaattattatagttataatctatttatatgggtttgatatatatatatatatatattaaatttgttaggggcaccatggtgcccgggctccatggccatccaccgtccaaatgctttaggatccgtgcaacgctaatagaggatactatcacatataagcgggtcttacccgataagagttgcatgcatatactttccttagaacatgcatgcgggtatttccatttttgctgtataccgtgcatgtatttccaaatttgcgccctctaatcacgcctacacattttgattagcactttccattttctatatcacatttccataaatacaacgtttgcatgcagatacttacctattgaaacatgattctgtttttgaaaattgacgccattccactaattgcgattattgccatctattttcaaggttatattccattttcaagatacacatataaccggctacagtagtccttttttttatttttcttggccacactgtttcacggtcgaagagctagctatccacctcgtcttcactgagttacctcgccgggattgctcgccccgccgtgaagagggccgacgtccgtggttttcgtcactgacgacgttcgtcacgatcctcttgctggaaaccagacctcctcaaccatttttgtcaagccattacagcgccggacgtccatgtgccttttcactgccgtcgctggttgttcgtgagattcggaacatgcattattcaccagcgagctacattacgtgaaaggtatggtcctcagtttttatcactcacacagtttacattcacatgcagtccctgttatgtatagatgatttgccatttctctttcttttatctactaactgagcacatgatgaatcacctggaacctaaattttagattttttgttgaaatgcagttcaatttagattgtcttaggtatataacgcgtgtgtttgaatatcttggtttgcacatccaatgaacagaatttagctaggtagtgaaacagcagcgatgtcccttgtacatgatcatctcacttctggtgctctctctggttctcgccaacaaccattcgtgttccaggtatgtgctccaacttatctgtacttatatgtacttctcatatatgttgacatcttcatagtattctgaaatttatattaatattgccagtagctatggacaagatgaatggtgcccggagcgagaagatcaatcagtcgctgcagaagtatgatcacccacgctgcagttggcacatattatttggcacgaggtcagaactacacaacttatgcacgcacatatacttaaaatccatggtatagaaaacatatacttggattaatttatattaagttaaatataccgtcagtccaagtaaagcgagttttaaattctaataatatacagtacacagatttaaaatttcgatatacttaagttttacatccggacataacgactaaaatatccttggttccaaatttaattagattccaaatttactatatacaacaatattaaatgacaataataaaatataccgtgtacacaaattgtaaatttagatacacttagattcctaatataattaaattaacgtaactttgtacaagttagctaagtatatagaaaatataatgcgtgtatacatagccattacattattacataaatgagtaaacattttctgaattttgaaagtgcaaaacgcactaatttagctaggtgtacataagcataccatatatatgattccatatatacttatattccaactgcaacgttcatggtgtattataatatctcggtttccatatataattattttcaaaataaccgcgggataacatttccatatatactacatcgtatacgtatactcaggttttcatataccctaataaagttaaatttgagttgttttgttgatagatatatgtatgaatcgaattattataactaggtatatactcacaatttaaaatttttaaaaaatttgagtaattttgtgcatttgaaaccatggtgccccatatgagtgtcctatatatatatatatatatatatacatacatatatacatacatacatatacatacatacatatatatatacatacatatatatatatatatatatat

SEQ ID NO: 43894 - DNA, 671 bp, Oryza sativa
ctaacaatcatctttcattcatctccgcaaaaaaaaaaaacaatcatcacatttaaacatcatgcaaacatgctatatttttatagtttttagaatttaagagcttttcaaaaacaaacatgttaaattatcatccaataaaattcacataatatttaaatgtatatctttattatgttttatgatatcctatatacttatatagtttaagtatatagttcattcacttagtgcttaaatgattaatctatggtccaaattatctttctcttttttttcctctaattaagtcatatcacatcaattgtttttagcctttagatgattaatctacggtccaaactatctccctacttttcttcctccataaagtcataccaccttactttttacgtttaaatcaccattctacatactatataaatttaaattatcataaaccacattaatttacttaatctgatgttatttagttatcttgcacattattttttttattgttatcatactaaatttccgcagcaatgcgcggggtttcacctagttatcacaattgtttagccaaccgcatgcgaccaaacgcttgtgtaaatgttgcattaaagcaaccacatttgaaaatgtatttcaacattttttttaaaaaaaaagatttcttatactatgaatct

SEQ ID NO: 43895 - DNA, 704 bp, Oryza sativa
attcctgcagccccgggatgtggtggatttgcttccttaccagcattttcgacatataaaccgaagggtgatatatcttgagggtgatcgaaatctgtcgaacaaactgtcgcaaatcagtaaacatataatgatgtagtataattaatatctggtactttttagaaatttttcttgcattcgacgacatttgtgtttacatatgcatttcaaacatatcatcctctcgtatgtctttgggttcattgaagcaaaaacaaattgctgtaatggattgggttgatatgttggtttgcaagtcagcagtattttgatgaagactactaagcggattaaattaatgttatattttaatccctgatgcattcataagtccactagttagttaaactattcccatttcgcatcagcttttcaatatctctttttcctgtacgaactgggtggacttcctcgcagaatagaactttgtactaggtaatatgttactgtcaaatgtccggcacactagagttctgcagaagtttttcgtttatcgtgcaaagcacgtcttgatatgccatgtactagcatgatatgaataaacttgctttgtttggagtcaattagtgttttttttaataaaaattcttcaacactacatagtttttgcattgctggtgtagataaaattagcttgaggtctttgctacagctttcacctt

SEQ ID NO: 43896 - DNA, 863 bp, Oryza sativa
tgatttattaaagtgaacaaggaaccaaatcatacagccgctagctctgttatcattgcagtcaggtgacgtaggcaaccacttttgactatttcacgaaagctttgtgcaaatttagatttgcaaatatcacccgaatatactgcatgatacttctgccaccattttttatgattaaacccgatcgatttttttaattacattcatgttgtcccaagtttacagcacaagttcttcacttcttccccttgctagcagattgaaattaaaacgttgccctcccaatgagttcttccaatatgaattcaataagatcaagatttaccattgatctttagtttttcaaacgtgcgttaaaagtgtgtggtatacttcttctgtgtaataaaaaatactttaaaagttagtataaaactaaaattcgatctttgaatgacatagaaccaaatttatcatttacttttgttgtgttaagcttgtgttttaaaaggataaagttcatttttttactagatatatatttgaaagagtgatttgtactttgaaatatctttattaccgaagttttactttggatcaccctccctcgaatcttttcacgttggaccagatattcttattatttttcactttagactacccaaactcttttcgcgagcatatcaacggcctcaagcacatcggcatcctcataccgatgatctcccctatttacatatactcacatatttgatgaatgagagattggatatggctagataagaatgttatgttggtacaaaatgaaaaatggcaaaaatagctaattgatggaccatagtaaaattcaataataaaaggtggcataaagtataaatcacact

SEQ ID NO: 43897 - DNA, 2371 bp, Oryza sativa
tccttaatcaagtatcagcaaactcgataaatcccattttataacgactatgttctcttatacagtaatatctcaaaatgataataactaaacatttaaataatacacatgcattaggaggaaaaaaaaaggctaagcagcattttaataaccatcagcattcgaggtccggacagaaatatctatgttctgctcggctataagttgtagccactgaattcagatacataataatgccaatatttgcttacagcagcacaactgccttgccattcgcttccccctaatcaatccatcaacaatctctcataccaatcaacaaatcgaacaaagagactgagtccttgtctccaaatctcagctaaaccccacttcctctccttagtcacccctaacgaatcacaatcacaaacaattctaattccaccacacagaagcgctcgctccaatggtattctagctcgaattccccgctcccaaccgttaaaatcctagcaaaatcccaaactcttataaccctgcgactcgatcaggaacagctacaccagaaactcaacaaatcgcgaacgcattgctgaacaactcgacgcatcacatcatcaatcgcgcgggaacgcactccgaaccgaagttcagggagagagagagagagagagagagagagagagagagagagagagagagagagagagagctcacggggacgaggatgggaggagggcggggagcgaggcgggggagtcggtggggacggggagggagcccacccggaggtagcgcgccggcggcggcgcggcgacctccagcctccccacgcactgcagctcgctcgacgcgtccatcgccgccgtagccgtacccctcgccgccgccgccgccgccgccgatcgccgcggttttttctcgggcgtttggatgctttggctaatggcctagcggtttggtgggcccgcgaattccctcggagtcagtggatggtcgcttcctgtggttgcatcgccatcgatcggtcggagccggacgcggacgggacgggataaaaaagacgaatctgattttttttttcttaggaagtctgatttttagggtgtattttattttctataagaaaagaaataatttttgatcaatgcttgtagaatattttttcgacaaacaggggctcttaaaatgagcacactcaactctataagcgcacatcctattataatatgactactattcgttcaaaacaaaattataatatgactatctctgaaaattagaccgacatatcttaaaattaatgaagtcattacaacttaaaaattaggctggcatatcttgagattaatgaagacaataaatgtctcgttattgatgggtatatcgtctattattgaaagaaatacaagcacacgtaccaagtttaggactttaatcccggtggacaggtttcaccgtaaagaatttaaccagttaagttacgcttacttcacaattcttttataatattatgttatcaaataccaacaacagttataaactatgtaatattacgtggaaaacactttggcataagaatttatttaatgatgtagtttttccgtaattgatttacttgcacttcgactaaacattagtcaaaatttacataattcgacattttttttaaaaaaagggaaccatttggtgtaatgccgaaatcaaccggattagttctagatttaattaaatgcacaactaattagtccgaaatcaaccggattaccaacgaagctaatgtatgcacatttaattgaagtacagaaagtaattaaatgcacggtgatgtagtcatttcttcccacaactaattagtcctagatttcctagaagtgatgtctttgggtgacggaggaggtattggatctgtgtggaaagcttctggtctagtttttgtagctacaacttttctcaaaactaaaagctctctaaataaatctagcttttcattcagattctaaaaagttagttataaaacctagaaattgagtacatgtcagaaaattcttataagttggccatcaaccaactgcttacccattacgtgggacaaagaaaatattagggtggatgtgttatcaggtgtaggattgcgatgtgttgtgcgtgtacattttccatgtaatcatgaaaaaaatatttttaaggatagaggtgtaatagcatgcttgatttaaagttacaacattttttttggtgtgttttgatacgtttacttgtgaagttaccaaactttggtacattatgtatgtctagagcatgtttagtttgttgcatcattaaattttgcaaggttaaaaatgttagcaaactaaacatgccttagtagttaataagccctaaaaca

SEQ ID NO: 43898 - DNA, 656 bp, Oryza sativa
tacgtcgtttggtaggttcttgtgattcttcattgtctataaattgagaaaaaaatagttaatgatgaatttattcaacacggtacaataatatgtagatcttccattttattatattttcattacctaattatagaaaagagattaaacaacgtcacacatatatactaaattgtcaattgtcagccccgttggcagacaacacaactgtagctaaaagagaagttggatttccaatcaagatataccatgtcactcacacttcagtgtatcaatgatgtcacatagcatgtatataaactgctaacccattgtgtattcatgtgcataaattagttggctcacaatgagacattattactcttaaaatatttaagattgtggtggtgatggttggtgacttggttctacttttacatcccaccgcagcgtgtgaggcctttatcctcactttgtttcctgatttctcacccacccaacttatatgtattatcaaaaactcacatatactcaggaaagtcacacaatgtgtcctgataaaaaacacaaactctggtcgcaacacatcagcacatagcgattaataagcaatttcaatcaccagcttctatcaagtaaaaaatggtagactaacatatgggttgggctgcaggaat

SEQ ID NO: 43899 - DNA, 1035 bp, Oryza sativa
cctctttgcccggcactagaatcagctgaccacatcatccagagatgcaaaaatgctaatagcctatgggaaaaaatgaacctcctgcacctggcaaaccattctgaatcgtcctcagcttttctgcaagcagtcgttgacagaaatcattcaaatagaggaattgaacctatctggtttgcagcttgtgcatacacgttgtggaaagcacgcaacaacatgatttttgagagacaaaatgacaacttgtaattcatcattcaacaaatctcagacacactaaagctctggagcatgagagccaatgaagcaaccaaagaacgaattctctcctggtgtgcagggctgtagttgtgactttactttgtatatacccttgtaattccagccccctgttttgtttcttttcttttcttttatctattttaattttcccttttcccctttcttaatacccctctacccccttgctataacctgtaacttgtaaacctcatttctcttaatgaaatgactataaggtagaacatgctctaccttcttgcgtcaaaaaaatacaagtatacaacagcctgataatcccgatggcacgtactactaccgtagtaccgttcaccgttgtgcgagctactagcttctccgtggaatctatggcacccaaaattctcggtttgtcattgactctgatacgattagtaatgttacagactgcataagttcgcttatccttgagaccttgacccaagcatcatgttctttcctcagctgtttgatgactgaatctgagaagaggtttcatgcgaacacatgtcaccgtcgaatctgaagctgttctccccatccgaacagagaaattccgctccgtgcgtgtcgagcaccgtccggttacggcttgattgtcaacttgagggaaggggattgagagtttacatgagagaattgatggtgagattaagatgggaatttgatttttcatcccagtctcttgtttggtagaggtggtggaaattgatagggagtttagttggagattag

SEQ ID NO: 43900 - DNA, 2133 bp, Oryza sativa
tatatatatatatatatatacatacatatatacatacatacatatacatacatacatatatatatacatacatatatatatatatatatagtaatttgtttggtgctccatggtgcccgggcaccattgttgaaattgagtatatacccaattcaaatgagtatgaaactttttcaattacttaggtattaacattaactactttactaactagtttaaagcaagtttgaactgaatttgaacttgtttttgttagattttgattctaggtatatagcatccatacatataattagttaggtatgtaatcatggattgtgaaataaagttaaatttgagttgttttgttgataagtataggtatgaatcaaattattataactaggtatatactcacaatttgaaaattttgaaaaatttgagtgattttgtgcattagataccatggtgcccgggcaccatggtgccccatatgagtgtcctatatatatatatatatgtatatatatatatatatatatatatatatatatatatatgtggggatcattttacgatagggtcccaggctcccagctgcgaccgtctgctcagtaggtcccgcggtcccgccacgcgccactcgtcttgaccgcgcgctcggctgccgggccagcgcgccgaaccgccaatcaagcaggaggcgcggcgcgggcctttggctgcctccctttcccaagccgaaacgcacgattcgcgcccgcgcgcgcgcgcgtgccccctgtgcgtgttggtttcaggttttggcctctttctgcccggggaatgtgggatccgccgcgtcgccctgcgctcgacagacaccgaccccggtgggggcatggaggccatgtccatatgagcaacgcaacgtcgtggcctcgtgggtagggcaagggttggcttccgttttcccgccggcgcttttcggtgttcttctgatttttggccgccgtgcggtgcgatcgccaaatgtctcggactcttggttgattctgttgtgttgtccaaccacaagtgccaactgacaactgccaaagcccggttgttgtcacaacgtaacgtaccaatacggcgggcgcgggtaggacgtggatatgagttacccacaatttttgccatctcttctacggatgagttcgtgcttaccaagcaaacagtgtgtgatggattacttaaatccgtggaactattctactggttttttaaccttagctttcaaggtcgatccgcccccaatgaacaaggcgggcgcacgcaagtccgagcgagaagaagctctgatgtaaacgctcgtcactatcgagtttttcggctttcggccgcgggatcttgcgttgcttcgttcgggaggtaaataaataacggccccaaacgaccagtccatggaaaattctgggccgctactgacagcataaggcgggccaatatagctgggtactatcaggctgtcaccgttgtggcccaagcccaacattttattcagccttttgtccttttcgaaacgtacgttgcgtagaggaaccaatccggcgactgggcggccatttccgtccgccaccatattggaaattggatgatttcttctgtcgtgatatacaaagagtacttcctccgtcaaaaacaaacatactttttgttcaaatctagatatatagaagttgatttgttttgttttaagatagagagtatctttattacttcaaaaaagaaatgttgaagtctagtcggtgttgtatttacgtgtgggcggacgagagagtgccacgaatattcttcgtcctggagaggccggccatcgacgacgtctgagcttttgagaatcttatccgagcaagcaaaacgacgtgagtagcaaccggcatcgcactcgattcccttggctcacgtacgcagcacgctgcccgccacgtattccacgctgcacgcacagcccccgaccacccccgagccgtgaacgtgaacgcgatcaccacccgggcggccggccgcctcatccgctcgtctcgtatatggacaaaatcgcagaaacaccaaaagcgaacaggggaaaaaaaaacggggagtcgagtcgcttcgccgcgcggatgagacgcgcgctgaccaccacccgac

SEQ ID NO: 43901 - DNA, 775 bp, Oryza sativa
tatatctcatcggtattttccataagtcataggataaagggtatgacttatccataaccctgacataatgaattttcttataggtcatacataatttatatacataaaaaacaattatatattctatagccattaaagctcatcccttgcgtgttactccctccgtcccaaaaaaatacaaaccctgggtttccgtgtccaattttgactgtccgtcttatatgtaatttttttataattcgtattttcattgttgttagatgataaaacatgattaatattttattcgtgacttgtctttttaattttttttcataattttttcaaataagacggacggtcaaacgttggacacggaaaccagggtttgttttttttttacggagggagtacgcgctaaaataataggaagtacatgtacaatgatatttattttttccctcttttctagtgtattgcaaattaatggtgaagtggatattttcttataccaagattagcataagtagatccgaggatgattttaagttaaaacgaatacttaaaggacaaatacggacaaaatgaatcctaagaactaaattaagctttaggtaaacttaagagactaaatcgagtattcgttcaaaggaaacctgactcgatctttatgccatcaccctatatggatatattctcttatcattctgaatgggtattaacactattactgctaatctagatatgtagcttcgtcaaccatcacggcacaaaaatatcttcatatttgctcaca

SEQ ID NO: 43902 - DNA, 1583 bp, Oryza sativa
gcccaaacgctctcgccgtccacgcacgcgcagccaaggaggacgactcggcgagccgcgcgagggtggcgccgccgccgtggacgggttgctcggcgcggtacgtccccgtgccgagcaagaagacggggaggtacaccgccgtcatggccaagcacgcggcgaacccgagtgcggctcacgctgtcctcgacgtagctgagcgcgctgttggagatggcgtagccgcaggaattgaagaagtggtaccagttgaagtaggagctccgcgacgcgcgcgcgccggggtcgctcggcggcgcgaactggtcggcgccgaaggcctccgagcacgggttgtggaagccctgcgccagcgcaaggaggtagagcgcggcgtggaagaaggcgaggcgggcggttgatggcggcgccgccgccgcctccgccggcggggagcaggcggtggctgcgtcatggcagctcaccgggtgtgggtgcgttgctcgcgtcactgatgagatcgtcagcatccccaagctctgtaatttttcttaaggatcaaaggttaaatgtaaagcaacatcgaagaaagagaatgtgtttgctccctcaaatcatttctattcggattccctgtaatatgatatatatcacattcgacacttgctagcaagatcatagatgagcttcgtttgtgggaaatggcaggtgccaagggagtgaagtatattatgttaagagattaggcttttgttttttagggagtgcaggcaggaagagttcctccgggaacgcccccactgtcttctgttatgtacagtttctctcacttcttctataatataaaaccagctcgctgggttcttttaatatatatatatgtatatatatatatatatatatatatatatatatatatatatatatatatatatatatatatatatatgtatgtatgtatatatatatatatgtgtgtatatatatatatgtatgtgtgtatatatatatatgtatgtgtgtatatatatatatatgtatgtatatatatatatatatatgtatgtatatatatgtatgtatgtatgtatatatatatatatatatgtatatatatatgtatatatatgtatataggatactcatatggggcaccatggtgcccgggcaccatggtttcaaatgcacaaaattactcaaatttttcaaaatttttaaattgtgagtatttacctagttataagaattcgattcatacatatatctatcaacaaaataactcaaatttaactttatttcacaattcatgattacatacctaactaattatatgtatggatgctatatacctagaatcaaaatctaacaaaaacaagttcaaattcagttcaaacttgctttgaactagttagtaaagtagttaatgttaatacctaaataattgaaaaagtttcatactcatttgaattagttatatactcaatttcaacaatggtgcccgggcaccatggagcaccaaacaaatttactatatatatatatgtatatatatatatatatatgtatatatatatatatatgtatatatgtatatatatata

SEQ ID NO: 43903 - DNA, 959 bp, Oryza sativa
agagaactacgaaaacatatctaaatgccaatcataaaggagacatatctaaatggcaatcgttgtctttgaaaaaaaattggtaatcagtgtagagtgtcaaacgataagaagatatatctaaatggcaaccactttatcttttttatgaaagctgtatacaaatttagttttgcaaatatcaccaaaatatcatgcatgatactcctacatccagtttttccccttttggcgaattcaactttttttagtcacatcactatcccaagtttctagcctatagtacttttctagtatttcttcctgttgctaataaattaaaaacatcgtgttggtggcaaggttcaccaaactgtttagaggtggagttaccattacctcaaggtttaacggttaccacgagatataccattgatataccattaaaaaactgagaatgttaccgcacggtttataaaccctggttggtggtgaatgcttccaatagaaatttaaagtaagagattaatttacagttattcttgtctcttcgagcatgtgctaatttggtgaatttttttatatatttgagaaaatattatatgtcactgaaccaactttcacaatatttatatgatgttaaaaaattgaagggctcaaactcattttggccctaattccaaaatgtcccatattgcaatgcaacacaattgaaactatagccatgtttagatcccatctcaaaatgtttcgccctgtcacatcgaacgtttgaacacctgcatgaagtattaaatataggctaaaaaataactaattgcagattgcaactaatttacaagacgaatcttttaagcctaattactctatgatttgacaatgtggtgctacagactatagtaacatttgctaatgacggattaattaggctgaataaattcgtctcgccgtttattgacgaatctgtaattagttttttc

SEQ ID NO: 43904 - DNA, 699 bp, Oryza sativa
tttggaattaaaaaacaatattaaaagccaagtctaaagtctatataggaatatatataatttacaaataactaaaatttgatattaaaaataattaataactaacacgtataaaaaatataatatgataattcagaaataaaaataaataatattagaagaagagcatagagtctatatagaaatacaatttacggaaaatttgaaattaaaaaaagaaatattaaaagacgagtctagagtccatataggaatatatatatatatatatatatatatatatatatatataatttacaaataactaaaatttgatattaaaaataattaataactaacacatatataaaatatatgaatattacacattagtagttttgtaaagttattgcaaaatttaaaattatgttatcattttaatatatttgaataatataatgagaaaacatatatgctattatatgtgagaaaatataatgatgctaccgcgcaatctgcgcgggccaccatgctagttttaatagtatagcccactactggctccgattcatctatagttcatctaatagccaattcatacaatagttacttactatactattaatatatggtcccatttgtcatacacatattgcgttttagagtccgtactgcagctggctacatatttgtagcccgatgctcttcgggctgcaggaa

SEQ ID NO: 43905 - DNA, 654 bp, Oryza sativa
tcctgcagccctggtaataacaaataagtaaactctgcagactgttgaagctactgacctgaaaccaccacctgtgcgatgggatgaagacagtggtaggaggcctcatgataataacaacaggaggccttatgaaaacagcaacaggtacactatctaccttttgtgttattttgtcaatccttgcaacgtcattgaaaatcctaaccttctggtgaaattgtttaggcaaaacccagctggagcaatatctggccgccaacttggggaagctgcccaccgacttgtggtgaacagcttgaatgctcggagtggcggacaatacaataccccatcgatgccatatcaaaccataatgaatggcatgccttatccaaatgggattccaccaaggatggagcagcctgctcctggctggcatgttcctggtgatctaccaaatggtcaggtaccaccagcttatgcatcatcatcaggtcattatcagaacgataggtctgggccttctcagtatggacgagataaccatggaaggtacccatatgcaagagacaaccaccatgattcaagagaagggttccaccataccatcagagcggtggaaactcgtatcaatcacattctgctccatcagcaggtcctggacggtatgcg

SEQ ID NO: 43906 - DNA, 2420 bp, Oryza sativa
taagagagttctaaaaaaaaaagaacacgggatgaaaatggtaaacacatatgaagatttacatataactgttactccctccgtttcacaatgtaagtcattttaacatttttcacattcatatctgtctagattcattaacatcaatataaatataaaaaatgctaaaatgacttatattgtgaaacagaagaagtatatattatttagactgcctttgacatcaattgaaatgatttaattttgagaggaaagaaagagccgtgtgctacggtctggcggctgggatgaccaagggggcccacaaggcagccactcagccacgcacgcacagtgtcagctatcacctgagcagctgatcagttcgtgaaacaactgctgatttttttggaagaaggtgaaaataaaatcctatcataaggtcctgggattagtactgtctactgattaatctagcgagatgtgatacattacactcctctctagctgtatgatcaagtttgttctgtggctgtgcatggtgctcatgcttcctctacaactggcgctgctgctgattagttctgctggagtttattggcgcggtggctactggctagctggctgccggatactgccaaggtctgtaagatttatgcagacacaccggctcaacctttgcatattaattggcagacaccccaagtaaaagttttatttgttggggttaaaactgaacctcgtagttgctttcaacgactagggattaacaagtggagtgggggggggggggggaattcggatataggccgggtagttatctcgaattctcgctatgagcgcgattcaaattgtaagtttgtaagcatgatttttttgaatttcaaccagtatgaaatagatctagagaaataaatttgaacagatgcgtacaatttttggctgccagaaaaaataagtctcgagtatagccaagctttgagtctaactacatatggtgattggactaagaaatcaacttttttttcaactggtggcaagttgtagatctagaaatttttagaacatgacagaatcatcgacatcatcagttaccaatgacacattgttttcaattattagcgtgagccggtgagcccaaggtaaatagacttggtctccaccagtggtggctctagccacctagtgttaacagaaagtggatcagtcaccagctccatgcctctgatgttaatccagactagttttcttactaattttatttttcaagatctagacctagcttcataacaaaatgatcaaacatggatataataagatagatctaagatgaaactgctaacttgcttctatcttgagaattcagagaaaaaaggtttggatatatatttacctcatagtaatggcccggatgacggaggtcgcatgaagtggtatatctaggcgagcagatgttttggggaagacatgctcatgataatggaaaaggaagaggggccactgacggatgaacgaggatgggaatgattgaggtggcctggggcgcattttataggacggaacgaatgttctagaccaaccaaatgacgtcatgaataataaaaaggaaaaactttttgtcactctactttagtatcaaaaattgcaaaatgtgccgacaataataaatgatttatataattaacttgatcatgtaatatcgtttcattttatttatggcaattttattgtttttaatccttcgggtcttccagtaaataaataacacatattgaaagttaaacccttggttgaaaagaaaaaagaaaagaggaacacaattaccaaccaactaaagtatgcttaataaaggtaggccacaggtgaaacagttttgcacatcaccaaggacctaagtgaaaaatgctaatgcatgctcctaagattaaaataggtgacatggaaaatccagtgagcaggaaaaaaaaagaaacttttgtaattaaacttttccttttgaaatttaatatagcgtaggggcctccctacagtttcaccgtaaagggaatattttctacaagctttataattgacgtggtgatgcagaaatgcctcacgcaacatggaagcgccatgatctgacagccttgtacttcatgaaagccttgggtgattttgtttggatcactccttatgtattgtattgtagtagtagccagccacttttgctgttgtatcttgttttttccctaacaaatttcactttctgtttgtatcttgtactacaagatgattaatacatccatagtgaacagaaagtgaaagatacaaaccgcctcaaatttgtcaacagataaaaaggaacctttttcatgtggccaactcaaagaggttaatgtatctttaaactttaccccacattttctgtagtgtgtctaatattcttatttctttcgctacgt

SEQ ID NO: 43907 - DNA, 507 bp, Oryza sativa
aaagcagttccaatcgatgcaaagtaactaggtgtcagccaaagtaactaattaacaatgaacaagtaagtatgtagggttaactatactgaactgaaaataaatgccatatatatatagttgcatggaatggaagatgaatatatatatatatatatatatatatatatatatatatatatatatatatatatatatatatatagagagagagagagagagagagagagagagagagagagatctctaaagagagatgagtaataattggatcactaggagatgtggcacgtggtggggtggaagtggtggggattatgattattagtgggggggggggcgttggaaggagaagggtggaggcggagcctgagggggcactctagcttgatgttggggccgggcagcctgataatggcggacggcgtgagctcgatctcggtcttggcggccatggtgacgtggatggagtagatgccctcggtgtcctcccggcggaaggcggcg

SEQ ID NO: 43908 - DNA, 636 bp, Oryza sativa
aaaaaaacacaaggggccaataagatatgcgaagaatcgttattaacatacttttcagggaaaatgaacggagatggcaactttgagtgcatcccacagaatattcatgagtggtgatctatatgtttgtcattttggtttactccctctgttttttaatatatgacaccgttgactttttgagatatgtttgactattcattttattccaaaaaaatatgtaattatcatatattttattgtgacttaatttattgtgaaatgttctttaagcatcacttaatatatatatatatatttgcacaaaaaatttgaataagacaaatgatcaaacgtttgtcaaaaagtcaattgcgtcatatattaaaaaacggatgtagtatttagtaaggtttctcaactttttgtactgagcatttttatcagttatgtcaagcgatgattgagatttgcaagccataaatgctgacgtcagatatgcaatatacaaaaaggaagaaacaggaaagaaaagggttgcatacaaatttgccaggagccaagtttttgtagataatgatgacatccccagcctgaagaccatgtgtcttcagaaattcacctgccaatatgaatacgaaatatcaatctaccatg

SEQ ID NO: 43909 - DNA, 876 bp, Oryza sativa
tatgtagtcagctcagcacaaggtaaaaataattaacaagacgagatcccctggtcgatcctggtcaggttgcattgaggaatcaagctagcatgcaggcatgtgcggttggtgttttgtgatggtgtaggtgctgtgcgataatcatctatataaatcagagcgaaattactctctgctaccgatagaaagtacgtacgtactgtagcggagcttatataattaagctcacatattgtacaagaagcttgactaaagatgtaattaatgaagcgtgttcagttcatatatagatgcatggtcatgtcgttggtttgcacaaggttaattaagctgtatcccgtataccttacatagatgaaatgagccattaagagagaaagaaaactagttgatgctaataatatgaaggaacacgcaactagcagtatgatttcatcaagctagggctgcataagcattgttaagctcgcaagtgggaagaagaagaagaagaagaagaagaagaagaagaagaagaagccatgaattaagtaggtgaggtaggtaggtgaagctagctagcttttgtttggagtggaagatatattgtggaagtgcagcagcacgggggtgttgcacctggggcatctgggctgctttgtgttggacacggccagcatcacgtacatgaggcaccgtgggcacccagccaccaccatcgccgccgccgccgcctgctgatcttccgcctccgacgacacgcacgaccttgccggcgactccatggcttaattcccacctgcactgcaccacaagcttactcgatcgatcgatcgatctgtgtcttaattctagctagtgtggtggcctcgctgatctcataagctagcacta

SEQ ID NO: 43910 - DNA, 798 bp, Oryza sativa
ccaacctagcgagcttatagtaacttactagtacacagttgtcactctcatcaaagagacggatcatcgatgtgcggcacattctacggttcatgttatgggaattaattagatttcacccacagctgtcacacaagatagataattgttgaacaccgcacaagaaataccagatttttagcgatctagacgtccactattttcttcatcatactccaggagttaattctttctggacaaaacagaaaatatgccatatcggtcgatttgacatgatcaggtcttcaaggtggcagacaatgtgaatatgcatccaaccaacacggcaatcagtagaactacaaacgccattagaatgctgaaactgctgccatgcgtcttcctcgagccattctgtccagagttcatctctttcagaccaggctctgaaggcgcttttgacaaagctccagggaccacatcccaaaacgatcctagcgtcgcagccgatgcactttctggttctacgatcgaatagtttcccatatctgcttcaagcgacatcacttccttgcagcgctccatggcatcctgcacatgtcacacataagggtgtcaagcagccaaaccaaaccttatcatttattctagccgatcatggatatgttagacaaactaacataccacaaaccaaccagcgaacaacatatagaatactacttcctccatcccataatataagggattatgtaatttttggtaaaaattaaggaagtagtgaaatgacgtgatagtacaaaaggtgagggctgcaggaat

SEQ ID NO: 43911 - DNA, 671 bp, Oryza sativa
aaacccaaaacaaggagcaacacagttaaaaagaaaggatctaactaaaagaaaaaaaacggctgaagcttcatttacccttttttttctacgtccctttttggtatagcatgtttcatattattaacatatgtattagtaagaaatggcttcagttctccaaactatgatagaaatattaattttgtacttgctagtagttgttaccgtataatagccggataagaccaggcacaattttaacatacaacaatggatactacttaggacaacaaatcaacagctatgcatttagtgggggtgtcctacagacatgtgattatagccttaccattctgtccatttggagaagtgtattcaggctgccttcatttacaggtactggcaagggaggcatctgacccatgataccaggcgtctcactcattctacaacatttttttttataaacaaattagctaacttagacagggagcgatgaaatatgacggtaaaatgttccggcttgatcatgcttacttctgcatctcactgcattaatatacgaaaatactatgcgttcgatgttagatacgattttaaatttttaatacgatcaaacaccacgctgtccacgtggagcggtggaaccaaattttctattggaccagaacttgcagccattaataacg

SEQ ID NO: 43912 - DNA, 672 bp, Oryza sativa
cactgtatatggtcatttgccctcttgaaattaagccacaaacccagagcagagctaggtagctaggtccattatattggagatgaagcgtagggtagtacaacctttgtgaagtgcatactgtttcttgtccttggaaggataacacaaacatgtacagtaactacaatatgtctggtgctagctagctcttaccaattatatgtgatgagcaggcagtatagcaagaaacaattctgcaattgagcaatgctattgctaagctagctagctgcatgttccacaacagtggatcttagcaagtgacgcataatattaattgttgtgcagtatgtgtggtccttatgaaacagttttccttctctgaattaactattattgcctagctagttaccttgagatttttacgcaagttcatttggagcattcatatatactccacatatttgctccgtgtagctagagtcctaaattatactcgtacgcagcagtgtgcgagatatgatctccaggattgaactgcacctagcaatgcttgctgttcccgaatagtacgtactgtagatacaggcgacaggatctgcaggatatcatgcgtgccacagcccacagtgaagatgtcggcagctgcatcaggctttggaacgattaagaaatccgagatgatcacat

SEQ ID NO: 43913 - DNA, 7197 bp, Oryza sativa
atctatcgttcgatcgctacatgtcatgcatccccatgtggggtgcctagctctctcggtgttctttctttctttctttctgttttgcacgctcgtacgtactccatgctttcttcctgtaataagcagacacattattcagcattcagctgcgtgattaatttgactgcatcatgcagggctctctctcttttgttacctacctatgtgagatctactagcactagtagttcacaattgccgaaatttcccaatcgatctttctgcactttagatgtgcctaattaattaaacagatacttcagaggctggttattatttgtttttcaggtgaaagtaattagtaccagcacgagtagctagctagatagaggtgggagaaacactattttttttaaaaaaaaacatttttcgtggagaacaaccctttttattactagcggattaaacatatatacgcttgtaaaaatgctaccgctgtgggcggaaagactgtgccatgctgataggactgttatcgagtcctataaacatattctatcctctcatctccgttcaaatacaacttaaagtccctatactccaacttccttttaattgaaattcaggtgggaagctctccccaggatgaccagtctaaaaaaacagagttgctagaaatatggcgccatatgctatagtcgattttttttcaaccacttacacagtagttatacctcatttacaccccacttacatatataattagtatgtaattttcgaatttacatatgcaattttagtacttacatatgtaattttgagacttacattgtaaatacactaaaattacatatgtaatttatggacttacaatataaatacatgccgactattttttaatgaaaaatatggcgccacaaatatagctacacaaaaaaaaaattgtattgaagggatttccggtcacggatcaccggcgagaatcaatttttacaccaaactgcctaggaaaaaacgtttcttgctgatgggcttcctagggcatagtttgcgaaaacatatatccgttggcggcataaaaaccgtcagcgatcatcatcgatggttgcaggcaatctgtttccgtcaacgaaactaaaagtgaaatcataagtaatttcccattttgtagtagtgaaatcataaaggtggaattaaaagtgtgagtgattgagggagtgtggcattagctcgcaaaagtggatatatatacatagagagagagatggcggcaggtaagctgtcaaattcagacaagtccatttcatcaacatcaactttttgtttctctgttttaaattctttttggagaaaaaagaaaaaggaacaggacgatcgagaaaaagataggaggcaatcgaagccagggataagtggatcacaattaacttaggcacgcagaggccgatagatcacctggcttcttgtcagtctcaatttcgatctgaatattgttttgctccagtaactgcacgtatacatgtttagttacaaatatgtagcatatcacgtcatttctcatttcctcacatgcatgtgccggcctgcctgccggttagctctagtagcaggggctggctaacgggcgatcgatctccatccacccctatacacttctctccccccttcttcctcccttcttctcttcctactacactataattttttttacaaaaataaaaaacaaagtatatgtatatatatatatatatatacacacacacacacacacacacacacacacacacacatgaatcgggtatgtaaacttttgacttataaactttgggtctataaactttagatgtataaactttagatgtatagaaatactatatataaaaaatatttgaattcaaattcaaatttgaatcggatatataaacttttgatttataaactttgggtctttaaactttagatgtgtaaacttgagatgtacaaactttaagtgcataaatttactaaaatagaaaagtaatatggtgccaaaaaagaaaccaggtaaagggaggggatccgaatttgatcgctccttagcaatctcgctagtagcgtgccatccaccgatggatgcatgttcactaatccagcactcaattagatcaattagcttgattagttaacaaaacaattaagggttgaatcaaagtaagaggcaaaataattatgtttcctgcgtcgatacgatccacgtccaccactacttagaaaaagagttttttctggcggtcaaaattgatttttttgcttgcgggtagccagcaaaggctagtgaaaaatgcattttcactggtacgcagccggctgccagcgaaaatcaagtttcgtaggcagcatgttaatacaaccgctcacaaaactaccatcttcactggcaacaatttaagaggaccaccagtgaaaatattttttgggggtaaaaacaattgaaaatcagtgcgcgctggctaccatggccgcatgcaccgcccaccgcctagccccaccatggaggctcccttgccaccactgagccctattcacagttggtcaccgccgccaccggtcgccaccgcggagcctgtagaggagaggctcccttgcaccacctcactctactgagcccagctatcgccaccagatcaagcgcctgcaggagtcctcgccgctggtccgcctcctgcgcgagtcgccgccgccacctagggatgcaagcggggcgggcaagcgggtttttttaacccgcttatcccacttctggttcattttttcttctaaattttgtactaccatatgaaaaataaactagcaagcgggtttttatgcgggtagcgggactacccacttgcatccctaccgccaccccctcccctttgcctccgccgagcccgaagagaagagactcccctatgccaccccactctgccgagcccggccacctccctaatgccttactgccacggccgccgccctctaggtccgcgctcgcgagggagagctcggccggccggcggtggttccgccgctccgtggcccgctgacgctggatttggagcccttcgtcgcctccgtaacgccctaccggagccatcaccgtcatggccgccaccctccggatctgagcccgcgagggagagctcgggcagccgacggtggatgtacctctccgtggcccgctgacgccagatccgcggaggtcgatcacgtgccgtcaccatcgccgccgagcggtgtcaccgccaagccccgccatgcaccgccgattcttccccacgcgttacctccgagtcccctccttgtcgccgccgccgccagtggggatggaggaggagattggtgcgacgacttacggtgggtaaggaaggcgccactggtgagggaggaagagagggaggcggtgggttgggggatctggagaagaggaggcgatgggtgggtggatgtggagatccggtgggtggtggtggtttttaatgtcgtaaatttgttttagtgtgccgatgtttttcactagcggacctatttagccgcctctggtaaaagtaattatcatttattttacggtgacttaatttatcgtcaaatgatttttaagcatgatttatttttatatttacataacatattgaatcagaagaatggttaagcgtttgtaaaaaaattaatggcaccatatattaaaaaagggagatagtagctcgtgaagcatgctggttggtggcagatcatgctcgatcgcccccatcgtcgcccagcttatattcctcgtccaaactaaagaaacaattaagctccatcggagacggtcattatctatagagtaaagtgcacgggcggtctctaaacttgtgtgggtgtgtcaactaggtcctttaattctcaaaataaatttttgggtccctcaacttgtctcgggtgtcatataggtccaaaagggtttcaacccgctccgtgtgctgacatggcatgccatgttggcgcctacgtgttagtagaacccatatgtcagccacatatagaaaaaaaaggacatattttttctcctatcttttttcatttatttttcaaaaattaaaacatcattttcttctctctttttaaattttatttttttctacatgattgacatgtggatcccactgacacataagagttactgtggcttgccacattatctcatagagtgggttagagcccgtttagacctatatgacacatgacgagtttggggacccaaaaatacattttgagagtttagagatctagatgacaacatatatatatataaacttaggctaataaaatcttgctactaaaaatatcatgcactctttagttttaaatatctaaagagtaattcctttttaggatattgctggcctcggccgcccgatgcagagaaaaaaatcggtagacctcacactactatacgtatgcaatattgtatctagccactagtttattctctttccctctttcacactttaaatattttatctcctaaactacttatccaatctacaatccgatcacaccgttgtattcattgtaattaaatttttactacaaaatattatatgattatattccgataaaagagaaacatgtgtttgaaaccgttaaattaaactcaatattttatatgtgatagcggcacgtttcaacccgtgtttccgatgtgtttcacaaaattgatgcaactacatgcctctattatgtcttctctcttcattccatccatccatgcattcatgtatttaatgatcttaaaaaaattctcctaaattacttattcgatctacgatccgatcccaccgttgtatttattgtaattaaatctttacaataagaatcacatgattatatcctgatgaagaaaaatgtttcaatctgttgaccctcgatatttcatacgcgcgtgatagagacatgttttaatgtgtgtgctttccttgtgtatcacaaaaaatttgaatgtttgaatggttgatttttttcaccatatatgacctaacatttttagaacggtcaaatgaaatgtttgaccggtaagaaaaatcaaacacccaatttggaacattggtctggtaagaaaaaccgaacactcgatttggagtttgctcttttttttcaagctattattaattgttccatcaagaataggaaagctccatggaagtcatttaggccctgtttagtttctaaaaagtttttcccaaaaacatcacatcgaatctttggacacatgcatgaatcattaaatatagataaaaacaaaaactaattacacagttagggggagacgaatttttttagcctaattagtccataattagccataagtgctatagtaacccacatgtcctaatgacggattaattaggctcaaaagattcgtctcgcggtttccaggcgagttatgaaattagttttttcattcgtgtccgaaaaatccttccgatatccggtcaaacgtccgatgtgacacccaaaatttttcatttctcgcgaactaaacggggccttaggtccgtgcattgcagccacagacgtgcatatcacctcgtccgacccggctttaacatagctagcgagtactacctttatttatttacaactagttaattattaattattactgtgtgatcctctagctgtagctaacccgcgcgccgctccgagagataagataaacccgcgagtagtgagagtcgacgatagatggcgccaacgctgccgtcgtggtggttgctcttcctcctgctcctcggagttggcgccaccgcggcggccagaggcagcaagaagctgactcccccggtgtcgacggcgtacgagtggccggagcggttccacgcggtggtggtgtcgatcaacctgaccaaccacgaccgcggcggcgggcggctgcagctaatcgagatctactacgactggccgcatggccgcgaccttaacatcgtcagggaccagctctccggcgatccaccgctgtacaacgtggagtgggtgaatggcacctcctacctcttcgacaccgccgcctccagctgccgcaccttccagttccccgtcggcatcctgcctcgatcgggcgtgacaccgtggacgccgacgtcgccactggccgccccgtccgctggatattcaacggcaatacgcggcatgtgctcgtgttcgaagccggtgtaatcctccaagtggcaggcgccgccgtactgcttcctcaacctcaataatctcgtcgctcgatcgatctcgctgcctcatgattatattaactgtgatcaggttcgcatgcatatatattggaccagctgatgattatatccacccatcgatcaattcatgccaaagtcgatcaatatatcctgtgcacgcgcgtacaacttactgagtatatatgttgtatatatagtttcctctctgctaccaattaattcatccgtattttaatgtatgacgccgtttaaccattcgttttatttaatttttttttaaaatatgaaaatatttatgtcatgcttaaagaacatttgatgatgaattaagtcacaataaaataaatgataatacaataaaatttttgaataagacgaatgttcaaacgttggacgaaaagttaacggcatcatacattacaatatggaggtagtaattaattaactgtgacataccatagtcaatacatatatattctgtgctaaacaacactaatataccaacctgtacttacttgcacagttatattttttttctcctgctatatttaatgaaattaacattctctactctggtcgtaaaaaaaaatataatacaacaccttattaactactcctttcctaaaaaaatattaactactccctccgtcatattatataacaatctagtatcagatacgacatgtcagtactacaaacctgaacactatgttgctatattttagaatggatgtaagttgctggctatttaatttgtttaagccagcctccatgggaagggaaagggaagggatgatggggacatgatgcaatttcaggcacaacacaacaacactcatatcaatcgataggatatagtaccttatttttataatattggataaaacacaacataacactataaatctgaatagtgtgtgttccattaaattttagtttgttgtattttaggaagatgatgagggagaatata

SEQ ID NO: 43914 - DNA, 2358 bp, Oryza sativa
aatctacgtttaatactcctaaatagcaagattccggagggctatttaatagcccgaaggatccaaacaagaccaatgagatagtactaagttactttctccgtcttaaaatattaaaagaaaatatgatcggatgggatatttcttaatattatggatctggataggaaatgacgcattcaattctaggtttatatattttgagatggagaaattaaagtattgtatggcagaaacagaaagcgaaaagagcaggacgaggcgtgagcttatggagaggggactgaaaaaacgagaagcaggatgtctatatatcaagtagtaaagcactggttttttagtgttatcgtaaattagtatactttgagaaatgaacttcacaacagatagctttcgaacaaatgctttaagcaatacggtacaatttttatttcgaatcatattttatacaacccgtgataaagttttggggggaaaagaaggctggaaagaaccctctattatctccatgtgcttatatttgtggctgtctctgtctgaaaaagagaaaagaaagaaaagaagaaagggagcggtacatgaacatgtacttgtcaggtgaagtgaggtaattaagcggcaaagagaaaaaaaggtaattaagcggcaaagataaaaaaagaaaaaagaaaaggcagcagtgagcagaggatgagagccagaggaacaggcagatacacacactgcagagtgcagagtcgcctctagcattcttcttcttgttgtattactttgtttttcatgtgactgatactttcttttaatttttttcaaaccagattggtaacgacatgtggatcttatttgtgtttttatttttaattttgagtaattttttaaaaatagagatatttagatgaaactatcacaaaattacaaatttaatgacatgtatcacagaactacaaatttagcatcaaatttttcatgaaactgcatattcaagacatcatatcgtatcataaaactatagaattagtgataaagttattaaagaactaattttagagtttagatccatgcatggtactattatctctactattataaaaattgaagatgtttttgccggtattttgatacgtgatccgtgtatgagtcagattttaagttcgtttgcttttggaaatatatatccgtatttgagtcagtttttaagataattgtttttggtaatacagaagaaatcatataagaaatctgtttttaaaaaaaactcacatgcaacttgagacgatcggactcctaagtgtagctcatgatatatatatatatatatatatatatatatatatatatatatatatatatatatatatatatattcaagtagactccacagtgaattttatctaactaaaccacgtaacaataataaaattaaaatagacttcaccagttgcaacgcactggcattttttcttgtttatttaaatttgtaaaagctgtaggtttatgataatattgatgttaaatatgatatcttaaatctgataatattttctgtgaatgacaaatgggtctcacacatattttttaattctaataccacctaagcgtcacgtcaacaccacgtggaacgaagactatcctccaaaataatctagagagtcaaattacaccggttttaatagttgagggttgatatatccggtactatggttcaggatacgaatcaaattcgtttattagttaagggagtaaaagtgaacgtattccacttcatatatatgaatgcatggtctctgctagctaagctgctaattattaattgggccatgattttatacgtgtgctaggcccaacgcacgcacgtttgcttcattgagcgagctggacatactgttggagttatgaagctgcactgtgacctaattaacctacgtcgccttcccagctcgtacctgtatgtacgttctaattaagctactgtactactactagtcattactactgtcaacaaattaactaaagtcattcgtatatttactttattttgccttagctaatgtaactgcaaacgatttactactgtgttaattttccttgagaaaaatactaccgtgttcgtcataattaagtagctgtaattaatactgcatacagctacttaattacgtaggatagatatgtatggattgatccataggagactgcctctatacgtatatatgttcatacatgtcgatcgatgatgtagatggttgatactattaatttggatggattcaacgtacgtaattgaccagacgaagacgactagatcaatctacccttgactttgtctcctacgctctcttttgaccgtctccctaattc

SEQ ID NO: 43915 - DNA, 841 bp, Oryza sativa
tttttttttccctaacagcctattttaaaaaactctttttcctaacagttgaatagaaccaaatagaagctcactccaagagaatgcaaatgattgaaaccaaaaggggagagtgtgtgagagagaaaatgatgaaccagaaatattcgttcagctctccagctagcagacaacaggaataaacaggattcctgatttcctcatgattccctgttatttaatacatgttgtattgttaaacttaaactaatggtttcgtctacagaggttgtttccggacacagttgttagttgtttatagtatgcactataaaaaaatatttttttacagacaccctaacttttaaaacaagctaaaatgtgacatttatgtaaaaagatttgaggtgtccagtaaaaacccgtttgcgaatgaaaataaggttattttcaaacgcggacaaatttttccactcaaccggccgaacatccttctatctcttttattttcttctcttctttattcctctactttactttacttcaattgtagatccgtcgaaatggtaaagagaggggcggatccggcgacctctccccctaccgtgaggatgtagaggtctctccacctctctcgcatacggatctgctggcggtggcaacaggaggggcatatccagtggtagcctcttccccctcccacatagacggcaacagcggaaggatactcccgagctagggtttctaggatctttttggaatttttttttgccgaaaattctttacgtagtcgggcagcataccatggaaaaattcctattttttagacacctgaggctatgcgattgctacacctgcctat

SEQ ID NO: 43916 - DNA, 673 bp, Oryza sativa
acccttccagttttcatcatcctccataacacataatctaactaccgtaatggatgctaaccagattttgcctagagtggttaagagcagtgatgaattggaaaccagaaacagcaatgttgaatttcactctgagacagttcgactctccctgagtcgaagcaaggccatgacagtcgtgctactgtgagtaacacactacacttaacatgctgttgtatctgatttactacacaaatttctatcttgcatttaatctacattaggcaagtacatagcataagtaatggagcaagtatctatcaattactcaatgccgatatagtcatttgagcagaagggcaaatgaagcagcaattccttactagtttagtaattcaagtagcttgtaaagatgattagccaaaacactgatgcagtacacaggcacatacttctgtcataattagcaacttcatttcctttgtgttcatgggagtgtgcttttatgccagaaactactcaactcgggagaataccaagtcattctgcgcaaggagctgacaaagagtgatgttggaaatgttggaagaattgtgctacccaaggtgtgttccgtatttctgtctcttggaagttctctagtatcattctgtgagaactttcatgtggtctaaactatgcttcataatgt

SEQ ID NO: 43917 - DNA, 712 bp, Oryza sativa
cctgcccccccttccgtttctagccaagcgcttctcttctcttcttctatccatcagtcagtcatagcagaagatgatgaactacactacacagtacacagtacacagtacacacacaggttttgcattttatttctggaatcatcaatcatagcaagcacagcagcagccgctagcatagcataaataatgcatcaaagattttccttaattttctccaaacaggacaacataagaggaaacaagacattacgatgctttaatttcatcatcgatcaatataccaaaacatacaagtgatcaataacagacaaacaaacattcagtcattcttctcttctactatcctttaatgccaaaattactcatcctatactcttctagtctagtgtagtctaataaagtcaactagtagcaaatgaactcttctcaagaaagaaagaaagatcccaactcttctcaagaaagaaagtgcatatgtcacttgacaccaacggacgccatgagatcctcgtactcagccttgtcatcctccgtcttcctttttcttcctcctccacctccaggtcctcctgacattactgcaccactcggcacaaatggatcgtatattggcttctgttgtgcttgtgccaacacatgaaacggccgttgtgcttcaactgccgctggcgggagagggaaagctccaacaaacccccttgtccctgcc

SEQ ID NO: 43918 - DNA, 1337 bp, Oryza sativa
  unsure (1)..(1337): unsure at all n locations
taatttactaaagttggtacagtctctaagttaacaatttttggtagcttgggacatgtataacntaagctatttgtgatacgccctgtagtttaggtgtgtgtaattaccctataaaaaattttggtgtatttttgcaagcttcatcacatatatgaatggtaaaatttaattatatatgaccctaaaattagctctttgctaatggacactccattttatttttaaaacgacatcattaaattatggtaatttattccttggatatcatggacaacaaaatataatgtccttttgagatgataaaataatttattttgcccttgtaatattctcttaactaaaattggatgttgatgttgctctcctctaactttgttgttccaatatagcaccagattattaataaggcgtctattgacaaacatgcatcgagcatatgatgcacatgttatacacatatcaaaagtgcaaactagctatctccatgcaaagcaccaaatagtgacttatgtacaagtttccagtgcagaatttcatacaaaaggattatccgaaaactttttgtagaaacttttttataagaaacttaccgcatgggtttttagaaataaactcgctattaaacatagaaaaagtcttcctctaggaaaactgtccatcaaaaagttcccacagaaaaatatttataggaagataaaaaaattatatagaagattaaaaaaacactttctgtaaccttcttatgaacatgggaaattttatgactctctgaaaaaactgccgcaagttttctgagtagaaaattttcaaatgtaactatagtatagtactatactataactacattataacttgtataagaatactaaaaatcatgtaacttcatatctaagttaattatagtgtaattatactataattacaatgtagttacactaaatttacccaaaaacttgcaataattttttagcagtttctaaaacaataatttgcaaggaaacattatgttgaaaaacctatataatgtaaatttgttcaaattttatgtatattcaaaaccatgttaaaacattgagttgtcatctctaagcccattatcgtacagtgtgcacaatcataatcctaatccatgttataaaagaagatgttaaaaatattaaaacattcataccacgcaaccacagtattttacgtgttgtatatcctctttcccttttaaaccaagtagtgattggtagcctctcatattggaactaggtgaaaccccgcgcattgctgcgggaatttagtaggataacaataaaaaaatgtgtaagatagggggatccactagt

SEQ ID NO: 43919 - DNA, 620 bp, Oryza sativa
gattttaattttttttatatggactgactgttcaagcagaggtcaaatttagctggtgtctctctctgttgggttgatttgtcttgtgggggcatgacaaccacttggtttgttggttgtctctagccatcatctttggtccctttttctcaaccaaaccattagagcaaaatctttttcttaattttcaaggaccttgcgaaaaggatatttgatctcaattgtgcgtggaatcttaactcaaattctcattttatgctaaacaacccacattagggtcaccattgaagagaaggtttagtttcattagttttctatcatatttctgttagacgcaatgcataaatctctaattgtacgtgtaacagttctagcaaacaaacataaaaattggaagaatagaagaatggcactacactaaaatggccttcaccgttccaagataaggcagcatgtttaatttgtttccagtagtttcttccattataagctctacagtagcttcagttttgcacgaatctatcaattcaatttccacgttgtcgagaataagtttttctcttacaggcaaaaaagggaaaacaaataccaggcagccccaaaaaagaaactcaagatga

SEQ ID NO: 43920 - DNA, 698 bp, Oryza sativa
aaacatgtatttttcgtgtttgtatattatctttcccttttcaacttggtagcagtcagtctcacatgttggaattctctgtcattcatatatctagtagtcgcggagaaagaaagaggtattaaaacatgtgccccactcaactgcacaaactagtattttcagtgtggtataatattatctttttgttttcaacttgttgaggttgatagtcttatgcattggaattctatgtcattcttatctatagtagtcgcgcaaaaagaaaaaaaaagtattaaagcgtgtaccccactcaaccgtgcaaactagtctttcccttttcaacctggttgcggtcggtatcctcgtacgttggaattgcttgtcattcttatctctctggttgcgttgaaaaaaaaaagtatttaagcgtgtgtcccacttaactacacaaattttgtatttttttttcatgttgtgtatcctctttcttaacttggtagcgggtatactcacacgttagaattctccaacattatatttctctggtagctgaaaaaaagaaaaaaaaagtactaaagcgtgtcccccattcaaccgcataaatttttattacttggtgaaaccatgtgcgttactgcgggagtttagtatgattgcaataagtagaaataatgtgtaaatataagcttggatacgttatatggtttataata

SEQ ID NO: 43921 - DNA, 2495 bp, Oryza sativa
acttgatcgatgccatgaaggcggacgggggcgtgatggggatagggctgtcacagccaccgacctccactccaggccccgcatgggcctctccgcatggcaccgccgcctagtcaactacggaagagcaaagactagcaaatgcgtaccacaccgtttttcactatatgtagccatgctttgatatgtcatgtgggtaaaagtgctaaatagtaaaatcatatctttagagaataaaataagagcaactctaataaggtatttgaattattgtcaaatctaatacagaaaaattgtggaacggtgtcccgtcaatacaggataaattaaatgagtggatcaatcttatcccttccctttctcttctctatccaaaccttcctcaccgccttcgcgttcgggcaagccagcgaggtagacttggtggcggcgatggtgctgcagcagcagtacgccgtggcgggggagcactggccgcggaaggcagcggaggtcaacacaagctgggactcgtgcatcagggagtaggtatccctagccaactcctcctcgccgaccatcctctcctcgacggccacaccgaagccgccgcattgttcgtcagcggcgcactggcgcagagcgccttgtactacagcggcagcgccggcgctgccttggagcccaagcaagaggtggacatggcagttgcgcccttctcctaggcacgcccggtcaagcggagctatcatgctcctcgccggagtgtgtgcaggtatatcgtgaaatgcaacctccacagtcgatacttgtaagtaccatgtccgatactggtatctttggtatcatggctgatacctaggtatcagaccccggtacttgtgggtatcatggcctcaaggttgtcatgcagacgacgctcgaagctatcgtgcttgccatcccatcgcttctgctcgctagtgttatgttcagatacggcacgactgatctggtacctcgagggtataatgcctagtacctaggtaccagctagtattcatggtaccaggtgcatggtatcagatactaggtacctataggtatcaggtggtacctgatacctgatacctatggtaccacaggtaccatgtcaaagatgtgggaaggggagcatgccgtcaccgcttggttgaccgccagccacatgtcattgcctcctcttttgttctcccttcctcagttcctctcctcaacgtatctctcctcttatttgttgttgatgtcggtgggggcaaaaaggtgaggggtcgccgctagcatgggaacaagaaaaacgggggaattagattcataatgtattccgttacaacaggatcctgttgtgtagttgccctcatctaatagtaataaaatagttaaatttcctaagatgaactgctcgagcgaatagtgaccatcacgttttctccatcttgctttggcccaaagtgacgagcaaacgaaggaaagaatgaagggaagcctctccagaagcagtaagtagtattagcatctcctgtaaagaccatttacggtagtattttgttcctattcaagtttcggcatagccgtaatactttgtttctagaagcagcagataattacaagttttctttcttatgtttcaaccatgttagaatgcatatatttcaactaaaaaataatttatttactattagagtcgcggaatttttctcgtgtcccaaatggacatgagattgcatgctccctccattttcaagtagctatcaattctgactttaccatgaatttaactaattactctaaaatggttagactaaattaatggagtaatacaatttaagaatttatcatcctttcaagacttcgcaaatatttcgtaaaaatgatgagttgtcaaatttcgaactgaataattatttaaaaagagaagggactacaaagatcggcccttaatctaaaatcaaattttgttcgtttcaatgataacctctttatagtgagcttattgaaacagtgtagcaaaatttacaaaaaggagagagtgaggccgaagtttcaccaaacaacaatttgcagaaatcaaaatgtaatggagctgctctgctcttgtcatcaccgggtgtacgtgcagctgtggttgggccattgccgttgcttgcattgccgggaagcctttgatgcttttacaaccacctatcccctccttccaagcttgtgccccaagtgacaaaagcaaggcagacaaaattttttatgcaaaattatattatatattgtgtattattattacaacatgttttggtgatcctttttagcttggcttgatttaatttgttgattagatgtgatgttatgtccctttgttaggtcgatgcaacagccaacagctctccggcatatgatgcatctgacaacaggttgatgtgttgcacttgtacagtgtgcctcggctgattggtcatcttgagtttcttttttggggctgccttgtatttgttttcccttttttg

SEQ ID NO: 43922 - DNA, 1391 bp, Oryza sativa
tcagcagcgagaggagttctggcgttcccgaggtctttagagagaactggttgagagacccccgtcatcccaaccaggttttcacaatacacacacagcgcgcaataatcaatatatttacctgcgcctcggtaaatattacaatcgccctgctcggcgtaaatttgcctcctacgcgaggacttaaagaagaaccattgtacagaggtaccacctttgctagataacttactttgcaaggtctgtccccattctagaattgcggtcatactcgttcgttcttcacatgtacttggcaatcttatgtcggttggaacagtactagccacccggaaatcaaccatttctaccgtactgttccaatctaagttcattatgttttatgcaatctaactaggcatgactaagcaaaatctagcatatatctggtttgctatgttcaggttatgcatttaaaatcatgtatgactaatgcatagaatagagatatagaatatagggcatttatgctcaaaggagaggaataataacttgccttgctccaacgcaaacaaatccgagataggcaacctgattatccgatcctcgaaacatcacaggttgccatccaaaagataatagactctactaagaaagacgaagaactaaattcaataaaagccataaaataacaagaaaacgataaatggttaggagggatagggtttggttgtgtgctagtcgatgctagagcataacgactaggtttggtatcttctctagctggtgtcaacagacaacataacggctagagggataggaggtttgtatgggtttagtggggcggaagtgttactctgacaaccgtgagtggcggcggagcggctaggatcacacagagcccgagagctaactgtgcggcgtgctgtggatgtcgagggaatagtgaagctccgaccgttgtacgcatcaaggcgtggggtgccaggagcagcacttcgaccttgggtttgggctttgccgggctttataaccaacggttcgacgttggggatagaaaaccacgaacgtccccatggaaggcataaagttccaaccggcggctttttagtggctaaaagggtaatttgggacaaaagaaaatatttgaaaaggcaatataaattcaaacgatatttgaataaattcaaataaaattataaaatagcaaatttggtgtcaaaagatagggtttgaatttagataaatttaggtccaagttttatcggaatcggatctatggtttggaaatatgggcttctaaagattgggttttgaattaaatctagaaaatatgaaaatgtactgttcatggacccacatgtcagtacctgctcttttccttttctctctctccttctcgtcttcttctt

SEQ ID NO: 43923 - DNA, 644 bp, Oryza sativa
actagtggatccccctgctttgtatcagttccgttattatgggcggtcgctaaccaagtcacaacccccaccaccaccaccaccaccaccaccttgaagcagaagctgcacaccgtttagatcacgcaaaaattgaaagtttggttgaaattggaacgatgtgatgaaaaaattagaaatttatgtgtgtaaaaaagtttcgatgtaatggaaaaattaaaagtttgaaaaaaaagtttagaactaaacaaggcccaagtcgccggatctcactggagccgaatgggttcagtttcgaaggagctgacaacaatggcattacggctactccatcgaagtacgcccttgacaggcaagtacaacgttaaacattccttcattagccatccaatggcttttgtcctgctattgcaaattcgcgaccatgcgacgccccgtacggatggacatgctgattctgcccaaagttctgcgattctgcagtctcagatctactacatgttaccccttaaaaaaaagtggattaagtcttggatattcatgtcacgcttttcaaactattaaacggcacgttttctgtgaaaattttctatatgaaaattgttctaaaattttctatcagaataatccatttttcaagttcg

SEQ ID NO: 43924 - DNA, 708 bp, Oryza sativa
cattagttattttttaaaagaaaaaaacaaaaggttgttatacatatattagctagatggttgtttgtcttcaccactatatatatgcagctaagtaaggccgacaacatcatttctgatcactatcggctaaatcgtccattcggtctggtcagataagacatgagaggtgctattttacaccgcggcccttttgttaattattattttacaatttttaagttggtttccttgcaaattatatattctcaatccattaatttgaactgtttgaactgagttttttatttgacaatcgattataacaaaagccagtactgatcgagaccaaattacatcatgtatagtttttatcattgatcaatcatcaacgatgtggaccatcaagtttttcattgagttttatgccttacactcaattggattcatacctactttgttatttggcttttcttttgtaatgatattaatttaatcctgtaaggcagttaaacaagatgttagcggtagttcaacacgatgttagcggcggttcaacaagttcacatctctaaaatgatttgtatatcccgcagcaacgcgcggggtatcattttttaatgacagacccacacgcgcctacaccattacacacgcaacatcacactcatacaatcattaatcacacgtcacacattgtacataaaagtattcttacgttcacgttgt

SEQ ID NO: 43925 - DNA, 843 bp, Oryza sativa
atgttcgattttatttgagcatagattactacccctgtataacacaaatttgctgataacaattattaatttgagatgatatttgccagattacattgagcgcaattttcctatgatgctatacagtaatacagatctccggaccaggatcctctgacttcatatgtggatcttgatccatagtaggtcctcatgtgttccgttcggtgcacaactgtcctatgctagccattgtacaatttggatgattgctgaaagacctgtaattatgatgttccaaagtttgtttaatcgactcttttgcattcggtggcatctccatctttatccgttcagtggctcagaacatgagtaacatgaacacggtcgaccaaagcgtgagagcaaaggaggcaatcaggtgcgtccaccctccacaagatgatggagcataatactcttctccgacgtcaaacaactgagccaatcatccctgcattgcagaaacgatgatcaccatacagctgaaacaaaagagagaatgtcactggagtcgatgggtgaacatcggtagactggcatgccgatgctcatggcgggggcaccgttgattgcatcaggagtacgtagcggtagagagatcttggaaggaacccaagcttcctgctgctgtgactctgatcactccaattccaattccacaggcaggcagaacgatgaagcgtatcatcgttcatcacgaccgatatgactatcagaggtttcatagccgtcctttctttgcctagcactagtagtgaagcaattgcaagtctttgcctgtgcatatcaataggccgtattctatctaatattaaaaaagaa

SEQ ID NO: 43926 - DNA, 1385 bp, Oryza sativa
aaggaaaatatattctcataatcccagctggtagaaacaaagggatggtagatatttttgcaactacatcgggtggttttagcaacaactctagggggtccgcaccacacaaggagttagagtcaacaccgagcggacgaagaagtatcctcgaggcaactagcacaatgattttctcttccttcttagacacaattacacagcgatatactcggcaacttggaaatatgggatattgatatcttttgtaactttttttttattttttttctctttttactcatatgtttttaatctaatacttttaatcaaatagataattatattttttttatagttcctatatgccaagaattgaaaaaaatgttctaagatttaaaaaatatacactataaatatatgaaattgaaatagtaatatatgggattcacattatactttttaattttttttcttgaaaatgtgcaccaaaaaatataactactcatgattaatattacttacccatttaaaaaagagtaccattaaaaataatctaatcaaacagtttctccatttgattcaatccaagacacttttcagctcaacgtgctatgctaagagaacataaacgtgctatgctaagagaacataaagataaacttaagtgatagaggagattgtttgccaacaacacacatgaaggaaaaaaatattcacatccatggtatgatatactcaagttcatcaataatttaaaaatattattaaagtttcataatttttaacgcaaatttgttctttaccacattgtaggtaactaagatattatcgtagaagctattcgatctttttcctataaccttattcttctctacttccgataatgatattgctaggtttgagtcaccagaccttacaactaaatagtgctagctagtttatgtgcacacgctatgcaatatatgttatttatgattttacatgagttagtagtaatgatcatgatatattaataatagagtgaattacgttgttggtacatagatttattgagtgggtgtagtttagtacataaacttgtgaaatactaattaaggtgcacagacttgtttaggatatgcgaactaagtctaaaacgatatattgtgactaatcatgctaaattagagttttattgggatgtcacatatataaatgacaacatgagacctgacttatgtgtaaatgacctttatatatatatttaaaaaaaggttacttatagttaccctcataaatgttccccatcaaaggaacaatcatgtaaattcactaggacaccaaactctagggttgtaaacctataaatagacctcaagtgaagcttgcccttcggtacgatagttcgttgtttgacaaaagta

SEQ ID NO: 43927 - DNA, 549 bp, Oryza sativa
gaatctgcatgtattgaaacagttgaatcggggaagatgacaaaggatcttgcactccttatccatggccccaagtaagccaatttatgcatatgtgtgagttttttcatggtagttcagaaacttaaatgtgtaacagctcaagacaaagtgttaatataataatacaaagtagatagtcctacagtgacatggtttctcaaaaagtagagttgcagtgatcataatagaaaacttaggcagctaatattactcgagcttttctacggatggtgatagatcatagcaagcatcaaataattgttcttgctgattgcaaggcagttagtacaccaaatagtttaaatatttttcagaagtggaaattttaagcgcttgttctgctgcacatttttagaccaaattcctgtatactcgaaccttttctttttttggatctgtgcggtagggcagcctgtttcacatataacaagaaaaatttcggtgtttgtatcagtgtgttatactggttgctgctattggcttattggctccgctgctctgttttat

SEQ ID NO: 43928 - DNA, 3946 bp, Oryza sativa
ttggtcacatattgttattgcatagtagatgctcatatttggtccaaatgctcatcacacaagctgaaatcacaaaataggggcaaaatcgcacagctgaaataaaataaaatggggcaaaaatgcaataaccaccaagggtataaatgtccttttttctaccactaacactgttaaaaccggctgttaaaagtgggggtacatggctgattcagattcaaaaagtgggggtaaaactgcaaaccctaaaaagtgggggtaaaacagcaattggcttcgaaagtgggggcatggatgcaattgcccctttgtgcaatgtaattttcagtgttcttgacaaaagaaccacaattctgcatgtaaggaacatgtgccccaaccttgtaccggtcaagctgcataagcggctgattttcccataagtgctacaaggtggggtgatcccatggaatctgatatcactttttagaaccttggtagttgtagaaatacaacttcaactataaggtctaaagtcactgttccagtaagccataagttcaatgatctacatgaaatgtcagtgcttatttggagccgtaatgagtactttggtttgtaatttttatcctctcatcaagccttagagtaaaaagttaattaactgtttacaggacagttcaaggatgttattacttttttatttatgttatttaccagtgtcctcatgctgaacaattgattgggcctgacataagtctctggagagaggtgtatcaagatgagatcttatacatgagatcaccacatgatttcacaccaagaaattttgaaaccaactttttttgcgttagtgctggagtgatcatagaactaaacagttgtggattttgctcagtttattctgtagagatgcaatgctcacatttcacaacctgttcaattatgagcagtacttgaccatgcttttatcaaccgtgacatatttgatcattaatttcccaccaatttggcatctctggttacatttaattggtcatcttcttgaagctgaccctttgtgcatattgttattttttactactgcttgcagtgcatagttgaagaaattcaaggcccaacccaagctcgtgctaggaaaggccgatttatttctgggtaattgtgtgactatttatcgtggaagtttaacttataattttattatttattagtgatgggtgatcttttgacaaaatatagtggtactcatagtatttatcgtccttaagcctgtttcaatgttactggaggtgcatctagatcttaatagtaggaagttctataatgctttttacattttaagttttacaattacttatgtccgtaaccatgtacctctgtttctgttacagccatgcacatcctggtagtccttatgtatttggtcttgctgaagtagaccatgatgttgagttccctgatccaatgcctgtagttggtgggttatacttctagatttctactccataaatcaagttaaatatctctgtgttatctcttccatcgtaactatgctgcttgttagctagttatatgtttgctccataaaatttcatatgtaactttgtaggattaatttcatgttgagagtgtgctagtaaatcaaaatcgagcgtggaaattgattggtaatggtatagtccattaggttatatggaatgttattttcttttattgaacaatacttttatgaactgtttatatctttcattgaaaaatgtcataattactactcatgaatcttgacaaagattttatagcatatttttcccccaaaatttaatgagtacaagtaataaatcatggtgtatagacctatgagtgttgttcaaggcgcaaagaactttttttgtgtttgaggcattatgttatgcttttttgtaagttttaaaatgtatttcatttctgttcgtgctttatttctattccctgtttatatgatggtttcattaggccaccatgtactgattccagcactgacattttcatacaccatgaaatttatattgatagggatttcacgatctgcaaaaggctattgcctgatttctgtgctagagacaatgaaaacatattcagctgaggagggcttaacagaggaagcagttgttactaagcttcgcatatgccgttatcatcatctataccttcatagttctttgaggaacaattcttcaggtttgggtttatatttcagagcaattgttttctcatttatttattgtgtttgatctggaatcaaggatacagtaattatggaactaggagatataaagttccaaattatgctcttaacatgattttctgttcattttggatcgtaccattaaaattgtccaaatttgaaggtgttacactggtatcgtgtttcatgcatttgtacttgaacaacaattttaaagctcgtggtgctcactcctttctctacatttactgatgcattagtttttttatatgaatgctgcatcactcatatgtacgatggaagaaacttgagattgaaatttttgtggagtaatatgattcgtgccattaagataatatgcatatgacgaatgtagttgtagctatctatggtttgaatgcacctatttatttatgatccttcctgtcaaatttcttatggtttaggcacatcacgctggggagaatttggcgaaggtgggctattgtggggagagtgcagtggaaaatcttttgagtggtttgatggtaatcctattgaagaactgttatgcaaggtctgtagaatatatcttggtgtaatggataattatcatgattttttgtgcatatggtccatgtgttgagattaaatatgaacttttgctgattttcctagatttttatgtgccacacttctatattcttctcagtgagccttgaatattgtttcttactttcttatatccccccccccccaaaaaaaaaaatcaaggtaagggaaatatatgggcttgaagagaagactgttttccgtaatgtcagtgtctcattggaagggaggcctcaacccttgtatcttggaacagctactcaaattggtatgagttagcttccttggtagtgttgatcttttaaaagagacttctaaagtggtgacatctcatttattaattaatgtgctataggggtgataccaactgagggaatacccagtttgctaaaaattgttctccctccaaactttggtggccttccatcattgtaagtattgttatttgttggattaagtgcccctatttggtggccttccataaaaatcgtagcaagatctttatattccattgcttatatgtgtttgccttggctcttgagagttaccttttcttatgatatgtaggtatattagagatcttcttcttaaccctccatcttttgatgttgcatcatcagttcaaggtatattttttcactgtgagattcagtgtttgtaatttgctgagttggaacttgagttcactgcgtgtaagatagtatctatttgatttttaattaagcgcatacagttatgattaatattaactttggaaatggacaaaaatggaatgcctaatttcatctgaatttcaatccttggaactttgcatgctttccttttccgatcacatcactacatcatgatggtttaattgctatgactaaaaatgtatttccatcattgtggagaactgcagatactgtcatagcctcataggtcttttcgaggaaaaaaaaaagcctcataggtcataattgcattaacaaaccatcccttaggtggaacataggccccgtttggcacaactctagctcccaactccaacttacctggagcgggagctgtgccaaacggtccacattcacctttttttggagtggagttggcagagctactcctagaaaatgaactacgggggtggagctgggtttttgctactccaca

SEQ ID NO: 43929 - DNA, 660 bp, Oryza sativa
ttgccagcaaaatcaaattccagttcttgagttacatttatattgtgtgtactgacactgaaatataattggcttgaatagaatgtttactttcagggattatttgaccagatatgattctttttttttccagatacattggtatgatctggcaatacagcaatgaaatatatttgtttagaaaataatctacatggacaactgtctataatattatgacataacctgtagcacatctacaaatttgagatctagtggggctactatttctatatgcttatcagccatagggtacaccgcagtgccacatacttattacatgcataccagttcttatgaaaatgatctgtaaccttgatccctttcatatgttgatgtgcatatattttttgccggttcaaatgctcttacatattttcttggtttagtggagcactacttttatttaatgcaatatggaggcatgtggttgagctgtctttcctgaaacttctgtcgagcacttgagtatacaatgtaccacaataaaccagtattttcttagaagtgaatggtcctctgccagcaaatatgttgaaatttgtatccaaattatgattgatatttcacacctgtgatacatatactatgttccttgtgtactatacctttttttttttt

SEQ ID NO: 43930 - DNA, 831 bp, Oryza sativa
ctactaactctttataatatgcaatctaatcgaactctaggagagtaaattctgatccagtttggttgctaattacgttaagtggcaggagcaaagtcgtatccatcttgcccgccccaattttgtccacttggtagtatgccatcattgtgcatagtaaggggccttcgtccatgtggaacagtgggagagcttatgttgcgaaatgcaatatactatggcataataaactgcttaattcggatattatttatgtcgtactacatgattcgctactcaaaacaactggatttactgatgacactatggctaccactatgaggtcccaactaggtgtagttaatcttctatcaacaaattcccaaatattcttcagggagactgcttgtttgcaaaattgtggctatcgaaattcaaaacgctctcatcctatgtttctcatcaatagattccctgggggccattgccctgttacgggagtgagatacttgaaccccacatactcgaaatgttccacccaatgacccaaagctagtataatgtgattctgtgaatatgtgatgagaaaggtgcaagttatcctctgtatatttatttctatgacaacaatggtacgccaagttattttctgctcggctctccagaacgacttcggcttcaagtgagagtcagcatccgatgcgggtgacatttgtcaccgtgaacaagttgccagctcgcgacggattttacgttgccagagacttacacgagtgtgggggctcgcctcacgcttggcggtttggcagttttgggccgcgacggcgacgtgccgaagccgcatatgcatcg

SEQ ID NO: 43931 - DNA, 603 bp, Oryza sativa
tattcatggacaattatcatcttagcaatgattttacgagtggcctcatgatcataatcaaaaagagtagcaatgagagaggcacctgccatgtcaggattaaagccaagcaaagcttgagccttctgcctgcccaatttgttcaaatatgccgtgcacttctttatatggcgattgagagttgaagtagcaccacctttcttataggcaatgagcctatagcaaaaacttcatttggccttcgtctcagtggcccctttctccgtttttgatggaacatccacaaccttgaaaagcttccaacaatctgaatgcttaacccttgccacactctttgcaggggatacaaaaataaccttctttcgtttccctttcctctttaatccttgagatccagagttgccctcatctgtagattccccatccacttccttatcttgacttgaggaatgaactgacaaatgtgagggtgtgctattagacgaaacagacagcataaaaaattcttcatttttcgagtctgatccctgcaagttcaattaaatagtcagattgttatgctattgcttaccacataatcagtacaggagggtataacatagc

SEQ ID NO: 43932 - DNA, 1395 bp, Oryza sativa
acacaatgcacacattctcccacaatgcatacatcgattaaaactccatgccaattactccaccttagcatgcacgcattctcccatgttgtattaattgtattccgatgaaatccgtctccatgcagttatatgatgatcaatttaagaaattttgatttctattacatgataatcaatttagaaaggagggagtaattagcgggcacataataaagatgagttcaaaacgatggtgacaagagaaaccattccaccatgctatgaaaaaattgtgcccatcctaatttgcattcatctcaaagcgattgtaatatatagatccaggatttgtacggatagtgaatctcataaattttgccatattagtcgtcttttgaaacaccaccttgtatatatgcaactactagtgtaaaaaactacactaattcatatagacaaaactattgattttaacaatgaaataaggccaaatacttacaaagactacactagttccactaaaaaaattattcatacccttgatttcagaagattaaaaaaaatataaataacaaatatattacacaactcctacaattcataggataatatttatagtatgcagttcaaattccatccaatataaaaatttatttgaaactttctgggagctatttatgctgcatgtgtgcacatacacattctgttgacattggaatatttccagacagtagagcagcatgcaaccagaatatgattcaaaaagtaattaacagaatgaaaagtgttacttatgaacagttaaatggatatttctgaaatgacaacattgagacgaaatgacatcaaaagagtgcaaagtctagttagtattgatgctagtacaagacactggttaaagtaatgtgtgcatagactgtattttcattgttgtggatgatatatatgttaagttagataatcattcacttattaacaagccgtgtttatcactcttatgaactcctaatgcaatcctccctccttttttaaatatatgacattgctgacttttgaacatgacgtttgtccattcaccttacaaaaaaaaatagtgcaaatatgtaaaattataagttatgtttgatgtacctttaataataaacaagtcacaaaaaataatttatatttcaaacgtcatatctaaaagtcaatagctaatatctgaacatgatccatactggtgaaatagtaggattccaacaattcatctgagtatatggaatagatcaaatcatgtgtgaggggatgaattgttgcaccagtccaataaatatccaacaaattagaaaaaaaatcaattccaaaagagaccatctgtccaacaaattagaaacaaaaatcaattccaaaagagaccatctgtagacagga

SEQ ID NO: 43933 - DNA, 969 bp, Oryza sativa
acggccacagcacatcattagagacatcttgaagtacacttgctgtaacagctcagtttcaatcggtacctaacacctgcacaaatggggcaacagcttgcctttcattttggagaaaaaaaactaaatgctaatgctataatagatattatgtgctacatggttctcgtgagagtcatattccccttgattgaacactatcacacagccaaaaaatgttccaaaatgcatatatgcatgtaaaagttagaccaaaatgacattaaaactattagcaatacaatttctaacccctgcagcaattcatgagcgacaaacctacaaatatcctgtttgtcctaaattagaatagataaaatcaatgtaaaatcagtggttacataagatagatgtactaaagaagtaaaagatatgcgcaagtaatgctatatgaaatcttttaaaatcaaggactctgttacgtaagcagtgacactgcagggaatttacatacactttggtttggttgatcatctgctttagagtcagtgagcaataagtggcgttccagataatggacatgcatcgtttgtcctattctgttagacaagaatttttactaagtaaatataaatgtctaacatacaaagctggtcagcttaacagcatttcagtttaattgggtcttaaacactgttttaggagtaaaccatagcgttgctataagttcaaacacttacattttgatagtgccagtttttcattcagctaggcccttaacgcaactacaccaaaacaaccaagtacttttttcattcctttaccattccagagttgccggctgtcttattttttcagttaggtgaaagcaacttaattttcccacaacaaaacaaaattattcagattctatataatatatgccttcactgatatatgatatttttcagttactattgttttcgtctctccttgacaattccagaaaaa

SEQ ID NO: 43934 - DNA, 722 bp, Oryza sativa
gcatgagacccagtttcttcctctcttcgttctctctcttaattaatatagtaccacataagctaaaagtcctacatggcaatatagttaatgccatagacaccattctaggtggagggttgggattgccctaatattgtgattcaacgcttgcagcattttaatgctgcacattatttggtcagatttacagtattaaaaaatatctcatctggttttagattcttatattttaggactgggacggatgaagtacgtagtacgttttcttcaatttcagacttcaacttcctctcttttttttcattgggacgttttttaaactattaaacggtgtgttttttaaaattactataaaaatattatttgaaaaattcaaataaatttattttcaagtttataattataaatacttaattaattatgtgttaatgggttttctttttggtatgcgctgaaaatctctctccaacttagagaaataactcaaccggctgatagtaatgcaactaacagtaatgtaaccaatgaatataatgtattcggaaagtagtagtactccttattttgttgggattactattcgatcgcttaattactacaagtttctgatcgctttacataattaaactatgatgatgcaagcaaggcaataacagagttggcttgcggatagtagacagggaagagatgccctagaagcccttagctagattgtcact

SEQ ID NO: 43935 - DNA, 673 bp, Oryza sativa
cacttattttgggacggagggagtaaggagtagcttagctagctagcctagctcttacgtggctacaggaaaccactggtccaattcgtgggaatcaattctttgatcgatcggagacagactgcacacacggagcatgtaacctgagcaacactgtagtcgatctgaatgcatgcgaccctctctgaatcctaataacttgtcgcaataaagaaaaatccccatacattatggatctatagccaggaatagttacttcttaaaatcgatctgtaaatgcgatggaataaaatcgatctataaatgcgaggaataaaatcgatcgatcaattgaagcctgaaaatttaatttctttattggcctgctgcagaagcttacctgcagcatgcaatgcccctgcgtgaaagggactggagcatggggtgagtgaattaattgatcgattaattcgccattatatattctcaatttatttatttcttattttctttgtttgcgtttctgttgaaggaaaaagaaaatgggaggagaaaactggtaggagttgtactgctgctagtcttggcatttggatctggacctgaatgcgatgtgtgccgtttgcttgctcctctccaaatccaaggtggcactgctccgaagcaaaagtgcttgcatgggttgtagctgctg

SEQ ID NO: 43936 - DNA, 669 bp, Oryza sativa
tttgccttcgaataaacagaacacaagcaggccttgtaatatttagtatatattcttgtcatagcttttccctacgaatcaaaatgaatatccttgtctcaaattgaacggtatggcggctgtttgactagtctagttttctgcttggaatttggaaataccgtggcctgtttggtggagctttagattctgataatcagctgtttggtagcaagcttctgaaaatctggaaatgctctgaaacccagcttctccagcttctggcttcttagttcaattttcagaatctgtaactacagattctcagaagctgtggactgtttgggacagcttctagcagaagtagcttttgggaaaagttgcagctggaagaagctcctccaaacagggcctgtctagctgagcaaggacaattattgggtgcacagagtgtacaacatgttcaggccttcagggttgcactgttgcttacttcgatacactcctacctagtaaacacaaagaattaattgactgactggtggcctggtggggctgaccgattgagtaatacacagtactaccattatactctatgcataatctattcgatctcccacacctcccttcatatgaggtttacctgctgtgacgcacgcagtcatgtaatttttaattattttgatagaa

SEQ ID NO: 43937 - DNA, 799 bp, Oryza sativa
aatggtagtatgagcttccggagaaggaagaaaaggaagatcaagttggctttcttccaaaacacaatctgcagcagaataaaacaaaattaataagcaatcagattggtaaaacagagctatcaacaagccagttgtttcatctagcaatcagattggtaaaacagagctatcaacaagtcagttgtttcatccagacatcctatcaggtagtacattattttgatgacaatgacaacaaaaggtgataagcaaattcatattctatcatggtaatgcaaaaaaaggtccagttgtaacatgcgcacaaatgatatacaattagatatcaacattttatattctagtgagatggatgctgctcgatgagcatgcgtctttattgaagtgtataaacctaagtacttgagagaaaaggctaatggtacaggacatatcaatatgtgaattaatatttcgagaatcagttaaagagtataaaaaaacctctaacattttagaatttcatcatgttaacatccttggagcatattcccgatgccatgagcgcgtgttgtgtatccaacaaaagcaccgaacacacttttttttgtcaagatcacattatttacctgttgatgttcaaattttcactttaagtaataaacggattaaatgatatatctgacatgctatttgaagacaaagttgcacagaatggatacgggaaaaaatgctgtaaagccttaattttatttcgtgtttgcattaacagatatatttatccagaccaatcggatatctcataacaacatttggt

SEQ ID NO: 43938 - DNA, 867 bp, Oryza sativa
tgttccttgatgttgatatactagtaccattgccaaatgaagggcgagggagtgtaatgtatacggcatagaaatcttgtataactagtactatacgtcataccggattaattttgaagtgagaatttcgttggtgtctctcccctttgtgcctagagaatcaacggaccgttgtagtgcgaaatcttgcacaaagcatagtatatatgtacttctatacttagtgttatgggacgatactaccttcgttccaaaatattgctatctattagtatgcgatttgtttcatcttagaatgacagattcgtcgtctcaaacagagaaattaagtatttaatttgaacgagcgacttattaattgatgcatgtaattcaatatcacatgcatgtctgatttaattaggcaaaattgttttttttgacctgcatacatctaatttaaacatgcttttgaaactttttttttttgcttggggtgtttcttctggtgttttttaaaaggtttctcctccatcttcctacatttttcattcctatgcatgggataagagaagctacatactccgtatcactctagtttctatgtttcttctaccccgtgtttcgaacagagccgccctttgcattaccagtgttccggatgaaaaagccagtttgccaaaaaaatttttaaacaaaatctacttgaatatattagctcgtttgtaaactgaataccctatattctaacagatcaatcgaccatgtagggagtgaaggcggaatgctagctaggcttcctgttgtacaacacagcatatactccctccgtttcgaaatgtttgacgccgttgactttttatcatatgtttgaccgctcgttttatt

SEQ ID NO: 43939 - DNA, 4479 bp, Oryza sativa
gccgccacacgtcgccgccgcgatccattgccgtgatacgcttcgcttagccgcatcagctataagcttagctaagctaagctacctcacactcatcagctcgcctttctacgagcaccaccacgctgtggccttatcactcgatcgactgatcggctactgatcgatcggtgacaggctgagagaaagccaagctaaaacagcagcgaaagcagctgcagctagcaaaggtgaagagagagagagaagaaaaaaaaaagcaaaaccttaaaaactaaaggtgagatcgctgtgtatgcaatcgtctcccaaatctttgctttgccgtgatggttctaatcaagcaaaaagcctcgccgtggcctacctatccgaacattacatgtagaaaccgcagctttagagcctggtccaaagcaattttttttcctgcctgtccgagaagaacaccccatgtgtacgcttaccatatgcatatgttcatatatccatctgaatcctggctttatgcgaaagtttgcttttggttcttgggcagctgcaggtttggttaagtgtttggtcactagagcttcttcagaaaaaggaggctctagcaaactgtagctgtggaatttcgatcgatcgatcacacatgtcgtttttgtgttggcactgctgcgtttcttatccgcgaattaaagagtggtcgtcgctggtgaaatggtgattcctagaacagtgcagaggggggtcaactcggatgccaccaaaaattgcaggataaaaaaatggtgtgctttagataagatgatgaaccaagtgttgagagtgattaggacgcatggttggagtgctttattgcggtgtcttttgaagataatatgttgattatgaccacagaaacagggtggaagcagagtgaaggagtagcatcagttgggcaaatatccagtgcaatccggccgggtgcattggcatagaaaataaaaaattattgaaaaatcgaggtctacactgttaaaaaaaatctggtctaatttattttattagaggatgagggaaaaaaattctgaaaaagaaattggaaaaaggagaaagaaactgcacatcggaatttgtattgcctaacgagttcagattaatttctttgacagataaatccatgttctgtcaatgttattatactctttcatcaccatttacatcatatttttccagacagagggtccgtgcacttctaagagtcccattggttggtctaataaaccaaaggaaaaatcaaaatttgaatttttctaacttaattttaaatttaatttttcaagatatttttgacataatttttttagcgttggcttttaaatcactacgaacaaaaacgttttacctataaattaatttttattctctaatgaaccattttggtttattagggaatatggacgaccgataaggttcaaacttcatctgcctttatatgaggtccgatcgattggcaaagatgtgtaaaatggacatacaaataaccttttggtggtatacaatgcaacttgttctttttttcaacaaaaggtgtttgctatatctcgtgttgcatagggatgttagtgagtttaacgcggactatattctctcctttcttggagagaaggataccacaatttttatgcatttattggattcccttgagacaagtaggagtagttgtttcttcttcttcttcttcttcttcgaatagtggctgtttctcttttcacctcaatcgttccttttctaatcaaatcatgctgataggcgccattacctgtggaggactaactaaaagtaaatgacagccaatcctgtcaaatattaaagactcacaagcacaatcccaaagtgcagaaaccatagcacaaataaattgtggtgcctttttgtctaattaaattactcactttagctcatcacttcatcagtcctttctggatgtttcctttgctacactactgaagtaacattcttttagaccactagtactagtactatatactccctccgatcaacgacacactctacaagatatacctttaaccttatttttctattataatatatacaataaataaatgcatgtttacttttattatagtgttttaaaaaacaaatctagtttctttaaactaaatatttttaaagttattgatggtgaaagttataaaagtttaacctcaaccttattcaaaacgtcaattaatatagaatcagagggagggagtagcacttaaacctaccccttaattgcattggtcaaataagtaatacgtctaggtgtcaagctgctaatcgaccataaaagcagattagtgcaacaaattaggccaggtgtccctacggcttatcaatttgtggtttcgtcgacatgaccggtaaaccggccggtgtacttgttgggagggaaagacaaaaaaacgagttcatcatcaggcagaaacagtagtagcaaaagtaaaggtttttccataatcactaataatgcaatccaaagcttagaaaaaaggcagagtttagtttgttctgatgcatgcaagcactacaactatatagctccggtagtgttgttgaactggatatttagagtgacattgtcctttagttagctgtcgtcatggagcccatgatgtacttaatttgtcgatcgatgatggtatatgtcaatccttgttaaggtagtggtatgcattgtagacggtgatgggatgcagctcatcagttgcccataacatggtcactcacttagtcctggatagatactcttttctttgtactagagaattgctatttagtcgccggccagcagcaaaataattaacaacatccttgagttgatcgatctgtttgcttgtaggcgcaatgcatacgacgaggcatacgggtcatacatgtaagtgcaatatagattaatcattgttagaaccaatataacagattttaggttaattcataagtttgactaaattttacagggaagagtgtattaacgtcaacgacattgataaaaaatgaaaactaaaaaaacttatgaatctaagatgctcatttgatattgtaaatattcttttatatatagaaatttagcttaaatttacgacaaggcaatatatacccttgtatttgggacggtgggagttccggttcctctgcagtaagagccactattgatgtgagtagaacagtgaacaacttcagtgaatatatagtagcactttactgtgactatacagtatgacatcacttgttttaatttttaagacaaatttgattaattgtagctcttttattgtacagtttatccaaaccattcatgacatatcaaacgattgtttccctagtacgatatattgtagatatgtaagaataactaacatcagcacgatactcttgtatgtattagttctagtacctctaataatagagatatatgataccctgttggtatcagatctgatatctatgtaccatgctgacgtcagtatgataccgtaggtatcgaatctgataccttcgatatcaaacatgatactctataggtattaaatctgatatctaggtactataagtactacacagacgtcgttatagtatttcggtatcggatttggtacctttagtactagcctactaggcatgatacaagattatatctggtatcatcatgataatattattatgatattagccattccgttaaaacttgtataccgttttgtagcatttctgtatattttagctctttgccgtattacatgctacggtagtgaatcccaagtccggagtatataccatgtgcgacacacgtgctggcagaacatgctcgatcctggtagtagattcatgtactccagttgttagctcgactgatcgatcgcactcatcgccgaaactcgatctgtcacgatacttgctttaatctcgatcgattagcaaccgaaggggacactcttgaaagtgcaactaatcacatgaacacacagttaattacttaatttctctgtagcaactatcaaacgataaccaaccatatgtttgcatgcagcttgcccacgtacctgatgatcactctcgtacagttaaagttaggcacagatcaccgtcatcacttggcacgtatacgtgtaacacaactacattacccacctaaacacgtgtcacccacgctttgagctcgccgctgtcacgtttttttccatgtgagatgcagttgcctctcctctcctctagctaggacatgtttagttgggaaaataattttaccccttcatatcatattggatataccgatatatatttaaagtattaagtgtagtctaataacaaaacaaataacatattcccttattaaactaaatttattaagcctaattaatctatcattagcaaatgtttactgtagcacaacattgtcaaatcatgacgcaattagacttaaggcctgttcactttgataaaaaaaaaacc

SEQ ID NO: 43940 - DNA, 5076 bp, Oryza sativa
tggtaaggttgaaaagggagtacctatacatctttcgaaagatttttatgatcgtatcacacagatttttaatctttggattaaaatccgatagatataataaaaagcaaaaagcaattaagaaacaccataatggacactaaattaccataacctcaagaaaaagaccaaatccaatacaaaatttaaaatttacatgcgaagattcaaaaattacagtgtaacttacaaaagttacagtgtaagtttcataaattacactgtaacttacaagaaaatgcactgtaaatttgagtgagaaaatcgagtgagagataagaaaaaatctttcgagtgagatatagcaaaatcgggttgaaaatgacatcaaagtgaaaagcccttaaaaaattcgtctcgtaattttctagcgacctgtataattgtttttttctacatttaatactttatatatgtgttcagacatttgacagctaaaaaattccatcgcgtgcatgtgtgtgcatcgtgattcgtgcccgccgcggatacgacaataacatatgccgtgcatgccaggtggcggcatccgccaccaccaacggcgacacgtaggacggctggagggtcccgcgcgtcagatccgggctgggcttgtggcgcacgcgcctgacacgtgcgcagcgtccgcgagccatcgatccggtgcatcgcgcggcggccatttacttcgcgattaagctaaagacgaacgacgacgaggtggggcccacgcccacgtcgcaccaaccggggcacccacaaaagcagcgcgaccgcgacgtcgtcatctaacgcggacgcccatctccaccgtccgatctcgccactaggagtgtttccaaccgtcggatcgtttgcgcgcgtagatacggatatacttgtaagcgaggggtagaatctctctctcggtgccacagctttaaagttagtttttaaaagttacggggggaaattttaactctcacgaagaagaagaaaccccacgtaaccgttgggcccgcgaagtgggtggggcccactgctcgagtgtcggggtatggtctcgggtggtctgcctataaataccagccatttcctcatcgttcctcccttttccccgattctctacttcccccctctagttttctgaaattgcggataggtccttcttttttgtgtgttgggacttgggagagtgagaaaaatgctgtcagtgcaggaggcgcttgactttgacctggacgcgatgacgtccgggttcgggttcacgccgtgggcggctgacacgtgccctaccttggagcagctgatggcgtcgtccgcgtcgccctcgccgtcgtcgtcgcttgatgacaacgcggcggcggcggaggaggagaacggtgaggtggaggaggaggaggagcggaggcggcagcggcggaaggtgtcgaaccggctgtcggcgcggcggtcgcgggcgcggaagcagcagcggctggaggagctgcgtggggagagcgcccgcctccgcgccgagaaccgggagctggcggccaggctgcacgccgtggcgcgccacggcctcgccgcgcggtgccagaacgcgcgcctccgcgccgaggccgccgcgctcgcccgccgcctcctcgcgctccagcggctcgcccgcggccgccacatgatgatcacggcgtcgccgccgcagttctcgcgtcgctgatggcgtagaaggcgcacacaggtgaagttttggaacggacgatgggtaactttgtcgtgagatggaatggacgacgctgtgcatggcgcactacttagctagtgaaaggggtctctcgtgtcgacgtagtatacagtgcacgtacgtgtacattgcatggacgtatgactgatataagtacatggaacttgatgtaaattattacgatcactactaccattctaccaaagttaaaattaaatatattaccagtttttgttgcatcgacgacgtcgacgcctgtacgtgtccgaatccacgtgctctcatttttgtaacgggatgatcgaggactcgatcgtgtgtactgtctgtgggcaaacggaaaggagctgtccatgtcttgtttgtacagcgagattaggagagccacaaatgagatcagtgtgggacactagttgtctacttgcttagttgctcctctcgtggactccaaattaatcatactgtgggtcgctgtgtatgcaatcgaagtaacccggcaaatacgacaagcacagctgcacatgtccacacacaacacaatgcatagcagtaacaccaacttgctaaaacagtgttacgcgaaatgaacaaataaattgtgcttgtataaaaattttggctagctgtcgcaaaccaaagtaggagtacctagtaccggtaaaaaaacttgttaaacactcgtgcgtacggattgaatcaaagccaaatagcacatgatactcaacattactgattactactactactacttagtatactagtataaaaatttaaaatagtgttcacttccccctaacgttgtgttttgtcgtttctttttgagaatgactcatatttatattttttgtactttgaatttgcaaaatacttcaacaataatgtcgtgttctttcagtaaacagctcgtgcagatttatcctagagtggccctatgtggtatcctaatttatgttaaacctagcaagatcagttacgatatatcctaatttcttctgtcttggttcataggcaccaaagaagttcatgcatctgaacaaacattttacattttgtttacgtactacttcctccgtttcacaatgtaagactttctagcattgtctacattcatttaaatgttaataaatctaaacacatacatatgtctagattcattaatatttatatgtatgtggctgtgggcaatgctagaaagtcttacattgtgaaacggatggaatagattgatattacgcacccacaaattcatgtaggagtacttcttactagattgatactacacaggaaaacttgttcatgtggtgcttcgatccggtgggtccgtcagtcagccggtcataaggagtaccgttgtgctagtatgcgcatgcttagctttttaagcgccatgtttcttccaagtttcgttatgtaaataattttatcaacgaataaaaaaataagtgtttaattaaaattttgaaaatttgaggtagaatttgtttattcaaattttagtataaacattttaaaaattatgttgaaatattcaaattttggttgaagttttctaaatgttcaatataacgttttaataactgagttgaaagtttcaaattttcagtagaaagtttcaaagcttttattgtgaaccacctaataagagaaaaacgattttgctatatctcactcgaaagattttttcttatctctcactcgattttctcactcaaatttacagttcattttcttgtaagttacagtgtaatttatgaaacttacactgtaacttttgtaagttacactgtaatttttgaatcttcgcatgtaaattttaaattttgtattagatttggtctttttcttgaggatatggtaatttattgtctattatggtttttcttaattgctttttgtattttattatatatatcggattttaatctaaagattaaaaatctgtgtgatacaatcataaaaatctttcgaaagatgtataggtactccctataaatcttgcgacagatttcatgttacatatcattcgatttttggaccgtttgattgcgtcaagattcgtgcttacacgggtgggaaaataaaatgtgcgtgttcacgtgtaagcgaggagtcgaccgcacgatctcttgttgccgaacaaaggcctttaattttaccaactgagcaaggaaccaatattgattttgtatctaaagaacagacttacatactacgtacaaattaattacagtgtaattatgtaataatcacactgtaactactaaaattacagtgtaactatactaaaattataatgtaactatactaaaagtacattgtaactttttaatgcatatgttgatgacatttttatttttttattaaacctctttagacttataactgtcagattgggtccgttgttacgattaagctagcccgtttccctcttcaacgtggcgcacatccatatgttaaaaaatccgagtgagatgaatgaaaaaatcattcgaatgattgctagacactcccgacccaaaatgactccaggcccgcttcggtcggcatgcgcacgtgggcatcggcgctccgagtcctacgaggccggaggtagaagagacccacaagggtacgagcaaaatctgaaggaatccaatccacgaacggcccagcaagagcccaccatactatccagcccgtctcatctccgccgcttaaaacccccggccgccggcgaagcccaccgcaaatatcgcaattagccctaaccccctttcttccttttcttccttcctacgcacacgcacgcagccgagagcaacggcagcggcaacgggggcggtctcgccggaggcggtcacggggggatcgatgctggaagagaggaagctgttcgtggcgggcctcccgcagcagacgcgggagggcgacctgcggggccacttcgcccggtacggcgaggtggtgcacacccgggtggtgctcgacatggccagcggcaacagccgcggcttcggcttcgtggagttcgccgacgaggcggcgacgctgagggcgctcgccgacgacgagatgcccaaccacgtcttccgtggccgcaaggtgaggcgacccctccccccgctcgatcgcggcttgccgctgtcgagatcgatgcttgttgattactgctgattagttcaacctgtgcttgtttcgggttgaacctggcttgctgtgatcatcgggcggtgtctattggattagtagattaaatgtggctaatttccggttgtatacctgggtttaccatgatcatcgggtggtggattagtattaggttagtagattacatttgttcgaattgatggggttaagtgataaggaagctt

SEQ ID NO: 43941 - DNA, 996 bp, Oryza sativa
gggttaaacatcgatgactgttgttcgagtcgtgaggtggatgatccacctatataaaattataacactcacagatattacgcaccggtgggtgtccattaaatagaaatttaattaataaggttaggatttatcaccatgcatctctcgtcatttcgagcttttgttaggaattgtattagtttgtgtatgaatatggtttatgtggtgtgactgcgtgtatgttatccgtgtaataataaaaaaggcatataggacaaattttgtgaaaccaaataattaaagtttggacggcaaacgtgtattttcttcctgattatttcgatcttaacttgcactgtcgtatatcgacaattcgacatcacgaggagtaaaaggaacacaccatcgtttctgatgtctcaagcagacattgatcagttctctactcccctatctctctcatgggaacatcctactgaccgtcatataaaactggtccgcgcgcagttgacctttgactcccagcaaatttaaaaagaaaacgatttaaatccatctactgctagatgaaagctgccgcacatatatctattcctcatccaggcccccacaccacgcattgcatcgcattacaatgcatctatagggttctgcatttatacttcaacgatgtacagccactgaactactgcagcaagactgtagctgcgtatagaagagtataacaccgttgtcttttttactataactttggatcatcttttaaaaacattaagtataaatatatgaaattataggctattactatatttaatttctttgacaataaaacaagtcacaacaaaataaataatattaacatatttttttataagacaaatgtttaaacaatatacgaaaggttggtataccatcatatattttatgtacgtgatggagggagtatatacttagtagtacatgtatagtggtagttgaacttgtcgaagtatgtacgtatcatgcatgcatgca

SEQ ID NO: 43942 - DNA, 1004 bp, Oryza sativa
ttaaccgtttgcgcacttccagcgttctatacttctattgcagtgctctgttgtgcaatggatttcctggcagttcatatctgatatcttggcagtcagaaactcctctcatcgtccactagcttatcagctacaagcctacaaccaaaattttaattttaaaaattaattttagagttgttttcttttctcgtcataacatattttccagcattagctttcgaaccgctactaacaacaatataaaagttttactaaactatttgggttcctcgttcattttcctaatagcttatcagtcgtagcttcaaactgaaaaaacaccctcctaaaaccgtgctggtggtttaacatcatacaagatcccaacagtgtgaaatgcaaacctctgtctgctttttaccactcggtgtgtacagtgccatacgcgggcacacgaaaaacattcagaaaaggcgacaggttctttctttgcggttgcaggaaaagaggccacaactacttgcacaagggaagcgaagaaggacaggcgaataccagaagcaaaggtttgcacataaagccaggccccaatttgtagcagatgggccaagttttcaccgtgtttttcacctcttttcagctgggggacacgggcaaggcaaacaaagcaaatggaccattttccccatggcccaggcttcagtccagtgcactccagggctctaggccatccgttttgagatattttcaggcctgaattttccctctcaaaaaccagaaacacccagatggacacaccccggcacagtactctcaccgacgaaaggactgtcttttcccttatacttatcagccaaaatttaaattttcaactttaaatttaaatctgattttgaggttttttcatcgaaatttatttttcaacctttacttgtaagtcgctaacaacacgtatataaatgttttattcagaaattatttttcgtttgcaaatataccgttttgcttattccgcgaataag

SEQ ID NO: 43943 - DNA, 656 bp, Oryza sativa
ccatccataagccctatcaaccatcaccgtgccttcgcctctgacacaagctcgaaaacagtagttccgaggggtgtgtggatcaaatggacattccttatggtggtcgccaacatgtgctagtctttgtggatcatttttcaagttcggatgcatgcatatttaattatttaccaaaaaaaattctgagctgttcttgcatgcttgtctacatcgatccacagctgcaattgctgacacatttatcggggtctctactccttgtctattgactgtgtaggctgcggtgcaaaaggaatatccagataaaatggttgtgactgtgactcggtgcctgttcagcacgatgcagtcgtttgtcgtcgcggtggtcgcagagcgcgacttctccagatggaagctaagattcgacattagcttgctcgccatcctatactcggtaagttgtgcacataaaattttcaatcatcctcttccactagtgtattcactattggcatgttcttcggcacacgcatctgactattagacgactggtggtttgcttcagggtgttatggtgacgggagtgtcctactacctgcaaacgtggtgcctaaagatgagaggccccatgttcttcgcctcctggacgccactctgcttcgtgttcacaa

SEQ ID NO: 43944 - DNA, 707 bp, Oryza sativa
catacgaatttagtaccaattatttttttaaaaaaaactaagcatttaaaaaactactatgcccaaagttttagaagtttgattaaacctagtcttaaaggttaaatatttgttacttcctccgttacatacatacatacatacatacatacaaaatatgaaacggaggaagtactgccttaccggagggagtacataatagcattaggggtgcgcattcggtctaaccaaaaatttcggtctcgatcttcggtcttttgattttttcggtctttgaaaagtgaagaacaaatttcagcgcaaaaatgttaggaccgacaaattcggtctttgtcttttcggtctcggtcctaaccgaaattcaacaacattttcatatatgcaaagaaataatggaaattttcaacacaaaaatcacaaaaaaaaagttcgtaagcacttatgagtaaagactcttattaggttgcatgcctagaagaagtagggatgtgaaaattagagtttaatcctattaaacatagtggattgtaggttgcatttagacatttttgataattcggtctattcggttacccgaggaaactaaccgaattgaccgaacaaaattcggtcttttactgcctagggccgaatttctcgatctcggtctttttgatctcggtctccgtctttttctacccaccccttaatagcatgctgcatgcgtc

SEQ ID NO: 43945 - DNA, 2454 bp, Oryza sativa
caaacggcccaaataaatcccagaagacggcagatcgctctccccagtccccaaccaattcggcattcgcgagcgacggcaagccgacgccagcagcgtgaagtataagcggcaacggtgcaaaatcattcatccagaccttggcgtgttctgcacctcgcatgcactgttttcttttctatcctattttctttgccttctcttgccgatcgagcatatccttattttttcctgttggatctataagggaagagcacatatgttggatgcatagatgtccagtgattttggtggtttgggaattgtgatgtatctttttttcacggtaattcaatttattctttaattagttacttgactgattaaccccctataattgggcatgcagacggctgtcggccggcggcagttctgttatttttttttaatcggaactaaaaataaactttaatctgataaaaagttttaaatctttagtcccggtttataagagaaccgagactattgtaaaatttgacggaccgatcaaagatcgtttctctagtagtggctctcaacccagcggccagtggcactactatctgctgaatgtattgcatgttttgatcggcgaaaagatgtactgatactctccattcagaatttagtttgctgctacagcatcaaatatatattttctagtgattttgtttgtgaatttgtcagtggcagatacttctcatggtgatactcatgtcctaatgtattatgattttttctgagatctagtgtgttctgtgattcatatctaagcaaccccataccaattaatatctttaaaaatagcatatactatatttatactaactaaaaatagataaaaattagtacataccgcaactaacctaaaatgtggagtagtatatactgctactttataaaagcatatactgctattaacttaaaaattagtatataatgctacaaagttaaaagcagtacataccactactactattgtaaaaatatgacatataatgctactggtagaattcagtatatactactactactactaagttaaaaattaaacagtatgtaccactactactctataaaatagtatatactgctagtaactaaataaacagtatatactgcatgctactaacatttaaaaaaaagtatatactgctactaagttaaaaatagtatatatatacctactacattacaaaatagtatatactactattaacttaagaaaaggtatatactgtactaactcttcaaaggagaagaattcagtacatactctttcggagaagtaatcagcataactgattaagaaaaaagtatatgctgctctaattaagtaaaacgagtacaatttatgctgctactacttaaaaaaaaggtatatacttaaaatatttataaccctttttttaatcagtttgaatggtagaagatccatctgtttagaggatggtacgttcattattcaaatttaaactaacagcacactccctacgttcaattgtgcaccaaatgcggtctgtacctgtgcatgcatgcaccatgcagcgattagagaaaaacaatattttcattctcttcccaccagtttaattagatgctaatggttatccactaaggggagagagtatgtactcccgggagtacataacaatgatcctataaattaaaatggttctatactaccgtccatagaaggcagccccgatgaagagcgctattggattcacatgtggacccgttttgatttctattcgagaaaaaaaaaatccgtagtacgacataactatcccacattaatcggtataccggagtgttcctgacgcataaatacctctctctcaaaccatcctattggtaaatcgggtcctcggtgagagcacgatctaccggcggtgatccggacggatcaatggcaccggccgattttacggcgacatcggtgtccatccgatactaggttttccttttttttttaatttcacgatcttgtttgatttgatttcagatgcatcaagcaagagagagagatgggttgttacatacctttgtagaagagctgcagggagcaagatgagggagccaactgcctggcgatagaagacgaagatgtagatgttcatcccgtggttgaaagcagccttggatatcacaaacatgccagtgtagatcagttggacgacgatggcgacaaaataaggcttcatacttgctttcaccatcttgatcgatctagcaatggcaggcgtgcgtggtgtttgtgcgagtgcgttgtcttcagtgtgcagagtgtgtgttgtctacagtgtacgagagcgcccgtttagtttctctccatcaacctggcactatttctatatatttatataaaaaagaagcagtcagtatgccaagtgtaaacgcaagagcacggaggtactgtagctttgattttgg

SEQ ID NO: 43946 - DNA, 4637 bp, Oryza sativa
attcctgcaccccataattaagaaaatattcttttttagattttgcttactaacagattgaaaagaaatctatatatgagataaactttcaagtaaaatttaaaactttctatcgaaaaattaagggatttgctagatgtctattagattaatgggtaggccaaattaaatcccaataataccatattggaaatttagtgctatgggtaataataccatattgaaaatttaagtgaagagatcttaatttaaatatggagctagtggagaatctctgttcaccggttgagatggtggatggacagccacactcgtgcacagagctgtgtattaactcgggttaatcgcacggattgaattctccgaatgtaactctcacatgtgctacaaatcctctgcgattaatcgcgtggatgctctccctctcttgttctgtatcggaagatgattaattctggtgtattaactcgggttaatcgcgcggattgaattctccgaacataactctcgcatgcgctacaaatcttccgcgattaatcgcattaacccgggttaatcgtgcagattgaattctccgaatgtaactctcgcatgcgctacaaatcctccgctaacggggttaatcgcgcgaattgaattctccgaacgtaattctcgcatgaggtacaaatcctccatgattaatcgcattatattctagtgtattaacttgggttaatcgtgtggattgaattctccgaacgtaactctcgcatgcgctacaaatcctccgcgattaatcgcattaactcgggttaatcgtgcggattgaattctccgaaagtaactctcgcatgctctacaaatcctccgctaacggggttaattgcgcggattgaattctccaaacgtaactctcgcatgcgctacaaatcctccgcgattaatcgcattaactcgggttaatcgtgcggattgaattctccgaatttaactctcgcatgcgctacaaatcctttgctaacgggatgaacagacacaacgctcgcacttatgttcttcctctctcgcactttctttccggctgttctcctatttcggaactccgtctgcttacgtacttgcacgggtaggcaggcaatcaagtctttggggagcgtctcggtgcaactgctcatgttctgcttcgacttcttcctctacatcgcgatggcttccactggaaatggcgcaccaggagctggagggaacggcgatgctccaggagacaacactaacggaggcaatacaaatgactcaacctccttgcaccgttttctgggtatatggttctatctctaattgatgttcttcatgttacttatatattaatcatgctatccttaggattgcaatcctaggtgaatgttgatgatgcttatgcttatgttatgaaaaacatgcccatatttctatttagtcacaccactagattattactattgtgaatgttatgtttattattgtgttattttagattaaaatataccgaattatgatcaaatttacaaaatgccagcctgagggatcgacatctcagcgagcgagattggtgaattgaaaagtggggacgaagctgatcatggacgtcggcggcaggtagaggcgccgctgctggagaagaagggcagcaccggcatcggcgatgggtactgcactgagaggtgcccgggtgcggcgtcgatcggcgtaaggccgcgagctccggcatcccctacaggagcttcctctttgtctggatcatcacgctctgcacaggtaaccaccacttcattcttctctcttccactcacccacatgcatcatcaatcgcgcgcatctgcacctgattcgcttccccctcctcttaattgatgtccacatttttatcgagttatatcatgagtttgtgtttaatttctcctatatatgttctccattgatcatgccaccttggagtgctatatagaagtatatacatactgatgcagccccttcaattaatcaaaatctttaaattaacaattactactaattttatgaattgctttgagattcgtgcacctcaaccaactattgaatttgggcatgacactaagggcttttttggagagattctgaatagcttctctcataatcagaagctctccaaacaatttagcttttcattgatattctaataagttgtagttgtataatcttaggcaataaaatagaagtcagaagctagaaaatctaacttttttatattctaaaaagactcttcaaatttaatctctggccagatctaggagcggagggagagaaggggagccgccgccgtcgccccgtccatgcggccgccgtcgcaccccctcctctggccagatctaggagtggggaaggagaggggggagccgccaccgcgtccgcgccgccgccgtcgctcccctcctccggttggattgggagggagggaggggaggggaggagagtgacgggccggtgagagagagagagagagagagttgagagggaaatgagtggtggccggtggggaggggtggaggagaagataaggaagacttaaagatatttttttgggtaggtatgatttttgcaggcggaccacataaggttccacctgcgaaaatcaatttttccaagcggaccacttaagaggtccgcctgcgaaaataaagttatttttcgcaggcagacctccacctggaggattttcgcaggcggatgacgaaaatccaccccgttttatattttcgtaggcggatcatatttggttccgagggtcatacccgctttgaaaaataaaaggccaatttcactaaaaatccttttttaagtagtggtggctattgattaattgtagcttaatcaaatacgtgaaatttctatatgttacactaaaccatgattgcaaaagatggctaaagaaatgttagtatacatgagaacattcttcaattgatcagcatacaaagtgatctactgctaactgacgaaaacgagacaacatctaattaagccactaattaaacattattacttttgaccaaggtaaaataatgagtatagtactggtttcgtttacacaaagatcgagggttgcactctacgcgtacctgtttgttaagtagttaatcatgagtgatggagaagccgggagttaatcatatttgccacacaaaatcaatatgcaattattgaattcgtacggacaagctgacgatgtagactgataaataaaatcctgtatgcatgcatgcatgcgccattttgtactccagtaatcttttgtttggcatgcatgtcagcatgtgtgcgtggttcaggcaatgtgatatatagtgaattgattggcaatgtgagagtgagttgattgaagtagcaacaacctgtcgggcctagcggccggccagcctgactgactgacgtaggagctgacgatgccattgcacattgttggtgctactgatgctcaattagattagatatcctcattaataataagctattagtagtgttttactgtttgatgataacttatttctagccgtactgggctaaaatgtatagtaatactgaaattaaggaactgctggattcaagcagcagctggttgactttggttaccagcacacaattaacctaaaatttaattaactgttggttctggccgattaattagttatcttacggttgcagcagcaatggtgttaccattaatttttttaatttctacgtaatctatcggtgggatgtacgatggattaataaacttcaactaccttttaaaaaaaaaacttcaactaaataattgttattactgtcatgtactctgacttatttttcgaggggacaggcagggagttcctacaatttaatccagtttataaggaaaaccggaccaaaaaattttacaacagcacggttaatttatgaaaaactggcgaaaaccccggcattgacatactgaacctaaaaactaagaacagcagtccgacaagggataaaactcctaaaatgaatccttcaagaaggatacgccgacagaacaacgacatcgtccgatcctaacgaatctaaggttttcatccggagaaatctcttgaagtggggtttgaaccagggctccaatagcaacgccttcaagaaggtaaacggcacccaagggtgtcgccgttgctagcatcggcaagttgagcaaggctttcgcctcggagtcccatccaaacatagcatccgcgacggaagccaccaaataccacctgcacaccgggtactgtttaagaagattgacagcaactgcagcaggtggcaattccaacttggattggtgcagctatacatgatgtaacatgggaaagtttattcgtcgctcgaggaaacactcctttaattttttatactatttgaaaaatcataaaaatattaataaaaagtatatcaataatacaatatattgataaataaaatacaagctcaaatttaactagaaatgaaaataataaattaactcagaataaaacatgtcattcatagttaaatttattttttaagttatatatattaaattgaatttacatatttgtcgagtgacacccccacatatttaatttattttattatcttttttattaaat

SEQ ID NO: 43947 - DNA, 665 bp, Oryza sativa
caacagctaattaccaagtttttgcgatgttatgtagccaatatttatttctggccatgttataccaagttatcatttatgcattgtcacgcatcagtagaaaagcatcttgctcttcatttaaatataaatacatatcagtaaagctttgtatagtgtatttagctaccctgaatagaatgcaagaatattgaccaatttgataacttgacatgtacctgtaattgcaagaacttgaccaacatcctcagacgagaaatttagtccgccaaattgtttgtcactttcagaccatagagaaaatatctaaaatttgatttcaattatcatcaaaggttgaaaaaacaactttactgaaaaaaaattcaaaataatgtgtgcaccatatttttctatagaaaggatgctatgaaattaatcatcgtaagaagagaactcccaagacaaaggagaaaaaaatgcaaataaaaaatattctatacagttataataaaacatatagtagtagagatatattaacatatccatgctatcctaatctaatcattcaatttatatgtaatttccctatgatttcattggtggagaggaacaaaattgaaatcgagtaattcatttgtctatgttcgtattaatgacaagatgtggtgaaattgtgaccattg

SEQ ID NO: 43948 - DNA, 997 bp, Oryza sativa
agcagtataaaaaaatctgttaaaaacattacatcattaaggaaaatcagttaaaaggcattttcgcatatcaatattgcattgcagactgaatgctatgtatctaacacggagtaggacatttcagtgtatgcttctgctgactgttgacatagatgccatgtagtgttgtgaaaatttcagcaaccgaggtaggtaaaaaagatcacaaacacaacgaagaacctaaagatctacaaggtctgaatcagcatcacctacagtcccatcattggagatcctatcaatgaagttgctattggtgcaatgaaagattacaggaattaattatgtgcccaataaggtttggatgactggcactatgacataacaggaattaattgcgtatctaatattgttcgcacagtgatctccctcaaacaataaattttctagttaacataatagaccccccagctaacccacatcacatgaaccaggacgtggcattactagtttgcaactgtaacaccatggacaacgtaatgaccggtgtaaacggtcgtcgtgtgtagtatgagtcggagcatcacagcacattgtaattaacggttgtaagcagcactgaaagcaaatatggagaagtgcgtagtaaaaacagcaacaacatgtcaacatccccctattatagaaatcttgttgaggcaattggcttaactaacttggtcctgttaatctactattatagagaatcagcgatttccccacaggaacaggaatcattgacatgactgaacaccgaccaaacccatatggaactgcacatggacattgcagtaacatgtagcatttgcaagaaagaagacatgttcctacaggtaccaagatccccaatgttgacatgctgtcatgttcctacgtggtaccaagattctctttgttggcgatattcagtcaactcattcgtactacactagaaaaagaaaaatcctagaaaaccatgagttaaaaaaaaaaa

SEQ ID NO: 43949 - DNA, 2382 bp, Oryza sativa
cccctcctgaaagctaggatattttacttgtaccaaaaaccaagactggttagaaaatctttagccaggatccaaacacaccctgaatgtcacaggttgcaaaaagggggggaatgttccatacataccggcggtgaggcagatcatccagagatagaggaattccttgtaaggcaatcccctgtagacctccttcttgcgatcgtaggcacagccggggcaaccttggtggtagtcccccttgagcaacggcacctcctcttccatcccctcctctcccgcccggcaagggcaatgcgacccccccagaacaaacagggaggctcaccctcaccctcggctatcaatcggcaaaagaggagaagctcggcggcgagggagggagggcctgagattgagaggagaggaggaggcaaacaaggagagggccaatggccaacccaacaaggaaagccagcaacaagaagaggtggaagaggaagccaaaacgaagccgtggtcgtcgctaaaattccacggcgcgcattgccacacacaagaatatgtttagctccatggaggtgggtggaagtggaagtcatttattaatactagtattaggattactagcacatcagcacaagagaacaacagatttgcaactcatttattatgttccatcagcacatcagcatgagaagaaaacaaaagatttgcaacctcacactggcttgatgtggaatttgtgcatttttcatattccgaacttcatactcgttctgaaactttctaaatattcaaatttaatattttttttggacttggcatttttcgtgtttcaatttgtactacttatgcctatatatgtacactatactcaaatctgtgtatgttcctattgtatgttcgaattttgaacatattttttagacttgaatttttttccttcaactttttcacgaacacattcagatccttacgtctcccagacatgtacaaacagtaccgtcacaatcatcttcaaatattttctgtggatttcaagactcagaatattcagagatcgagcaatagtaaatatttgatgaaagcgaacttaacacatgcatgtacatatgggttcgtatattgtaccatctccatattttaatgtataacactgttgactttttatcgaacgtttgatcattcgtcttatttaaaaaaatacgtaattattatttattttattgtgacttgattcatcaacaattattctttaagcatgacataaatattttcatattttcaaacaaaatttgaataaaacgagtgatcaaacgttggttaaaaagtcaatgacgtcatacattaaaatacggagggagtacgtgatacacgccaaagttcacatgagccaccaacagttggacaaagcgacaaaaactctatccgacttgggtggttggagctccacgtcacatatagctccatgcatatttggaattagcatgcaatgctataaactcacattataccacgaaaagtgaaaataattatttaagggcacaaaccaataattagatgttaaaaagtgataaaacagattatagaaagtatatcatggaatttctatataggagacttttgtaaaagtcatggtgtttaaccgatcgaaaagtgcacctttatcatagaacatgattgaaattatgggcgaacaggctttagggtgtgggcagtgagaaatcacatgttagtgggtttttcttaaagagatagtgcttatacacacatgtaaggacgtacgaaaagagtgcaaacgaaccggttcgctttttaagtagtagagatatcatcttacgtagacttcacttaaaacttgatggtctacttaaaaattttaactccactggatatgcttttgttctcaattcgatcatgagccggttatataaactagtatacaattcccttaatatagcaagtttattaaacaactcattttattgttgcacacatgcagccaacggcggaggcacttcccgaacgggttgggcggccgcgtgaactccaccgctactgtctctattaccgttagctacttatacgagtataatacaaattgaaatatcgtatgagccgctatcttgtttttctttcaaaatatgggagacattatgaaaaaccatacggccaggttaataaagtaaaaaacaaatttacagaaggtaacgtggatgaagtgaagtctgagtaagcgctaatcatgcatggagcaatggttggcttgtgctaatcaagaaacgagaatataggtagtacaaaagcaatgaatgaaccattaagctcacgaatttaatctcagcaggtcaggtcatgtgcgagtgtgcgaccgtctgctacacatgcacacgcaccctg

SEQ ID NO: 43950 - DNA, 694 bp, Oryza sativa
ttcttaaaggcaaaaggttttagcatgaaaatatcatgaaaaaaataccaatcttatcatattagagacataataactactaagtccaacaacagagttgaactagaaaagtttgtggactatcaaattcacaagtaaaggaataattttacatttattctgtactaaaattggtatagaattttcatgcaagtgtgttatgcttgttttatttatgaattgtataggttctcttgggcccaagaacgccaaaatgcagccttcttcccaggtatataattgatttacaagttagaaaccaacttctgttgataactatgcattttatagtgcaagtataataaatgtactgcatccttgaaggtactaatatcagatatattccattgatgttgcaggggatcaaatgatattctttgccctaaaatggattgtccccgttttgcttgcggtcaagctttgatgctttggggtcagatcaacattgttgtccgcagtagtggaatcttctcttgatgctaattcaccgagttccgtcaaagttcttggtatagcatgcttgtaaagattctttcttgagttcacaaatccatgatttatccctgttaaagttaagaaaaatcaaatatctcaatgttaaaattagaaatagttcctaaatgtttctttaacacatacctctcaattttgattt

SEQ ID NO: 43951 - DNA, 737 bp, Oryza sativa
attcctgcacccccagacaacaatgatgcaaacaatagaaagatcagagttatggttccttcacaattaatcgtgtattggtataagctatgaaggagcatccaacacccactaatcactacttttgataaatcactaacattaagggatagaaataaatatccagataaaatcaaaatacgaggtaactatcacaaagctcaagacttggtgcatttaaccagccacgtggtctattaaagcaatgatgattttttgttacttatgcataatagtgatgtcgtaaatttacctggaaagaaaaacgcatgttggcgtttttgtgcccaagaaaacctacattaaccaatcataattaatatgccaacaagacccatgatacatatcaagtcaaccattgcattttttataagcagtaatcagcttagttactaaccactcaagtcaaatatttattcattttaattaagtaatccctctgtttcaaattacttcttattctaggtttgttttaatttaaacatttgtatattttgccatcaacttctagacattcatgtagtttaatatcataagatttatgtttgtagattagccttgatatatactttcataatatataattcacatggtgttaacctatacgattttctagaaattaattgtcaagaatagatacgtttgccttaggacaatactaaaatgataactaatttgaaatgaatggaacaatgaaa

SEQ ID NO: 43952 - DNA, 2367 bp, Oryza sativa
tgtggagtgccaatagctggagtagtttttgtcacttagtgtgttgcttatgcttcaaaaattttcatttcttgagcatgcaacgaaccattccatgtaggagccccttgcctgacctggaaaacatggtaattttggaaagtaagcagacaatgccaatattttactggattatcttgacatgttggatatcttggttaatcttgcctttgaccagctggcagccatgcatgcccagtcattgaggcaaaggtaaagacaccaccctagtatttactcatgcttgtgtcagttgtagttttcacatgttgactattgtccgctgagagactccagactgcatgaatgtgttatgcgcaaatgcagtttgaggaatccctcctcatggatggttggtacttaccaccagaggaaacaggaatggtgataagttggatggttacaccgtggtctcttgaaccgtaaacaactttcatgttcttctcacacaattacacttatatacgagttttattggatatagtagaaacttatggatggcattcttttattgaagactgtgtcagtgtactaaactacaaattaatccagcttactaccaatgaaagtggtaactgacaacacattgatcacttgcagagaaggtaaacaatacagctgtataatgctagagaaaactaatacagctgcataagttttatacttttacacttatacctattgaattcagttgtcttttgtagaaacttgtggttgatattctctgttgaatagtgaagtatatcaatttaactaaactgcataagaccctttttgtatcagttacatatttgatcacatggacataaatggttctgacttttaaatctagccatgaatttgttgattctgttgtgatccaatacatgttaacagtagcttgttgctaagttccttgaattgagctcaagcatctcttttattgtgaaaatgaccaggtatttaagaaccatggtgcatctgctggggcctcaatggcacactcacatagccagatgttaggaactccctttgtccctccctctgttaccacccggcttaactgcatgaaggaggttttcgagagattggggaagtgcagcctttgtgagttccagtccaaggatattttggtccgtgaaacacacaatttttctgcaattgtcccttttgcagcatcgtatccttttgagatatggattattcccagacagcatagttcctatttccatgaaatagacaaggatacggtatgtactgttcctaattcgtttttatgtgccattatcatattatgcttagtggttcatactacagtttcgtttacaagtttatgtgattcacaatttgtatattttttccttctttgcttgtatcatattaccttctgtgtatgtgattcacaatttgttactcattgttgaagtaagtccatctgtctatatttcaagcttcaatgtgtatgctagaatggtagttaagtggttaaacgtggacttaaccagccaagtttaaatattcaacgcctgtatgcccagtgattgtaattgccaggtgtaagtgttggctgccatgagaaccaagttcaatgcagtggcaataatgcaatatgctttcagctattggttcgattgacttagggtgcttagatatcttgttgctttttgtgatatgcctatactactgctagaattcagtaattagtgttttacatttactctggtgtgtcacatggaaattagcaaattgtctttctaaatcctgattaaatgttggcctgtaaatgctgtgcattagctattaaataaccacacctttaatactacagctacgttatgtgccatgtcatttcctacagccacaagcagcacatgacacgtttgtgtctctctggaaatttatgagttcctcatctggctttgagcgcaccatactgggtcacatatgctgtgggacatctgtgcactaaatcattttgatttactttactttttttttccctttcagtgcttattgatgctttctgtgttctctttcttttgatgtaaatgagacgtgagttctatttcatccatgttggtgtgctctagtcattgatcctgttgctcatttcttggtttgtccatttcagtttcttgtatgctcatactgcctgactatttctattgcctttttgttgcattaactgattgcaatgatgtctgcaagcactggatcttgaatctttattgaggaccatgctggcaagagttgtctaaacagctcaacgaccctccattcaactttatgatacacagcgcaccatttggagtctcatcatcctgtcttccttacacacattggttcctt

SEQ ID NO: 43953 - DNA, 2596 bp, Oryza sativa
aaaaggattaaaaaacctcgcctgtgctgcgctgtgaagtgcttgggcgagtttgaacatattttgacaaactagccaagaacccatatgttccaataaaaaaacaaattatgtcgtgtgttgttattgtgggtggggaactaatcctccacacacgtaaaatggagaaacggattaacggatgattaatggagtattagtttaaaaaacttaaaaaatatcaatatatatttttaaaattaacttgcctataatttttttaaaaaaaatacacattgttaaaacattgtttaacagtttatgaagtgtgcacgtgaaaaaatgtgaaagtagaatgttgagaaagggggaaaagaatgcaccctaaatctaattcaacaaaatcaacgaaaattcaaccttttttgaaactgccacgcatgttgaccaaaacggtcaacttgaaggagtacaaccgttacacactcttagagcaggtacaatagtgagctataaactagctacaaatatatattttaaagagataaataaggagagaagagcagcgggctacagatttatagccagctgtaacacggactccaagacacagtgtgcgtatgacaggtgggaccaggtattaatagtgtagtatgtagctattgtatgaatgggctattagattggctatagataaattggagctagtaattggctatactattaaacttgctcttactagtttccaactttccatctctacatgctaactactccctccgtcccaaaaaaatagtacaataaatctgaacaaaggtatatccagattcgtagcacatgtgtcacattcaatactagtttgatcttttataggacgaagggagcagaatcttgatgatgggtacacgcacactcgtggagggagacgtggagtaaaagaagcacgtccatctctacatgctacagtacacggtactactcataggaaataattttcttctgtcaggaattaatccgaaaatatttctgtgtcattattagcctttgcagggtcacatacgtacgtagtacaaatctcacaaatccatccgattcgtgcgtgcagtcgatcgatcgatcaagctgtaataatgtgaagtacacaccaactatctataattaaacttgctccatctgatcaagaagcatctggctgtcaccgccgccgtcgtgtccctccgccgccgccgccgagaaatctctgatgatggacaggtacaccgtggcttggatgacgacgatgatcgccatgaccagcagcatgaccggcagcatgagcagcgcctccccccagctggtgctgtccaccaccaccatccgcgcgatcacacccagcaccaccaccgtagacacgacgaacaaaacctgcatcatatccacacacagatcatcagctaatcaagtaatccacactgaattacgaggtaattcctgtgtttcattatgaaacatttttcctcgtcaaatttataaaaaaaaatataataatattttcagcacaaaacagatatattattaaaatataaaaattgaaaatgcttctgccggtactttggtacgccattcgtgtataagtcggttttcaagttcgttcgcttttgaaaatacatatccgtatttgagccggtttttaagttcggttttggaagtacataagggagtcgtaaaaaaacttgcatgctaattttagatgaacggactcctaactacagctcataatttatatatatatatatatatatatatatatatataacaaactcatataacaatagtaagattaaatagtttccacccgttgcaacgcacgggttttttctagtattattaaaatatttacaatgttatatttaataaaattaatttgttgttgtaaatgttgcttaatttttcctataaacttaatcaaacctcatatgtttgtctagaaaaaagtcaaaatgacctataatataaaaaaaagtgaaaataacttataatatgaaaaagagaagtactccatccgtttcacaatgtaagactttctagcattacccacatacatatatatatatatatatatgttaatgaatcatgtatatgtctagattcattaaatgaatgtggacaatgctaaaaagttttatattgtgaaacgaaggaagtagtaattaactagcagttgtcagtggtctaggtacgcactgtgacgaagtttttgcaggcgggggtcatggggcggtgggggaggtggtgcgggggcaccctccgccgctcgacgtagttaccgtcatcggcggcggcgacgtcgacgaccgtgtggggcggcgccggcgggagcttctgtagcgggcagtgtaggggatcttcaaggttgtatgcacccatgaaagggaacatcgacatgtcgtcgcacgcgcgagggacggacgtacacgtacggctgtcttccctttcgatcgtgccgccttatttttatagcggggagtccccaatccgattccgtcttagaaacgcagacaggacatatacacgggataaataccccggtaaatatcggcaagtgagtcatgcatttggtttacactagtatcatttt

SEQ ID NO: 43954 - DNA, 2107 bp, Oryza sativa
aacttgatggaggtacctttgaaatcgagatgggtttataacgaatgggctagacaaaatctagaggcacgtggctaagtctagggcactttcacatcacctttctcctccatcgttgcttctcactcctagttgacaactgtcgccaccacggccgagccacactgtcatcgtcgtcaaccatagccacaccaccatcgacctgcgccctcaataacggtggatctggcgttggtggcctcgggagcgacgaatccgccatcgccaggggcttagcaggccttatcatcaccatgatcctgggcattgggatgtcaatgacggcggtaggccttgggacaccggatctaacgttaggccttagtagtgaggacttcattggcgatgacgactacacactatagtgaggatgtcggcgaggctcatcctacgacgacatgtgttaacgatggtggtgcgagggtgtcaacgccagcagttccaccatccaccaaggtcccgaacgaccacttgcttttggaatttgtgaatttttgttttggagtttttttttttgaatttgtgattgtgtctataaaaatttgcaggttgtgattggatcggaattcatgaattgcaggctttaattttatctaatttttcttctttttttgccaacaggcaagccactttatagtaccacctggaaatactaatttttactggtggttccatccgtagaaattgttttcacatatgggtatcttaatttaaccgtctataaaaaatatttgtagacggttatcgaacttcacaatttttaatctgtcagaggcatgtcgctcaaccatctctacaagccgaatttgtccgctagtgaaaactaatttcgcatcagtgcattgacacaatgacaccacaaatagccagattccattggcaggtttataaattcacaaaacctcaggggtatatatatgctattctcccttaatttaaaatttaattaagcatcaatcgtgtaatgggcagtacgtgtacgtctagtaaaaggctggcaatgcaagagtgctagctacacatatgtgcttaatctctaataaagtgctctctaactttgccctttataaactagaaagataaaagtcagctcagcttctaggcatgtctggttatacttatccggtgctcaacaagctaagacaaaggtcactgttttaattctcacctgataaaaagcaccaagtaaatttgttttttttttgggggacaccaagtaaatttgttgcatatgaaattttacacatacatataattttgttactaaaaaaataaagaagtagttaaacacaagaatgccattaattatacttcaaatctcacatatatttccttcaaagctcttacatatatatacatatggcgtatttacaaattagggtcccagtgctaaacatagcgtatatctacaaatatacaggtccgatatcatatatatacacacactgcaattacccaacaataggaaaatgaattctgccatatcattaaactccatagctagctcacacatatacatggcactttttgtacgaagactgtttttatttcagaaacgtgcgtcaacgatcttgcggtcaactccatcgtaggttcatcgaatccaacctagctttaactccaaaaacacatcattttttttttgaacattaaaaacacatcatcaaccccacatatctttcctcctagaatctccccatccatatcaatgatatcatggatatggtacatctccacacagaatttaacacaaaaggggctgtttggttcccagccacactttaccattacttgccaataaaaattgccacaccttgcctaaggtgaggtgattaaattgttagccacaacttactaagcctaagggaatcttgccacacttttttgagccattgacacgtgggacccaatttgttggaggggaatcttgccacaactgtggctacaaccaaacacctgtcaaatttgcctaaccttaggtgtggcaaactgtggtaaagtgtggcttgcaaccaaacacacccaaaatagttatccaaactcccaaggcagcatctcagcaaccatg

SEQ ID NO: 43955 - DNA, 644 bp, Oryza sativa
ctagcatcaattatcatcctcctatattcatgcattcacatttcttccattcctctctcagttattatggtctccaatgaacttgtcaccatttaccaaatgacccagacagcaaaagcgctaaactcagtaaccaaaaaaacgaaaatctctacctgtacatacttcaccgcagggtgctccatgagctgccgcacgcggcgcgcgtacgcgagcagcacgtcgccgaccccggccgcgtccaggtcccacagccgcacgtcgtggcgcggcgtctcgatgaccacgtcgtggaacccgaaccccaccacggcgcgctccccgggcgtcgcctccccctcccccgcctcctccggcgccggcggctcggcgtcgcgccgcagcgccgggtacaggttctcgatgacgcggatccgccagggcgacgcgtcgggcggcgccggcacgcggaagatctccggcgcgcactccgactcgcggccctggcagaaggggcaggacggcttgggggcgccggcggcggcgccggcgccggggctagggttggcgggggcgtgcgacttgaggtcggtggggcgccgcgagcgcgccggccagaagactacccagcggccgaacacggcgtcgcggcgcgcctccgatgt

SEQ ID NO: 43956 - DNA, 687 bp, Oryza sativa
attcctgcagccccacgaggaaatgagaaatactgtactagtataatttccttgtagcattcaggtttctgtcaacatcacctctacctcatcttcttgcaccagtttatcagctagatatttaatggtatttaatagtacatggcaccatttagacatatgccataatgtcagcatcccagtgtttggtttgctatatttttgaagtgctcatctaatcagcatggttggattattccagcacatgacggattctgaacgacttattttctttcgtggcatatgtggggtcaactactagatgcattattttgtgcctttcctgattactaaagtctggagattgtattccgatccgattttttggatctgatacagcatttttctgctccccctgttctggatcgttgccactccatatgttggtagaactctgaactataaattatcatcatgagcgaaattatgaatttgattacagttgcagttgtattagtagtacttttatttgtttgtattattgattattaatggttgccgccatgcgaaaccttgatggtgacaagtgacgagtcaaggcctatcgcatttggacaggatatgattatcaattgccgaggtgtttacgtgctgatgacttggctaagcagtaatcaaacgacaaattatcaattgttctacatgtat

SEQ ID NO: 43957 - DNA, 2192 bp, Oryza sativa
tccatctacaatttttaacccatgcataaacattaattacttgaaaataatatgtaattaccattgcaataccaatacttcaaaagctaacaacatgtctaatttttccaataaataagtacattactcaaatactacacattattgataaaaaaaaactctactcctacaaattacctacccttcaccacacatcaacccctttcaaaccctctcaatcaccacaaatccatcccacatcctaggccatcaccacacatccatctcccatcaaaccctagtgcatcaccaaacatccatcccaaatatattttgtcaaatgtatcaataacaaccaaatggataaagatatgccacctccacacttcatccccacccatattatccatctaataatccatccttagccaactattatcaaaccacgtctacaaccaaaacaatgcaaaatatccaataaaactttggggaacttagggtttatagaggggtttaccttctcttccgatcccaaactcaatgccgcacaaatcaccttcgattagagaggtttttgggggagattgggcgaggagaacgcggtgtcgaccgaaccctaggcgggcggctggggaaaaaacggaggaagaactggctggggcggcctcagccgggctccaaggtcaacgccaacttacttggcgctgaggttgggcacctcagcgccgaagcggttggcgctgaggtagctgccacgtcagctaggggatcggcctggccgccacggtggcacaatgtcagcgccagtcccattggcgctgacacggccaacctcagcgccaatgcgtttggcgctgagccgacggcctagttttggttgaagtttttggcaggggttagtttcgaaataagtttttgaaaagggtcaatttgtcaaaaaaacggtccttcgggggtatacgtgtatgtttcggatgagggaagaaacggtacgtacgccgtcaggatcgtagttggactatcttcccgtattccaattctgatcgtctctccatgtcggagtctagtagtagtagcaaattaagattactcaattcgtactacacgtatatgatctcctaatccgagaaagctctgattcgcgcgtgcatcgaggcgccgctaggtttcttttttctttccggaatttcttttcgctgttagatttcttttttcttgcatataaattaactaattcgattagttttagataataatgataattaaggtaatgtttattttttctgaagattttttaagtaacagattgaaaagaaatctatacgtgaagtcaaattttgaaaacttttaacctagatttaaaaactttcaacttaaattttgaattttttgaagtcaaattttaaaaactttcaacttttcatctcaaatttaaaaaactttcaatccagatttgaaaactttcaacccggatttgaaaactttcaagtcaaatttgaaaagtttcaactcaaaatttgaaaattttcaactcaaatttaaaaactttcaagttaaaattaaaagctttcaatgctacatttgtaaagaggtgtgcaaaagattgaaaaaaatcggaaagaaattgccaaaaaaagaaaaacgcggcgccaaaatcgaaaaaaaaaaggtctgaacaaaatcgcactgccaaacccacagtgccacgtactccacaccccggaaaacctccatgcacggacgccgcgcgagcatggagtacatggactccatgacctagtcggagcgaggcgaggcgagggcgcgcggcggcgaggcgtggagtagcgtggggaggaagaggaggagcgagagcgcgcgccccgttggcctctcgcttctcggcgcggcgtggggaggaagacgagagaggcaagtagccgtagagaggagattttgttatttctgaactgggcgacgcgacgcgaggaaggagacgacggcacagacgcatgtctctctctgacaggtgggccctccggtcgggtcaactgtcgtcaatgacttgtaggcccaagcagggtgagtcggcctcgctgcgttaacttggtgtcaaatttgctctctgacaggtgggccctctggtctactgtcgtcaatgacaggtggatccgttcacggagctgtcaaattttgcccaattgaggctcagatttaggattgaatttgagttt

SEQ ID NO: 43958 - DNA, 947 bp, Oryza sativa
atcttccttagatggcatcggctcacacaccatggtagtctgtacaagaactttctctaactggtgaaggacagcatgccaacatagaccctgtgtgagctgacaaggtggcgcttgagtggagcctcgtcatgacaagcaaagaaggccgctactgtctgccataggcactgcttgaagcaaaagaaaaaaaagggagggaacaagaagaatatggcatgtgggcctaaaacatgggatgagggtagggaggccaattttgcaaaaaagttggtgcgtttttgtacattaatggcaggagtatatacagagttaatggcaatggcatataaggggcataaaatttctcctagtggcacagaagggaacagctatttttgattggcatataaggaaaccgatatgatgtagaggccgggttgactgcgacagacctaaacagctattttcttcccgctaatttttatggcgggctgtgtacatccaagttggatgtagaggccaggtttttactccgttttctaaaacaatataaggaaaccggtatactttgagtgacacaaagggattttttttcctaatcaaaagcaaacaagccaccagggcacaacaccaagcatctaaagcatctttagataataaccgccaagcatctgggattctgggtatcataatttcataccgattctcatgaacagatcaaactgctagaaattactctactctttctgtgaattgtgtcttactactctacccttacaattaaaatggcaattaaattagtaagccaaaaataactggataagtgtccagtataaactgactaatatctgggttccctcaggcacgacaaagccttaatccaaagcaaacaagccaccagggaatctaatcatctttttttagacaacaaacgccaagcatctgagtatagcaagtgccaagaa

SEQ ID NO: 43959 - DNA, 600 bp, Oryza sativa
caccagaaggcatctgcagaagaagtttgaataaagcaaatatcagcaaaagcttgacatgttaccctgagagatacatttaaacgattagcctatcatactagatagctaacaaacagctaatggaaagaactgataggctccgtctagaggaaatgctattcatgtaattgcttatagctttctcagataattgttgaactaaatatgctggggttttaagtcagctgtgtattactgtatttttcagaggaactgaaatagtttggagttttgacacaacagagggagcaactaaagagaggatgcactttctcctgtgtattatttataaaataaacaataagagtgctcctgtacataacattatatgcatgcttaccttgattcctaagcaagccaagtgaaaagttgaagggcagttatcgcagcagagcaaatcgccaccatcaccacaaatgccacaagtatcatcatccggatcatcaccaggatctaccttgtaaaaccctttcttttcagattgtgattgcttcttccacgcatcaactaagcattgtgacaacgtagccccaccatcttccagaaagatgttttcat

SEQ ID NO: 43960 - DNA, 614 bp, Oryza sativa
ttcataaaaccctaggtttttaggcgtccgtaactcaaaacctcaatttttactttgtttcatgaaacccctagattttgagggtaaaatggttcattaaaccccaaatataagctttatatcatctttcaaactaatattgtagtatgtcattattagttgggattacgttgagtttttttttatgaaaaactaaggaaaaaaactagtcaagatctagaatgtgtacttcaagtcaactaatataaatttatgaaaaaaataattttacataaatatgaggtattcttcaaacattttgcctcaaaacatgagctttcttgaaaagaacaacaataataatgggacttttatgttatggtcctatggacgccccaatatctaggattttataaaatttactctttttttccttgtccccttagatgcgtcgctcctaaatttaggattaatttcgtaaattttgataagcacactagctaatttcttccaatgtaggatgtagcagaaaaaatagaggaaatgtatttttatcagcaaaaagttttccacaatacaaaataaagtgtgacgtggcctgaataataagcacgaaaaaaatgacgtcgattcct

SEQ ID NO: 43961 - DNA, 4237 bp, Oryza sativa
agggaagaggcacggaaagtgtccatgactccatgtcaatgaggagggtgatgaaggggagtaggctaaagccaaagtcgatgatgatgccgatgtcagtgtccatgcgggttgtgaggccgagccgctcaagctcattgcggacaaggggtgctggtgtggtgttcccagaacgtgacctccagatgggcgtggatgtggtgccgcacgcgcaccatccagtcccgtgcgccacaacagcgcctcctcgtaacttgcggaggcagaggaaacaatgaggaggaggaagaagagaggagccactctttctccaattcggtcaccacggctacgattcagcctccgctgtacctcctttctcctccacgagctccacctggcctcctcttcatcagctgctccctcatcaatgtgtccactagcccctgaggagattgtttgcaccaacagcccaaagcccgtcatgtggaacaacggcaagatgagcaatgtcactatgaccggcaacgacagcttgccacttcgacttcaatggtttggcggctggaggaggagcagcgctgtcaagccgtcctgatttgaagggaaatagacaaggatgagagtggctgcctgggggaaaaagaagggagtagttgggccgggctgagggagaggaaatgggccgtctgggagagggaaatgggggctggcccaaggaaggagagaggggataagaggataggggttgtgttttttttcttgggaattcgaaggagatttgaattggaattggaatttgaatttgaatttttgtaaatggactgtaaaagggactgtgaactttgatattatgggagtttatttgtggacttggaataagaggtttgagatctttaatggcataggcaaaaatccgaataagaaccaaattttgaaaataattttgtatttaaaataggttttaaacgaaacggaaaaatcgggatgttacagaaactaaggtctcctatacgggtaggcatctccgcctctccggtgagcacctatggttgtggtgtgccacgggaagtttgtcaagactttcgatttcacctccgcaaggggaaaaaagatcaagagtgaaatcgatgagtgtattggtacaacctcatgagaaaaagggttgaaagagactcaatttttgtggccacttaacggaggcttggatcgttcaatggattttatgttggaagttttaatttgaattaaaagttctcaccattttaatatgttatgagatgtgataataagaacgccatttaatttaaccccccccctctcctcgcgtaggaggcatcacggttctttcattagggtggtcaaaaaggcttaaggggattcagctactgtcagcactcatcagaattcacaacatcatgcatgtttctacctagtttagcataaacagtaatatattgctagagttaagtgcgttcttgtcatcaatccgtaatatgcatgaatacaaattgtcctcataaccaatattttcgttagaaacccctgtttcaggcttttcaactataaaactagtatattccaacatcagctgaactggaaattctactctatgtgtctaaccaacacactaatcttttgccgagtttcctgagcctgtcataaattcagcacaaaataatttgctaaatcatgggtctccttcctcggtgacaacaatcaacatcatttagataaattctactaccaaagaaacacaaaatacacccaaagtgcataattttttctggtgttgcctaacattaaaattcatcatataagttcaaccgtcgtcaatgatgggcgggcctgtgtacggtgagttggcgtagacgcccgccgcgttaacttgatgacactactacgaaaatcatcgttcgtggcgggcattttaggttttcgctggcggaatttggagccgccacaaagtaaaggccagtgaagatataagattttcgctggcagtttcgtttcgcttgtgaaaatctattttcgcaagcggacacatgattttttgctggcggttgaggtccacttgagaaaactcattttctctggcggtttcctaaagataaccgccagtgaaaattaacccaccccgccaaaaatcacctaccccagattcaaaattccccagccggccaaatttataacagtcttcaaatccgcatcacaaatacataatattggtatcaatccttaaatcctcatttagatgggcagcatgtacagattgaaatccacatccaaaatttcgagcatccattcaaatcctcgttagattccattaacatgcaagtgaacacgacatacaagcattttgaagatgaaaaagaaaagaaaaacaacatcaacaggagagaggaaggagatcgtcatcgccgtcgccgaccgagcagatgtgggagccccatcgccgatcgagcatcaccgccgccgagctcctcccgccgcaccaagccccgcaacaccagatctgagaagcccagccgctagcgagaccgtgggagggggagggggaggaggaggagaagagaagaagcgcccgcctccgtggccgtcgcgcaccgcttcctatcgcagccgtgcgctcgcctaccaccatcgcagtcttgcgcccgccttccaccaccgtcgtggcgcgctcgccgccgttgttgtcgcgcgcccgccatcatcatcgtcgcgcgcccgcctctcctgctgtcgttgcgggcccacctcccgccgccgtcgcgcgcccgcctctcccgccgtcgccgtgcacctgcctcccgccttcgccatgcgcccacctcccatcgttgtcaccacgccggagccaccaccgccgactgtggggtgggaggaggagagagtgctggtgggggtagaggagaggagaggctggttgatgaggatggatggataagtactactggccgttggatggtgatttttataatggctgtgaattttttcactggtgttggtgctctttagtaccgctagggaaaataggattattgttggtggtctattaagatgtctgccagtaaaaatagggttatttttacaagcggatttcttaagcaaccgctagtgaaaatggacataaaccttccacccctctttaaaatttcgcaagcggatttgttatataaccgccagcgaaaagaataggataccaccataaaaaatcattttctagtagtgtcgaatgaccgaaagctgtgaaaatttgctcaaatagccgcaggttcaggattgaatttgagttgactgtacacaaaattgatttaacgtaccgacttgttttgatcgctgctggagtgagtttgcagaatttaggagcgtcatgcccgccatggatgctcgatcgatcggtccagtgaataaagataacttagctagtacgcgtaccattcaaaaattcgattaatagcgggaaaatattatgttatatagtgtacgacatcttaccaaacagttaggagtggcatagccgcacaagaagattactctttgcaggcatgttgctttacgcaaccgtatgcgataatcaatctttgtgtgcagtcgtattaaacggcctgcctgcgaatctgtgtgctgttggattgcccacacatgaagattgtggtcttcgtagaccttttagagtagacgggccgtccaaccacatcactactggaaaagtgatctttgctgagtcggctgatttccacaatagttccggttctaataagaactgggattaaagattgtttttaatcccggttaaaaatttttttaatccttagtcccgattcatcccctatcagaagcctatcaggggaccgatgatctttaatctttactcccggttggtattaccaatagagactaaatatccatatatctttagtcccggttggagttaccaaccagaactaaaaatccatctttgttttaatctttactcccggttggtaataaaatccatcttaactccagaccaactgggagtaaatatttctctcccatctctggtcggttaagtcacaggtgagactttcctcctcaccaagatatttagataagatcggatcgatcatcccctctcctcctacccctcagatccccttcctcctcctaccctcccatccggcggccgacggcagcgggcaggtggccagcggccggcagggccgcgcccggcgccgcggcaggtgccggccgtggcaagcagcatcaagca

SEQ ID NO: 43962 - DNA, 2421 bp, Oryza sativa
ctttttttttctttccgcggccgatagcaatattttggtctcgtagcgctagctatattcagattacattaagaaatacatgttttatttttttagaaaataatgtaaaaatatacatatgctacgttgagttgtaaaacgaaaatcacaactaaaccaattaaacatgtttgctcccgtagtgatgcatctaactgattgtatatatatttgtatgcgggcgcgctaacgtgtttaattcagcggcccaatagttgatcaactggatcatcggaagcaccgtgcttcatttttgtaattaatgggttgtatgtgcttacatccaaaaatattgagggaaaggacatgactctttgattacatgactaagaagattaagtcttccaactaattaatagaagtccataccaaaattacaacggtaaaatgtatatgagtaaaagagaatttaaggctttgacttcaatttcacaccagctcattcttgtctagccatgttgagcatgtggttcaaccatataagatttatagatctcaaaagtgaaaaacaaataaaaaaagatcagagcgagtcgtacatttggcccattttggttaccgaatttcctttttgccacccggcctttatctaattcttttcaactttggattagatacttctactatttctttttttcttaccactaaacgctcttcccgagcacaacaatagcctttaagcacatcggcaccctaattaacgatctcctctactgatgtgcaacatctctgacggaagataaagataaaagcgtagtccaaagtgtaaattatataaaaatacctagtcgaaaacgaaaagattacgtagaaagtagtctaaagtggaattaactttgttaacaaaaactgcacggccaaaatacagtttattcaacaataaaataagcaacaataataaaattcgatctcgaccggtacggttcgtgcatgttgtgtactccctccattcaaaaaaaaaaagacaaaccgtaggtttccgtgtctaaagtttaaccgtctgtcttatatgaattttttttataattagtattttcattgttgttagatgataaaacatgattaatattttatgtgtgacttgtctttttatttttttcatattttttaaataagatggacggttaaacattgaacacggaaactcagggtttgtctttttttgggaacggagggagtgcatgtatagagaaagaggtatgagcgtacttaccaagaatgctttcgcggcagctcgggcaagagcagtagggtgctttcgtctctcgatcgtcggaggatctgcaggccgtgccggggctagctgcccttgttccagcaagctgcacatgagatcggcctcggccttctccatatatcgctcgcgatcgatcgaggatcaatacagctggatcgatcgaacgttcgcatacgcatatcgatctcgcgaaacacgcagtgtgtatgtatatattggaagataattaaccgtgttcctacgtgtatgtttcggaacaggatcgagttgaacaactttcccgtgctccttagtgatcgtctccgtgttgaactccctactccacgctaatgcacttttaccggacttctattggtcacttggcgcactaaattaacaatcaatttggtcgatccgtggtttagggaactctctccaataatccggatgtcacaccgtgaaaaataaaaaggaataaattcactttaggtctctcaaattgtcaaccattctgattttcgtccttagttcggaaagccggatgtgacgcatcccccaacttataaaaccgtgcaaacgaggtccctcggtagtatactctctgattttggctgacgtggcgctactttgactaggtctttatccaacgtggtattgatgtgttacttacgcgtcaatttaatccagaaaaacaataaaacccgtaggacccacatatcaattacacacacaaataataaaaaatagcggggcccactgtggcccatatgtcatcctcactactctcctcttctctctctcgggcaaagcaaagcagcggtcgcccggtgaagctggttgggcgacagccggagcaggggagggccacgggcagagctgagggatggagcagcgatgggccacgggcggctcctctcctcccgccggccggcgcgcgggccatccactccgccccgctgctctgcccacgatccaacgccgctcctcttctcccccgctcttctccccagccgtcgtcgcgtgctcctcttctcccccacctccgcgcgctgctccttccccccgccgtctactggggcgaggcgggtagaggcgaagagatggctgctccgcccgccggctactggcacccctctactctggccgcacatagagagaagagggag

SEQ ID NO: 43963 - DNA, 3157 bp, Oryza sativa
  unsure (1)..(3157): unsure at all n locations
ccggtgcaatatatgtcntaagtcagtatagtgaatggttttgttctacgtggcaatttcaacagcactgagtcagtgtgggccccacatgtcatatctctatgttctctcggtggtgaggaacacggccgctggcagagggttgtgaggaggacggtgaccgatgagagaagctagctcgatagaggacggacgccgatggttgccgtcaacgatgggtgaccctgacaacgctggtgacaaggcggacaaggaaggcgagaccagggagcacaatgtcgtattcctctcagcgcccactccattatccgcagcaacaaggagaagccgagtatgctgttgtccgcagggccgaggtcctcgctccagggatctggcggctggccgcccgccgtcgtcgggagccgagggggtccgttgcctagtgccctcgccgcttgaccgcccagatctggaggctggccatccgccgcctcgggagcctggaggcccgctacttggtgccttggtgtcctccgtctggtggacctcactcccggggaagacattgctccggtgacaccgccatgagccaatggtggggagcgagaaggcaacatcgggaaaggaagatggcgggcgggatggcgagctcgagctcgccagctccccttccctctcccttgcctttatcttctcatcggctcccgcttgctgcaacctctccgtcaacaacctttggcgccctccctatcccggtcctctgctaactctcggcctcttcagatgatgagtagccagcggcggcggatacaaatggggtcgaggtcagtgttggaggcgagctagagcatgtcacagatgtcgtcctcctcaccgcctgccactgggcgttgtcctcctcaaagcccgtcgccggcctcctcgcagtgcgccgtctgttgagattggaaaaggcaggaagagagatataggtggagagagaggtgaagaatcgctgacatgtggagcccactctaactcagcgatgttactcgggtcaaattgcaaattgccatggaaaacaaaatcactcaccctactgccttgcgacttactccctccgtcacaatatataagggattttggtgagatgtgacgcttatattatgggacggagggagtatattctaccggttttgacagttgagcgatctgttgtatcttgttttctgtttcaatgacgaaaatcagatccgttgtcaagttaagagacctcagatgaacttattcctagcacatttgtgttgttgcatattgcctcagctaatcacgcgtgctggaacaagcagaaataaataggacgatcgaaaaaagagggggaaaacatgcaaaagaattaaagaaagatgaaaaaataattttataaaaatctttagatttgttgttcgttataattatcatttatcgaaaacattttttccagatagcatctataatcatctattgaatacaactacaagtagaaaagaagagtaaatttcataaccccatcaagtcacaaaaacccacaggtattttggcatgtggcacataactcaattattatgatcctaaagttaaaaaaaatgcactgttaactattttgacatatactcttgtatcaaaatttgataaagtggatggaacatttatatggtggatgaaatgctcataaatttgacatgtgattatagaactcaaaagtgtggtagatcaaagttaaaataattagtaatgtagttttgaaaaatattaggaccataatatttttgggtatgtgtcacatgctaaaatttatgtggttttgttcaactttgatcataataggtggagttatataaaattataaaaaaatactaacaatcctaaattccaatcctactttgattcgtctcagtcttcaaacaaacacaaaattaaattacactaatagatctatttaaaagtatgatttgtatgtccgttaaaataaatcatgtaaaataatgtaacttttctatgttctaatatgtatctgttcgattttttaggaccaatcatgtatctgtttatcgtatcaatgtgttagaaatttcttcatgccaggtaattaattaacaaggggagaaaacaccgcacataatagtgtgtatagttaatctcataaggaacacgatcccacagcgtatgacgcatgcaccatctgtcacaggtaaaaaagaggaaaacacctgacagcaggatatagagtggtacgatcgacacagccgtcacagagagagcacactaaactgcaggatagtgtattgttgtataccatgcctaaacgggtctgggatgaacaaaatcaagaaagggatcgagaaacacccatctgtcagctattggaaggaatcttcgacatattgcctgtccccaaaaagtaaccaaaaaacagaggataggaattagagatagctagggaatatgtatacagtacccatagttgtaaaaattgagtttatatatacctgataaaatcaattccatttcctaaaggtccgggtcttgatcaacgcccgtacaacagctctgcattaacaattaatgataatgatacagtattattatctacctaccatgacattatatagaaactaggaatagataagagagaatttaattatttgcttacccttgcccacaaatacaaatgcccaaatagcaccacactgccaatgaagccaaaaaccaacctccaaaaccacaactcattgtcgtgaactgcaggggccaaaggtgacgagggtggaggaggggccaatggcgaagttggcgtactcagtgccaaaagatagatgctgtatatgactagaactgaaaaggccgcatacaggacatgtcccatatgccgactgaagatctttggaaacttctccccaaacatcccggcagggagaccaacgctcccgaagccccagatagttgcaaatgctgcaagcatccatataccataaccagcgggcaacagaggccggagaaagaataacacggctaaagatgtgcccaatatgtagacatagccaatttgtcttttattccaaacgtccttgtctccctgtatatagacattaacattatatgcttgtactgaaaacattaacattatatactttatcgttaacattgcttaaagcac

SEQ ID NO: 43964 - DNA, 647 bp, Oryza sativa
tttatatagttgttaatgaatctagatatataaatatatctagattcattaataattatatgaatgcgagaaatgttagaatgacttatattatgaaacggaggaagtagttagttagattttttttccgtcgttctcgctttttgagtgtgggttaggagcacagtcaaagtatgtgcatattgtttttttattcctttaaatataaataacctattattaataatttttttattttttttgcggggaataaattttgtatttgattgtactatctgccacggctcgattataaaagttgatttgtaatggagctgagtaagtagtgataattctcctacctaaatacgcatatgccgtgtcattgtaagtggtcaaccacgcgtctataagattgatccgattagcagaacaaaattcttccaacgcacgaggcgatcgaccgaccgagcgcataaacacgcacgcacaattattggccggctccgtgccctccgtgtgcctcaatcatcatcctgtcaacatgcatgagacgtcgttaatttgtactatcgtttttctttaaaaagaatatcaatgtggttttcacaaagtagatgaattatggattccaaatttctatcacaccttgaaatgtgcaaatttta

SEQ ID NO: 43965 - DNA, 620 bp, Oryza sativa
cactccatgctgctgcaccgtggaacaagagtgataaaaaccatgccaatcatcacaagagcaacagtgttcccgaaccactgcaatatatatgtcaagaagagttaggaaaaagtaaacggatatgttaacttataatgtgtgaagaatctttgttagatccgggcaatataaacgtaagcataagaactttcaataagattttagtaatatatttatggattatcgtaagaactcttgctccaagggtgtcgccgtgtcggcgtagtggtaggtcgtcgtcgtcctccatgtaatctcaaaaagaaagaacccgatttttttatatctaaacatatgcaacccagtattttggaattatgattctaaccaattaacctacccacgtgaccaccgtcaatatccggttgattaggaggacctaatgaagtatatgagctatttgggttttctttatttagacttaggtttattggcttaattttttaattcaacttattagcttacatgatttataaggcggtgaatttaatatcctaagtttagtgatagagttatacctctacctcaaataagcaaaaaaaaacttatcccacttagtttttggtttaatagtgttg

SEQ ID NO: 43966 - DNA, 1041 bp, Oryza sativa
ttttaaataggctagaatagtaattgctggtgagtgaagatgtggcatacttggataggattttaaatagactaggatagtaattgctaatgggtgatgatgtggcatgcttgtatgttaagctttagcttctaataattgttaatgggtaataccaactatatagaaagttagatatgtgatatatgctttaatggtgtttttttaagtatattgcgttagtaagtgacaatgacggtggatattccagcatataaatgagatatgtaaagcagaacttaaaagtataattgcttatggtatattatattcccatagttggagtacttggtcactatctataggaataaattgttggatgagcgtttgagaaaaatattatatgattattagacgattcttcaaggaaaaaaagaacgattatgtgattgttggtttagagggaaattcggaatcatgtgactcgattcattattatgaaaagcagcccacatgctttatctaaataagttgaattcacatgctattattttaagtcgtgacatcctagttgttttcttttttatgggtcatgctagttgtttagcattatcttttagaggagtctattataatctactttgcaggttttgcaaggacttgatttcttttgttcaatttgtagagtatataaagttctttgaaggggaaaatccattaaagaaaacataagtcaccatccaacgtatgcttatttgtaagtacctttttccttataacttttggctcaacgataaagcacatgactcaagatattttttctcaagtcagtaaattaaatgaaagaaaaggtcaagtaacttttcattggagaaataaattaaatgaaactaaaaaaagattgtccaaccgaaaaaggtgagtgacttagcctaatttgaatgatccgaagggatggcacattatctgattttgtgataatgtttgagaataaaatgaattaattgactattacaaattttaaaagttgtctataaaagcattataagcaacaatttataa

SEQ ID NO: 43967 - DNA, 2330 bp, Oryza sativa
atggatttgctggggaaggatctcactcaagttaaagaatttgagccaaggtacatacattttttgttcactcccatgtttatttacttacttaattactgtttgttgaaatgtatggtgaattttggtgtgatgtagttgttcatcaatttaggtagagacggcttgttagcagaaatgtgggatgtctctaatctctagaggaatgttctggtcttaggtaatcgcttcacgcgtttgctataagtcatggtcatttgtagttggttgatattaggggttcattatcaaaaaggctgagtcaatggttgttttttttttgccttctgtcccttgatgatggtggacttcttttgttattccgatgtagtggccgtgtaagatgataatggggcaagtcgttaaagtattgtgcaactctactatattttgactttggttttggtgtgtaagcatagatgcggctgctgtgagcacagtccatctggtcatcatcagattaagaaattagatggctggggtcatactctgaagaagtaatatcacaatacattactaataataaaaccccaatttgtcgtgcttggataacggtgaagaccaagccatcttcttcccttattgggtagctgctctagattttttttcttcaatgtgtccaaaattggcggttttcttcaatgcagcaagaaaacataattgaatatccaaattacatttgtcgctatctatatttgtgcaagaccacctgtctaaattgaggcctagccactttgcactgcactgaagttgtcatgtacttcgcttttggtcagtttttctttgtaattttgggtaaaatgtaaacctgaagctctgcaagagatttgatttttaagactgagatgtatccatgcagcagccataatcagatttaaggtgtgacatggacatcatctttgtaaatataggtcatgtccatctgtcagtgaaatgttctgaatatgtgctactcaactaattaattataagtgcatttgccaagtttactctttccagatatttttcttctccaaacttacacgtcaaaatggatatttgattgtcaagctgcaagcaatcttttgtttttgtcatttctatctaaagaactggttaactgttttttcctcaattagtttgcagcaaaccaagtgggtaattgtatatcaccttgtatgaccctctgcacatccaagctaaagaccaagcaagctttcaatctagatcagcagattcagcaccatctttattaaaaaaaaaaaatcaatgcccagggcggttttgtacatgaaccttcatttttcagaaaaagtcattgggtttgttgtggattgcttccatctgctttatattatcgtatcatgagtggatacattgaatgttgattatctatgtctttcacatttaaactagtaatggcacattaacacaaacatctttcatagtcttattctatgatgatgggaacagcataccgacataattatccgttgttgtgtcgctttcgaagttcctttccctttacagctctaattgatttgaaactctccacgctaagtagtgtatatccttgattgccatgactgctcaaacctcttattacaaaaagatcaatgtatcattgttctttgatgcttatactacattttcttgcgtgcagcgaatctggagactcggatgacgaagacggcaacacctgcatctgtgtcatccagtaagcagccccttggagatcatccctgtaaattctctgaaaggaaaaaccgaaaaacaagtgtctgggtcagccattagttgtttatttgtcagtagagagatcagagagccccccattgtgtcgttggtttatctggaattgtggatggaattgggttgtgttgtactatcaatcagcagcagcttcaccagtacatgttgcacatgcatagagtttagattttagaagattcctgcaaagatctgatgattatgttcttgtctgaccttgttctggtaacctggttggggtgttttggtggcagtataatgattataaccagcattgcattaggctgactggattggctgaaatgtgggccccctcttctgtatgcccagcttgatgggctggtctgggctgggcttagcttgggccttaggccgcccagtctgatgacaccgtccggtccgaaactattcgggattcagacttccaggccaacttgattcataagaatccacagaaattttagattaagccctgtatttctcctgaatcctagtaccatttggacgaaaaatcctgtaaaaattgcttgtgaaattaccct

SEQ ID NO: 43968 - DNA, 635 bp, Oryza sativa
ttggtactgttcatgtccaaagtttgaccgttcgtcttatttaaaaaaaattatgattagtatttttattgttattatatgataaaatatgaatagtactttatgtatgactaatttttttttaatatttttcataaatttttaaataagacagatggtcaaaatgctgaacacggatatctatggctatttattttgggacggaggtagtaccaaatatgccctgaatttgtgcggttgttgatataactaaacgggcctttatcgggccttcggcccatgatctctcttcctctctgcttgattagtactccataattttttttttgttttattgttctactactctttctggaagaataattagtatgctgctaatcattatcacgagatggcgatggcgatttggtagattattgttgatgcaattccaagatcagcatcaccggcgacagaaaacataatcagaatatcagatactccaggaatcaaatattgggctgataaacgatgagagacaaatatcaacgatgctactggccaaagttcagaatccaatgttactggatttggaatatactacctacctgggctcctgagggagaccgagctggatatgtactgtacaagctgat

SEQ ID NO: 43969 - DNA, 1605 bp, Oryza sativa
atgtgtgagcgagtgacaggtggggtcgagctacgtgggcccggtgcgtcagtgattggggtagggtgggtttgggtgagagatggtggtggcgggaacgggaggtggactcgtgttacggggttggtgggtgtttcagtgagtgacaggtggggtcggattatgtgggcccgatgtgtcagtgagtggtgtggggtggggtggtgggggtagaggtggagggaacgggtacgagctgggtgcacccgataagcgcacacgggtgattgattggttcgttaggatggctgctgccgacgctgcctgaataagagcacctgcaatgataaagtaggtgttatctataaaatataaaacatgtacatctcaacaatagactaaattaatagtaaatcatctcaatattatgtctacatgggtatctatagctctctaatacattgcctcgtttttctctatagactatctacaggttagtagatagcttcactctctctcttcatttaatctcttccaggtaggaaaatatgctgacatggatctcttatagagagcttatagataaccattgcggatgccctagccctaagggcagtcccaacccataacactagacatggtttccataaactctacatcataaaaaaaactagtactggacactactcttccaatgcaaacactactattccatactccctccattccaaattgatctacatatttcataggtataccaagaccaagaaaagctaataactctcttatactatatttactctagcaacaaacttaatgcatgcaccatccccactattttctagccaatagcaaatcaagatattgcatgtgggttataaatacttgtgtgcatggatgcatgcatcaatgtccatttactccaatgcacaaataacgaatagacctaatgaatgaacacaaatatgtagatcatttaggaataacctcaaaaaactatatgtagatcaatttggaatggatggagtacttcaatttaatgctacttatctcatatgatgtcttggatgttgtgtagaaaccatgtctctttacttatttattcacttgccacatcattttttgtcctaggtggtaacttatttaatgctatggacatcatcctagtcattgggttgggaatgccctaaccaccctcttaccaaattggccacagtaattccttgactttgatggtaaccaatgctgccctctttttgattatcatccttgttggaatagtttaggacttgatgcttcacctaactgtaatatatatataatatataatgttcgatagcattcattcgatcgtggtgcagtcagcccgtacaacgctttgtgtcagcagctacgatagtaacaatgcattgcgatggttgtacctttgcagtcgaacatactctttcattcaaagtttcaaacaagcagaagcggatggacaactgcccatgatttttgtagcgataaactataatgaaaataaattaatgtggataaattactttgatggttaaacttgtttctatctatatagtttaaactagggtttagaaaactcccacaccactactaccaacagcattg

SEQ ID NO: 43970 - DNA, 780 bp, Oryza sativa
aggggtaaaatcaatttctggatgccgtttaacaaaatataatacctgacgttgcatgtacacagacggtgttagaacggagcaggtgctagaacacaatctgttgttatcataaaattattgattgcgttcctttttacttctttctccgttctaagactttttagcattacccatattcatatatatgttaataaatctagacatatataatatctatataaatatggacaacgctagctagaaagttttataacctgaaacgaaacgaagatacaattaacctagggtcccattccaacttggaccctagacttctctgggcacggccggcccaaagtccgcggcagcgcggtgcacgctgacgccaggaaggacggactagcgtcccgcatgcacgcgtaggcaacggcgacggcagccgcacgcagtgccagaaggacatcgtcggcggcgtcaatatccatggcggcgccgcttactatagagaaagggtttttacagatccaagtcccataccgctggagaaaccgtttgtaatctcggttaaaaacccctctagttccggttttttaaccgggactaaatatttttagtcctgagtgaaataatcggaagaagagtagaatttatagttccgggtgaaataaccgggagtagagttgaatctttagttccgggtgaaataatcgggagtaaagttaacaccaagcgggactaaagagagggtagcggcagtcccggtcggtcccttttttttcatcgtttctttgctagttg

SEQ ID NO: 43971 - DNA, 925 bp, Oryza sativa
ccatttttttatataaaaaaaatagaagcagaagcagccagcagctagcgaaggtgtatttgtctagctgagctgatgaggagagaggccgggaggcaattgcatggactggctggctagtggacggttgcgggacgaaagcggcgtggcgcgaggcgactgggcgcccacggatggcagggatttccacgcccaatcaccgcttgccgcgtcaaccagttgataagaaatacggatcacgcgcagatttcatccttccctccatcaacacccttcgttgcgcgtgctattgttaattttgttattttacaccattaaactattttattgcttcacttaacatttattttttttctcattttacatcttcatacatgtccaactgttttagaaccctatggacctttttttttctcattttacatattgaactattgaaaatcaaacacgtaaccccttaaaggtatttctcttttttctctccctctataagtactccatatgccctaaaatataagagattttgaccggattgatctgctttgtaaagaattccttatattttgggatgggggctgtatcattttgcaatgaaatttggtaggattgatatatacagtataacttgcctctcaactttgtttataatttttctaatcaccgtttactagattggaagctctgagactgatttactttgaggtttgaaatttcaagcatttagtcatgaaaaaatttgaaaatattttggaatgataatggtgtcatctatggctctacaaaattttagcttaaatactactcgtataaagagaaacaaagaaaaagaaatacaaaagtttagtttaggggtaaaatgataaaaaaatagtttagtgggttaagcgaaccaatgaaatagttttgggagtaaaatgaagttgtt

SEQ ID NO: 43972 - DNA, 679 bp, Oryza sativa
gcagagaaccccctacactagtgggtatatagtatgtacactgctatacaaatacatctaacaatgctcagcctaaccaactagttagagtagggatcaagttaatagtgtctctgccttgagttagagatggaaagctttgagaagaagggtgtccacttgatatttgttagaaatctgtttaatcagttcacgcgggtctacttaaaaggttgccagattattgtggatgtaagcaagaaatatgtaaaaggttttcttcaccaatcgattatgatcagagcctcccatcacaaccgcgagccaacctgccctatgcacgtctcatattcttccccacacataacataaaggaaacaaaaagttgtgaactaattaattacctactttttttttctaaaagaacatattatagtgcatatagtttgtatgtagtatgccatatgcactataactggataaaacttatttgcaaatgctggaagcttacctactcttttcatatgttgtctaaattatttgcagtgaccgtttacatctagtttggagtttgtcttcttctgctaagcaagattcatttggccgagcaggattaatggctcttgcattttgtgttgcttcatgcgcatgtcatttaaatacaaatgatttaccatgtgattatgctgggcaagaaagg

SEQ ID NO: 43973 - DNA, 563 bp, Oryza sativa
ctgcgggcgggtattaggattatttattaatccttagactgtttctcttctagacttttgggcttatgtaacttatagcatttagtgtaaactcagcactagcattaagtgtaactcttggtcttttgtatcactaactgtaactcagctatatatatgagttttcacctccacactttgtgtgaggcatctattctacttcttctacaattacaaccgattagtacaagtatatacaagttgtagtatcaagcttgatattttacctcactgattcaatctaatctttgcagcttggttttttgctcttggcatgcttttggaaatttgattttcctccatttttggttcttgtgatagctattcttaatgatggtaagaacattgctgtctgcactcatcatagaggttaattttattaccaaaaacaggacagactcctattgtcctatcatcatagatgttattgctcaatgaattttcgtttctttgtttccaatgatatctgctactcaggaaccataatgactatatccaaagataaggttaaaccatctccctat

SEQ ID NO: 43974 - DNA, 747 bp, Oryza sativa
gcatagaacatgctacagactatcaaggtttatgtggctgttaagcgcataccttagatgctaactcctgaaccatcagttgcaaatttgacatctttttagtatactcggagagcttcaactccagttctgttatatcaggcctgcaaaatgagaatgactcaagatttgaagcatacacagctgattttcaacatcttacttttcctctttttcttcaactgggagtacttacaaccaacaaaattatcagataagaagtacttacaaggggtaaattgattgtatctgaacatctgcaggaaatagtttgcactcttcagaaaatatttgggcttgtttctctgcaattgaatctacgagcagcacatcttttgccagctgctcatcaacactaccaaaaagcaatttgttaggaattatgtctccaatgcactcatgttgatcctaatggattatttgatgtatatgaaagttcagttttcttcagatatacttttattttcttacatgttttcttcagatatacttttattttcttacattgctagaagcctagaacaaaagtttcatgaaaaaatagtactgaattatcacaaactgacaatgtttatgactatgtcctgtatgaataacatgaagggtattatttcgttgcaaatagaaatagtcaagcttaaagccaacctccactctggattgtcagcatagcagctagcttcaactagatcaacaatgagacagaga

SEQ ID NO: 43975 - DNA, 695 bp, Oryza sativa
acaaagaaagaagatttatggacttcaaccagtgtgaggatagaaatcttgtacaaaagaagaaaaaaaacaattacaatacctcatacagagaaaaagagaaaaggttatagatttaagttgaatccaatggtgtgtatccaaatggcaatagctgtaattataaggataggaacagtagttgacttggttgagatatcaggttattggtcggaccacatgctattattaactacattcactgagcttatatgatgttcaaaacagctatgcaagaacaaaagtacaaaactaatatttctaaggcacctagcaaacccaagcaggaggttatcatgtgttgtctttaatacagctacagaaggttccaggttcaaagcctggtgggtgcgctttttcatccaatttctgtgaggtattatggataaacttgggttgacccaagttaatcaaatgcagaaataatctgttaacatcagaccacccagggtcttgcggcttacagaaattgcaaaactgactgcttttcacatctcgatcaaaataaccactcagtatttcaacagaacagggaaaatccactttacgttgcttgctgacaaatatgcaaatattggactcgttgtataaactgcagtcttacttatcttactccatatgcactttaggcttacagagaaagtatatagatagcc

SEQ ID NO: 43976 - DNA, 1687 bp, Oryza sativa
agaggtatgtcaatgtgttattggcctctacgttcggtagaaactagtaatgatgtactatattatgtgttctgaactcattataagatctctaccagcaaatgattctttgctattgtgctactatttgtatattgcgtttcatttatcatcatatgcagacaacctggatacaacatcgttgctcatattacaggtagaaaacgaacaaaattaaatggcattgtgtgccatcccgttttgttttaaagcttcgcctaaatcctaatgtattttagtgtctcgctgtgattgaattgtttccactaactgttgcatcatttgcactcttgtagtacttcatgtacactcttctctttaaaacgagactgaaatatacactgatgtatcatatccttttctcctgaatcttgttgactcaaagtagctcattctatcacgagtacttatcttcagcaagaacatcttttcatttttcttgttcctggatgtaatttggagctaaattgttttgagtactactaatatttaccaggaaccatttttgttactcctgaatctggtggcttgggggtaaattgcatacattagcaataaaaaaaagtaggtcccaccgggattcgaacccaggtcgccagattcaaagtctggagtgctaaccactacaccatggaaccggttgttgcatgtggtccgtcgatggtgatacttctgtcttttactgaagatcagtaacaaagggaagtatactagttgaaacccacatgttcatttgtgggcatccatctgctaggcacttcaattaaacaaaaacacgggaatatccaacgaatcctcttctccacattcccgtacttttttgtgctgaatcgaatttcctgacgccatataaaaaaacgaatttcctgacatatctcaggaaaaaaaaaaggtaatactcgagagtcgataacatcctcctagactcctacggcgtggcacacagttcactaaaatccaggcaacacaagtacacaacacgcagagtcacacatatgcttggagttggagcacttttccaggagtccggctcaggtgcagggaaccctgcacatagtaatatacaggccaaatcaaatcgcgacacctgtacacaaggtaggtccacccaatcaaccaagtaacaatgtaaacggaggtttaaccacgatcccacaaaatcaggtaacagaaccattcacccgcgaaatactttgacgtcgcgcgcgacgccgcacagagtttctttcctctttctctgttcttctgtactgctagatctctaaaattagattggtgattcttgatagagatcagtgtcctcgtgaagcaagacgcatggcggaagccccagtccacccttcatcttcaaagagtatgttaattgtccataaacttggcaagacccgattagtttgtctcaatctctgccataagttatctgctaattgttattaaattagattggtttcacctatatatggtgaataggattttatattgttccttgcatgttaaactagcatatacacaataatgatcacgttatacttattcttatatttagatcatgaaaaagaagacgtgggagacacgaatataagcagtactgatgatgcttgtgtgcaaaagttagagccagtaattggcatggaatttgatgatgaaa

SEQ ID NO: 43977 - DNA, 721 bp, Oryza sativa
  unsure (1)..(721): unsure at all n locations
tgtatttgaagtataggtggatggtgcctcnnttatagatagagttgtagttggcttagataaaccagctaccactagtagttgtgttagttgtgtagttacgtcctatttgctgagactgattaaacccgtatgcgtgtggtctgagaccaccggcgttccggtcgccggtgaacctcgccggcgtttcggccgatggcacacatgggcccatatgcaggccgcagcccatttaagcccaagtaaagaggcctcttttctttctccatttttgggcccaatctgttattgcataaacttaacttaagcccatacgtattccaatcagaaaattattagagaagagaaatactggaactgacgcgtcttgcgttgtcttggcttcacaaatcaacaaagatcggcagctgcatcaacatgcctgacacggcacgcatgttatttttgttggttgcgattagatgttaattgatttttctgcgattgaatgtaattacttgaccccgtccgtataatcacacgcacatagaatagaatggttatgcgtatacgaagatgagaaaggaagatacggtccaaagaaattcacaagcaattgaaaacaaacgaatatttttcaaggagcagatctctgttgcttccttttcttctctgttgaaaagggaagggaatgttctctctttatgtcaacgcttatctgacgacaaagtggattggatat

SEQ ID NO: 43978 - DNA, 1275 bp, Oryza sativa
gggaacatgcatgatatggaaattttttataaagaaggtcaccacatgtgtatattgcaccgcccagattccaaatggagaattttttttagatactttgaacagaggatatgatatgaaaccgaagttaaaatataggcaaaagcgcttatatttggtgaatttttggggggcatgcctaaaaagttgcaactggtttgtccattgaccatgcttgccacgtttcgtgaaaaaaaaaagttgcaaagcaaagagcagaagttggtaagcaaagcgtacgcgtgttcgctgttccattacctgcgaactccggcgatggcgcgcccccgcaggcgtatcccgccagctcgtgcattgcctgctcctcccgcctcctctcctgcacgccacgcgccgccgccgccgccgctgacgacgacggcgacggcgacgaccacgcccactggtcgccgtcgccgtcgccgccgccgccgccgccgcccgccacgacgcgcgccagcgccgacaccatcgtcgacatctcctgcgcctggtaataccccgacatgagctccgacgcccccgccaccgtcattgccgtcgccgccgccgccgccgccgcacgcccgtcgccgccgcccttcaccggcctgccgccgccgccgcgtggtccacgttggtctgccaggtcgaagcacatcaacgtctcatatgcaccggagtctctctactacagagtcgcttcgatgcaagagagagggatcagaattcagaggagaggtttatctcgttaattctcgtttcaacccttccgaaagttttcagcggacgactcgcgcatttatagggctagtttgtggcgtgcgtattctagtaatcggcacgaagagagagagaaaaaaaagaagaaattaaaggagattaagcaacgtgacagaatagccgtcttctaaagctggtttcaaacctgcatatatcatccctttgcagcaacgcttcccttggttttgtttattctgtttttgtgaatttatttatctatgtcccggtatgaacaagcgtagtaaatctatgatcggtttacggtttacggttggaaattatcatcggtaattcttctttttttctaaggattagcgtgggcaaattaattaccaggtcggcagtaggatcaagtgattagtacgagactacgagtgattaagcttgtgccgacatggcgcacgtcgtcgtggcgagcgcagcgccggcacccgacgctttgacgcggtcagcgtctcgtatccgacataaatt

SEQ ID NO: 43979 - DNA, 1504 bp, Oryza sativa
ggtactactcgtagaattcactaaatgtgacaaccaaagattgcattgcaaggcaagtgtgggcacgctgagtttgtaccagtaacatgttagcatggtcccctagcttcgctagctagctcccccacccccggctttactgtacaagacgatctccctgatctgtgcctaccaggagcacaagttgcaaaagtggtcatcaccactggtggtgactggtgagagatgcgtacggtcaaaactcggaaggggggcgcatccatccaatccatcctcggatcggtgcagatctcaataggactttcgctgctgctgcggccggcacgcgcgccggtgacgttatgctcgctcgcgggcggccacgttcctgcacagtggaggggagagcacatggcaaaagctgcgtgatgagggaaaaatatggttcgatgtgcgtagagtggagcagtactagtgtaaacttaattagcaaatgtttagttggaaaaaaaatttatcactgcatgactacattagatatacggataaatatttgaagtattaaacgagtctaataacaaaataaattacagatttcgttagaaaactgcgaaacgaatttattaagcctaattattctattattagcaaatatttactgtagcaccacattattaaatcatggcacaattaggtttaaaagatttgtctcgtaattttcaggtgcactgtgtaattggttttttttctacatttaatatttcatgtatatgtccaaatatttgatgtgacagcgtgaaaaattttatttgggaactaaacaagtctttatttcgtgccaaaataaaccaatcatgtactaatatatatgtgtccagcttagtaaaatgtgtaatctgttgtacgagattttattctgagaggaggaagtattatcagaaaccgcttggcatgcaggattacgccatcatggagcacgctttcaggtctcgtttcgtgatgattgggaaatattgcgatgttatggtttcactgtttcacacttcaggtttcgtttcatgattggcagacgttgtgttgtggcattatgttaatatgcattctgttttttttttcattctagaatataaaaatttctgactatataaaacttccaaaaaaatatgtatagacaagtgctattttaatgcatggacagtgtgtatatggacaagtgttttttttttcatatggagtatttagaatgatagaaatgcttgtattttgaaacggagttggtaatataattatagggaaaaaccaaaagtgtacttagtacggttgtattttcttagtgtaattggctaacttccataaatctttaataatctaaaaaataattacagaatcattaacctttcattgtttacatgtatacttgttagcttgttagctataaccaaaattaaaatttaaaataaaaaggttttgagatgtttttggtttttttatcgtagtttacttttcaacattagcttataaacag

SEQ ID NO: 43980 - DNA, 3670 bp, Oryza sativa
atgggaaaatttcagtttgtgaaggtcaaattcccttttgccgaggaggcctgctgccaaagcaacgcagccacattttcaaactgtttgacattcctggctgcatgaatcaaatgtgcacatgactaattataatactgtagtaaaacatggcgagagagagaaacaattcaagagctgcaaccaaaagccaatgcagaggtttggcagatcagagccttcgctcgaaaaggaaaggcaagagttggcttgggttagtacttctgttagattagtatactgttagagcaagtttaatagtatagcacactactagctctaaatcatctatagtcaatgtaatagccaattcatacaataattgcttactatactattaatacttggtcccacatgccatacacacattacgtcttggagtccgtgctgcagctggctatagatttgtagcccgctgctcttctctctcttcctttatctcttcaaaatatgtttacagctggcttataacccgctattgtacctgctcttaagagcatctccagcgtgaatgtaaaatcgatttaaggtagataaaagcgaaccatacacactgtggcagccgactcatggtgtcagacagaaaaatcgaactccaagttaagtcgaactctagagagttaaaaaaatatttgttgtctgcatagaaagtagacacattgattggttgatggattctttttgtgggccccacaaattgatttcacactgcagctatcgatttcactcttcattcgacttcaaccaatacaatggtcgaaccaaacactgtggttgctctaataacacttcattatctaaaagaactagtataataatacttgggagctgaaacttgagaagcataagtaccaaccttgaaccttttggtcgtcaaacacgaggaaagattcgactcatttttccttgaaaaaataacacaaagcttctgccaaacacattacacaattcataaacacagtttgatcctctcaaaagacgaacaagaatcacggttttgatcgtaagccatgatgaaaactgaaaaagccagagtaaacaagaatacgaacgatttgtttttcattttcagaggacgggaactgttgggaagttgaaaattttgaggcgatcgacgcctcaaaaattcaacgttccaagcagatggattggatttgaagtcgcaacaaacggaaaatttcaaacactggctgccagagcagtctcgatcgtttcttggtcctctcgtttgcatggctcacgtctcccttttgacattcaggcgctcctgctgcatcgcacgcttgtcctgcaatctaatctaaactgaatccgaggcgtgatttctagtgatatttcgcgttatccctgacacagccacatgtttgatgcgttcgtacggatgtcaggaaggtgaagatttgtacacaagcattggtcaaaatctcaaaattcatggaggcctgctaatgataacttgaggctctgttttgggacggagggggctctgtttagttcaaaaaaaaactttttgcgaaaacatcatatcaaatctttagacatttgtatagagcattaaatatagataaaaaactaattacacagtttgcatataaatcgcgagacgaatattttgagtctaattagttcataattagtcataaatgctacagtaaccacacatgtgctaatggtggcttaattaggcttaaaatattcgtctcgcagttttcaggcgagttatgaaattagttttttcattcgtatcaaaaaccccttccgatatccggtcaaacgttcgatgtgacatccaaaaatttttatttcaccaactaaacttgaggcagctgttcaggtcaagtttgttcttgcaaggagatcgatgattatcgagcctcatcagttgaccaaatcggtttattagtgataaaaataatttataaataatttttttatatacatttttttaacaaaatggaaaccaagctatgttaaaaagaaatgtacgctatgaacacaagttttcatgtagataccatgcacaccaactaataaaatttttttaaaaaattagaaaaatgtgcatgtacttccaaaagcgttgtacttatatgtaaatctttacatcaaattaattatattttagccgtaataaaataaaataaaataaaatttctaacatttttaaggataaggatataaatcgatttgatttttttctccatttatagaatggatttgaagataagattttacacataaatataaaatatgatactattaaaagtacatgtacaaattctttctaaaatttttagtgaagtttattagttgatgtgcttcgtgtgtacacgagaatgctgctatgtataagatatgttccccaattaaaatacttaaaatcatttttaaaaatttaaatttcgatagctgttgaatcttttcgggaaccgacgaggcgctgatggcttgctgttcatattggattttggaacgtggtcaggatgctgatgctctgcatatagatcacgtctgatgcacttgcaagtctcttcttgttctctcctacacgtataccacgttttttatgcaaggaaataatatatcccggtttatatatttagagttaccaggtccattgttatcatgcgtttctgtcttctaatcaacatccatttgcagattaccggggggcaacatattagttgcacgtgcaaaagcacgctggttgaagaatgcaaggtaaacattttgggtgccatattaataataactttgcaatgtaaaaatgtactactataagaaaataacgcaggaaatcttcttggtaagatgccttcacattattttcttttgacgaaagtattttttttccttaccgtgacgagcattaattctatatctatatactcttataaaaacccatagtagtggtggtgggttcacccctaccacccccaactaacacgtggatttatggatcccacttctgtgatttgcttactctcttctcttcagttttcagtcatttgaaatttgagtaagacgagaaatttcactcttttacttttgccttttcatatgaaaatcattgtttcatcctaggagaggtaagatattgtattcttaccaagagaactcacagtgttatgttttatattaaataaatagttgcaatgtacgggtattcacagcaatgtacgggtattaaataaataacatcacacaagttttttttttctttcatttttgcgattgtcgtccgccttcttacgacactcctttgaaccatgaaaaagggaattcagttcactgataacgattcatgaacctcatgtttgtcagtttaaatagtattctcctattttatttattatagttttctgctgtaaatgtacagttttttttttggtacaaaagctacgagaaaacaaaaggagaggtgcccacgtactacagtacaacatgattaccaccgggaccatgcatgtatggatggttcgtggtgacctggatttttcacattttggttcttttgaaaaacttatttcgtaaatagacccttgaaaaaacttatcccagaaattgtccttttttgggcgccagagtggctggtgtcgtcatccaacgggacggcgccagagaggctggc

SEQ ID NO: 43981 - DNA, 2418 bp, Oryza sativa
gtatcagtacctatgtaaaccgagtaatccggtagtatttgcgtgtgtaaaactgtaaattgggtaattctcctctagtgtgaaaactagtcggatttcatatgtaattttgcacggagctagattatccaaaagtcaaattatatttgatgttttgtttctaattttctgtgaatacaagtatgttttgtatattagttgatatatagtataaatttataatctggatctgacgagccactatgaacatggttctttttgttcctttcaattatttataggttcttagtataattggtgcctcattttagctttttttaaaaagtcttttgtcgattacctcattatttacattcatattgcacatatcccatgcagctgtggtcatgtcacacataagtactcttattgtcgcttgtgctacaaccaaactttagatggtattagagtgcaccacaaacttttggtggtatacagctaaagtcgtgaaatttctatgacatggaaccactttttcccaactttgagtttgtcgattatcttcaactctcgaatactcttattgtcgcttgtgctacaaccaaactttacatggtattagagtgcatcacaaactttttggtggtatacggctaaagtcgtgaaatttctatgacatggaaccacttttttccagctttgagtttgtcgattatcttcaactctctaagccgttcatatttcatcattacacatcaataaagataattttcaatgacgtggtatcacctattgaacaaatcaaaataaaggatgagtataagcggaaaagaaggtgaagaaggcatgtgaatttttatatatttttttcttttttaattgtttattattatttttatgatgacattattaccctttatccacgtaggctccatataaatgccatgccataaaaaacaactccagttttaaccaagagatgaaatacaaatcattttgatagtcgaggagctaaaagtgaacggtttttatagcttgaggaccaaagtcgaaccaggaccttagttgagggactgaagttatatctgtaactgtgcggccgctcaccgctgcacccggtctacttgacttgacgttaacaacggagcaggatgacccacggtgaaaagtcgaagggaaggcctcgtaggtcgcttagatcgggcccggccagcgaagatttcccagcgagaactgaaaagcgtgaagcggcaatcggcaacgaaagcgacgagcctagcgcctctagtagtagaagaagtaacaaagcttcctttaccgtgtgatgctttgattcgatcattcgattaggtataggttaggtgcattaagctcctagcagaagcaaattttacctcggatcccctcacattcagacaatcagatccctacttttgggagcagggaagtgtgggatgttcagctgttactccgtagtagattattagagaaaataatcaaaatgtaatgttcagtcctcaggagcacctgaatgatagctggtaaaagcacgcaaagagaatagtgcatatgatccgtgctactactatcttgctagttgctgcgccatttatatatagtttgacttgcagacgatttaaattggcagactgaaacttaaagaatggtcctgggttactgtattttgcaggagatgacccaagaagagacgtacggtatgtctgtggtccaaatagaaacgcaaaaccaattttaatgtgttccctatagtaagaatggttaaattgtgcaacaatttatgtacatactccctctagttttcaatttaattgacgttttggacaatgacacggtctacaagatatatctttaaccttatttttctattataatatatacaataaataaatgcacgtttacttttattatagtgctttgaaagacaaatttatatatgttgttctagtttctttaaactaaatatttttaaagttttcgatggtcaaagtaataaaagtttgaccttaacctttattcaaaacgtcaattaatatagaactggagagagcagtttttttttcttttaccaacatcagccatgcaggctatttgcgcagttgttcatgggcgttattatttttccataggtagccgcccggggtaacagaacacatttaagagttccagtacgctagactagtagagctgtcttgcatgtttgaactgtaaaacagttttcctgaaaaacgatatgcagaagaaaattgttgcatctatatcatggtttgacattatagaacagcagaagaaaaatgacggttccatgtcctaagcttatcagtataagctaatttaactgtttcttgtttgactcaccagatatgatcaacgcaagaatatcttatggaaatggtacttgcgtaacaagctggattagca

SEQ ID NO: 43982 - DNA, 684 bp, Oryza sativa
tagctaaaaggaggccctgatgaatcattccattgcgagctgagctgagctgaaaagatgtgtacccgctttgatatatgccatcctgctccatgacacaatcagaaattatatccatgcatattctaatactcctcccgatttcttttagttcaggtccaaactgccaaaagagaaagacagatcaaactaattcttcatttaatcaaataagaggaaaggcttgtggtgcacacatactgcatagcccaactgttgcttcgctgtgggttagcctttgagaggtttcattttgcttcctttccctcaggtttggctaaggacctgcttgctttgtagttaggggatctgattgtctaagtgtatacctaatgcatcacgtatgaattgtgaaatttaattaatcgggtatgtgtacgtacgatccatgtctccagggcctactgataggtgattgatgaggatgcacggctcctgctcgtaaagtatactgatattgcgaccggttgataagttggatacttggatccaattgtccgcagttcgcagaatgcaaactagtactatcaattaatttaaacagtagtacttactttgtagtagtaagttgtaacactaggtttatttcttttcagctacaggctaagcttattgtggatgtgtcttttaaattgttaaacggcg

SEQ ID NO: 43983 - DNA, 1345 bp, Oryza sativa
ttggtgtcataacgtgtctatcggtatcatagtatactaattatacttagatcatagtataataatatatggataagtagttttgttataggttttgccgaaagtcgtcggtgtcgcttgacaccggccctattactgtagctccgcccctggtttagatcactttcgcacactttccattagtcgaccgtctttagatatagaaaaacaaatttgtggagcatattgttggagtgtagagattgttgtatgagatttgtaaatttatgagtttgttatgcgaaatattacttaccatacaaaatttagatgtggcagaaaaaataattctatttgtttttagttattaaaaaatatatatgtactccctctgtttcacaatgtaagtcattttagcattttccacattcatattgatgttaatgaatctatcaataaatctgtctagattcattaacatcaatatgaatgtaggaaatgctagaatgacttacattgtgaaactgagaaagtagcatattttcttacactagttgtatattttatttaaaatattgttctacaatgctaatggtttcttttccatttctttaaaaaaatgctacacatacttttctcgaatattatattaaattttatatgttcccccttatggatattatagtcaaacaacaaattgccggcattagttttctcaaatttacatagtccttgacatcaaattgattttttttcaatatccactaaacaatcaactaacaaaaaggatacaaaagagataaaaactaaaatccagggatatataagggaataattaaaattcagggcactgaaggattggcaagcgataaatcccttttagaaagaaaatcctactaataaggaaaaatgacaaattaaacacgaattaaagagccaccgtaatgcatgccaaaacagaccgtgatcttgccctgacacacaattaacaacaataaggaactgtagctgttatgccatcgcgatcgtcctgcatatgagttgttagctgtgtggaccctgcatcacatggccgcgacaatatggtgcatccacgaataatggccgcccctagctaagatacgattcactaatcatatacccgaacgaggtggccgaagcattccaaagcataacaacacacaggcctggactaaaaattaaggtttcttttgcaggaaccagataaaagtttgggtatataatactattgttactactatattaataaagtgcgtgatttgacaagggaaattaaaatacaaaggacccagaggccggataatctttgtactgtacgtcaaaattaagcgtgcgctgccactgg

SEQ ID NO: 43984 - DNA, 1027 bp, Oryza sativa
gactttttaaaatatatttgaccgttcgtcttattcaaaaagtttaagtaattattaatttttttcctatcatttaattcattgttaaatatacttttatgtatatatatacatacacatatatgtatatatatatacatatatgtgtatgtatatatatacatattttacaaaagtttttgaataagacgaacagtcaaacatgttttaaaaagtcaacggcgtcaaatatttaggaaaggagggagtacttatctcgatgacattgacaagtagtgtatgaaattaactaggaccaactaattcggcacgtaaggataactacagtttcagctactacttacccgtcagtaacgtacacgtagataacgctctatctagatctttagaaattgcaaagatctcttaaaaatacgaaaattttacaggttctgaacaacatgatttcccctctaaagaaaatatgaatatatacacacaagcacacttaccctacaaacatacccaatattttatcacaataaactctttcaagagactagtcggtaatatcgtagttggcaagtacatcatgtctactcttaattaatataaatacgaataattgtgctaagtcaaggacataattttggttggtaaagtaacgaactcatcgttcgcgaagtgaaccagaacagaacacttttaggtgaaccgtgctaaaattttctttcaagaaaaatcacacaaaactacaaaattactagtaccaagttgagttgctttcactgttctgtcatgtggtctccttgtccgctctgtgtattttctgccccctccagcgcgttggcgcccagcccccgctagtcgcaccagtgcgttggctcgatggaatccacgtcaccaagacaagggtgcgtgtagccatctagaccgagacaccgtctcgtgttacgtgggggcggctgccacgtggacgggccggcgaaaatcgcgcgttatctcccatttcgttcgtctcgcgccgcgccacatgcgtatggttttg

SEQ ID NO: 43985 - DNA, 721 bp, Oryza sativa
agaaatagaacattcaggaatatatacttcatgtaactttagttcagccaagtatacgcaatagcaggcttgaatatgcacatggagagaggattgtgttgcaatttgtgtgaaatatatcaggtccaaaaatgtattgaaaagttactgactatagaagaagaaagatgaaaatgcccaaaagcttatgatgcagtttgttctcaatagacaaagatgctttcagaaaatataaactagacattttatttcaaaattatataaattgtgcatgccgaattgttttttgatggatgctcaagggacaatttgtttgtaaatttgttattgagaaatttccacatgtatatatagtccacatttccttatatggtaaaagataatatatgtgcgttagatttcactctggtattaacatggctgcatgtccccttaaaaagtcatgtaggtattttagaagcttgcttatcagagaaaattatagaattaaattagcagctctccgtacctccaaatttaagttattctgaaccagatcaacagtgttttgcaatatctctcttccctgaaagagacatcatagcacatattaatcgcaaccagcatacttgtacaacatttttctttttcttttttcttttcgaatttacttctgaggaagagtaaagatgttctcacttgcagtgtaataagctcagcaagtggctttgcataaaacctg

SEQ ID NO: 43986 - DNA, 705 bp, Oryza sativa
tctggactcgggtgtgtgggggaagaaaaagactttgccctcttctcgtcttctccatgtgatatgggctgcttgtttgggcgtgggcggtgggccccacccgagagattatccagacgaaatgaatgaggccgtcatcacagcctgtcaggccgtgttcggatgggccgaaatgtcaagaccggttcacgtgaggaataagttcactgtaagtccctttatttgtcgcccagcctaattttcgtccctacaacacaaaaccggatacaacgcatcccccaacttacaaaaccgtgcaaataaggtccctcggtggtatagtccctgattttagctgatgtggcgctctttgactaggtctttatccaatgtggcatcgacgtggcgcttacgtggcaattcgatccgaaaaaaataaaatccatagtatccacatgtcagttacacataaataataaaagatggtgggacccacatgggaactctaaaactgagaggagagattttttttttgtttgtttgtttaccgtccgacctcgctctagccgtcgaccaccacgccgtcgacagggacgatctcgccggccctgaccgcgacgacgtcgcccacgcggacgtcgcgcacgctgacgacatcgcccgtcgtcgcgaggaccgccttcgcaggtagcatgcccatcaacgacgacatctcggcactcgcct

SEQ ID NO: 43987 - DNA, 1179 bp, Oryza sativa
gaccattcttgaccaacgtgaagctaaaaatacaacagaacatagttggaattgcagatagaatgtaccgggtgtactggtccatgagccccaaggattctctttacaaaactgtcactaatgagatctccttgacagcattcctacataagagaatggtggaatagctaatgcaggaataactaagcatcagtttcgaatgaagtataagaacaatgaggcaggaataactcacatctgtttttgcttgcgctagccaggcactcgtgaaataagcatgagggccaagggaaagtgcagcgtggagaatcgtgacatgcttgcagtaccttatgcaagttactttgaccaataaggcaagccctattgcttgagagcacatatgccagtttcctgtgacacagcagttctaggccatcaatgcatggaatgacaaatgcttgatatgcagaatggtgaaatgatcaaaatacgtggaaagaaatatacagtgaagtgatgcccacactcaggccagatcctcagcctcagctaaatccccagccatttgaatagcacggaagatccccataagaatgggaacagaactggtattgtgaccatgctcatcatccatttcagatgagtgttctcaacatcataacaagtgggctgccaatagaacaaaggagaaagtgattagagcttcaaaaactcccaaacacatgtactaactaaaaatccgaaaagtgttatgcaaacatctcaaacaagaaaacacctccaaaattccgcagagatcttgttttcacataacttcatgggaaattccttatcatatgctagggtatgggtcaagaaaaccacggcatacgctggatggtctacaagtgactctttcctttttgtgttatgatgaacaaataatcttctttgctcctttagcacttcagttaagtaccttgtcgactagggaaaatacaggtcaaaagaaagaagacaccttaaagcatacaatatgagattgtatagtacgttaatagaaacaagaacagaagacacctacttcagtacgaacatctctggagcaatctgttgatgccagcgcaaaagcacatgcatatttaataggaattgcatgttccattataaggtcatggagtttgcagatgaatgacttgcgaacagtatatgaagaat

SEQ ID NO: 43988 - DNA, 657 bp, Oryza sativa
tgtcagcgatggagaaggacatggttgctctggcctttcgacacggtggcggcaagcaccaggccaactccatctcctcgcctgagctccatgtcaacctcatccgggagctcgaggagcggctcgaggtcgtcccgtgagggtagaagggctaagcgctttgggagcctatatcgcgtggataactactgtgagcaccacaccaccgccttccgccttagccggcactcccgccctcgatgctaccatggtggttagatcctaatggagaaccaccgcacttcccgtgtgttccataccacgctgccctccccaccatccctcattgccaacccccgcggctgcaagctttagcaaggtgctggtggtgggcaccttcaaatcgaaccccctccatcttgccgctagccaccagatgagatgaagagggttgatcggcctgcatcttgccaccagccatctaacaagagactaaaagtagaggggaagagaggaagaaaagagtgaacacttatacatgggtcccatcgttttttttttctgattgttatgccatgtagatgctacatcagatgaagaccaagtcaaacaagtcacttaggctcaacatcatctgaaaccatttctaatactaccgagaactcgattgcaccggtt

SEQ ID NO: 43989 - DNA, 676 bp, Oryza sativa
catttactaactaatgaaaacaccactataagatggcgaatggatgttaaggagtacttcagtgtgatttgttacgagaagtctcatattccctccgtcctaaaacatctatttttgtcacggatagaataactcataagctagcgtcttaacaaattttgcactatagcacacattgttagatttattaattgatggacatttttgtattttttgcctaatatttaatacgagttgtaataataaaacattacatagattccccgtaaaaaaaaataaaacattacatagataataaataaaatcctacaacctccataactaattattaactatatgatctaaatatattactacctccaacccatatatgagatttttctatgtaactatatggaccaactagaaacccttccgctcctccggaaagatataatcctttttatcaagagacgaaggtagtaacacctttatttttattatattgataatctctcgttctaaaaataatctgtagtacactatgttaatgccatctcctctgttttagattgtacgtgaggtgttctgattttctcctaagtcaaattttttcatggttgactaattaagtatatagaaagatatagcaacatttacaacattaaactaattttattaaatccacgttgaatat

SEQ ID NO: 43990 - DNA, 647 bp, Oryza sativa
aatataatttccagcaatggcgccaaaatattcttgttatattatggtcacagatatgatccgcgagcgcatggatatactattgtagttgtagcatttcactcggatgtattccaagatatcgtatttatttaatcccatgtgaagattgataagagagaactatgctaataatttatatattacttgtatacatcaaagtctatgcaggggttaattcatttcaaggggtaggtgaaacgaagaaggaagaaccaagttactctcactaaataaattctaggctaagtagagaaagaataagaaaataaatcattcctatacttctagtatacagttatctttagtttacactcgctagtatacaatcatgtagccaataccccctaactatgccctcccggtgttttgagagatcactcctgattgccgagttccttacgacaatccgtcatggccatccaaccagaaatgattacgaaggagtacccatgccaggaaagtgtcttagtactatatactaatgtggagaaaaacccgtactgagctgtcatcatcagtggcccacctctactgtcccgtagtatataaccccaaataatgatatttaataatctaagcaccacacttacattattaaatactac

SEQ ID NO: 43991 - DNA, 711 bp, Oryza sativa
ttgatgttagtgctaagtacacattaccaaatttatttgctacgtctaggtaaactgaataatagaaattaataaacctgtgtgtgcaccccccataattccaagttaagcttattttcacaaaatttggagattttaacagcatgcgatttctgccttgaaaaggtactaccttcatctcaaagtcttttttttttgggacgaaggtagtaacatttgaactccgatggtagtttaattgcttcataatagtgagtcaacttgaaattcgcagtcggtgacctccacggtgatctaaaccaaacgagggcggcgctagtgatggctggtctcctgagctcggaatcggatggccatgtatggacaggagggcagacggtatagaaccatttcctgtcctatgtttgttgcatttagttcattgaattttgtttaaaagttctttttcacagaaatatactcaaatttataacaaaattagtaattgcatttgcatgccagccaaaactcaaaatgtgtaagtttgtactatacttaatttgcatggatcacacacagtacattgtgcttccttccttttagcatagatgtaactgtggtatcttctgctagatctcaggtgcagctactcttctgttctgcacgtatcctcatctctccacagagaagaagaatgtgaaatgttttcatttttgtacaggtgctggttca

SEQ ID NO: 43992 - DNA, 3009 bp, Oryza sativa
aaaatgatgaggatggtagctcctttagaacacctttacaaaaatatcatgactaattttatcatttaatagaaaactcaactataattttacaaaaacaaagaaaccctaaatagtgtggatagaataaaagaagaaatttaaggattttcataataatgtgatttggtacattaaattttaaattaaaaatcgattgaaaattttattcgaatgtacttttttttctcaaggttcaataaaactgcactaattcttataaaactatgcaaaatttatattacctctgtatttaaaataatatcattttaaaaatcaacacatactccattgcatatgttttatcattgttttcccgaactatatgtctataaaaattaaaatacagctatataggagagttttcataaaaatctattaaaaagatatttacaatttaataatttaagatgtcaaaatttgaggaagtcatttttttaacaaacataatactttttttaataacacgaaaacaaatgcatgggctataaaataagcacgccaataagcgtgctcaattttctaccaagacttgaattccaagctctaataacaccggtttgaactgcttttgcatgaagcgagggtaaaaacgtaaaaatttacaataaaggtatgacccaataaattgatatgggcttaggtttataccctaggtgtttcaaatggtatcatagcatggttatatgcgtgtgactaatttatatcctaggcgttggtggcattaattgtatctagtatggtatggttacacgtgtgtgactattttaagccttagactttggtatgtcacaatggtaggtgttacaaatagtatcagacccacgattataagtgcatataagttagtatgtcacagtttgtatcgcttatagcctgctgggatgtcacaatcatgggtaactttggttacccaaaaatacgtatgaaaggaaaatcctctggctgagctgttcgggagaggaaacaaaaacttttccagcactgtgcagaagtgaaagctttctttctcataaaaaagttagcatgaacactgaataatacatggaaatttcagatccaaatctcaatctgaagctacaaaactggataaaccaatagtcaattcagattcagacatcatttttcaaaacaaattagagcagaatatcgaataggaacaggaaaattcagattgaggagaagatttatgagaataatctatatggcacctacaaaaataggaacctgtagttgcattagaagaagatttgcacccaaaaaaatggaaccaagtgatggagacacaatgcaactgcaagaggatgctagcaactcagaaggagatcggagaagagagaagtgtctctgatgagctccaagacgatgcggttcctcatcactgacgggttataaacaaaggccgtcacaggtgacctcatctgtgctacttcaacccgtcataggtgagttatctgtgacgggcatcaaggtagatacgtcatagaatgggtacacgggatgtcacctttagacccgtcacaggcgtctcacctctaatgggttgtaaccacccctaggcttgcggagaccctcacctctgatggccggaaaatactggcccgtcagatgtgactatcacctctgataggctgtccccgtcaaagatgagtggaatcataaagatgagtggaatcatcagtgaccagaaatctctgactagggctaaactcatcaaaggtgagggtttggacccatcagaaataacctgatccgacgtagtaccacgggctgatgtctgcacatgtgattttgaggtcgattttctccgctacccgcaagattgagcataccatggtcagtttggaaacgacagtgggatcagtgtttgtatactagctaaacataaattagcttaaattagatgacactttacaacgagtggtagctatgaacctcagagacaaaccatatcatgtcaaagatataatttgtagttttcttttgtttatttctaacgatacaaagtagtataatctcttctctccaactagctagactgcagagttgattgatcatcttataattaattcttcggtaagctagcggcagattatgtacggccgacctgtcttccctttattcgttacttcctccgtttcacaatgtaagtcattctagtatttcccacattcatattgatattagatatatatggttagattcattaatattaatatgaatatgagaaatactagaatgacttacattatgaaacggagggagtaacacttaacactgagccactaccttagtatcactgctcgctcttctttttatcgatcgtcttcatcagctcccgcatctgttcctcatcaagaggtagcctcgtctctgtgcacaatgtgtgtgccatcatgaatccattcggaccattcatgaaagatggagcattagagagagggtgatgaatgctatggacatgcgaaggaggcggaggaggaggaggatgtttggggatgaagaacaagttgcccattaatagagatcgacaatagatattctctatgcacgacagttgtcttttctttctttctcagtgtttgtattttgtgtacctgtctgtctgtgggtgtagttgtggtgctagccctttaaatactagccaaaggatcttttttttcctcttcttccttttcaaggaaatagccaaaatattattcgctggtgcagaataaaaatgtttgcacggtttgcattgatgtatggatttcgactaggcagtcgaccttataaggtatttgctgacaagctttctcttgagacacgttgtctgtcggaaaaaaaaaaccctttaacgacatactataggataacactatagtgcttttgacggcagatgagctatcgcaacttttaggtcacggtgtagtgttattagcttctcgtaggtaccaaattaatttgtaatttcctgagggctgcaggaat

SEQ ID NO: 43993 - DNA, 2012 bp, Oryza sativa
acgtagttaagaaatatcaccagtcgtcctcctcctcaccgtagcccactgccatcgtcgtcactgtagcagccgtcaataagggccaggggctagcggatccaccccttctgatggtggcgcctccggatctaccaccctcaagctccaccatcatcgcccgctatcgtcattacccctcccggggctgagagtggcagatccacccctcccgagggctgcgccaccggattcgctgccctcgagctcatcgctctggttggatctcgcattcaccacaccaagccccacaaggtgtccgaggacaccaccaccgccactcccgccgtccttcgtgatggatcctcagtcactgagcttctcgccgctcaagcctgacatcagccgctcctgcccaacgctccagccgtgcgcacgagatggagagggagagtgagagagagaaagaggaaggatagcataagagaggagagctgaaggagcggagatgatttagtttttatatttagtttgcagtgattttcgcaagcgggcctggagaagtctgcggaaatctaatttttgcatgcgaccgcttaagaggctcacctgaaaaaataagtctattttcgcaggcctcttaagaggctgtatgctaaaatgcattttctcatggaaccctttgaaccgatcctgggggagtgatttttgtaggtgggagcagttatggtctgcctgtagtatagaaaaatcaattgtatagtaacgtacgtctatgagtgtccaacattgggtgctactgctcataactctacaaaaattctagctcaccctgtattgcccatgcaagtccttaagtgtgtatctggttatgggatgaggtgacaggatgggacgagattcagggataggtggtggaacatgatcatttttaaggagaatattcccctagttaaaatctagcataagtttatatttaaaaaactggtgaaccaattcaacccattttttctctcgctggcaacatacgggtcacctactttcgatcatcccttaaaaacagaatcttcgaatccctcatgccaaacatatagctgtgagcctgtgactatctaaaaaaggatgggcctcacccattccacctgaccacctctccaaagtaaaaacacactaagatatttccaatggccagttggccaccactgggatatatcacatccatagacccgtatattctattagccaccaccgtgatcacatcttgagaatcttctctctctcacacacacacagttatttatctctagatcagggcacacatatatttgttaataaatatgtttgagctattcccattaaattccaacagaaaattttggaggagaaagtcttttcaatacccctaaaaagtcacttacattgccacagcaatagaccaaagaatggcagatatgaaataacgcgactaccttgttgatgatatcttctactgtagtcctgacatttgatatgtcttctcttatctacggcatgcgattgccattggacctcacgctcgtctcatcgcatcaaactttctgtcgtggcctaatgggccggcagatgtatgtatgaacctgggtctcggttagttccaccacaagaatctaacgagagtcattttattttcgttttcaataataatgtaagaaaattggatctgctaagctaagtgtgaaaaagcaccaatttgtaacggagggagtaccaagttgcagttagatgccccaatattataaccatcaattgcactgtatctggacaattattctgtacattcccagtggatggctttctccttttaattgagatctttggtattactatctggtgatgtcctccgtagatcgatatgcaatggtggattggcggggtgatatgagagctaccatggccatatatatatagcgaagtgtgcaagctgctggcctagctatcaagggaaaaatatgcggtggaaaccacatatgtgatggaaacttgaaaactaatgt

SEQ ID NO: 43994 - DNA, 1929 bp, Oryza sativa
ttttgtcagcatgtggaacaagttagacttgtatgtgaagtgcctacgcagcctttgtctctgtcactgaacaaactgctatcaaaacttcaatttgtagcataaagagaatcccaaggatcaggttagataagtaaccaccaccttagagcaggtacaatagcagattattagctagctataaatatattttaataagataaaaaataaaagaaaataacaatgtgcgtatgataggtgagaccatatattaatagtatagtaagtatctattggatgaattggatgaattggctattagatcggctatagataaattagagctagtagtgggctatactattagacttgctcttataacatgtctaaagcacaattgaatctctattagacttgctcttataacatgtctaaagcacaattgaatctcgtccactcattgcggggagctcataaactggttagtgaatgcaacttgatatcgagatattgataaacgtttcatccacatcttctgctcatcgatctcaagctgtgaaaactcatgaaatcactaggtcaattgttcagacaaacatataaataagtcgagatgattatttgtgggctctccatctacaatagtcaatcgaaaacccgttggtttttatccgactcttgcacgtgtgacccacatcaacgcgtttacgctgccgatatttgtgaccttccctagtttgtctaagacaaccatctcataaaaaagaagtttctctgacacaatttgggcttaatgtgactatcgtcatctgtaattttgtcatctttctctagtctaaactttgaatccttgtcagacctaccaaacgaatgccatgtccatgtcaaggataaagtgcacgataatatatagacagcaggtaaccaagtcaattgcactgttttggtatcatgctttctgagagacagacaagaaaacactacaaaaacgatccattccaactggaattgggatgaagacgtacaggtcaacgagtcaaacatgtaaagtcttcagtttacaaattagtccttgattgcagcaactaaacaataattgaacacttacaataatgatttgttagtaactagagaagttaagaacttgcgcacatgagtatggattggtacgaaaaatgtcaccatgttaaagacttcacatttttatccttagattctgcaattttaggtttgtgctaggcatggcaacaaagcaatgcgccattttaagtggatcaccgagtcatactgagaaaaatctaggcaaaccacatgatgattactgacttaaaattcctctctaactaagcaattggatcatccttatcgcctatcagataacacgcctaggcaaattcatcttagcgggtacgttgtctgaaggtgctgcatcaggaactgagcagagtgtacatgacgaagtgatgagggcatctcgatgtttgacatgtctatgtccggtacttcctctgctatctcctctgtcgtgaaaggaatgctgcaatttgcagaggttagataggaaggatgatgaatgtacaggtcagataaacgtatgcaatcaaagctcatggacattttgggggcactaacctcaagtcgtcatccaagagaaatgaatttgacactggattttgtgcatcgctgctcaccatgtccctcattttggcaacaacctgcaattaaagaaatccacaagttagccgaaagaaagaacatggccatagatcacagttcacagctcaagaggagatgagaacatgcctcggctgatacactgtgggtaccatatttgtcatcccagtacatcgtacatagacgatatatctgcctcacacttaacgcctgacagatatccgtaaaacaaaataagtgcgcgtgtgaggaaaataaattctatgtgaagtataa

SEQ ID NO: 43995 - DNA, 1016 bp, Oryza sativa
gaagaccaccacccagcctctaagggcaccgcaatggttatctataggctctctacaagagatccatgtcagcatattttcctacttggaagagattaaatgaagagagaaagagcaaagctatctactaacctggagatagtctatagagaaaaacgaggcaatggattagagagctatagatatccatgtagacataccattgaagtgatttactattaatctagtctattgctgagatttacatgttttatagatagcaccttactttaccattgcgggtgctctaatcgtcagatgtaaacaatcatttattaaagtttgggcatgctaaaagtctagaaaaaatacaatataataggaggaaaatcacatagtcctaacggcatatttgtctttccacatctatattaatgtcaggatttagctaaaagctactctctcttttaagtcatttgactttttttaaaaaaagttctttagttttaattaagttaatagaaaaaattagcaacatttacaacaccaaattagcattgaatatattttgattatatgttcttttattaaaaatattactatatttttctacgaacttgatcacatttaaataagtttgactaagaaaaagtcaagcaatttataatatgaaacgagggagtttgttttcttgaatgaagtcaacaaaacaagtatatacatgccttatttgggtagctgaaaatcatatcataagaaagagtcggtgagaatttgaaaaaggttagtcttttttagcttctggctttaaagttcacgtttcagattttacagctacatattttcgaaatttagattctgagagtcttatgtataataagctctcgtaaataaagtttataaggatgattttacgtgcgtagtgagtatatagcgtttaaataaaaaataaaaggaaaaagtacgaattaccccctgaactatcacggttaaccgaattacctccgaacccgaaaaccagacattactcatcctga

SEQ ID NO: 43996 - DNA, 2114 bp, Oryza sativa
caaagtgtattcatttgtcaaatgtatctctgttgaatttttgtgctgtatgctagagatgaaataatgctaccgatgcttcacaaggtctgtttgtttgaatgctacaagtctgggtgtgctatggccaccataaaggaaatagcacatgttttctacagatgtatgagaatgctatgaatatacaattaatcagttatacatgccttccccagttaattacactgctttaataattcctgccatgtctggactcttgagttagacttgacgagggccatgagaaattcctcatggggaaatttgtatgctggtatagacaagcaccaccaatttgttgagataagcttctgaccttcagcttccttgcgtgcaagtactcaatggcagttttctacagtctacagaagctagcatgggtatttctttctggatgttctgtcagaaaataactgtagcacaattacttatcaaaatgttatacggttcaggaggtttagtggtctaaaacttttaacataatctaaaatctgtgatttgattcaatcaagtacaagcatactcttatgtgcagcagacatactcttgagtacttgaggttttagcatgtcttcactgcgctttaagatatgccattcacaattatatcctaacataataatcccttatttcttttacttaaataataatcccttaattggtagaacaaacaatcaaatttaatgaagcttcagttaaaaatttatacatacaaattagtgaatatggtaaaacatgtacgcttagattatttttatttggaaggttatgaatgcttatattattgagtgaagtgatttatctatatctttcaaactgttcatgatctccaaatacaagattgatggctatgcaattttgttcaaacaacagttagtgaatacagtttccttaataaaataaaacgaatgtacataccatggaggaaggcagatcaattcccatttgtgtatacaagtcatctgtccctctagtacttccactcctgtatgtccatccaaaattgtccagtacagtagctttccagaaaaagaatttttcctatacatgcctgcacatctatgattttccaatgaacagcaagtcatcaatatgtatgaagaaattacattggtggtttactgataacaaaatggctatcagccatcagggtaaaaataatgcaacttcgccaggtaaaaagttaacataatttaactgtcttcacttttcagagatgaacaagagattgagatgaatttagagtgcttacgcaggtttcttaaggttttatatgaagtctaaaacttccatctcgtcgtatgagtccctccgattcttcaaaacccttggtctgtcattgattatttctaggacctaattcaatagagttgcacatcaaactccggggaaaaaaattatgggcatcaacatattgcctgctatgctgctacttgataaatatgccaaggaggatagaatttcaaacaagagattcagcatatacccaattaatatgtctgcattaatattcctagaaaaatttcatggctttaatatgtaggttactgcaaataagttagtatacatgttgcgcagaggatcagaaaaactgaacaacacactaccaaccaaatcagtaactgtttcatgacaacacagctattaacagagatagaaaatgaactgctaaatgtctatgaagaaccaaggcataccaaatttccaggcaaaacgaaagtttacctctggccttgaatagagaacaccataagacatgcccacatcaacacaccaaaccttgccatcgcatttgctgggaaaaagaaataatcacctattacttctcttgatgttttttcagttgtaaattacccaagtgagaacaacagataccaattcactccacgagtctggggtgtgtgccctacaaccatcccttttgctcccacagatttcagtgttcgttcagcaaccacagaagatagctgaaaccaacaaaaataatttgacaagtctgtgataatcttatcaatagtgctattgatatattttccatagaccatagtgcaaaataagcatatgttttatcgata

SEQ ID NO: 43997 - DNA, 1000 bp, Oryza sativa
tttcctcccaaatagtttggaaatgaacttacaaacaattagtttctacttccttcgtttcaggttataagacattttgactttggtcaaagtcaaaatgctttaagtttgactaaatttgaagaaaaacaaataataacatttttaacccaagacaaatttattataaaaatatatttaattattgatttaatgaaactaatttgatattataaatattactatatttgtctataagcttaattaaagttgaagtagttcgacttttgacaaagtcaaaacgtcttgtaacctgaaatggagagagtattttttttctaaagatgattcccaatgcaaatagaaaaatgaactgatgtagcacgtataaacatggacaataaactagtttttatctataccggaacaagtgttcggcgagcacgtatatatagcataccggcgacgatgcggcggccgggcgcggtgacgaacgtgggcgggtcaccggcgacggtgatggccggtcggccgccgccgccatcaccagccgcaccgcgcgagaaagaagcccgcccgctcgcgctgatggccacgtgcacggcagcgcggcctctaggaccacaacgacggcaaccagctggcgtcgccgccgccggcgacgtcgagagcccgaacgtggtggcggcagccgcagccgcaaccctcaccggcggcgggagcaccgccatcgctggccgtccgtacgcccgctgttttactcgtctaatcctctacgagacgtggtggtgaaaccacgctgtaactggagtggaggcagtgaaagggtcgagcctcgagtctcgagcgcgcgggggcggcgtctcagccaaccgttttgtggatggagtttcgcggcgccgtgccgcccagccacgtacgataggagaagggccggcccagaaacgacggtgttaccggcccaaatcaggcccggaaaaagtacaccgaaagacctcgagtgaccaaaagcggggtcttg

SEQ ID NO: 43998 - DNA, 1731 bp, Oryza sativa
aaccgttttgtggatggagtttcgcggcgccgtgtgccacccagccacgtacgataggagaagggccggcctagaaaacggcggtgttaccggcccaaatcaggcccggcccggcccataatgatgtacgccacttgcgtgtcgcgtcggtcaccatgacgcaatcacccgtctcggagaagaccagaaataggggacttccatgtgactaataatatatatccatgcttagtagtagtaacatgttaggctcgtataattaaaaattgatatgtatggaatgaaaataaattaataaatattacaggcacatacgaagaagcggatgtcgacctccaatttactgtgagaaggccggcacgaaagaagaacgattgtgcttttaaaaacaaatacttctatacataccagtgaagcactgaagcatacaatccgcatccaactctgccacattcaccgacccaccgtgtttttttttttaattatgctggctcgacaaacaacagctgtgaccgtgcatacttagtcttatgcaggttgtatatttgggtcggatgcatagcaattatttcttttaaatagtagagaaagaaatgaacttctctaacaaagttgtgtaatcattggtaggtgtgcttgttcagttaggtccatgcacgcatgcgaaatgggctatccatcgatcgatcgaatcggctgtgcaaatgggatcctacgtacgctttggcttaacaggccagctagctactgtggagtggagcatcgcttcactaatcactagtgcctgcaatgcatggcgccgttgactatcacggatacgtgggtgattagcaggagcctagctgggttgcagttaggtaagatcggattaccttaattgggaatgtgagcacgtaatttttggatttttgtttctaagcaacatgcatgcttacgcggaccacgtcgatccggttgacctgatgttgctacagctaatttaaatttatatctatgctcacaaatcaaaatttagggccctttgatttaaagaaaattcgtagaaattttagaggatttcattcctatagaaattttttctatatagccctttgaatcaaatgaatgaatcctattgaatccaatgaaattcctatagaatgactcttcccatgtaagttttggagaaaatttaacatgaggtagaacctcatggaaagaatcatttgagtctttatctctctttaaattcctgtgtttttcctgtggcccaatcaaacagtcattcatatgttttttctgtttttttaatcctctattttacacttgcatttctgtcagaatcctatatttttcctattcctccgtttttttcattcctatgatttaaaggggctcttaaagggtgaatagctaatatggtccttgaagtttcgcttcaggctcagtttagtccttaagattttaaatcatccaaataagtccttcaaattaattatttgggttaatatagtccttggaccaacaaaaagtgccaggtgagcatgtcaagtcatcattgcatgcagcggtataaatgaaatgaccattctgcccttatataccatataaaaaagaaaacaaatatttcacatatgtatgatcgttttagaaattatcgcttacaattgctgcagccaagcactgatcgcataaattcctttgtcggccaccctccgcaacaatgttgggtctgggttggcctgttatttt

SEQ ID NO: 43999 - DNA, 3826 bp, Oryza sativa
attatagaagattaaagacatgttgtcagcatacacaaataatcataataactttagttaacgatcacacggcatgaacacattgatttgtagccttgattaaaagaaaggttatgagatggggatgaaaggatttgagactatatatatcttcgtctcattaatttgttaggtctcataacttaataaaaatgtaactttttaagatggaattttaaatgatagaaatacaataattttgaaataaaaatatagtaagtaagttgtacgaataattatgagcataaaagaaacggcagtgctaatgcccatctcatcactttgcaaaaggagaggagacgatataaagacaaaagggagcgcccgtttgggcgtggcccgcggccggtccgccacgaccggaaccattaccggttgcaatattgcatccctccaagattccatcagagtcttgagatcgattcccgcgttcagttccccgcgatcgccgcgcttttgggggcgtacggatcaaccacggcagcaaagcccggacaaggcatgagagagatctatgattagcatcgccaaatgttgtgagttgtgtgtgtgtgaccccatcgaaatatcactgctcacgcaaagaccgttttggacatgcagatgcttgggtttgaaactgatcatgttattatatttgagccaatcttttttttaagtaatgagatgttttttttaagtaaagattaaagttaaggcaaaatatttattttaagtcatctcattgatcaaattttgtattttaaattcattggatcccctcttaagcacatgattggctggcgatgcttagatttcagtgtattgataccggtgtactataaatatttatattgtacgtacaaaatttaatcctaaagttaattatatttagaaacagaggacttgtgattcaaattagtatggagggaaaaaaagggggcaaaagtgccatttgttaataagaaactagtcaataatataaaagtactagtatgatattgaaatgataaggtaagggatattgaaactagtcagttatcaaatgttaggggttagaaatgttagtgaggatggatttgggtgattttggaatagaattgtagctagaacaggctaagtgtaattctatactaatatggttcactaaaccaagattgtaaatctaaatgtgtaatttttaagtttacacgaacccgtgctcaagcactgagatgtattacactctaagagcaagtttaatagtagagcttattacctgctattagtccatcttatcataacatatataatagattaactataagattacctttaatttctcttctcctctctctttttctaacttatgtatttaatgtatttgtcttgtagcatgtgtagagctaactcttgcataagaaagagccaatgcccttcatttttgttatcttctcctccacatgaatttatagggcccgtttgggggagctttagattctgagaagcagttgtttggtagccagcttctgagaatctggaaaagctctgaaacctagcttctccagcttctagcttcttagttcattcttcaaaatctgtaacaacagattctcagaagctgtgtactgtttgggacagcttctaacagaagcagcttttaagaaaagctgcagctggaacaagctcccccaaatagggtcatagttggcttaaagcatgtttataatagaggtgatggccacctccaattttatccacattatacgtccataaaattaaaattaacttatataatgcattgaatctaatacactaatcccaatacacttaccactaatcaacccctcactttttctcttgtttcttagagttcgtgtggaggttacctcttgcacgatgggtgactcctcttcctctctcttctcttctctctcttctatcctccatatcatcgtataaacatatatgatactttggggtttgtacatatatagaacctttatagtataacctactattatccttgcttaaaaaaaagcattacccgctgataatgggaaatttaactatttcatactattaggtttatcaattattcaaatacccctattagatttgccttaatttttttcccttctaaggtggtggcttcttaactatttgccacttttaccaatgtgggtatccagcgtaaaaattgatgtaggacccacctattagtctaaaacctctccttttcctctctccctccggtccagccaacctcaccaactgtctgcactactccagcctgccccgctatcctccccttcatcaatcctcgacggttaacagctgttgaactacaggaccgtgggatagcgacggggatgcttggagggccccgctccacactgcactctcagggatcctcgcctgcttcccggccgtctccaagctcatcctcaagtgcgaccgccatcccgagagcatcgccgaccccctcggctcggcccttcgacgactcaagctttgctccctctgtctcgttgccgcgctcggcaccagcctccacaagctctccgccagctcatgcatctttggtgccaaggggattgagggcgtcctccgcgcctgcctccatctcgaggagcagtgccgacagttagcgaggctggtcgaactagaggaaaagaggaaggggagagttgtgagactgataggtaggtccgcatcgatttttacactgggttaccacgtcagcatgccgtgtgggcaaaagttgcaaactcaaatagttaaaagaagccaccactttagaaggaaaaaaaagagaggcaaatctaggccctgtttagattccaatttttttttcaaactttcattttttctgtcacatcaaactttcttacacacacaaacttctaacttttttgtcacattgttccaatttattcaaactttcaattttagtgtggaactaaacacaaccctaagagcaggtacaatagcgggctactagacagctataaacatattttaatgagataaaagatgagagataacaacagcgggctacagatttgtagccagctgcaacacggactacaagacgcaatgtgtgtatgacagatgagaccattagatcggctatagataaattagagctagcagtgagttatactattgaacttgctctaacagaggtgtagtgacaaacagttaaatttcccgctgatagagagcgtgcgcaggcaaaaacgcaaccatatccccaggcgcgagctctgtccccgatagatcttgtgcatttgtgcagtgtgcacgcgacatgaatccaccaacgtctccatgggccgcctcaccctgctccctgccctgctcttctcgtctctctctctctacccggccgttgggactcgctgacttgggagcagagccagccacagagacagaccgggtgtgtgtatactgtacagatacaaaattcaaattcttgcactgccctctgcgtggccccaccttgccaatcctcttgcacctcgtgtcactgcgggtgggcccaacgggacggttgacggttagtgagtaataaatgatttatctctcgctaataatccactgatcctggagatgatgctgcattacccactaatcatatattaaaaaaagcctaaaatgatgggacaaaaagcccatatataataaaaaataaaataaccccggaaacattctcatcccatctccacccaaaaaagccccaaaaccctcttccaaagccccctgtgagtggaccccacctcccattcccaatccgaatcccaatcccgactagtgcgcgcccttt

SEQ ID NO: 44000 - DNA, 891 bp, Oryza sativa
tcccccctcccccccttttttagagtctaccctagcttccgcgagcgcacggtgccgccgtgcgctcacgggagccagtgtgacggcgccacatacactaaggaggttgtcaccgtcatcgttcaaatgctgtggcgaggagttgctcgagagatgaagggtaaggaattaccctcactgacatttgagcctcataatttcttaaaaaaaaaatcttctaataaaattgccaagcaaaagacatgtcaacaccagtagaccaagtcaatgtgacaaaattgccagcaaaattgctagggggatttacactaatttttataatttttatagttggggaaagttctatacccgaatttgcgaaggacacgaatgaaactcgacctgttaatgagggatctaaagttaactttttccctattcttaagcaaacccaaccagtgtgaactatgaagtgtcttgcatctaaacattactactatttttgtagtgtctggcatcaaagcaagtgacgtatgctcctgttgggctgacgcgtggttgaggtaattttagaaagctctatagtttaacgaatttcacgaatccacgtatatatcggagaacttaattaggctattttttatttttttaaaataatgagaatttataaaacccggcttctacaccaacgtggcaataacattctgaaccgtaatttgaatagtaaccatgattctaattctatccctactttttcaggtttatctgggaacatgccgtgaacacaattcaggatataacgaaaacacgtctttccgtgaacaactataataaacacgtgctagttgattattattatctgattttattggaagcacctataaatcgggcgcccgattgtttttaaaaatc

SEQ ID NO: 44001 - DNA, 648 bp, Oryza sativa
gtcgccgccttgccgatagaaggtaagagaagaggaagatatgaaagagaaagaggggaagggatgagggagaatatgagatgaggtggagagtggagaccgctgacatgtgggtccgcttgatgacttagcaagtcaactgccacgtaggtcaaaaccgtctccaaaaccgtctagggagttgatttgcatcggtttttggaattgggggatgggttatacctggttttctggttgtgggatgctattcataaacggccatgagttgagggagggaaagtggacttattcctattgccattgctatatgctttgctaccatagaacactcggaaataggccaaggcccaaggcctctatccaaatgggccgctagctagcaagcctcttcattccgggatgacgccggatgtcacactgcattgttgccagtcatggtgaagggcagtgtaaaacagtaaaagtgccctaaattttgtgacataaattacttctgctgataatatatatagtttctgtttgcatatgaacacaactgttcttatttacagtgttttcttttgtaagtagtactttcgctatgtagtaggagtataaaaactgagaaatttggcacttcctgggccaatgatatatttttaagtgtga

SEQ ID NO: 44002 - DNA, 1115 bp, Oryza sativa
atgttgtcaatcattcagtttctgatattgttgtcgaacaaggtaagctgaaaataatgcagaacaaacttgttcgtgacgattcatttaaaaagactgtttgtgacttgttactaaactattaaagcgcttttgctaggacttggttatgagagatatatatatattttcattttccatctttttgttgagttagtgcaaatccagttctttccttggttgtgaaaagctatgttaacttgttaagaagtttgttcttgttttttttaaataaatgagtgacactcttggtgcaatatgcttagttatctactgtactcatgtgatatctgtaggttatctccaatcactttttggtatatattcaatcagatttgagaacattggtgtccgaaagccttctagtgatgacataaagataactggaattagtcatccacatgatttcaggaaggtactaaacattttgatttatctatctcagtctatctcgagtttttgtctcattcagacatgctttcttcaggctgttcttgtccatcttttgaatacaagcaatctgaatctcagtagaaaagcttatgtacacgatgatcagcagagcacgagttctaaacctataactatgtcttcggtatgtctatttcttaatggtaccttttaatagtttaaactgtaaagatcctttgcatttagcaagccctggagctatgagatccaacctttctgaatgtgcgatagttataaaactaagaacaagcatatattttgtatatcgaggttctgtttgtataataccttaggaagtattgtattgtagatatatagcttctaacaacatacatggttttgctaagtcaagattgtatttccatattaccctattaaacttggctaatgttttcattttacagaccattttcactgatccccgtgttttgcatgatatatatacaacacattgaatttttcaggttcctcctcttggagatttgatacttgagaagcttgacgaagttgaaatctctgtgaaggtgataattacagtatcactgttaatttctctaagttttaattatcttctgttttgttctcataccattatagaaacatgg

SEQ ID NO: 44003 - DNA, 864 bp, Oryza sativa
caggctaaagaaatgatcttttttttttatttgagtaaatttcagaaatctacaactatttgggtcaaaactatcaatttgctacacgtcatactcatgcatacatgccaagttcacacgcacgcacaactggttacagttgcagaacttgcagtttaatgataaaatcgtttgatatagttacaacagttttgcgaaatgttcgccttaatcttatagaaaagcgatacctttgaccaaataactacagctttctgaaatttactcctttatatatattttgcatcacgagaaacaattttaatcacttaggtggatatctactcatttgttgcatgtgaacaaaatgaatatgaaaaaaaaaataaaaagaataattaatacacgtatattcacagatgaattctgttttttttagttcatcaaactctgctcactcaattctcttccacttaacttttcacatttccctcattcccttccggttttacactctctctctctctacatacttgattatatattagcaccatgcaataaatggacgaacatccacccgagcgattacaatcctctccaccaacatacaagtttaaattcaacttctataaattgtaacaaaaataacaaatttaactccaataagtatatgcatattcacaaatgaatttattaattttgttataacttgtagaagtcgaatttaaaattgcatgtttgtggggtgatatatttcatattaatctatcttatcaacttttctgaattttttttcaataaacgggcgaacatccaaccgagcgattacaatcctctctcttggtagctaactaaagaagtgatcttcttcttcttcttcttcat

SEQ ID NO: 44004 - DNA, 795 bp, Oryza sativa
actgttcatgtcatgcaaatggaatcccagaacagtaaataaaggactaacaatatgctaatatacatatgaaaaaaacttttctgaaagaactgctgcgacttctaagtcatgtagtattttcaatcagttatgctatgcctgatgttgaacattgcaatctttaaactgtcaaacattccagcaaatacactacaggaaaaaggtatgcaacaggatctcatttaagctttgctcctaatgattccgataccatctggcacacaactaggaggctacagatcagaggacagtgagtacttgggtcatcggagtgcaagttcttagtttggataaagtggggacatggagccattctagttcatttcggtttttaattacatataccacatgaactagcaattgcagaaagttgtatttttagtttggataaagtggctcaatcctgaggcataccttcaatagcaggcaaatttgtgatgaaagacatcatctgtggagaaagtcttttcaatatttcatcaatctcctttgtatacccactggctgtggttgagaagtctgggcctgacaaaaataaacaatgatattttatgtgtgagaaaagttgacaattgtgtctgaatggaatggctggaagcatttgcagcccaaactatgaaaaaaaaaagttgtcaatcccatcaagtaacattatgcaattggcagattagatgttcatggtagcaattaaatgagataaccaagtgataataattttttgaccaagcattaggcagtgtaggctggcagcta

SEQ ID NO: 44005 - DNA, 1067 bp, Oryza sativa
atggcttcaactgaatataacttcaaatcaattgtaagcagaactattggggctaacatagtattcttctatgatggaaagtacatcaaaatcatcaaagcttatgacagtttatgttgacaaatacatagcaaacatattcagaatcaatagctgaagatcgaacgtacccgcagccaccgccgcatccgcaggaaccgcagttgcaacttccaccgcacgacatcttgatcgtctgggtctcttgtaaactcttgaacttgtatagttggatgaaatgagagattgaaagcttgatatgaactcagctcagatatgcccccctatttatagtagtagtacgcttgagaataagctgcacaattatttgcaagcattatcatgccagaaagatgtagctggttgaaatggccttgaaaaatcattatcattcattgacgtcagttttctataggcatttcccggagttttaaaaaagcatatttgtttggggtgcaattgcgtcattcttagttgaagatagtattgataagtgccctaaaatataaaaatattgacgatttttatatacgccctccgtcccataaaaaacgaatctaatactagatgtgacataatctagtacgatgaatctggacatatgtatgtccagattcataatactaggatgtgtcacatctggtactagattggttttttatggaacggagggagtagttgcttacgtgcaaaggttgcattattttaattactgttaatctgaaccaagtttctggacaaatgtgatccaagttttggccaggttcaaatttgctttcacaccatgatgtcaacctttgcttaaggtcgacgccttgttgctcatatttaaatcaaacaatctgaataagtttcttgtatgaactggatttaaactttcatcacgaaaaaccgttgaatttgatcaagttcttagctgtttcaatcatgcatcagtactatgatgcagaccctttgcttaagatagatgcattattgcacagcttgaaattgaatacgtttcttgtatgagttgaattcaaatttct

SEQ ID NO: 44006 - DNA, 1506 bp, Oryza sativa
tttttcaccctccgaggggagacgcgtccggtttacccggggagggaagaagatgcagaggcgcagagcaccaatgcatatgcagcagctgcaggcggcagcagcgaccacttgtgacctgcactactacacgtcctccctcctcctccttcctctgctggcttcttgctgatttggtgtgatctcttctgatacgcatcaacacgagaagcatcgaatcgagtgtacatgtacagtagtcgacagtactactacagtatggacattcagccagctgcatcgatctgcgccgttggatcgacacgacgtgcggcccggatgcatctgtcggtcgtggactgtagcaaaccacagccagtgatgtgatgagtgatcaatcgatggatctctatatcagctgacctgatgcgttgggggatccaaggttactactgcgcgtgtatggatcaatctttggtggtagccagggtttacaaaaccatcttattattacgtaacattctcagttttttaaaccacggcatactttgttgtaaccgtaaccgtgcggttaccgtaataaccgtcaaactatagagtgacggtaactctacacaaaacagtttgacgaattatggtggtagcgtgtcctcttgttttctagggaacgaaagatgagagagttggttagaggggtccgtccattggagtactagcttaatttgatctcgattgatacttgcaaaggttgatgtttaatcatagattcggtcctcgatctaataacaatatctaacccctctgctcaatctaatttagtgctagtacatgtatctatctggtcccgttgcgtgtcttcttttctactactgctcatttgctttagttgtgttctttagttcatcggccagctgaaaaatgcttttattttcttagaatccctgccgtttaatttgaaaatgatgtgaatctgaacatatattcatggtagttcatacgaaattaatagtggtcttcatataatgaagtttactgcattacttaggatgcatccatttggaatggttgggatctcctcttctgccgtacgtaaaatgggacgagtcactagcacataactaattaaagtattggattaaaaaaccctgaaaatatattaatataattttctcaagcaacttcatatataatttactagtgccaaaaccgaactgtttagcgatttgaaaaagactgagttcctgcttgaggttccaactctcctccctcgtttttttttgaaactgctaaacggtatgtttttttttgaaaaaaaaagtttctacgtagatttgttttagaaaattatatcaatctatttttcaaaggaaaaaaatctaatactgaattaatgatgtatttgaccggtcgagcgtgtaataattagcccgggacagcagtcgcgggagagaagccgatggagcatgcagcattgcagcggcagaggaggtgtgcttccttccacagtactgtagacgctgcatgcgc

SEQ ID NO: 44007 - DNA, 631 bp, Oryza sativa
gattttgtttgctaaattaaaaaaaatccgtccggaagaacctcctacaggcacccacgggtaataacgaaatttcagaaaattagatctgaaattgtaaaccctgatacgatgctgtgagatatcgatcccaacaacttcaaattcagtgaggtatatgtatttgtggtttgattaaaggcacgtatttcaaattcagttgatacatgaacatgttcagagcaggtttgatttggtcataaaatcatcaaactcaaatgcagtctaggtcatgcaataaatttaaattgaattcgtacagcaagttaatcaaatttgatgtgtacaagatatgtttaagtacgtgtctggtgtagctagctagcgccgtggatttgaaggaacgatgatttggtcagtagcttgagggatctgaattcttggcgtatgataaacttgagttcaaaaaatacaagacacatcagttttatatttcaattcgtgtaaaccattgaattcaattcatgcaagggaactgaatttgcatatttcaattcatactcttagctcatttaaatcgacatttgcacgatgatgagtagtgccttttgggggtggaactggtataagtttgacttttgcggaacttaat

SEQ ID NO: 44008 - DNA, 655 bp, Oryza sativa
tatgagatcgtcggcctctaagaattaagataactaggtcagctgacaacgatgacttgtgaggagtcacaatagctatgtcaatgcagtcttttttattcgctcttcgtatgggtttttatcggtttttagatgtaagatttttttatccaatttttcaagcccaagggactattcaactccctttttttttcttcttaatataaagtagaaaattccctccctcttgtggttttggaaaaaaagaagaagaagaagattgaggtaactatcgggtagccatgaatttgaagcaactatatgagtggttgatatttgtggcttagttttagcactaaagtgccatatgtgttaatgtactatagccctcaataaaatgggaggccattcctggtctcctatatatgtactagtagtagttgtgtccaaagcagcttgagagagagctttgttaataatggaagcgtgcgtatagcccatatataacagtggctagcttgtatgcgccaggcttgtatcatgcataagtcatccaaacagtaatccattcgtaacagggtagattaaactgtactccctccgtactcgtaaaagaagtcgtttaggacaatgtttaagtcaaacctggggaatataaatcatgaatagctctcaa

SEQ ID NO: 44009 - DNA, 1659 bp, Oryza sativa
aatcggactgcattggtcgacattcggcgaatttcgttcattttggtgcagcttcagacaagtctattgacctcccactttcacccaccatatatatactttttataaaagagaatagctagtgatggtggtggttttgctaccaacattactaccaattcccaacttttaaaataaataaataaatgatatttagggctagagagtccatatgtcaactactttcatcagtttttaatttttgtgggaaggaaaaaacagtgtgagctaaaaatgtccacatatgagtaacaaatatctacaacaattaagatatgataataacatggtaatgttaattttcttcacggacaatatgctagtttttcttaatgcttattagaaatttggctcaaaggtagccatttttccctgaaatttctgaattttgccaattttgatggggcctttttttttattactatttctttgtgtttgatcgatgcaccgggaaagtgtttcaatttctttgagaagatatccccttatttcttgcatgcatgtcatctaaatagtaataaatttttttaaaaaaatgataagatagattaatataaaatatatcactccacaaatatgtaagttcaaatttagcttctacaagttggaacaaaaataacaaatataattgtgaagttaatttgttcttttttctgtgaaagttgaatttagtcttgcatgtttgtgtaatgatataatttctattaatccatattattaaattgcatcaaactttttttataactatttagatgatactccctccgtacccgtaaaggaaatcgtttaggacaatgtttaaatcaaaccttgaaaatataaatcatgaataaccctcaattgaaaatataaaaattatatgaatagatttgtctttgaaaaatactttcataaaagtatacatatatcacttttcaataaatatttttataaaaataaggagtcaaaattatgttttgaagactgtgtcgctgttctaaacaacttactttacgagtacggagagagtatagcagaaatgagggatgtccatccagggatgaaaatccaattcccaatgcacccaaatggagtatactgctagttagtcacggactcacatgtctgttgttggcacttggagacattttgtaagacagcaacaacttaacctccaataattgttctactccaagcgttcacagctactaccaccataagctcgctcgcgcaattagtatatcgatcggccagaggaggaaaaaatatataaagcgcgggtgcacgatgcgccgccgcgtcgtcccggcggcggcggccgtttccgcccagctggcagccgccctcctcctcctcctcctcctccacgccgtcaccgtcgtcgtcgtcgccggcggcggcggcagcgaagtggccgtcgacaggtacgcggctgcaggcgcgatgctgctgcttccgcggcggcggcggcagcagctggaggacgaggtggtgttcccggcggcgatggcggtcgtcggagctgagcagctgcagcagggcgggtccttcagcgggctcacggcgaacaagcaagtctgcctgcagggtcactcgtgcgccgcgttcgccatgccctacaccggccatggctgcatctac

SEQ ID NO: 44010 - DNA, 967 bp, Oryza sativa
ggatcccccctttttgcctccttcctccccttctcctatgttcgcatctctcccctctacaacaaattgccctccctagatctccaccttcatagcttggatcaaaaagcgaaatagaaaaatggaacgaggaggaggagaggagtaaaaggagggattagatcagagtctcccctattgtctcctcacaagttctctaaagaaattataggtgaggtttttccccttgttatatcagttgttctagggtggttttagtggtttaatttgtggataaggaaggttagagaaggagttttgtttgttgtggttcgaattggctgttctgcatgttggcagatttacagtgtttcggttttttgaagtttcggagagctaaatgatattttctgcgaaagtgtataactagaaagttgtagataatatttatatctatcttctgaccgaagggcgcgattttatctcaagtggtttagacgatacgaatttttgagtataactgttgtttttatgccataatctggatagtagtagattgaactgtttttggatgggctaaacagtggaacagccaagactcctatagacaaagttgtagagatttttcttagctttccatattggtaaagtacactctgattgggcaagtagaactccagttatgattgttttagtgcggatagtctgaattttctggacagattgtgaagcctgctttcaagcgcaaattagaccattttaatggcataataaaaatataatttccacataagagttgtaggcattgttctgtagatttccaaaatatatttatttgcggtcatagccttttcatatttcaagatataaaggtttgaagcaacaatattgtttatagtgcaagcggcgttccttgttattgcgttttgataggatggggcagtaggttcacctttttcattgttttatatgcatgtttgaatgtgtt

SEQ ID NO: 44011 - DNA, 1056 bp, Oryza sativa
tatacatatgtttttttatacatatctatacatatatacatatatacatatatacatatatatacatatatacatatatatatatgaatgtgggcaatgctagaaagtcttatgatatgaaacggaggaagtatttatctggttagatacaaatcatgcttgcctgatgacttgcatttccaacatgtggttcattgaaccttaagcatccagtcatcatgtaaccacgggaagttggaaaaataaaaggattggcaacaacaggagagcatggctaaaaggcagtatctacttccagtcaaggctgactgcttaacctttctcccctttttctcatcctatgttcacacttcccacttcccagtagttagtagtatttaatcacctggctgaagattgtagtgtacctgcaaacaatttgtttgggtgtccttgtccctgatttattgggggaatggatccatcataacttagtttattgattaggtggttatggctgcatcgctttatgtctcatctattgtagtttaagcgcatagtgggcatgaattatgttgccttttgtttattgtccattattatcacgatcgattaatgttgagtgggaacctaaataatccatgattaagtgccactcagagcagcctctagtgctgtcgggcatgactttatggtagtgtgattgatctaagcctgtcttgcccaatcaaactactattacagcctgacacgattgctgttactggttgtctgcctacctgtgtagcctggactatcttggagcgtatggtgacaaagttcttatttttggggatattttaagattgaaacaatatatggttggtgccctagtcgtggatatcagcatcacggtcatggttactgtggatagtggtaagatgatgcagacattttccacggttgatatttagcttgagcaagtgtttaactatgttattgtcttatgcgttgtcgtgtctactaataggtgcttaggtagtgatggattagtgttgtttgctgcctattgtgtgattaagctgggaatctcacttt

SEQ ID NO: 44012 - DNA, 756 bp, Oryza sativa
agtagtttgacctatgaccaaatcaaaacatctttgtaacctcaaacggagggagtaacattatgtgtgcgtatatatataagcacgcgcccaaagtgcccggagagaaactggatcgagcgccgccaggacgacgacgataatgctcgggagcgaccggcgaccggccggcctcgtggcgcagctgctcctcatcaccctcgccgcccttctcatcctcctcctcaccaccgtggccgcggcggcgccggcggccggcggcgggtacagcgccagggtggtcatcgtcgccgggaagaagagcagcggcagcggcgccaccgccaccgctcaccgccgcgtcgtcgtcgacgatctcgccggcatgatggcggcggcgctggggcggcaacgcctggaggacgtggtggcgccggaggaggagctcctcatcccgggcggtctcgtggttggtgcgggcggcggcgggggcggctacggcgccttggaggcgaaccagccggcgtgcccccgcggcggctgcgccggcaagcagccaggaggggcgtacacccggccgtgcacgtacggcaacacctgcttccggccaagctaagccatggctgcatttgcaaaagataattagcagctgcaagcacacatatctgcctggtgcctgctagctcgatttgtgataattgcatgcatgtattaattaattatttactccacatgcctgtattattatgtactccctctatttcaggtaataggccg

SEQ ID NO: 44013 - DNA, 1602 bp, Oryza sativa
tatctaaatttataatagaaatatttagatatctaatatttaaggtatgaaatgttgtattataacatacatggatcgtaaaattacctaaagtgatatccttagattgtctcaacttcatcctcgtgtattctcgggccctgttcaatcgtttcctttcaaggcatggtcgaatggttatattgctaggatactccaatacagtcggtagcatcgtgaaacaatatagatgttgttagttcgtccacaaatagaagtaccatatacaattttattatgcaagttccgtatacaccaactaacatggcgggtttcactaaaactttgagagaatattttgcacgtactttcaatttcaataatattacatctatctataaagtataatttcaatttcattatattttagcaagataaaattctaatagatatgttactttttttatggctaaaacataacaaatatgaagttggtacttaatttatatgtgtatgcaatactattgaaaatacatgtatattgtttatataattttttatgatatatattatctggtgggtacatagtgtgtaaatttatgtgtatatacgatacattcccccacaaatataagcatttatatgagctttagcagagaataatgtttagcatttactagtaggggaaaatcccactcgaaatgtagcatttataataaaatgtaagaaacaatggcatatgatttgattctgttttgttttgtcagttgattttctctcaatgtatctatcttctttcacttccctcggatgcttggctattattttttatactctttggtgctttcatgtccacgagcctccctaatttcaccaccatcatctttaatttatatgccttatctcgcctacctatcccccctgtatctggcagctcatgtgccacacgtctactagccactccgatgaatcgtctccgcccccaacatcgactcaacgcactcctctatccccatggcaatgttgggctatagtggcaccgctggtgcatagctgcccaccgcttgctagccactccgacgaatcacctctgtctccaacattgatccaacgcgctcctccagccccatggtattggtgggttctggcggcaccgctagtgcatcgccatccactgctagtcgtcccttaaatccccaccccctccccgaaattcaatggctaatgtaattgactgatgttttttacaattaactgctgaacaacaaagggtaaaaattttaagacagctgatagaatccttgataatctagactgcgaatgcaaagaggcaaagctatagtagtagataagtaaagtaaaatatgagaaaattcgattggtagcataggtattgtccgagtaaaataatagcacaagaaacttgtttcttcgcctgaaagcacagctctgttagagatttctaaaatttagcacttccgtccactaaaaagaccaaaaagaaaacccttaggtcaatttcttcttcctcctccttccagtccctcactgcatacctcttcccctgttcatcgcttgcctcttgtctcttatgcatgaccgagacaccacgcataggcaagg

SEQ ID NO: 44014 - DNA, 557 bp, Oryza sativa
cgtaaatataaaaatatttatatcatgcttaaagattatttgatgataagtcaagtcataataaaataaatgatagttatataatttttttaagaagacaaatagtctaacgttaataaaaaattaacggtgtcatatattaaaatataaaagtagtacatatccagcagatacgtacaacgatcacgtgaagacgtgattcatccctcatcgccatcgatcaaccacaacacgacgatcgatggagttacgatgcaaaacaccgaaacgccgctactacaccaggtggcaccatacgtacacatacgacacatgcaacggacacacgtcagatactcggatcacagtcaacacgaagaagaggcccagcagcccacagacaatttagttagcgcaaggcccacaaaactgtgcggctcggcccacatctcgacgccgagtttgaatttacgcccttcatacgcaataccagaaatagcgcgtcactcaacctacaaaaccaatatacttaaggtcttaggatagtatatatagtgtccattttagatgatgcgata

SEQ ID NO: 44015 - DNA, 713 bp, Oryza sativa
cattttgcaaaggcatacttgtgttaaaatttatgtgctccatggttgtgccttggactgccaagttgccatctgtgacataacttacagcacttattaaaaaccttttacatagtatcggggcaagacaatgtcaagtatggtagaaatactaagctgctgcttggtttggtcagttttggcaacaataattacacattgtaaaatcttgaaaccacattgtgggcatacaattttttttaatcttctgactgtttttgtattgatctcacccaatttattgtattgtgatcctttaatgactttatattgtgcttgttgcaatggaatttgtgtatttcctgctttcctaataacagctcatgcacaattggcattaggatgtgcatgctttatatatatttagccttatttaatttgactttggagaaaaatattttttccctcattccttgctctaaattatgttttctcaggtggaacaaagacggaaggaggctttatctaggacatccgaagacgccttatctgccttggaaaacacactttatgacgttgtttctcgatacagctatatggatctttggccatgctcaaccaaagaattggattatctatcaagacatgaggtttgcactatctcaaatatacaactactcttgcatatttcatccgaagcaaatgtaacaagctcatatttggaactcacagtc

SEQ ID NO: 44016 - DNA, 1669 bp, Oryza sativa
gagaaatcagatcatgtacaaaaaatttacgtatttttagttcaatgtagagcacttatcttacagatttcaagtgtagtaagtgtgtaagcatgaactttgcaaacagaaaagatcaaatcttcagttcagaagaaagaaacgacacactgcagatcaggaatggcttggcatggtttctagttgtgctaatctagtcaaacaaccagtcaaccacaaccagtttaaatgcaaatgttgatacagagtaaagtgattaccgtctggagggagcaagaaactggccagaacagaagctagggctgtgatagtgtaaagttagttgctttattcattgcagcatttatatgtttcagtttggggtgtcaaaagcaggggagttaatttatttgttcagtgatccataactgtgacctgcacactctacacatcctacttactaccacagtaccacagataaagcttatacatgctcctctacaacaacattggtactaaatttgtgcaagattattcctttgacattatacagttaactactcgttcagataacagttaaagcacagaaaatgacagagagagaaaaaaaaaagagaaggctgaattgctccaattggttctttggaggttgcaagggccaaccgaccataaacactattggtaagtaagagcattgttaagcacccatgattcatccagctattactatcaacatacagacaaattcacagatgtcaggacaagttgtgggcacaattcttgtgagaggaaataataaggctaccactgttttctcgcaagcttgtcttccatctttagcagtgtcaccatctggcattaattgggagctgatcaatggggagataatctgccaaaacacctacctaataccctcaagaaggctacaaaataagggaatgtgcaagaggcagaagcaaatccaaagtaaaagtgatgattctaggaccatttggagcccccactggttgcctactaatgacgaattaaagctatggccagggctaattgcgcacgagatggaattttgatttggacaataagggttagttggttaggtgtctcgagcaaatttgacaaatcgaaaaccaatttaatttgcaataaattcactctatttaatatggcacctctttagttttcacctaattgtaatgaaggactcatgagagagaaatgcaataaaatctgcaagaatttcacctagaacatcttctgaattcttgcaagcaatatgcttttgattttattttttttaagttgagacaaaacagttgtttctaaaaaaaagtatttataaaagggatttataggaaacttaggattcctcaagagtggtcttgtgccatccatttcatctagaaattcaagcattaaccaagaagaaacaaaatgaaagaatgttgaaagcatggtagtaggccaaagaaatcaatgtgttgttgtttgttgatctgattggattggaccgttgtatcctccttggctagatgttactaccacagtagtagtactgacaaattgaaagcagtgtgggggtatactatactatactactcctataccacaagtatactgaaacatggatctgtgttgctgggtgttactatctttcaggtaactaacatagcaagttctcaattactgacca

SEQ ID NO: 44017 - DNA, 922 bp, Oryza sativa
aggaacagttattagacttgatctgtaaccagaaaaagaagaagaaaactgaaactaaaatagtttctgaagaattaaggcagtctacttgtaagaaagacaagaattcagtaaacatggtgaatttgaggtttagtttagtactcctacaagaagatcatggctaactggtgatgaagaaaaacaaaagtcgggtcatttttgtagctgacgactgaactggacctcaaagaaagctggagcacacaacaaactgtttatcttttcacaaaccagagaaattaaaggtagttctagtactaattcagaaaccaacagaggtcagattggtgcttccagaagaaagcccttgaagctgaagcacaataaacagtaatcttttcttcacaaacctgaaaatcaaagttaatttgctactagtactgattcagaagcaaacaaggttatcttggtccttccaaaagattgccatacattcaaaatcttctcatgcgaagtttataactgaaccatcaaaacaaatccccccaaaagaaaaaaaaaatctctctctgtgggcaggacagtctgcaaaatgaccttgcccatgcatgcaaatgcaatggcaattgcaggaggtcatcagtttggtccctccctaccccaacacaaggtgacaaaacaaatgatgggatctcttagacatcactgtttgcaactatagctcctcctgcattattattgaagggaagggacctcacaacctctcttctcttttttttttctctcttgtactgtgctttgtactactgtgtgcattatgttgttgcatttgtcttagtgtgggtactgtctactcctactccactatagtttaggtgaccaaatatgctggttaattaggtggcgtttggatcagggactcaagtatgggggatccact

SEQ ID NO: 44018 - DNA, 592 bp, Oryza sativa
aaaccagcgtgacaggattgttttgtcatgtcatctcgaccgacatggtcaaaggttcagatcgacatggtgtgcatcatggtgttgatacacgtagtatgtacttcctctgtttcacaatataagactttctaacatcagtggcgtaactaggatttaaagtaaaagtgtttcatctatatgtaatatgtcaattaaaagggtggtccactatataatttttactatattaactagcacatatactataatttcaaatttttaggtggtccatggaccacggtgccacctagctagtacgcccctgtctagcattgtccatattcatctagacatatgtatgtatttagattcattaacatttatatgtatatgggcaatgctagaaagtcttacattataaaacggagggagcatatatgggacagtagcagacagggtaggtagagcgtcgtgggtgaatctttggcgccgcgccggtcgatcgatcgaatgagccatatgcatgcagacggtgaccagaacagaccaaaccaaacaaaaactgaagagagattagtggtagctagagagaagaagataaacagggtcc

SEQ ID NO: 44019 - DNA, 1552 bp, Oryza sativa
gtggattcccaagatataaaattcttgtgtcagtctctcaaaatcagaagatctattttctataatgggataagaccctcccagctacacatggttcgggatgttcacaatatattgttatagctaggaggggttatatctccttctaggttaggtcttttaggacggagggagtactctcccccccccctctctctctctcaactggagtacttcctccgtcctataaaaaaataaagtactagatgtgacacattctaaatacaatgaatctagacatataaatatatatttatctagattcgttgtattagaatgtgtcacattcagttctagatttagtgcttgtttggttattagagatgcaagtgggtttttttagtctgcctatctcatttctagttcattttttcttctaaattttgtactaccacgtggaaaatgaactaccaagtatgtttttatgcgggtagcgggactacccacttgcatccctaataattactcactccgtttctaaatatttgatgccattgacttttttaaatatgtttaatcgttcgtcttatttaaaaattttaagtaattattaattattttcctattatttgattcattgttaaatatacttatatgtatacatatagttttacttatttcacaaaagtttttgaataagacgaacggttaaacatgtgctaaaaagtcaacggtgttaaacatttagaaatagagggagtatttagctagcatttggattgctactaatataaagccaaattctcatggtatcagtggcggacgcgggtttaaaatacagatggggcggcaaagctagccttaattaggtgttggtacaacgcacacaaaccatagtcactggttcacggcattggcacaacagcgcacggcacaaatatcgagaaagttaacaacgaagattggtagttaaacaaacatatatgacttgtatgtagagatatgaaaaaaaaagaaatactgttagacaatatggggaagcacttttaatagttcgaggtataaaaacgagatgcaaaattatttaggggtttaagtgcttcgccaaaatagttcaagtgagtaaaatagattttttaaatatatttacaaatttaactatttactatatactgtattatacgctaaagaaatagaaagaaaattgaattttatgtatggccaaaatcagaaatagtcaaaatggttacttatacactaattttcataaatgttcttgttcttacttaaagtatttgatttatctgattatttaatagtagactgaagtaaaatgaggtttgggggtgtggggcgacacggatcgtagttggaccgactgactcaccctacccaatgggtgtgtccgccactgcatggtatagtggagaaacttctagagtatgaccaaataggatatggaccctaccaaatatttggtatcaatccaaactaacatacatactatttaatttgccaacaaaatggcccttattttttttatgggacggaggaagtaatatgccagtgcaat

SEQ ID NO: 44020 - DNA, 602 bp, Oryza sativa
aattagttataagctcaaaaaatgccatcgtgtgagtagaagttacaaaaggctacctgaagagctttataatttcccttagctgcagcgctgtgtactggtgtaagaccaagtttgttcccctggaaaactctggcaccattcttcagcaggagccacacaatcctgcacaaatacagaagacaactaagtaaagagaatgcaaatagcagtaagaactagtatgttgtattttaacagttgatagaacaaaattctaatagcataccttggctcctgtgtgcttgagctaccactaaggcaccagtgaagtgccgtgttcccttcaggatcggcttcattgacatcaacatcccccatcaggagcatctttgtgacatttacatctccaacctacagtagaaaggtcagtcagaagaaagtcttctggtgtatatacagttgtagcactaaaaactttaccttaagcatagcacattttaagcattcttgcatggaccataattggagaaaaatcagtttctgaaattgggcagggcatgaaaatgactcaaaagctcagcttacatggtattaatggtaactcatcagtatgcatacca

SEQ ID NO: 44021 - DNA, 529 bp, Oryza sativa
acagaagcatgtccatcaagcattcgagagaacatatttctaagcaaaaagagcactcctcaagcttgcaggagtgagcgcacctaaccgagtagcctgttagctcatcccacgagcgcagcaaaatcgaaggagagtgaactgatctctccttcagattgtgggactgtttgctttattctatatagtaatgtaagttctggtattactgtatcagggaagtaagcctactcaacaaaacttgaagtgctcaatcatgcagccacaagtggtgcagcccttgagtaatgttactgaagccaggaagcatcctcgacatgcgatgctgtgcatacagggggaacatctgacaatcgcctcagctccacggcagaccaccatcagctggcacctttgatctgatgcacgctccatgactccctgcatatcagatgatcgatcagacatcagacacattcaatcataaactctggtcaagtaaaacagcagtagcatcctgatccttgctagtctctaacagtctgaaaaa

SEQ ID NO: 44022 - DNA, 822 bp, Oryza sativa
ccatctgtgattgtacaaatcataactaatgttccaactgaaaataccttaactgggagcaattaatgggaggttgagaaataaaacaaccaacaagtaaaattaaaatttccttaatctgaccgtgcaaaaatttaaagctagcagacactctgaaacccttctttttttcttttattgaacgaacagtcaaacccaaatgattccaaactgtacttcggcaataacgagttgtctactagttgtttgaatttaatggctagggggaaaaaacccacacatttagcagcaagcaacagattgcgcaggctaggtcaattgcaggacacgaacacactgctactgctaataacttccaaaaatagacgcatcaaacgagttgaagcctgaaaatcacagcacaagatttcctagcacgaaggagggcacatcgaatcatcgccatagctaagcagaattccgggagcggttaagcacgccgccgactgcgacagcgcagccgattacgttccgccggcaaagtcggcagccggtagctcgaatcgagcaggaaccggcgcacctaaggtgcccgagcgagccggagttactacgagaccgatcgaatctcttaccactggggggagcaggcgagatcgcggcggaattcggcgccggcggcgatggcgacaacggtggcggtcggaaggttcgagaagagggagggaagcgcaaatttgggggaaaacagaaaagcttccgccgcgtgaatacgtaaaccaccaaagtacgctttcagaagggagacacgtaaaaatagagcttggcgcagcggagcacgac

SEQ ID NO: 44023 - DNA, 635 bp, Oryza sativa
gatggttgggtgcaggttaggcatgtttcttgaaaccatttttgtgtttggattgcgttttggttatgaattcattcgttgtgacttgaatgatctatagtttgttattcagaatttacagggttttttttttcgatttggtctgtacgtcaaccgtcaactgctatataaaacttgtaagttaggttttaattaaaatttaaaattttggagattggttattgttccatggaaaagatgtgaagattattgcagtcataaaagtcagttgatatcttcagcaaagagatcatgaagagaccttgtttttattttagttttccaagtggaaatggtcagtaaaccaagcaattaaccaacatagtgtgtttgtaacgccacgtggcacagtagcagcaatatccgtgaattagaatgctcagattgagaatgtgaaatatgatatgcttgattcaaatccgttttgatgaattgacatggaaagcaactgatggttttaagatgaaattgaaagaaacatgcatggattcaatttgtccctgcaaaagtgtatacaggggtagtagtaatcagcatatgcatgcatggatagatgacgattacccccaatctgaaaaaaatgaaattactgtcaa

SEQ ID NO: 44024 - DNA, 1684 bp, Oryza sativa
gccttagtattgtactactactacgtgaacttcttcaaaaatgatcaaaatggagacaaacccaaacccttaaccatattagagtttgtttggttaattcggctgcgtttagctagactagctaccgtagcctgcagcagttgtgaatggttgcaactgacagccgatttgaattgccgcagccgtagcaagtgcctccgaacaaagccttcataggagtaatagattggaggggatagtgagaagtgtataatcaatatccttcaaatccccttgagatagggtttaatcgaacaaaaccttagataatgataggtcaattcatccacctgtggatgcaccttcaacgagaataaaaacaacacttaagtggtgagaaatgtgcgttggtatcagtggtatggtttcgcaatagtcacacccatatcctaaatggatagcatacagtaccttctccctttaaattatgacgttggtttgttcaaaattgaattcgtcaatgtcatacaaaagatatagaagggaatatatattatgacatgttgtaaattgttatgtgacaaactggcaaatggcaatggccttttgttctccacagtcctattggttgtatgaagcatgaacatgcattagtataaagtagaatctagaatagtttatacaccttttaaattaagtggtgaacttgtggaattggatacactataatggaattggatacaccattttcaaagaaatgagttagggtcctcatacaataggagcttattaaggatgatgaaccaataaggttaaagaaatgagatatagagaagtctttctcatgttgctacaacaattgaatggtcacatatacatactattggttgtatgaagcatgaacatgcattagtataaagtagaatctagaatagtttatacaccttttaaattaagtggtgaacttgtggaattggatacactataatggttaaatttgcacttcaatttatatatatgtgtgtgctgctttatttgtgttaacttaaactattgattgttcatatgtgctatactttatccagttgtttctatttgcatggtctaggtcacccatcgagtgtattttacccacctactcctttcataaaaaaaaacaacatagacaaggatatgatataatataggactggacatgttcgttgtcctatgttatatcaagtcattggttaggttttttttttacggagggagtaggtgtgggcaaggttggaaatttcggactttgatttctgaaatttcagtcattttggacccctccgttacgatattattttggccaaaatatttaaaaagttttaacttttcgtgaattttagtaatatttattcaaaaattcctaattttcggtctaccggtgacctccgatacaatcggtcaagccgaaaagttaaaccctaggtgtgggttgagggaaaaaaaacctataaccgtgtgatttgcgtcctcgagggaaaggctacttgattatgatcggtgtagaccaaggtttaatgtagtattggttaggctatttctatcggagaaaaccgataggactgaattttgtaaaattttagaatatttgaatataaaatttgattgaatctagtacatttcgtgagatccataaaaaataaaagaaaaggtctgcaaattttagatg

SEQ ID NO: 44025 - DNA, 660 bp, Oryza sativa
gtctccgcggccggacgcgagggagatagtaatagagaagtgggtgggccttatgggctttcgattacatgggcctctttgaggcccatgtagttggggctccgtcgtaattgtgggccattacggttggcccggagtgggattccctcctcctcctccttgcggcccatatgtttgggctgcacagcgtacactggtgtgtacactggtttgagaagagaataaaggaaaaagtatactgaaggtccctcaacttatcatcgagttacaaaatcgtcccctaaccacagaaataccgggtgtccctcaactaataaaaccgttcactttagatcattcggtggttttgaccccggttttatctgacgtggcggatgagtcagcatgagacccacatatcagcgtggccactgacaaacgacttataatattaaatggagagaaaaagtattaattatttaaattttaataaataaattaatataattttttaaaacaactttcatatatatatatatatatatatatatatatatatatatatatatatatatatatatatatatatatatatatatattaaaaaaagcaggacacacactcactctctttctctctctcatcattgttgaataaagagagaaaacccctgattcccca

SEQ ID NO: 44026 - DNA, 2008 bp, Oryza sativa
gtgcatctctctcctctctctttctcctgtgcaagaaaaagatccaagctttgagcaccgcatcaatcgcttttgttattccagcgagtttttgggttctttgtgtgatttggatggaaggtgatcggaacctctatctctctctctctctcatcttgtttgttttgtgggcgactgttcttgccttcttggttggggatgatcagacattcagaccatcagatgaatcgatttctttgtagagcagttcttgatttatttatttattttgcgctaggtagtagatcggaggggttcatatgattcttggatcttttggttgatttgatttgatctttgttcttcacatggatgaagcgagttttgtgtgtgtttgagcctttgccctttgcttctctgtctgcggaagaaaatactcgtcttttccccttcacttgttcaattttttctcagttttggtggttagaaagaaaatctttgtttgcaaacttgattttctttttggaatgctcatctgcaacgagttgcggatttttttgttttcttgctgctctctgaagagcaagtgcggatcttgcattctcggtcggatctctgcgtttctttgcaaccatcgattccactgctttgcttcttgtaggtttctttggttcgatggaactcgctttatgcatgttctttcacttctgttcttgtgaatccttcgatgtgactcctgcggtttttttcaactatattattttgttttatgtgctgttgatttcccttccagtttactaattcctactgcattgtttaatctttacaggtgggcttcaggactggtggtgataactggctgttggtaaggtgagggttttactttcaaatgtcatctgcaacaatttcatgttgctcaccaattttgttggactgtgtgtgggctgtttcttggtgcttatggttgtgggattgagtctcctgggtttgcttccacttagacactagcagtataatgcacataaagttgggcaaataagtttaatcatgcacataagttgaatttgatgcacatttttcattactttgatgcacataagttgggcaaaattcaagtgactgtcaagtcatattctgttgcctattgaacctgcaggaaacatggcagagaccagaggcgtgggtgggcgccttgcggcattggcttctaaggtggactcgaagatatattatctcaaggatgtgttggttgagtacatggacatgaaaaatgtggttgctgaaatagcagaggagagggagaggttccagcttgaacagcgtggttcgtggccttctcacgaataatgttgtgcttcgtcgattccaatgttgaactattatttagtaaaggtgtcatatgtaacttgaaatggttatggcaggaaatgacgcacttctggaagcaatgaaggaggagcttgtggcagcaaacaacgagctcgaagcagcaaaagaggaaatctctcgaaagaacaatgagctagagtctgtaaagaaacagcttcaagagagtgaagcgagaaatattcaggctgagcagcagagcggcattgtggttgagcttatgcaaccaagaggggtaataatctatagttcctgcccccaaattattcataatttcttcatggcattgactaaccacattatgttttcaacttattttaattcttcctatttagccatgtaacttaacacctcacaaatgtctatatttttcacatcatgccttagcatactttttgtactaataaagtaataactagcattttttttttgcttggagcaggtgcaaacaagatcgatgcaaaaacgcaaaaggccattgcaaggaccttcgggctgtgaggctgatgaccaagagtatacgagtcaaatcaatgtccaatctccacgttgcttggaatcgatgagaactcctgatgtatggaacattttgtttagaatatggattctcaattcttgatattttcattatgggcctaccaga

SEQ ID NO: 44027 - DNA, 1205 bp, Oryza sativa
caaggatgggaggaaggccaccctgcgtgagtgtgttgagtacgtttgcaatcaagtgaagcaactcacagtgaccaagcgcaggaagtctcgcaggtacaatgtccatggattataattgctgattgatctcatatatttactgcttcggtagcaattgtttttatagtaacaaaatgtgggatacaaaatcattgctactggtggttaactgattgtatcatcactcatcagggtggtcaacaatctttctagcactgatcagaaattcacaagtagatggcagttttacattttacaactagcagatggaagttttaatttttgaaaattagcataatggtactttcatgttttttttttagttttaggcctttagctcgctttgattatgtttagtcaccttagaagctgaaacctaccgccattcttttaccatcaagtgttcgacgagtgaatgctacgtcaaacattgcagcctatatgaaacactttccttcacccccataaaatcttataaggaaaaatgcttgtgtgactgcaggggaagttgacctgctggtggcaccacaacaacacaagggtatattgcaagaatgaacttgtaaacttcacttcaatttcttactgcgtgatgttgtgaattttactacctttttctttctacgaataaaatccttgactctcactttttctggtagtaactagaaatgggactgctcattcttcaacttatgctattggagtacccacactctccagtacctttgccttgatgttcattttagttcccacaaatcagttctcaagaacatgttattgtcaatgtatatgcatttatatttttaagaatatttatacgttgagctcatttcgccatattgttgtttttgcaggtggtgagggctgagttttgggggcagtgtaggactaatccatgaagttcctgagcaagaatggaagtcttagcttgcttatgtcttttgtaaaaatgtcatgactaggaagtaggaatctctgaagaacctgatcgtatgaagcaacggatggaaaactatgaactactactactactactactagtacatctattttgtgttttgtaaaaccaagttgtggcttatgaccactgtactgcttgtgcacccagctcattacatgctatagtatgtatttacatgagacctatagttaatgtctgagtg

SEQ ID NO: 44028 - DNA, 1001 bp, Oryza sativa
ccatttgggcgccgtgcatggcgccgccggcgtatgatccccaagatgatgaggtggtggtcgcgcgtgcagacgacgcgtacatgttgcctgcagcctccacgccgccggtggcgacggcggcggcgagggccgccgcaaggatcacgacagcgcgcggcggcggcgatggcaggtcaagccgccgcatcacgcgcgccggccggcgatgagcaatttcgatggcccgtcgtcgttgcttgctactagctagcttccgttctggtttgctgctgtcctgccgcgactttgctgcgtgtgatatcactcctataaatagcgatggaagggctgatcgagcttcctgaatatggttccatcgtttcgctccggaggcaggccggagtgtagtggtaccctaccccaccctcccttacgataggagttttttttttctttatcttatctttttttatctgtttttttttcttgacccctggcaatggccttttgacagtgtgcgttgtgtaatcaaattttgttctctttttctaacatatatattgacgtgtaatctttttgcgccttcgcgaaaaaaatgtgtttattggtacggtttattaaaatgtatctctactattatgaaaattgaaaatattttcatcggaattttggtacgtcatccgtgtttgaatcggttttaattttatgtttctgtcaaatcatttcctttttttcttacgccgctatgacgcgcgcaaattaattgggccagcatcttttcacacgctccttgccgtacgcagtgattgggctcgcgacagagtctgttttccacacgcgcctttgtgcgccgctgtgattggacccgcaacaccctcgctctcgtgattttcaacatgtccgattgggcctgcgatgccctcgtgagtgtaatttgccttgccacatgtccgagtgggactgcgtcgccctcgccagcgattcaaaaattgaatgttttttttgtcaaaactatggta

SEQ ID NO: 44029 - DNA, 584 bp, Oryza sativa
aaatttagcttaatacgagtgaagtttaaactaacagggtatatatggtaaaaatagataaactatagttaatatttttttaaccaggttcctggacacccccagctatacatagctccgcccctgtgctcatgctcacttcacgtgtactcccttcgtaaaaaaaaatgtccaacctagattaagatgatataacctaatacaatgaatctgaacaaccatctgttcacattcattgtatatatcatatcttatttaagttaggttttttttgacagagggagtaagcacgtgccatcatacgtgtgccaatgtaataaatgagagtgatgttcatgtcaactctggtcaagtgtctaaattgttttagaaactagatgatgtcccgcgctttgctgcgggatatatgttatataatggagaaatgatgaaatgatttggattgaaatattatgaaaatgatttgcgaatggtgatttagcatgtgtatgtttagttttacaatgaaataaattgctgatatgattactatatgcttacatgttgagctttatgtatccaatagattgatgtggcatccttgc

SEQ ID NO: 44030 - DNA, 577 bp, Oryza sativa
tgtgtcgtatagggtgtttggacagtaataaaaaaaaactaattacagtatccgtaagtaaaccacgagacaaatttattaagtgatccaattaatccgtcattagtaaatgtttactgtagcaacacattgtcaaatcatggagcaattaggcttaaaagattcgtctcgcaaattagttgtaatctgtgcaattagttattttttagcttatatttaatacttcatacatgtgttcaaacgttcgatgtgacagggtgtaaaattttgagatgggatctaaacagacgggacaagatattaattgtatagtaagcgactattatataaattagctagtattaaattggctatagatattttaaagctagtagttggctatactattaaacttgatacgagagagggagctagtaattagctactccattaaacttgctctgagagtgaggtgtgaggaggggaaaaaataaaaaaaattggagagacaagacaatggatggagatatcacgtcacatcaccgacacgctgcactgtatacgtacgctgtacagtacagtacagtaggagaacgta

SEQ ID NO: 44031 - DNA, 569 bp, Oryza sativa
gtttctctaaatgccacttttatatttatctttagaaatttgacatcagtgggagaaattttcttgatatttttctttacatttctgctgatgtggcatgacaactaggacaatctgtatggccgagtgataagtaattttcattttctccctctccaagtctggcacaaaccatcgccaccgcaataccaccgactttgccacgtcgactcaagcccgacccaacaacacacgcacatgacgcactcgaccttcccttcccactcccaagtggtagaaaaaaaattcattgaggaagcaaagtgaaatcgtgatggatgctaggtaggatgactacgagagacggcgccggtggcatcgatgatgtatcgctgcagaaggtctggtcctagacaaagccaccacgccaccaacctctccagacctagcatgcataggcgacgataatggttgtggagatcgacagggaagaggcatgtccactgaccgttgtaacaatggttgtcaccacctcgagctaccctctccagcagttgaggaaggcaactcgctgttgccgccttctcgat

SEQ ID NO: 44032 - DNA, 3840 bp, Oryza sativa
taatatccttttcatagggcagcaggcatcaaatcaatggctcgaatgggaggcctgtatacgatcatgggccaggaattatagtcggaatagcatttagctgtccatggtctctggacctggaatagcatgatagttggacatgcccaaataaaacggagataaaatttaggacacttatggcaggctttttaacctgatacacggtgtgtttggtgtaaaaactttctatatgagagttggtgtaaaatgttatattaattcatgttgcaagtttgtaataaataaaaatgaggtggtcacacgttttgtcttataggttgggcgtacagcatatcctttttattttcatgttcattttcaggagattcagacaccatcaaagactagtgcccatgttcctccgcatagtgtaagcgggccttctctcagggcgggaagggggcagcctgcaaaattccaggccccccgccgcctatttgcaggcggccccccgcacagtgtaaaatcgccctcccccagggcggcaagggagccgcctgcaaatttccatgcccccctcgccgcccatttgcaggcggccccccgcacagtgtaaaatcgccctagcggagggcggcaagggggccgcctgcaaatttcattgagagcgaacggccgtctgccacgtcacatttgccgctctctgggagggcgatttttaaaaatagccctcccagagggcggcgccctcccagagagaatagccctcccagagggcggcgccctcccagagagcggcgggcgactacttctgtcaaattttgaaatagaaaattatttttgtaaaacttttaataaaaaaaattaaaaataaaaaaattcctcctattagagaccggcctgtcatattatgggcccttctaatatccttttcattagcccacaggcctcaaatccatggcctcaatgggaggcccgtatacgatcatgggccagtaattttagttcgattcgcattttgctgtccatggtccctggacctggactagcctgatatttggacatgaccaaataaaacggagataaaattttggatacttatggcacgctttttaaactgctacacggtgtgtttcgtgtaaaaactttttatatgaaagttgctctaaaatgtcagattaattcatttttcaagtttgtaataattaaaactcaagtaatcacacgttattaccatctcgttttgcgtaaaacacttaatttttattttcatcttcattttcaggagattcaaacaccatcaaagactagtgaccttttttttcctcttcttaattgcggccattttctctgatccgaaatatttctaaaaacatgaccctataaatcaacaaaaaaacaaaatcataattcaattaggactccatccaaaataataattgtgaactcttttaaaaatatataaaaaatccacatattattctgtgcacctcctccccgccccggcgatcggtgcatccccaagccccccgaaatattcatgcaaacaagaccctataatcaacaaaatacagaatcataatttgattaggaatccatccaaaataataacagggaactcttttaaaaagacaagaaaaaactcaaattattcacaacataaattcagactatttcaattgggaaatccaaactttcagcttcgaacttaattgaatgttcaacatgagaatgactgaatgagggggtacctcaccttaactacccagttaaattttacaaattccgactagtctaaaaaaaagtttacaaatttcagaacgatctcgagtggatagcaaggaactctatgcatgtgttgcttgactgagttagcgattaaaatgtgattgtcactatcccaatcatcattacttaatgatttcacaatcgatcgatcaatttttttttattttgagtactagcagatcatagtcacgtatcgtaaacgacacaaaattttgacactatttacatttgtttcataaaaaaacccacaaataaaaattaaatgtgcatgcataagttttttgaaaggagaaactctgaggaaaatgcaacgtgttactaagtttatatgtgttgttttcgtgcagaccaagcgacgagagaagcgtgtgtatattgtcatgagcttagttgcagggtgagtgacatgtcaccttacgtttcaccaaaccaccagactaacctaacagaagattactctatcattcaaccgacgcgtataacaaaagaaaaaacattttctacttttggtttatgttagttttagtgttgcctaatcttgaaacgcaagtaattaataaagctgctcgtcactgtcggatcttcttaattggctgagcaactgggactgcagatcgatcgatcttctgctttgtgccgcagcaaccaccgatcgactgttgatcaccctcacgtcaaattcaccaattatgcgtatgaaattgacagcttaattcgatttcattatttcaccacgaagcgagttgaaatttggtttggtctccatcacaagatctgtgcatgattagctgatagagctagccagctggagcagtagctcgatctgagtgatcgacgtacctgcaaaaccatgagatcagattgtgttggtacagtatccgagtctcacacctaattgaagttgaagtctctatagttccaactcatgttggtacatccatcgtccaatgcatgaatgttggtatatgaacaaatcaacacgtttgacacatcataaaaaatgaacaatttttaatagccatcttgtcaatttaaattcactgtaatttcaagaaagcagcaggataatacagtgatatatactacttcacttttttgatgcgtttgatcattcgttttattaaaaaattacatacttatagtttattttgttgtgagttattttagcacttaaagtactttaaacatgatttatatatatcttatacatttatataaaacttttaaataagattaatgataaatatgtgtttaaagttaacggtgtaatatatttaaaaaggagggagtacttggtttcatttaatatccgatgtgataatttggaccttcaagtcctgtttgttcagtgaacgcgtggaggacgaagctattggtagtatgtccatcttcttctttttttgccggttaatttgatttggctcggagaaaattaaggagaatggcaatgtggtgcggtagaaaaggcagtggatcgtcttctcttggaggagatggatcaaacgggttggttgtcgtgtcacctccattctcacccaacttccttacctagcaagcttccattgccatggcgatggcggcaccagcatacgcagagagcgagctctatatactagcaactcgtgtgggagagcagagcagaagcagaagcagagccgaaccgagctagacgacgaaagaggagagggagaccacgagatcatcgacaatggcgctgctccggcaatggcgccgcggcctcgccctcgccgctctgctcgcgctccacctcgccctcgccgcggcacagtcgcctgcggccgcgccggcgcagcccaccccaaccccagtgcccacggcgccggccaagtcaccgcccgcgccggccacgcctgctcccaccgccactcccactcctcccgttgcaccggccaaggcgccgccggtcgcgcccgccgtcgcgcctgtcacgccgccgccaccgacaccgaagaaagcaccaccaccgccggtgacgcccccgccggtgacacctcccccggtgacacccccgccggtgtcgcccccgcccgcgaccccgcctccggctct

SEQ ID NO: 44033 - DNA, 1763 bp, Oryza sativa
  unsure (1)..(1763): unsure at all n locations
aattatcctaatatatataagattttttaaaaggaaaaattgataaaaaataacttaatatgtgatatatcatgcatattccacaaacgtacaattataaatttgaccaagacgaattaaaaaaaataaggttgtgaatatagtacatgtagttatagtttaatttattatttttttacaactttgaggggttgatttagaattttgcatgtttgttaagtgatatatcatacattgatctatattttattttttaaaaaaaatatataacggaatatactatcgacggaaaaaaactatccctatcaattctgaactatggacaccagtatagcttaagttgtctagtcttgcttcaaaaattcagatataaatagctagctaggatgcatcagcgatttcaccccgttcaaatccactaaaaaaatggataaacttttagataaaaatggtacgcttttcaaactgctaaacggtgtgtttcgtgtgaaaactttatatatgaaagttgttctaaaataccagattaatccatttttcaagtttgtaataattaaaactcaattaatcatatattattaccacatcattttatgtgaaacacttaatctttaccttcatcttcgtcaaaagagattcaaacaccacctatgcctctccatgcacctgttactatccaagtactacatattgtcatctttcttatattgggcgtaacggtagtagattctgttactaatctctgcagccatgcaacagttctgtaaataatgcaaactcagttactatcacacattttatctcaataattattaatgtgtacatgactatcctagtactgatatatatgatacaaaaacataaaagtaagggcatgtatatatatagtaccgggaaacaagatcatcaggtagtaaagagagaaaatcaacaagatgccatatgggtatatatcttcactactcatgcagagcatatattcgagaattaacacgcaagctagctaggctattgatcgatggaatagttactttgttaatgtgcatggttcattctcgatggacgagagcattttgaaatataataattggaagtccaatatatatatntttagttctgcccgacaaagatagaaaatactgcccagattcccttaggatttgatgttcatgctctattcgagcatatatgtacaatatatagccagtaataataacagttatatatatgatcaatatatccctgcagattatgttttacgcgatggtctttaattttaggagtttgtaacgtacggggccgggaattggcaggcaaaacacaacacacagacatgatcgatcaggatagaaattaaagatggtatgaaaccgtacccccattattgtttctgcctcaagagttaattgattgcaaaaagtataatatcttagagagacaaagagatcaaagaaagaaactcgcactagctaattgaaaaggaaaaggctcatggcctttgatttgagccttttagaagaaaaggttatcttgcatgcattgaaagagaaggggaaaactaaaacagaccaataagatcgtgagagcaaataattactacctccgtttcaggttataagactttctaacattgtccacatttatataaatgttaatgaatctagaaagtgggtaacatctatatgaatgtgggtaatgctagaaagtcttataatatgatccaaattactgatatactacctccatcccaaaatgtttgacgc

SEQ ID NO: 44034 - DNA, 3657 bp, Oryza sativa
  unsure (1)..(3657): unsure at all n locations
aatacaattttaaaatagctgaaaattggaattaaaataaggaatattaaaaaaagagtccatataagaacccaattacgagattaattaaaattgggaataaaaaaataaaatccgaaattagaaaaaaaagaagagatcaagtaggaatacaatttaaaattagctgaaatttggaattaaaaataagcaatattgaaataataatccatataagaacccaatacgagattaattaaaattcagaatgaaaaataaaataatattcaaaattagaaaaattaaaagagagttcaagtaggaatacaattttcaaaaaactgaacttgacaataaaaaataaaaataaaattcttaaaagacnnccatcngatattaattaaaatttgaaaaaataattcttaaatttagaaaaagaaaaatagattttcatttaggaatccattttataaatacctaaaatttgtgataaaaataatnactattgaaagaaaagatcatctaaaacacatgacgagataaattaagtaagaggcctataaaggagtagagtggtggcggttgatacgacatataaaaattgttaataaaacaccaaatagaatcctaatgacgattaaaaggagggacgacagacaagccgtaacgcaaacgagcaatgcgattgctgggactactagaaagtaaaaaaaaaaaccccattgataatcatattcaattttaaaaatctcaatgacaataaaaagtagaagcagtgggcggggtgtatagtagtatagtttcagagccgctgatgtttgacgtgacttctagaaaataaaaaatgaatttcaacgatagttatgctcaatttttagaatcacaatgataataaagaaagagtaggcggcggacgggccatagaggagcatagcatagtggcatcgtttgacgagacttctaaaaaattataaaaaatgaaacccaacaagacaataaactctaaaaactacaaggttcaatttttaaaggttctgaactttgaaaaagtaaaaaaacaatgattatcatgttcgattttaaaatctcaatgacaataaagaagggacgcagcaggcgagccgtagagaaagtaaaaatgaaccgaaacgataattatgttcgatttttaaaatctcaatgacaaaaaagaaaagagacagtggacagaccatagaggagtataatggcaacgtttgacgggacgtctagaaattataaaaacgaaacccaacgtgacaataaactctaaaaactataagatccaatttttaaaggtttcaaggagaatgaatagaaatagtggtagatcgagcatgcaaataaagaaggatatgtcataaggggtagcaagtggtgtgacttttaaaaaatgtatataattagaaacacggggatgataaggtttaatctttcaaactcttaagacatgatatagctatttaataaattttaagtaaaatcatactaaaaaatatatgattttgtttgggtgctagccgcgcaattgcgcgggccacccagctagtttctgtaaagaaagaaaaagaaaaaaaagaaatcactaactatgcggctcataaataaaccgtccgatttagtccggacggatcggatctgtgcgaaattgcagtggggcgctcaacatattacaggaaaccgctggatgtgtattattggttcgtcaatatatatactcatccattcccttgcggaacttgtaaatgtttggcatcgaattgaattagatgacgcatcatccttttggacgaatttgatatatttttgcctcgatcgatccggaatccccacactgagctgagctctcccatttcactggagaaatattgtacgccacgttattgcctcgatcgattgttaattttgggataatgaggcccatatgtattgacttgcggtcgccagtggcccactaagtgtggccatcgtgcggtttgaataggcccaccactatgtaagcatacagtattcggtagtgtagatcccccggttgcgcgcggacacgggggatcctaatgggcgatcgatcacctggagacgggggtagcgatcgatcccctcctgcctccctccctccacccctccaactggtttccttttttggcaccatattacttttctattttagtaaatttatacacctaaagtttatacacctcaagtttacacatctaaagtttagagaccaaaagtttacaagtcaaaagtttatatatccgattcaaatttgaatttgaattcaaatattttatatatatatagtatttctatacatctaaagtttatagacctaaagtttataagtcaaaagtttacatatccgtttcaaatttgaatttgaattatatccgattcataagtcaaaagtttacatacccgtttcaaatttgaattcaaatgtttctatatatagtatttctatacatctaaagtttatagacccaaagtttataagtcaaaagtttacatacccgattcaaatttgaatttgaattcaaactttttatatatagtatttctatacataaatttttttgactttttgttttttaaaaaaattttgtgtggtgtactgtaatagaagaaggggaggaggaagaaggggaggaggaaggagggagaggagggaggagtgtatcgtacaggggaggggacgggcgggcgggtgatcgctcattctcgcgcggacgcaagtaggcaaccccgacgatcaccggagaagcaccgcgtgcggtggcgagtttcatcgatctccgtgatacattatcacacacacagaaacagttagtagttcaatatatatatatatatatttggtggaggccagtggaaagagcggaaaaacgatggatggatcggggcggtggcctcgcggcgctagcgctctggacattaagggcggtgtgggcgcgggattgcggcggccgccatggccatgggaggataggcgagagctttgtgtagtttgggattcttcttcgagacgagcgatggagacggaagccaaattcggttctgctgtcttgtctagtcaggccgtcagggttgggccacttgttggatcgatgaatcccaacacggcccactagctgcttgcttttttatttttctttttggaaacaggagcttttcttggctcttgctagctagtgtaaacagcatgtacgttttaacgtgggctgcagggctggggcacaccacaaacaactcgatcgaacagatcgagcaaaatgagtgcaagttccgacaagagatcgacgagtctctctatatagttacatatatactccctccgttttaaaatgtttgacactgttgactttttagcacgtgtttaaccgtttgtcttattaaaaataattgtgaaatatgtaaaaatatgtgtacatgaaagtatatttaacaattaataaaatgatatgaaaagaataaataattacttaaattttttgaataagacgaatggtcaaacacataatttttaaaaagtgtcaaatattttaaaacgaaaagagtatatgcatagctagctgtatatacatatgaacataccacttgatcagacgatcgagcaaccacgcaagtatatactacctccatcccaaaatgtttgacgcc

SEQ ID NO: 44035 - DNA, 1211 bp, Oryza sativa
gcatggagaaatttgtggaactacagttgaaagtatatgtagtaatgaatttgttatgttaatattagattttttttttatatatatatgagaaggtattatagaaaatgtaatatctatgtcacctttttcaatatggtaaacataaattaaattagtctcttatcgcatttgttttagataatgcatatgtaacagttaccaaatctactgtatgtagcatccaaaaaaatattgtgtttttaataaaataaaaataaaaaatgaaaccttttgtatcagtattaaaaaaaataaaatttatcatgaataatacctcacatatcaaactcatgaatgaatgtaatagtctagaaacatacttctacaattccaacaatatactccacaaattaactgtcagcaggtacaaaagaaatcaaaaccaaaattcagtgttatacaaagaattaattgagcaaaactcggaagtatagaaggaatgggctgaaatttcaggaccatataagaaattctctcattgtagggtacagagagaaatatgctgtataggctctatctttcgatctatctataatcgctggaagctgcaggtagcctggcctgctggataattccatccatcaccttccttcacatactgcatgtcggcatgtactccaaactatatcaaatttatctactggaaattacactagactagctaggccctataacaacgagatcgaaagagaaattaaaaatgttattactcatatactcccatgtcgtataatataagggattatacattttcttaaaaaataatcaataaaagaacaaatcatatacaaaaggtggtagttgaaaaataaactaacaaaataatttgttcatatataaggaataaattggtaaggtacgaaatacattattgtctcggatcacaaaccccttacattttaatacaaaatataaggacaaaatttattatattatggaacggaggaagctagcgttctttggatgacccaagaggccgccgtcgatgcataatgatatgatgagcctacatgcatgcttgcagactccgatgggccaccaccctctcaaacctagccgaatagcatagtagtactagtattactctcaccgtcgtaaaataacttcatatgtattatatttataccctttgttcaaaaataagttcacatttatcttcttcctaccca

SEQ ID NO: 44036 - DNA, 641 bp, Oryza sativa
agcaatcactcatgaatatttggcattacgtaggcatgcttttcatgcttccttgcccctgccagtctgaatctgagcccacccaatgaaaacaaggcaaatagtaacacaagagaaatattccacgcgtgcgtttatacaagtacaagcatgaatggtttcacaaatcaaaattgcaccagtgatcctgttcataaagcaatataccttgatatcacttccccggaaaagtatgtactcataaactttggtgctagcaggaatttgcactccatctttcttgcgcccttcggttccaaatgatcgaactagagaacaacaaatggacagacaggtgtaaaacaaacattgggatgaacaaagcgtctaacagtgctggaagtaaagcaaagcgtagtcaacacttgagttgtacggatacgagaataagcatcaggtggcttaaaaaatcttttaagaaaaactagtcgcgaaggtcaacattgttgcatcccagaaatttcaaattgaataacacgtagctaggttgggggctgagattcacctcacgggggaaccaaatctagcgctgaatcaagcgaatctgaggaaatgagagggggagcgggcgcggggggcgggatggaattaataccattgcg

SEQ ID NO: 44037 - DNA, 713 bp, Oryza sativa
gaatattccaaggcgaggcgaccgaatggaggaggggaaaggaaaggaaagggaagacgaagcacctatcccatcggcaccgcacgcgcgtacctactgacaggtggggtcactacaatgtgggccacacatgtcagtaggtatcgagggaggtgggcggtggaaccgccgtgtgattcttatctcatcgtggggctcgtctggtcaacgaggaccacgacccgatccgctacgccctggtttgttgttgggctcgttacaaccaatgggccgttgattacacgacaaattggcccactccaacaaaagaattattgtttctcttgataagtttactataggtctctcatctttacatcgagtttgaatcatatcttgaatcacagtcacagaaatcttgaccgccaacttgcaaaactaggttaaattaattagatcctccaacaatatagatttttcgtgaacatacaaagtgattacacgtcgatatattagaagaaaaagattttctaaattttttatcaataaatagttcattataaattaaattttatttaatgaaaataatatcactagattgtcatttaaattgctatcatatgattatgattaacattacagtatattacaattttaaagttaaacattagttttaaagaccgtgtcaaatttgacgcaccttatgagtgggatggagggagtgcatggcagaa

SEQ ID NO: 44038 - DNA, 2816 bp, Oryza sativa
gcccatcacgatggctttgtggacgggacagatctgcatgtcgctgatgccgtgcgaaatgatctcttcccccgtatagtagtcctccctcgtcggcgatgcgccgccggccgggaaggcgttaacgtggttcaggaggccctgcattttcgcctggtccaccttcagctcctccacgaagcacgccatgcctttacggatcctcgccaacactactgaatttgcctccatgtacgatgtagcgtaccttacgactacgactttttccttcaatccgatcgatccgatatatgtagccctccgtagtatgcacgtgtatatttatatacgaacaacacaagactatcctgctgcatgaatcctgatcgattttggctaccgatcgcccgaggactctcgatccgactcggatgcatgcccccccccccccccccctcacacatggccctcacctaccgacatcgatagatgccggcgacaccacgagattgctagtaggagtacgtatttcgcaaagctatcaagattgatggcatcatatcattatatttgcatataactcaaatagttatagaaaaaaaataaaaatattaataacatcaattgacataagtctacaaataaacgtgtaagaccaaatttgatctacactgtctagagaaaatatatatatatatacatacatatatatacatatatatatatatatatatatctacttagcttccatcgttcgtaaaaaaccgggcgaaaaaaccgggggaaaaaaccaaaattgtccgataaaaaaaccagccgaacaaaaacgtgcgaaaaaaagaaaagaaaaaacaaaatagcgataaaaaaagtccaactatgtcccgtaaaacaaatagagataaaaaataaaagagtaaaatacatcagcggtccttaaacttgtcaggaggtttcacttaggtccacgaacttgcaaggtgcacatcgatgcccctaaacttggtttattgtatcatcccggtccaaaaccgcgtttgactgtggttttgcctatgtgtcacgccacgtggacaatgacatggatttttttaatttttttctccctttttccttcttttttctctttcttccttcttttttctcggtggtgagagacggcacgaggagaggggctatcgcagtggtgaaaagaagaaggaagaagggtgaaaaaaaaattccaagtcatcattcacgtggcgtgccacgtaagcaagaccacggtcaaacgcggctttggaccgaaatgaaacaataaaccaagtttaggtaccttgatgtacgatttgcaagttcgtggatctaagtgaaaactcccgacaagtttaagaaccgctggtgcattttactcaaaataaaaaaagtccgactcgttgcgattccttcttagaaaaaaaaaagtccgactctagatcgagtctcactcctctcggtttgagtccgagattctaggcaccacttctctcggtttcaatctataccgtgatattccatacatcttggtgaaaacaaattgatgtgtcggattaaagatctgtttgcaaaaacggaacctacatgtcgagagcattccatttttatatgattttaatttttgggtttgtacattagcatttgagccctgtaatttttatatttatatttgagtccctataatcttgcaataaggtgcttttggtattttttaaaaaaacaataaataaaagggatagaacaaaggcagaaaggtgcataaaaagaaaaagaaaagccacacaaaaaagaaaataaacaaaaaacaacaacaacaaaagtctatttcccctaagtggcgaaaaaaaactgtagatgcaaacggaaaaaaaaaatccgattcctataaaaggcaaaaaatagtggtgaaaaaaaaacgcttgatccgattccttaaaaaacggaaaaaagtctgattcctgtaaaggaaaaaaatccaaaaaaatctaaaaaagttcgtccaattccctaagaaagtggcaaaaaaaatggttcgtaaaaaataaaaagctggttcgtataaaataaaaaattcacgcgagaaaaaaatggaaagggcgaaacaaagtccaatttctaatcagtataaatctcttctctatctctaatctaatctaactatttaaaaataaaaaatgcacgagaaaataaaaacaatcaaaaaaacgtgtgagaaaaaagtcagaaaaaagcacaaaaacacgttgaaaaggtttttccatcttcttaaaaaaaaataaaaaaatgcgtgagaaaaattatttccattgttggcaaaaaaaattaaaaatacatgcgaggaaaagactgtcaaaaaaatgcgccatttctaaaaaataatggtttgaaaaaaccacgcaagaaaaaaacactatatatataaaaaaatcgctctaaaaaaactgtcagaaaaaagctaaattgatggacgcttgagtcggataggatccatcgattttttaccatctactacacggcttttatttcgtcatatattctcatgtattgggaaaaaaagcaaaaaataacattaagaaaaaacatgaaaaaaaaccacgcgagaaagtaattgtcagaaaaataggcaaaaaacacgcgagaaaagcaaaacaaaaaaggggagaaaaatatggttttcgtcatcagtaaaaaaaaaaggaaaaataacatgctagaaaaactgttagaaagaaatgcgctatttctgaaaaatgtttataggtacaacacaagactatcctgctgcatgaatcctgatcgatcttggctcgcatcataccgat

SEQ ID NO: 44039 - DNA, 1980 bp, Oryza sativa
aaataaaatttagactcgcatgtgtgtatagttgtgtctcatattaacataatctatcttattatattaacaagatctatcttgtcaaattttatgaatttttcatttaataataactatttaaaccacatgcatacacctagatactatggttatggtttattaaaaaacctagtacatataaaattaacattggcgccgttgtttttaaaaccggaacatattgagaaaatcatcgagccgagcggggatgctaaatcccctcatcttgtcctctctcacgccactcatctctccatccttccatctcccctcctcctcatcctcttcttcttcgctcttcctctcccgggcatggcgtggcatggcggtcgccacccatttggccttcctctcccgggcatggcagtgacggcctcttcctctcttgggcccctttgatttggaggaaaaacataggaattttagaggatttcaatcctatagaaaaatttcctatgaagccctttgaaataaaggattgaatcctatccaatcctttgaaattcctatggaatggacaatcctatagagattttggaggaaatttagcaagagcttcaacctcttgctaactttcctttgagtctatctctctcatccaatttctgtgtttttcctatggttcaatcaaacggtcattcctgtgtgttttcttgcgttttacaatcctctgttttcttacattcctatcaaaatcctacgtttttcctattcctacgttttctcaatcctgcgattcaaaggggtccttatgtgtggcgccgcaatggtggctacctcttcctctcccccagaccggggtgtgaactaccggatccggttgccacaagtttggggtggccatatcctggctcgattgtggcctcttcctctcctctacccgatggctatggcgggtgcctctcttccactcccctccctggtgcgacggctaccggatctggccaccgcgagctcaggtgatccacgtgaggtcgcctcttcctctccccggctctacaatggcctcttcctctcctctatgtggcggcggcagtggcggctgcctattccattccctagcccggtgcagtggccaccagatccgaccagtagcgtgtctaattcgagtgatttgtgaatatttttttgtgatttgtggagggggttgatgaatcgacggtggtatgtgcatgttgatgaataaggaaggtgttcttggatgtgagatgctctggagggtgatagggagttgttcgaatcgagcatatgcatcgagccaagtttttatttttattcctggaaccaacacctttgaaatttgaattctcctcatcagtatcgcctgcacgggatgtcggttgtcaaatttggcacctttcaaccagcactaatccctgtttttgtgtatgtatatcgacacaagacatatctagaacaattaagtaaagcaataaaaataaggaagtccctcataattcacatagaaaaggttagaaaagatatagcagaagacaaggtggaaatatgaccaatatcacacattcacacttagtaggtactagctactagctggctagctcgatccccttcctatagctttataccccctgtcagctatatatgcgaagatcgaatcgtaatttgatactaagtgggatgtgatctcaaaaggttaatttgaagcgagagattgcatatgcgcatgcatggcactgagggaagagacggatcgaagtgaaagaagaaactaaaggcaactgctagtagtaagagagcaatatgtcacgcgacaggcagacatactattgtactagagatgaaaattcacttcaaagatcgatctcaatgaagaatcgacccaaagtcatacacatccccaacttgaagtcttgagcaatactaatatactccctccttccctaaatgtttgacgccgttgacttttttaaatatgtt

SEQ ID NO: 44040 - DNA, 1425 bp, Oryza sativa
tatatatagtcagatttatctttttatcagcgagttcgtttctaagcgatcttatgagcaatttagttgtaaaatagtcgttgaaatcaaagagttggggtaatcgatatgtaaaatgcgtattttccatgttagaattgatgtttaagataattagtagtgtggtacttttgttttactttaagagagtaactgagtatgtctacgtaaagacatgttagaatagatgaaaccaagtttgttatttaactcaacaatgtagtaagttgtagccaattggttgttatagttttattcattttgcataaatgcatgtagatatcgattctttagttattcactaaaattatggttctcgtgtgcaacattgacaccaagaattaaaaattgctcttttatcactcgagctgtattttagacgtgctcaagggtcatactggcttttcctacactaagctattagtccttttgtttatatcatgatcttccatatgactttataacttaattaaatatttttatgaactataattcaaaaacatagcttgttgtacaccacaactaagaaacgtcatgtacgaaaacaatcttatttgtcacataaaacttgctaccaataactgcgatgacaccaatcggtgagtcatattcaagcacaccaggctcttaccctaaaaataagtcatgtggggttttaaaaaccgcttgatagtttggcaccattgtaatattaacggctagtgaatagtgcaacaactagtacatttgcgacttgtgatattttgttgccttctctacatgtaaaaatctatgcgacattatacattttatatattgccattgtgtatccatgtaaatctggagtagcagttgacatctctcggtttgtttgacaaataggtttagaaaaaaagatatttccaaccatacaagggtaaggttcaatcctaaccattcattcatttcacctcgtttaatcctaaccatctactcatttctattttccaatcccacctttcataacttatttgccaagcaaagcctaaccattcattcatctcacatcatttaatcctaaccattcactcatttccgttttccaattccacctctcgattcccatttgccaagcaaagcctaacttttcgttcatttcacctcatttaatcataaccatccactcatttatattttccaatctcacattttataacccattttccagaaaaaaaaagcctatatggttagacatcgatcctcgatactttgtaataatagaaggttagaggcgatatgatattcaaccatgctcaacccctgggaccctggtcatggagagagagagagagttgcctattgccatggcatacagatggatacctgcagcaaaaagatccaaaactctaggcgattactccctccgcc

SEQ ID NO: 44041 - DNA, 922 bp, Oryza sativa
aggaggaagaaaaggggcgagaatgacatgtggggcccacgtgggccccaccatttttttttattaatttatgtgtgaaactgacatgtgggtcccacaggttttattattttttcggatcaaattgccacgtaagcgccacgtcaatgccacgttagacgaagaccgagtcaaattagccacgtaggcgccacgtcagccaaaaccaccctcaaaactgccgagggacctaatctgcgccggttttgatagttgagggactcgttgtgtctggttttctgttggagggacgaaaatcggattcattaacaagttaagggacctcagatgaacttattccttttctaagcactgctacacatacttattttttcttataaatttttactaataattacggttgatttaggtagatagacgttataaatattcaagatgcaattacagcattacatattagtgttagtgttcgtaagaatttataagaaaaaaattactactagtacatgtactttttcttttacacagcttttagaagttcagggacggactacacccgattttacggaaggacgcaggtaaaactcagacctacacttgagagacgtaaagtgaacttttttccttagggtgatccaagtgtcactgcgttttgctctagattgcgtagcggcccattttccgctaaactgaaaggtttcgggcccgtttgcgtttgaaggccactgcagcagaagcttttgctccttctgtttccgaatacaaagcttaggccccgtttggtacggctccaaactccaactctcagctctaaactcctactccagttgaagctagctcctattggagttacagaccaatcaaaagtgtttggcaaacttttagctccagatctgaaaaaaaaaagaaaaaaaattttaaa

SEQ ID NO: 44042 - DNA, 593 bp, Oryza sativa
agttctggggatgaatctgtgctagtgcttctctagattcatccctagaaatttgggacggaggcgtagtgaataagcctgattatcttcgttatccagacaaggtcttgttggggttgagcagttgggaaattgcatcaaccaaacaacaaagctattggagcctctcaagtttcatggcttctttgattgaatgaattttggagggttttttttttcagaatttgaaaattcctgcgatgtttcaaaggaatccataatgatttttatacggaatgggaaattgtcgttcatcttgagcattacaatctgctagcgaaattcttagcaatgtctagtactttacccgtcccaaaaaaaaaaaggcaacctaggataggcaacctaggatgggatgtctagattcgttgtactatgttgcctgtccaaaaaaaaggcaacctagaagatgggatgtctagattcattgtgttgtgctgttactatctagattttttttcttcttttttttggggggggggggggggggcggagggagaattgctgccactatctaaattttttttcttcttttttttggggggggggggggg

SEQ ID NO: 44043 - DNA, 1936 bp, Oryza sativa
actgttttgtcctaaattagctagaaatataatttttatgggacggagggagtaagaaaaagaacatatataattactcgtaaatacgattatctatatagagtcagagaattcgaaccaaataagctacatgagtaggtttctactcgcaaatatacatgtccaactaaagaaacctaatcaagtgagctacgcttaaccctcacgacgacgacaattttcatgttctccgagctttgaaagaaaaagggtttgaaaaagaacacaccaagttgctagtttaaggagctttcaggcaatttaagcctaacactttccatggcatgtgctgacaacgagctgaggcgagaggccccctgatttggatgaagactcatccatcaacttaatttttctaatccctttatagctgaaatgttggacttggcctgaactagtccatacacacacacagtgcgcacatatttctgcatgttatactagctgacctgacagcctaatatactgtacctaattttgcttttgtgtttgggtctaattaattaaagtggagcccttttcagagggggggtttggatgcatctccaggagtagtcatcgtctttagctatttggatccacttctacttggaataataacacaataccacattgtgtgtgaatttgtctgctctcatgcatttgaggccactaggcatgtgggatgttgtccatctttgcgtgtcctcgagttcacatatttatttgggtattaattcatttgcaatatgaggctctgggtcctatcaatgtatgtgtacgtatgggcattgctcctgccgtacagtcccagactttggctgtctttgcagcttaattcaatttatttttggatacgtcgaccacaagcaaattaaatcatatgtcatcatatacaagcatgcacggttaatttgtgatcagtagctatatatacaattaagtagtgatgaagaatggctggtcaatttcttgacgatggcttgtttgaaccggataaattagaagcaaattgttcgtaaattggtgctgatttcagtccagtttctccgacgacgacgacccgaatcaagtggaactaatgtatcccccacttgagcgaattcaaccaaaacaaaacagagaattacgtacgctgctgcatttctgttcttctgacttttggggggaggaagaagaggaggaattagcggctaaactaatcatggtactaacatggccggcacatgtgcttttgtggccacactagctatacaaaagttattcccactttcatttgacaccgacactggtagtatcctcattcttccccttgttgcaggcccaaatgatgagcacgaaattactgccagtgattgacaaactctgctttcaattattggagtacctgcatcttgcctctctgctggacaaacattgtaggagtacgctacagcaagtgaaatatgatactgctctgaattaatctattagaagtttagtactatataccttcgtttaaaaaggaaaaaaaaacttcatttatgataatgaatttgaacaaagcactactttggtttaattgattagttcaaaataagagtttatgtaagtgcaaacatgtatactcactgtaacagatagcaggtagtagtagtgtcaagtacactaatcaattaacccaaagtacattccggtaagtaactgctacagctaccacttttggcaaagatctgatcacaaggctcacaagcaacctcagcagttacacctcctagctagcccctatggttggttggttggcaaagttgcttgtactagttgctactctatctctctctctcacacacacacaaacaagaaacaactacagtacaagccctataccaaaagcaagattggctctaggctctagtctagccacaatgcacttgccaag

SEQ ID NO: 44044 - DNA, 3504 bp, Oryza sativa
ttttacttactaaatatagttactttgggtcttgaattataaattttgtggtaaataatctaatgatgaattatgtattttctatataatatagtatgagaggatggaaggatgtatggcgtaagtacgtgtactggtgcacgtaaatgatacggatttaaagtgggtccaccgtatttaaagttgtaaatgatacggatttaaagtggctccaccgtatttaaagttttcctttttaagaattattagatattcctcaaatttattaaaatgccacatgacgacttaagagcgtttgtaggagtttcacgtggcggcttgagagcgtttgtagaaagtttaatggacttttagtatataatagatagataacgttagtattcatctctggcgccttgttttagtatcagctctcttaatcatcgacacaaaaaaatatttagtttttcgtcaactgtaggttctgtcatgagctttctttacagagcacaaatgatgtgtagactaacagtcttgtcatttcagttgatgctggagaacgagagaaccatgaagccacctgagacgcaaagaatggacgatgaaatcgccatcgagagggatcatgatgaggagcagaaggcggcattgaggcgtgccgttgctctaggggtcgcagatgttaatgtgccatcagcatatggtacattcagtgaaaatctgactcctgaggctgatgaggcctctccggtattgcccgacagtggactgcgaaggacggtctgggatgagtggattgcaaggatatttgagaaggatgaatctggcaaaatgattccacgaacatgattatggtagaacagggcattatgctatgaaattaggaaaaaaataataaataagtatgcaggcaatataatctgagccgattattattggcatcagttcatctccagcctgttcaagtctgttttcaaaaccttgaaatggtgatggaaggaaataggaattgttggcagagcaatgatgtgaaatctgatgcagtttcaacctcagaaacaaagatcctagtagatgatatggggcctgtttggatcggagggctatttatttatttatgagtattaaacgtaaattactgataaaacccattccataacccctaggctattgtgcgagatgaatctaacgagatatattaatccatgatttgctacagtgatcatccgctaatcatggattaatatacctcgttagattcgtctcgcaaaataggctaggggttatggaatgggttttgtgagtaatctacgtttaatacttctaaatagcaagattccggagggatatttaatagcttggaggagccaaacaaggccatggtcgcacggatgtaaatgactccatccatcctaaaataatagcaaactatagtttaggatgaagggggtaggaattaacaaaagggaaggaatataggtgaaaattgatataggaattagcaaaatggaaggaatataggtgaaaattgatataggattacatatatttgttatcagaaaatgtcctttatacacacaattgattaagtaattagttgtacagtaagctattaaggagagtaagatttgtatgcaaaccatgagataaaaaagaggggcatcctatcttttggtaaattttcagccagaaagtacgaactttgttattatcaagacagtggaatgctgcaaatagtcttctctcaatctttagttattaagcgtaccatttgttcttttagaactcatgaactttattgaaggaaatgcttaaaagcacagtacatgaatgatgttaacttctccacaaggagattacaaaggttgcctaaggttgggcaacttgcaaaatagcaggcaaagcatgacaagaaaactattatgacaagaaagttattaggagaagaggttcttgctttatgtcagcatgtttattggcctcccttggaatccatctgattgcgatttgtttacctgcagataaagcatgcaattcaaagagtaatgatctcaaagaccaattgtcttggttgagcaatgaaatcttgctgctgtaaggttgagactaaagttttattgtctgacaggaaaaatgtatgctgtaactgtaaagccaagcaaaattttgtaacctgaaacaaatgctgcaagatcaacaagaggagaagtaaagctcttcgaacgtgcttttattaaggttactgcgtgtgaaccaggatcatgtataaaaatgccaaaatctgatatattaattttccaagaagcatcaacataacaaagagtacagtacctgaagggataatcaagttaacataaggagatgttgttcagtttgtgttacctccgaagaatcatgttgtgtttgatgaacactattataactttgcaccatggagatggttgcattacaaacctgaaaaggctcccaattttttgctttaaaattatgatcattcatagcttttcaaatttgccaaagcataatagcaattttttgaagggcattatctgtggacatagtagctaggaggtaagaataatatcatacatagatgtcatcaagctaagagcatccgttttatgttgaaaatcaaagataaaccaaactagtctactaaagcaacagtgcaaaaagatatgagtttcgttttgttgttgaccgcatgtggaacaagtaggttcaatgtccttgattctagaatgaagagtaacagcagtaggtaaagcgtttctgaaaagtgtccaaagaagaattttaactataggagaaattgtcttatttttccaagcagatttaataagattgataactaaggaaggaataggatgatgattataatggaaagacttgaaaacttctttgtaagcacttttagtattacactcagcagaagaagtgtgaatccaacaaagcttatcttctgtatcctgatgaattactcttacatgggatatagaatttgtagcctccttagcaaagacttgagaaattttatcaaagtcataatttttgttttgaccccacaagccatcgaaggtaaatgattaggaatattagtcggatttaaggatcatgaataatttctcaaatagaacactagggttgattctaaatagaaacctaacctttagaaatttgcccaatacatgaagtgaaaaggtattttcggattttagaaatggaagaccagagagttgactgggaaacattaaaaggagctttccaaaaggaagcattgttgaaatatttggttttgagaatagaggagactaggcccccttttttttttcttaactccaaactttaactttcttgttttccattagcacaccttttaagttgttaaatggtgcattttttttaaaaaagtttctatatagaagttcttttaaaaacaaataaatctattttaaaatttataataaataatacttaatcaattatgtgctaatgaggtttctcgtttaattgcataacatgtac

SEQ ID NO: 44045 - DNA, 745 bp, Oryza sativa
gagcctccgcgcgagcccccgcagctcgtccgccgccgcgtgggcgtggccgccgacctccgcggcgagcgcctccgccgagcgcgcggcgggcggcagcgccgccgtggcgatcatggcggcggcggtggcgtggcttccaacgccggctagtcgatcggaggaaacgagagcttgttggcgtccacgtcgttttaatttaaagtcaaccgcagcgaagattgggtcgtggctgtcgtcagcttacgcaagcaagcagagactgtttcctgatttattttatttttttggtcggagtaaccgataaatggctgtccgtccttttggctgtttaatcgaggtcttctcactcaaacagtctgtgttggagaattgtttctaaacctaatgatttaggctccgttccacgtgtggtgttttggagattgatttttgttcatcatatgtgccccaaatctaaaattcattttccatcattttatttgtcaaatacttcatttattcaactctgttcagaatcttaataaaatcattttttatgttaatatgagtccaagtgataagtaaaaccattctaagcatggctaagcaatatagtaaactagtgacaatataactcatattccaagtagtaatagtaatagaatatgattcctaaggttaggaatgagggatatggatatatgtggggttaaggcgataatgcaaataataggagtttgtctaacaaatttaacaaaatttt

SEQ ID NO: 44046 - DNA, 2896 bp, Oryza sativa
ctcttttcttgttgggggggggggggggcggggggggggcgagttaaaaatgtgcatgcttccttattcttcaccaccacttaagttttttttttggtgaaaaaactaatcaatatgaaatgggaggaataaataatatggtcttataagtacatctattttctctatctatttaatgcttgaaattatagaaatttacccttttattcatatattaattgaaagcagcgagacattgagatgatggacataagttggaagacgaatacgtgcgtacaaattctgaattccaaccaaccaaagtaatgaaactacttattttccctccacatgtgtataagaatcgaggaaatccttttttttaaaaaaaataattttatcttcttattccttaaatataacgttctaagtgcataacattaaaaagttcaagttacacagtaaaggaaactaatgaattgattatttgtttgaaaatttggtactcaaggagcataacgtttgcatcaagcgggagcaaaagatgtcggtagcattcttttcctagaattttacctcaattttcgttagcacacttttcaaacatcggtgtgtttcatgtaataaaaaatctttgtgaaagttgctttaaaatatcaaatatatcaatttttcaagtttgtaataattaaaacttaattaattatgcgctaatagttatctcgttttgcatgtccgcatttaatctaaatcttcgtcagattcgaatacagtattctcatttactacttcattctatcctggataaaagattgcaaagaggcctggcttttttttattattgtccttcccagtccgcagtccccactctcgagtctcgactcctccgctgctctccactcatcaatttgctcctcgctcgacctcggtgtctccatcttcgccgcggtacgaccgtatcgctgctacaacggccttcagtctatggccttcttcgcatgaagctcgaaggcgcctgcgtctgcaagattgaagttgcgccggcaacatcagcaaagagaaatctgcgatgcgctccctgtcccccacctcctgcaatccctcatgcttctcgggccagcggccggatccgcagcccacgataccttcgcccgccgcatccggaagacaactcccatattcccaagccgatgtgattatcggcgcaaaaatctggtagtgagctttggtgctggacaaagcaccagtgagtgtgagttgtgcgatacagctagcgttgcttgcgtccattcacttgctctctgcctcttttgctcatttgcatcaccatccagtatcccttagtataggctcggtgattttggtactcgcctgcaggcaggcatgcatgcatcctacttgggtattttcctctctacaagttcaacgaaagatctaaagagaaccagtgatcctagggaagacactgcttgattttctttgctgaaaacatctcaacacgtgccttaatttagcaccaattgcaggtaattttaaccagttctttggtgttctaaatggaaggagtataaataaaggacacgagcgggtggttcgccgtggcgtcatcggccgtgatgcgcaggtggcggaggatccggcacggcgccaccgctcactcgcacacgccgcctcctctcctcctccgctagctagcgcccctcccttctcctgatccgggccgatggccagtgccgtccctcttctttctccccgggttcaatggatttggcaagtctgtattgggacgggcgttctcgagggtgactcctgtcggtgagatagaagcgtttaggaagggcagcagcatggcggcgggaggcacaggggagggcgaggtggccgggcgaatgtgaagaagacgagcccaacgccgttgagggagaacatgaagcgggtggtcggccgcaacgcgcgagtagcggaggagccggtggattagggtcgagcaattctgcaaataaaaaatacaataactccgtagttttacgatgaggtccaccgcaacgaactttagccgtcgatacttaatcaaacggtgcaagaggagtgccaaggagacacgtggcagatttctagagaggtgaagcttgatttctagagtgccacgtggcccaatcaagtgccaggattcgggccctgcaatcggtatataagattgggttaatgggctttgggctactcaaattaagtgggccttgagagtttcacgttgaaaaagatcacggaaggacttggaataagttcaccgaaggtccctcaacttaacaacgagatttttgaggtcccctaaccatagaaccagaaatgtgtacccctaaacttacacaaactatgcacacaagatcctatggcagtatatatgggtggtttcgctgacgtggcatcctagtcagcaaaaaaaaaatgttacgtggggcccacatgtcagctgcacatcttttttcttctcttttcttctccttctcttctcttttctctcttctctcttctcttcttcaggccagcggtgggcagagcagcgatgggaaagcgcggatgcgggcggcaggcgagcgcggtagcggagggaaacactagtgtgtactctcgttctggctcggccagtcgccccaccgccgctcgcttcctggctcaggtagggctgcaatttcgcgctccatataacgccgctgtggacgtacagcagaggccacgtgcaaaccctgcctgcgccgtgtgttgtcatacgggcgtgtggcggtgggctggcggccatgtccccgtatgaggctatgggcgtagcggcggctgggacgcagctataggcggaggaggtggcatcttggattcagtgtccatcttggaggcggtacgtggtgccccccgagtaggggtg

SEQ ID NO: 44047 - DNA, 679 bp, Oryza sativa
acagcgcgtaatgaagggacaccatgtaccactttcaaaaccaagcaatgcacaactttcaaatcttcaagactttcgagatttaagatcctcttcagttttttgttcctgtgaacttcaagttctctaagtgaaggcagattctcaattgttttgaggctgtcagcatgatctatgcgcaagcttctcagtgcagtacaatgctcaagccagcgaggaagtgaatccagcttggggcatctttcaagcctgaaatccactagtgaaggcatatctccttcttcgatacctgaccatgacttcaagttgctcatctcgctgatgagcaactgttccagcttgggaaatgccactccattatctggttttccgcgaagttcagggccaatggtagctgacaaattagaatcgattattgcaaggtattttagattactcatctggcccagagatggcagctgcgagcaatgtgaacaaccatcaatggttagcctctgcaactctgatagaccgggaaaggatagccaagatggaaattcatgtccataataatttgccatcttgatagacacaacagaaggtgctggcgccagttcttcaaaaacatctttaatattctcggctctacctatctgtgttgtttgctcatcaatgctgcagcataactcaagctctttga

SEQ ID NO: 44048 - DNA, 667 bp, Oryza sativa
taagagagattagttagaaaatatgagatgggagggaagagtcggtggacattcatattgggaggagggggcacatacgtaacttaactgagggggaggttaaaacttatttaatcataatagattcaatgaatttaaatagtgggcccgctggttttttaagtaccacgtggctttgtaggagtgtttttagaagtcccatgtaacggcttgagagtgtttatagtaagtttaatggacttttatgatggtaggcatgcatgtatgttataagtatgtatttgaaaaacttataaggactgaaaatcaaccatatagccaagcttcagaagtacgttttcttcataaatttatttgtcatctttgcttaaataacttttattaggtatttgttgtctttatactatgtaatatttaattcatatgtataagtaattattattttcttcttcaccatttaaaaaggaggtagacttaggctgagttatttccccaactttcccaactcactttccctttgttttccacatgcacgctttcaaactgctaaacgttatgttgttttgcaaaacttttctatacaaaagttgctttaaaaaatcatattaatctatttttcaaaaaaataatagtaaacacttaattaatcataagaaaatgcgtcact

SEQ ID NO: 44049 - DNA, 604 bp, Oryza sativa
caaaatcccttccaaaccgtatatctcatccaaccaaccaaacaaaatctcatactagccaggatgaactaatgcaaccaaccaaacagttgcatgtgtatcatcctagccaggctaaactcagcctggatatgagagatggaccaggctaaggcaatgcaagcaaccaaacacacccttaaggaatcgtacgtgaaaataccatccctcattttccctctcaatacttcaaaaatttcatccttatccgctctccaactatctcacctcctcatccttatcctcaccctcatatgtctctcactttctctcctctcctctcacgcactcatgcgtcacggcagcaggcaggtcggtagtaggcaacggtgggcggctcggcagcaggcgacggcgggaggagtagggccctgagcggactcagccggaactacgtcacccctaccgctgacgatgacaacgagatggccgggagtggcaccgttggccctgcgaatccacgccgcccccgttgacgaggaggaggaggaggtggtggctaggagcggaggcggacactaacttaatctgctcccctggcggccgtccccatgctccctccatg

SEQ ID NO: 44050 - DNA, 694 bp, Oryza sativa
gatctaaagaggctagacataaatcatttttcaaaagtacataaattagcaaatcatatttaggttgaactaaaagtaaagtaatatattaacactttggtggtataaacgtaaaaacataacatgccttgttgttcctgcctcatacagaaactatacagtgggcaaaagtatgtaagatgcataatatagaggtctcatatatgcagatcacttcatgttagaacacaatccaaacaaacaaaaataatcaaatcaagtttatgtaaaaagaacatatatgcagtcaaatcaagagatacaaaatcatcctcttgatatcaattgcaagaacagtaaacaaaatcaataacatgcattgataaaaggataaaaaaagcatgagagatatcattgcataccaactgtttgtgaaatgtttactctgtctgcaagggatagatgttcgaagtgtctatcaaaggagaacgaccaccaatatataattgggtaaatgtgtttataagtatgaaataataatgagtactaatgaacacattaattataacaatatcttttctattttgtctttggaaaaactttaatttcctagataaaaactgtcttgttcattataaacaaattaattactaccattcaaaagaaaagagacataattggcagctatatccatactatatgggctgcaggaatt

SEQ ID NO: 44051 - DNA, 738 bp, Oryza sativa
aattcctgcagcccatacgccgacggaggccatgcaggtggtgtcgggtaggcctacgtgacatttaatatggcggtataaagtgtggaggtactcgcaatgggaggcaaagtggtcggtgtagctaggcattggtgaggcccaacagtggaagcggttcgatgaagatggggaagcgatgtagttgaggagacggtgagagtagaacaggagcccacgctttgatcacacaggcacgatcatcatatgctcaatggatttcttaatcattgtgttgtaccgccaccacaagggaccagcgtgtggggttcaagcttttcactccaagttattcctgtaacgtagtaagggcgaaagcagagttttgtatatccgcctactcgtccaaaaaaaaagtttcaaaaaaccggtgaacatacacaaatagagaaaacaaccatggaaaaaaaagttgaaacacactaaaaaactgaaaacatactatagtagagtggaatggaacgtttaacccctcttactagatcccgttgcaaagcacaatatatttgctagtaaactaaaaatatatcaagtttcaaaaaatctaaatgttggcaagaactgataagatgaagcacagaagatggaggcggaattcctccgtctcaaaaacaaattaattacctgctattgaagcggttgcatgacctagtgcggaaatgcaatttgaggactgtctaaggctgagtttttttccca

SEQ ID NO: 44052 - DNA, 771 bp, Oryza sativa
atgcctcaagcataacttgtgtgtggctaaatccaaaaaggaaatgagacacaggttcttgctgttatattcttagtcagatcaaatatgtctatgtgttatggttaattggttattgaataaaaaaaagttgaacattcataggtaaaatcacagtagtgaagcacaaagcaattaactaattttacatgagaacaaagaatagctgtgacattatagatttctagttaggtagagtagtagatgcactgctgcaagcaaataggacacatctaacaagaagatataaaaaagtatgcactcatgctagtagatgaattgaatttctaactatgttcaataacaggtctacaaggtcacacacatggaattggtgattctacctgtttccatgcagatgtgtaattaccagttcgactacaaaatcaggatgtttatgtcgatgcaaacacttggctaatcctcaattatcatgcactcttatcagtatcaatgaacataaacagtcagatagtatttcatcgcaaattattggattgtcagtatcactagattccgcaataagcaaagcaaaagaccgaaattcccaccatggagagctaatccccccccaccccccctccccctctttgcacgagtcaattgcactgccatttcgcgtacctggcattggagcgctccccgaggacgcgcttccgctcggcctcctcgcgcgcgacctccgcgatgcgggcgcgcagctccttccgctgcctccgcacgaccccccgg

SEQ ID NO: 44053 - DNA, 2219 bp, Oryza sativa
gagtgggagtggattttgaatttctttttttgtttttcttggttgttccgtttgcgtctctttggagtttggagtttggacaggacaacgtaagagtcacgccgtcgggcaggccagctgtttggtacgggtatttgccatttggtaatcctttttttctcgctgaacgatctagtaaaacgatgtaactacggttacagattaataaagcgcgtcaaatggcttctctcaaaaaaaaaaatgatagggcgcggatgctgatgcaaatcagattatttcggatattaaaaatggcacatacacgatgtgataacggattaaaactgtgaggtgttatgtgcatacgaaatcaacacggttcataggtacgactggtgtgtagggatagtgtttttttatggaagttggggaaactacagcagttgtcaatagagtcatgtgggctacgactgattaacatcacctcgctgtcgtcggtttttttccttttcaaaactcatgtatttatttacattactaaggttacgtaatactaatacataagcaattataatgcatagagcacgcatatggactagggcacatcctagttttacaaaggactttgaaagatttgaaaatagaaacaatcgagtccttttaacttagtcaataaattcaataagcttgattcaacatagcttaaaataaaatgagttgcacatgattgaaccaccgtactgtcccaaaagggatctcacacaaatggattattaggcgatggcatacaacgtgatatttcaaccacatcatagaagacttttgccaaagcattagccaaagaagacgcaacaaaagttgttccaaaggtctagccccaatccatgacaccagcgaagcaaacataataagcacagcaagatgcaaatgaacccgaaaaccgtacccaaaaggggcctccatgcataggaggtcagggtcaacttgggttggctcaacaccattagtcgcctcatgaagaacttccaccgaagatgaaaaaggccttcatccttggaatgagctcattagagatataggtgtagaccggtgcaacctattctcatgcaaatctggaggcatcctaaccagtagaaaggacccgtcgacgtagtgactcgccggtgggatcaaatcccacagtgaactccatgatggcagcaccaatgaccagctccagaacaacaagagcaagatcaactagagtaattagacaagcgggagaacccgactaaaacaacaactactagtaggatggtgcctgaccccctctttcacccttcattggtgacgagttgccagagagaaggatgaagaggggtcggaatgatgagagtgctactgttggggaaatttaggagagaccttgcatgtttccctcgtgggtttaccatccggggactaaattgcccgatggaagatctacatgttttggcattgaaaaccgttgttattgagtgatagaagctaaaaggatgttgcctcgctatatggcgtcattgggaaatacgttgacatgggagtgtgggacattgtgttccattttgtgttggggtgcatcatcgtttgccgctcggcttgatggagagcatagtgttttccttgggcgcacgtgtgagtgggcgcgctaacatgagaagctatgtagaggtgggattggagatcatggggaggagacatggaggaaagatgagagctagctagcttgcaggagggcacgcggaggtggatcgacttctccccaggcatcgatagtgacactcgcaagagagcaagccgtctcgcgtgacgaatccaacggcgctcgaggctcttctctagtggcagcagcgactcttggcaccggaggtcataggggatggtgcccctaatgacagtggtggcggccatagagggcaactcatgatttgttcctgggtacatagggccacacataagcgttacatagggcaactcctcaatgactcaagtcagaagtcatacgcggagcatcaagcatctgaaattggcccatttggcttttcgcggacagcccatgtggtggcccgacgcaggataagacgggaccgtccaatctaatggatggtctcaattgatcccaacctagacaaatatccggcagccaaaaccctaaccctaaattcatttctcccgatccccttgctctctcactcccgtcatcgctgccggcaaaggggggg

SEQ ID NO: 44054 - DNA, 2110 bp, Oryza sativa
agaggacattgaatactttgatttcccccctaatagttctagtcacatagaatttaggacaatctcatcaaaattgcatttacttactacaaaattagatcatgaaacgatttgctcgagataaagtcttcaatagcaggccatttaccttaatgtataagagctcgtcattattttccttttctttttgagatgagagaattcatgaaggatgaaaacagtcatggaaatttccgtataagtggtaccatttttcaccctttttatttctagcagttgatactgaatattgataaatatgatcaatttccgaccgatcaagaattatttctgaatacatactaccgattccgacagttttcatcccatctagaattgtgaagtgactgtcttgaacaagtaaaatcccttggcctttttaaaaaactaggaaggtgtattattaaaacgtaagattatagtttgttcagaaattatatctcataagaacaaactctaggtcagtgatatctcaagaaccattcatcgacttagaagatagattaaggtcatatgacttttgaatcgacttttggattgagtgagtaattatcgtcatgcataccatctgaacatatatataccatgcaatattgctacaagcaaaaattaggacatgaaggaactcatggttattgtgactgaattgcctcatgaagacgcatgctttagtgacaatcaaattaaggatagattaacagttcaatttttccccttcgtagaagttcaaatttttctcacaattttaaagaattttaaagcctttttatgttacaacacaaatcagccacacgattgtttggtttggtagtgcaaaatatcaccaatagttttaagctaatttctttcttttcgtatgtttaattctctttttcaaaacaatatttgtttgaaagaagagtataattatataaatttaatttgtacatatagtgtgcctataaattttgatgtgttttatagtaaaatttatcggcagttatgattaccttggcaaataaccttagctacctcaggtatggtgctacgtcatgcgtgtagaaggcaaagacgcacatgtgcagagggtaggcgagagaggtcttcagagttttttttttaatctcttagaactgatggtccattggtttaagaagaaatcgatggcaaaatatcttttattagaaagtattggatccactaatttaagtatagattagttattatagatcataaattactaattttatggtacaaaatataattgtgtaaactttagtataaatcatgctttttttaaaataatggttcaaaataatgataggtccactggtttatctattttttttgggtatgttacgtttgtatatgtattttctttttctcaaagccgtactggagattaggacagaggtttttattataatttttagaatgtatcatttgatggtttaagagtgtttttaaaacgtcacgtgacaggttgcgagcgttaaaaaagtttaatgaatctttggtgtatataatagccaatagatatgcttttgtaaaggcaagtgctatgatagatgcgattaccacctttaaatttatctattttatttactcatgaactaagaggtaacatatacaatgtatcatctctagtacacaaataccgtatctttaacactcccacacatttcttgaaatttgtatggaggttgtctcttgatttaggggtggctcatcatctctctcctcacttctctcctccactcatcactcaatccaatgtggcactcttagagggggtctaatgcgcgaaagtgcaccagacgcgaacggattcaaaatttctagttttggctaccgcatggcgagatgaatccgatgtttcctgttttggttaccaatcgtgaaactgtcaaaaccgcgagtgtttcacatgccgtgcatccgcgtctcgtcagctgctagccatatgagcctgcatgggcctatagcatatatggattgatttcatgtctgtctatggtgtgattcgttaatgggccattttattaggttattttttattcgaatattttttaatatattttagatttcaatt

SEQ ID NO: 44055 - DNA, 1083 bp, Oryza sativa
ccacgtggtcacgtcttaacatatatactcatatttgcatgcataggcgtggttaggtgcacgaatgaaagaaagatcgtcggacgggttcgcgcgactgtctactagcgaacattcgcgtactacacctctcgggggggagggggggtggttcattatagtagccctttggtagagtattcaggccggcatcctccccttggataaagagccaccatatattgaccgttcaccattgcaataattttttttaacgattcgccgttgcaagttggcatacgtgcagcagaggacatgggtgctgctgcgctgtactgtgtattcgatagggatttggtacacacggatttggcaagagctcctgtgtacgtagctatctcgccgttgatcgctcgtatcacgttgcaactccacatggtgaacttaaaccgattggtatttgctcgcaacaaacccacgtcctacatgatcctccgcgtggcacaccacgagaaaatcggcagaaaacaccagtggccaggcgaagcgagatggaggccaccgcatcgatgttgcaggcccgggactggtcgtctctcccaacggacgtgcttgtcttgatcctggagcgcatgcggtggtcgactcacccgagcgtcgtgttagtgtgccagcaatggcgctccgctgtgtcgctgtcgcccttctacccggcatggatcaccccactcctgctcaacaccgctgacatcggcaccgccaatataaggtactataggggagtggattctaatccctcgaggggatatcctctcgtatacctttttcttccaaattcgatgcaaatagttgtgaaaaattctaaaaaaaattgacaatgtagagtataatgatacctactagtccaccaaaattcatgttcaaatttgatctacacatcgagaaacaaaaaagacaaatttagatataaactgtacactactattcatacgctgaatttgtcttttttatatctcgacgtgtgagttgagtttggacttaagattttgtggagttgtatatatgtgttgtatgaatgttatcaaatttttccagaatttttca

SEQ ID NO: 44056 - DNA, 886 bp, Oryza sativa
caaacccctaacacgtcggcaatcctcaaaacacctttgagcctcttgaactgcgtttctcagttctggcaaccacctttctgataccatcttttcttgttcaccagctaatttaagacagtagttggccaccctatataaaggaaacatcagtagccattcttgaaacgtagtaagctggaatatagattcattccaccaaatataagatattcaagaccaataaaaaaacacaggactacttgtgataaacaagggcatcccaaattgcaattcctggattgttttagatagacatcagctgcacaataattttatttcactgcgtatcagcatactaaataacattttgtggacttgtcatcaattcaaaattaagaacaagtcttcagttcatgaatcccaatggtacactgctcaattggtaaatgttacagctgccacatgcattacacagtgaacaaaatgtatttgaaacgcatgttagaattcttttcaataacaaaacccctacttccaagagaaaatatgtactgataaaaaatacccgaaatgaaatactattttctgaggaacaaaattgcaggaaccgaacaagtcgacagaggatggaagggaatacaaacaaacattggcaccagtcctacaaactataccgacaatcactgatacacaagacatctcctttatgttacagttctagctggattcagtaaatatctattgtgaagaaagacaaagattaagtaaaatttcagcgtacctttcatattcctgttgagcacgatgtgctcggttcagcaaaacacgatcattctcaaccagatttctccgcgtgtgcaccaaattaatagcctttgataaatcctctagtatactagcttca

SEQ ID NO: 44057 - DNA, 719 bp, Oryza sativa
caatacaagctaatagattcgggtactgttagtatcatagaatgcacaaacacattataagcaccatgagaatttcatagtcatatttagcttaatcatgaactcaaaacgtaaacatgtttcataagccatgacaatgttatagagattatgcttatctgatattcttgataatacgaaactggagtaccaaattgaagatcttggaaacttgtgtgcatattaccattttttccttttttttagagaataaatgttatgactgctgctttctcactgtaagtattaatattaatttggaaggaagcatcttaaattaaattcattacaccacagtggaatcttgaataagtacctccaagtgtctgctgttagtcatgttctgtgaggtgttcccagtaggcatctttttacttcctgccgcatcactagtgccatgaaggcgttgcaagagcttctggcttttagctttagcttcagcagctttatttaaagcatcttctgtggccaagaattgctgaacatgttctttctgcaaggtaaataaatgttatgtggaagttaacttcagtgacatgtacttcatttgaggtggtaggcataaggcattaacacagaattttactagcctgtggagaaagaagagcttgatgaaatcatgcagcttctttttttttatcaagaggaaagaaaaaacaatcaagtgggctgcaggaatt

SEQ ID NO: 44058 - DNA, 669 bp, Oryza sativa
attcctgcagcctattgtgtacacgatgtaaactattttggatgtattgattatccatataaatcaattgttgtatggcatatgttaattacgtacaattattagaagttttaacaattttaaatcatgtaattgctagttatatgcgataattagaatttttaaaagtttaaatcatgcatgtggcatttacatatgttaattagagtttttaaccattaatttaatatcattcatatgctaattatatatgattatttgaatttttattaattttaaatcatgcatgtggcatttacatatgttaattagagtttttaacaattaatttaatatcattcatatgctaattatatatgattattagaatttttattaattttaaatcatgcatgtcgtatgtatatacatatgttaattacaatttttaacaacttaatatcattcatatgctaagtatatatgattattagaatttttattaattttaaatcatatatttgcttattacgttttatccacttaatttactacagacaacaataatttttcgaagtaattgtcattaatttttcgactttaaataattttaatgcattattttctattttagaaacacatatataatggaaattaatattcagtgtgcttatcagtagtcccggttta

SEQ ID NO: 44059 - DNA, 649 bp, Oryza sativa
atgccgggcggccctagccgtccctacctattctttgctcgcctcagcacctccacactagcgctcctctccgcccgcgctgctcttcctccccttccgtcggtgcccctctaccccggtgcatctccctctcctctctctctcttgcgctcctctctccgatggcggcggagaagaggaggacgatggtgcctcttcggcggcagcggagaggaggaggatgatgtccagcttagatctgggagatgggccgacgagcccagcaccgcggagaggaggaggaggacgagcttgaggaggcccttgccggcaaggcggggtcgagggcagtaggatgagccggtgagcttatccggcccggtggccctccttcccctagccgactagctcggcggcatggatcttcctccctctctcttccttgacggtgcggagcacgagcatgggtcccacctgcaacgcccacgacgaggaatctgtgtctaaagtttgctccgcgttcctaaggaggccgcgaggatagacgacgtggcagcgaatatttcacttttggtgttgaggcccaactccacctaggcgcattgtgaatggcctgacgaacggagaatgcggagaacaaactgaagcaacatacatggacgaatgccat

SEQ ID NO: 44060 - DNA, 719 bp, Oryza sativa
tttattttaaaatatgaaattacgattgacataccattcttttttttatatttgtatagatgcattagtattttacatataattattttgattagtcaatatatacagttataatctagacccaccatgattgacaatactgggccttttgccccctctgattaatgtactaatttctaattcttggggtgaaaattgaaaatacacggcagacatatgtagataagatagacaaaatgatagatcaattgattaagagaaacatgtggatatataccaacgataacatataattggttagaacacgtggtaggttttcttataaaatttgtagaacccagtttaatttatttcttttgtgaaatccatacattagaaatcacttgtaatcgttggacctatgtcgatctcttgagcatgtgctaactgctaagggtgcgactgtggcaaatgtgtgcatttgtgtctttcatttaatcgtaaaacatactttggcaaaaatggatatcctggtaagttgcaacaattaaaagtgattgaaatggtcatgtagcggttgtcggtgctagaatttagttactgttaagaataacttagatttaaattcaaattatataattttttatatagtgttatgaatcaactgaatgtcggttcgtgttcctatttgttactgcaatgttcctttattttacaaccacgatggggctgcaggaatt

SEQ ID NO: 44061 - DNA, 648 bp, Oryza sativa
atttggaactaaactcggcctaccttctggtggtaggggctgcagctgcaccatcttggttgctagcatctctcttattaactcctatcaactgatccaccctcactgatcactcttgtagagtcttggtgtacatttactcctactgcactgcactaccaaactctccttcggccctcacctcacaccttctgttactgttagtgggccccacatttgcaaccttctctctctaccactctcttgcgcaactcctcctctatcgatctccttcctatatatacatgctcacttggacacaacacattccatctcccaaagcagcagcagcagcagcagcagcaggccagcagctagcattatcagagagagagagcaaagtgtgctctcttcttcctcttctctgctactaatcaaagctagccagctagagacatctatagcttgggagaaagaagaaagctgagagctctttcttgctagctagctagcaatggcggcttctgctgctgctccggccaccgtggcggggctgctggtggcggtggcggcgataatggcggcgtcgccggccggcgcgcagccttcgccggggtactacccgagctcggtgcacagggcaatggccttctctcgtgactacaccaa

SEQ ID NO: 44062 - DNA, 691 bp, Oryza sativa
aacctctcttttttctccatttgctctatcttcttatctaccatcaattgagctttatactaaccctgtacgtttcacttacctattgtctcctcaaccactactgattctttcctcgatgatggcaagcaccaaagaagttagggcattggggtgttgcagctaaagtacatatacatggaggccttgagcagtcggtaaactagtggcggtcagcgatgaagacgatacaatgtggagaggtgaggtggtgccaccggagctatgagtaaagaggaccggatgtaggcggtgttggcggcatatgaaattcaaagcaacttaaggagtatatattaggccatgttcttttctccaacaaaaactggataaaattttggatactcgtgacacgcttttcaaactgctaaacagtatgtttcgtgcagaagctttctatatgaaagttgctctcaaaaatcacattaatctattttttaagtatgtaataatttaaactcaatcaatcatacattaataccacatcgttttgcgtaaaacatttaatcttcatcttcagaaaaaaaaagaccaccttagtacgagatgggtaattgagcacgtgagagtagctctagtgcgaatctaaaaccaatttcaacgctaaaaatccgaacagtacaatctattttaataccgggctgcaggaatt

SEQ ID NO: 44063 - DNA, 2240 bp, Oryza sativa
gggggcgaccattgcttgggcaggagagagagcggagcgagaggaggagagcaggcagaggaatggtcgcggctagggtttggggaaggggggttagggttgtttctgttttacaaaaacgcccctcatcttatagttttcagagcgcggtacgatttttcgatttttctcttcttcgtatagaatatttttgtttacaaaggtcctctaagtaagaacgcagaaccttaaaactaagggatggggacatataacaaattatcaagtaaatcaagggtgtttttgcaaaatgaccagcgacgacgtggaggcaggagtgctcgcgaaatcccaccgttttccagcgcgcgctgacgtgtcgcgacgcggcagcgtccacgccagcgcaaaatgccgtgggagcagcatttccgggcgggtttgaagactttagatttagattagatgtctgcatgtccaatttttctgcaggaaggtcgtggttttttcatggaccaagtttataggttctatatccgatatctcttccacaggctttattttcttttttctacgcatactactacctcagcggcgtttatgagctctgattttctttttgaactggattgatggaaattctgaactttacacttctgtgtttagttcgtgtgccaaattttttttaagtatacgaacatacatttgaagtattaaacgtagactaataacaaaacaaatgacagattccatatgtaaactgcgagacgaatctattaagcctaattaatctgtcgttagcaaatgtttactgtagcaccacattgtcaaatcatgacgtaattaggctcaaaagattcgtctcgtgatttacatgtaaattgtgtaattggttttttttccatatttaatgatccatgcaaatattcagatatttaatgtgacggaaaagttggaagtttgaagaaaatattctgaatctaaacaaggccttttctactgttttgtactatgttttgtgttttgttttctgggctcccgatgcattgatgttagttggaacttggaacttagaacttatgtcagcatttaattggtgtggtaattggttatttcctaattcacgagttggcgatcctttgacatcgtttaaattgtagatttaccggtagagcataagcaaaataggatatgatttacgcttctgcgcttggcatgggaaggcaaatcggatgtgctgcgtttggagcctattagattctgacgtgtgggatgcttgatcgtcgacgtggaagcggtgaattttggtttggaagcaatcagacttgcacgtgctgctagggcgccaatgcagaaacacgaaaaccgtcgatgtacgctagacagtgacgaataatagaaacactacaaatattttaaatatgtaaagataaagataagaaaaatgagatcacgaggaaagaaagcatgaacgggatgtggcgagacatattttcgttcttttattatagatcactgtctttttgtgattaggaatttaaattgtttgtttatttttgaaaacaaaaaggaaaaaaagagatcggaatggggagaagcgaagcaagcgcaaggtgtggtgggacgtatttttgtttttttattagatcttttgtccttttgtgattaggaataggtgtgattattttcgctcttcttttcttcaggtccgatttttttttgccatgatggaaatcgctcttttttctattaaatggacgataaaatcatttaaattttttttatgtagtagagatttgtaacattagctttttaagtcgctaaaaacatataaatataaaagttttaaatacaatttatttttatcgttgattagtgtgacaggttataatcaacacatatccatgtgaaatgtctagcttgcacataaacgctacccatataaaaatacaaggaaaatcactggccttttcgttttaggaaaaaaaatccgatccctttctaaggaaaatcaccgttccaaattgccgaccgtacgtgcagcagagctataccgtgccggccagcggcacacgtatgtacgtacgtttacgtgtaggtttgtttccccggacaactcgtatcgcattgcaactcccagatgtaaaccgattggtattttcgctccactacgccctacgtacatataagctcccgcgcgcgcggcacaccacgatataataataactagagcctggggagcaccgcctctacgcaactat

SEQ ID NO: 44064 - DNA, 3929 bp, Oryza sativa
agaaactctattgggatcaagctattaaatccatttgtactacttgttttacagtgtgagaacatttttttcttccctatatcccactttcactttgtcatatataccgcagtgtttatataaagttataagcatgcatatgaaaataacatcaaatgtcaatcgatgatattactttctaaaacaaatttaatttatattagactatcctcgcaaaaaaaatatattagactaactatttgttatatattttaaaagttgaatctaaaatagtgtgcatgttttattggactgaggtagtaattaagaggggcatttgcaaatttgccaccggtttttttaattttgaaaggatgccactcgaatgacagttctagtggcattttttgcaattttctagtggcagttttaacgatttaaagtagtggtaaaattcacaattgcccctaattaagattgtcggtcattacctcgctttcagattgtgggaactccatttggattaaaaaattaataaactaattgcctctcatatgataaataaacaattaattaagtcgtgtctagtataggaaaattaattcaccataagaaaacatatttacctgcgcaaattatgacatgtacgcatcaagagattgctcttgcttgatttggtgagaggtgatgttttcctttgctaacatgtgctggcattggaaacttttgcgcttgtctaaatagttggggaattgaattttcagatgatatcgctgaattgcttgcttcatcaatacatcaacttatgtcaacggaggacttaggcagtctgcctgcacagaacatcgagcggaattagacacaggagactcagaatcgaaggcaaccaagcaatgctataggattgttgaagatagcataatagtccaacagaaaatcacatgataatgagtaatgactattaagatcattagtttaactctgccttttgcgatttgccataatagatcaatcattaatctgattaatgaatcaatcttaccaggttatatcgacattggtggttggcctggaatccaatcaactcatcgggagtgatagggaggttatcgagaaggcaagtttggctcatagttagcgacgacggcgaccgcctggaccagcctctcgtcgtccttcggcagagcacagagtagggttttgttttttattatgtctacgctgttatgattcggtaccacactggtgtttctttttttcttgagtacacgtgcttttaattacatgtttcaatgggcttttagttgcacgtttattaatgggccttttagctgcacgttaattgtatggttaagatagagcgatcaatctaatcaatggttagatctttctgattaacgtggaagctcatagaaagtgtccaattagtataggtatagatagatagattttgataggcagtggtatgcaacgataagtatatatatatagatggcattccacatatgcaaggcagggcagcacttacaataagaacttaggtcgcattactaattaaaacaatagtagtgacagagcgggtaagtgtgtcatctataaagtgatgaacctgtttgttgctagcaaaaggatggctttactataattgtgagcataagtataaatcgcctacgaaatatacatcacgaaacaaaatcagggaaaaaaggaactcgctgctacagacctcgacgacctataaaatcgaaaaaatctagcttcttccatgccaggagacccatgaatccagtatcccaccgaatggctgcacagcaaatcacaagaaagcatgaatatccgcaaagggaaaggcataaacaggtcatatataacgaaaacatatcgactgatagcattgcaacatgaacagaaccaaaataaaagcgaaaaagattagaaccattaaaacaacacgaaacgaaatttaacgaggccaacaattgtgtgattcattgaaggggcgtctaaaacaagcggcaagaaagcaatcccaatgtagcccttaattaaaaggtccatgcacaatgtttttccgtccatctagattaaataaaacatgctattatatccgtttaattcgcagtaggatggagccctcaacagccaaataaatcctgtacacctcataacaaaaatcattcagccgatgcttcagccaagggaaattttcatatctctaagatctatatgcacataccctgatcaaccatggccacctaaataccaatcaaccggtagataattcccgctatatgggaaataactatatccctataccctataatgtattgctagatcaacatgtgcagtggaagtaaagcatggaaaaatgtaacctcctcacaagcaccaaatactgagcaccaagcagcgatgagaacaaagaagtacggacttgatcaatcacccgaacagccatctatggtgacgatggtacaacgaacgcagttatctctggcaacaataacaataatagaacagatctgcaaccgcatatcatatccatgacctaccatgtaaaggtgacctaacaaacacaaccatactgatcttaattcaacaatctccatctcaggccagaacctgtctgaaccagtacatgatcagcacgcaaggaagatgagcaacctaaaatcccaggcttaactacatgcatccccaagaaaaaaaaaaacctattggactatacccctgtatatgtttttggagggcaaccaacgttgcaaccactaacaaaaacagatctctaaaacgtaatcgatatttcaccaaaggcgatatatcactttctaagcttcaccttgccttgtataccatgcttagaacagggcaatatcatgtaacgaatgaagaacctgcacaatatggtataacaaaaagatcagtaacgtaccatgagtcgaagaacatactaatcaggtcacacaaaccatgcagcaacaatgatattcttatctgaagaaacaagatctacagacagcacaaaagaagaatcaataactgatgaatggaggaaaaagagcatgagagtaagccatgataaacacggaagacataattgaactaaaagaatagcccataatccataacaatagcgtgtaacaaatccagttttcatcataccaaggcaattttttttcaccgctaggcaaaataaaaaaaataactctaaaacattaacagcgaaaatcattcgtcgcctagacaggaccaaaagcgaacgaaggacaatgtaaacatggaccaattattctcaaggcaaattgaagggaaatggtaaacacctatgagcatgataggtctaatgggacaaataaaagagagcaacaagaggcagcaccctaaccactagggtatcctgcaatcgcaatcgtattaaacagcagctataagcaggcacatacatttctctggctgcgtacataagcaaagcagaagctgatcatttctagatacccatgataataccacacctgcatgggcatggtaatagctttaactgagatacttgggcataaaaacgaacaaatcataaggcctgcatgcatagccttttccttgaatcaaaaagtgtaaaaaaaaaaatatcagggcaccgcctcctgcattaacaggatccaccacgtcacccacaccagggaaaaagaccgcagaggcatgtgtctcgacagataacaacaaatgctcctgctcttgcaggaacagccagtactctttgacccggatcatggacagaatttgcacaagggtgtgcttcaatagataacaacagctggccttgtttcatagcctgggtactaaaaagcgatataaccaacaaaaaaatagcacaccatgtatgaaacgtgtggaagcacctgaaccttctcatagacaagatgattctgcgggataaactgaaaaagccatgg

SEQ ID NO: 44065 - DNA, 915 bp, Oryza sativa
cctatatatctattctatttattgggaagacttctggtcgtggtggcgcgctgcgaatcagattagaactcgagtaagcaatatgatatttccttctccgatgccaattagattagaactcaagtaagcaatctgatatttccttcttgaactacatttacgttataacggacagcctagacggaatacgataggaaataatgtgaaagatctgttatagattttgagccgtgtgcgatcttaacaaagatggattagattacacccgtatgaaatacgtacaagaacatataagtcatggcataagtatatatcttgttgaaatacacaaaacaaaattaaattctgtaaaaaaaactagaaaaagaatttacattcaaacatactatgtaagtcacacggtaattacaattacaatgtaattaccatataataactatgtaacttctgtatttgccgccattgttttatgcttctctatcttctcatggaacctaagagcatggccaagagaggcccaaaactctatcccaaaattctggttttgggatttgtaatcgggctttgaggtgttgagtatattgctcgcttcaaaagatgccttaaatttctcaaatgaaaaggtgggggccaccggttaatccatccacataaatctcggttgtttctccccttcccatctgatcgctcctctccacgatcgttcacgccccgcgatgagcgcgcaggaggccaattgggagtgagacttcttccatacctatatatggagagcgataaacccagtgaagggaatcctgattttcggtttcatgtttagggccaccgttcgatctatttttttcaacaaaattcctaaatattttgtgtgtctgtgtgtgaaacaaagacgagagtacttcctccgtttcacaa

SEQ ID NO: 44066 - DNA, 1169 bp, Oryza sativa
atttacatgttgggtgtatggaatggatactgcactgagcaattcctaaatatctctcttaagaccttacacttttggacgcacctggacctgctgcaaacaattgttaatgggctatttctgctgatttattttagaaccccatgcattttattaagtatacataactagatacatatcacatgagttattcccaagggagagtcaactgcacgtgcaggcagttttgcaaagaggccccttgaacagccagtacaactgccgctgttagattttgctgttagaatttgtgtttctttgcagttcaaatctagtttcagctgctgtgtactggttagaatgttagattcaggctggtttcagcttctgtgtactggctggtttctgatggtttatgtaaattatatcaccatatatctctttaaaaacacatatgcagctaaaagacctaaaatatcaagagaaataaataacagtcccaataattacagagtatatgtagtttttgtgcttttaacttttgatagattataaaataatattatgaaacaccatttggatattaaagttgactatattctttagaaaaaaaaagacaattaatttgtagattccaatcaactaggtgccaaaacgagaataaactatgtaatcaaacctgtctcatgcatcctatatgcatgcacatattagttctatgtatatatccatgtattaaacaggtgaatctattattttcatttattagattagatctattaaagtaattaatctctctctcctaatttcccacgtatttgcaggagaaaaataaatatgtactgttcttccgaaaaacgcatacgtatgtatatatgcatgtacaagagactactacttgccaaaaaaacacatagacgtatttggatctagaaaaaaaaactattaacaatttcctcctaacccttaaattagaactaaaacgttgtcatgtttgtatatatgtacatatgatcagtctacccctctaatgtgactcatttcatcgcatttatttcttagggtagttcactaggatatatctatattttaagagttcaaaggcggactgactatacttcatacgacataaaactaatgttaaaacattcagatttcatatattacaattaaaaacagatcgctaaggc

SEQ ID NO: 44067 - DNA, 1096 bp, Oryza sativa
agtgcatatagatgaagtaatgttttctgaagtttatcgatgaagtattgtaatcctaaaacataaaatgcaaagtacatatattacaattcttgaaaggaagtgaaaaacaagaagagaagcacaaatccaatagtaacgatagcaaggatattgttttcctgcaaaggttgtgataaacaacaataggagcaataaagtgcatcttaagggagaacctgtctttccagtagctggtcatatgttccgcgggttgacagctctgatccagtctttccattgccatatacttgatatggcaagggtgagcttgcatcagttgaagcagcatcaatgacctgctcattttcatatttatacctagaaaaaaattgtataactggttaacaacaacacaaagataattaagaaacttaaatttgagtccatttggtgaagtagatcagaacacattttgactagaaaatgaacaaagcatttctcattagaaatgtaatatagcaatatttccattgcagcaaacacctactaatttttttacaaatctaaagcaagtcctgaacaaaaactaaattcactataatgtacttgtgtatgcaaaattccaatcataggattacattcaatagaatgcagctagtacatgcgagaatgatccagaagttactaaagaatattttacacgtaaccatcatcatgatggtggaaagtcaaattatttttcatgtgtattcatgaaacagaatgcaacaactgaaaatagatatagaatggtagtacctcaaaagttctgcatcagcacgtatgtcaatcttgtctgtttctttatgtatgagtattttcatgcgtgatgtgtatgtaatgattgattgcagcagtaatgaaggattttttagggaatccaatgccacagctttaacatcctgtggtatttcaccatccagatcaatgcccaactttgctgcatctaactgggaacttgaattgatgccacttccttcaaatgctgggaaagagcttcgaatcatttcgatcatatctccagcaagagtttcacatgccttccgaatactcctttcacgtgaggtctctacaa

SEQ ID NO: 44068 - DNA, 665 bp, Oryza sativa
tagtttctgccatacttatagaaaatatttatttattattagatggatcgtatatgccattggcacgtaaaggtgtaataagggttgtcttcttctagctcaagtgtggttttaattttagtcggcatgtaccgcccatactaagacatactttgcattactttaggtgaatagccagattggttctccaagtttcactcatgtctcagtttggtccttaaaattccgatatgtctatcctactactcttttaagtttttatattttagttcaaactctttcttttgaacttacttagtccttgtttggtttgaaaaagattagttcacacctattttatagtgtgaaattacttccctcaattccctctaatccatctctcttagatattaactgaacatgttcttagaaaagctacatagctgggtaaacctaaccaactactgctgtataatcgctttccctctaacccctctctcttagatattaactgaacatgttcttacaaagctacatggatggttgatcaacgacccttataccccttatatatatatatatatacacacacacacacacattgcaattcatgtggtgaaaatgtatgatgagacacccatataactaagttcatgtcagcggtacatccaagtatccaacaataa

SEQ ID NO: 44069 - DNA, 793 bp, Oryza sativa
cattggtaaaagattgccatcatcgagtttggtcattacataaagatgctctaattttctaattgtgttagctacaacgatccatagaaacattatcattgatatgggtacgcttgaaaaatgtcaattgtcattggattatttttttacccgttgcaatgcacggggcatttttactagtatataataaaagaacgaaaatatgtctcaccacatcccgttcatgctttctttcctcgtgatctcatttttttctttatctttatctttacatacatatttaaaatatttgtagtgtttctattattcgtcactgtctagcgtacatcgacggttttcgtgtttctgcattggcgccctagcagcacgtgcgagcttgattgcttccaaaccaaaattcaccgcttccacgtcgacggtcaatcatcccatgtgtcagaatccaataggctccacacgcatcacatccgatttgccttcccatgccaagcaattttgtgaatctaccatttaaacgatgtcaaaggatcgccaactcgtgaattaggaaataacaaagtcactaatataacaaatatacaatagtaacaagcctcataatccatatgacaagtggacccataataattagaaaatctaaattaataattaattaaagtaggtccattatgcacccgtggattttatatatatatatatatatatatatatatatatatatatatatatatatatatatatatatatatatatatatatatatatatatatatatatatacacacacacatgg

SEQ ID NO: 44070 - DNA, 2823 bp, Oryza sativa
ccttcctgcagaaaaatcggacatgcagacatacagtaagccaacaaaaaatccaggacaacacgtagaaccaatcggagcatcaaaaagtcagagattcgctgccgttcgaagaaggaaaatttagtccaatcaaattaagaatccacaagcgctgacgcactaacagggggtgtttaaatccagggtgaaaagttttggcgtgtcatattgaatttacggatacacatttaaagtattaaatgtagtctaataattccgtatgtaaagtgcaagacgaatttattaagcctaattaatccgtcattagcaaatgtttactatagtaccacattgtcaaatcataaagcaattaggcttaaaaaattcgcctcgcaaattagttgtaatatgtgcaattagttattttttagcctatatttaatacttcatgtatgtgttcaaacattcgacgtgacaaggtgaaaaattttagggagggatctaaacagggctaggtgaaaaaaaataaaagtggattctctgaactcaagaaagattcctgtagagtactccctccatttctaagtgcttgtttaagccgtgtttagttccaaagtttttcttcaaacctttaacttttccatcacattaaaacttttctacacacacaaaactctaattttttcgtcacatcgttccaatttcaaccaaacttccaatttcggtgttaactaaacatagccttagttcccaactttttcttcaaacttccaacttttccatcacatcaaaacttttctatacacataaacttctaacttttttattcaaactttcaattttagcgtggaactaaacacagcctaaatatttgacaccgttgactttttatcacatgtttgatcgttcgttttatttaaaaaattttgtgaaatatacaaaactatatgtatacatataagtatatttaataatgaatcaaatgataggaaaagaattaataatttcttaaatttttttaacaagacgaacgataaaatatatttaaaaaaatcaacggcattaaaaatattaaatttttagaaacggtgggagtattggtgttggtggctgtatggatgaaaacggatcggatacggacggaaactagctttatcatattcgttttcatatttttttcggaatcggaatcggaatcgaaaactcggatacggaaatgaaatcgaatattatcgaatacagatacggagcgaatacgagacggaacgaatacggtagcggatatttatcggtatataaaaaacccctcaaattgagtttcttgatcaaggaagagatatcgcttattattttagttcaacatctccaacatttatatcgtcaattttgtagacggtcccataaccctatgtgaaaatcgattttcatggctattcctcttacagatacatatgcaaatatgattatcattttctattttcaagaccttttactagatgtataacttacttaccattgtataaattggagaagttatttattttacttcacatcttcaaaacttgtaatgtttgttttatactttaaatgctttcaaatacaaatgttataaactacaaagtggtagatcccgttgagctctacaactttgatatggaacacatctccatcagatgtcgtttgaattgtagatctgagattttgtaaaaattaatatggtatattataatgaatatttagactccttaaatgacctcaaataataaaatagtcaataagaaagttgtagatctcatcgagctctacaatgttgatataaagtttgtcgccatctgattccatatgaaaaagttatgtatatatacatgttttttctaaactttgctcaatgtctgcggatatctgaaaaaaaatccggatagtttttccgaccgttttctgattccgacggatagtacccttactgtattcgttttcgtttccgagaaaaaaaaatccgaattcgtttccgaatccgagaatttccggatagttccgacggaaactatccgaatccgaaaaatggtccggacggacggaaactatccgaaccactttcacccctagctggctgtgcttgctccagatctgcaccatgcgacacagctcccagccgcttgatgccctccttcctgcccacgacagcaaactttgcaactgcgctcatcacatgctccgctcatctacagataaaaaactattcagagatcatcagcacaagatggtttcgtggtgtagttggttatcacgtcagtctaacacactgaaggtctccggttcgaacccgggcgaagccaagttaactttttttttccttctttttatcttcagattcaaatcaaccactgaattcaaactttcgttggaattcaaactttcgttgtttttcctccgaactcactgaattcaaagtaactcactatttttattattttttttatcttcagattcaaatcaaccactgaattcaaactttcgttttttcccccgaactcactgaattcaaagtaactcactatttttcttcttttttctcttcttttttttaatcttcggattcaaatcaaccagtgaattcaaattttctttttttccctccgaactcactgaattcaaagtaactcactaattttcttctttggattcagactagctaactgctgaattcaatcttctgttttttccctccgaattcactgaattcaatgtaactcattattttcttcttcgttctttttatcttcagattcaaatcaaccactgaattcaaactttcgttgtttttcctcgggctgcaggaat

SEQ ID NO: 44071 - DNA, 903 bp, Oryza sativa
tatataagaaagttttaatataatgaaaaagttaaatatgcgaacacggcccaaatttataggttctatatccgatatctcttccacaggctttattttcctttttatacacatactactacctcagcggcgtttatgagttctgattttctttttttgttgaactggatcgatggaaattctgaactttgtacatttgtgtgtgtagttggtgtgctaaaattttttcaagtatacggacacacatttgaagtattaaacgtagactaataacaaaacaaattacagattccgcttgtaaactgcgagacgaatctattaagcctaattaatccatcatttgcaaatgtttactgtagcaccacattgttaaatcatggcgtaattagactcaaaagatttgtctcgcaatttacatacaaactgtacagttggtttttttgtctacatttaatgctccatgcatgtgtccaaatatttgatgtgacggtaaagttggaagtttgaagaaaatatcttgaattgtagtactacgttttgtgttctgttttctgggctcccgatgcattgaataagtgaaaaaatggggttgcaaagctgaagctaaaaccttgtaatcccttgtagaaattaggatatatatttttttgtcggggaaaagttaggatatctaggaagaggactatttttcgaggggatagggaagaggacactgcacacattcttttccccctcttaagttcatacgacttgtgacagtgaacttaggctgtgttcaggaggtgagttgggagctcacctcctgcgcacgtaaaacagagcaacacattttcttttgattaattaagtatttacctttttaaaaaatagtttaatatgattttttaaaagcgggctgcagga

SEQ ID NO: 44072 - DNA, 699 bp, Oryza sativa
tgcttgggactatgcaatctctactttcaagccgtatacgtccccttcctttttcttttcaacaaaacgataagaagtcaggcaggccgttgtcgcctttgacaatggtcaccgtttcgtgctcacacaagtcttgtaaatgcagtctctttcttttccctagctagtattttctccgtttcacaatttaagtcattctagtatttctcacatttatattaatattaataaatctaaatagatatatatgtctatatttattaacatcaatataaatgtggaaaataatagaatgacttacattatgaaacgggggagtattgaataagcgatcatcttctcacatgcagctaccctcaccctctcacaagcaagaagacaggactgcttttgccgttttcccctttggcggcagcccagctcgcctacgcaatttccctcgacctggccgcttcgccaccatacacttgcctcgtgttcgtggcactgtacgtagcagcattgcgacttgttgtacttgtacacgaccgagagaggtcggttcagtttaaccggtgcccctccgcgtcttcgggcacacaacgatcccaacaccaaccgtcgatggaagcatgccgggacagaaacacgttggtcacatcaggtgtgaggatgcaaccgtacaagctgcaaaaaaaagaaataacaaatgctgcgccc

SEQ ID NO: 44073 - DNA, 754 bp, Oryza sativa
ccgatggtcgattatatgagtgttttttaattaatagaatgccacatagcgacttagaagtgtttataggagtgctaggagcaatcatatgtatgatttagatgctatgatcattttaagatcgtttatttatcttttaaatttaaaatatcatttatttacaaaagcatcaagatcaattcgtatatgtaaatagcccccacgtgtatgttgtgagaaattaataaagtttttttatgaagaaattaattaagttggtagaaagtcattagatgtctaacaatgtacttttaatgggttagtttcattaaaaaataagctagcatattttgattttcaatgacaaattttaatattttcttttatttagtggagcactcaagatggatgtaggtctagaatgcaataaatccaatatagatgttaaaattatatatttatttgaaaaataaaaatagatatataatttatggtacaaataattgtaaagactcgtaaaattaatccggcctttattaaaaagtctaaaatagcacgtttaagtataaattagttaatatatttctttgttagtttaatgcgtacagaatgtaacggtataaactttataaactttatttaaatagtgtatgatttgaaaataatgctccacataaaggtttcacgtatacctttatttaatgggtaaaaatatagtggtgtaaactttattttggaaagaaatatatcataatataatcatataagttatgat

SEQ ID NO: 44074 - DNA, 2007 bp, Oryza sativa
attcctgcagccctctagtttttttttattggtatgtatgagatggataaaaaataaacttattttggagatagtactttgataaattttggactttctaacgtcacatagagtgttgtacccaagaaaaaaaaagtcaattttattaacccaaaatcgcaacaaaaacaattccaaatttccagaaaagtttggaagtccaactcccaaaactgcaaaatactgttcgaaaacagtagaaaatactgttcaaaatttctatttatatattactactatagtagctgtagcaatcaatctcgttcgttcgctaccaatcggacggttaaaaatatcacaaagttgaagtactgtgcgcctctgacggttttgtcaccatcagaggatctcattccacaggtgcgagcatggtgatgcgcggtgtgtagccatgtgcgcaagttgtcgtcatggtatgtatgtgctaggtagcatttatggataacatattgaaaattttggtattaatagtgtcgtctctacagctgtgcaaaaaggaatgtccagtaaaaagttaaataccacgatggaaaattaaacactatcggagtgaaactcccaaattcaccaaaagtataggactccacctcccaatcaaaacccttcgtcaatatctccccgcctctcaactcctcaaaattgaaattttaatttacactacaacagtcacccacatctcaatcgggtggcaaccctcatctgtgtcgggtatgacgcccgtcacgacgtaaaggtcactgatgtgagactctatcgaggataaggctgtcacagataaagttatctttgtcgggcctaaactaaagtccgtcaccgataggtttcacctagacgaccagtcaaacaaaacccgtcaccgatgacctaatctcaatggaccacaattaatgcccatcacggatgactacaatcccaattgggcttaaactaaaggccgtcacagatgcctcaactcaatcgggttttaacttatgcccatcacagaggaggtcatccctattgggtttaagttaaagcccatcatcgatgagtatttccccaaagaaaaattaattctgtttttttgctagcctcagacctttgctagtcatgctcactgtaaaatgacagaaacaaatatatttcacaatatcccatgatccgtgacaggctcgatttttatgcacatctagcatgtatgtgcgagtatatctttgtcggtctcttttttcggcccgtttaagatgacttcgttgtgacggcccacaaaaccctggcatgtgaggggcatcacagatgagaggatctgtactaataacaagtcttgaaccaaatatttaattcctctctttttccttcaaagaatttttccttaaaaattttctaattgcaaatacgtccggaaatccttcattgaactcctagttttcacgttttcaaaaacatcaaattggtatttaaacctcagcataagtactcaaaatccgttcaaacaatttctctctctctcattcacgccttggcccggcctgctattttcccttttcattttcctttggaataagttcacttgaggtcccttagcttgtcaacgaatccaattttcatccttcaaccataagaccagttataatggatccctcaaccattaaagccggtgcaaactagattcctcggcggttttgatggtggttttggctgacgtggtgcatacgtggccggtttgacttggtcctcgtcctacgtggctggtttgacttggtcctcatcctacgtggccggtttgacttggtcctcgtcctacgtgacagtgatgtggcactagaaccaaaaattaaaaatttggaaaatatggggcccacatgtaggtcccacccttctctctatccaaggaggacggcatgtcgacgcctccttctcctctcttcctccgtcccgaaaatcctccatttctccttgagctccctcgccgactgatgagggcacgtg

SEQ ID NO: 44075 - DNA, 3077 bp, Oryza sativa
  unsure (1)..(3077): unsure at all n locations
tgcattaaacatatgtgttttgatgtgagcttaacacgcaacagaaatatctgtcctgcgtgtgacctttttcacctgtggttgggtcggcaggaggaaccaagaagaggcaagggccggcgccggcagcagataaaacagaggcttgcaagcatgtgttattgatggattgttgtggttttttctgactttgtttaccgtacataaggttaaggttgggaacttcacctttccgttcacaaaagaagcgatccagtaacgcgtgattaattactccctccgtcccacattgaacgcatttttaagtttctatgtcaatcatttgaccatccgtcttatttatttaaaaaatttatgaaaaaatttaaaaaatagtcacgcataaaatactattcatattttatcatctaataacaataaaaatactaatcatattttttttaaaataagacgtatagtcaaacgttatataaaaagctgaaaaatgtattctttatgggatggagggagtaagcattagctaaaataaagttaaataatagataactatgattttctttaaagcaactttcctatacgtgaggttgatagggcatgtactgtctgtgaagtgactatacgttgagataacggaaagagagttgtcatgccacttgggaaaatcgctagggattggccaaaatgactttgtggcgtggagacagggttctgaatactaccactgtccggttattagatttggatagaagttcaagtctaaaatgttgaatttgtaccaattggtaaccatctagttgttgcacaaaagtgttgtagattaaagtttgaatttatatcctctcgccggtaatagggatgtaaactatactcctccggtttcatatttcttcacgttttggacagtgacacggttttcaaaatatgtctttacccttatttttctgttataatatatacaatatataaatatatgtttatttttattatagaaatttgaaagacaaattcatatatggttttcttgttcttttaaactaaatacttttaaagttattgatagttaaagttacacaagtttaactttaacctccaaaacatcgaattatagaaccggagggagtatcatttttacggagacaattcttggaccatcgtgaattttcatatttatcaatgttaagtatatagttccgagttccgactgcaacatgatggcaaaattagaaaaaaaaaatcaaattttatatatgactaggaaattcaaatattagatatgagtaaaacataaatggtcaaaaatggtgtcacctttacggaaacgacctaattgatccactggacaatggtttgttattggtcactcctctgggtagattattttttttaaccactgtaatttcttcatttcctttctgtgtgtgcgtttgaatgatgaccaattttgacccaaaaaactcaaatcaactcgaaattgaagaaaacaagaaattatagaaagataataacccacatatatactgtatctgccgagagccgacgagtatctgaatcttccactacaacgctacacctgttacaacttgtgttgagcagcgagctaggtattgtccttttctgattaacatacaaattttaacttgatttataatagaattgttaaacgatgcattttgtttaaaaaatataatagaactgtcaaacaatgcattttgtttacaaaaattatatatattaagttactttaaaataacaaataaatctattctctaaattcatatagtaatcgaaatttaatttattttgtgtggagtaatagctagtatcttttttttaattaactacatcttcatttccatcttcctttaaaccaaggccacttgagtgcgctgacaaaagtgacaagcagatgaaattaaaacagcccattaattcgtccatcaatttgttaggaagaaaacaaacataaacaacagcncaggatgggatgcgatctccgtgatcgctcagtgtcgctagcgtacacaactcgataactcattagaaacaaaacgcttcccccctcttgcagcatggcactacaagtcgtatgtgtattttaggtttgacactccatggagatccatcgacagacagattctctattaattcttccctggtttcaagttttcaaccccccggacctatgggccgaagtctcattggttacccatataatccctaagaaatcaaagcgatttattaggaaataaaaattaatttatagttaaaactcttatacagttattcgtgacgatttagaagccaacgctaaaaagaatgacgtcaaaagtttcttaaaataaactttaaaatttaaattttagacttttgctttgacttactccctctgaccgtaaatatttgacaccatttgacttttttaaacatgtttgaccattcgccttattaaaaaaattaagtaattattaattcttttcctatcatttgattcattgttaaatatacttttatgtatacatatagttttacatatttcactgaataagactaacggtcaaacgtattaaaaaaaaaaatcaacggcgtcaaatatttagtgacggagagagtattaggtaaaccgatggtgcggcgcgggaggtgacactgcatactcctggtacgcaacgcaactcgatcggatatgggaaggacgagacggactggggaggggaccccggcctcaatgggggcacatattctcgtacggtcgaacgcaacaaacgcgacgcgacaaaaagaaaaaaaaaaaaccccaacgtgccgtgccgtccccgcgcacgcacgcagtagctaggcacaacagctgcttccgtccgtcgtcgggaggctggagacggggacggcgactaccgctgcgactgcgtacgtgagagtgtagcaaacatccacccatccatccatcgatgcatggagacacggccccctcccgttgcgttgcgtgccgacgtcgtaggttcgtggagggtacgatgatcatctgattggtcaatgcatgtgtgtgatcatgcatatcatggttggttaattcggtttgg

SEQ ID NO: 44076 - DNA, 2068 bp, Oryza sativa
aaaattaattttcataggtgggtctcttaacatacccgcatgaaaaaatgagcctatttttacaaacggcgtacctaccaccagctcaccaccaccctaaaatatcaaatttcctctctccactcctcactctctccccactcctcccttatcctctcctctcttctcatctcctctcctctcttcctacgacgtatggctccgacagtccacggcgggagcgacagcggactaggcgggaggagctcgaagggggaggtgcatgtcgacggcgacaacggtgggccctcctccactctcctctgatagcggttgccctccctcgtgcgaatctgcaggttgcagaggggcagtggaggcgtagggaggggcgacggcgatgagctgcggggactcagcgacgacgatgtcgacaattggtggcggattttggcaaccacgttgccggcaaaaaacccatgcacattcttcgctggcgtatgagctagggtttcgagttttgatttttttgggggcatttttatttttttttcagatttttatttttatagatagacggcataagcacccgcatgcgtatgcgagtgcgcctacatggaaaaatagcaattttcgcagatactttcgaacatcggacggttcaaccgcaaacaaaaataggttttgaccgtataaaaattgattttcgtagtagtgtactgtgccaaaggagggtgagcctgcagtggcagtggcggtgactgagggggaacagggtactatgggtgagaggagtggggaaattaagcccttaatgagttgacggttcaaccggtcaaccaatttaatatggtccttgatgtatcttttgctggttcagaataaaaactagcagtaatgtgtatctcgctgccgacctttattgatcgagaactagcagcaattaacatcggtttaattagacggtgcagtgatgatgcttctacaggaaccacaagtgatttgatttggcggtatacatcttttattcattttgtatatatactagctagtgatatgagactattaaatgtatacaactgtcagcaagcactggggaattaaaaggaaacaaactgttcctggctaactcgatcaagcgtgtcactcgtttcaacaagcttcaaaatttcctattcccgttcgattatatttgttcccttccttcgatccggtgacgacgacgacgacgacgacggacaacgacacccccagatgagacggtcaaaacggggcaacccaaccccaggccgtgccatgccggccgggggccggagacagcttcgctttcgttgaatttttcagcccccggtcgccgccccaaaacaaatcacacacacacaaaaataactctatctaaggcatctagctctagtagctagctacccctatcatcatcatcttcttcttcctctcgatcgccatcacctcccggttgcgtacgcgaccggcgacccgtctcccggccggtgtcgtgagctgaccctctaagcaaccaagctaccgacgacatcgtacaaacgaacgaaagaacgagcgagcgaacgaacaatcttctttcccatcatcggccggccggccaatcagccagccacatgtctggcccgactggccggccgaccgacctgccacggttttattattattcagctcgatcacgacggcgatttgctcgtcgccgcctcgatcgagctcgctataactgctccaacatcgcaagcaactgacgccgatcgatcgatcgacctggtcggctacggctagctgcagcggcggcgtccttccatcgttttcgatctcttagctcgatcttaattttgatgttaatttaatttaatatgcatatgcatgtgtcattaagtgatgtgggtacatgttgggggatgtggatgaataattaaggagtatgtgaagtgtgtgtgtgtgcgtgtatgtatggacagaatcacttgccatttgctgcaagtaacctagctcgatgattttggttggttggttcatgtgctgttttgctgcgtcgtcggccgtgggccatgcacacatgtacact

SEQ ID NO: 44077 - DNA, 1694 bp, Oryza sativa
attcctgcagcccaaaggacattttactagctagtcaagtaaattaagggtgtgtttggttgggtggatgggactggatgggagatggccgcctgattttttggggtgtttggttggaggacggggtggatatggcggcccagaataaggaatattctctcaatatgctggatgaagggatccggttcttttggccggatgaagccatccaccttctataggacgctgattagtgcttgattagtgagtttattagagtatgattaacggtattagcatgttttgctattaattagtagttagcatggcaagattagtgtcaacaagtgttaattccaacctgtaagtgtataactaagtaatattatgccaattaagatattataattagttaattaatctcatccgatgcatcctcatcctgtcaaccaaacaaaaagttggctcatcccatccatacaaccaaacacaaaacttgtatatcctcatccttaaaaacatggatggacatatcccatccaaccttgcccttcaaccaaacataccctaaaacgaacagaggtagtcaagcggcctttgcgaaacagaaatagttctgaagtgttttcagcatcagagttaaacaaacgcatgggccaaatcgcaaatggggacgaccgtctagatgaaatccagatagaattaagcttgattccatttcgaaactcggccggtcgtaccacggagaatcaatcttgcaagctagctagtttgaaaacaaatacagattaattaaattagacctataatcatctgtagctagctagatgctcgatcgattgagtgtcgcaaaacgcaatatcagaaaaaggggcaccttttacacacacgcaccctgggcttcctttttctttgagcattttaatgatatgaatttcaactttgctcgtcaacgttccaccaaaacgacacgttgctgtcagccttttcgcgacctttctcccttctcgcggtaacgtgcgccgcggtgctttgacaaaaacaccatatatttttatataagtatatatatatatatgcatatctatctctgtatacatattatatatattcacttccattacacacatagaacctatatatttattcatatataccgagacaaacaaaataaacatataaattgctatgtaccgataccaaaaagattttgtctctaactatgcacttggacaaatggtggagccaccgcttcgggaccccagcatgggtctgggcccaatgaatatgaagtggaatttttcatattattatttaaattgaaaataaatagaattttcatgataattagatttgttctggccttgctccggcactacacctgcatgcatagtactaaggtgctgcctagaaaaatatatttttccagacggaaccttaagcggtccgtctgagaagatagatattcctaagtggatggccacagagctcgacattctatgttgcaggaccggtggtggcgaagtttttgtctgcctggaaaaaaggtagtaagtttttcgtctagaaaaatgattttcccagcagtgtgcttgtgcagctgcataagctagaaatgaaatctttcgtggagtaatatatagattgtgagacagagagaccttttcgctattgggatgacggcaaaagcttcgggaggagtggaagccacactg

SEQ ID NO: 44078 - DNA, 2245 bp, Oryza sativa
tcctgcagccccaagctgctaattattgccaacttatcagtaccactagtactatactgtccttttgcgttgctttcttttagtttaatttcagaccatattaattggttcatgtgattaatgggcttgccatgttagcaaaataattataggctgtattctttcatgagtgatctgggtgattgtgagtgagtttgtttcgttttctgcgcacacgcttcctaaactattaaacggtgtgttttttttcaaaaaatttctataggaaagttgctttaaaaaattatattaatccatttttaaaatttaaaatagttaatagtcaattaatcatgtgctaatgactcacctcgttttacgtatcttttcaatctcccctatctcctctcctcaaacacagccatagtcaagttgcctgcctttttgtgattagtttttcaaactggttgctgtgcgcctctgtttgtgatatgggggccacaggtggtgtgtgtacgtgagatcactttgagtctttgacagggaaattaattaattaattataattgcatgcaatgttgcaaatgtgccctagcctgtgatgtgatgcaaccctttgcttttgctaattgcttgtcatgcacggcaggctaacctgaaattaactgccatgccatgcaacatgacaatatgccctgtgtcatgtgcttcttcactatttgtatttcgtacagtggttggggtcgggagatttcgtgagcttaattccaacctccgatttgttcttccataactgctacatgtacgctgcataaaatagacggaatcccaaacatactgtagaagtgttcatgtaaagtgttctcctagttaatattgattttttattgttacaattttaaccactaattaattatttggcaccgggatgatatcctcgacatgattgtagaagtgttcaggtgtgtaaagtacttcggctgtgtttagtttggttgtgtttagttcagcgcaaagtttagattttggttgaaattggagatgatatgactgaaaagttgtgtgtgtatgaaaggttgatgtgatggaaaaagttggaagtttggatccaatgtttagatctaaacacagccttccttggttttcaaataattaatattattaaattttatttgtttcaactttggctaatatttgttgttaaataattagactataattattaaaagtttcatgcttatataaggatgatataccctttaacaatatgttgtattttttttgtatttgcaaatatatattttgcaaaaaaaaaaagacaagtggtcaaagcgtgaaaatgaatagtacttgtccgttattaaagaaagcgagggaattaatagtaaatatatatttaaattttctactttgtggaaatacagttaataataataataataataataataataataataataataataataataataataataataataataataataataataataataataataataataataataataaggtctgtgcttccgtgtaaaatcgtgtaaaaggagtgcccacgaacgcaacacaatgtcgcactggtctgtcagaaattaagcatcttcaaagaatcacatttgggatggcattgtacctcccaaggactgtaggacgtacttgctatgactaatgtgattctttcctcgcaaaagaatgtgtggttcttgtccccatgtacacctatgcgcacaagaatcacaagtcatagtgaagttattcatatctcattttaagcgcagccataaagtttcgcgtacaactttaatcgtccgcctaatttaatttttttaaaaaaaaataaaaaaacataagtcacacatgaattatcattcatattttatcatctaataataaaaaaatactaataaaaaaaattcaaataagacagatcattaaagctgaacatgaacatgtaaactcattgttgcgtttaagggcccctttgaatcaaatgatttatataggaattttataggattcaaatactataggaaatttttctatttggccctttgattcaaaggattgaagctttccaaatcctatgaaattcctatagaatggcacattacatgtggattttagagtaaatttagcaagagctccaacctcttagaaaatttcctttgagtctatatctctcatccgaatcctgtgtttttcctacgctccaatcaaacgatcattcctgtgtttttcctgtgttttg

SEQ ID NO: 44079 - DNA, 1705 bp, Oryza sativa
taagatgtggtgaacttttttgcatttttgaagaaattaaaccatctcttgtaaattccatgtatttataagttgcttgatggatccataaacttatttgctctgcgacgcaaggaagcgcccaccacaccatgacagatgattaattgaggcaatgcctctaaggacattagagagattagggagtgatttcttttggcatggtgaggaagaaacaaaaagaaaagaaagaaaatgggtgggttgaacataggggaatatgtgtagttgcaagttgtgtttccatggatcacctctttggcataagttaaaagtaatgagttatgcaaatcttaaaacgtgtggaattgtgtaaggttataatgggttatattgggttgttgtgtgttgtagatatggtggctagagtatttatttctttatttgatggaaaatatggtgccgaaacttgagactgagattcggctttagttttgtgaatgtgcagatttaaaatggtcttccaggtttggttgtttgagagaaaattgttgtacaaacttggtcataaaaaacgatctggcactattgttgagaaatagtgattcatctatttgtgtgaggaatatcaagatatttaaggtctggtgattttttgtaattttaaataaactaggaaggtagcccgcgcgaatgcgcgggcatgaccgtaagtttgagacacttataatagcgaaatattaaccggagaacatctaccacgatttctccgtaaattgtttttgtcagcattaacttcttctataattttctaacctcctgctttatattatatcatatttaagtaatatctataagcaattatttgtaatcttcttcgtcatttgaaaagaaggtaaacttattttctttagaaaatatgtcaatgaaaagtaagtactaaggtattattctttttttaattgaatatatattatcatggttcattcgagaatgaattgggtgggacataaagctccacttaaagtatggatgtatatagcttaatatgactaatgtagtttgagacactaaaacaaaacatcaaatagatgccggcactatataggtgccgaaaatgttaaaaccggcacctatatagattttcccacctctgcggggtgaaaaaaaaagaaaaccagcaccttttataactataggtgccggttctaaataaaaccgacacttatactacaagtgtcgggtttttttaaatgtgatgtaccatgaatacacacttgttttttcttatataagatagatctaacggttagaaataatgtttccaccaatttaaaaggcataggattattccgaaaatgtagcttaaaaattatggttgttttaattccaacattacgaagtgaacatagctcaactggttaggttccttgtggtggaacttgtccactcgggttcatgtcccagatttgacaaattctttcagtggtaggcgatgtggccgttgatagcgaggcgtagtggtaatttcgtcaatctcaaaatatgtcagactagtctcttggaagtactcataggggtagtgtgcacacattgtgagcgcctgcatttgtactttgtttctaaaaaaaatatcaaacaatatttattgtttctcttttaattaaatagataaaacaatagagaaccacagtgttgtgtacatcttagtgtgaggagaaggtgg

SEQ ID NO: 44080 - DNA, 838 bp, Oryza sativa
cttaatggacttttagtctctaacgttacctattgtatgtcgatccgatttgtcgtgatgtatttaagactataacataacttgtatacaccgttagtttatataattaaatgaatacaatggatcatatattgggtgtataattaaaaataatttaaaagatgatgtttacagaccattgatttatttgatatttgatatttatattatagatctagcttacatgcatatacttcagtgtattatgtagtattatattttatttttattttatattatacaaaatcctattctaaaccgtcgttttttccacctgtacaaagtatgcattttttgggggtatatcattttttatcatatatagatgtctattttttttcttccggccaacagtaccagttgcatagtttatttggaggaaaaattatcacatttttaataatccaccaatctaaacacaaatcgacagtgagattagatcgtgccatgtggtggccttggagtgtttgtaagagagccacgtggctgtttgagagcatttgtagaaagtttagtagacttttaatctatatatgggctctgaactaataggattaagcgtaattaactcactaaggatgaaattccgctttttaaataacgtttatgatgttaggccattcatcttctttaaaatcgatacggtttttttcttaggagggtatcgaagcacatctcacattagagaaatgttttaattcggtgaatagtatgagtacgtatgtacacaggatttgttttagctatttcccaggtgaacagtactactatgtatttatacgtacacacgataatttat

SEQ ID NO: 44081 - DNA, 647 bp, Oryza sativa
  unsure (1)..(647): unsure at all n locations
tcaaatttaaaactaagttttaaattaagttttgtcagtgatggtcgagtgtggatttatgtttacttcgttggaagcgcaggtcgcatggctaattttcctccgttgattcgtccctcatccaaatatacttctctttctaagtaaaattatttgtcatcttaaggccatgcacaaagttagagacgggtatgagctctacgctatctagagagactaacgtcatacaacagttgaagacaatatggtctctaccattaataaatgctaagagtcgactctgaaccgtagacctgcataacaaccatatttctctttcctcctttctctttcttctatactatcaaatttactttacttgcatgataatagagagaccactaataaacactgttgtacatgccctaagcagaaaaaatatgctatatggtcataaatatttgacagttacaacgagattcaattaaactttcaaaattcagtccaaaaattatggatagccggaattttaaaagttcaattgaatcatatcctgaacgtaaaatatgtatgaccgaaggaagtaatttttttgggtcgtaaaatggcccanaatcacaaattttagcatgaatctttctttaaagtccccaaaaagattaatctct

SEQ ID NO: 44082 - DNA, 1837 bp, Oryza sativa
ccctttcccctctttctccatggcttgatatctaccattcgtacaaaaggggaagggggaatgggagatcggaggattgtagtggtggtcatcacttgcacaccgttgcaagttcatgtccattgctttgtgcccccctctctctctcttcgccatcacacaggtgcatgcacacatgtggcaccttgcacatcatcatcgttcatcgtcatcagagagatcatgcagtaattgtggccacaaactatttggaaccaaataaatttgtataatacttggtgtaatttctgaaggggatcggaattggtgtgttaaaaggctcaaataaacggcaggcaagagtgaccaagtgtccccctcttgagtgagaattaaaggtggtagcaaatcacctcaagaagaaaatgaaggtacatgcgtatctacatgtggttttccttgccaccaacagagatttggatccgatagagatatgtccaggctatctcttaggataactagatgaaaagaaaggctagctagctagcgggtaaaagaattaccacttcagtccatgaaatattaattgccagtgtgattagttatataagtagtgacccagtcacaaaaaaataataataatagaactaccctagtatatggaatgggaaataacctagtgcaaacgaatctgggcagaagatgagacataatcctagtacaacgaattaggacacatcttctatctaacttcgttgtactagattatatctcattccatactgggttaggttttttttagagacggaggaagtatggattatagatatacagggttgacatcaatcgagatcagtagggtttaggttacacacggtgagaaattgtcggagttcaaacgatagattagtctaactatgatgaggtgatgtgaccctgtaattaatgtaagactgatattagtaatgatcaatctctggtatagtagtatatattgcatcattactaaggattcgattttttcgtgcggtcaaaatacattttcccgtacgaaggtcctgcccgtctgcaaccaggtgcctgcgaaaatcaacatccacacaggataatacattaatgtctagaccaaaccaccactttgtttagtttaggttttgatttattgggcttagacttttaaactgactttttcttttatggtttataaaccggtgacatttaatccttcaagtttacgggtgtggtcccaactaattaactcagttaagtaaaaaaaagctaattaaatctaacattcgacactacagtgcaggaatgacttctggaatttttttaataaaaaacaactggaaaacaatctatttgtttagtccagtagtcctctacttttttgttcataagagcaaaaaaaaaagggccatagtttataaattttggatggagtggatcaaatttgaatggaggggaaatcaaacttggacttatcggtatatatacgtacgtaacaatctatgccaataagtctaggtatatttcttaattttttccatagaggaagtgtaactttcggcttctttaccaactagatgtacacacagctgctacaccactaagcttgaaaaaattattaccttaatatcggcaaaaataaaaataaaataaaattatcacatcactagcaataataaaagggtaaaaacatacaaccccattatatatcgaactaggagttgattgatcatccacacaggcctgaccattactaaaaacaagatatgttaaaatatttatgtttgttgcaacgcccataagaaaatatcaaatccagggttttcatcttagggtctcatgtgttgaa

SEQ ID NO: 44083 - DNA, 4213 bp, Oryza sativa
cggagggccgcccggcgaggcggcggctggcggccgcgcgccggcggggtgcggcaggcagccggccggcgcgtcgcgcggtgagtctgcagcctgcggcggtggccggcgcgagggcggcggggcgcggagggccggccggcgaggcggcggatttttttttttaagaatttgagattgttgtgtgatgtatttgattggatctgattgttgtgtgatgtatttgatttgtgtgtgatgtgaatatttgataattttgtagaagttgtgatgtaattttttttttgagattttgtgatgtatttgagtatttgagatgatcgattgtggatttggaagcaatttgaaaatgattgatttgtgattttggggatgggattgatttgtgattttgattaaaaacaatgaagaaaataaaataataaagagcaaccggatctagtctttttagtaccaaccgggactaaagataaagcatctttagtcccggttgttaacaccaaccgggactaaaaatggatttttactcccggttttttcacccgggactaaagatagcgatctttagtcccggattcatagtcccggttggaaaaccgggactacaggagggttacgatctgggagtaaaaaccctttctccaccagtgagaagagttaccacagctccaagaccacaccatagaacaacctcgtcactggttatgatcatcctgtatccaaccagcaaatgcatgccataccgttaactgttgggatttcactgggatcgaacgactcaatcaacaaacacgactacgagagaactagaacgaagaagcatggaataataggaagcaaaatttctgacaagaggcaaaactttgcttcgttctagttcacgcgtgtattgattgagtcgatatgcctcatctcactgatatgatcgtacttaaaaggaaccttaagcgatagggccaattctataatggaaaaacgaacccggtagtaatttcttcttggcagaatgacttttactctaagaccaagttcccttggggtaagaggagcattcttgaattgaactatcctctactaatattactaacataggatattgggaaaagaacctatttatttagggaagtaaggtaggtagtttgcaacgttatatacaaagccaagggaaatagagtcctgggttctaccattatcgagaaataaaacaatgatttccatatcatttcatgaaaaagattcttttgttgacccgttgtctgaataaagaaattgtatatcatgcggatctaggaagtcaattctttaggagagccaagccaaaaattagaaaataaagggtttaagtcttttgccttcttcttcaaggaccaacgaggatctaatccagccaactccatactaagctcaaaagtctatggagcagataaatgattaaaaatccttcccttcctgacacttgccgcatctgtcccttctcgagaataattattacgtgtagtagcgatcagtggttcacgctagagctatttcttttagaaaagcttgatccgtctttgactcgcttttgctcaagaaggctcttccttctagttccttgccaaactccacttgtaagtaactctcccttgaaccgaacgaactttacgagaattagttgttatctatgatgtctttttacacctatgctgcaacaagacctacattttacttgaagtgtgctcactgattgaagagctttgcttcctaaaatataatgcattcctaattggttgatccggtgaaatcccaacaccaacctggtccagtaaacgactaggaatgcatgcattcatcctcatcctaatctattaatttcatgcaatttaattatgggaagtgtccaaggtctttcaagagtctctcattatggtatctaaaacaagctgggtttctagcccgtcatctgataatcatcactaatcgcgtgccagtaccaacttggtgctctatcatcagctcatcacaacacacataaatatcaacttattacttggtgcttctcctaatcaaagatcaaaggaggcttcatcaagatgtggtgcaatattgtgctgatcactaattaatatgcgccgccggggtgtttccagtgggtgttacttaatcatatcacatttcttttggcttgccatatgctcaagtgcgcattgcaacttgaagtagcttgattgacagtttgtccctcggcatgctttaatttaatttcgcctcctaattctaattaagaccatggatatttagctgcaagagtgatccttccattgttcttccttttctttcactttatgaattaaacttaattccagtggctaaactatctagttagattgagcactagatatccctctactagggttgtgtttgaggagaagagatagagaagattgggaagatacgcaaaacgaggtgagccattagcgtatgattaattgagtattaattattttaaactttaaaaatggattaatatgattttttaaagtaactttcttatagaaattttttacaaaaaatgcaccgtttagtagttcgggaagcgtgcgcgcgaaatatgaaacaaactcactcccgttctccaaacgaacgcagcctagatctctaggtgcatgcctagcttatctcatatgcatggatccttccttttcgtggtcctttggatgtaaataagttcttagatactttcagcgtccatatgaccaaaaaaaaaaaacaaaagataattctgatggtgtgtaatattcatgcaaataaatgcaagtgcccattagtgtacaccatgttagattttgttccagccatttgttaagttagtagaaacttgtgaaagcaaggaaggaattaattagaggggatcgaatctttctcttgctagcttttgctcgagtgacacacgaatattctggaacagaaagagagaataaacttaactgcgactgttgcatctcagcatctgtgtgatcgatgatgcagtaactttctaggaagctaactagaatatatatatatatatgccatggaactgtcagtataaagttttgaattcagaaattctctggtcaattctttatttgtgtaggggtgttagtgctgtacatatagtggctgtgcatgtttgtagcaagtcgtgttcttagcttttgagatcgatcgaatcatgaaactgattaacaattttgatcgagaattagtatcttgattattcctgagtgtcagctgccattcaaacatgtagtatatgttgggttgccttttctttttttttttttccggttgagaaattctcgaccatcaattggtatctaggaagtcccttgaccatccatatgtcagcaggaataaaacttgaagcatctctcactgtttatgaagcttttggcatgcatgaaatactctctgcttttttattattactttgactttttgagactatatgagtggtttatgacagttgccagtctccaatttttttttcattcctaaagaattttatgcatgcatgctatgtttaaactttaaatgtcgtaatttaagaacttaagaaaattatgacagttcatgtgtcaacgtactgaacttgtccgctgtacagctttcaaaatgttattcccggtcaacgtacagttcatgtcaacgtactgatcctctatatatgttctaaaagaaaactaattagattacaaaaatcttcccggcacgaaaattatcgatatatggtacgtagagctgtcctcgaatcctcaataaaagtaccttttcaaattttcgcaaaagaaaatccttttcaaaaacattatacaggtttgtaatatctcccacatgaactgacgcaacataccgatccatgatattttaaaggaataagttcatctgaggcctcttaacttgtcaatgaatccgattttcatcctttaacctgaaaaccagatacaacgggtccctcaactgtcaaaacaggtgcaacatagatcacacggcagttttagcttacgtggctaattaaattgacccggtctttatctgacgtggcattgacatggcaatttggtttggacattaataaaaatagtgaccccacatgtcagttacaccaaaagaattaattaaaaaatggtggggcccacataggcctcacatgtcattctcacccctcctcttcttcctccactctccccat

SEQ ID NO: 44084 - DNA, 3176 bp, Oryza sativa
attcctgcagccctaggtgagggttggatgaggatgctaggtcccgatcttccaatagttattgataactctcgatttagtggaaacttgacacacacaatgcggcttccgatcaacacaatctgaactctgcaatcgtagcaccacgtctcctctagttatcaaccgtccactgctcggttgacctcgccgagaaggctaatccctgcatgtgaatcaaataacacaagtaagaacaagatagattgcaacacaattgtgtatgaatgattaagcactcgaatttgaggttccacaaaccaatctagcaacgaaattgcaatggcataaataatctaagcaaaacctgactctaaactatgacggctgctgaataaatatgatttgagacgtccttgggttgccctagagcgcgcatccccttgggctaagccacgacataattacaaagcccacaacccaaatcatatttggactggatgaggtacgtgacttgttttgcagattcccgatatcttggtgggaattttgacgtgggaccaaaaccatatgaaagtagactccaataaactttccaacaagtgctcatgggccctaaaattccttttagattagcggctaggtccgtttgaaattgatgctgtcatgaggcctgaatccgaatccaaaacgtgtagaactttatctcttgtcttctatggaccaaaagtggcgtggtgaggtagaagtagacttggagaatgtcttagtttggtccccaatcaacttctttgatcatccttgcattccttatgctcggtttcttttccttcacccaagcaagtacctctgcaaacgaaaagatacaaaactcatggtgtagtaacatttgttcaaatatataataagtaaatctaagatagaacatatgcacctttagttgatgaatacataagttagacatggtcatatccgagctagttgtgtcctcatcagggggattcggcaggctgcaggcggagcaaaggggcgagcgagatccgcgagatccctcccctcctcctccggctgctaccgcgagatccacgagatccggctgcatgccgtacatcaccgtcccatgccactgatctgttcttggggcggtggggagtggtgagtttgtggtcgtttcttgcggcgtggtgaggtgtggggagaaagagagattgcacatatccatggcgcggtcccgcttctcggaggcgagggaggatgacaaagatgagttctttgactcgagggaggtcatgtcgccaacgtccatctcttctccggcgagctccgggcgccatgacaacgacgggttgcgctatgacggacccatgtttgaggtgtgggccaccacccagcgctactgccgctgacgccctccccttctcttgtgtcgtcggccgctggacctccccgtggcgcatggagagagaagaggggagagagatgaagagagggcagatgggaagagaggaggaagaagaggagggtgtgagaatgacatgtgtggcccatgtgggccccactattttttaataattcttttggtgtaactgacatgtggagtcattgtttttattactccctccgtattttcatgtatgacgccattgacttttcgaccagtgtttgaccatttgttttattcaaaatttttgtgcaaatatgaaagtatttatatcatgcttaaagaacatttgatgatgagttgagtcacaataaaataaatgataattgtataaattttttgaataagacgaatggtcaaacgttggataaaaagtcaacggcgtcatacattaaaatatggaggtagtaattttcaagtcaaattgccacgtcaataccacatcaataccaagcagatgaaaaccgggtcaatttagccacgtaggctaaaaccctcgtccaaaccgtcatgggacctatattgctccggttttgacattagagggacccgttgtatatggttttttggttaaaggacgaaaattagattcgttgacaagttaagggacctcacatgaacttattcttattttaaatgccaatttgcattgaatataaataagagagaattaatatggggcctccattgtaaaattcgctcacgaaataaaatagatggcccattcaattcattagctctagagtctagacaggccgagctgccaagaaggacagttggatcaaggatcacgcaaccaagcccatttaatatgttcccattttctttcactttacatggttaagatgaaaaacatttacggtgagtttgttgagaaaatataaattgtgtacactctcccaaaaagaatgccaatcctattattcaaattttgtaaagggaaacaactatagagtattactttttcccccaaccagcacctattcaaatttctcctcatgttcctccgaccaatctcctactctcagcaatctctcattgtattctttttgtaatagagggagtaaggttttcatacataaattttgctagttttttcacacgtaattttgaaagctgattaaagaaaaaaatctcagattattcaccagattattgaaataaattatttcatccatgcttaaaaaatacgttgtctaaaaaaaggttcttctgctgcagtgcttagactacttgttttaaactatttattaattttatttctcaaaatatttaacttatctttataactaaatcaaatagataatttgcgaaaataatccagacagtaatctaaatcaaacttggcccaaacctatgtgaatcacaaatatactcgcactagtttgcacaaattgttttcttaagttctttctagagggatttggctatttagcatctgagtgaaacttggagaatagcatattgcttgacatgtttgcaaccttaaagccctatatgtaggagcatcaattcagatgttaagggaagtatcttctggctctacatttgttactgcatatataatgcaaggagtttcttcgtcataagttctcttccaacaatctattgttctaataggctgaactgccattgacaggtaggcccaggaaaattttccggcccagtagggcccatatgttatttgtctctctttgtaagcaaaacacagatctttgtagcaagcaaagctgtattcctctcctgggagattctg

SEQ ID NO: 44085 - DNA, 662 bp, Oryza sativa
tgatataatataaatctaataggttaaaatattattaaagaataaattaatgctgacaaaaataatttatggagaaatcgtggcagatgttctcctgttaatacgtcgcttttataaatacctcaaacttggcgtacgactcatgcacgcgggggctaccttcctagttatactaatagttttacacatctaataaaatcattgcgtacgccctccctccacccaccgtactccaccatctccattggtggtttggcgccttatgctcgggtcacgtgaatagtggaatgtaccatcatatcaattaatcgtctcattggactatatcatctctacttcgtttatcaaccaatcaacaaaaaccatagcgttgtcatctccggagcaaaggggaattagagaattaagcaagcattctgtagaagagagtttgacgagaaaaaaaaagttttagtaattaactccgcagcagcgcggtgcatttggccatcctttaatttcagactcttatctactcgacttgtcgaaccatcgatatgttggagcaatctctgataactgaccaatatttttagagtcatatgctcttgctaatagaatgctctaaagctatctatctaaaatttttcaccccaaacgacaaaaaaatacacctgcagaga

SEQ ID NO: 44086 - DNA, 2912 bp, Oryza sativa
ttcctgcagcccgctaagttagtatcggccggtagccaaatccatactactccttccgtcccaaaatatagcagcaacctaggatatggtgctgctatattttgggacggagggagtattaattagtcagtggtgaacctagaaaaaaatatcgggggtccaatgtgtactaattatctaattttttacttatatactaattaacatcatataatttaattagaatttgaataatttacccaggctcaaaagaccccgggaaaatgtacatatactagctaggcgtcctgaagttaagtacacctagagttttgttttggtactttattcaacttaatttgcaaagcatgcatgcatgaaatttgagctgcattcagcagagttggaaaaaaaatgcctgacataatgtttcttggttttagctggcatccaatacgaattattcgattcgtttgaccaggaagcactgagagctactagtagagtatgaaattatagtgcccaccagagaataagtacgatttgagcagcttgagagaattaaatttcccatattcgggccatctgttccgacatactaaagccctaaaatccacgtgcttcaatatatatttgcaccacgcatatgcaacagatgttcattattaatagtgacacgcatattcatcattgaccatgcagtgtcactattaattactccctccgtattttagtgtatgacgccgttgactttttgaccaacgtttgacccttcatttcattcaaattttttgtgtaaatatgaaaatatttatgtcatgcttaaaaaatatttgatgatgaataaagtcacaataaaataaataataattacataaatgttttgaataagacgaatggtcaaacgttgaataaaaagtcaacagcgtcatacattaaaatatggaggtagtactacacaagaggcgatccctgaggtagtactatacaagaggcgatccctttcggtccgtaacttgcatatccctgtccaattctcaaactgacaaccatactactttctccgtcccaaaatgtaagcatttttgaggttggcacgggtattaagaaagtaggtgagaatgattaaagaaggtgcgtgattggttgaaaagagaaagtaggtgaaaaagaatggttgtgattggttgagaggagaaggtaggtagaaaaatagcttcattttaggacaaagtactgtgctagaaatagctacattttaggacagaggtagtagttggtttctaaactggcagctgtacggacaaccattgctctttgacgtgaaccaatgacatataggccggccatgtcagtcatttaaagttaagagggcattaagatggtgtttggatccacggaataaattttagtcctgttacatcacatcggatgtttgacactaattaaaagtattaaacgtatactaaatgacaaaacccattttataaccttggactaattcgcgagatgaatctattgagcctaattaatccatgattaccctatgtgatgctacagtaaatatgtgctaattatggattaattatgcttaaaatttttttctcgcgaattagctcttatttatgcaactagttttattattagtctacgtttaatacttctaattagcgtcaaacattcgatgtgacaggaattaaaatttagtccctgaatccatatatgtaagggtaggattgtctttcgatattagtgataggtaccgtattggttgttcttcggtatgggttaagtcatcctcacatctattacattatttgcatgattttttccacacatttacgttttgtgcctaaaaacttgatcgattaaagcatatactctctccatcccaaatataataacctaaaatcgaatggaacatttcctagtactacgtctgtctagattcgtactacttggaaatgtcaatgtcacatccggtactagattcttatattttataggacgaagggagtaagtgattgcatcggttaaaatatgactgaatcttgctttggctgggtcgccttgctgctagtgccgccggctgccctgttagttgccgaagcccttgccgctgcccatgtacctgccacgaaaggggaattggggagttagggtttttagccacaaacaagtcaacattttaacccacgtaaacacaattaaatgcacgcgatctttgttctttcttttccctactgtgatctaaatattgattgagtcagtcgttgttttcctactaccgattagatcgagccggcaatcctcttaaaaaaaatactcccattcgttcctaaatacttgacaccattgacttatttaaacatgtttgatcatttgtcttattcaaaaaaatttaagtaattattaattcttttcctatcatttattcatggaaaaagtacgaattaccccccgaactatcgcggtcgaccgaattacccactgaaccacaaaaccagacattcttcacccgtaactacgcaaaccggacaaataacccgccccctcccccccccgccctcaaaccatggtggttttgtcctacgtggcagtccagtcaataattcatttataaaaaaataggtggaccccacctttaagtttcttaccctctctctctactctctcagaggacaacagcgcaggtaactgagcgacggaggggagtcaaggactccggcggcaggggcagaggagcatggcggcggaggaggcgaggtggcagcggaggagcgcggcgaggcgaggtggcggcagcaaggtgaggcgaggcgaggcaaggcgagcacaacggtgaaggaggcgagtgctgcggcggaggagcgcgacagcggaggaggcgtggcgaggcgaggagagcgcccagcggaggaggcgagcacagc

SEQ ID NO: 44087 - DNA, 6316 bp, Oryza sativa
cgtgcacagggtgctccacgagccgctcttccccatcgagtggacaccaccgccgtccacgacgtcgccatcggcacccgtctctgctacgcccgcctcaccgacgcttccgcctcttcgccatggccgctgtcgtgcgggtcgacctccctttccctatcccctccacctccccgctcgccgatcgctggaccgccatcctcgcacgctgctgcccacctttacctctgctgccggcgccgcctcgcctcctcctccgctctgtgacggccgcttgagcaacctccacctccgccgccttcaaccgtgctggtgagaggagggagaagagagagagatagagagagagagagtgagagagattggggagagagagagatagataggtgtgggaactgacaggtgggccctacttatttttttaaaaaaatattgactggactgccacgtaggacaaaaccaccatggtttgaggccggggcagggagggggttatttgttcggcttgcgtagttgggggtgaagaatgtgtccggttttgttgttcacaggggtaatttggcagaccgcgatagttcggaggggggtaattcgtaccttttcctttattcaatgttaaatatagttttatgtatacatatagttttacatatttcacaaatttttttaataagacgaacggtcaaacatatttaaaaaagtcaacggcgtcaaatatttagggacggagggagtacttatattttacgagttaattactccactaccatcggtttcaataattttattccatacctcgtcctcctataattaaccatttcattgccatcagttacaataattttattccatacctcaccctcttttaatcaacttctgtctctatatatctatctcatgtgttaatggtaaacactgatgatggtgcgcccaggccatgcgcgcgcgtatctgaacggatagaagattactcctgatcttctgctgcttaacgtcgctagtgcgtgttaatttggaactttggatggtcgtcgtacctaggagcaaatgaaaagctctgctggtcaagttcgtgcagagaaataaaccggccagttgaatattatattatacattattggcagtttacgtcaggatatatgtgcgttctagctagttagcacaatgctgctaatctagtatgacgaaatggggtatctcttcaggcacgttctatgttctagttggtgtcaatcagtgaaggaatgcatgcatattcatgaccgatcgccggccaaaaaaaaagtagggcactggccccgatgcaaaataaatagagaacatatatttacaaaaatactgagaacaaaaaaataagttatagtgatggcgttctacctaaatcggataaagatttttttgaagaataaatttcattggtggcatatgaccttgataggtggatgcaatctggtacgcaaatttgcaaaatgcttgtttcaacgcacggacttgtctaatgcttgcgaaagaagagcaaaatgggaggctgtgactaataatgctgacttaagagtccacttagaatgacatgtgcataataaaagggtcatcaggtataccacatgtgtggatagtctgatctagttggtatttattttttattccactgttttcaattcattgtatcattcatctatgctacaaattatttgtttgtataatcaacatcccttactataaatttgattgagtacatgcatatctagatgacatcatcctgatatatgtgcctgcatggcatcctaataaaatattcaattaagtaggattaaccatggtatgcttctttggctgggttcacatgcaccacacaagttcatgcattttgcaagtttgtgtatcaaattacatccacctcagagtaccgtcagtgcaatttactctccttttaaggaaggttggaaaaaaatatatcttgatgtagtgatatgaattttattaagcagaaaatggaacacatgagctatagcctttcgagatggtcatgattatcatcgaacacttattggaacataatgaaactagtttagacagttcaataaaagaataagattgaagatttttaaaattagaatcccgtttggatgcaataatactggttaggtatcggtacatatgaggtatcatgttctaattcctattggtataaggtgatacccatgcataggtatcagtcgataccccataagtacaatatgttgatacccgttgataccatcagaacttatagatatcaatgcaatactgattgataccatatctgagctgacgtcaggggttgtgcgtgacgatggcaagtcgggtccgagtggcccgaggggaagagcaattgggagacaaagagcatattggtgatggtgaggagctcctcgacaccttggaggagcaggaccacctccatccactattagaaaaataatttattgccataaaaaaaatcgtagtatcaatgctaaaattattgcaatagatacatgttgccacaatcttaaaatcgttgctagccatggtaataaatagcatggtaataggttattgcaatgatttttatttagttgtaataaattttgttattgccataaaatgtatgtggcaaaaaatatatattacaacacttcacatcgttgcaataaataactattgccaccactccatgtgtgacattagttctacgtaccaaattaaatgtttcaatattaatttatcatcctaattattttcttttgatatcttgtcatggctaggattcgaacccaagatttctccctcacgcgcgctcttcatgaccaactcacctaagcatcaattttgtttaaaaatgtatataattccatttgagactgcttaactgagatttgaatcatgaatttgagtatttaaaagatttcaaatgaaaaatttaagttgtagatctcatcgagaggtataaatttcatataaaatttgtcctaatccgtatccatacgaaaataataagctaaattatgagatgataaattttttatcgcaacgaatttgttgatatggcaatagaaaatagtgaaagtaccatgtactatgcaaattgccacaaaaattaaatttgtggggatagaacatgttcagttttgaaaataaacagaaataaggtctttaaacatattagaacacacattagtatggaataaaatattaaatgttggacccctaattttgggaagccttgttcggtcgtccattttgcacacccggcccttatcggcggctctgcattcaagctgacaagttaattatgtttagcatcatgcacttgcaacatgggaagtcaagcccgataaaataaattaacacgagaagttatgccaaccatttcaatttgtgcaacatatatatggtggtgtagtcatgccaactatttcagtttcaaaacggttctaatgggaacatgggaagttcaggggaaaaagctggtggcgtacgtatatacagtgtacagtgcatatagcacccgtcaaattttgcaatttctcatatatatgtactttatctgtctagctatggtctatggtgtatatatgtgttttcatttttttgctgaagttgtttaggaatttggatcattgagccagacgagcagcctctgcctaactaatcagggttgtgcatcagctggttggctggttcaataatactctacttcaaagagagaagttacgtggagtctctaacaaaaatctcataggatttctacagcttacgtggaatattatcccagcactacactgtacaaataacaccaaacatgtgacgacccatatgtaccagcgacatttttctcaccgtcgcctattttcatacagggcggaaactaaaagctgacacatataacaccttattagtgttggttcatacaaaaccgatattaatagcagcgataatgtatttctcttttagtggaattacattatttataaatgttttttaaaaaatatttataaatagtatacgtgtaagaaatcttagttgcttttatctattaagatagttgatggttgaaataggtccttaacgaccgtcaacagcataattgagcccgtttgatgctgtttttactgtctcatcaaagtcctgtctatgttggtactacaacctgcacagatacggttatacagtgctgctgaccgggtaatgcacgtacggttggaaatccggtactggtagggccttcagaaccagcactgatttgggtgcctatagtagggctaattgtatttgaacagtattaatatgcggtctttttggatatgcatatatatatatacatatatatatatatatatttgttcgaatactccatctgatcaagaaatcatgtcgatcggttcttaacaagcttaagacacagtttaaaatagattattgtgcggattgttgctacggtctacgaatgatattctacttgattacaaagaaaaaataaatactttgataaataaacttaaaaaataactgaaacaagtgatctaaccaatacaatagaaaatgttttcttaagcgtctagtaaataatctgtttcagtaattcacttcacatctatcaaatttaaaggacaattactcatttgaccctattttccaacttaagtatcaaattgacccttttttttaaagtttgctcatttgaccatgtttttttaattcgaagttaccgcctaacccttctttcactacaccgtgagtatttcacttagaaaaaacaacaaaaaaacatgtatttacaagcccaactaacaaaaatgcccctaatacatcaatctatcctctaccttcattcttatcctctctctctctctcaccagagcgctgcggaggagcggcggctcggcgacgaagcggccctccgctggcggcggctacgggggagcggcggctcaattacgaggagggccgccgctggtggcggcggagcggttgtggcggctgcggaggggtggcgtcgtctcggcgacggtggcgttggctcggcaacaaggaggaccgccggtgggggctcggtgaataggaggatcgcccggtggcggctcggcggtagctgcggaggggtgacgttggctcatcgacgaggagaacggtcggcggcaacggcggcggcagcggtggctcggctacgaggaggactgccagcacccgcacgcggcacgcatctacagctctacgcacgctatgagcttgtcctgtgataaactaattttgggagaataaggtcaaataatcaagggtagaagtggtattttgggattttgttaacaccgtctaatgcccttaactgaagagggttagagtgtagcttcagtttttaaaagtagggtcaaatgagcaaagtgacaaaaacagggtggtagttagacctcaaaatagggtcaaatgtgctattgcccttaaatttaaagccattgtgttaccgttcacaatgcacctacatatatatctcaatgtatatgcaagcatgcacattgatgccaacatgcaacccagcaccttgagatattcatacatctccagtactagctaccagagatatcagataggacctctcctgagtgccaagtgcatgaatgacatggcatggtgcatcatccatatccaggcagagataagtccaagtggcaagagatcgatggcaaagcataataatccaccagcaaaccgtaccctaattggtttacatcatgtgcacaagcaacaggagccacataattgaggctgcctgccatggatgcagtaaagggatcagcagtttggtgacgacacaaacacacaatctaatataaagcccccccattatttgatcatgacataacctctttcctggcgaaaagaaaaaggaaaaaaaatatatctctgccttttggagagagactgatctctacacacctggtgcaatatgatacatcacctgtggactgcccaataattaatgcatggtgtctctcctttgaccaataattataaggatatgacatagagattagcaccagatattcataacaacaaactaaagaaagcttaatgcatgcatgagattaattattttccttctttagttatatatatgacgatggtatgtgattatccttatcaagaacacatatgatatatatcatcataaagctgcatgcagtgcggcgcctaattagggggacaaaagatggccaagatgatttcagcatgggtggtgagctgtcgaccccatggccatcaacacctaaagaggagcctgtgaattcttccaaaa

SEQ ID NO: 44088 - DNA, 2011 bp, Oryza sativa
tcacatcgagcgtgttgaatgctacaagtaatgaacctctgatcacgtgctattctctgtaggccatgcaatagcttttacaaaaagcggggaatatagctcatgctttaatttgtaacacttcatctgttacttttgggtgtactctttctttctttctttctttcttttttcttgtcttatttttttttacaaatgaagtataacttacagtctctgcattggatttacacaaccatatttgcaatattagaaccctaactgatagagttatacacttgcaactttacgactacattaaaggtgcattttgtatgtttcataggttattttttttgaaatgtacaacataatttaggtctattttgttcaacaagaacacaacatattttcgatggtgttgctaatttatatgtatttgttttttatatacaagtttccatgttgtgcaagaggatacatacaaattttcatatttttgaaagttctaatgagataaagtaattgttaacattgtatgtctataagggtattttgggttttttttaaaaaaaatccaacctatggaaatatttaagaataattgataaagtcaccggtataatagatatatagacaatatcagtgaaaaattatagaactgtgacaaattcagtggtatggagtagattctctgtaacaccctaggtattctcctacctagtatgctacacactacggaacaaaaaacactaagtcctaaattcattaagaattttgacagtctcccctgtaaatatggacatttaaggctggcagttatatattaaactattaataatattattcccacagtgcgatcgatccatataatccattaaaagaaacttatagttatctaaaagattattataagaccaaactaggatatagttcaagtgttattatggacctaagtaatatagtttgatagtgtgcatatagatctgtatataattaagggtgctacttcccgcccatgcatgccgatatcaatgtgtacctaaaaccaaataaacacaagagtgagtacgaaaatactcagcaaatacaatatggaactagaaaacacatgtacacatcattggcaatagagcataaacataaagctttctttctttgataagaaacacattttcaaacaccaaatcaaagaaaatagtagttcccatgtgggcaaacatgaattgacatagtagtttccatcccagataattgtgaatacattctagcatttgccagcaaagctgagtaagcgtgatcaacgattacccataagaacatgaataaaaccagatagcacatccatggctcgcatggaacatgaacaagaacatgaataaaaccatatttcacatccatggcaagcatggaaattgaattatttaaccaaagctagaattcggaatattgaaacaagaatggcgttaacaatattctgaacataaacagtcacatatcatctagaaatatatcagaaataaataggtagagcaatcaatccatgaatcatacaattagttcgttatgcacttgcctccaatgaagggttggtatcatgcacgatccgaaggaccaccacctaatcacaaacaaaacctcagcaaacacattcaaatatgactataataaattaagtggcacactccttcagctctatcccaacctcaagccaaacagtaaacaccactcccatctataaacaacactgttacttcactattaattaactttaacacaacaaacaaatacattttaggaaactacagaatgagacctacaacttccatgtagaaaccatatttttattttgccatttaaaaggcctaatgtgcacatcaaaacaagcttcagaatctgcccacgaattcagactgtccacactaaaacaaccataactggagttctactcgcccaatcagggtgtactttaccaatatggaaaactaagaaaaaacttctacaactttatctataggcagcctgactgatt

SEQ ID NO: 44089 - DNA, 2373 bp, Oryza sativa
tcctccaattggcgaaatacaaagacacagaaaaactgacagtgccccgaactaacaatccaaaacactgcacctaaacccatcctctaaccctccaaaaatgatgaattaaaacaataaaacaacctacaaccactactataggagaggtaagcctcacctagggtttgcttggagaacttgtgagaatatgatgggaacaccaacccaccactcctcctgctccccacattttcctcgatctgtttttccaatcagattcttgataagggctatggttcttagagatccatggagtagggttaacaggggagaaaagaataggtgagttccatgcatgggtgccaagggaaaggtgtggcggcctccgttggatgcaccagcagcggcggcgcagaagcggagatgcggacgaatatcatctagtatacttatatagttcatccttactaagtagtgtagttaatactatttctctcttctctcatgaagccatatcacccgaattatttctaacctctggatgatagatctatagtacaattatcttttctttcttctcgcataaaaccattcaatctcaattattttgaggcttaaaattcataaataccaattacataatatatattcaccttgcactatatttgcaaccatgtgcaaattatataaaatacatgaggtcattttgttttggttttaaatgatcatattgcaccttaccttatttgtacatattatgcaacataatttcccacagcaacacgacgggtattcatccagtattacaaacgattggtcccatttgatgaaacatcacattttcactacacatgttctttctcccacccacttaaggacttgaatttgtcctctaattctagttgactctcatcatggtaaaaagaccatggtgtattgcaacagttatggcatatgaagtagcataggtcaacacatatgttcataattgttgccttgttgaaccggtttgctacaaaaggggtttgaggaatttgtgaaaaaaattgacaataaatcttaggaaataaattgcagattaaatacgatgtatagagaacaatctccagacttacatattcatggtttgttgtgtacctaccgttgaccgtaagcatcttgtgatgaggacacaactagcttggatatgaccatgactaacttatgtattcatcaactaaaggtgcatatgttctatgttagatttacttattatatatttgaacaaacattacgacaccatgagttttgtattttttcgtttgcagaggtaattgcttgtgtgaaggaaaagaaaccgagcgtaaggaatgcatggatgatcaaataagttgattggggatgaaaacaagaccttctccaagtctacttctacctcaccatgccacttttggataatagaagataagagataaagttctgtacgttttggattcggattcgggcctcccgacagcatgaaatttaaatggacctagccgctgatctagaaggaatttcggggtccataagtacttgttgaaaaaattttgtagtctactttcatatggtttaggtcccacgtcaaaattccctccgagctattgggaatctgcaaaacaagcaacgtacttcacacaatctgatttgggttttgggccttgtaattgtgtcgtaggctaagcccaagggggtgtgcaccctagggcaaccctaggatatcccaaatcatatttattcagtagccgtcatagtttagatttgggttttgcttagattatttgccattgcagtttcactgttagataggtttgtggaaccccaaattcgagtgcttaatcatttatgtgcaattgtgttgtaatctatcttgttcttacttgtgttcttcgattcgcatgcaagcattagtcttatcggcgaggtcaaccggacagtgcacggttgataaccagaggagatgtggtactgcgattgcaggattcgaatctcattgatcggaagctggatcgtgtgtgtcaagtttccaacaaattgagagttatcaatacctatcggaagatcatgacctagtttcctcatcagttggtatcagagcgccaaattgaccgttaggtactttatctatagccataaccagaaaattgccacacaaaaatattgcatccattacctagccaatttgagccgttgcattgttctattagtttttgtgttgttgaattttaaattgcatcgtcgtgtcgagtgccggtttagttttaggtttaatttttagttttgagtattgcatttgttcatcactttgggttagtcacgtctgtcagtttgggtccagtttgtaggatcgaaacataagagggctgcaggaat

SEQ ID NO: 44090 - DNA, 3376 bp, Oryza sativa
aacccggtgaaacacaaatcgaagacaatacgcacacaatacctccatcgtatgccatatggaatcttcaccaaccacatgcatcaactctagccttagtatcccgcatgatatctgatcaccacggacatcgtcttaccaccaagccgactcccggtccatcaccacagatactctcccgagacatcgaatcacctacacatgaaacaaacaaagaaacaatattccgggaccaagctatcccaaacttgactcattagtagcaaataatagtatctcatacgtatagtatccatctagaagccataaccatgaaacaatcatggatatccaaagaaacaacccgaaaccgaaaccgacacagtgtcggccggtcaaaccgcgggcctggccggtctgaccgcacacatagcgccggtctgaccggcaagctccacccggtcggaccgatcacataaaataatagtgaatccgatcatcacctgaaaattgattatttccaaaaccacttcgacgataatctccaaatatcaaaaccaataatcacagatgctaattattcatcacagaataagaatcaaaacacactttgatcttacacagttttgcatctcgtcggttgttgtcgggacctagcatcctcatcatctcatgcacgtaatattcacatagtacaagatgccgagggggttgcttgaaacactgcgaacataataagaacatcggtcgttataaataagtaattattcaaagaatttgtgttcatgtcatatgtcagtaccaaccaaactgtcttggcgtttagcttagtatttgctcctctattgacctttcatatttcaagtaaaacctctgcgcaccggcctgataaaatctttttctcatcctacttaaaaacgtcagaacagccctttggtacggcggggcgggctgggggtggcgctgggggtggtatcttattacttacaaattagtaaggaactctatgtagcttttcttgtgatagtttgtcgggtcaagaggtatggccaagtggtcctttggatatactaaggaataaaatgtagtgtttgctgcaaataagatagatgaattagagacaatatttgctagtaatgatgtattaacgaattgtaactacgtaatcaaatggaagagccactgcttacaaaaagctgtataggagcattaattaagacttttttttgtcatggtgcgagagcattcctcatcccaagtagtataacttgaatgaactggaagtttgtttcatactaggttgtccacggccgagacggcgaatcagatttggtgccaatagacacatctggatctggagcctgcgaggttgtccatgtgtacagtatgcaagctcatccaccagtggcggcgcatccatggcggccttgctcatagcggatgtgagcagatccacttgagctcatccgagacagcggtggcggcagcagatccatggtgaccttgtggggtggttgtggggggtgaggggttgggctcatgtacgatggaagttgttggcggtgagcagagatggagtatgggtgagctagggtttctgggttctagtgttttgtaaaggttctcgagtgaaaatggcaatcgtcttaaggaatcgcatatgaatatgtgatttcccgtaggctgacctccaagagctagcatttgatatataacatctgcacaaccattttgttagaggtggtcagcaccgcgtctctgctaggtcaatttagagttttagacgcatgtaaaattgacaattgtagtagtgtaccgatccagactagccaggatatataaaaagtcaaccatacatacactctaaataacttcgttgctacaaaaggcaacgtccctgatcgaaccaagcttatacacttttattgtgatttggctgaggagaaaaagtcggatttttttcctagcgtgaaaaatggtatttgtaggcccctggagttctatctttttcacaggtagacaaaataatgcctgcaaaaatggctgatgccatctcagggtcacataacacataaaaaatattttcatagatgggtatagcagaaaactgcatgtgagaacaagtatgtttttgttgatggttctcctaaggaattgctcgcaaaaaccatgactttcacctgtggttccttaagaaaactgcccataaaaataggatgattttttgccgatgattgtcgtatgtaagacttaaaaaataatttttctagaggtatctagattcatcatattaggaatattaggatatgtaacattcgatacaaggttggtttacttttaaatgtaggaaagtagtatgtgtttcaaataagttatttagccgtcagcgtggattcgtgcacctctatttccatgcaaccaattaataatgacgctaggcagtccttcctattcgttatagacttaataatgctttcattttttataggttagaatttaccaaaaatgtaaataaaaaccttgactatcttttgttaatctttaccgtaaattatattttgtttattattgttttgaggtatatatatgatatggtgtatcttgctattcgatcaactttgattagaaatacaagacaatattgcagggggcaacttcagggctggtttgcttttttaaaagttttcagtgcgcactctcgatctgtcacactaaactaatctataattaaggtactgaaaggggctgtgattccaagaaaaaagggtggaattcaaaaaggaaaaagaaaaaaggatcgcaaattaagaaagaaaagaatactaagttggcgtcacagatgatagcatgtagcatggatgcctatcctaattgattaacaattgtgcatgatagtgtacaaaggtttacatagcgattaggaacagaaaaccgatgcgacacttcacctagttctttaactgcaaatatctctgcacttcacctttataataggcattcagtttgtgtacacaaaattaagagggcatgcaataggagaaatcgaactatatatatacaaacgaactacagcagaaccacactcactacactggtcaaggtcacctgtgacgggcccaaaccctcacctttgacggttttgggcttggtcagtgatcagtggtcactggtaagtccagtcacctttgacgggtggccggccgtcagtggtgacatccacctctgacgggcaagttaatagaaggccgtcagaggtgttggtctaagctagactagggcttgttaggacccgtcacaggtgtctcatctctgacgagcccctaaataaaggcccgtcagaggtgatgatctccggtatatagtagccgtcacagggtgacccacctgtgacgggccc

SEQ ID NO: 44091 - DNA, 1809 bp, Oryza sativa
tgttaccaaatttcggtagaacaggataatatgttgttgtcagaattcactatgcattatcaatgtttgataacaaactaaatgcatccatatatttgttaattttaccacatggtatggtttaaaatggtactaatctgaataagccttagtgtataaatctttaataactctatttttgtatcctcttcaacttaaagaattgtctttttaagtaatatatttatgagatttctttaatattactttattttctctcgttttaaccatttaacaagcaatattttcttctctttctcatttttttctccatattgatgaagggcatattagtttttttttgttttcttacttaatttaccttttagggacggagggagcaaagaataattacctgggtagaaatggaaaatccatggaaattgaacaaaaacaacaaaagaaaatataggtaaaacttttttcttttgttgtttgcaatgctaaaaaatagacaatgatgaaaatagtccaaaatcaactctaaaattttaaaattcaaaatttggttgtaggtgataagttaacaagtagataatgagattgaaaaatgtttcaatttcaccctccacaactcatttcaatttcccctagtaatgtttttgtaaaaaaaaataatggatgagatccggccttcacttcaacggaacctacaaccaattatacagttttttagcttaaaggcaaataaaaaatagctaccgtaggatgaaaaggaagacaaataaccactccgtcaataaaagaagatatacaactcttgtctggacaataatcatatttaaaaatttccatccaaagttaacgataatctatattaccgtgttctctaaatttgtgcatgcaagatgaatggattccttctccttatcacacctttatagattgcttagaacccaagtcggtatgttgctccgaaaaatacttgtacataatatgtagttggagctttgtcaaaaccatattattcatactaagtcacaaagcttaatttgaagccaatactcctagctattaatataagtttttacacatatataactacggacacaattgctcatgtaatacggtcgttaaaagttaactctagtatcaccctcgaataacagttattatcacaaattaaatttataatagttaatttatcatacgtatcacaaataatgaccacagtttattcgcaggctattcaaccattcgactatggcataagtactgcctccgatccataatataaatatttttagagttgggtataattattaaaaaaataggtagaagtgaataatggagtgttgtgattggttaagtagtgaaggcagataggaaaagtgaatggcgggggttgtgattggttcaaaagaaagtgttggtggagaagttgttatattttagaataaatattaagagttaaaagttgttatattttaaaacggagagagtatctcaaattaactttacataagtaaatgagaatggatcgcgataaacgagaactgagacgaaggcaggcaggcaggtggtggtggtgacattgaatgtactgtatactaccactgactactcggggtcgggggtagctggaggtatccggcatggcggcatcttgacgttgttggaactcgagcaaagccggtcaaacttgtgattctagaaacgacacagcctcctccttgtgtaatggtggagctgagtgtgtactgttactgtggctgtctgcctacctgcaggctgcagctgctccagagaagcagggcccgttagtccatg

SEQ ID NO: 44092 - DNA, 1512 bp, Oryza sativa
attatgtatcaaccatgttgcctcacaataattgtgtcgataagaacatgctttagcgataagtatttgaattcatgtgaccagtcacaactatcatgcactcttaatagcatcactacacactctagcaaactaaataaaatagagtaagtgaattttaaagaaaatatgattgttcaacaggccacaacaataaataaaccttagtcttgttcatacctgattgcatccttggaacatgtttagtttcttgacaaggggcaagaaaaaaatgtggcgacaaaagacgacacagcagcaaatcctcgtgagcaatgccaaattgatccgatagagaccacttgaaagtaatctcgacgctttactgttactacaaataataaagttctccatttcatttgttctcgaatccttgatattaggccatgatttggcctgagttgtttaagtacgcatgtaattgtagctaggagcttatcttgaaggcccatcagtgccataacagtttctgccagccattgatgcaatggccctatgagcagaacaagcatgatcatttttctactccctccatttcatattataagtagttttgacattgtatcgatctaatcagatttgtttaagtttgaccaagtttatagaaaaaaaaatatagcggcatttccaatacaaaacaaatatattcgatattatatttaatggaactaatttggtgttatagatattgctaatgttttttaataaaattggtcaaacttaaagatatttaactgaaaaaagtcaaagcaacttattataatatgaaacaaaaacagagtactaaaaggaaagtactagttgtcttcctaatgccattgaaccagtggtgacactaggaaagacaattagtgctcataatttgatccagaaattaaaccggtcgcatcggtggacaataatcagcgccagtgttcttcctaatattctctcttatgcacgaaatacacactaatggatcaagcattatcctatctgatttttcggtgaaggggatttcgaatctactttccttgcggtgggtaggtagcgaggaggaaggacgaaggagcgcgccgcgcgcgtacgatagacatggggtggggagagacgggctaacctttgccgccgccggcgatgcgatcgccgctcgaacaccacgcgaaagggagggagagaggcagagaccggacggctccgggcgccgccgccggcgggatccatccatctccggcgggaacaaccgcggatcgaggcgccgagcaggggagcagcgagagagaaggcaggaagaaagggaaggaagacgagcaaactcctcgcgaaccgctacagggagatttctttggtaaaaaaaaaaagtaaatttcattttggccatatatttttacccatgttacagcttgggtcaggttttagctgagtttttcaccttggaccacttcatattaccatttgtttcaacctggaccatagccgctcgtcttctccgag

SEQ ID NO: 44093 - DNA, 1258 bp, Oryza sativa
cccctgtgatctaaaaattggtccctaaggaaccccggaagggctgccatccaatgggtacacgaaagtgacgaagttgctttgactactgaaccatgcctagatcgttggagcaaattggatgatcgggccgagggctgccccctaggtccttagttgtcaactttatggacatagaagatgttctgcttcaatttttttttacatttccaaacttaattatatttttgcaatgtcacattcattatgttgattcaatgagatttttgatgtgtacaaatcattacaatatatttctagagtcaactattataccaaatacgaaatgttctgtattccgggtattgaaacttcaggttttgttgctcagtattgaaaattactggttttgatatagtagaaggaaaatctaactacggaatttcaatcataaatttagcccatgtttgtttgaaatagctgggggcgtacacatactcaccgttatttctcgcttaatgttgctgtgaacttgtgaagcttgatggctatattcaaacagaagtaccagatttccagtctacctgatacttgagatcaatggtagattgcttctatccactttactgccataacatggtgctaattctcatcaggaacaccaagatatacattatacagtactgaaactatcatgtcaacaaaaaaagagaaaaacatgtagtatttaaatatcgatctgctgcatctgcactaacagatcaagtaatgcaacaagcaaaagttacttgtaccttgtagaatctggtttggtgcttttgaactcttggtgaagggacaaggaagtctgcggtagtctgaaaatgcaagtgcttaatgtttgctgaaactgtcatttgtagttcagtcttagctcttagggcagcttctttgggccctattaatactccctgaagcttgctctttcattaacaaaagcatgtcagtcttcctaattcctcccctttcttcagataatatacctttgagaatgtaagtagaacatcatcttctttgacaaaaaataataatggaaaatagaacctcataggagaggaatacagctttgcttgctacaaggatcagacttttcattccaaagaataagacacatgtttgagaacatatgggccctgctgggctaaaaaattttcctgggcctacttgtcagttgtcaatgcctgttcataacactcttagaagttagaacattcttagtttattatcggaagagaatttg

SEQ ID NO: 44094 - DNA, 2137 bp, Oryza sativa
aattgctaaaaaaccgtcacagcaaaaaactttgaaatttaactataatattgttgtagtgcaactataatataattacactatagttacattataactgcagtgtaactatactgtaactatatggtaatttttatataagttaaatataaaatcgcatatattattttagtacttatatacaagtattttatagttatagtatagctatagtgaaattatattacaattattggaattatattatggagtagttatgtgcagtttttttagatagtcccatgcccgatggatccaaatcgaaaaaaatactaccataattgaaccataaacttattttaacataaaattatatatcggaatttaagtgaattatgtcctaagtgtaaaaaaataaaaataaagtaaattttatgaaaccccacataacatagttacacaaaatcaccgggattttggcacgtggcacgtaaccttatgtattttcacaaaaccacactattgataaattttgctcttatctatcacactttgagttttacaaactcatctcaaaaccacaacgtgttttgtccatcgtataaatattacatccactttttaaaattttaatatatgagtacatcagaatggttaatgttatggttttgtgaaattttagaaccataatacccaatttgtgttgcatgttaaaatctctatggttttacaacttatgtaacctgtaacctgcatcatgataggtggagttttctgaaatttactcgaaaatttatatcgagcggaactttattttcactactacaatacctattttcctatgtgggcattttgattatctcgtgcagtagtccggcccgtctgcagccgggcgtctgggaaaatcggcatattcacgtgcgggcgacccaacttcacgggataatcgattatctcgtgcggtcgtgttataccgtcctcacggaacaaaaaaaaccaaaaataaaaaagggtgaaaatcgccgccgcccgccggatccgggtgggggcccgcccgctcgccgctgcacaggaagggaggcagtggtcgacgtgcacgacgaggacgacctacaggagtaggtccgccaccgcgcccggctcgccacctcgccagcccgacagaggggaaggggaggagggaaagagagagaggggtagttgagggagaataaaagggaaaaagtaagagagaggatgtgaaaaatttgaagtagatgggagggaaaggagggggtatttttctgtgcggtccacttaaaaagcctgcatgggaaaatcgattttttcgtgcgatcggattaggaggcccgcacggaaaaatcgattttcctatgagggcgatagccccgtgccggttcctttattttcccgtgcggttccacttatgaaccgcatggaaacaaaagggggcggcttccaggaaaatctatcgtgaagtagtgtttactatgtgagctcgatgaccattgctacatggtcccatatgtcagtctcctgtttcctttctctctacctcgcggatttgctcctcgtctttctccgctctctcgccggctagccgctacccggtcgccggcggcggccgccggcggagatggatgctgcgggcggcggcggctctagccgtcgttcaccgggagccatccagtccgcttgtcccccttcagccaacggcgagcgacgatggcggcgaaggttagcctgtgactcctcatctccccctctctcaccttccctccagaccaaccgcagaggaagtggattctgaatccaatctgtgcaaatcagataataaaatgctactagattcatttctgtctacgaatttctcgcaaaagagcgagaaaattgatccccaaaatagatactctgtatagtgactcgatccgatttttatttctggatcaaaccatgagcggccgatgtgccatgccatcgctggctcagtggcattaggaagagaattagtggtagaaaatatcatttcttgtgttgtattgatatatgacctcattatcattatcagtattagtatcagatgagcgttttatcggtttaagtgggtacagtactagctcccttggtaggctcattttgtttgttttccccgcccgtg

SEQ ID NO: 44095 - DNA, 689 bp, Oryza sativa
agtttcttcaaaataaattcatctaatcatctgtgatctctctccctttagggcttgtcaaatcaaccaaaattttatacaccgtcacatcgaatatttgaacacctgcatgaagtattaaatataggcaaaaaaaaaataattgcacatattgcgactaatttgcgagatgaatcttttaagcccaattgctctatgattcgacaatatggtgctacagtaaacatttgctaatgacagattaattaagcttaataaatttatctcgcggtttattgacggattctgtaattagtttttttattagtgcctgaacaccccataagacaccctatataatattcgatgtgacacgctaaaactttacacccctgaatctaaacatcccattatccacctattcccttttttcattattggtttatgtgtaaaactaatcctccggactgataatacctgccattttggataagggtgatgtcgaactttaaaatctttaactatgaataattttcaaaatatttatcttagaaatatgggtaactggatgtgtatatatagattagtcttaaaaacacttcaataaaatcattttttatatttttatatatattataatataaaataatggctaaagttactttttgaagattgtgtccttatccaaaaggataagtaaccagaggcag

SEQ ID NO: 44096 - DNA, 775 bp, Oryza sativa
cttaggatatcgatataactttcgatgaatatatttaatcattactcgcatagcatagccacatatattaggcgtgttcggaaggccaggccacaatcgtggcagcagcagccacatgttagtctgatgcttgcagcactgttgccgttggctacgctacaacgcagccacggttgccgaacatgcccattatcaaaaccatttttgatttaattattttgggtcaacttttattacccaaagttaatatcactttgtgttatgtttttttaatcttttgttgtacttttgactaacgcttttgttttgtatagccagatccaatctctccccggagaagatatgagctttgcctgtaaataggggtgatagttggcataattgtgtggtctttgtaaaattgataaaaaaaactagcccaaagtaaaaaaaattagataaaggatggtccaaaataaaacctaggtaagaaaaggtagaacaaaatggaaatcactcaaaccatatttttagaagcatttactaactaaaattctaatgtctaatgctagtatgtacttaaaagaaaatctttaataaacatttactaactaatatttcaaccgatagattttacggtcttatttaacatgactcaaaattgctaaatttaactttctagtagcatactctaaagtggagtgacttgaatcctgcttcatctctttaattaatcatcacccttttaggtgaggttgaaaccattttgttagccgttagctcttaaacagattaa

SEQ ID NO: 44097 - DNA, 699 bp, Oryza sativa
ccgttatttatgtctgcttttcagaggagatagatatctctctctgtgcgcaggcagaggtgtagcttttgggcgacatggtctcgctagatctttcctgcttttcagttgcatggtaaagagatttgcgtctgaaaagtttctctcttggtgagagaagaaaaaagatgtgtggatggagctaagctagccataggatatatatatatatatatatatatatatatatatatatatatatatatatatatatatatatatgatatatatgtctagacatataatgcatatatgcatgcatgatgggggtgcagtgtgcagtctttggggttgggttgggttgggtttgctttgctttgcttatcatggaggaagggaattgatgccctgcatgaaaatatgcctatgtatgcaggacctccatgtgtgtggtgagaggagagatagattgaggtgtagaagccataattaacagccactagaacaacaatataatgctgagtaatgcgccatgcatatgttggtgacgctaattgcctgcctgattagtttaagacaggctcgctaatgatgtcaaatgcgcgtcatagtatgcatcatggtcatgcatggcatgcccctagtaaagggtgcgtcatgcatggtatgaaaccatggaccagctgctgcacagtgtgtacgggtagaaaagtagagtat

SEQ ID NO: 44098 - DNA, 649 bp, Oryza sativa
aagctaattgacaccaaaatcaagtaaacattaaccaaatagatttattttattttgtgcttcactagaaaaattagccgacaaatctgagcccatgacaaaaaaaaatgtgtagcctttgtaaggctaaacagaaggagagcatagctcttgtactccgcatcattcatccctatgagctacccatgatccatttctacacaaaaaggaatgatcaattgctcattaaccctctaataatatggaaactcatatcaatcactcctccagcaacgcataatccagagaaatacgcactagggcgcatcactcgtagcaaaggcgacaataccatttcctaattcatgattacatctctagagacgaagaacaactcaaagaggatacgtgtcaaaaatcagaaccgcagggggggatcgaagtggggaaaggagagcggacgcaactgttggggacgtgggagatggagacgccggtggcgacgaggtcctcctgggacggccgggcgagctggacgacgtccccgaaggcggtgatggagagcgggccgcggatgccggcggcgcggagcgcggcggtgacgcgcggggcgacgcggccggggttgacgccgttggggaggttgcagttctcgaagtcccaccacacg

SEQ ID NO: 44099 - DNA, 686 bp, Oryza sativa
attgaacacatacgtatactacacacgtcctacaaacgtactcctctcgttgtaaaattaagtttatgtgttagatttttttttattttaaacagaagtaatactcggtactcgcactggttaatgcgtcttgctgtacgtgtaaggggttgtttagatcaggggtgtaaaattttgacgtgtcatatcgggtattatatagagtgttgtatggggtgtttgggcactaataaaaaaactaattacagaattcatcaagtaaaccgcgaaacgaatttattaaacctaattaatccgttattaccaaatatttactgtagtaccacattgtcaaattatgcagaaattaagcttaaaagattcgtctcgcaaattagtcgtaatctgtgcaattagttgtttttatcctatatttaatacttcatgcaggtgttcaaacgttcgatgtgacagggcgtaaaattttagggtgtaatctaaatatggcctaaatgattaacttgtaaacttatttatagatcaaagtagtgggttcgtgatttattttagtctatataaatagattttgtgagtttgccacttactccctctgtttaaaaaataacttaaatcctatagataatttttagatacacgtgtgtctatgtgtgtatagatttgtccctaagattttacttttacttttt

SEQ ID NO: 44100 - DNA, 579 bp, Oryza sativa
atgaactgaatttgaacctccttgacaaataggagagcggaaaaatccttcaatggagtgtggagcatgcattatacattcttcaatccatggtggaactttattaaaaagattgaggtaggaagaatgcatacattgaccttgatggtcgtgctttatagtagttgtacatgccattttgctactctcatatactatactgtagtaagccagagtccttcaatgctccattgatgttcccaactcacatctctcgttctccaagtgcatgcttaccaaactgctatatggtgtgtttttttcttttttaaagaaaagttttatatgaaaattgttttaaaatcatgttaattaattttttttaaaaaagagttaatacttaattaatcatgctttaatgaatcattccattctacgtgcgtgagaaattagcacccaacatcaacctctgaacacagcctaaaggcagtggtggtgtgaaagtgaagcatgcaaagtgggctgtgggcgggctctgcgtttgaaagggggaaggaaggttttgcatggaatttgcaatggcagccggtgagacctttt

SEQ ID NO: 44101 - DNA, 678 bp, Oryza sativa
aactaattttatcagttcgtcgaacgaacggcgacaaatcctgttccagatatgttttggattattaactgtgactcatcagcacaccatgatgtcccatctaattgtcaagctcttatcgccttatacggattaacaaattgagcagcatcttttctgcaatagatagaaaagtgaagctctccccttcacgggactgatcatgatatatacttgttcatgcatttgtcatcgatgttgacatggcaaagacctttcttatggaatgtacacatcattgacctcattttggttgaaactttccgacaaattattgctctgtttaatttcctgcaggagagaaatcagattgtccaacctctccataaagtttccttccatgctgcaactttgaagaaaatttcttgttttctttaattaattagttactccctgccaagaaccgtcagtttcttatcaacaagaggctgttcgttgaatgtgatccgttctaatccatggacgctccgacaaatctcatagaatcaggaaacagattattttatatgtacttctgatggagacagacagggtttactgcagttggtgaagctgaaaattgatcaagttactaccaatctttgtcaactaatatgaaccatagagtgaaaacacatgtgctaatttacatcaactaac

SEQ ID NO: 44102 - DNA, 681 bp, Oryza sativa
ctagtttttttttttttgtttaggatggaatattgtttcatggaggaggaggagaaatcaggggagcggcggttacgggtcacgggattgggttgttcgactcgaggttacgggttgctactgcgggattgggttgttcgagtggaggtgtggggtctcgcttcgattcgcttctccgtccatttgatcgggggagagaaaaatttttcaaaatcggtcgaatcacgagtccctgtctccaattgcggtgttacggggtgatgatagggatcgatttttggtcgtttcctccttgggttcttcctaacactacagattcgattggtctggagtaggtttcaactttcgtcagccacaaactgtttgtccgcgagcacggcgtcattgaattggcgaaataaatcgatcaatcaatcaatcagcgttggtccctgaccagtccgtcctcgtgtccaatgaaaagcttccgatggatggatggattggttggaaaatctcattacgatagctctggagtgcttcattagtttcattatattgtccttttggatttgtggacatacactctaatgtaggttatcgtaaacatgaatgaatgccgattagcttgctcccttggtggtgttcccctcttgtgctttcgctgtaaccagcgattgccggttgccttcggtaggtaga

SEQ ID NO: 44103 - DNA, 654 bp, Oryza sativa
  unsure (1)..(654): unsure at all n locations
taggtcatagttagtggtgccacatggaaccatgtatatataataagattaaaatgtcagatatcacgtgtatcacgatggtgtagtgctgtgctgtgctggcatggcgcttgattagggggccactgcccctatcgttaaccccactgccctggatagttgtgtccataagacgacgtgattttttgtccaaacactgtacaagcatactggtgtgctactccgttccaaaaaaaaaaaaataaaccctagctacgaatctggacacgtatatgtctaggtttgtagcttggattgggtttttttggacggagggggtaggtgtttatataaactggcaagatcgatggaggcggcgcgttgggcggtccaccggcctaaaccggatctggccgcctccgccctggtgcggaaggggggaaggctagtggaaggagctggatgaggcgccgaaggaggagttggccagcagtgttgggggagcccgacaggatgacggagttaattggagggggtggtcaagccggtcctaagccgaatttagccgcctccatcttggttctggaagaagaaggccgacgaaagtggagttggggagttgaggagttggaggtgcangtggccgggaggttggccggaggggcacaacaggtg

SEQ ID NO: 44104 - DNA, 648 bp, Oryza sativa
tgctgtttttcttcctactactttaaaaacgtagtcgtcttcctttcaactctttattgtacgtaggatggctttttactactttaaaaacatagtcatcctccttttgactccttatcgtgcataggatggtggtttttactactttatgatgtcgcctagaggggtgaatagacgatttttaaaataaatgtggaagctaaaacaaaacagggtcggattgtctgatatcaggtcggatagtcctatgtgatcggattgtctgaaatgagatcagactatctgacctgcacaacaacaaaaacaaacaagaaacaacctaaaagctctagatccaatccacacgtaaggaggtgagctcaaccaacaacaatattagcatggcacaaagcaatgcaacaagaaggtaaagagagataggatatcactgaggtttacgcgacgatgtatttcccggagttcaaatccttgaggggattctagtctccgttgaggggctcgcaaagagccgggtctttttcaaccctatcctcgtgaggttgcacaaatgcactcctccttccactaagggtatctctttccttgcggaggcgagatccggccttcacaaacttctcttggccaaccacacgtagatcggtggcccaa

SEQ ID NO: 44105 - DNA, 738 bp, Oryza sativa
attcctgcagcccaggccgccttcgggcgcgccccgcggctgccaggtggggcccggccgtcagccgcccgcgccctcggtgcggctgacgcgtgggacccacggcgccggccagcgcaagccgcgtgcgcccggtccaccgtggaccgtgaggctgccgcgtgggccccactcccgtggacccggtccgcgcgcccctcccctcggctgacgcaataaatccgattttaaattaaaatttaaatgaagaaattcgcaaatatccatttaaagagcatataaacttcaaatggccataacttggccatttgaactcggaattggaccgttcaagtctctaatttttccttatgaagtcaagaacccatttttgtgctttgtttctgcttgttatatggagtttagtagagtaaaagccttttcttttccgttggtcgtgtagacgctgcagcttcggaagatccgctcttcgtggaagttgaagccggtgtttgggaaagcgagcaaggcaagtcacatcatctttgaacatattgaatcccagtttgtaaaattatgttgatttaacttattgcattatcgctttatttaaattcccgcgttatcactgttttatttagccatgcctatttacctttgttacgaccttattattgttattggtattattaccttgttcaccctagaaccaacaaaaccccaactagtggacactctactcatggtaccactagtatg

SEQ ID NO: 44106 - DNA, 696 bp, Oryza sativa
tcgttgattgcgagatgtttgtaatgacttcgtcaatctcaagatgtaccgacccaatctttgaagaatgtccatagagataggatgtacttatgtttacaatggtgagtgtatacttgtattgtgttttaaaaaaaatctatacgcacagtactacgggaggatagcatacggtgtttcaattcacctactcctaagcagagtgtaacttaactcgttaggtttcttgttgtggaaacaatccacccggtttcaagtcctaggcttggtacgggtgctcgcatttacagctaattattctttcaataataggcaacgtatccatcgatagcaagacacccatggtgatttcgttaatctcaagatatgccggcctagtctgccggagatctatacgcacaggacaatgggaggatagcatacggtgtttcaattcacctactcctaagtaaagtgagtgtaacttagctcgttaggttccctgttgtagaaacaacccacctgggttcaagtcctagacttggtacgggtgctcgcatttacagctaattattctttcaatgataaacaacatattcatcgatagcaagacatccatggtgatttcgttaatctcaatatatgccggcctagtctgtcggagatgctcataggggtaggataacacccttcaactactaaaaccataccaaacaa

SEQ ID NO: 44107 - DNA, 648 bp, Oryza sativa
aggtgaaagaatacatggagagtcaactatcaaaaataagttcttctaatgcagcaaccaagaagcacacgcatgttgacgaggttgtgaaacatcacataggcctgaaggatctgttttagatcccatctgtgtagccacaaagggtgcacctaggagaatgaaaggatgggatgagcatcggccaagattgtgcagtcgttgtcaccaaccaggccatgacattcgccgttgtccagaggcaaagcgagaagagtaagttgatgtttcatgttgtgtacaaatgatttgagtttggtgtgtttatgttatgtgcataacactagtatttctctttgtttgcgcacattactgcaaacacatattgagaatgggcaaatgaatgctttacatcgttgctgccaatctgtgctagtgtaatattaggttggttgcctcatgctagattgtcagattaatatatcctgtataaacttgtagcaaattcatgccacagaacacacctggttaattatatgtagacaagatttggcccttattgagagtctgaaaattgctgtaatattgtatgacataaatttacactgtttggtatgatttgttcaacaatgttctcattgctaaacatttaagatggttacatctttg

SEQ ID NO: 44108 - DNA, 634 bp, Oryza sativa
cagcgtctgcaggcgtcatcgccacggacgccttccgccgcgaccaccagcgccactgcttcccgccaccccatgtcctcttcttgtaccgcctcgaccactgggcctaccccgaccgcgtctgcgtccacctccgcggcgtcgacatcgccgctcgcgagacccacccgcccacccggctatccgcctcgcccacaccgacgccaacctccgccgtccgccgcacgcccgttcccgccttgttgctgcctccccgggcccatctttggccgccacggagccccgccgggctgccgcggtgcttccccactgcgaccgtcgccgccggccgcagtcgcggggccaccctccttctctcccgcctcgccccggcggcctccaccccagccgctggccggcttgcccagaaaagagaagagaagagaagagaagagtgagagagagaggaggaggaagggagagagatgacgtggcatcctgacatatgggacccacgtaggtcccacgctgcctcagccgttacataggataaaaccggtgttaaaatcaccgaagaacctattctgaccggttttgattagttaagggacgtcgaatatctgattttgcggttgggggtgattttgtaactcga

SEQ ID NO: 44109 - DNA, 651 bp, Oryza sativa
aaactaaggcacttccaacaatgacctggttagcccaagcccaacccaggttctacctagcccaagacacagcaaggcctagtttgcccagttaaagatgagaatttggatgtttcatagcccattggaacacaataaatttacacccactttcatataagatacaatcatacagttatattttgttcatacaaaacattgtctttcctgacattatcttgctgcttcttcgaaggccaaggaataatttgttattttcattggtaatatatatacatgtcttgtaatattatctgatgccatataagcttaaagttagttaacacaatgtattgattagctctgtaatcctaaaattagagtcttaacccttaagcataagttaatcacgtatttcatcctgtacttgcttgattttgctatcaagtattgcaggtaccagtatatactttacttagtactccctccgtttcatattataaatcgttcgaatttttattttatcaaacttttttaagtttgactaagtttagagaaaaatatagtaacattttcaatacaaaacaaacatattatcaaaatatattcaatgctaaatctaatgaaactaatttggtgttataaatgtttgctaattttttctgtaaattt

SEQ ID NO: 44110 - DNA, 761 bp, Oryza sativa
gaaagaagaaccagaaacaaggtcaccaggttttgccgagttcagtggagtcatcattcagaagaggaagcaacctgggaaagggaggatgagttgaaagccgcccatccgcacctcttcgccagctcctccgaatctcggggccaagattccgtttaaggggggtaggtttgtcacaccctgaagttctcctcccaagcctaaatttaatttataaatgaccctaagaaaataccggtgcaaagcaagagtaaaccccttttaaatcaatgcaaataataatcggaattggcatgtggaatttttcttgagttctacaggtcgaaattcactaacaggatttttagtggaattttcagagccctaaaaataattttaaccaattaaaattgagcaagcaatattttaattccagggaaaattcttttctccttttttctttttctttttcccttccttttccgaatgggccgccggcccattctctcctttcctccccctcctccctgctgggccggccgcaggccgaggcccagccaggccgccccgccgccctcctctcccggggtcgccgacaggtggggcccacctgtcgggtccttccccaacctcccgccgcgccgccgcgcccgcaaccgccgccgcgcccacgtctccgcctccttcgggccacgtcgaccacgcccgcgcgtgcgccgcgttccccgcgcccactcccctctctcacccgctcgcgcccgcgctcgagatggccgggattc

SEQ ID NO: 44111 - DNA, 1505 bp, Oryza sativa
gtcaaactttatgcaagctatttaagatttgaaattttgcgccatgctgctatagatgcatgaattttatgaaaattttgtgagattatcaaaattttatgaattttattattatctctacacaatatttgaaaatatcgtaccactcggtatatatgcacctattaatgtgggtagaaaaatattgaaatgttgaaataaacggtgcatgtattttcccacagttgccaccagtatatattacatatataaatactgaaataaacagcttagcatccaggcatctttcatctttggctctttggtgatagactactgcttcattattcaatttcatttcatataatatatagtacttgcatgttgattagaagatcttcttcttgttgcttctgttgtttcttgtaaatatgcatgacttctttttttgtttgttttcatacttgggcatcaattatttttctattattatagtgctcacagattatgacgatttcatcacgtcaatctgatatcattcggttctcactagatcttcccagctggaagtagaaaatgcacactttgttatcttttactaagaaattactggttggcaatacatgtcaaagatttatcttgaccttgctactagggtaattcaatttgcaataatccgtagaataatttaactccctaatatataggtttgcattggatgggaagaaaatgactgccgaatctatgatggagtaagcaaaaattaacaagaatttatatgatcgatacaaggacaatcgatctcggctggcccacaaatttcaggtgtgaagtcatcagtcgcatgtttagccaaaatctggagagaccacttgacacacgcaattaatatattccccagtacagtctaaagaaccaatatatattatttgatacatatgttaatatatatactgatgtgactgacaaatagacaaacgagattaaattgtgggttttacaatacctgaatcatccttaagaagcaaaggattatacagcagtgactgatggtgattgattcaacggtgacttttggcgatatgttctgattaaggtcgtccatgcatcaatatcgtatcctgacaagtacgtgtatcacataattcttcactagcttgatttttttatgttgttacttagtaatatactacatctttttctaatatataataccgtttaccttttagcgttcgtttgatcattcatctttcttatcatgaatattcacaaacataaaaaatataagtcatatttaaagaaaccttaattgtaaatcaaatcacaacaaaataaatattaattacatatttttttatataagtaaggttaaaaaatcgattgtatttttaaaagttaacaatatcatatattaaaaattatagtcggagtaatataagctagccccatatatatatatatatatatatatatatatatatatatatagagagagagagagagagagagagagagagagagagaga

SEQ ID NO: 44112 - DNA, 549 bp, Oryza sativa
cataatgggcatgaaagccttggacaaaaaatagtaaaatggaaggagtattacacaagataagcatgcaattctaagtttttttaaaaagccaaaattgggagtttactttttcaatatttttacaaaccagataaacatgatatctgcatggttattatcatcacctctttgtcccttaatccattacttctaaatgtgcttcatacaggtactgaagatgatttctttcctagcactagggatactgtaagtactgttatatatttataaaagactagccaaactaatcaagtgtatttgtacaaaagaaatgaaacaagtacagatttcagaagcctcaaaataaatatgcataccacacaacttaaaattacgaaaaaaactcctttccattgtgaaatatctgtaaactaaaccgattctcttttagtattgaccatgtcagaccttgataaagatttctcaaaattaattatcataaccctaaaaattatagtcctagtttctgaattattttcgaacatcgcacatttttcaataactcag

SEQ ID NO: 44113 - DNA, 686 bp, Oryza sativa
tagatattgtccttcttttcatacttatagctgcatcacttgagtttgatcttatgagtcatgattagaatctcaatctctagcctgcttcttggttgccgattagggtagtatcgggatttcagccgatcttacttgatttaactatatttgttttatatgctttattgacatgttaaatccgtcctttatgttaagatcttgccgtatctaagtatattaggctctttgtttggtatatcctatttgctttgatatcttaatatagagtggtatcggaatattagccgatacatgctagatctatctgatcggctatgctatgaatatatataattttattcttagtatatacttcgatctaagtgatttatattgtctcggcatggcgaccgatctatcccaatcacttgacttaagtatatatcgacataaagattatatatcgttaatatctatagccgatcgagtagatttagttctttcttatctatttatgactgtcgattgatgcatatatgacatcggctcaaagacaaatgatacgtcatcggcacctagccgatcggctatcgtttatggatttaaccacggtttctttgtctctgtttcttgttgattgcaggatcaaatcaactggcacgctagcatacccgaggcgagttttggacctgcactggagttaa

SEQ ID NO: 44114 - DNA, 930 bp, Oryza sativa
actcaagtgcatttcgttattaggtggagtatatacttaactcactgcggtgatttcagtgaatttagtgcatgcgatccggatctcccgcagctcgcgtgtatacatacagatccagatcctgcactaccgcaccacacaacacaacccccaagcaatataatcaccataataacactgaagaatctaggggggggggggaaagaaagtaaggggcaaatgagagaggagtgaatgatgaatgcggcggaaaagcagaactcacggggacgggataggagattcgcatccggggaggaaaaattggaagaggaggcaggcagacgcaggcatggtttactgcggtactggctctacaggaagagaggcggcgacgatggcggagggaggaaggtggacgcgtggtgttgccactgctacgactaaaaaacaacaaggcaagtcaatcttgatcttagagcatcacaacaatatccttaaatgaaacccaattttaaaattaaaatttattttataaaagaattgctccaacagttccatagagatgtatccaaaaattagaatctcattctcctccttactcgctctccacaagtcaggagacactctcactttcaatttccttcgctctctacaagtcggtcaggagacactctcacttccaatttccttatagcaaaaggagatggcgacaagtggagagatcgcgcgcgtgggaggggatggacaaagcgattttctttattatatgttggtagttcagtgtgggttcactttttattattggaagttaatttaagatatttgttagaaataaaaatctatttacaccttaaaatcaaattaggaatttcaaaaacagaattttaaagataaaagatttttgggtatcgtgctctttacccccatcaacttttacaatcgatctat

SEQ ID NO: 44115 - DNA, 1265 bp, Oryza sativa
gtggggatttagggatgttgggagcaactggcatggctcaaaatcaatacacaagtagtaaaaaataatgaaaataaaaagaaaaaacatttgccacatggcgctacaatctttagtctcgattggtgttaaaggggttgtaaatcgggactaataacgatggattccctagtagtggaagcatgagatgcaaaaggatcacgcttgtgaagctagcaattctcataaaattctagtcaaatttcctataattttcctcgttacgacaacaaaaatgatgatggagaagctgttttgcaggccagcaaccggttgatgccccatcattttcctctcccttttgtttctttcaacatatacatattgctgccttcttattttcttccattttcttatttagtatactcagtatatattagctttactagcctgattagactaagacatactaccttcgtccaaaatatcaaattttaattatatatctgagcatgtgctaaaaaaagtatattatgggacaaaaaaaatagtttttgccccaaaaaatgcccctttttaacaggtctttgctttttatcaggtcttactagataatttattaattaatatattcagtcaagaccacgtcaatataacgatggtatatcagatagggaaaaggggagaaattctagtccatttgcgactagtagcatatcgctagctacggcacctgcatggttcgttttcagtgaaacaaccaaagtgttattgttaaaaaaaaagtgttgaagtggaaaaaaagagcgagatatcgatgcatgtcatgtgtgtgctgtagctaagtaggagtcgtggctacacaaattaagtagtacgtcacaggaaaaagatcattttttttccggtgggctgcatgcttcagaaaaccacaatcgatcagaggaaaaattaggtgtgtccaactgtccaaaataagttaaggaccgtgaaagcaacaccctgcccaactctcttcctgctttatatgatctttttcttccatttcctctctatgcataacttcattatatattgacaacattttagttcgttttacgcaacgttcttttcctattgatttttatcctcatttctggccatacatacaggatacaggttagtacttagacatcacggtctttttaaatgtatggttggtcgcttctaatattttgttgtgatattattagaaacaccgataacactgaaatattaggaattgccaatgcgatatactgataaaa

SEQ ID NO: 44116 - DNA, 642 bp, Oryza sativa
tctctatcccggcctctctccaaaccaccacctcacctcctcttcctcctcctccccttgcctctccgctcctccccctcgccgccaccgtcaccaacacagccgccaccgcacttgtaggagcaacgtgtcatctccggcggcggcaacaggggcgctaattctatgccgggggtgacggcggctatggcgtggggcgagcgtggagcctgattgacgacaacctggacgttgacgggggcttgtcctcgcctgaaccgacgacggggacgcgtccatgctaggggcaacaacggtgtgggtgagcaacccctcctctctgccccttcccaccggcgcttggggcggccaaatccgatgcctcccaacccagctccacgccctcttcggcccaacgcgacgtgcgaagcaacttctccacgatgatgagtgcaggttactccacgacgtgcggatggacttcattttttttctgatttgtttatcttgtacttttacctttgatgcatgcaaataatttgtgtcatggattttgattggagtgatggaattcttcaattgagccaaaaattgctttgattcgtgatgcagatggatgtgggatggatggatggcgatatgtacatgtgggataggagctgc

SEQ ID NO: 44117 - DNA, 645 bp, Oryza sativa
cttccaattttgatgtgaattaaacacacccttaggcgtcacattgtgacacgctgacagccggagctcggcattggcattgaagacgacatggacatggatggatggaagcgatacagtgcaggcccccgacactagtgccacaagtttcttctcccggtgtccacacctgcatctgcactgactggcgtacatggatggcccacgcatgcagggtaacctttttgtcaactcaaaccgtgcagacttgcaaaaaaaatgcgagcaaattgcaaacaaatttgcaatgcatgtgagaaggaaggaattggccaaagcagaattgcaggaaaaggtctcaccggctgccattgcaaattccatgcaaaaccttccttccccctttcaaacgcagagcccgcccacagcccactttgcatgcttcactttcacaccaccactgcctttaggctgtgttcagaggttgatgttgggtgctaatttctcacgcacgtagaatggaatgattcattaaagcatgattaattaagtattaactcttttttaaaaaaaattaattaacatgattttaaaacaattttcatataaaacttttctttaaaaaagaaaaaaacacaccatatagcagtttggtaagcatgcact

SEQ ID NO: 44118 - DNA, 968 bp, Oryza sativa
atcaatcagtcggttccaaaatttgcacacaaccgttatgaaagggacagttagttctataatacagtagatgtgtaaattactggagtttagttggtggttaacagatgacagctgagaaggccggtgttcgttgaaaatcttgagggccagattagctgcagtcagatttcacttagccgaggcagaaaggcagctgagctgagctggtctagtcttgctgcgagaccatttatgaaatgctgacttggccttctaattgccatcaattatcttatttttaaactgccgttaattaatcaactgatagctacttgcacgcgtgatgcgcatatttatatgcgtgtgcttgaaggccatctccatccgaccatgggtctgatggctgcattgaatccagggcacacaatttctcatacatgtatagcttaattagtagcagtaattagctttattgtacaacagtagttattttcagattaatttttctgtacttcaaaaaaatacattttctaaaaaaatactttacttatattacttagactatttgttatgagttacttcctccgtactcgtaaagtaagtcgtttaggacaatgtttaagtcaaaccttgggaatataaataatgaataactctcaagttgttgagtttgaaaatataaaaattatatgaatagatttgtcttgaaaaatactttaataaaagtatacataagtaacaagaagtcaaatttgtgttttggagaccgcgtcgttgttctaaacgacttcctttacgagtacggagggagtattagttatgtttatttattaaagtatctaatttatccatataatataattgagtagataatcgacaataacaatccgctgaataatctattcgaaaataaacataattgttcagggaaggaatccgaataagaaaagtcatgccactatagtgctaaccgaacataatattct

SEQ ID NO: 44119 - DNA, 1228 bp, Oryza sativa
gatttcaatgaataaacacgatatggtgtactacaattaaataatgtatagaattgagaaaattactaccttacaaagatgatgttgtttttctctctcaaaatttttagagaatcgcaccacgtataagtttaaagcacaccaccattggcactaggggtaagagtttgtaggctagtgaatgtccgcgtattagttttggaaagtttatcatgtcatagggctaaaatataaatagttcatagcgcttagattaacactttatggtatggataccaaagtctttccatgcattattgctttctcgattggtttctaattatactatctaataagtaaattattcgagtttagagaataaaagatacatggtacaaggattaaatgttgtatagattagggtaaatcaccttacaaagattatattgttttttttactctcacaattttttcagagaattgtaccacatatgagcttgaggtgtgaatcgcaccacccttactctaggatttggagctttgtaggctaaagaatgtccatgtgttagttttgaaatgttgatcatttcataggactgaaatagggatagttcttaagagcttacactaacaccttatgatgatggataccaaagactttccactatgctagtgggtaacatgtttttggtccccttattcgatgtacaatgaattgaacaatgttgtttcttatccaaccatgtaagtgatgacctttttcttataaaggggcaatgactttaaagctagctatttattctaaactttatattcttagagagttttagtccgctacaacactagctctctatataaactgtaacatttatctgatttttcttcctgtagatcaatgtgattgggattatagttattatcgtgtgattaaatgcaagttgtacatctttatatataacaacataagttaactagagaaacaaaaggtataattgcaataatgtttgaaccttctaccctgcttcaacaccacagaccgaggactgtgatggtgaaccttcgttatctattaacgagttaggagttgcaacgccacgactccttatcacctgaatgcttataaaggtggctgagggttagtccaatgttagtcttagcttgagtggacttatagtccattatccattaaagttatattccataatgagcatagcaaagtttacctctcgattcagcttcattatggtgg

SEQ ID NO: 44120 - DNA, 1216 bp, Oryza sativa
agggcagagcagcgacggcaaggcgaaaatcggcgcggcggtgtggttgaggagcggcgccgtggtggaccggtgggggtggggatcgcttcaggtggactgggctggatatgggctcgaaaatctttggacgaaattacccctcgctaatgataattaagtgctaatctcccttttaatcacagccgctgattagctttaactttcgtgcaagtttttttttgtggagcatagaagcacatcccttagatttttcttttaactacctagttgatagaaaatttattcaaaaactcacaaatatataatagtgtaatttggtaatttgtatgtaactatgttattttttaaaacaattaacgttgtacggtagtggagacatgcgcgagcgcctggcgtgtgccaaataatctttttcgctaaccggttgaaaaatcacaattttatgtcgcaagaatttcgcaattctatttttttcttaagatgttcatatcaatcctcacgtcgtttttctaggctaataagccatagaaaaatgaacaaagcaatgaaaaataatttataagtaaaacttttgtacctgtgttcttaataatttaaaagccaatgctagaatataaattatgattaaaaaaatccttgaattaagtttgaaatttaaattttagctgcagccggataacccaacaagcaaacgatggattctaatgtttaattcttgatgcaatgtcaatgtgtgcaacatagtactacatgattatatggcaaaattcggcttcgactgcacttggttggcgtttggattggagccgtctttcggcaaatcaatctggcgcctaccgaattggtactttggtaggatattgaaccaaacttgatctccattctgatctcggagcatatattctgcttgagatattacgcaaatttcaactcgttcgaacttcttgcaaatttttcccgtaacctaaatgaagagagtttgttcttgtggtcctaagataagaaaaggaaaaagtacaccaatggtcccttaacttgtcgtcgagttacaaaatcacccccaaccgcaaaatcagatattcgacgtcccttaactaatcaaaaccggtcagaataggttcttcggtgattttaacaccggttttatcctatgtaacggctgaggcagcgtgggacctacgtgggtcccatatgtcaggatgccacgtcatct

SEQ ID NO: 44121 - DNA, 1473 bp, Oryza sativa
cgacatggcgatcgatctatcccaatcacttagtttaaatatacatcgaaggaacaattatatgtcgttaatatctatagcctatcgagtagatttagttctatcttatttattcacaactgccgattgattccaatatgacatcggctcgaagataaatgatatgtcatcggcaactagccgatcggctgtcgtttatggatttaaccatggttttcttgtctttctttcttgttgattccaggatcaaatcaactagcacgctcacgaacctagaagcaagattttggacctgcactgaagttaagcagatcttccaggccagtgtgtgtttttcacatcaacaacggtttaaccttggcatttgaaccgtagctagttgcctagttcctagaatatataaataatataaagcccagtttttttttacgatcagcaccagacaacgcaatgattcattaaaaaaaatacaagactattgacctgaaaaacaatagccaggaatgaaaaacaattccaccaccaccaccacgcactgacaacgtctacacacagccgccgttaagtgtgagcggtcgccactagactaacaaggaatctacaaccaagaccgccgaaacataagccctaataaccagccaccaactcaattctatccacgattttgggattgaggggtagagggtaagagagaagatggaaccactcccctactaaggcccgccgatgtggccaacttgcaaaagcttgtgtgccgccgcaagaggatgaatgagcctgcaccaactgcttgagagaagatttggcaagggggcttccaatatgacgactccagtgagaacggcgacgatgagcaccgccgccatccgccaagatcttagggagaaccaagacagggttttgacccggcagccccaccagaggaagaggacgactcaacaacactctcaggagggaaagcgacgcccaaagtggccgtcgttgccggcccgaccaatcccaagctaggtttacacccgttgtccgccccctaccgatcgacagccaaagctccaaagctctaccacctgccaacctctgtcggcacgtgcacactgctgcatcaacgccccccgccggctgtactccgcgtcaatgccgccaacagctctacgcaccacaatggcctcccgctaccgccggctatgccactacgagctttgtcgtcgaccacgcctctaaattgggctcgcctccacgcgccgcgatagcctactgccgttgccagccgcctccacacgttgtgccggtcttcacaccgccagccgtgacttgcacgttggtcaccccgcgctactgtaggatcgagatgtcgactagagggagggtgaataggcgatttaaaaactaagaaaaaattggttatatagcatcgaaagttcacgtttttggttttatagcaccgaaagttaccggttcactttaatagcatcc

SEQ ID NO: 44122 - DNA, 753 bp, Oryza sativa
acaactattgtattgaagtttgtaaaaatgtgaaatagatgtattgcaactagataaagtgggggtaattataataggatttgattaagtggaagacattttagtctttttgattttagtgttgagaaggcatcccaattaatcgtcaattgaattcactcctattttattatgttcttgatcatgcgatatacgactgatagttgatttcctggtacaactagatcgatccatcggctgtgtttcttttgtaattaattgcagttagtggagataacgcgagatgatcgcgagcaccagtagagcaggtacagtggcaggctataagccagctataaacatattttaaaaagataaaggaagagagagataagcagcgggctatctgtagccagctgtagcacagacttcaagacgtaatgtgtgtatgacaggtggaccagttattaataatatagtaagcaactattgtagtatgaattaactattatattgactacagatgatttggagctagcaatggactatgctattaaacttgctcgtacagtacacaaatgatgtccttgtctgtctcacaatgtcgtcacctatcgagatcagagacgactcctgatcgatcccaaggttgacgaatgctgctagctactccaagctagcctgtgatggctagctacctatcttgacctagtagctagctagtacctacctagtacctagttgtacgagcaacggactatccggccggtcagc

SEQ ID NO: 44123 - DNA, 680 bp, Oryza sativa
atatgtgactgccggagctacttctgtgtaatggtccttacttcttcggtaatttcagaaattttttggccaaaattatttgaagttttgactgattttgaattaatttgaacaaaatttgaccaaattcacaaaaattgcaaaaaacagaaaatttcgggtgatattgagcttgccggtggggagcgaaattaccaaaattttagaaatttcgaaccgaaatttcaaaccctagtcataagcgtatagtccagtctatccgacgagcgcggttatttacatatagcacgctacttatagttttgtttttgtttcgtgtaaaaaagttaatccaggagtaggatagttagatggacaaagtcttataggtcggttcttctcttgttacagtagtaaggtggtcataactataaacttttgtttttatttcatgtaaaaagttaacccaagacttatatgattggatggataagatcttataagttggttctcctcttgtttaccagtaaggtgatcttaaccaagtacacatagtattttgtagactacataagtcatattctaatggaaaaaatccaaatcaccccatactattgcgatcgtcaaaataacccccatactattgcgatcgtccgaattacccctaaactccaataccggacatttttaaccttgaaatt

SEQ ID NO: 44124 - DNA, 3097 bp, Oryza sativa
cggattgtcgggcccaccgaccagacaaatgaccgtggaacccccacgcggcccccatccgctttccttctcgtcttttctttggcacggacatgaaggcatattaaaaaataaaaaggagaatagctaatatggtccttaaaattttgttcctgggtcattttagtcattaattttttatattgtccaaataagtcctttaaatttgtcatatgggctaatatagtccttggtcccacgaaaatcgcatccaaacaagtcctttaaatttgtcatgtgggctaatatagtccttggtcccaccaaaatcgccacatggacatgccatgtcacatttctatgcaaaatctatatgatttgtccaatttacccttacgcataggaaaataaaaaacaaaagaaaaaagttaaaaaatatatggtacatgtaagagcaaaaatatacctcaaaagggtgaaaaaagaagtatttttttcctatggttatgtctaattcacccttatatttatttttctatgatatacgtaagggtatattagacaattcatcatagatttgcatgaatgatgacatggcatatccatatgatgattttggtagacccaaggactattctaggccttatgacaaaggttaaggatttctttggaccatttaaaaggttagggactaaactgatcctacagagaaattttagggactaaagtagctattctctcttaaaaaaacaatttctaactacgtacagtaagtatatacaaatatacttcctccattccataatactcctataagacatgatcaaacttggtatagtcttcaaaactaatacttgatctaaaatttctcacttaaaatttttcatatactataagatttattgtaacaaatttataaccatcttaaagtaaatttgaatgtcaatccaatgatattaattttaacaaataaaatttaatttatattataataattgttgatcaaatgtttttaaagttaaatcttggaatgtgtgcacgtcttttattataggatagagggagtagtttatgtctaggctatataggtctcgttcttttctccaataagagttggatgaagattaagatttttgtggcacgcttttcaaactgctaaacggagtgttttgtgcaaaaactttctatatgaaagttgctctaaaatattgtattaatctatttttcaagtttgtaataattaaaactcaatcaatcatacattaataccatctcgttttgcgtaaaaaacttaatgaaacatctttaggagaaaaggacaccaccatagccaaaaattgattactttttaaaaataggttttacttacaataaaacacttctttttttcgtaagtttttgggattagaattttaaactgttttcttaataagtcaatgactttcaagtaagtttggtggacttcttactctaattcacgtaaacatataaagtagtattaaaactagcttttggtttaatagtgtggacggtttgtggctttataagagaagaatgatataaaagttgtctctttttttctctttttcagttttggcctttattttgcttagaagctcaaacaaatactagaacctagtatatagttaaatgagtggcagatgagaaatggtagtttccttttagaacattagtagtaatatatagcaccatacgcgaaaaacttacatggaattatgtcgtcaggcacagcgaaatacttacgtggaataattatagacatggatgataaatcttgtaaggtatgagagcatcatatataataaatattgtcgataatcagttaaccaacaatagcttttgtcttgattatattgggacatgtcgtgttagccctcgataattgactattttaaacaggttcagatccctcgaagcaataataaacatatgtcatgatgattgtatttgtatactaggagtatgtaaaaacactataaactagggaacttggcctgacttcacgtgtgtgttttttttttctcaaaatgatcagctaaactaaatagcagttttctctttactatgaaaattatgattatatactatagcttaaatttaaaataacatgtttttgtaatacagcctcccatggtccaactgtctcctctggagacagaactacagaagcaaggatagatcgaattcaaagtttatggcaaatggccaaatggtttgatcacgaactctcccttcaccttacattaatttaagacaggggaaggatttgaaaacacaagttgtgctttaactattactacgacggttgaagtttatacatatagtacgtgtgttacgagtattacacgattacttgggattagcagggagtacagtaggtcatagttagtggtgccacatggaaccatgtatatataataagattaaaatgtcagatatcacgtgtatcacgatggtgtagtgctgtgctgtgctggcatggcgcttgattagggggccactgcccctatcgttaaccccactgccctggatagttgtgtccataagacgacgtgattttttgtccaaacactgtacaagcatactggtgtgctactccgttccaaaaaaaaaaaaataaaccctagctacgaatctggacacgtatatgtctaggtttgtagcttggattgggtttttttggacggagggggtaggtgtttatataaactggcaagatcgatggaggcggcgcgttgggcggtccaccggcctaaaccggatctggccgcctccgccctggtgcggaaggggggaaggctagtggaaggagctggatgaggcgccgaaggaggagttggccgcagtgttgggggagcccgacaggatgacggagttaattggagggggtggtcaagccggtcctaagccgaatttagccgcctccatcttggttctggaagaagaaggccgacgaaagtggagttggggagttgaggagttggaggtgcaggtggccgggaggttggccggaggggcacaacaggtgtcaattggtgaaattgccgcattgaggggtcgttcgttgttgcagatatgcttgttggatagccgcggg

SEQ ID NO: 44125 - DNA, 1129 bp, Oryza sativa
ctatgaaagtgtggtatgtcataaatatagcaatgaaccaaagacttgcttgatttagtcaaagggcttagccacaagttgtggcaagtgtttctctcctgctcttcttttcttttcttttctttttttgttcgagataaaaatctcagttagtatgtccctctacaccatgcaatacaaattaagttgaaacacattcaaatggatatacggataaaattctttattggatcttatttgagaaacgataatactccctccatttctaaaaggagggattctaggtttttaagagattaaggatgaagataaaagatcactatcatgcatgcctcatgttgcgtggtgagtgaaaaagtggttgtggataaggtgagaataaaattaaatatcaatgattgatcgggcactatatagtacatataaaatcccttattgttggataaaattctaaaatgtttcgatcgttgggcgttcgagagaataattttttttaagggaaaaaggggggggagatatttcattgcacacaaagaaaggctacagctattaattccaatatgatagtattatctctgtccattcctagtgtaaatgcggcacacacgttgaagaggcatatgtttacacgcaggtcaccctaaacgtgtccaaaaagtcaggtcttaaaaatcattatatgtagtaagatatggtggatttatactcggtaaacacgtcttgattaatctaatgaccactagttcttcttttagcaaggagacatggcaaggctagtgaaagatgagagccctgaactgaaaggcagaagcactatacgtacgtgtcatataattcctagtgtagtagtttttttatcattgctcaattttgtttgcttcccctgaataatggatcgagcttttgctcatcctgactttatacctcacgaggacaacagagagtattactttttgcaggatgattatatttttgtttttatcataccgacgattaggtgcccaattatatacctagtactccctccgtccctaaatataaaaaaatttgatagaatgtgacacatcatgtccatatatattgtactagaatgtgtcacatcccactaaaatcctttatatttagggat

SEQ ID NO: 44126 - DNA, 506 bp, Oryza sativa
gcaattcgaagcaactgaacaatctcaagctctcaacaacatgaggagaagattggagaattgtagcagagacaacaggttcagaaaatctcgagcccgaatatgcaatgaaattaattctctcctttcaaggctgtaaccatatgctagtaatatgcagtgaaattgtacatgtttactttaactccatgtacaagcataaacctaacaacatgtatattagttagttgatgtaaattagcacatgtgttttcactctatggttcatattagttgacaaagattggtagtaacttgatcaattttcagcttcaccaactgcagtaaaccctgtctgtctccatcagaagtacatataaaataatctgtttcctgattctatgagatttgtcggagcgtccatggattagaacggatcacattcaacgaacagcctcttgttgataagaaactgacggttcttggcagggagtaactaattaattaaagaaaacaagaaattttct

SEQ ID NO: 44127 - DNA, 634 bp, Oryza sativa
ttgtccacaatatcaacaagagttgagggacgtaatgcaaaagaattccatcgttcatgtatacttactacaagtacaagcatgcattaattggagtatgctgaatggaataatttggttcatgctatcatctaaccagctactcggattcgaattttaggtagaatcactggtatacaggaattattgggatgacttgtattaaggtatttatgactggatcaatgattccagtattactcaaaatctcaaacagtgtacttccatgtgtcatgtgttcatgacataatctattaacaaacatcaaggtttgactttttttttaaaaaatgcaattcatccattcaagtttctatgaatcaaaatgacacaacattacgagatgaccaatataccatggcataccttcattttaatgtcatcatagccacatccacatgttgcaaaacagataaacttattataatctcaccaatttgaaaagttacttgttcaatgtatttgagatgctcttatcttacaataatataatggtgcgacggtatagtaatctatttcaacctatacaaaaataccagactaagctaaggtgatgaaaagttactttcttgcttgtcaaaggacttttggacca

SEQ ID NO: 44128 - DNA, 767 bp, Oryza sativa
aaatcaaaagctccccctaaacatgtgcatatcaatcatagacaataaatatggagccaatgcacatttcaatatcacattccaacaagcacaaaacacattagcaatatatcaatgtgaacttcaatccataggcataagatggtcacatatattaatatcacatacaccatccatcatcgcacaagttcacatcacttaaccatccaaaacacataagtcacaaatcatcctaaaagggctcacaaataaacataggctattacaagaccacgaggggtccaaatgacatagagtttaacaaaacgacaaagaacacacaatatagagtaatagcccatacccatacaaaatatagcccaaacctccttaacttattaaatatgaggtgactaacctcactaccactagtcccaacccacaagacataaaacacacttttctcccccttttggcatcaagcaccaaaaaggtcttcactcttgtagaggaggaggacgcgccgaagtggaaggatgaggagcatcacgacgacgatgatacacaaatgcttgggagctctccaacatttggactcgagaatccaatgtacccactctagtgtgcaatctccccacagaagcattcaagtctccaacatctgtgcgcaatccacgaacattctcatgcaaagcttcatgcccggtggacaagcgttgaatgctttcacttagggtattaatagccccaagtaccgggtaaagtattcgtttggttgcattccaaag

SEQ ID NO: 44129 - DNA, 586 bp, Oryza sativa
tactcctaagtcaatgacatgtggggccagaatgatgtggggacaggatgtcagtgagaggggctcgggtgtgcggtggtagcggggggtttgtgcgtcggggggtgtgggtggtggggcccacgcggtgggtttccgagtcagtgttccactctggttgagttgacggcgtgagctgctttacggttagccgcacgggatttgccagcgagacgaccaggtccacgccttcaccttcacttcactgccagtttttttttaaaatttttttaaaatatttctctgactttccgctgctgctgctgttcatcttatctgaatctgaattttctgaagatttctgaagatgagggcagtgcagggcagcaaatctgaccggaattgctccatggtttcctcgacaccttaaacaactgcactgcactgcacacatatgcagacttgattattctgctcatatggatctgtaaaattattgacctcgtttgtgctctgacggctaccgcagctccagccagcacaaacgatcaaatccattgccttaggcctaatttagtttaaattattttaagaagtaaacttaaca

SEQ ID NO: 44130 - DNA, 1117 bp, Oryza sativa
cgccgccgtagtgcagcttgcggcgggggcagccaccgctctgtttcttggctccgacgtgtccgctcttgccgtcgggttcgccattgtcgtggcgagaagcggcatccgggctgaagctgaggacgatgaactcgtcgccctcctccttcaagtacggcgccggcggcggcggccacccctccgccgagctcaccgacctgctcctcctcctccgccgctgccgccgcagcggctggcactccgtctccggcggcggcggcggcattgcgtcgagccccatcagcctggccacgacgcaggggctcatcccctcctcctgctgtacctgcacctgcaccaccaccgcaccgtcgtcgtcgccgccgcccgcattgccggcggcggcgtgcgcgcagagtaggcggcggaggaagtcgagagccaaggtggaggacgccatggcaatggcaactatggcagcatcagcttcgcaatgctgctgctattatatcttcttcttgcctccgttcttgattcgatttgaactgcagttggagggaaaaagaaagaaagaaagagagaaagaaaagcaaaaggaggaagaagaaaggtatggctatggaggtagcagcagcttgattagatgaagaaatggatggaattttgcaaagattttactgctagtggtagaaaggtgatcaactgttgcagtggttatcttcttcttctacttctacttctactgctgctgatgctgttgcacttttgtgttttgtctgtccccttggatctttggagtgagggtgtgtttagttcacgtcaaaattggaagtttggttgaaattggaacgatgtgacggaaaagttgaaagtttgtgtgtgtagaaaagttttgatgtgatagaaaaattgaaagtttgaagaaaaagtttggatctaaactcggcctgagtgaaatttttaccgtttgacatttgaaatactcctagagtatttgctcatactgttttattacagttagtagtaggactatcatatttgtgtgtattgtgataaggttgggactgacactgtttacctgcctgtgccatatatgaacactgtagttcatagcttcactattgcaatgatataa

SEQ ID NO: 44131 - DNA, 999 bp, Oryza sativa
ggggcgctgcgcgtattaaaggaagtttagcctaggcccccctcctcgcttgctccccccgccaaacggcggctgggcgagggcctcagggcaaagtagtgcaagggcccgaggggcatgacgtggcaccccgaggccctgaccccccggccgctcctgcggttcgcggaatacggggataggaccaggctgtagggcacgtggcatgatgggaaggtagattcccctcactttacatacccccaggcccatatctccgacaggaacgatgtgactaaaaagttgtgtgtgtatgaaaggtttgatgggatggacagttggaagtttggaaaaaaaaactttggaactaaacaaagccattttgtgtagaaaagtttcgatgtgataaaaaagttggaagtttgaagaaaaagttgataactgaaccaggccactgttcatgcatgctcggtggaacctctacatctttgatttcgagtttttgactgtgtttagttcacatcaaaattggaagtttggttgaaattagaacgatgtgataaaaaagttgaaagtttacgtatgtggaaaagttttgatgtgatggaaaagttgaaagtttgaagaattattttggaactaaacacggcctttactccagtttccattgcattaaatgatctatatgaacggatggaatggcatatgtggtgttttcaattcacctactacatgctgcaaacgcaaacgccgacctcgacggcattagcaatccgatccacacaacacaaatcgctgcactcatcagaatccaacgatcgcattgccggcccaaacttttttcttgccatcgtgaggttaggtttttttgtggtcgaactgctatagatttaacacggatactcgtatttatggttaatttatttaagttgtaggtaacatactcgttgattgcgagatgtttgtaatgacttcgtcaatctcgtaccgacccaatctttgaagaatgtccatagagat

SEQ ID NO: 44132 - DNA, 1132 bp, Oryza sativa
tttttgaaaaaatttctagaaaagttgcttaaaaaatgatattaatctatttttaaatttaaaatagttaatactcaattaatcatgcgctaatacctcaccttgttttgcgtatctttccaatcttctctatctcctcctcaaacacagcctaagtgtcggtttattaggaaaaccgtcatttatattattagtgttggttttttaataaaccggcacctatataatattataggtgtcatttttttacttttagacccattgaagggtcgggaggaccgaaaaagtctcatactatgtgccaagtttagggcgtttcttatcaggagtttcgtagtagtgtgtgaatttgagcccaacatggaaaaaaagaataaaatgcactagtggcccttaaacttgtcataaggtttcacttagatccacgaacttgtaaagcgtacatcgaggtctctaaacttggtttaatatatcaaccccgtccaaagcattgtttgaccgtggtcttgtctacgtggcacgccacatggacgatgacatggcgttttttttcatttccccttttctttttcctcctattcttttatcttcttcctccactagagccacctcgagctcccccgcgtcaaagaggtcgaagaagagagaaatgaaagaggaagaagagagaaacaaagaaataataataataataataataataataataataataataataataataataataatgatgatgccatgccgtcatctacatgtgatgatgatgatgtgccatgccgtcatctacatgtcatgccacgtaagtaagaccacggtcaaatgagactttcattgggatgatacaataaaccaagtttagggtcttcgatacacactttgcaagttcatggatctagataaaatttgcttacaagtctaaggaccgctagtgcaatttacttaaaaaaaatagtaaggaccttttataccaagctaagttagactcctcgatggtgtcacttggtttcaggaggagcgactcagaacacagcatctacacgtgtgccgagcttcgcggttgatcgtcggcgtgtacgttgacaatctcatcagcaccggctgcagcagcaaaaaaaaaaaaaatcga

SEQ ID NO: 44133 - DNA, 666 bp, Oryza sativa
tggacatcgaatgccactctttaaaatggaaaaaaaggagtaatcagctgtgacacgaaaaaaaacgaatccttttgtagctcatcatttattggaaaatatatatacatatatatatatatatatatatgtatgtatatatatatatatatatatatgtatgtatgtatgtgtgtatgtatgtatgtatgtatgtatggcgcaagagttcctcgtattatccttgtcttaaactatatggcagtttatttttcacataatatttgatcatttactttattaaaagtttagtacaaacaagtagcgcagctaattaagggggttgccaaaggccctatccaaataccaccaccactacacccctcatatttttactttatattaaggttagctaagataagtatatttatctagtttgtttttgtatagcttgaaagtattatcagtttagttagttagcaagtctaaaaatattagcaagaaacatgatctacaaaattagtttgtgaattctcatctttttcaaagtaaaatagatggtacttatttgtgagattattcaatagtttacattaaaagaatttagcaataaagactagtttcaaactttcaatgatatcattaaagagctaaaattcatgtttttttaaaggactactttacgca

SEQ ID NO: 44134 - DNA, 922 bp, Oryza sativa
agtagaagatagtgcaattaatgatgattttgccctttcttttgggattaatcgtgcacacgtcagtccacggtggatgagtttccggttcaacaggacgataccgggtgctgcatgtgcacgcctgacccttataattaaatccttataacaccgtgtacaggacacattcatccatctttaattagtttttttaattctaattgcatgcgtgtctggcgatctggaatacaacatgtagctcaaccggtttagctagatccaatcattcgacaataatattcattcagtgtcattcaatctctcactcatccataaataaaacacataaaaaacctagtggccatctaccgtttgatcggggtagctctagtttcatccgagtctatgctatgtggaaaaaaaacttgtatcacgacgagaaaaaatatatcatagcaaattatggcataacagaaaatttgatctaaattgtaaaataaaacaaaattttaagtaggagatagtggaattaatgcttatttttcccttttttctaggattaatcgtgcacgcgttagttcgcgttggatgggtttttgttcagcagcacgaatgcaccatacatacccttataaatccttgtaacaccgagtacagtacacggtgtgccctcacatgtttgtgtgtttccgtggaagcgtaggtaacttgatttgtttcagagaactcataactttgggggtgtttacattaagaagttttgacgtgtcacatcaaatattatatagggtgttgcatgggatattccgatactaataaaaaaaaactaattatagaatccgtcagtaaaccgtgacaagtttattaagcctaattaattcatcattagcaactgtttactgtagcaccacattgtcaaatcatggagcaattagcctta

SEQ ID NO: 44135 - DNA, 534 bp, Oryza sativa
cctatgtacttcactctattgtaaatatggctataaaatttataacgaatatttgaacatctaaatgatataaaatgaaaaaaattatcaactacaaagttatagatttcgtcgagatctataattttcatataaagtttggctttatctgacttatatgaaatatttaaaaactttataactatcatatgataaactatatggcaattttgcatttagacccatcacgtcaaaaaattgccctctgaaaggatgttttctaaaaaagctctcccagagtgtgttaggggtgtagatatgtaattatttgaaacaaaaaattatttatgtaaatattttaataaataataaaaattaataatacaaaaacgaattcttctgtctattcataagaaaaggcccaatttatccaggctatacattgggcttttgtactgtgcaaaaactatcccatgcatgggccacagcccactcttgctttcatattggcccacttgagaattctcactctttttcttatggaaaaagtacacc

SEQ ID NO: 44136 - DNA, 1367 bp, Oryza sativa
accagccaactgaaatactaccattagtaaagaattttttaaagaaccgtctatcaaaatcattatttttaaaaacagtttactaaaaggattgtacgtaaaaattctgtcttcacagatggtttgcttaaataactatgcttaaaaattggagcaatattaatattaacgatgaaatttggcaactgttattagttaagaccgagtcaagggaggatttaacgctatgattatagtagattcggttggaaaatgtattggaataagttgataagtgtcatggttatggataatgcataccctctatcctacgagtcatggaatgtagggatatcttcgtatgtacggtaaagctctgtatgcgataaggaaatcgacaaaagattatggaaataaattatggatgcttactgatgttagttttctgttgaatttctaatattgcagttatggagcatcttggaagctcaagcattgcgcgtgggagaggcaagaacaagaggatttggacgaactttgattgttcaagttcgctttagatccaagctggaaatcagaaggagatttcaaaaatggatactgcaagttctagagaatgtacttgctaagaagttgtcaagttctagccttactactgttccgcacattgagtcgagagtaagacactttaggactaagtttggcgtaattgaagtgatgctaactaaaaagtggcttttctcgggatgacaacagaaagatagatgatacaataatgtgagaaacaacaatatgatgatcattgcagggtaagtcatcaaacaaagtatataattatatggagtacaaaatttatttattgattcataagtcgctattggcggactgcggccgcctgccgctaccaattagccgctattgcagcagtggggcgaggtgatatcaatctatttacattggccaccgaacaagtccaaaggtccggtcacacgcgtggggagaccaaagtggctgtactaccaaatagcatgtggctgctatactaacttgcgcatgtttctgtgtttctccgctgtgcaacgaccatgcaaccagccaactgagatatacctctcactagtacaaaaatcatctatataggttctaggttttcctttcgatgagaacataatattacacgtggattcatgataaatcttatttgaaaatagcggtggttttttaaagaaccatctatcaaaatcattacttttaaagaggttactaaaagaattgtatgtaaaaattgatcttcacagatggtttgcttaaataactatgctaaaaaattggagtaatattaatattaacattgaaatttcgcaattgttgttagttaagatcgagtc

SEQ ID NO: 44137 - DNA, 956 bp, Oryza sativa
cctttcacaataattatggatgtaataactggtaataatttgcttagctcctggtttggagttagatctgttcagccgggtatggttgttcaggatggttgggcctgtacagcatgggtgtgctgttcagtgttgattaaaacttctgattaattaatctactgttttactactcttaactctttgctaaatgctgctttcgcaaatgagcctatattatgccatcctttggaatccttgtgcacttgcatatttgctgtgtggcttgttgagtatgtcatatgctcattcttgcaataatcatcaaacctcagttgaagataaaggatccagaaggagaagacgtttggcttataccccagttgagctgcctatgggagtggagctgaagccatcgctagaccgttaattccgctgctgtttttcttttcttttgtaagtatgtaacgttattattatgatggatttgtatattaaattgtcagtttgtgtacctcggctgattcctggacgaggatttcatgcacaaattagttcggaaattattagtgaatttccgggcgtgacaagttggtatcagagccatctcgactgtaggataagccaaatggtcaaaccttaaggactatttttccgaaaacataatttgtgaaaattttcctttcttccttatctagaactctttgcaaattgtttcattgtctactctcttctctcgttcaacttgagtagttctgaaactagtggttgaaacttgaagacaccaatgaggtctacttaaggaggttaagtaaagtggatcgaggaagaactgaagtgccaagtggtcaagatggaatgaagtttggatcctgtcttagcacctataccgccaaagtaattttgaagaatagttagtagggtagaacgtttgttgtttgctttgtgtgtaggtatggttgcattcccatcattgg

SEQ ID NO: 44138 - DNA, 701 bp, Oryza sativa
attattacaagtaacatataaattattagtcaggttctctctactataatctttccacgagattaaataaatacgataccattggaatactctcgggtgaaatgctacaatggtatatccgtgcgcttgcggatgaactctgtaaccataatataccaggagtatttctgcgccattgctgggaattgtatttctagtaatgtcgttaagaaataccaacagttgccttgctcgcatgccccaccaaaccacgttgctccccttttcgacatcttctccttcttgcaacctccgcatcaccatcctcaatcttttaagctctgatacacccacatcgtcgccctcttccatctttggcaagtttcacctggcaacatggctctcttctcctcgcaacctcatttccacaattctcctcctttgtactcggctccaatgctcccacaccgttggcctccaccatctcgtgttgctctagcttcaacacatgcccaccatcctcatcatctcccactgctgaggcgacacaaccatcgtcctagctatccctctaagccgacaaacacatctcactttctcatcctgaccttattctcccctaaccttaaccctgcaaccctatccattcgggagatcacttgagatgaaaccaggccatgaatcatagggcaagctctaagctgtcagggacgcggtactcc

SEQ ID NO: 44139 - DNA, 755 bp, Oryza sativa
tttttttattgtttagtcccggttggtatgaacaacaaggattaaagtgttgattttagtactggttagtgttatcaatcaggactaaggatagttggggccagacacagcctgataactgtttgaagctggattaaaaatgatctttagtcctggttggtaacgggattaaagataaaaaaagattcgtctggcttttgaacctggactaaacatattcttttggtttatttgaaccgggactaatgtgatttttgccatttgggtaaagatcacttctccaatagtgtttgtactatacgataaaacaatctttggccaaaaattgaggaatttggtttcacgattaattttacatgtctcttcatcgcctttggtcacccagctagctcttttttcacgactgctaacaacatatgtcaaaaggtctacctaacatatattttcaaatttaaaaatgagaaatactactatatgcatttactcgttctataacatgatatctatggatatcactgttgcaatatgctatccagtggtagcgttttatctgaaccctcgtaccattcgcaacaacgtaatgttagcatcaatagtttcatggactatggccttgtttgataacaaaagtcttctattagtttagttttattgttttttggttattaagttagttttttggtttatatgatttataagctggtggatttaaagctttaagtaaagatagagtcccatagctatctcacgtaagg

SEQ ID NO: 44140 - DNA, 952 bp, Oryza sativa
  unsure (1)..(952): unsure at all n locations
gggaggaccccacccgttcgggtggttcggccctctccccgctgtcacgcctaaanattcccgagtagaattccaagcagaatgtgcattaaaatccccgtccaggaccggccggggtacacaaacgacaatgttgacattcagatccacgtcttacaaacatcataaaagtcttacacaaatgcagcggaagaaaagaaagacaacaggagctaagccttgactagaactgcagcgggaacaccactccacaggcatcctcgacggcacggacgaagcctactcctcggagaaaccttcatctgacacatacttgagctctggggttgggaaaaaatagagcaagactgagtactacccactgtactcagcaagtcataccggaataggggtatgatgcagggaattatcaaagaagagctggagtggttcatttgcataaagcgagcatttataaacagaagttgaaagatttaaacagttgtaataattaattaatattaactatccactgtccaacgctatcccacgttgcaacaggcccaaccatccacctaaactatccaatttcaaaagattacactagggtaagactaatcacggtgaatctggttgaccgcccataaccgcgggcacggctattcgaatagttttattctgatcagaggtgtacaactgtacccacaagacacagccccacgacacgtttccgtgcgccgacatgccaccacgacataccggaaagaggccgtgacaggacccttcgtataaccccctctaaccaagcacaccacacctcaggtttcacccccactcctcgcaaggcagcgggcagtcccctctcgtgcctaggtgaatccggaagcgacagaggccgtcgcagggcccgccccgctccatcacgcccacccttgcctggatgcgtcgactagaggagagctacactacaagc

SEQ ID NO: 44141 - DNA, 3365 bp, Oryza sativa
gaatcgtctgcaccacctctatgggctgtatcggctgtcttctgtccgatccatctcagccgatgcagactccagccgatgccttcacagccgatgcatactctgttcttcgaatccatctcttttctgaatccgcttcgtttccaatgtcgaacttggttcatattttaccaaatttggtcgtgaacacatgccccccaagtccgctatatttgtaatgttgcggatttgctcaatttccctttccgagctgaactagggtttctaaaaccgattccgttttggccgttaccgtgctccccttttaaatagtaaccaccgctcttctcgtttcacggcgtcacttccgtttaaaccgctcttagccaaaactttccccaatcctccgcctcgagctctccggcgacaccttcaagatttccggcaatccaagggcgaccctccgcgacaccaatcctctccgtcggcaatgttgaactccgccagtccaccgagcgcatcatccgccgaatatgttgaggtaagtgcccatcggctaaactcccttcttattgcgcaagattggttcttttcccgctcaatcctcgatttttcttcttctgtagcatctcactcaccaagttgcgatccctagcataactgatgagttccagtttttccttggcccaatcggcaatctagaccccacaaagtttatcaatggagaaaccaaccgaattccttttagatttgccaatccagatctaagctcctggaaaaataccttcaaatcttggccatcggctgaaaagagttggcctgcctggtataagaggatgtccgctagcaaatcaactcactgggaagaaatcggcatatcccaagccttggccttaactgtagcagacatggcgagagatgaatctatgatagcagctgctacttacttctggtccacggccatgaacaccttcctcttctcccaaggagcgatgaccccaactctcttagatgtcatcatgatcactgacctagatgtcacctcatcggctaacctgcctagcttggatacccaactcacccatgagttcaaaaccaggagcataggtggttggttaggctatgttgtgaagaacatgggaaccgggccaatttctccaagggaacatgcagcctttccttatgatgtggcttgaaaaattcctgttctgcggtccaagctgtggtcctactgcaaactggcaacgtgtagctgagaatttggtagaaaagaagcatttccctcttggaaagtatctgctaggctacctatatcaaactctcaatgctgcaataaacaagatagtctctggaaaatcaattggcacagggggtccatggtggttacttcaaatctggttgaacctgcacaccaggatggttgccgatcgaccagcgctagccgatgcaaattttccaaggtttgagccgatcatcagagatgatggagaaaggagtactacacgccgatgtatgtccttcgaagaagcagcatcggtcagtaccgcatccaagttatcggctgagctcttcaaagaatggttcaacaacttttatgatgggttcgtgttgacagaaaacacgaggcctgggagatctgcttaactccagtgcaggtccaaaactcgccttcggatgtatgagcgtgccagttgatttgatcttgtaatcaacaagaaataaagacaaaagaaccgtagttaaacctataaatgatagccgatcggccaggtgccgatgacatatcatttatctttgagccgatgtcatttgtgcatcgatcggcaatcgtgaataaataaggaagaaaaactaaatctactcgatcggctgtagatgttaacgatatatactccttataccgatatatacttaaatcaagtgattgggatatatcggtcgccatgccgagacagtataaatcacatagaccgaaatatatattaataataggactatataagtttacagcataaccgatcagatagatctagcatgtatcggctaatactccgatactactctatatcaggacattaaaacaggtatagaatatcaagcaaaagcctaacacattcaaatacaccaatatcttggcataaagggcatatttaacatatcagtgaagcaaatagagataattatagttaaatcagatacgaccggctgaaactccgatgctattctaatcggcaactaggtggcaggctagagatcaatattctaagcacgacttaataggtcaaactcaattgatgcagcattaagtatgaaaagaagaacaatatctagataatcaagccgctagaagattcatagaatggtagatatcttatataatctggatcaacgtaaagatctaacctaatcggctgtcttctgcacacagatgttggccgatggtgtattagataacaatattgctgaagattatataagatatatgataacttgatgaattatacaataagattagagtgtcatgaagatgtaagcactaatcctaagagcacgatccgtcataacgaattttacctgttgttgaagatcgaaaccgatgcagctcaacccgaaagtaagaattcgtcgaaataaaagcaaaaggtggcgatgcgcctgaattgtattgaatgtgtcttctttcttttacatagggctcggggtctatttatacccgagaaatacaagatatgtccatattggacacgactcttatctctaacaaactctaaaatatcacaagtctttgcggcagacttttgcctaaacatatctctaaggaagttacataaaatatcctaattaatagatacaattaccttctcaggactctatccatgcgtggcaatcatcttgaagcacatcaactcgaacccaatgttgcacacgggtcgtattgtcggaaccggctatatcagcttatctagttcaactcaatctcagccgatcctagccgtagccgatcaggactccagccgattcctgctctgttccaaaactcgatctccgcctccaactcttccttgattaaatcccctttcctgatacacatgctaccaaatttggttgttaacagttccccaagaacactagaatctggtttgcatatgaaggacatagcactttcgagcttcctggtgatttttggtttgacgagatcaattccaaaaaatatgacaaatccaaagaggtattctcaacagccatcaacccttgcatcatccctgtcggcatccaccaaggcaagaacatccagatgacctacgagttttgtcatccgacagcgccacaaggcaatttggcatgggtcaactgccaattagcttattcttcaccgacaagatcca

SEQ ID NO: 44142 - DNA, 1160 bp, Oryza sativa
caatcctcatagatatcagtatgatcacaggtttggatgtcacctcatcggccaaccctatgagtttgaacacaaagaaccaatatgacttcaaaaccaaaagcatacgaggttggtcaggctatgtagcagcatacatgggccatggttcggtcacccctcgagaacatgtggcttttctattaatgtggctagaaaaatttcttttctgtggatcaagttgcggccccacaaccaactggcaatttctggctgaagctttagaaacaaagagacaattccccttgggcaaaattctcctcggctatctataccagatgtggctaagatagtagtcggttcagtagttggagcaggtggaccctggtggctgctacaaacctggttaaacctgatagtcatgaaggttgtcaatcggccatccgtatcagaagctgagttcccaagactagagccgattgtaggggatgatgaagaagagcgtactcatcggagatgcacatcatacggcaaatacgcttctacaccaactgatgccggagcaaaactatcggctgaactgctcaaggactggttttgtagcttctatgaaggctttcaaaaagatgctagagtctggttcctttatgaagactctgcacaacttgaacacccagtggacttcaaattcgaagacatcaatcatgaagtataccaatcatccagggaaatcttctcggctgcaatcagcccatgcatccttcctgttggcattcatcaaggaagaaacatccaaacttcttatgaattctatcatccaatgagctcagctagacaactcggaatgggccaactcccgatcagcttattctttgctgacaagatccaatgccgaggagggattttgtcaaccctgatgatggatcggctgcttagccttcaaggaccccctctgggcagtattgacaacatagaactggcaacattcaggagcaaaagcttcgacaggtggtggggtgaatggaaactgcatttattccaccaaccagcttcaatgtacatgacagacctctttcccgatattgtccctcaagtaagtcttcaactttgctcaattttagttaaataactgtttggccaattgatcttaactaatcatccttttgatttgcaaacaacag

SEQ ID NO: 44143 - DNA, 696 bp, Oryza sativa
taattgtggtaagaaaaagcttggtctcgcgtcgccctccaccacgggcggctcgggaggcgacaagcgcctccaccaccgcccgagcggccgccgacaaagccgcatggccgcaagaatggtgacggcggggcttcgtccacctcatgcttgggccaagcgagctgttcggggtggcgcgttggtggtggtgccggcagtggcggagcctaggccatggcaggcagccaggacatgcttgctagggagcgaggctggccgaattaacgttggtgtcgaggctggcacacgggaagagatggtgcaggcgtggcaggccggcgcgtggatggcgacggtaaccggaggtggaggcagggagggaggagaccgactatggagtacgggctagatctagagccaggcaatggtggaggcaggagaggaggggccgacatgtggtggggtcgctgtagcgacgatggcagtggtagggcggcagttccggcggccttttggtaggaggttctcatggccggcgggggtggaggcttgcatggcgcgagaaggcatggccagtgacacggaggccaacgcagctgaagcatctaggcccccgttattaattttggtaattaatgacaagcactaattgtagactaaccgttgctattgagataatattttaagattaggtccatgtcatgtgtgcgcatg

SEQ ID NO: 44144 - DNA, 637 bp, Oryza sativa
aaccagccaataacaagttatatagcacaactaataaagattacaacatatatatgataactcgacggattacataaacaagattagagtgtcataaagatggaagcactaatcccgagaacacaagccgccatgacaagtttacctctagtttaagaccgaatcgatgcagctcaacccgaaagcaagaactcgtcgaaatagaacaaaagtaaaaagggtggcgatgcgccgagagtgtattgaactgttgttgttttttacattgggttcgggtcatatttatacatgagatacaaaatatgtccttaccaaacacgactcttatctctaacaaactctaagataccataagtctttgcggcagacttttgcctaaacatatctctaaggaaatcatacaaaatatcctaattaatagatacaattgcctttccgcgagctttatctctattgttgcaatccttgtgaagcacgttgatcgactctagaaacaaccttgaagccattaccgtcagaatcggctgcaccacctctatcggctgtataggctgtcttctgtccgatccatctcagccgatgcatactctgttcttcgaatctatctctttgccgaatccgcttcgattccaatgtc

SEQ ID NO: 44145 - DNA, 846 bp, Oryza sativa
cgccatcggcactcttcaccagcgctacccggacgagttgcagcactcgccctaccgctaccaccctcgtcgcggaggagcccgcgaccacgccaccttccgggatgctagctcggaggatgacgctaccatcgtgcacttggcgcgcatggtggaggcgtacgacgcggctcgtatcgacttccatcagatggtgcgccgtgggatggtcgagaacaacttgaagatcctggagctgcgtcaggagaacctgcagctcaagaaggacctagacgcggtggaggcgcagctgcatcagctcaagatcgcccagggagagatctgccgccccaagcgtcgccgcgtctgccgcagccagaagatcaccgcccgcaagagcacctccaggcctgagcttgttcgttagtccctggcgtggacttgcttcgtcgagacccctcgtgccgagcccgcgcccgtggttccccaggagggggaagcctccggcgttggtagcacggaggatgcgctgttgctcaccttccgtcctggcccgtcgcagcggtagacgagcagttagtaggcttgcgcgtgtgttctttctcgtttgtcttcttgggttgtgtggggcacggttatgccggtgtgtggtgtaactgtgtcggagcctgtctttatttattcgcctaagcaacttgaactttaatgaacccatttaatagcagtaataaatttaagaattatggtagtcgtgggtggttagctttaattgtcagctctctctgtttgctggttctgtgtggggttttcagatggtgatgaccaggagaaatgctaacaccggtgatggcaaccaacctgaaggca

SEQ ID NO: 44146 - DNA, 697 bp, Oryza sativa
actaaatgatttcaactgaaaaaatcatcaacaacaaagtggtataactcatcaggatctataacttgtattttggtcgtttcttcatccgataaagtggtttgtaacattgttcacaaaatgtacatatctcttatttagttttataacatataagagagatatgtaaattttgtgaaaatattactatcactttgtcggatgaagaaatgaccaaaatagaagttataaatcttggtaagttatacaattttattgttgatgactttttcagctgaaatcatttacttcttcaaaatattatttgaagttttgaaattcaaatttttagttgataaaatgaagtcacaagaaaaaaatagccaaaataactgcatgcagtaagaacacaataatatgatagagcatgattttagaaacatttaggaaaaagaatcatccaatttggaatttatatgagtgtgataaactagttttattttttttttcaaattttattttcccatacggctccttaaatggcccgtaatcaatttttccatacgggctcttaagtgatccacatgcagcggacttcttaagaggcctgcatgaaaaaatcgatttttccatgcgggccacttaaggagccgtatgggaaaatgcctctcgatttttccagacgcgactagttatggtccatttacaaaaatcatgg

SEQ ID NO: 44147 - DNA, 674 bp, Oryza sativa
atgaatgacaggaacactacttggtggttgttgacagatagaccactagccaccttagctcaattattgacataaaaattataggtttcctgacaaattttgatcccatactaggatacaaatttatactaattaaaatggcaaataagtatttaattgtttttatggtattttgatggttcatgtgaatatgtttccaagaagaacaaattaattgttcacataaaattcatataagatcattaggctagcttcatccatggaaaatattatctctgcaagtagagggaaaagaaaagattaaaaacaatattttgccacaacatgaactggtatggtgcggttcatcgtcatatctgaaatcctaaaatctccatggagctcctgatcagagatttttcagcaggctgcccaccaaaagatcagcaattacctcagtccaatgtcttatctgatctaaaggatgaaatggaccggcctgaaaagagaaaactactaaccttttggtttgtggaatcctgagttggtatcctagatgcttttgtcatgctttcaaaattagtacaaaaataggcctaaaaagaattacataaaaaccaaaaaaaatgtgcatctggtgttgtgctgtcactctttcgatttctcggacaattttattcaatatgaaagtgtgc

SEQ ID NO: 44148 - DNA, 705 bp, Oryza sativa
attcctgcagccctttagttcacgctaaaattaaaagtttggttaaaattggaacgatgtgacggaaaagttatgaagtttatgtgtgtggaaagttttgatgtgatggaaaagttgaaagtttgaagaaatattttggaactataaacacggtggtagctactagtgcaggacgtgacagctacattactagataacgtcacatcctgtactaggtagctacattttgggacggaggaagcagtagtttctagcggctataatttctcgtagaattaaaacttcatttaaacagtctagtttttcacccaaattctaaaaaactgtaataaaaaccagaagcttggaaaacctaacttatctagcatattcgttgcagtagaagctccccaacttatccagattttataatatcttaaactcccaacttatctacattttaagaagttggcttcaaaccaattgcattaagctccccccaacaggcttgtcattttttgttctctctaacaatctagattttcaactaaattattttcaactaaattctattaccaaaatctcaaaatataaaggattttgaccatgtgtagtttaaaaatataagaaaatttgaactatatagttacaatatttttggacttgggtcaataatggcaagtttatggaacttccgacagctgtacttctaccaacaacaaaagc

SEQ ID NO: 44149 - DNA, 2620 bp, Oryza sativa
tgaggcatgaccgcagccctctaggaggaagaggcagcccaaggaccggtgagacccgatcgtccaggttgggcgaaggatcaacaccaaagtgaagcaagaatgatgcactgctcatatgagctatgcaactacctgaaatcagctatactaatgatttctgtataactatggcgtacggttatatgatgtcttatgatcaagtatcaagtatgagtctatgagaatgtttatgtatatctctagcctagtatatcaccccttcctctttttttggtgtatttcctgatttggagcaccatatgtgtaatctctgaactaccagaatattagagtgactacttggtaaccttttgagtttcatttgctaaattcctgtcagaacttgtggatgattcatactgaaaactatttgtattcattaattctttaaaagaaacaggattatagttggcatcctttatgcttgtgtgttgagctgaaatatcaaatacgagtgctgtatactcgtattcttctatcagagatgaagtttcttaagttattactagttaacatatgaaactcagttggcccaatttccctctagaatttggacacattttgttagctatatgcattagtgagcagcaacaagcataaatcttgatatttaaagaacatttcaatagctttattcattttctgaactgaagaaaacctcaagcttgattggtgattgagacttgtgtataaccgatgtataaagttgtgctataaaatctcaagctattgcgatgtaactagtttccagatgacttttcttccttgatttgtggcaacgatgtgatttgtagcttctctttaagcgtcatgaccatgatatgtttcctttttctttaagataatgaaagttttttttattgatctcagtcaattacatcaagatgatacaattgtcctaagaactgacatgcttcaaagacctataccgaatgttatgatctactccctccatctacttttgatagtcaaattttcaaatctgaaaaatttatttttgataggcatatttcaatccaacaacttatcatcttaatgactttcttggatttaatgcatgactctttatttttccacacatgattggctacatgggcattgagaaatgtagatattaatgaatcgcttatttacgaggaatgactagtagcatatttaaatggatgataagtagaattacttatccttggtctgtgtgccaagatgaaatatgactatcaaaagtagatggagggagtatttcagaatataagtttctttcaaaatagtcggcgctggcgtgaatcacgttaaatccaatgagaaactaaagtcggcacaataatgcaatatagagttggtcttgatccaacaaattctagactcaagaacttcatcaccaatgcgcatgcgaaaaaacaagataagatgacacatgactgattttgacagaaagatgattgcatatttgcatagggacatgccaattgtctgagtctacttacaggacatccactgctgatttttcagtcagtaatttgctggtaaaggacatcaggtatgatacacattagagagctgcaagctggaaaaccaagtgcagctacacattatgtctgtacttctgtactcagttgcagggtacttgagagctgcaagctggaaaaccaagtgcagctactgtctctgactgtacttgttcatgttactacttactatagaggggaagatgccaatatcaagatgcagctctttctagtgaagttctatctgatgaaagaaacaaagagaagaacctccaacacatgcctgcagtaggtagaaagggaagagagggtgccttacagccacattccttcttcaactgcagccattatttcagctttagaaagcacactgcattggccctgaagcattgacctccagagaattcattcatcagcatgctagctgagggaggttgagatcatagataggatcataggagctgctaccctgtcatgccgctgggcgaaacgacaccccgtttgtcgacaatcatggtcgcctttttcgtgaccgatggatgatttccccgacaacccgtgagccgggactagtaacccaggattgcttccacaggtgatgaaactgtgctggaaagatggacaaggggtgatcccaaccacaagaaccctctgaatgatgagagtggggggtcaagagagtagtggctggaattcatcggcgcagcggagaaaagttcaggcagaatgatccatctcttgaggtccatagctgatggctggatgagaattgtgtgcacaaggaggcattgttctttgtgttctttcaccatcatttgatctgcagacagtaagtagtgtgtcacacccagcagggaattccctgagaaatggtcccattttgacaggccaaagctccttttctctccaggcgtctctgaattcatcatccctgatcagttcctttcctacatgcctcttccatctactttgatgcattgccattggttttatctcaccttttttttttcagattgttgatagcaatgtgacaattcctatagagggtgtagatggatcaatcaaaaagttca

SEQ ID NO: 44150 - DNA, 7408 bp, Oryza sativa
caagatatcccataaaatcaggaaaagaaaaaggaaagagttcttaatcttaggtttgccggattttattgcacactgtgtacctgactctcatgaatcttgcaaactttataaaagattaaccggttgcatctttcatctacattttatggagatcaatatgaagtacctaaaaataataataatccttattactatgtgatttttccagaaaagcatcagttcattagataagatttctaaaaagaaaacaaaggaaagcatcccaagattccatttggaatacaagtctagaggatgagctgaaaatggataattagacagatttctgaaaagaaaacaaaggaaagtatcccaagattccatttggaatacaagtctaaaggatgaagtgaaaatgggataattagacagatttctgaaaagaaaacaaaggaaagtatcccaaaattccatttggaatacaagtctaaaggatgagctgaaaatgggataattatactttttaggcttcattcggcactaccatttcccagcttatattccctcattttccacgcgcgcacttctgaaccactaaacagtgtgtttttttttttgcaaaaattttctataggaaagtggctttaaaaatcatattaattaatcatacgctaatgagccatttcgttttgcgtgctgggatgagcagatcctgacctgctcatccgaacacacccttacttggtagagaactgcgagttgatatgtgttcagaaagagtacacgcaacacaagataataagatggaaaagtgaaaaccaaatatgtgtacctgatgcccaatgaacctggccctccttaagcattcacggtacagctacaacatgaaaaaaaacaatgttcaacagcaaatgacatttttgcctcatctgacattatttcatttcattgcaatggtatctcataaataaacacaacgaaaaatcaggctacacgggcatgacagacatgttttggaaaagcttttgtaaagttttagggtgattcactgatagagctgctctaactatacatgtaaaacatttacaagactgactgtagaactgttctaaccaaagaaccatacatgtagaaattagggaccgactatagaaatgctcaaaccaataaccatagatgatacatgtaagaaaattcgggactgactatagagctgctcaaaccaataaccatacatgtaagaaaatttgggactgactatagaactgatccaaccatacatgtaaaaattcaggactgactgctcatcaccacacacaggtcgtgttgatgtcgtcgatcggaaaaggcgtaacgcagaactgagacttactctgatcacattatcagcaagctctggaggcaaagccttttgaatcgaaggcatctccttccacccactcttcagtctctgaaccagtcactgaaaacatgtaaccaaaaaaaaaagatcaaacctctagttaacccacaaaaatatccaattctaccacaaccaatcgccctgccgggcattcttccccacaccagaccaaccatcgatctgaaaacttccccacaccagaccaaccatcgatctgaaaacgaaggttaacctaaccatcaagccaagcccccaatgaactaggacagtgggaatcttgcagtgcagctccgacatggaatcgaacttggcgaatcccatgttcttggccccgctagcctgaggccttaccagctcttcgtccgtcgtcatcggaggaagaggaggagcagggacagaaaagggcgcagacggggaggggtgtacctgtgactgccacggcggtcgccgtggggagggggagattgccggtggcggtggcggcggcgcacgggcgggaggggacgagagcggcggcggcggcgtcgtcaagctgcggcgcatggggaggaggcgttgcagagatggccgatgggatgtttatgggccggagtagagaggcccagcccaagagaaaatttggcccatgggcctctggctctctgaaattgggcttacacgaggagacatagccccacaattgtatatttgtcgacacatgtaattatagaatattatggagggatttttaaaagtaacaatgtaattacaccacaattgtattataattatatttgttaaattttaaaaagaaaatttgttgacgaatgtataggtaatatctaggtgacatatcgtgagttcgggcctaatagtgaatgttcaatttggtaatgttaaattttggcacattcggcattactgagtttcggtggtgctaggatatgttttagttaaagccaaattttggtagaattttcaagggggagacttaaagaattatcaaaatttgctacggtgacattggtaagaatatgtttagtttgttgccctatcggttaacattgaaagtgtcaagaaaaataaagaagccttaaaacttaactttagaactgatttcaagtatttttaatgtgcatttttaatattggtttttaagtcactaaaatacgtatataaaaattttacttataaattattttttatcgctaataaagccgatttagcttataatcaactcctagttaatcgatgggggcatttgtctttctcttgctctatttcaattgcaacaaacgatctgttttttttttctcatgaacttcatttcgatggcttgaactaaatttgattcctagatcgtcaatctcttcagttcaatttttacatatatatttccaaattgattcatgtgcggcaatggcaattcttttcacttccaatatttctgtaaaattattctgtattgggaataatttgctctttcttttttgggaagggaataatgtgctctttctttaatgcaaatgttagagtatatggtagttagagttatattaggataggatttgtttgtttggattccttccatgtctgtaatccttcattatctcctccccatgtactcctatatatatcggccccccgagtctcaacacaatgagtcccacgttacgcagtatacctctcctatactatccaacatggtatcccccgaggctcaatacaatgagtcccacgttacgcagtatacctctcctatactatccaacatggtatcagagcgggcgatctagttgcctctctcacgcttccgccgctgtcgcccccgggagggttctgatctcctcccgaggattgtcgccgttgtcacccccaggagggttctgatctcctcccgggggcggccaccctctcctatactatccaacatggtatcccccaaggctcaatacaatgagtcccacgttacgcagtatacctctcctatactatccaacatggtatcgagcgggcgatctagtcgcctctctcacgcttccgccgctgtcgcccccgggagggttctgatctcctcccgggggcggccaccgttttttgataccatattaagttgcatgcatcgcctctctcacgcttccgccgctgtcgcccccgggagggttctgatctcttcccgggggcggccaccgttttttgataccatattaagttgcatgcatcgccaggccaccgttttttgataccatattaagttgcatgcatcgccaggccaccgttttttgataccatattaagttacatgcatcgcctctctcacgctttcgccgctatcgcccccgggaggtttctgatctcctcccgggggcggccaccgttttttgataccatattaagttgcatgcatcgagttgcatgcatcgcctctcacacgcttccgccgctgtcacccccgggagggttctgatctcctcccgggggcggccaccgttttttgataccatattaagttgcatgcatcgcctctctcatgcttccgccgctgtcgctcctgggagggttttgatctcctcccgggggcggccaccgttttttgataccatattaagttgcatgcatcgcctctctcacgcttccgccgctgtcgcccccgggagggttctgatctcctctcgggggcggccaccgttttttgataccatattaagttgcatgcaccagccagttgtacctaaaagcctaagctgataggaaaaggcgggcaattcactttatacactccaacactccccctcacgcgagaccccctcaagtctcaagcgtggaatattggagtgggctgcaattattttttttaattgcgcgccagccaggattcgaactcgagacctctgactctgataccatattaagttgcatgcatcagccagttgcatctaaaagcctaagctgataggaaaaagcgggcaattcactttatacactccaacagcaaagaatcatgccatttgcaaaaattgctccatggaagacatgaattagtgcttgtacctttttagcggctcactgtttgcaggcatgatatgttgacatgttgttacctataaagaagttccttaatttgataagttggcatcattcacttctttgttggctagcccacaaatcaataaagtgtcctccataaaagcaaaaaatcaggttgggtctcttgattaattgtagtaacagtacctgcttacaaaaagtccaagaaagcacatactgtccattttcgcaggttgctatgtgaatgatgagatggttcccgtgaagagaagagctagctcttacctctcatgtgatcggtttagagcaaatttaaaaccaaacgatcagacaaaggtttttgttgcctagtttcagattataactttacaagaaagctagtagtaaaaagatgcttaattagatgcatgcatgaaaaggaaagtgcatcaggtgatgagtgtttctcatcgaagttcctttatagcttcctgtctagatacgatggagcaattgcttgaccacgtcattagcaagctaaattcaattatatctgggtcccacacctttacccaagttgtagatgactctctttagagtaggtacaatagcaggctattagtcagccgtaaacatattttaatgagataaaagataagagagaagagcagcaaggtacaaatctgtagccagctgcagcgcggactccaagacgcaatgtgtgtatgacaggtgagaccatatattaatagtatagtaagcacttattagatgaattggctgttaaattggctatagatgaattagagctagtagtgggctatactattaaacttgctcttaggtggccaaaggaaaaggtttatctttaattgcatagcatggatcatgccaattaactaatgagttgctttgtccataatttagtagatagatttattgtaaaaacatgaaagtacataaaattattctaatgtacgtattttgtgttagttttactaccattggagtgccatattcattactgaagccattatattggctattcatcatattgcaacaaaatcgttaagctccaaccacaacataccgtgagtaccgtccaacttatcattctattagtggcttgattcacctttattctctatttcggcgattggacccaacttcttccttcactatgatggtcggtcggatttagacttcccacactcgtggaagcgtcaggaccctctagaaacaaaatgtgcgccggagatgcccaaggcaccagcccggatgatcccacttcacttctcttgctatcctcaattcctcatgtccccatatcccttcatctccctatcctctctcctatcaacggccacctttgcacctacctccacactcgtcatctttctctcctatcccagtgcatctcagctctccgctacgacaaccatgtgcttggtggtcaagtcccttggtcatttggcgctcacatgtcgacgctgcagccgattggccccatgtagataattagtaggccaaggaggaagctagagcttatgccacatgagggtcatgcaaatgtgtaggtttgcagctgtggctcgatgatgacatcgcttttcaggacgatgcaaagggagttcgtttgctagggcaacggacgcaggggcattcggtttttctttttggctcgaacgcctagtggagaccgtttcccaaatctaattctctcatccaatcttggctcatccttgttcagctgctcgggaaaatcctatcttaattcccatgtatgttttatgttggatgagtcaaatttatggcaaatttgttttgcttgagctaaaaataatgggattagctacatatatctttatatagaaattctctccaaaaaaaacttttatgcataactatatataatgtaattataaatttgatataatttgaatataattgccttgtaactcaacaaatgtgttgtaccacagtgggggatagcgcccgtcattccaacaggatcatccataacacatatccgacgggtgaaaatttgaaagtttatatcctctaattttcttgcgacaaaagaacatcagttatgaaaataatttcgggtccacaaatataatactacttgaaaataatttcgggtccacaaatataatactacttccgtttcaaattataagactttctagcattgcccatatttatatagatattaatgaatctagacacacatatatgtctagattcatttaacatatatatgaatgtgggtaatgctagaaagtcttataatatgaaacggaagaagtactatttagggtatgccgttaatgccaagaataataagatttaaaatcgagaagaaaatacgaaccggagatcgagttcaattgcctcttttcttgaggcatttgcaaatttaccacatgttttttcaatattacaaggatgccacttgaatgacagttctagtggcatttttgtaattttctagtgacagttttatgataacgattcaaagtagtactccctccatttcaaaatatttgataccgttgactttttagtacatgtttgactactcgtcttattcaaaaaatttaagtaattatttattctttttatatcatttgatttattgttaaatatactttcatgtacacatataattttacatatttcacaatttttttaataagacgaacggttaaatatatgctaaaaagtcaatggtgtcaaatattttgaaacggagggagtagtaaatttgcaattgcctctcttctttctttttttctttttgccgttgcccgttgctagctgtatatacgcatgtatccttggctcgcacgacacgaaacatcaggatcatctacgccgcgtagccacaccaaacaccgaaaaccacctccactcaaatcccgccacgcgtccggtcgcggactgacagggtgggcccacgagccccacccagtcacgccccgccacgcgtcccccctcccttttattattatt

SEQ ID NO: 44151 - DNA, 665 bp, Oryza sativa
tgaacatacgatgaagggaaaatcatagagatcaaacgctccgtccatcatatcttgcaatatattttataaatggaactaattttccgaataatcacatgttattttgagtacacagcccagcgctctggcatattaaaaaaatgtgaggatttgccattttagcgtttttcactttgtcagtataggatcatagctagagagagcgatgcaaagctaaattccattaaccgttcaatggatcattagatcatatatggttggatcgagggtttccaaggcctgatggttacgttcgctagcagaggcacccagtgccggcgatgatggctggtgggtagcacaagaattcagatgccatctcaactgctcaaagaccacaattcatttgcaattccactattacaggcctcgtccttggcatgtaatagtgggcaggtagagggtgttgtcggtggggcgaagtggtagccttgctggtggcaggactagaagttggctggtcctgtgtggcggaggccacgtgcttccgatgttgggctggtgacagaccacggcgactcggtgcagagggtcctaggcgaaagcctagcagtgggtactccttcaggcgtggttcctattgggcactgtataggtacccttctccctcggcgacgatctct

SEQ ID NO: 44152 - DNA, 1721 bp, Oryza sativa
caaatgagattgtttctgaagtgtcaatttgatttgtttcagaatcgcctgtctgttcatgattgttgtcaatttgtcagtgatctctgattctctgaattctgaaggaaaaggaaattccattaaagcacggcattgccataggcttagcatgcaattaccctatatggaaatgaaaacagcattggtagactgtatcactataatggcaattaatcatgtagatctgaccaaaacggttcattaatccgacaaacagaagagaagaacaatgaagccggtcatggatgtcagacagttcagcaagttcggcatcaaactagtcacagatttcagaagagcatcatgcaagaaaaaaatgcagcatgaataatatatgtcattatgctacctgatacgacagatacctaagtttttcttccaagaactgtcaaatggatggcatatgctattctcatcaagaaaacattgtttactctgacaatcatacgactattagaggaataatctaatgcccataccttcagaaattatattaatatgatcattagacaagaatattcctctaatatctggaaagttatgggcattggattggttgaagagaaaatactaaggatggcacataacctttgtgctgtatgttttttttttccaaacaaaagaaaattttgggctgtttgtgtctgagtgggaggggttatcagtgaattatctttcggtgctacattacatctctgagacaaatctaaaaaccttgtacacataagacaaatacacataaaagattgcatcaacatcaccatatgtcgatcttttgctctatctccatcatcatggggaaatttcttccatgtttgacagtactacatgaagttgaatctacaggatgatgaaatactttttacttggcagcaactagatctaatgatgaatagcaattcttataaatattgatgcgtgaaatagtcaatgcccagctcatagcttcattggttggctactacgatttcaagttctcaacagataaaaaaaatatgaaaggacattgaacatcatctataatctttacgttaaaaaaatcatctataatctttaatatattatcttgttcataggctatgctgggaggcttaggtgatcctatgaggggctgagggcagtttagtttacaatcatatcttagactgattgtacctacttcgctgtcgatccaatgaacaaagatgtatatattgctctagcatgaatctgcttaagaaatcatgcttccatatatactccctctatattttaatgcataatgccgttgactttttttaccaatgtttgaccatttgtcttattcaaaattttttgcaaatataaaaatatttatatcatgcttaaaaaacatttgatgataaatcaagtcacaataaaataaatgataattacataaatcttttcaataagatgattggacaaacgttgataaaaaaaactcaacgacgtcatacattaaaatacggagggggtaacatttttctaaacacaaacacttcacatgccaatttattaagaagggagattttgcagtaatctagtgtcacagtcaaactgtaatggttagtccaataaatctaataattcaaatcaatataaataaatcaatgcatgctttgcatcgaaccgattcgcgatcatctatccttgcctgtggcacttactctttgtttttg

SEQ ID NO: 44153 - DNA, 3222 bp, Oryza sativa
aattcctgcagcccaaaagttgtccaatcttgtaatcaacatttacacaatcacacagggttgccccccactaacatggtaagctctccattctgcattttcatagcacaaatggaacacatgtggatcttaatgagggaatcaaaataaaagcaaactgaaccatctatcaatcatgaagcttaggtttgcatcagagaagtttggagtctagcacttcattcagatgaggagcattcattccatatggaatgccaacacagactgataaaaccatttgccaaataaatagagtaggtggcacaagaatggaatagtttatccttccaactatgcaagattgcaagccctgatatttctggcacaggcaagaacccctttttcactgaatggcactgatacaagcctataataaatgctagtctttgacaattatacagataataatgaacagtaggaaatatggggcaatatttggagaatagtcgagcaataaggcatttattctccttttggctatgagatatcttcatatctcttagcattgtacaatcatgctttcttgatgaaagaaaattttgcagttcattgcatcacactttagacatctagctttgcacgaaacaaatgccgtaccaatgctatataacttcaggcttgttttctcttaatatataaataaaaagtcaaaaattgactgccatttgattgtttttttttcagggaaaaagggacttcattaattatgaacctcagattaatcctgaaggatcctctgtctgacaaatttttaattatcttttttttctcgaatatgcaggagagttgtgtatctttgcatttaagaataataaatttacaagatggccaaaccaaaaattagacatcttctgagttcaagccatatttgctaattcatgactaactttattttgatctctatgaatcttctgaaatgtaaaacccctctttctggacagtagctcattcgtctccctgatcacaaaagcatgatcagatctgtccattttcttggtctgattgttagcctttcttttcccctaaaaaagaggtttgtgattgctaagtttgattgtgattgcttagttagatcgtgtcatcataggcagcaatgatatgaaaaatttaaccaaagcgcattattaacaacaaataactaattagccttgctgttgtcatgcttaaccatgtctgtttaacctagctaacaaaatattttgtctgttagtgcagtttgtttttttatgtcagtggaagctgcattttcagtctcaagagttaggctagcattttacaaattttagatgagctttttctgaatgatcctcaaaagactagtttaactagagagctttgtcagaaaagaaaactcaattaaagcacctgcacgtgtgcaggatgaagccaactaaatcctgttaaaagtgagcctcttaaaactaaatgctggtaaagtgagctcttagctttctttttctctctctatatcaaaccatgggctcaaattgagttctatttgttttttcttaagtaacaattttgtgaacaagggtgaggtgtgcatatcttaggacggatctacttaacttatttacccttaatttggtactatttattatgtagattatagcgcatgcatcaggccataccatttgcacttggttcttttgattattgtaaggaattagttcttcagataactaccgatagtcacttacaagttggttagctcacactaaaataatgcatgtgtatggtcaaaaagtaccataatcatgacctcataaaccatcagacaaattacttcaagcaacttcctctgtcaaaaaaaaataatctaagagcggatggaacacttcctgatacaataaatttggatagctatctgtctagattaattgtattaggaattgtctcatctactactagattggttttttctgagacggaggaagtacactttgaccttgtactccatgttaatcacgtcactcttggacttaaccaaagtgatatgatccactagattagagccccactagctaattgtacttggcacaagatttatttcaaagtaaaagttggaatacatactttgaataaattcataaatacttccttctgtaataggtttaaggttattttgaagtaaaaatattttcaatttatttatccatagttattttctttggtaatagattgataccgttgccagaaattatacttgattttaaaaaaaaaacatcccttattaataagacgaagctcttctattctttttatctttcagagtcgatcaggtgacactttgaccaccaaaatttagcattatatattttttaacaaaagttaaaagtacaagaatgatctgaaagtatttccatggcaagttggccagtacaatttttcagcattctagagtggaactttcatgttactggacagggtggtgattagttcctcatcaggcaacagtaatgacctacttttcatttactttgggcaaaaattaacagcacaataatgtcattggaaatacatgctccgtgactgcacacgaaagcaacagtaattaataatataattgtacatttatatgcagggacaaagttaaggtcaagtcattgtgatccacaaactgaaccaagcttcagtttttgtttcccctgaaaaaaaactttgatttaatttcttaattgagtgaggcacatacatccatgaacaggatgctggtttcaaggagatcctatgtcacactatcatgctaagcacattattttctatgagctgttaagtactagtagattagaaaaagtaatgcatgtgacatagtgaggccaactctgaacttgtgactgatcaatatgtagcagttgtaggttcagaatcatgctacagtacaatcaccccctttgtctatattttctatgagctgtaagtactagtagattagaaaaactaatgcatgtggattactgaaagccaactatataacttgtgactgatcaggtagcagttggtaggttcagaatcatgctactatactagtagtactaatatactagcaacccttttctaaagtttttttttttgaatagtacgatgatgtggtcataaactcgatcataatgtcaggtaattttagtaaaagcatgttgtttatacttgacattcagagaagtacagcaaaaatatactact

SEQ ID NO: 44154 - DNA, 611 bp, Oryza sativa
tcaaattcaaatttgaatcaggtatgtaaacttttgacttataaactttggatctataaactttaggtgtataaactttagatgtatagaaatactatatgtagaaaatatttgaattcaaattcaaatttgaatcagatataatttaaattcaaatttgaaacgggtatataaacttttgacttgtaaactttaggtctataaactttaggtatataaattttagatgtatagaaatactatatataaaaaatatttgaattcaaattcaaaatttgaatcggatatataaacttttggtctctaaactttagatgtgtaaacttgaggtgtataaactttaggtgtataaatttactaaaataggaaagtaatgcggtaccaaaaaaggaaaccaggtggagggagggaggggggaggggatcgatcgctacccatctccaggcgatcgatcgccattaggatccccgcactttagtgcatatcctttctcgacatacaggcccggctctaggggtcgagctgggccaccgcacagggccccacgaagtgaaagggcccaatcccatatatgttgtacataatagcccatagaaattagaaagcccact

SEQ ID NO: 44155 - DNA, 662 bp, Oryza sativa
ctaaaatttaaattttggaacttaattttgtaattgattttagcgacctttttcagcgtagcctatttcttaaccttagttatttatattgataaagcaacatttttttgtgagtgaattacatgttgggccagtttttattaccatggttgcatatggattaggattgaactataattttcactttagactagttatctttgcataacttttcagtttaggcccgttctactccagatctcatgtctttcgtctccaagagccagcatatgatctgagcagggtgaccgtgacacagagcaaatcgagctcattactagctggaaacaaaaatgaaaaatgagatgtctgtctttgcttgttcactgtaggctggaagcaaaaattggaaaatgagagatctttgtgctttgctcattaacccgggggcttttgctcattcacccagggaatttgaaagatctcaccaacgccaggaaaatataagctgggccaatggagaggctgcaggagcagccttgaatcaggtacaaggactagaggaggatgaactaatgtaaggaccatgttattggggtgtggactcactagtccaaggtgcaaagcgtggtaacaaatatggtctaaaatgaaaagatttgatatcacctagtccaatatac

SEQ ID NO: 44156 - DNA, 690 bp, Oryza sativa
atgatagttaatgtgaatttttttgtgcgagaaagagacttcctactgacgttaactcaattatgccccctactactgcagttttctgttttaatttagttgatataaaatagattcagactgatacttgcattttgtgcgagaaaacgtctatcccttgttttaaaaattgtaagagggctataaaaaactggagttttaagagggctaggcttgctaagatacatgagttttggcttctcttatgattatttcttgctgagagaattgcatttgcttcttacttcatggtttctgtttcttgtcctaactgcttatcctgcatggttctggcagatttgttaatgaaacttgcaagcgcttgaaggagaagaagtcctatcttgtttggaatgctgttggctgccttggtgtttctgctatcagtgatcttgttagagaggtatgcaatttttacacggaatagttaaataagtatactgatcaatgtttagactagtaaaacttggtgcaacattattttggtgtaagctactgtctaaacctctcaaatgtcccatcatgcctccatgatactcctagattggtaggtattggccaaatggccttacataggacatctgtttgcccactactcttacaaatatcactgccctgattctttgcagttacatggagggctgcaggaat

SEQ ID NO: 44157 - DNA, 1350 bp, Oryza sativa
caataaagaacattgttgacgagtgtggttccttgctagtaatttctttgatccaaattatgcatggcttatattggggctttaattaattggattcaccatttcattctattctttttttaatactagcaaaaaagcatgtgctttgcaacgggtaaaaactattttaatattattattattattatatggtttagttacaattaagtttaccgtctaaagttagcatgcgagttttcttatatgactatttctgtatttccaaaagcgaacgaatttaaaaaccgactcaaatacggatatgtatttccaaaagtgaatgaacttaaaaaccaacttatacacagatgatgtaccaaagtaccggcaaaaacatctttattttttatatattttttaataattgtaagttgtgggcatcctataattattcaaacaaggagcctgtttttttctcactctccaaccgagatcaccattttttaaaaaaagtgaccggacacgagatgtgaagaaagcaagaatcattattcgctcctaccgtagattattgttaatgatcctgggataccagaactcagaagcaaccggtcacacacagcgcacatgccacaccgcattaagccagcacgaatctcatgaagatatgatgcatcgaaagaagggctgaggccctgtttgatagagagctccagctcccagctccaccttaagctggagctgaaccaaatggtttagattcatcggaaaggggagcggagcgggatggagcgctcaacctatttacagcgctactcgttatttttcaatgaaattacaagcagaatgccaccgggccgattcacacatccccaagtcacggtcacgcatcgcgtcttctccacgaggccgcgaagagagaagggggagggaggattgaggtggtcgcggcggtggcagtgacaacacacggcgcacggcggcggtggtggtggttgcctcctcttttacaacacctacagctcctagtggagctaccctccactggagttggagtttggagttaggagttggaagctggagctctaccaaacaggaccaaaaagccaaaataaataaatggcacaattaatttaaatagcaaaactgaacaagaattcattggaattgcgtgagcaaactcagacccttggattggatactacatatatatacccctcatgtcccgttagtgttgtggatattttcttcccaactcttgtagtatgcatggctgtttatcgagcatgaatagactttcatgtgttcaaattaatcgggaagtgatcgacacaatcaacggatgagaataattaagtaggaaatggtaaa

SEQ ID NO: 44158 - DNA, 2511 bp, Oryza sativa
aggtgaatccggaagccgcataggccgtcgcagggcccatccaaactccatcacgcccacccttgcctggatgcgtcggctagaggaaagctacactacaagcccagccgttgcccacgctggcttgtggtaagtacgataaattcttccagggcatcccgcgaaccggtccttaactgccatgggtgcgaccagcaaaaccatgcacccacagcccaccatgtggttcattttatttaaccaacaccggagcggtggtactaatccaacattaccattagaaccaacagtctaaacattaatatgattttccccattgtgagctagttgaactaagcatggctaagcaattcctagtccaaactctaatcatgttataaccccaagctaacaaaggagcatggtatcaaaatagtatggctgtaataataggtaaccatcccatagtataattgcaaaacaaatgcgatatttgaaagaaaacattaggacatttgcaatataggatcaatatgatcaagtgacaagcatgacttgccttgctctgctgctggaggtacctcggcgactatttcgaagtacaccggagcgtcggagggatcggaatctaacgacatacaaagcaaacattgcaaacaggctataagactactgaaacagagaacaaaaccatttttaatggattctacacatttttcttgatttactgagacttgaatgggattaaacggagctcggatgaattagttatgaattttagaagattcactgtgtttattactataaaagaaaaaccttaaatcatttattgcgcaatattaaccagggctgacgtcagcacggaggggtgtggcgccgacatgcgggacccaccggtcagcggcccgggagagagagaaaggggtggcggcgcgcgggcccactgtcagcggcacgggagatggaaggggcggcggcgccacgtggcagccgaaccgacggccccgatctacccaagggtagatcggacggcggcgggagctcgcggccggacgcgcgggcacggcgcaagccgaaccggcgaccatggcgccggcggcgcagcgctcacgcggcggcggtgcgcatgcggcagcggcgcaaggcgacggccgacggcgaccgaccggcggcggagagcggcggctagaggaggagcggcggctacgcggctaagcggcgtgccacggctacacggtgcgggagagagagaaagaggaggagggcctcaccgacaacggtcgacgacggcgggcgacggaggacgatggcgacggcgggacgagctccggaacctcctaacgaacaaaaggagagggattagagggagagggaagagcgcgagagagcgagagcgccggccgaaggcggcggccatggcgtcactcaccggcgcacgacggggatgggtctccggcggcgaacctcaacggggaaggggcggccgaggtagatctcgaccccgcgaatctaacggcggcgacggcgcaagacggcggcgagcctagcggcggctagcggcggccgaagtagcaaaacggcggcggcgggtggttgcacggcgcggggacgattgggagctcgggaggggtcggcgaaatggggaaaaagtgagagggagtgccggcgatgcttaaatagggggagagagggccggacgtggccggaagaggcgggattcgccggccgacgtgggggagtggggaggagagagaggcgggattcggttttcgaatcccggccatctcgggcgcgggcgcgagcgggagagagaggggaacgggcgcgggggatgcggcgcacgcgcgggcgtggtcgacgtggcccggggaaggcggagacgtgggcgcggcggcggtttcgggcgcggcggcgcgagcgggatcggcgggaggagggagacgggtccgacaggtgggccccacctgtcggcgaccccgagagaggaggcggcgggcggcctgggctgccggactgggcctcggcctgcggccggcccagcaaggaggagggaaggaaaaagggaaacgggccgacggcccatttgacaaaaaggaggaaaaagaaaggaaaaaagaaaaagaaaaggaaaaaggatttttccctggaattaaaatattgcttgctcaattttaattggttaaaattatttctagcgctctgaaaattccactaaaaatcctgttaatgaattttgacatgtagaactcaagaaaaattccacatgtcacgtccgattattatttgcattactttcttagggttttctcctgattttacctgcattttcttggggtcatttgcaaattaccattttgacttgggaggaaaacttcggggtgtgacatccaacttgttcagttgtgtcaccccggtccctaaacaggacagtctaaaaactttatattaaaaaataattcataactttttcatgtgaactctaataaagacaaactttatatcaaaattgtagccctcgacgggctgcaggaa

SEQ ID NO: 44159 - DNA, 702 bp, Oryza sativa
tacttctctttccacaccattgtttggatgatacttcttatcgtttggtactttatattgtttgtacatatcttctaattgattcttgctgtgcagtgcggcaaggggccttatcaatcacattttgtatgaatctgagaagatgacaggacgcaaattttcaagttaagaaatttggaactagacaatcagtgtgctgtatgaataatagtaaacagtgatgtgatcttgtggttgctgaattactttgttttttttttggcacaaggatcaactaatcctttgatgggtcattgagttattaaggtggttgttttctttggtttcatctactgtggctcttgactcttgaggtgtttcacccaagcttgcaatatgctacttgggcaggtcatcttgaaacctggaaatatgaatcttcagtgattgataatgctttctttcagaaatcagatccataataatttatagtcctttctcctgtgatccatcgaatattgaaactttgcacagctactgtgtatgctgatcgatcaacttgagtatgatgtgttttgctcgtgtttcctggttccatctccatggaacagaactacacccacaacttgcaatagtgcaaactgtaagcattcatggcgatggttttttggaacgtagttttatggatcaaaattctgggagcatctggagctttctgaggat

SEQ ID NO: 44160 - DNA, 670 bp, Oryza sativa
tacgcatcacttttcatcaaaattacatgaaaaccccttttcccaccatgaatttgctcagtggccgctggcatcgattgacagcacaggcgtctctccgatggaggtggtgacataaagatttggaggtggtgacataaagaaaagaaatcacagcttagtgacaaaagttatgggcggagggggtaaaaagtgtcaacaggtgacggtagaaaaataaagagcgattcgcactttggacctacatttattacctaagttgtatattggactaggtgatatcaaatcttttcattttagaccatatttgttaccacgctttgcaccttggactagtgagtccacaccccaataacatggtccttacattagttcatcctcctctagtccttgtacctgattcaaggctgctcctgcagcctctccattggcccagcttatattttcctggcgttggtgagatctttcaaattccctgggtgaatgagcaaaagcccccgggttaatgagcaaagcacaaagatctctcattttccaatttttgcttccagcctacagtgaacaagcaaagacagacatctcatttttcatttttgtttccagctagtaatgagctcgatttgctctgtgtcacggtcaccctgctcagatcatatgctggctcttggag

SEQ ID NO: 44161 - DNA, 749 bp, Oryza sativa
attcctgcagcccctttgctgtctgaattgcaatatcgcattgcatgtgctctccaaagtccaaagattaaagaagcattactgtggccgacatacactttggttgtactggtatggtactgtctttgctttgccctgccaaaggaaacaaagcaaataaatggataaacaaaacctgattctctgtttgattggcagacactgctgtatataatggcttggttgttggtactcgtaaggtgctaaccatgaccaaatttcagttgaattaatgcatttgtacaagcttacattaatctgacagtggcagctgtgtttcttgttttttttttttcatgctctgaagaaacagggcaaatattctggtttgttcaacaactctgttctgcagtgtggcaatggcaacttctctcggcagattgccctgttttttcagaagcagagttatgcaggagccaggagacgtttctccaggtgtcataccatcctaaatactgaaagttttcctagaagaagcatctaaacagtcacacccactattcagatctatggaagttattgaggaacaatttttgttggttcattttctaatagtaaggcctctcctttggaacaaaagaaaagtgaaataaattatgaggttttgtattcgtatgggaaaatttctattagagccctttggagtaaaggaccggtctctacaaatttctatagaatggggcaatctgtgggcattttagagggaaata

SEQ ID NO: 44162 - DNA, 2316 bp, Oryza sativa
caccgcgacggcggcgaggtgcgcgaagaggagcagcgccgcgagcgggggcaggacgaggcggaggcgagcgcgcgccgccatggcttcgcggcgagtcgcggcgcggcgctgttccgtgcggaggaagagaggagaattggttcgttcgcttcgctcggggggtttactgggaatttgggaaatttggttcgttcgccttctctccaacgtctcctttttattgctgccgttccggcgccggaggccctgggggtggtgggccccgccagctgtaaatgattgtttttgttagtgaaataaaatataagagattttcgctctattttttttcacgggaaatgtattttttttgtccctggaaaattgcaccttaatagttatttttcgcagtaagtaatgacttttcgaatttagttatcgatcaattatattataatttgtgaaggtgcttttgtggagcatacctttggtgcaacaacacacaagttgggcaaaggccaaggcatgtcaagtaagcagtgtatatgcatattattggtacatacaatcattttttttttcatagtggtattggaacttttaggttttataaaagagagttgagtctccaacttcatggtatgcttctattttgatgtaatatttatgcatggtgaaaccaagttattgtaattttaatagtacagtcgattgccagctgtattttttgtcgatgttatcttaaagatgtttgtacagccaactcatacaacaaattaactctaccacccttttcaatgtatttattgagagatttggctatttatacattgatcgctcctttcttcgcctcatcttacatttacagttgttctctacgctggcacacaacggtacgcactttagcatttctcaccaccagcatatgcctcgacactatctccatgatgtaactggcgcttagcctcaacgctacattgcgattgtcaccaataaggtcgatgagacaataccctcgtatagtggggcaacaccgagctcatagtcacgccatagccatagacatatatagcaacatgcatgtatcacgcgccttgctacattcacgtgggccctataaccgtggagagatagtttctaccgcttcacttaccttgtagcgcatgtataatccactatcttagctgccatctcacacacactctctctcatactatacaaataactcatcaacgaaccaatgcgaatatatatattatcatcgataaaaaaccgcttattgtttttattgtacatgctctcctaaccacatcaagtaggtaagcaaggagcttagccatatacacgcttccttcccacctcgatctcacccaactctaaacccttggtaattacaaatgatgatgatgtacgtactctttctaacagcagtcagcagcacacctatactactacagtgctacctacttttaaggggttgtatatatattatagcaaagatgcaaaaatatcttagccggtaaacaaaaaggccattgcatccaatttcatattttggaaaccgctctctctctctctactccaaggaatttttctgttgcaacggaagaggtaggaagggatggccctggactagatgagctgtaccgtggccaccctgattgcctgccctccaactaataatccgtttggtccgtcctagatttcttgtccctaagccagcttccctttgtccctaattaatctgcgtgcgtcctcccctctctctctctctctggtccagtgctagtactgtgctagccgatgtagggtttaggtgggccccacgggtcagtgagtagagggacaaccaacggcgacgacgattctgagatttcgccctctcgctgaccactgcgggcccacgcgcagccgtacgtacagccagctggctgattgccagccgccagctttataccttggccgttcgtttgttcgcggtcggatgggaagaagaatatctgacgtccgtccatttagccagctcagcgcgaacaaaatttttttctaaaattttgtttatgggctaagaaagacagatacaaatttagaattttttttgaaagactgatagaactagttttattttaaagaacacttacattacgactcctttaagcagagttaagaaaatatagaaatagaaaaatatagtaatatgatacgaatgcaagtgtaaaacaggaaataaaaactactaactccatcccaacatataacatattttgggtagatgtgacacattctattacaatgtccagattcattatagactccctgttcagattcattttg

SEQ ID NO: 44163 - DNA, 592 bp, Oryza sativa
taagtataatttctctataatttgacaatgtggtgctatagtaaacatttactaatgacggattaattaggtttaataaatttttttcgctttacttacggattctgtaattagtttttttattagtgctcaaacatcccatacgacatcttataaaatacctgatgtgacatgccaaaactttactcctctagatctaaactttacacgccagttgtacatgtgttgtataattgggttgtacacatagggatactctttgtcatatgcccatgcgtgatgagtgcgcgcgtagtgtgtggtgtacgcgtgcatctgcgcggattgcaccgatcgagttactattattgctcagcagcatatatatggcattgcgtgctgttgcgatctttagcatctcctggatacaggcaacagcgttaatgcgcgtgatacgatctctcacaaaattgaattattggcgatcacgttttaaaaactaccataaacagaaatatcataattcatgcataccaaaatacaaatcactgcccatatcgccctcaaatacaaaatacaaatggttaatcttatttcaaagtgtgttgtgaac

SEQ ID NO: 44164 - DNA, 640 bp, Oryza sativa
cgtgcgcgcggaagacgagactcaatctccccaaacaccctggaacgaacagagccaagtatcaaaagaaaatccacagccaatttgccttcactaaataatacaggttcaatttgccttcactaaataatactacattactacttcatttcataacatgtgactatgtgtattgtcagtatgcatacctaggaagtaggaaatacaaaactatagtgatgtttgatagaaattggatcaaattcaacgccattttgataggttacaattacatccgtctgataaaaaacagccataatccaattcgaaagaattgctacgcgaacctgacagaggaagagtcttcttatttagcatgagactgattcgttggggatgcattcacacatcctcttcaacggaatgaaaagcaatcaaaccttgaaacggaaggatcacacatgtggtggtagaatagacccaaaaggcccacgcaaattaggcttgaaacacaaggagaaaatctcaaaaatcatgtgttccaagaaaccgaaacgtccatcgctgcagagctaggcatgcaaaagttttgagagtgtattattggcacaagtaattaacaaattattagacttgacttgcacatatgatgattattagg

SEQ ID NO: 44165 - DNA, 845 bp, Oryza sativa
attcctgcagcccaaataatttatattatattaattattgattaatgttttaaatttgaatcttaaaatatatgcatgccttatattacggggtgtagaaaagatggcaaacatcaatttgatcaataacaatgacgtgtggatattcgttctccatttttattgcccatgcccatacataagagtcttaagcagatgtttacatgcacttgtaaaacacacatgtacacaactgcgccactcgccatctgatcatcatggcattttgttttcatgcataatgttggtgtgctcatcaatcgtggcaatacatctaccgcaggatcagaagggaaataataccgccacaggcctccagcagtagcatgaacccactgccctacctgatcctactaccacatgctccaccattaactgccgggactgcatagttgaagacttgaagctgtcctggactctaggaggtttaaattaaacagttgtgacaatatccaaaataaccctcattgccgtaacccttatctccgtagggagcgtatcctatgcacacaggccctcgcgtgtacacactgtgtacaccaactaaaaattatcacaaaaaattctaggaaaattcatacatgtacttttaatagtattacatctacgtgcaaagtcgcatcttcaaattcattctacatagagaataacaaaaaagataaaattctgacaaaattgcaaccttaaaactgtcagatttttttttgttacggctaaaatataatgaatttgacgttaagattttaaccctaggtgtaatacaattgaaagtatgtgtatgattttttctagagggctgcaggaat

SEQ ID NO: 44166 - DNA, 655 bp, Oryza sativa
  unsure (1)..(655): unsure at all n locations
cggtcccagccaagtgcggcgtgcccggtggctcggcgtccccgtacaacgcgcgaggttggcgtggcgttgcgttgcgttgcttcgctgcgaaggttggcacgctgcatgtgcgcctgggcaccgcggcgaccgagccggggacacacgcacgactgagcaatatggccctaggacggccaaggaaaagacgaagaaatgctcttgcttttaccgcgagtggggcgtcgctgcagcgtgtttgattgctggtgctgctccaactcgaagcgcacacattttttttcttctttttttaaaaaaaaaagggtcagtaaaatgggagtgataagatgtgtttttttaaannnctttatgactattccggatttctgatcagttatctggcataaccgtcactggctatcagtctgaaatttcaaattttgggcttgaatttatcctttttactacctccgttctaaattattagtcgctttgacttttttcttgtaacgtttgaccattcgtattatttgaaaaactagagcaaatataaaaacaaagaagtcatacttaaagtacttttgataataaagcaaatcacaaacaaaataaataataattccataatttttttgaataagacgaaaaatcaaaggttacaaacaaaaag

SEQ ID NO: 44167 - DNA, 3308 bp, Oryza sativa
ccgctgccgagctcgagctcgagctcgcgggcctcgcgccgccgccggcgagacgaaacccggccggggtgagtcgtcgtcggcgttgaggtagtgcgtgtagtttggatgaggaaacggaacggcgtggagcgaggctgcgaaaatggcggagttatcacttatcgctgggtgggcctggcggtgcgccattttctgatgcacgagcatgctgtaggatataggaaaaagtccaactgtcctccctcaacaatagcgtcaattataacctcttaaccgcaaaacgagcaaagaggtttcctcaaccaagatagtttttgacggtggttttgtcctctgtcatgcttactagcatcctaaacagaaaaagaaataaaagaagaaaatgggtctcccaaatcgtggcatttaactatttgccacttttaagatgtgatgatatccatcatcgtcttcttattctttctcctctcggttcggctggacgcaaccactacgatgattttgtgcttgggtcagagaagcatagaggagacaggccgcatgccctcctaccagcatagaggagacaggttgcatgccctcttactaaggccagcgccaaggaagaccgctagagccgagcatcaaaggcagtgtcaaggggaaggacagcgccggaggggatgaggaggatatcctgaagccatccccaactcacaaatcggcggttgcaatgctttcttcctatggatgagaagaggtcgaggtctaggttggagccaatggatgcagggttggtcgtgtctgggcgtggccgaggcggagctaggatctagaatcattgccacatcacccactattgttggtacacctgcaacgtcagtgtttaggggttccacatggtggcggtcatgggcggtgacagactgaccattgaccattcaccaccaccattgaagccttttaaaaggagtatagaagtatgtacatagttgtcttgtttctattatcaataaggtagttagtctagttgggtagtcggtctcatgcaagagtggattggttcatgggaggtttcatgtcgttgtgggtcagttttgtttgggactgttaacacatatgcatgtatgtttttgtgagttttcatttacaagtcttaaccctattgttggtaaagtaggaatgagggctcccactccattggctgctcggggcattgtggagcccaaaatagttaaagcaagagccaacgaagggatccaagcgatgcctcgagccaaagaaggtgacccgacatcaacgtcagctcggggctttagctagtgttagcttggagtcacaacgactactgcaattgggctaggaacccaaggtctaccttgggcactgatgcctccccgagtgaatctacttcattaagtagatttgaccagtccctgtgtgcagcattgccttatcattccgcatcaaatacgtgtgatatatttcatgtggatagatcatgagcgacgtggcagagcatgcctccctcgcttgcccacgtcgcctcaagggaaaagattggcgacatggcgtgtgttccgtagtccgtactcacctaacacaccccctatcagcatcggaggctgagaggtgggcccattgatagtcgggatgaagacttttgctaccctgctccacatgtcagccgataggtgaacccatcacatccacccattatttttggaaggacgatgacaggattgagcataccaacccttgtgagcggggtcctacacatgcacacttgcatgcacactgtggtaaccccttggcatatgaaaggaggaccaatgccactaagaaaagggttcggttcggttcaatttggttgggttcaactggatatgtttagcccaattagcccaagttagaccaacaatcacaaaggcaatgaacaagggttcatcctctcccacttagaacaatatccacccaacacatacattgtaagtttcatcatccatagcaagattacatgagtatggtattacacttccgacagcctgaacctatgtaaaccacctacctacatttctttcgtgcgatctaaacacgagctcggaacccgcaccttggccgaacactcaaaggagagtatgattctctctagaggaacatcccactccgacgcctaagcagtccatctttgggttcagattctaagaagttgcagttgtaaaatccagaaaatgaactaaaagctagaagctagaaaaccctacttttccatattctcggaaactaactaccaactactatatatatcagtttctcataattttaagctcccaaatagatcctacgtgtctcatatggggtagcctgcaatgctaatgccctaaggccctttatagtgcaacaccgtggatcagtgctatggggcgccacgtcggaatcaagcttgcgtggcgctaggttccgcgcccaagcaaggatgcttgcttccacggagagaagcacgattcctccttgccgcgggcccacgcgaggcgaggaaacgagcgctgtagagcgcgttgccccgtgcgccccgcccgttcgtgccctcgcgccgcccgtgtggaagggttttccccaaaatcacccaccaaaaaatcacggcaacaaatcaaggaacaacccaccaaaatcgcggcaacaaatcaaggaacacgcccaccaaaatcgcggcaacaaatcaaggaacacaaatcgcggcaacaaaatggccgctcgccgctcggccccgaggggatttggaaaaatcgccaacacaaatcgcggcaacacaaatcaaggtcgacgccaagctccgccgctcgtccccgaggccgccgccgcttgtccctgaggccgccgccgtcgccgccggtcggccccgaggccgcctccgccgccgccgccgccgccaccgccgccgccgccgccgctcggccccgaggctgccaccgccgctcgtccctgaggctgccgccagctccgccggtcggccccgaggccatcgcagacggagggccccgaggccgatcggtccctgaggccactcggcgccggcggagggaggaggggcgtcggcgccgagtggagttgggggaagtgagggcgtgattagtgatgtgaggaggggagggaggatgctgctatgatgacgaggggattggtaaagtagtatatgtgggtcccactatcgatgcttgcactgtggagaaaatgtctttgcagctcttcatcctacgtgttaccctgtggtacctcatagtggatgcttgcactgtgagaggcttaaaagcctccctgccggacct

SEQ ID NO: 44168 - DNA, 706 bp, Oryza sativa
ccaccccctactgtcttttaatagtagtatagatatagatatttcaagagtcaatgattttcatgtcttgacacatacaagggatggcaataggcatctacaccaaactagcttgtgcatttctgacgcactatctgtctagctctccttcgtatctatgtttctttggacattgaaccactgctgcactttttagctaacagttgacagtttatcaattttctttgaatctggagctattctttttctgatcggtgttgctatatatgaaagcaaaattgagggatgaagggaaaaaccgaagtcagctacaaccatgaagaaatacatcagtagtttagtgccaatttaccatttgagcgtatgaacactacaacagtactgcatagatgcttacattggaattacagtactgtgttacctttcatgacaataaccagtcaaccacctttgtcctgtgtcatttaaatcattaactatatgagatagcagtttttgtgttgcagctgtaatgtcaaatcgtctggtgattcattcatgctcttttcaatgctgaactatttgcaggttgtttttactgggtttgcctatggtggtctgtctgaattgtctgaagatgaatatacctcatgttcaatgggttcaacaatagcaggagagattggcatttttggctacagaccatctgtcctgggctgcaggaatt

SEQ ID NO: 44169 - DNA, 787 bp, Oryza sativa
tccaccccataaaccctaaccgatcgagggggcgcagccagtgacgggaagtccaccgccgcgccacgcctcgtcgtcgacaccgtcgctgctgcaaccgcatcaccgccatcggaaccgagcacatcgttgccgccgtccacgtcaagcccgcgacgacaacgacgatggccggccggacttcctcttcctcaacaacgactggtcacaaccctaaatcctctcactccctctttgttcattcatctattgttgttcatccattgcaaatagaaccacccgactagatctaaacctaggtgatccaatagacaaccctatcagtttttttttaatataatggatatttccctgagaaaatcaagaagataattgtctccatttgagagttgaaagaatcatgggttttgtggttatttcacacgtaaagggttgaactgaacgtctagctttgagttactgaaactctattttctgaaagaaaagacaaatactcgattctatcctcagcgctttcgcaatactctattattgagtgctatatgccttcaagaagctattaagaacaagataggagtgattcaattggaggacgtatatacgatcgagctctcttgcgtgctttgttcactgacctgcttagcatgatggaatcacaacagtgttgcataatcaagcacgtcctagtagtgtaataataataccaattgcttaatttcgtgactaattggatgttgctgtcacaggaaaaagaagaatttccaagctgagattctccccaggagta

SEQ ID NO: 44170 - DNA, 1225 bp, Oryza sativa
cgttcagcttagcagcatgaaaagaatatctcacattgaaagggacgtgtgaattagcagatactctggtccagtatttcatctgacaaaaaaaaaatcagctattattttacatcgctgcctgccaattcttgccttagacgcatctacgaaaatgatgtcttaatgtatgaattggccaaaactgagttttttcaagcaaaagaacaaattgacatccaagtttacctcgacaatgatacccaatgatccacacccatgaagtaattttagtttaaaactctccataatacattttacagtactattagaagttataaggtcacacacaataaaaggatcatttcacatggcaatcccctacaatagcagtgcttttaactagaaggtgttccaaaatttaatttgcatagctaatctaattgtaactagaatcctctggttctaaataggttcagtatcacatgcattgctggactccagatgaagcttagggttctttcagcaaagcaaggagaaaacagcatgttatgaacataattttctaaagaaaaggatatcagcttattgatcaattgactcattcctgatcataaaatgaaaataggaaaaaatagcagtaactggacttattctgctccaaactcaagatttctcaccgtacaccctttccataccttagtctgcctgtatggattgttgaaccttcaaagcaacaccttgcattctaagtaaaactgctagctagacaatggccacactcattatctaattgttgggtgtagcatcccatgacatgctattatagatgagttagtttttaattaaggcaatgccaaaaggacgtgtaataatgtaaatatgtttactgttaatcatatatgttggttttacaacagaatgtgattctccctgaccctttatggattttatgtggcatgcattgcatattgttaaaaaatgcttcaacacttgaagtgtatacttttcatagcaggttatacaaacatttgaaaacatttttattaaatagtagaaggtttgcatgggccatataccaaaacagtatttgtgaacccatggtccttgttctgaaccaagacttggtttcatgatgacaccaaaccgaagaaaacaaactgcgaccatatttgtccaaactgaagttctacctctgactctgagttccattgaatatttgccaatccatcttattcagcgcctt

SEQ ID NO: 44171 - DNA, 1488 bp, Oryza sativa
aaatggagaaaatctcacttcctataaccagtgatggagtttgagtgaactatcaatgggggaccaaaaagttaacggtattcattaacacactattaaaataccaaatttagtactaaaaatacactacgaatctattacacactaatatcaggcctaactgccacatgcttaatggacattgctttcacagatccagttacttctttccacggtgtgtagctctctcgtcagtcaccacacaagaaacaaagataagcagcagtgagcaattaatatggcaagtccatcaaaattcaggaactaagcctaactgttgctgctatgctgcatactactagctaccacacatgggcttgtgtgccaattgctgctgcatagtagctaaaggaaaattttctgggggaccacaaccctgttaagtccacactatcctccgaccctgcctataaccacagctctgcatactacagataacataatcaagtttaaacaatcatgaacctttaatacttacatgctatgtaaatccttgccaagtttctgctctatcactattttgatatcttgaaagttacatggagttgcctgaattattacaaaaatgttaaataaacaaaaactaatgaggctatgcagtgtacactaacattaagatagaaattaactagtaaacctgatcttgcagacaagagagtgttgatgagtattcttttggtacttgtcttattgtacttgcgtttaggcattattgtacttgcatggttatgcactcccgttaatcttagtgctacttttgaagtttggatatttgatctgcttgtatgctatcaaggaaaaacaaatcttgtattgagcccttatttgtttctttctttatgccaaatctgttgttcagatatgctccagccacacaactttggagaggcagcatatcatgtgatgggtagcatatctgaacaagcccagatatctgaactttggagataggcataaactttggagaggtagcatacaaagttgtgatgggtggcagcaaagaggataggcatgaacctgagcttgaacattggagcattgcagtaaaggatgggaaagccctggaaaacgagtggatgagtgagataccaatcccacgtcgcggccctcatagatctataacttcccctccccatgatttctattgttgccatttttgttggaaagtaatgttgctatacacctaaatgtcttgatgtttagcatctgttatattcagacttttatggtgctccccacaatatgtatgcttctaggctatttctttgatcaagtatctagattaaaattagttctgggccagaaatctgtttgcatgccatacaaagttcttgtggcatataagtatataacctgttcccgagaatggtcctgtcattaacaagcagcttaatcatgatttttctcttttgctaccagggcttttgttgttgctaatgataagctact

SEQ ID NO: 44172 - DNA, 3713 bp, Oryza sativa
cagtagcatataagggattatctcaaaaaagtatcatgttgctcctcggaaaacgcgtatagtagtctcattggccttcgtcgatgggatgtgtattttcatattaagagttcttaaaagttatcaactcaaagcccaaacgctacaatgttcgaaattctcaacttaacactagcgtcaatgctgcttcttgtgcacggagttcctaacgtaaagtcagagagatgtgggagccacttcccttcttgggagccacactgtccctcactagaccattcacaatgctttcatgtgacattcagcagaagcagagggaaacaaatattcgctgccacctcctccaccagcggagctttgccaagactatgtagctcaagtttgccaccggttcctcgtcagtttttgcaggagtggcctacgctagcactccgtgctaccgaaggagaaagagagaagaggagagagatgtgtcgtcgtccccatgctccacgtcgctgagctcgtcgcgaaggggaggagggtgaccgggcaccgtcctcgccggagaagttcgccggctcgatggggaaagcgacggccgcggtgaaggtcgatttggcgccggtgaactcaagaaagaggggagatccggcgagtcgtcgccatcgccgcccgaggctagatccggcaagcacaagccgaatatgcctgccccgccgccactccgcctggcgccatcgctgctctactcagctccgcgaggaccaccacgccgctactccactcggctccgcgaaacgttgctgccgctgtcgtcgttggggaaggacgagagtccatcggtagtgaggaaaagaggggggggtggggagagagaggaagaggagctcgagactgagacgacgaggtggagccccattccatgctgctcgtcgccaccactctgcttgccgccactcgggccgctcgaggaaggggagatgaggcagccggaggaggggaggcgtgcgattagtgggggaggagtggcgctgagaggataaggagagagaaaattacattttttatttgtgtggacctcacttaaagttacaaagcactgttaaacttgtggcaaacattattcttaggtgttattgaacctacgtgtcacatgaggttcggcaaaacatgaagccgcactgctaatacccttatgctaacatggtcatagtccccctcgccggatccaaggctggcgcgtcgctatgaaacaaaaggaaagcattctaggtgcgatatgacatggctggaatgctacgaaactctgctatccttttgttgcatgcattgcaagttgtgcaatatgcttgcaatgggaaatctgagcttaattttatatgagtttgcattttcatatgttcattgttgtgtatgctggttaaattgcgttgaatatgtcgctatatttttttatgaacttataatgtgacttgtggtttttcttataaatttgacttaacataaatccaaactgacttgtaatgtgaataatgtgcaacaaaagaagtagcaaacactaagtccgtcctaaaatataagaaattttgtatggatataacgcataagagattttagatggatataacacttcccttgtccaggtttattgtatatcttggggcggagggaatatacatacatacattcgatgctatataaccaattttatccatatataaaatcttgcatagccaacaatggttgaatttgataacttaaagtagtaatccatatgtcaacaagatacaccactttacacaaacacttatgttgctggtgagaattcaacccccaaaaaaaaaacactaactggaccgcatgtttttcttatcacgctacatcatcatcaatcaataactcccctaaccccaccgtttttcttatttttttgaatttttttaggctttctcgttgttttacacgtagctgctaacccctcctgctcctcgcgcgcgtgggggcaaccgcccataagaggtgcgccggttaatcaaaatttggtcgctgtggtggtgtgcatacgtcgttgagaaaatggggattataccatcctcaaaacagggcttcgctgaaatgccatcctataattgggattcgcccaaataccactttcaactgagcccaacccgctgaaatgccatcccaaatcattttcatcaaaaataaaagattttactctacttttcacatgagttgatgaaattacccctcagtcaatttcatccttagaaatcaatcggctgggagagcgagacgcatagggttagggtttcgtccgcggcgccgatctgggtgccgccgcgcaacctccctagcgccgccgcgccgccctgcccttccctccagccaccgctccgtcgtgccctcccctcgcaccgacgcctcccctcgcgacgacgcggcgcgcctcccctcgcgccgccgctccgtgtcgtcgtccttcaccagcgccaccgcgccgcgttgcggccgtcccgtggcgccgacgaggtcgccgccctcccctcacgccgcggctctcccctggcgccgacgaggtctcccctcacgccgcggctctcccctggcgccgacgaggtctcccctcacgccgcggctcggccggcgccctcccctcgcgccgacgcttggccggcgcgccctcccctcgcaccacggctcggctggcgccctcccctagcgtcgcggctcggccggcggcctcccctcacgccgtcctacgctcggctgtactgcggcccctctccacgccggtctgtcgccgtcccggatctacttgcaggagtgatgcagatggattccaatgtttatgatatatgaactcagtttgagtgattatgcattttgtggttgggagtgatttgcgaataatctgggaagcatgctcttaatgatgcttaactggtgttgtttgaatgctgttaatgatgcttaatgagtgatgcttacgtggtgttgtttgaggcacgctcggtgtggtagttcctaggatgtaaaggtccttttttcatatgttcatcacatcctgtgtatatggtactctatatcctctaaatcgaatgaaccaggggtattttggtcatcaaagttgtgagaaaagagagaaaatgattttgatttactacaaaggaagagaatgacatttcagcgggttgggctcagttgaaagtggtatttggacgaatcccaattgtaggatgacatttccgcgaagccctgttttgaggatggtataatccccattttctctacgtcgttgggtggaggggctgctcccggtgggagcctgggaggaccgggtatttttgtaaaaaaatcctcgtgtttgcacggaatatcacatacgtcctcggacagcctgacatcccgttttatttcttgcatataacccctcgtcttccaagaaaatacaatgtgaagaagagaaaattccgtttctagggataacgctgtaaacataaaaaccatagggggttttctgaaaaacgtcctacactaacccccaatcccgaaaccctccgccgttctctccctcccctcccctcccctctcacctctcctctctcggcgcgggttccggccggagctgccgccggagggcggtggcggcagcggccctcccctccggatctggcgagacggctacgtccgcggctagatccggcaccgccgccgtcggatctggcgacctg

SEQ ID NO: 44173 - DNA, 654 bp, Oryza sativa
ttttataagctaggtgcaaaataagcactagatgatggccaaaatagtattagcttgtaatctctcccaaataagcactagatcatgtgaagggctttagatataactgttttcataagctaagtacaactggttggagatgctctaagaataaaggttggacaggctccatacccaaaacacgcaaggtactttgacaacattatttttcctgaagcagctagctgttctctcagaattcttagcctcttgggtaaaatctgcaatataacacactgtaagttctataaaatagaaacaacaaattgagtgcatagtgcagctataggggtcctcactttttaagtgtctaaaatcagctacaggggcccggaaatattttcagtgtccaaaatccacatacacagattaaccaaagtttgatgctagtaaaatgcacagaaaagtgcacaaaggggtgagatacacctgatgttttaacacatcgtgaattatttaaagaaattgaaaataaaatgtataatgaatttaactgatataactatgtccatcgtgttatatagagtacattgaacttttcttttaaaaaaaaagcatgtattgattgatttgaacaaacacatgatctgtactattgatctttgattccttgaa

SEQ ID NO: 44174 - DNA, 1110 bp, Oryza sativa
gttattctggcaatacatcctgtctaatgcctaccttggtaattttcacactgtttgtcaggtctgctgtaatgatcaggggccatacttttgctttgctcgcggaaacaacatatggctcatatatgacaacaacagaagacccatggtaattcccgatcaactttgcgtatttatgttttgactcacatttggtcgagcattactcgatatcattatttgtgtttgttttgtccttccagtatgctgaatcctgggaagcatcaatccagcagtacagtcaggccaacctctgtcctgaaatcatcttctttgagcgtgtcgaggatccagaattgggcacccaccgcgaccagactgcgccttgaaccattccattacttttaaggtttgatgtggctcagtggctgtagagattggttggttttgccattggaggcttgctgattgttgtggtgcttgtttgctggggcgttttgagtgggcaaactcctgtgcttttgagatcatcgtgcccacggcattcatgctcatgcatatatactggagtacttgacgttctctgcttggcgatggcgagatctggcatttctttgctggcctctggatcatgtagggtaggaaagtagtatcagtcgtttgtttgttcttccttgttgctcctgcaaatacctttattgctgtacatacaacaacgttctgtaacgcacaattctgggttcgtatatacggcgatagagcttgccttttctttgattacgagtactgatctagcaatggatatgcatttgcctgctctccactgcaattttgtatatctccggtactccctccgtctcataatataagagattttagatagatatgatatatactagtactacgaatctagataggcgtcacgtacctccaaaatccttagaattggatggaggcagtaccgcagtagtagtgattgttatacccacccaactatgctcatcagtagtagtgacgcagtttaggcccatccatttttaagcccgtacttcagcccatttttttcggccgaagcacgacgcggcccaaatacaaggcggaacattcaattttttacaaagcaccctcccc

SEQ ID NO: 44175 - DNA, 884 bp, Oryza sativa
cccatctattgagcttagctcttatcctaatgataatatttacaattgcaaacttatttgatttctcttattttgctgttttctcacagtttttgattgggaggatatcaatgggagctacaataacatgcatgaagtattgatcagcttagcaacagagttggacattagtcatatctacagaggtctgcattcaggatgcatgtatactctggtttctgcggtatgtgctgggagaaatctctgttatctttgaaaatgtgaattcacttgtcctgatattgacatgtgttttcctcttcttctaagttttagtgtgctctcaactgaggctgtcggctgtccattacttctactaggggacatagggaggaagtaaatgtagttagccatttgattgtattagttagcttgaagctgttcaactgtcacaataattgtacgtgtgaatcctttgtggctgctctggtatcaaatgttaaagactagttactcttccctgagatacacatacgagcatttctattttggatgctactcattagctattacagatcctaagtattctgctcccggagtgattttaagatatgttgtaatttgtgccggaaatatatattgtcatttatgttatacttgtcagatcagttaacttgaaatatttctgtgctatcatattgagaaagttacgcttattggaacatcactgtaaatttttattttcctttttgtgggctgcttagttgctagccgatagatgttacattggttctttattgtcagattatcacaagtaataatacttgtcttaccagtgtgaagttttacttctattgttctctcaattgcatctgtgtgctactccagtcagaactatttgacgc

SEQ ID NO: 44176 - DNA, 683 bp, Oryza sativa
gtcatctgtgtcattaacttattatactgagtgatcctacaaaatttgcgacttagcacaagatgctgagtcatgaatttgcttcgaccaagctccaaccttgcttccaagtcatgaactttttactctcaagactatgtatcctgttgatctaagagcaaaacctacccaaaatccgtaactaacaaaggtgtatataaagcatcaggtgtcagcaacaacttaaactgttcttgatttccaggctttggatatcttcttccccagatatctagcagcaacagcgccacctgaggccagcagtccagacatcgcttgacgtgcacttgagaccattacccggcgcctcaaagccttgcggacacaggttgctgctacatcttttgaagaaactgaggcacgagttggcatttctggaaattaaacaatttatcagaatgtgttatagattcgacggtactaatctcgaatgacgttagtaccttcgcaattcgatgcaaatcttccttgcaatcgcctttggattgtccatgggagataagagaacagttcgtttgttgcagatgcaccacaatcctgcaaatatagaactcttatcagttttagtttatgaagttccaaaagaaaaagattttcgtagagtaccaataaaatatcttataagtttcaaaggagataaatat

SEQ ID NO: 44177 - DNA, 670 bp, Oryza sativa
tttccctttttatgtatttggttcaattagttagtaaactaacatcttttcacttattcaggtggaatctttcagtgaactcttgaaagctcggaagtccaggattgaaagttgtgggcatatggtttcccagtactctcttgaatgtccaccacgtttgttcatgaccggtagggttgtcttttcgactaatattcagaatgtaattatgtatatatctttcctctatttaggagaaaaatgtaggtcaattaaaggaatcatgtgatcagtatgccatatgattttttattgctgaaaaccaaatcaactattgaatataaacataccatatgtgctagtgtaatgataatacaaagtaattaatgccatgacatactcctgagttaatttgaaatcagccttccgtacccagagacaattttattcatttcctacaatttagggagcacctaggatgaaataagtattgtttttattaatagaagaaaggaactatggaggactcttaagctaagtaatggtgattttccatgtaccgatcagtacagcatctgcagctttcatgaactagtagaacagaaaatatctaggaggaactagatatattgtttcattgaggagaacacctcgatgaacttgatatctgggtttggatctcacatgtact

SEQ ID NO: 44178 - DNA, 946 bp, Oryza sativa
acttgctgtatttgcagattggctctgtacaagttgaaatgctattaattgatgctgaggtagattaccagaagaaaatgcttttggaagcctgtaaagtggattatcttgcagccattttacctattgcaaaggcttgccttcgggttagtacagtacttctatcaccaactgaactcgtattcactttttccataactttttcttatgtatgatatttaatgttgacaggccaaaatgaataataaccttcgtccaccaaatggtcttgaactacaagcacctttgaatattattctccgggtaacttgtgtttgcctcgttcagttttttatatttagctattggtttacttttctctaattttctctgactatctgcagtctttgtggcacataaggcgattccatgatactctccagaagataccatctaaatgcactgatgttaaagatggaaactctcaaattgggaagacattgtgtaaaatctttgattcttgggataatgagaaagcgggcaaaccatgtgacccgtgtgattcaacaagatttgcagattttacaaattctctggtttataaaaaggtctgttgcgttcactatttgtcccacctatctaattgcaaatctgtggcctccagcaaacagtaacaacgttcttttgtaaccaaattgtaaccgtctccatgttgtctacactctactcttagatcttagttatatcagataagttgttaatataaataaagtggatgagcttctattccttatgcttgttctgactccattgtccccttgagcaactcttttggccattttgtgcacctcaatctgcagttctttggagtagattagattaaaatcctgtttttctggatagaatatgacagattaaattctgctgatgatcctgtcactaatttgatccatgaatcacctttatg

SEQ ID NO: 44179 - DNA, 547 bp, Oryza sativa
tctataaacttagtcaaacttaattagaaaaaaaagtcaaacgacttaaaatatgaaacggaggaagcaatatattatgccattcgttttgattatttgtcttagtaaaaagatttatataaatgctatttcttccgtttcatattattagactttctagcattgcccacgtgtttgtgtgtatatatatatatatatatatatatatatatatatatatatatatatatatatatatatatatatatatatatatatgcaatgctagatagtcttataactagaaacggaggtagtttattttttttatatgactagttatatatacactctcacataaaattatacgtatacatatgtatgaaaaaaaattaaataagatatatagtcgcgctgtataaaaaaaaaaagaggtattacagttataaaaagaaaatccctttttctttgtatgaaaaaaaaatagcgcttactaacaacaaggaatttctctatccactttcacatacatgtcaccaaccactgtatatatttaaactttgataag

SEQ ID NO: 44180 - DNA, 1177 bp, Oryza sativa
tctttttacctccagaagtccaataattaattggtataatatcacacattactaatcgtataatattatagcatatagaacacaaaattggccataactttataaattgatagaattgatcataagtccaaattctttaacatatataagtactaattgttcgacatatgtttttggcaacatataaaacatgtaaaggatagaaaatggtaaaatgattaaaaaaatcttaaaatttagaggagaacttttcgatgcttgatattttaaaaatgagtgatgatgtcctcatcctttaacttgtaaaaagaattctcttccaatgaatgtagattgttgctcatcttgcctcttgtttttatatagttcatcgaagaaaacaccctctctaaattctctaaattcctaacagcagctcatatatataaatttaacactctgaaaattaaatattatggttctaagtatctaaattcctaatatttacagctttatactatcaatctgtcaataaatatagacttctgaaaaataaagaagataggaactaaggaagttgaatccttcggtgctagtgaactattgaactggagtactaaagaacaaatcaataaatcaagccgtcgccgccagaaaacataactactattgaactacctaggacaaatcaatgcaatgaatcaagctgtggtcgttcggccgccgcatcgcgtacctgtgtggtggcctggcggactggcggcctgcacgccggcgacgcgccgacgcctgacggcccgagccccgacgccgcacgccgcagccgccgacgagcacgctgcagactggactgcagtcgccgccgcacgcccgacgcgccgcctacccgcctcggcgccggcagccgccgacgcaaccgctgcagtcgccgccgccgcactgccgcacgccaccgccgccgcaccgcgcacgtctatcctgcggaacccgaagaaccctagcgccgccggccgccgacgacgagcgcgaagtgggagagtgtgttactgccgctacgcatcgaagcaagcggccgaggggatattgcgatgggacgcatgtgggccttctgctgttgttagacaccaagcccaccaaatttacagcccggaattatgttcgaggttggaaaggcccaatacacaacaatactatagtt

SEQ ID NO: 44181 - DNA, 529 bp, Oryza sativa
tttttcgtctggtttttttgacggacgatggaaacatctcttattttttaagtagtagagataaagataaagatatatatatatatatatatatatatacatacatatatatacatatatacatatatatacatatatacataaatatatatacatatatatatatatatatatatatatatatatacatatatatatatatacataaatatatatatatatacataaatatatatatatatacataaatatatatatatatatatatatatatatatatatatatatatatatatatatatatatatatacatacatacatacatatatatatatgtgtgtatatatacacatatgtgtatatatatatatatgtgtatatatatatatatatgtgtgtagatatatatatatatatatatatatatatatatatatatatatatatatatatatatatatatatatatatatatatatatatatatatatatatatatatatatagatatatatatatatatatata

SEQ ID NO: 44182 - DNA, 710 bp, Oryza sativa
ggctcaaaccaaaaagagatggatggatagatggatggatggatggatgtatggagaaatccaaggtacatgacccctccagatttgtgtcccctatagtgcttgtcctcttctctctccccatctctcaatgaacttattggtgaaaacaaattaaaatatagtgtgttaattaattaatttaaccatgcatgggccggccctcctctaccaactagattacctgtttgcttttgttagtttgatttgtccatttactaggtccaatattttagtaagttgttgcgtatagcccccatctcgagctatatgctagtcagccgtcctacatatgtggcttggtatgcttgtgtttttccttgcatggtgtaccggtataggctagtacatcttctacctcaaccttaattataaaagtttcaagtttatacaatccattaaattacaattgtatattagccgttaggcatgcctcacatgtgtcgatctttaatttttgcctgctcattgattaattgtgtgtatagatcaattttgcatttcaaactcaaacaattactattgctgtttgagatggtacattataacatggacccacatgtacataaatgcatgcacatcctttataaacccttaaatattatcaaagacatcaataatgcacatatatatactcaaatgtgcacgtatgtccagttatgtgtaatatg

SEQ ID NO: 44183 - DNA, 584 bp, Oryza sativa
ttgccggccggtttctgaatatgcatgactactaaacacgcagtaatttgactagcttgctgtcaattgtcattggcaaggcatcagagaagcagtaataattcatcatccagcatgcaagcatgatgatttgttttttttgaaacaatcaagcgtgatgaattgaactgcacacatctgtatgaatgttaatccacgacgtccctaccaccagcagatcaatttggcacacgccacctctgcacgaacatgaacgaatcatgctactagtagcagaagaggaatatacctgcgtgatactccagtaattaattaagttcagttaatgttatcgtcatgttgacaccggcctccgtgttttttttttcttcggtaatcgccacagcctccgacccaacgttgactaacttaaaagtgctgcaaaagtggacactgtttaagaaacgtcattcatattgtcagcaaaaagatatgaaagttcagtacatgtttcgttagagtttgtggcgaatatatgtacgtagtcggttaccgtttaggacttggagttgtactaggtataggactagagtaagagtcggact

SEQ ID NO: 44184 - DNA, 1985 bp, Oryza sativa
tgttaggacgtactccctccatttttattctttgcttagatcaaaattaaactaatcagcatcaaatatttagggaaggagtaatatataaacatggcaagtaaccatcaaattcatatcacagataccatgaaagaccaataggaaatatgagtatgtaattttaccttccaggataataactattggttgcaataattagccatgaaagaccaataagaaagaaatatgaagtctttcaagatagaaaaaaattacacaaaatatggtacctcccgatatatcctcaataactgtaaaatcactttcaagataatcatcaagattagttgctagcgacgttagaatatattaatcaacaagaattagctataagtatgcaaatttttccttctggcggcaatgctgttgttgccacagatgttttttagcaaatagctagtcatgtaactgacttgtaatccccctcttcttaatataagctaggcaaaatttgctgcatgccactcaaaatttataatctttgtaggacaccacaaaacacatggtaattaactattggacaatgaacatgttattttattatatttggtctaaatagagagagaaatttttagaaaagacaagtttgcccgtaggatatgtttctttttaataaccctattaggtttatttcgaattaccatgactaggggagtgagaatggactacatcgacggagtgagaatcgattgggtctagttcgacctagaccaagtcgtcttacaagccaatggataaaagggcaaatttatactttccgcgttgtttctctctctatttgcaccggatataataaaaataatgtgttaagtgtccagcagataattaccatgttttcacgatatcctgcaaccaatacatattttgtgggtgtcctacagtaaagacaatgaactttaagtgtactgtagtaaatttgccttaatataatggcagagttcctgccaaatgttaatttcaaagaaagtgtctagtttacgtatgtcaactgtgcacttttcaaaagtttttccaataatggcctaggaaaaaaatgttttttccaatatgtatgtaaaaagagtaggtacatgaaaaacatattagatatgttgttaattgaaaatagtttcaaaatattgcactacaaattcactatgcctgtgcacaacttatatttcaaaatacttgaaataaagtacataataaaatggtaaagtgtagaacctatatttcaaaagtcaaatacaaagctaacttcaagtcttgatcaacacaaaatactttgatttaactcagctttgcatggatatctcttattatctctatgtatatgatgcatgcaagctagaatgtgggctgcatgcttgccctgatccttttttttttgtcaatcatcaatagagaacaagttctctcattctttttttcctttagaaaagaagcaaggatattcttaagaattgcaacatgcgagttaataagtaacatagttgcagttgctagctagctattgatcgtctagaaggcgtcaagaatcatgcaagacatgtaaggggatctccatctcatatgtgttgacttgtctaagaccatattagagtgtcatctctccactgatttgaaggtagggaggccggggcgttagaacaattgcaacaacactcgctagagagccactgattatttttttttaaaaaaaaagatgctcaaaactatgcagctaattgcatctctacatcaagagcaaataaaactcaaggctaacccacttaccagacacgattgcatcggccaacggagtctaacatatgctctagatgcaccatcacctaatcaactaatatgtaacatctccaatttttcaatatataacgttgtttacttcttgataaatgtttgatcattgggattattctttttttttgcaaatataaaaaaatgaagtcatgcttaaagaacat

SEQ ID NO: 44185 - DNA, 2427 bp, Oryza sativa
ctccacccctttttatatggcacagggtgacgggggcccaccagccattgggctgggcgcccccgattagggcgcgggtcaaggcccccttgagccgttggactcaaggggagggagatccatctaacagaaccattactgagacctgacataagttattgttgccaagcttatcataaaactcacaagcaacttcaacttctggatgaattaatttttgttgaaatttgaagggacaccaatgaaatttagcagcaacagtgtcgtcttgcatataagtcatggccatgtggaaaattcagagattggcagcactgaaaggagaactctctttttttgctgcaactactcctgggtttatgatcgcttattttcccgcattttttacaaaactactggtggtatagtctaatagagaaagttacacctcttcaaaacagtaacaattttatatttttctgaatattttatcattattcatgaacgtaataatgtggattgcaccgaccctgaactccacctgggccagatgtgtaatgaaacgagtggctacatagcaatgaaggaataagttcattttaggtccctcatctttacgtcggatatgaattacatccttcaaccgcaataccagatataacttttgcaaaaccggtgtactcgagatcccagtacatacaatacaataccatgttttagctgcgtgacgagtaggacccacgtgtcagcgaccaacgtaactcttcttcctcccctcttccctttcttccccatccctcttcaggcgcgattcaaggatgatcaagtttgtttctgatcgtgggatggcgcgattcaaagatctagtagatgtttaatcggtctcacttatatatgtatatacatatatatatatatatatataactgacactctctagcggaggagaatgaaaggggaagaaaaaaaacgccttctttggttgttcctgatctgttcttcagtcttgtgaagattgtttcttcagtttactgttcactgtagagagagtttcaggtttcagagttaagcgagagtgcgagttgcgagcgattgccgctctaccggtgaagctgcagaggcaaatcgatctcctcgctcgctgcaagtgcagtacaacgagatgatggagaggagcctccgctagatgattattccatcaatactctctctccattttttgtgatttgttccattgattcagattcatacgcagcagctaaaacacacagaaaatacttgcagaggagacaaatcaataccttttttcctttttgcctccctttctttcaattgagttggattttggtttggttcaatggttgacacttgatatctgtaaataagttatttttaggagaagtatcttaaataagtaaatttttgcatttgaggcatcttcgacgcgaatgagaacattcagttgccgcaagcgccatcgcatcaccgagccgcccccatcgatgcgtctaggggagtactatcagatgacctaatttaacctggttttgtaagtttgggtttttggtaaatatgagagaccaaaagtgaacttattgcaagcctgaatgatatattacttgggccggattaagttgctgttatcaagtctgtcaaaattgtatgatttaggcctttataaaaattaagacccaaattgtaagaagcattagttcctcttgctaaggcccaaaccaactacagatcatgcaatccacatccagatgagaaaacatacacactcgaatttaggcccaacttgaattttgttatttctttcttttttcatgtaatggagtttttcttctttctttgaagagagagagagaggtggaaaggtctaaaaatgggccatgagagagagagacagagagagagagagagagagagagagagagaggtggaaaggtctaaaaatgggccatggtggtaggtgtgtgtgaaggaagtatttttccccagctacagtttggtcgatatgtactttttaacgaacttttgcaaaagtgagatggcttttaggagtgacgagttgagtcgagagtactagtacaaagatgcttgacgcatatgctatattatgcatgattggaaatagaaaagcatgatcttttttttctcagaatatcgaaaaatctgatcatatgatcgggagtttatcagattttataaaactagcaaaatatccgtgtgtgtgttgtagctaactctagttatattactagttatattagatgagtttactaaaacaaaattatcgctcaaattctgattatctaatgataattaataagataaatataatgttgtaccgtatacatgaagcaaattaatagagcttctcactccaagatactctctcttctaaattataaggcctatattttttacacagttttcaatagtata

SEQ ID NO: 44186 - DNA, 1466 bp, Oryza sativa
catccatccaagtcgctcaatattcattaacctatagataccttggctacatgcatgcatgcgtgctagcagcttttaattcaggtgagaataattaacgtatatatctatatgatccggatatgtgcttggctgtttttttttttcaaacgtataaaatgattgcatgtcagtatatattagaagaaagcaaagtttcgattatgtaacacaaatggctagaaggctattgccggatgacaagatcttgtaagaaactacttaaagaaaataaaaactcatataacgagagagtgcaggtgaagccccattaaacaccaacaagctagcacccccaaaaaaaacaaataaaaacattgctatagtgctttcttgcttggctgttcgaatttaattactctctccgttctaaaatataacaacctggttgctactattagacataactttaatattacaaatatgaacagactttgctatactagattattatattttaggaagaggagtatataaattctattcgtgcaacgcacgtggcctatgacgcacacacatggatacagcatcatacgtacattatcaagtgaggatatgcgcgtatgtactcttatatacacattcaagggacggaaactaaagataaattcaatttctgagcttatattaactactaattttgtactgaaaattcactcgtgtgtggataactattggcacaaaaattaatgaaaagaacttataatcatgatcactagatacagtctgcgctgacaactctaccatcacaaccttaataattagcgattggaacttaatttttttaatttcaaacaaatgttagttccgatcattatctaaacatttaaaaaacattcctttttaaataaggaattaagagagagatgatgattacatacggataaaaacattaattagtttcgacagacgatcgagtgcgacgtacgtgcgcccccgtcatgtattctttaggcatcaatgcagcaagaataattcagcgtataattgaaatattatttttgctaattaattgacgcagaccgaattgaaatgtatgcatatgcataatatgatatgaatggtatacgtacgcacatactatacgtacgtacatttacaacgtatagtacgtatatatatacacagtgcaatgtggtccagtagacagggcgacgtgcaggggatcgtgagaaagcaaggaataattaatgattagtcgatgtgacaccttatccaagaactaaatgcatgtgtacattatacacagctatatataatattgtaccgatattttgttgttgtaatataatttgtcattaatttggctgcagatatatgcaacaagagtctctgtgatggatgtgtatgtgtatagctaggcatactagctagccggtcaacatatctctctgtatgtaacatgcactcgatcgcacgagtagatg

SEQ ID NO: 44187 - DNA, 607 bp, Oryza sativa
tgacatggaaacccctcttctctgtatagaaaacactgaaaaaatgtcactgcagcaggtttagagtcattagttcatgacaagagcatgaagaaactgtgtgatcatttagcaattttgtttcctcctaaccataattaaacaacctgtacaaatgtagctgtcacacacaggtcacaaatggatgaagcaaacctgcttttgagaaagagttaagtcgctgtcagaggaaagaacacgaacgggttgctgcgttccgtgatggaactcaccagtagtgcagttgggatctccggagttaatcagcttgcttctgcaactagctttgctctgcagttgtgtatttgttcacgaacctctgaaaatttttagggttttggtcgccttctccacgtaggtcgccaccactgtgacgcagccagctctggtgactgatgaatctttaatgaattcagcatctggatggctctcagaatcagtagcagataaaaatgaatccaaagtgcagtagcagcagtgatgcaggatgtcagcacacaaacagctagtgctgatcgaatcagactgggagtgagttgggcacaagatgttactacagtatcttact

SEQ ID NO: 44188 - DNA, 649 bp, Oryza sativa
tctgtcaatgggtacagtcgtacaggggaaagagatatacacatgcctgcgtgcctacttgccttttgaccatctctgtttatgatcagtttcttaatccatgcagatttcaagctcccattcctgattggcagatgtgcactactgccacagtccatttcacatatatttttgttgttctccctttgcttctcttctcctctcttcttgatcaggtagcctaacttattagtcttcaagttccagctgagcaagctgctagtttagtcgatcttaccactacttcccctgcattcaatagattgattactgatgatataacaaccaaacactttataacatgagtactatactttacaactaaagaacgatcattggggagatctacacttttatttatatatgcatgtctctgcacttttttttttattcagacacatgagagcttctctttatatgtctcgtgtcatgtttggcagggagagagcaagctaaggtggtgaagcatgaggaaaggcaatgcaagattcccaaaggttggagctttgatctcaattgcatcaacatcatttcttgaaatttctctcctgtgctttgtttaatttaccggggtgtgttttttttttcatattttgcgcagtcatcgtca

SEQ ID NO: 44189 - DNA, 885 bp, Oryza sativa
cccgaaaaaattagtggtcgaattacagaccttttcttctttttttttaaataaacctcaaaaagaggatgagggggaccatattaaaaagaaaaaaaaatctgacaattgcacgattagttaaaaggaaaccggcaaaacctacatggttaattatagactcacacagtggtgttttaattactgatttttttatgcaaaattaaacccgattactaatcctataatcggtatttttgtgaataaaataggactgctagccacttggtcagttgctgaatatatgatcagttgctgacagctaatataattggtgcctaaatatcatgcatgtgaggtcactgatcagctcgatcgataatatcactgattgatcaaagtcagacaagcgctgatcagctaagctagctctttgtgctatcttgtaggagcatcaagttagtagtgcggcagtagtaggctactatagcacgacgtgcttggcactaataccgtatatgttttagcttagtacaattactcagtttattaagatgatcattagatcagatgaaactgacattaccgatatattaaccgctcagacggccgtctctcgccgtatatcagtaaagtaatttacacctatcttaaatagtaggaaagagtagacatgaacatgttagagtgcgtagctcggcccatcaactatgggccacctaggtcatattgggtctgctctggcttcaagcccaaccggagccacaactttaggtcctaggtctacataacccaaaagactagtctgatagagattgttccgggttccaaaccttgggctctgataccacttgttataaaaccggctccgaaatcacatcggaaaccaaacgcagaagaaacgcc

SEQ ID NO: 44190 - DNA, 801 bp, Oryza sativa
caactcatggcacaccaaggcaccacaactaatgagccctttttctgttttctcagtggtgttgatgagttcttctaatcatcatttgaaatgacagcctatgtgggaggaacttttcagagaaagctgagaatcgaatgctccatcagttagtagtcaagtatatatttttaaatatgtggaacatgaaaactacccaacaagctccatgaaaatgatgcttgtagatgactgtgaccacattattcagtggaaaatatacatagctaccaccactctcatttagtggagtgtaatgggaaactgatgggaaattaactactgcttgaccaatgattagtgcaaataattaattagtgagctcaatacatactgcctaattttggttctcatattcatttattttaagagaaaatctcttatatgcctctgaaattttaactaatcccttctatgcccctgaattttgcttacttccttatatacacctgtcggagggtgatcctctctagcgggaggctgtgaggcccccctttgtgagtccggccaggggaccgggtgcaatactgaggaatgtgttctcgcgcgagcgaggtgaatctgcgagaatcaagctcacaaggtggaaggcgagagagtgagagagagggtttatacaggttcgggccgctatcaagcgtaataccctactcctgtctgtgtgatgaccttcgtgtggttacgaagattttagatcctgggattacaagctagggcttggccagcctcttccaagaatccagttttctcaggggctgcagg

SEQ ID NO: 44191 - DNA, 694 bp, Oryza sativa
ctaacggaaagagcaaagttttaaatcaacttttaacaattcataaggataaaatggacttttacagaacttaatagagagatgctaatggaaacctaaccgcgatggtatttctgagacaaattaagacgcttgtacgatagcatttctagcaagttggatttatcgatggtatttaatttcttggaatggtgtgcttgtagatgacatttcctagatttcctcaattaattaaacaatatgcagtatatatggcactcagtaattaagagctaatggtcggattagtaaggaagagctcgctagccaattaattaattagcagcagctagcgaaggaaaaacggagttcgtcgggatagcaggcgaccgtgtggtatgcattgcatatggtccaatttgccgcagttttactccacttagtctgtgtataattcagcgcaaagtttagattttggttaaaattagaaatgatgtgactgaaaagttgtatgtatatgacaggttgatgtaatgaaaaaggactgaagtttggatccaaaatctagatctaaacacagccttagcaacggctttacccgtcaaaacctaattatgcatgtgagctcaacagtagttcagcacaaaaccccacggcctttaatatcctctcgatccaccaataatatccatctaatttttattttttcctccct

SEQ ID NO: 44192 - DNA, 1698 bp, Oryza sativa
attaagatataagtggtatctgtcatattaattatttcgtgaggccctaagaaatggtttcacaaaaaagaggttaacgaagaaaataattaaattaaagtatattagctagaggtgcagaaatgaaaaaaaaaaagagaaaaaaaaacaaagcttgcacaagctgccacgtacaggtacatctctctggcgaacatggggcgcacaaactaactctggattctctcttgagtttaatactgtgatttgtttttggagcctgtacgtgcttagaggattaggaactacagtaattaacatacatatctaggactaacaacatctaccactaagtttagcaatagtcgtactaattatactatacaaacagtatattactaatatactactttcatattttaatgtatgacaccgttaaatttttgtctaacgacgtttgacattcgtcttattcaaaaatatttatgtaattatcatttattttattgtgacttgattcatcatttaatattttttaagtatgacataatttttttatatttataacaaaaaaaatgaacaatcaaatattaattaaaagatcaacggcattgtacattaaaatacgatgggagtattaattaagagtataacataaccgcgtgtctaacaacaagcatgcatctacctgtaaccaatagcaaggcttagcacttagcaggagtaatagttaattaattaattaatcgattaattagaggaggatttgtattagtaaaaaataataaattattaatagaaaagtagagggggtggggccgggcatgcggcgcccgacgcggttgtcgtattgagagcatgcacatgggggccatgtgtggcgcccccgccgtcagctcccattggcccacgtgtcgcacgcaggtgcacgtgcggcgcgctacgcgacaaagctttgccctgcgcatcgcaacgtgtcacagtcgccgccgctgcaccgccccgactgacagatcacccacgacgccctatccacacagccttaaatattttcagtgatattaatattgtaaagttgaaaaataaaattatttgattatttaagaaactatttttttaaaaaacacacctttatcagtatgagaagcgtgttaacgaaaaacatgaaagttgaaatttggagttagagtacaggagtatagaacgcggcctgaatatagaagattgagaatacggcaacgaggtaagttattagtgcgtaattaattaaatattaattattttaagcttgaaaaaaatattaatactacatctgtttcaggttataagactttctagcattgcccatattcatatagatgttaatgaatctaggtaaatgctagaaagtcttataatataaaacggatgagtatgattttaaagtaacttttatatataaatttttttttcaaaaaaatgcatcatgtatcatttcgggagatgttcgcacggaaaacaatgttacagatacaaccagacaacctacacgtactctctccgttccctgacacaccttgaacaatcttgtctaacaacatggtaaaaatcaggaaattagaaaaatatcttcatatgtgtctttcatatgtatgtccggttctcacgtatcacttgtattttgcagaaagagcagtgactaaagttcatgcatgaatagtttttagtgacaagtaaaat

SEQ ID NO: 44193 - DNA, 3118 bp, Oryza sativa
agggtttcgaaatggggacgccgggggaggcggatccggcgaggtgggggttggcactcacagtcgccgagcgtgtccgggtggccgacggcggccttgacgcacacctccacgcccatggcggcgacgacgacctggcgcttctcacgtacgggaagagaagattttgggtttcgacggcggcgagctattggcggcgagatgaccggagaaatgggggaggcgggatttatagggagggggagctcgccggagacggagggtgtgagaatgacatgtggggcccaggaggcggtccccccgtgttctggaggcttcggtattcgggacggggagggtagcgtgattgtcatgcggacgtggcggcccatgggccaagacaaaatgagtgaggtggttgcgcctagtccttttctgtttcgaaaggaggaaagcatgaagcatcgcaagattcgagttgcttttttttttcacaaacaatttaggcccgttcccaaattttttttccgtaaaacatcaaatctttatatatatgtatggagtattaaatgtatattaaagtaaaaactaattgcacagttaaggaagaaatcgcgagacgaaacttttgagcctaattagtctatgattagccataagtgctacagcaacccacatgtactaatagcggattaattaggctcaaaagattcgtctcgcggtttccaagcgacttatgaaattagttttttcatttgtgtccgaaaatcccttccgatatccggtcaaacgtccgatgtgacatcaaaaaattttcatttcgcgatctaaacatacccttcctatgaaaaaaaattgaatagtatccattccattgacgagttttttttttgttacatgcaattgtggtagtactactattgaagtgtgattatggctccgtttgagatagctgtaatcggtggattgacgagtaatctgatttctcttatagttgtctaaaagtgtaaacttgatgaataatatggaattattaaaaagttgaaagtttgctctaaaatagtacctaagaaaactttatataactttcttttcctgaaatgtgaaacgcaccgttgagaaacttagagagcatgtaaacaatgtacgattagatactcaaaggggcagacaaatgggttttttcccacttatctcgcttatatttcttttttttccttataaatttataccatcatatataaaatgaactagcaagctgtttttatataggaagtgttgcccacctgcaatcctatctgctatgatcaatgttttggcagcaaaatctacggtgagctttagcgctattccctccgtcccaaaatataagaagttttggttggataagacactttctgatgtctcgtagtactgggatgtatcttatttcagctaaacttcttatattttaagatgaagaaagtagaagtagtgtaaaggagagaatgtagacggtgaaagtgaaacagggctaatcatccgatgagaggagggggagagggtcaccatcaaacacaaaacacgtgttgcatctaatactcctcccacttaaaaaaccaaaaaaaaacaaaagaggtagggcttgtttggtttgaatccaatttttgccctaccaaaatcttggtagtgccaaaatcttggcaagttttggcactaccaaattaggtagtattgaatttaaactattgtgacaaaaaattgatagcaaaccaaacatgtatttgctactattgaattagctaagaaattggtaggacaataagttggtagcaaaccaaacagacccataatatcatccatggtcaggaccatagttaggaccggaggtgtgcgttttgtggcacgttgtgatgttttgtggttgttgatggacctgcagggcacatcctgacgccgacacaatgagatcagggagtaccagcaccaccgtccaccgatcacaattatggagtagcatggcattgtagttgcttctctcttgtccggttctgtgagcacgatgggatgcggtgcctcgccattgacacctcccttccccgcaaagaaaatatctaacgccattgatacgcagaatctgtgtcacttacgcaagagaacagcatgattaaactctaaatatgtaaagttgtaccatagtagatgtatgtgaaaggtcttacacattctgaatctttctagctaggttaacaattcatacaaccccgatgatcgtatcgatttttttatctgattcattgctttattttctttgacaaaaatgacctgtaaaataacaaagtaagacaattttacccctttaaattttataccaccaatagtcttatgatctatttaaatggaaaattaaaccgatgcataccgttagatcatttataccgtgaatatatgctatactaatatgtcatactataaaagttctcaatcataaccataggaaaccaaattcaaaacttgacgacaatagcatggtttcaattttatacgtatttggatacaattagacagaaatagtaatggcattttttaaaacaacacctttataacgtagaattaagggttaattagatctataccactgcaattaaccctatctgatatccgtaggccttctatttgttcctaggccctggcccctgggtgctcgggccgcgtgaggcagagagaggcgggccgcatgggcttttgcacggcccccgtcggctccgaagcgttccgcatctcacgccgccgccgcctccgcaacgccatggccgatctgcaggaggacaattccaaatcctacaaggtcgccgctttcattgtccgattcgattaatcccgcgctatctctctctctttatgcattatctggttgatgatggtgcacgtgtgtatgcattaatcaaaaactaatcacacatggcgtccgacgactcttctcctccagacgccaagaggctacgccgctcgccgccgacctccacctctcccgaccacctcctcgtcgacgagatcctcacgcgcctccccatcgccgccgccgtccgcctccgcgccgtctcccgcgactggaacgccgccctcacctccgaccacttcatcctcgcccaccgcgcca

SEQ ID NO: 44194 - DNA, 773 bp, Oryza sativa
tgtgattgcctcacctgagctcaatttggtgataaagaaaattgccattctgccgtccaatacactgacaccacatgtaatgtccttgatccaatcttttatttctgcttgacaaaattgtatatatgtataagtactgatcgatgagcagtttatagaaagatcagtttagagatgaatctataagctagtttatgcattgactcattgctatattctgttcctgtctaggttcagagaaaaaagattgagcttttacttggattcacacgtacatgtaccaacaattaatttcttttttttttgggaagtgtatactcctgttgctcaacagaaggatagagaacgacgtgatctctatttattagggccatgcaattacagggtcaaaaatatgtttttttcaagtgcagtgcgtggggagctatctagctatggtaatctccgttaaattgttgacaaaaaatctacatggatccaatttcagttagcgagaagagatttactctggtccaacaaaaggtatctcgaggtaccggtacctcatggtaccaaatcgtttccgatcgttggatctagctaggtaggatggatattgttatattcaatgattagaaatgatttggtaccgtgaggtaccggtacctcaaggtactttttgttggaccggagcaaatctctactgagaaatatgcaatatggggtaggtggatcactacttcaactctacaagtaggggaaagtatattgactctcaaggggacgtcccctca

SEQ ID NO: 44195 - DNA, 892 bp, Oryza sativa
agtgctcctgattggaggtgaatgacacagaatcgctgctttgataaatagatcaagtttaatttgctacatcatgaaattaactaattaaggatgctagctagctttgcgtatgtcatgagatgtgctcatcttacctcaatcatcaatcatcacatatatccgatttatatgtaaacacccttttacaacacaggcagctattatacatatacgcagatgaaaaaaaaaagtgtttttatataccatattttatagtgtaaaatttagtatatctcagtatctcaagtattatgaggtattgaattttatcctaaaaattttggtacttcttagacactttcaagtaccgtaaaatttcaacaagaacaataactacaaggtggggaattaagtaaatctccgatcctacctaatttccctaattgacaggtcaggattttttttctgaagaaagacagttcaggttttagacaaactgaatgaataaattatatatatataggacactcatattgggcaccatggtatcaaatacacaaaatcactcaaaattttcaaaattttcaaattgtgagtatataccgagttataataactcgattcatacctatacctatcaacaaaacaactcaaatttaactttatttcacaatccatgattacatacctaactaattatatgtatggatgctatatacctagaatcaaaatctaacaaaaacaagttcaaattcagttcaaacttgctttgaactagttagtaaagtagctaatgttaatatctaagtaattgaaaaagtttcatacccatttgaattaggtatatactcaatttcaacaatggtgcccgggcaccatggagcaccaaacaaatttatatatatatata

SEQ ID NO: 44196 - DNA, 605 bp, Oryza sativa
ttcatgcttttcttaaagaaaaactctattgcattattttagactatttgttttaaactatttatccagtttataatatatataatatttaatttatcgttataatctagtagatcatccatcatatttcatctgccaataatctaaaatgaacactacctaagcacaagaacaatatgtagtatttactttaaaagatgttataaaagttatacttagtaaatggttgtatgcatgcctagttggtgtagaagccgtaatctatatatcttcatttctttaaaatttttttggaacctctctgtatatgtttggaaatccaaactgagtcgtcgattttgttccatagaatttctatgaaaactattatgtgtatgaaaaattaactattacgtgtatgaaattttttatgcgtatgccctgattgtcttttggagcataattttatgttaactaaccaaattacccattggggcacgctagacttttttttttgaagtagaattatatttaacatacaacactaactctgatttcttacaataatccttttggcagcagtgaatctacaatattataatgtggattagactccctgatgaaca

SEQ ID NO: 44197 - DNA, 2073 bp, Oryza sativa
tgcgttctactccatgactacatttgacatagtttttagaaatttgaactctacttcatgaccatacttggcacaattttaagggcatgttcactttaatgccaagaaaaatcttaccaaattttgctaaaattttggcaggatttcttatatagttaccaaattttggcaacaaactgaatgtagccatttttttggcaactttaccaaaatttggtaaggttgaaaatagcatcaaagtgaacatgccctaagatattgttgccccctaacaattaggagtatccattatcatccaacagtcattaatttggcaccgttaaatcagctgctattcgtaggatagtttagaacaaggcaagtgtattatgttctcggtttcttagtgatgatttttttgaagcttcatccaaatgaacatggatggatcaaataggcaatacgtttccggtaaattcgagaaacgcctaaggatcttccggctagcttcacaagatggtgggctagccgacttagttttgaagccccactcattctaattatttaatattaggtctttccctaatatttctttttttttgttccggttaaattccgccaggttactcgcactcaaaccacatccccatgctctacttatagatagagcttgagaaatattggttttgattagttactagattatctctttttgaatgaatttcaaatgtttatagccattaggatgtaagggattttattccaatattcaaatctgatgggggcctaactgcaaaatgtgcacctgtcatcccatataaaaagttgccccaaatgattccatcacacaaactcctaaacccacaatatacaacccaagatacccgggcacatttacagaaatgccccccaaactcctcacttatctcatcctagccctcctcgccgcctccgccgccgcagcgcggcgccacccgtctccggcgagctcagccgccgccggggagcccgtctacctatggccgctgccgaggaacttcacctcgggttcccggaccctgctggtcgaccctgacctcgcgctcgacggccagggccccggcggcgccgccgcggcggtggccgaggcgttcgagaggtacagatcgctcgtcttctctccatgggcgcacgccgcgcgcaacgcctcgggtgggtacgacgtcgggaagctcaccgtcgtcgtcgcctccgccgatgagaaggtaccgtgtgtgtgtgttcgagctgctcccgagtttggctcgacggttgcttcgtctggatcagcacgcacactgtgaatttctccgtgtttttgtgatgtagctggagcttggagtggacgagagctacacgatctatgtcgcggcggcgggcggcgtcaattcgatcgtgggtggagcaaccatagaggtgatttcatttcctcttctccagattatgcccttttttttacagtagtgttgtgttggtgaagtgttttgggagaatttgacgtgagggctactacttctccctttttgaagtacggtttaactcctagcgtagttatggagcaagtagagtgagctgagtgagtggtaaaaagaagacttcaatgtggaattactgcaaatattgatgaactggtttccagtgaaattcagcttataacggtatagcatagctaaggctgaacttctctaatgcaatgaacttgattttttttaatgagctagctatttgatttttgcgcacttctcagtagatgcatcaactcttgtggtattcttggaaactctgatatgaaatgctcatattattgtgggttttatcaaacgaaactaacggttggtactgtttgtggagtgtgttgattgatacgaacatcatctctgaatattttagagttctactgccaggcttggggtcttggggccttgggggcatgggttcaactaaagtagccctcactcatatacagtttagctttgccggttgtgccccctgcaaactttcagagaactgaagacaaacgttgctattaagttataatattgtccaacatttctcttttatgcacaagtgtatgaa

SEQ ID NO: 44198 - DNA, 2272 bp, Oryza sativa
ctatataatcttatcgttgattttcatttaaattagtggacccgttattttataccattagattagatctattattaaaaaaatatttttcttatgttgacatacaagcgctacacgatgtaaacgctacttcttgtctttccgtacgtacaaatgcacgtgactgaaagcaaaacgataaagctttcctattcttcgctggaaaaaacatacatccatataaaaatcaatggtctttaaaatatgatttctataatataaaaataaaatatataacttcacaaatataaatatatttacttaaatctatctattattatatactaaaagttcgttaaacttcctacaaacgcttctaaaccgccttcggtgctataaaacaaaaaaacgtgaactttcgatttgccttttaatagacgggaaacatctagccctcaattttcatttaaactggtggatccattattttgcaccattagattagattaaaacctcccttcctctcctctccttgcacgttttgtggtccaaattacagaaaaccatacacattttgacacttggtactcaagtacatatattttggtagtgtagtttaacaaaactaaactatcaatgaatggattcacctgtgagacgacgtcatcgttccacctaggatgaggacgtggtatcctgttaacttggaccataaaacgtgtagttttgtgaaatttactcttttttctattcccattcacccacttttattttttttacctagggtacccctaaatatttttatattacttttttcgctattgacttttgagcatatgtttgattattcatcttactaataaaaatacataattaccatttattttattatgattttacattgatgtcttatgttcgctatattttagcacaaaatacattgcggcaaatggcatcgacatgtattaattaactccataacaattttttcaaaaaaaaatcgcatcaaactatatactttatggtatcaaatattacttaacaaatatacaatggtaatttgaactatgtaaaaatgcaaaccatgtaatttagttgtttttttaagtagatccaatttaaattttaatttatgtgagattaacattatcaaatcattttggaatttttcgaaactgtttggttggtatttcaatagtaataaatcctacattatacatatatgtaaagaaaattcaacaaaaaaattttcaacaggtaaagtatatatcattggttttttttcatattttctaataattatttaaatgatatgaaaatagtcagaatataacccaaaaataacatatttatttaagaagttcaaatatagttaataatggtccaaagacataagtcgataaaaaatagctatttattttaaaagattataataaattagggttcctgactaatataggatgaaaacatgagagacagtacattgggagagggcatgaatgaggcgaagggggtggatgttgggcgatggtgtacgtatgtgcatacatacaatgcccctcgggctctatattggcacaatcgatgtttactttatgttttcactcccaatacatatccaaaatgacatatttggttaaggtcggcttttaactctagctaccacaccaattataattttatatccattatttgtgattgatcgaaaaatgcagttctgccagttagaggaaacaatccaatccgagagtgccaatcgatcttctacataagtgctctagaatatattctatggcaccatttaaatgactttattagacagtatttaatgatcttttagtatatagaacatagatatacttgccgatggctttgtacttttatttcataccttccgggtataaaaaagtatgttttttataaatatttatagttttatttataaataaataaataaatcaatcaatcaagatcacattaactatattttactacatagaagttaacatggcaactaaataacaacggaaaattaattgtacatatgtattatgttatactaaatcattcattgtatgtaacaaaagtcaattaaacacgctctagagcgctcataaatcaccgtataatatgtcgtaaagttgtaataaatagtaattacattgacgtatctattatttttaactattagatctattattttttaaaaaatcttaagtcgccatgtgtcacctcctatgaaaacaggaaaaaccatagaaattcttagaaaaaatgaaacaccccatcatcg

SEQ ID NO: 44199 - DNA, 1262 bp, Oryza sativa
tgaattttccacaagaaagaagaaagaagaaagaagaagaagcaaaactagtgatggaaaaggagaagaattccagcacgtcagccatggcgtcgcgagtccccaagcttgcctaacccgtcttgaccacgacaaacacgcagagagagagagagagagagagagagagaaaggatgagagggacaagacaacacatcgatgattcgcccccatccgctacgactccaagaacagcaaactcatacacgcatttcgccgccggccggccgggcggcggcggccatggccggccaagaaatgcggtgctcagaaatctttcttccgtttgggttcaccggagagaaacaagacggctggagatcaaagacgatgtttgccaaatcaattaattacctcttgcggctgcagatcatcctggaaggcccagagggaggagagcagcgtggcgtccaggccgtctccgaatccgagtggcagcggctccattgccatctcctcttctcctcttcctcttcctcttcctctttctctttctcctggccacacgctgatcgatctgatgatctcttcctcctccccttttcttgctctctctctctcgtacgtgtgtgcttcttgatttgggagaaacaaggacaagtgaagaagaaggaggcttttgggtgcagagagattcagagaaaatgtatatataggagttctaagctagcagatgatggtctctcttggtttgttttgtttactaatcacaggaggaggtttttgtgaagaagaagaagaagaagattagtagcaagaggttgtgggagagaggagaaaaatcaggggattaaagtatatggaatgtgcattcctcctatcatctcttgccatctgtgcacacatttcctatacaaagatactactactactttccaagggaagagagataaaaaaaaaggggaaaaggaaaaagaaaagttaggagaagaggagagaaaaaaaaaatgcaatgggggtggtgggtcccaaccacttttgtgtctctttgtgtaggtttggagacttggaggatggcgtggacaaagtctttgcttctttccttatttacaagtctcatggggctacccctctacagactacctgaaattgatgattcttcctcttctctctctttcaagtctccacagtatttttctctgtttttttcttggtattttctgccagtatatagtatgtgctctagtgtttctcgtattatacagtgtacatgtcggtttga

SEQ ID NO: 44200 - DNA, 1463 bp, Oryza sativa
agtactacttgattttttaccgtgcagactgtgcagtgcacgtactattaattatagtattaattactgcaccacattagattatggccttatatgtgggtcgttgctcatcttagcatggaaggaatattcttctgtctgtaattcaggttccatgcatgcatgcacagtaaatactttcattaaccctcataattttggcaacttattactgtctctctacttatatagtaggttaattatttggggaagatattgaaattacttttgattgttgttgtggagttgtattactatatatggcgcatatttatgtttcccttttcaaagctaggttggctgttctatttatttatttttcccagtatttaaaatttaaatttgttaagcataaagtagtgtgaacattgactagcacacaagtacgagaaaaactgcgtgtcagttccctggtgtgtacactttaaatactcttatgtggcatatctgtttttttgtttaagacaaatctgtgtagagatcgatgtggagcataatatgttaattgtgcgtacatatgatcgacactgtccatttcccaattaaaaaaaccaacaaacccgaaaggtatctgaagccaaatgattaacaacctgggttacaagtccaggtacacttaacgttcaggggtcatgaaagagcacagaattaaactagctaattaatgcaggataattaaattatatcgatcgtagagaggcatgtcaggacaatgacttgctgcctcgtgtcctcacaatcgcgaaagttgtctcgacatgcatgtttgttttttcttaattttttcaggaaaaaaaaatctagtaacatactccattcgtatataatatatgtgtgttttggttaataattagttaacaccatagataatgtagagccagctaaaccatagttatcacataatctttaaaaatgcaccgattaatcgcataatctatatactttacgcgtacaagctaaggtacaacggctatcgttttagtgaattatctccatgcatgttatgctaaagatcgacttccaaagacaatacatcgtatgtataaatgatagtcccagtgtaagcaatatccaccggagtcgtagcaaaaacgagttttcatacacaattaactatcactgcttatacgtatatatacttcgttggattataaatatatttgacataactacgaggagattgtgttaaaaaaatatgtcctgagaagaaattaagacggggaaaaggatcaaagaataatcgacagaaagtttatataacgtgggaaatgaagcaaatatagacaaattaaagaggacatgatcaaggtacacacacagtcatcgacaggcatatgcaacaaaggcatagagttgaccttggacaaaactggacatgtacattatctggcaaatagccacctcatcagctagctcgcctgtgg

SEQ ID NO: 44201 - DNA, 1999 bp, Oryza sativa
tgtaggtggtgagcggcgggtgaaaaccctgcccggccttggccggaccgacaacgatgaattccccctcctgagggtgttgtcgtgctgtctcacccctcaagggtgattgccgggcgaaagcccagtcttggctcctttgagccctgatggacggcagcggcggtcttccgtcgcttctctttttgaagacgtcgttttggcacccccttgctgtagggcgatctcgtctgtgttcctttgttggtctagcggcggccggtctggtgctaaccttctcctggtcgtgtgtgttggcgctgccggtgtgtgggtggtggtatatttttttctttctcctggttatgaccctccagggttgtaatcttgtaattttttcctgctctatcaatagaatttcgcatcgtctcgtgtgagtcgttcaaaaaaaaagatagaattagttttatttttggatagagaaagtatgcaataacaggtctgccgtgggagcggagtgaggaggcctcgaggcctcactagtcactactgatgctaggactgtgaaagcttcactaacattttctgccgaacatatataaaagaagagattgaagattcgtctagtttgttaaacacaccttactatttcttttgtagatcgatccgtcctggactgcatgtgtatgaaaaatttgagattttggagagagagaaacgttcaattgtgagcatgttacagattgaacgccggatctcaaggttacaaccacatatcccttatcactgcactatcaaccacgtttcaagaaccagcatgtgtactattaattacaagtagccggctggtgtgtggatggttgacatcgttcattagctgagctagcagagagtacatgaatttatatgttgtttgtttgtttcctccatttctttgatgagagagagagagagagagatgagagcggcggaggagacaaaaaaaactttaaatttttgcgtgagaaaaggtcgcaccatccaccatgtgactacctttgaggtatggcatggtgaaccttatagctttaactgcctgcagctgctggtatatgcttcctcctactgaagaagaagacgacgacgatgctagagctggaagacgatgatcgagcattgctaattctagaagagagagatgctattagcggcgccgttaaacccaaacgactaagaacatcatgctatacactacacactaactcttagctagctaattaactcgggtccaacgcggctaagctccgaatttccattaataacttaccggccggcgagagcaattagctagatagatacctttggatcttctctgctgccttctgagcttgatcaacacgtactcctccagtccatataatgatgttaaataggaataatttttgaaagttcgattgaagattaccgcaattaattttataagtttatggtactagaaaaaaatacccgtgcgttgtaacgggtgaagtctattttaatctcattattattatatgatttagttaagataaaattaactatgagagttcacttggatatatatatttttaaaaaatcatgagctgtagttaggagtccgatcgtctcaagttagaatgcgagttttttttaaacagattaaaaagtgaacgatcttaaaaaccgactcaaatacggatatgtattttcaaaagcaaatgaacttaaaaaccgactcatacacggatgacgtaccaaaataccggcaaaaacatttttaatttttataatagtaaagatttgtgaagtatttttcacggaaaatctacgtactccacctccgttttttaatatatgacaccgttgactttttgggatacatttgaccatttgtattattcaaaaaatacatataattattatttattttattgtgacttgatttatcttcaaatattctttaagcatgacttatttttttttatatttgcataaaagaatttgaataagatgaatggacaaa

SEQ ID NO: 44202 - DNA, 1065 bp, Oryza sativa
cctcctctcccctctcccgcttcttccccgtgcgccgctgcgcccgcatctgcccgcctgctggggagaagcaatgagagccgacctcctccccctacttctttccggcgcgccgccatgcccactctgccctagccgccacacccgcatctgcctgcctgctccacgccgcccgcctgccgcgctcgcttgccgcctgccgccagcctccactcaccgaagaagataagagagaagagagaaaaaagaggagaagaaaataggagagggcaactgatatttgggtcccacgtcagcaaaaccacccatatatactgccataggactctgagtgtacgttttgtgtgggtttaggtgtgcaaatttctgattttgtatttaagggactcaaaaaaatctcgctattaagttgagggatctctggtgaacttattccttttgtttttgggttcccttggcccatcttgttcttttctgcaaagcccatggcccatctctttgcgcagcccagccagcacaggcctgcgctgcgtgtcattccagcagccatacacgcgcctatgcacagtttcgaaaaagaaactgaaaattagcatggtgattggcgcgccgccctgtgtgtattaccatgtgtattgcataagttattgatttctaccaagcaattgctttcagtttattaaaaatatcaacatggtaatggtacttaactgtatttgtctttatatttttcaacatcgtatgaaaatttcagtcaaaaaaaaaacatcgtatgaaaattgtcggtcttacttgtgtaatttcgcttattttatcttaattttcaattaaacctatagtagattacatctatttgaagatttttaataatgagattcttgctactactaatttggtgcttttaattttgctattttagacatataggatgttactatcattgtgttacttgcctcgattttgatttaacatgaagtaactgcatctccgaaaaaacttaccatgggctacaaattctaatatcgctcccttccttttatatttaccagtaatctatccgtgcta

SEQ ID NO: 44203 - DNA, 759 bp, Oryza sativa
caattaattgcatcttatgtatatgcacaacggtaaattacttgaatatttgcacaagaggtatggaccaatattataaccttataacatgaactgtctcatttcttctccaaaagggaatacatgacaattctttatccacaatttgcatataaatacatatggacaatctcaaatttattagtatcagaactttgcgtctaacgatctacaaatctgtccacatatctccatgtacgaggaccccgtataacccatcaacacattttcctggaggttatggacaattccaacagctcatcacccaagtgtatctccgttttttaatagatcaagccgttgattttttatcacacgtttgaccattcgtcttattaaaaaaatttacgtaattataatttattttgttgtgagttgttttatcactcaaagtactttaagcatgatttatatatatacatttacataatttttttaataagacgaatggtcaaacatatgttcaaaaatcaacggcatcatctattataaaaaacggagggagtattagaattatcgcagcaacagatttcatcgtagcacgataaatttcaatgcatctttgaaatctcatttaacacgctgaacttttaaaataaaaattaatcaatacttaaaagtacattactactgacgtgttcatacactccatttgtaaaataatttttttgcggggcatttgtaaaataaatttaaaagcatcgtaaaatacaaacatgg

SEQ ID NO: 44204 - DNA, 652 bp, Oryza sativa
atccctactagataccagaagttgggcatcaaggtgttgaggcatcgtcgccggcggccgcgtcctcccccgtcgacgctccacactgaacccgaacctcgtcaccggcagctgcatccgctcccgtccacggtccacatcggagctcgtcgccaacgaccgcgtcctttgtcgggagctcgtcaccggcggccgtgtccatcgtccacgcctcagccggtgtctgcgtcctccacaccggagctcgtcgccggtgccgccgccaccaccacgcaggatcctccgccgtccactccccacgccggagctcgtcgatggcgccgtctctgtcaccacgcaggattatctgccgtccatgtgaccatgctccacgccggagcttgccggcggccgcgtccttcacgctggagctcgtcgccggcagctgcgtcctctacgccagagctcggcggcggcggctgcgtccgcgccaccggcgtcagcctcgtctgcgctgctcccatggtggcctacgctctcgtgtctgagggaggtggactgggagcgataccgttgggacagtatcccaacgggataccagtatatagtagccccctattttaatgggaatttggtcccaagcctaagcctcaagccctaatttccccatcct

SEQ ID NO: 44205 - DNA, 639 bp, Oryza sativa
ccatctttgcactgccatcatcctcaaaacgcgctaccgccaccgcctctatcaccttctcacccgcttcatcaccattgcatccgccggcttgactgctagcccccggctagtcagccactgctctctgtcgctgctccaacactcctgagcacaccgccacccacgtcgtcagctccacctgctctgatcacgccatcgatgccagcgctacccttttcatcccctccagcaccatcattcgctaataccccgagggcaaattgaagatatcataatagcaaaagatatcttatgtagcatatgaaaataatttgcattaaaaacagcaacaaaaaaaacctattttatatggcatatgataagttatattttaaaaatataattaaaaaaacttgaaacttatatacgaatcttaagaatttgaatgttgtatacggaggccaactaaaaacttttatacttttttaaacctcgaatgagataaattaattggtacctttacgtccatcagagtattttagatattttaaaaaaagtatccaacccaatgagcaattaatacagttaccgatgtattatagaaatagataatgtcaatgacaaatcgttgagtgatgataaacttaatcgcataga

SEQ ID NO: 44206 - DNA, 1026 bp, Oryza sativa
ttgcaacgggatattttaactgactctcccttttcgtttcctctgtccacgtgtgctcccctagtacctggtacctgatacctggtaccttaggtaccggtcggtatctggtaactagtacctttggtatcgactaggtatcgaccgatacctgatgcccggtacccaaggtaccaggtggtacctaggtatcagaccttggtaccaaggtatcaagcctgatacttgtggggtatcaaagggtaccatcaaaaaagaggaggagacgtgggggagggagcgccgcaacggcggaggatggcgtcgaggaggcacggcaaggtgagggacgtgtgctcccctagtacctggtaccttaggtaccggttcgtacctggtacctggtacctttggtaccgactaggtatcgaccgatacctgatgcccagtacctaaggtaccaggtgatacctaggtatcaaaccttggtaccaaggtataaagcctggtacttatggggtatcagagggtactgtcaaaaagaggaggagacgtcagggagggagggccgcaactgcggaggatgacgtcgaggaggcacgacgaggtgagggtcgaggcccgagccagagagtttgagaagtcttgaggaggagccgaggaggaggttgacggccatacctgttgcaggtcgacgcaagctgccggcgtccatcctggaggtgcaaaagcggggacgacggtgacgccgaggccgagggcgaggacaaggggagctcccgcttctgccctccccgaggcgactactccccggcacacacccgaccgacgagggcagcgagccatagcggcgcagcgaggggaggcgagctcgagggtgaccccgccgagggttggccgacctcgctgacgcagtgccgtcgttgtcctcctcggccgccggagacgacgacgacgatcccttcctcccggccggcttcttctccgctcggccttcttcagagagagagagaaagagagagagaggggagagggagagggagggct

SEQ ID NO: 44207 - DNA, 751 bp, Oryza sativa
aattgttaaccttggcgagggattttgaagcagattctgcataacagatcgatgctcaatgaaaacatcaatagaaattgcttctatcaattcaatttcgagcatgaatataaatcagaagtagagatagagaagcgaacaaaatatgaacaggattctttaaatggaaatggcaaatgtgatttcagttgtagagttgagcggccttaacttttaggaggctgagataggaattcatcatgttttcttgcatttccatttcgtgaaaaaaaaagtcctagtgtaggtaccatgcaactaaacttcataaatatatgacactacacatccaataattttgaggactattgaattagttactggttactgctgacgtgcatgatttcttattgcaaaaataatgttacctaactagctgcaacgaaaaaatgaagacacttgttcatcgctactgaacgctgctaaaaaagttttgcaaaagaaatattccagctacatgaaaattcctcagaattaactccacgctactaatgtgttgtgattagaaatggttgtcacaattacgatatgatcaattgcccatcacagttcaaatttttctcacaatttatctgtttttatgacatacattaattttgttcagatgtgcatcagtacatggccttgtcctctttatggaaacgctatgaagtccgtgacatttatgaacatttggacatattttaatgtcagcatattagccaagttatca

SEQ ID NO: 44208 - DNA, 645 bp, Oryza sativa
taatagtgagtcataagttatcccgatgatgtgctaatgtttctaagcagggctaagcaattatacctaatatctagctgaaccaatatataaagcccaactagtcaagttataataacccaaggtatcaaggaataaagtaatcaagaacaaaagggctataacaatgaataggttaattccacccaatgacattcgaaaataaatgcaatagttgaatagaaacaatagctttaaacgggatcaacattctcaaagggttgtttgggatctgtgtgcttgccttgctggccttggaactcttcaaactcttctccggcgaaaacggactctccggaaacgacgaaatctaagcagaaaagagcaaaatcaccaaaacagcacataaacaagcatgaacggtacatgtggatatttttaatatgtagatctcaattttagaaaaatttacagacttgaaccaactaaatccgagctaagatgaattagttatgaatttttgaagatttaatcggattaaaacacttatattgattttaattgaattatgacgcaataatgaattatttttgaaaaggaaaaagggatttattgcgtcagcgggctagggtttcggtggaccgggcgcacggcggcggttcacgc

SEQ ID NO: 44209 - DNA, 850 bp, Oryza sativa
gagtggccgccggcaaagccgtgcggccgcaaggacagcggcggcggggcttctcgcttctcgctgacctcgtgctcagacagctggggagccgctcagggcggtggcgacggtgattgctagatccgcgctgctcctgcctgatctggcgaggagtcagctggcgacggggacggcgatggtggtggggatggcgacggcgacggtaagggcgagctgcgccgggctgcggaggccgatgacggcggggatggcgaccgcagagaggcggcggtggtggagaccgtggatcgggcgacggcggccggtgggaggagccgtggcgcatgggcgacgccagcagtgggaggccggtgtcacgcccagaaatttagcccaagtttccagactatttcgtgtattaaatccctgtccaggaccagccagggtacacaaaacgacaagtaataaacagttccaaacgtaaataaagcgtaaaatacttacagaagaggcacttagtcctcacaccgaaacaaaagcagcagcagcggaaaaaggcgatcctagcggggtttcagctccactccacaggcaaaactcaactggggtctgagccttggtcttctaacttcgtcttcagctcagaagcactacacttctgaaaaggggtaataatagcaagactgagtacaaccaccgtacccaacaagccacaccaacgatgcagacgtgcaaggggatacaaggaggggtttgtggctatttgcataaaggcggttgtaaaacattttattgagcaaaacagtaaaacggttgagtaattaaagtaatattaaatctccactgatcaacgctacaccacgttgaa

SEQ ID NO: 44210 - DNA, 687 bp, Oryza sativa
tatgaggcacttagtcctcatcatgaagaaaactgcagcggaaaataaaatctagcgaagctccggctccactcccacaggcagctcaactggggtataagccaaacgtcttctccttctggatcctttttcttaactgaggttgattgattattgcaaggtgagcatatgacatactcagcaagccacacagcaaatatgcaagtgcacaaggataccaaaggatggcataatattggctcatttgtaaaagcagcatttagcaaaacatttaagagaagtaaaacattggagtaattaatcagaaattttaatcaacactgaacagcacacccgtgctgcccaggcccaaccattctgaacaaccatacccggctgaacagatctaatctccaaaccaggagctaagctaattattaccaggtataacatctataattattatgagaggtgtgagactaatcacgaaaaacattgctcaactcgcccataaccgcgggcacggctattcgaatagttttactctggccagaggtgtaccactgtacccacaagacacagcctcaacatcatgtctaccatgcgtcgcgatactggaaagtacccgaatagaggctgtgacaataccctttgcataacacaactcaccacagtgcaccattcctggatcataatcacccccttata

SEQ ID NO: 44211 - DNA, 980 bp, Oryza sativa
aggagaaaaaggatattagttattaacaactggtttgtcaaaccatatctcaagaaaaataaatttaatagatcatgtagcagattgtagatgaaatattaaattgttgcgtaagatttgcatcgtaagaagcaagaggtaggaaaattgatgaaaagtttgtgtttaattattagtactaatcacgaaacaaaataaatgatatacctcactttgatgggagatatatggatggaaatatgttaagtattataaaaataatagatatctatgttaaaatattgtggaaatgatacgagggggtgttgattggatttgcttgcatattgattcgtagaatttgatacaatatagatgatgtgcatgcttgcattagctttgatatgtaattattactaatagatgatgaggtggtatgtttgtatgttaagttttaggcttagtgggttgtaactatataaaatgtacagattagaggccgaaagtcagacaacgacaccttgctcatgtagcgcctattttatgataatgatttcattttaaatgcattgtttcacaaattatcatttctatcagacaaaataaacaacagaaatagacattaatatccattccatttatcatttctcgaaaagaaaacaaagattacaacgacacgatgcagttgctgtcttaagcctagttaaaacacccccttgtctccacctagccgatccaccgagtcctaagagagcagtgaagactgtctgctcggcgccatagaacacagtagacgaggacgcgttgcggcacgagaacagaccggcgagcgaccgaccatggcgtttgctgctctggcctcgctcgctatggttgccagctgctctgccacgggtagagctgctgcggcagttgacgtaatgcagggaatcacttctgccaagcgtgctgttcctccttccttgacccttctgtcttgctgctccgtccataatgcaggg

SEQ ID NO: 44212 - DNA, 696 bp, Oryza sativa
ccgcattaaaatcgataaattatttacactaaaaaaatcaataaattctcaacgactcctaatacatgcttgcacagtcaggttgatgatgtggcagatgcatctatgatggataacataacctccaatgtagctttacaaatttgtctccaaaatcgtcatggccgttgtatttgtgatgcattgtcaagagtaatagaaaccaccctagattctaaattgaattcttgtagtacatcaagtacaacactaagataagaggttctttggtgcttggatatccaaatgtcatatgtcacagaaaaaggaaagctaacagtactgaatgagcatttcaactcatccaacctagaacgatataacacaacaatattgttcttggtagttttccttgaaacttgggtgtactgtggacaaaaagcatttcggatcatcctctgaaattttttgcttttgcccatcctaatcggtagctcctcagaaactatgtaacaagcaatttcatctcgagctactcgtggctcataggtccatgtacttacagaaccattgggtccggagctcagttatgtctgccaggctcctgccgatgctttatccttgaggtgcgtcaaataatgtcggttttgatgtcctgttcctaaactagaagatgggggataaagttttccacagtgtttacaggtagcacgtgtt

SEQ ID NO: 44213 - DNA, 516 bp, Oryza sativa
caccccggccaatataagataactcgggcctctgttgcgaagcactaccgtacttccacatgtctagtgggtaaggcttagtttgtggctcagtctggttataaacaaaggtacacggatggagatggacgaagtcggggctcgatggacatctctaggacaaatgaaggctacacgagctacggcccggtagtcgagatgtcatggcacagggctggtgtccaactgctaggggctcaatcctgcctgcctatcccagaagttccggccgtaagtggggttgggtcggtactcttgtttatggctaggatgggttgggaactatgtcacgtctttcgtccgtatgccgtggtggtatgtggcacgtggttactcgtgaggaagatgtgtcttgaaggtaaagatgtacacctctgatcagagtaaatctattcgaatagccgcgcccccggttatgggcaagcctaacaatgtacccaagttagtggtttacttcttaaaatttgcttaacaact

SEQ ID NO: 44214 - DNA, 716 bp, Oryza sativa
cctgcagccctttgtccagagtatacaaatacgtaagcagcataattgcttaaagcaacaaacctgattaattattattgattaaagactggacatatttgtgtccaatcatacatttatcatttttttgtttttgcttgtttcacgaggatttggatgtggtgagcattatatgtacgctgatatgtactttcagaacttctgcagatatgtacgcggccatttaaaaagtacatggtgtcagggtatagcacgtatatttcagttggcacaatgcatatatacgattagatcaacagctagcaacggttttgtatcactaccagaaactccattagccctgacgggccaaaatttttctgacgtgtatctattaggctgtcaggagtaaacaatttttttctgacgtgctttcggtaccgtcacgatatcatgaatttcgctggcgtggtttgcctgtcagaaaaaaattttaggttcagatggttctcctacagagaccacatacgttttcatacataaagactgaccggcctggttataagaaactatagcatatattattattattattattattattattattcaacatgcatgctatgatgcatgacctatgatgcacacatccattacatgattaaatcaccaaatgcaaagcatgcacttactacaaggaaagttctgaaaggccgaaaaaaggcatgataaagaaa

SEQ ID NO: 44215 - DNA, 620 bp, Oryza sativa
atgtggctatgtgctatgtgctcatacatgtgaatggggaaatgtgggttttgtttgtgatatataagggtgaattttgtatgcaggatgaatgtgttgaatgtaggaaatgtcggtttcgtttcgttcaattttaattaaataacatgttgggaagatattttcaatttttttatatgactttcagtaaatgcttgtatatgacattttcgttatatgctttcatatgacattgtccgagtagatagtgcttttatatgacattttcgggccatttcggttgatatgacatttagatagtgcttttatatgacattttcgttaatgctaaacgatggtgctttgatatgacatttagatagtgcttttatatgacatttctgttaatgctaaatgatggtgctttgatatgagatttcggttatatgacattgtccgagtggtagatatttttaatttttttatatgactttgagttagtaataaattcaaattcttttatatgtacgcacattaaataatttttattgtcattcctataatatagaacgatggcagatagtgcgaaacgagatgaggataatgcctctcctccggcatcacacgctattgtggttgct

SEQ ID NO: 44216 - DNA, 532 bp, Oryza sativa
tgctcgtctgttattttgcgtggaaaccgattttgtgaatagggacgtgccacttggtttatctctccagcgattaatatgcatagaatttgttttaaaagattctgtactaaatatccaagtagataattaccattctggtgttctatttagttttacggacgacagattagtctgaagatatacatttacatgactcgctcactcactcgagcagttacatttacatgaccatccgcggcagtagtaaggccctgtttgtttcaacttataattattatattctagattattaagccagattgctataagctggattataataaactgatatagaataagctgtgagttgtttgtttgtctgaattattggaggcatggattattgggtttgaaaggctaaagtctataatgcccttagatatttgttcggttcatggcataggtgggtaatttttcttaactatgtaggggtagtgagtctttagccacttgataatctgaaaaaaaaagctcctttagagcagcttat

SEQ ID NO: 44217 - DNA, 755 bp, Oryza sativa
cccattagtgtgctaatgtttctaagcaggactgcatcctaatagctttagctaaaccacatagagttctagctaatcaatttgttaacccatttgcaaaggaaaggtaaggaatgtcaacagggtcataacaaaggatataggtcaaccctcccaaaggggagctttaggatctgtgtgacttaccttgcaggcctgcgaagactttcgaaccttcagcataaacagcctctttgggaacgtcgaaagccaaagcaaatgaatacaatcaacaaaacagtacaaaaacgagcataaacatgacatgtggatacttttgttggatatatctcgattttagatgaatttcgagacttgaaccacctaaatccgagttacggttaattagttatggatttcctaagttcaataggatttaaaccactgtcagataatatttatcatttatgacgcaataatgaattatttatgaattggaaaacggattactgcatccacatggatcggctccacagtagaccgggtgcgcagagccagtctatggatctgacggctcagattaaaagggaccgatctatcctagatctaacggctgaactaaatcgggttcaccacatgtgcggctgacgtggcagacagaggctgaagcagcgcggatgtggcggtgttgggttcatggctggttgcgagtggcacgggaccagatggtggccggcgatctagggcatggtgggttcggattggcgcaggggact

SEQ ID NO: 44218 - DNA, 1164 bp, Oryza sativa
atcaacgtaaaagtgaaactggattaagaaaatggatagtggatttaagttgatatattagagagatgatgatgctagtctagaggtttcaaaatgttacagaagactaattcaatcaaaggacacatttctacttcagaagagagcatttgcttttcattactcaatgttcaatttatattttgaactcatgaaacagtaaaagctgaagtactcctacaacatatttagcctgtcatgaccaaagtagcacactgagaaaattcagaaatcatggtttgcagagcaacagaacatcaattcaccaaatttattgaacatttcaacattggcacagtaacaactaacttcaaggcatcaaggaatattcactctaattaacatgcctgggtgctgatgtgcgaaggtgttccagatgcttggtctctgccaccctcagctgcaccacccttgtactgcatgtcaagaatggctaactcatcagatttcagatcaaaagataaaacatgtcacgatgtgatggttaatttttggcaaccaatccattccttggtgccaatcttagcattattcagtagcatcgtgtatcacgcaaaaaccaccatcaagtgcaaaagaaaatccctttttttctgaattatcggtggaaattaatcacatgtggagtgaacacgtaggggaacaatggagggagctcctacatcacggcgtccaacggcggcggcggccgtagcgcggtcctcagcaccacgccctttgctgcacggccagcggtctccatccgaggcggccggcgaatcaaaaggcggttaggtagacgggcgctggtcgatggacgtgattttttcctaccccatccccgtgcacaccaaccgagctcgtcgccctatctggcgaggatctgcgccgccgctgagcttgagaggagaggcagcgtcgtcgtcggagctcgtcgctgacgctgagctcctctccccatatagcgacgaggaagaggggaggacagcagactgaacggcgtgccagcgcgtggtaggctcggcctcgggcgccggaggaagaggcggcggcggcgacttcggcgcaggtgggacttgggaggggagatcggcggataagagggggtcgactgtcgagatggtgttgatggcggcctgacttttt

SEQ ID NO: 44219 - DNA, 1548 bp, Oryza sativa
cctcaaacggagggagtattattaattaattaccgcctcattctctccaactagcttaattctatgatatccgtactaaaagaagagattatgtttcttgttgcaggtacttgttttgggtctgttcatcggtatatccatctttgtctcgctctaatttagaccaaagacagactactaacaggcaaaaaaaaaccgacaattcaatacttcacagaaaacagcacaaaatactgccaggattcttctcaatcttcaggattagctcagaccctccaagtataacttttccttcaaggactggatgagattcttccaatgttgtatcaaagtgattattttttaagattagttgtattggatatttcagcaaaatgttatcaatcaaaaacaaaattatttcttcttgttcgcaatgcccagcagatagctgctagaataaccacacttatgttcagcattttcggctctattatttgctgccatgggcgtggggagtatgaccttaattatgagcaatccgtgttagtgtcggagtaaatttcttttagaaaaaacacatattgtaggctagggttgagacttgagcgttataccttgcttttgttgtaataggcaaatctctttcgctagaagaagaaaagttaactactatgtttcgttcaagggagtagctatactaatttatggcatcatattttttttttaaaaaaatcaacatgtatttacattgtaagtctctaaattacatacgtaattttcgtgtatttacaatataagttccaaaattatatacgtaagtctctaaagtatatatgtagtaagtccaatgtaatataatgcaagtgcataatgcaacctttatattttgcattgtaaattacatatatttatataacatctactgcattagaaacctacaagtaaaaccatcaaaagccatgcttgaggtggtggtgtggcggagcgatagcattgtcgagagagagagagaggcagagtacatggattgaggtggcaactatgtatagggtgcaacagagtggattgggcagcggtgacagagacgcaacgatgactaagggtgcaagtggctaacccgctaactcacttattacaagtggctaacctacgaacgcacctccgttacccatttatttgatctataggttggtttgcatggtcgctacttgcacccttaacagtgtcgctaggagtggatcatcatatttgatagttactactttcattctagaatataaatattattagtgttggacgcaggtattaaaaagtagataaaattaaatgggagaatgttgtgattagttgagaagcggagatagatggggaaattattatattttggataaattttgaataatagaagctgttatattttagaacatagaaaataagttttatagccgttcccaaaaaatatatttatttatggtggaatttattcatatgagttctgagtgttagatttgatatggattatagggtagatgactaattatttttttaagtagagacactcgtggg

SEQ ID NO: 44220 - DNA, 1668 bp, Oryza sativa
ctctttctattatgggtatatatacagagagggcttgagaggttggttgatgtatccacatatgagaaagcaataaagctgtgatgcctctccctatatctgtgttcattgtttatctattgtgtgcatgagatcgtcgtcttctactctggatcagcgaacaggccactagttatccaacacgttatcagcacgagttctcgctcgttccgctgatccgggtaagcgtttttaatagatcaatttgtttcgttactaatcagattgatatattgtgtttatgcatgtgtctgccgttggccgagaggatcgcctccgcacgtagccgcgcaccgaggcaaaccgtcgggtgacgcgcgtgcgtgtcgcactccacacacagagcagcagcaccgccggtcgtccgcactgaggccgaccacgccgcaaaacttcctgacacgatatacgtcgatctgcatcaacctgaccggtggcacatgcatataaatgtatgactgatcttgcatgtgtatggatctacaccaggcatgtactacctccgtcccaaaataagtgtagttttacactattcatgttcaacgtttaaccgtccgtcttatttgaaaattttttatgattagtatttttattgctattagatgataaaacatgaatagtactttatgtgtgactaaatgtttttaattttttcacaaatttttcaaataagacggacggtcaaacgttgaacgtgaatagtgcaaaactgtacttattttgggacggaggtagtacgtagtaagtactgatctccatcaaacaaaacctgcacacatgtatatgtgtgcgatccgatctgcatacacgcatatggagattgtcgaaactagatttcggcaataataaaagggggtggctatcaagctagaaaagtgtatgggtttggagacaaaggatttatacaggttcaggccttcttatataagaagtaataccctactcctgtccggggatgaatccgccgagtgtattattgattgtatgattcgggaaaaatcagcatatgcccctagaggcgcccggaccccccttatatatgggaaggagtccgggttacaaaagataatctatattcctaacggaatatgaagatacaggtaaaatacagtcgtaaccgactaagtttcagggtatttccttgatacacaagttaagaaactaacccaagatacagataagatattctatctacattaggtatcctgtacccagttcgaataccatcgccgtgtagatatgggatacccataatctccacagtagcccccgagtcctttgcagtcgaccatcgtagccttctcaaagatgataatccgagtacttcaaactcttcaagccaaaacctgccgagtggactgtaaagggcgaaaagataaagaatatggtgcatcgaatagatgcacctaattaggtgtagcccccaactatgtgattagttaacaaactaaacatatagttgaaagacaaaataataacacaattgtgcattatatgacaaaagcacacgcggcgcctaaataggcatgctagccgactgctttttagccacaataaaaaaaatccgagtggtttacactctaaaaggttcacgaatgaacacactcgacaggcatccgaatataaaaa

SEQ ID NO: 44221 - DNA, 535 bp, Oryza sativa
accaaatcttgaaatacttagtttgaaaaaataaaaatgttacgtgcaaatttttgcactgaaaacagaagtactttcgtaacctcataaacttcttagattttacaaacatattactccctccgtttcaggttataagatgttttgactttagtcaaaatcaaactgttttaagtttgaccaaatttgttgaaaaaagtagtaacatttttaacccgagacaaatttattatgaaaatatattcaattattgatttaatgatgaaactaatttagtattataaaaataagtatattcgtctataaacttagttaaaaatatcttgtaacctgaaacggagggagtacagtaaaatgcatttggcgccgccacgcccgcccacgcgggagacggcatcggagcgccaacttctgcgaacacacacacacacaacacaatgtcgtcgtcgacggtcagtcacccacgccacggcccacggcggcggaggttcgccggagaaatggaagaagatagtaatagcactagaaaacctgg

SEQ ID NO: 44222 - DNA, 1985 bp, Oryza sativa
actaaatgtagccatttttttttgataactttgcaaaaaaaaatgataaggttgaaaatagtagcaaagtgaacgagctctaaatctggcaagttaaccaggagaagaggacggtgagaagaaaacctctgcgtttggtggttgtggaggtgcagctgccaaggctggagcagattgtgaaagagccgacgctgcagcaggtgaaacagatggctgaggagatgctgccgcagaagtcgatggcacaactgctggagacgagggaggtgacagatgaacggcaatggacggcgaagtgcttgcacgtccatggtggggaaccggcggaagatctccatctgggacgactggggaggaggcgatctccatgtttgcgagaggtcgccggcgaccggcagcggaactggaagagagtagagacttagagaggggcggcgggcggaattggcagagacagttgtgcgtgcgccgggatcgcgggttggtgggcatgttatagaacggattcgcaatagttgtggcgacagtttggccttaggattgtcacggagattcgtgctcacgtggcattagccacacatgctttactgattttcttcatctttactcgggtgcgccatctttactctgttgcgctttgtccttatcatcctctagcactataacactaggcaggcgtattgatttgacagatagatcaaagtaatgattgatacttcatattaatttagttacaccataattacatcctgctaattacatatgtaattttgagacttacacatgtaattgtaaatacacatttaattttaaggacttgcagtgtactccctccgtcccaaaaaaaggcaaaccctggtttccgtgtccaacgtttgaccgtccgtcttatttgaaaaaattatgaaaacaattaaaaagataagtcacacataaagtattaatcatgttttatcatctaacaacaacgaaaatactaattataaaaaaaattcatataagacggacagtcaaacattagcacgagaacccatggtttatctttttttgggatggagggagtaaatatgtattgactatttttttatgaaaaatacgacggttgtccctgagagagctgcagctgctggtgctgcgcaggtacagccatcacatccgaagacagccatggctagtactgttttagaaaaaaaaaatcaagtcttcaccagtgccaaagctctctccctataagaccaactccagtgtgaacctaaaatcgattttaaccaaaaacaaaaaaagaaccgtgcacattgtgaggagctaatggtttgggtcagatgaaaaagcgacttcaaacgagaggtcgaacacaaatcataaaaataaaaaatatatttgttgctgccggatgtgagagcgagaggaaaggtgagattgagttttattttcatgtgaggaaagctttgttcaactggtatgaacagaactctcagaacacacactacagctgtcctaagtgctcgttcaccggtcgccatatttttttaatgaaaaagcaaagtgtaaaacaacgggccggaggtcaacccggtcaagcatctggttcaccggtctaaccgctagatcatcgatcgaactaccggttcaaactttattaataatttattcatttaccattatttctaatgcagaaaagtgtaattatgctacatatacgacaggaattcttatccagtactcctgccgtccaaaaaaaaaatctacttctgggtttcccaactgtaaataaataaatcaaagagcatgcccaacgataaagggaaaaaaaagggagaaagcaagtggatatactccagtgcaagtcacacagaataacgaaaatcctgataattaatggcttgtcttgactcgatgccgaaagaatcaagaatgcataatatgtccacgatggtgccggcatcacatacatcaaagaaaaattacacacatacaaagacatg

SEQ ID NO: 44223 - DNA, 1361 bp, Oryza sativa
agttacttctattgtatagctaagttacttctacaatttaataaattacttttaaattaataaaatgtttgaatatattcaacatggatcttgttttgtcacatattttatgtagagtataatggtacaaataaatcttgaaaataatatgtgatttaaaagatataagtcattaaaggggttaaaaaagacgtgtaccataggctaaaggcatttatatatgggatgaggtggtctccggttagggctaagcctaagggtgaaaacggagcggattcagacggatagtgatcataccatatcctaaatcatatttttttaagcgaactcggagcgggtgcggtccgtgtggatagtacacggatgtggatacggagcggattgtttcggatgtcggaaatagtgcggagtcggtgcggaatcagtttggaaacggattaaatttatcggatgttacgtgtgtatgcaatcaatacaatgtcaacttaacaatgtaagaaacaataatacaatagtcaatgaacgacccattgtaataattatgtgcttaagtgctaaacaacatgaatacgtgatgttcataatataaaaatacaactacgcaagtgtgacatgaggcggtgaaagcctcagactaaaaaatctaggttaattgatgaattaggccattagatggaccaacttatgttatatgcaatagatagagtgattacatgtgttgataattttgaattatccagcaaatggcatatcagataatccgataaaaatatcggataatccacatccgccagattttagagataccatatcctcatccgcatccacatccatatcagttggatttctgaaagcccttaccatagactcgtttcgaacggattcggaacagatcggataggatattatccgatccgttttcacccctaactaaaccactactactcacgtccactactaatgctattttggtgccgccgccatggagatgggaacgacagagatgagaggcaggggaaaatctaaccctagtgaccacggccaaatgggccgagatggcccaagggaattgctccgcgtcacgtgtggcattttctacgcacgacgccgaaccactcggtttgtcaaaaaccacccggttcattggttttcccaaaaactgttcggttccccttgtttttacaggtctgattgcatggatggtctttgaagtgacccaacccgtcaaggttcctagttatggttttttccggtttaaccggtccggtccgttttttgcactatgcgccaaagcgcgtactgggacaacgagcacggcaaagccggtgatggcttcgcatccctatgctaagatgataaga

SEQ ID NO: 44224 - DNA, 2549 bp, Oryza sativa
gtggtggagcatcggtgcgccagccatgcctttgttggtctagtggcggtcggccacgcttagcggtagccgatccggtactagtcttctcctgggcgtgtgtgttggcgatgtcgtcgtgtgggtggtggtattttttttcttttcctggttacgactctccatggttgtaatcttgtacttttttcctgctctatcaatagaacttcgcaccgtctcgtgcgagtcgttcaaaaaaaaaaaatgtttgccatgttcgcctcgcctgcattggtgtttgtatggttccatgtcctggtcaaggtaaaaggtaggccactacagggttgtgtgttcagtcaaagaagtgctagaattgctccaggcttccaggtctgatatctagagaatggggggagaatttcagatgctccatgaaatactgaagagcggagattgaggttggctgtttggatccctcctgtcctacctaccatcaagtcattataagttgatgatggtaatagctggaaaagatagtagcagtcttagtaaccaccaaaacaagctgcaggtgctcacatagggcttgtaggctatggccagcaggtggatacttattagtcaatgacaccactaaatgtactgaaaaacagcatttagaaggctttttgttattcaccagactcccttatattctaagccaagatccacaaaacgaaaacaaatatgtcagcataggatgaatgcgatgcccaagcacatattagtaaggcttccaatggacaaaaccattctttgtaaaagaacacctttttcacatcagtatcaacaaaaaacagcaggcaactaggaaaacaacattttagcaactctgcgcaattaatttcttatttcttggacactaagcataaaacaatctcctgataagttttcttcataaataatcaagaccatattggaaagaggtaaaatggctcttaccttcaaatgaacgcaagccgcttcaaaagaagcaaacatagagttaattagcagtaaaataaattggctttaacataattcttttgcaatctaggtccttcaaaccatcacactatttgctgggcttgtccttgaacagtcatttaggcccggtttaaatgccgaaaattttcgggtctgaaaacttgagagacaactaggcgcattttctatttcctaaaaggtttagcaaattaaattataccattcttatggaataaattaaaataagtttggtgacattggacttttgaaacaaaatgacatatgcatttacatactaatgctcatcgcttttccaaaaggagctatacaaaaatactatcccaaccaattattcaccctatttgaattcctgttccagttcttcaagattttagccatgccggtgtctcttaaaagcatttctttcgatgcaagtctttactaccttacctttacgccgctaccgtgtggagaatccatagcaatatatcaataattactgtattggagtgtcacatcgttctagattttattttttcccaacaacagggatcatatgatcactcattggtcatactcatcatcactcatgaatcaaggcattaggtagaatgcatacatacaaggagagaaaatgtcaacattctacacaagcattagacgtagatgggctagaaaccccatagcacatttaagcaaacataagacaaaaaaataaaaataaagtgaaaattcttagtgttcttaccatgggatgtttaaacgaataatcaatcggaaatacaatatcaaggaagaatatccctcctccatacgtagaacctacaagacgagtactaccgcattagatcaacaaagtgaaggtgcatataagactcgtttactctagaaaaaaaattaacgcaatttatgaacaggtgaaattcgcacagtgcagtagtaatattcacacacgctaggtttaccggctgctgctagctggagccccaagggcgcacgccgctccatcccccgcaggatcttcctcctccgcctccgccgcccctggcgccgccgccggcggggaaaggggagcgaccgagcgagagttgggggaaggagtaggaggagggcatgtttgcgtgggccgtgggccgggctctttgtgttggtgaggctttaagcccaatttttttaccaggccccaatcttgtcagaaataatgggccaaagttaaactggcgatgtttcagtatagggaaaagtacaccgaaggtccctcaacttatcatcgagttacaaaatcgtctccaaaccgcaaaacgggtatatgacatccctcatcttacaaaaccgttcacttcaggtcattcggcggttttgatcccggttttgtctgacatggcggctgagtcagaggtgggacccacgtgggctccacatgtcaggctgccacgtcacacccccctctctctttcccctctcctctcccttcctcttcctcctctctctctcaattttctcctcaatggaaagccagccggcgggtgaggagagggtcgtcggggcaaggcgggatagga

SEQ ID NO: 44225 - DNA, 3075 bp, Oryza sativa
  unsure (1)..(3075): unsure at all n locations
accgacgacgttatcccggacttggccgatcgggagtcccttgacgccctctgaaaaaccccacgtcgctgacgctgccgatgtcgtcgtgccgaagtcgccatcgccatcgcgtcggaatccgccgccgtcgtcgtcgcttgagcagggcggagaggcggcgggatccgcacgaggaggagaggctaccggatccgtccctcccgtcatcgccgccgacggatccgcgcgcatcggtggcggagagacggcgggatctgcgcgggagggggaaaggccgccggatccgcgcgtatggtgggcagcctgcttggagatggcgacggccttatggcgcagaagcccgacgaggttgaggcagagcagcgtggtggaggacgggatgcgctgtggcgtcgcgccgtggttgcggtggtgcagcgtggaggacgggagcacgcggcgtgatacggaggctgcggctgtggcggcggggaggcgaggagcgctgtgcaatctggactgagattagggtttcttatgcgcatacaaaatgggccaccgttggtgtttagtttcttacatgggctttgaccatgttggaatgagtccattaaggtccctcaactatagccacagtttaactagcgtccttataaaatactccctccgttttttaatagatgacgccgttgatttttttttcacatgtttgaccattcgtcttatttaaaaaatttacataattataatttattttgttatgagttattttatcactcatagtactttaagtgtgatttgtaanttatacatttgtataaaatttttgaataagacgaatgatcaaacatgtgagaaaaagtcaacgacgtcatctattaaaaaacggagggagtatatacaatgcaactagtatagcagcaagcgcgctcaacacaaacttttaaaacaaatgttcatactaaagttatctataaattatataggcttgtatatacctcatttgttgttagacttgcccagttttatgaaaatttttgaatccgccactgcttggcattcagtccgagcgtgtaaggaacctcttgtttaagggtggtgacagtgtcatccttaacaaaacgagaggtgtagttattaggattttgctgagttctggtgaagccacgtcacccttttaactccagccgttcgatcagctgctacaaacggttagatgcgttcctcctccaagcgctgcctccctcctccaccgagcgccagattctccgccgctgccgccgggcgcgcgactcctcccttccccaccagtccgcgcgacgctctcgcttcctcccaggcgcgggcccgccgtcgaccgctctcgcttccttccccagtcacgcacgcgcgaggcgcgggcccgccaccggccactctcgcatccccgcgccgcttctcctccaaccccctccccccggcgcttctcctccccccggcacttcaaaaccgctgccaccgcaggcttcatggctgtcgagccccattcccttacttcaaatcgcttcccacggcttctccctcagcggaaatcatagttcgattggctttctcaacctctccctcctctgaaatagtatatcttatgctgctccttcaccttgaaaccgtatgggtgtatattcacctcccaaaggtattcttcttcctcttcttgaatcatatatatctcatccaaatatccaatctattggcttcttcttttagtcaagctagattgatatgtttctgttatctctcagattattgaagaattaattaaaaaaaaaacagagagaatggttttgttttggctcttctttaggtttttaccatcccgattgaaatttatttatagtatataaggagatcattcattttatgaggataactggtatgcataacaattttacattactgacgcgtgcttgcagttataatttgatatttttttttttctgaatttcggttgcagatcattgccactactagattgcttgctattgctgtagcagcagccagccagtgcaggtgctgtgatggcggtttcctaggtccggcgccgtcctctgaggtcaggattgtactgcttttctgaccttgcatgtgcctgtaactgcaagctcaatttcgtgtgtttcctctgaacgcgcgtggcgtgtttgtggaaatgcctctgtgggagtagcacgcagtacgcacacacgcacgcacatgtttgcccattttgctccatgcatatcattatgcctgcatgttgtgagttgtgctgctgactaaccactgcagaattattggtttatataagttagaaccatattttgatgtgttccagcctgctgtctgttgtttgctgaccattgcatttgctgctgacccaaacaagttttagggccaagaggttgattcagtgtggacttaattatggtactgaaagtaactgtacatagtagttgcaatgcagaccagctttgcactaatttcaggaagataagaaaaagagccaaacttagataggtttaataattactcaaactatttttcctccactggaaagataaggagatcattcattctatgaggataacgggtatgtataacaattttacattactgacgcgtgcttgcagctataatttgatttttttttctgaatttcggttgcagatcattgccagtactagattgcttgctattgctgtagcagcagctatgggctaccgctaagatcagcccccatgacattttccatccaaatcagccgctgaagcaatatattgggtaatcataattgcctcgcctcatgtttgtttatggtcatcacaaattttaggtacaagcagcgactttccatatattttattatatgcccatcctaagatatatacttgctttgcaaaggtcaaacagttccttctataactatactatcagattttagatacatattagaccctaatttttcaactgtccttactaatttttcattgctacatgatgatcgtatttgcattcatgtaactaaattcttcatatttctttctggctggagtataaagaatgttctttgtaata

SEQ ID NO: 44226 - DNA, 1740 bp, Oryza sativa
aattttagagctagagaagatctacaactctgtaattaacaaccttttcatttaagatcgtttagatgtccgaatatttgttacaaaatctaaaacttatttaaaaaatctcaaaccaacatttcaaacaatattggataaagataaactttatataaaagacgtagatctagatgagttctataactttgtagtttattacttttccatttaaaatcatttggagtcaggggcaaatccagcatgggtgtggggggactcgagccccctaccccgctggatcagccttgatagaaggagagataaaaggggaagaagagggaaaaaataaagagtatggggaccgaagaagaaggaaagagataagttcctccttcaatctggtcttggattcgctccggtttagagtgtcaaataagcattattagcttttaagcaattgaaacccgtgaaaagggttcgaatacaaataaaatttttgcatttaggtcccttaacacccttaatttttaaacgtctagatttgtaaattttcaaaacaaaaatacttttctaaaatttgtaataaaaaatttaaaaaatcttaacctattataaaaattgaatatgattccttaatcacacaccttttcttccgccgtaacatcagctgcccgatgtatactttctatatagttgatacccactaacaattattagaagctaaagcttaacatgcaagcatatcacatcatcacccattagcaattattattcaaacccatttaaaatcccatgtaagcatgccacattctcactcactagcacttactattctaacttattttaaatcccatgcaaatatgacacatattcactaactagcaattactatcccatgcaagcatgatacatcatctacaaatcatcttccttattattttattaacatttcaactttcatcgtttcaacaatatttaagatatactcatccatgaaccccagcgaagcgcggggtatcactttaccgaagagttagcacgttatctgcgtgcatctggttgctgcgtcggctcgattctgatttcgtccgtagtcctgcttgcgcgcccgcccgtccgtagtccgcccaattcagggtgcttcgagcggatgacctcgagtagtagacatggttggagaaatgggggggaataattaattatttgccactcttacggatggtgataaatgatttgccgatccacatgtcatagacacataagagctcacatgttattttgagggttttcattgaagtttatttttcaacatttacttttagatagctaaaaacacgtatataaaagttttattcacaaattatttttcggttgtaaatataccatttggcttattccccaaataagagaaacaatggggtcaaatgtttcttggcttatcatctaatgtttattgtaattttattttttttttccgttgcaacacacgggtcgactggtcggcttgtgaggctttttttttctaaagaaaaatagaaaagatcgactggtcggcttgtgaggccgtgacgttacaagggttagtggcaatgccgcagtggggctctgttgatgttcgtccgtcttggttcgttcatcgtcgcgaatcccaatacccacaagccgcttatcgaaccgatactgtttctgccacaaccagtccgcaaaaagccaaaaactacgatctgcccgttttgttactgcctgtctccctccgta

SEQ ID NO: 44227 - DNA, 1468 bp, Oryza sativa
  unsure (1)..(1468): unsure at all n locations
tttttttttataatatatataaaaaataaatgcatgtntacttttattatagttctttaaaanacatatatatatatatatatatatatatatatatatatatatatatatatatatatatatatatatatatatatatatatatatatatatataatgttctatttcttttaaactaaatatttttaaagttattgatggtcaaagttataaaagtttgaccttaatcttgtctaaaacgtcaattaatatagaatcggagggagtacatctttgaagtttggagtattcagattaggtagccagttcttttttttgacgcaaaggtagccaattctggatttctggtctgtgccgtgttggaagagattagcaacggtatgcgtgtcataacatgatttcttgtccttttaatttggatggtttttacggatcagtagcagtaattactggcctggaaaaatcgtatacttttctgcctgaaaccacaaggtcaaagtttggaattactgtttcttctagacgcacttccgtgaagaaacaagagcaagtgatttgaatattattaatatacaggatttttcaggcattcaggaaaactgaaacccttcattaatttccttttctaaaaagaaacaacagctagcatacaaaataaagctcccaaatttgctagtagtacttttagttagggaggctggtcgtaaagcagacaataatttttacacaaactagaagccaatcatctttacagaaagcaggcttatcaacttatggctagtgtaatttgtcttggtttagtcataaagcaccggccattctggaagttgcacacaaaaacatatgaaatgtgcaaagtcactatataattcattcttttgttgcagtggcatcacatctcccatgttttcagttggtcggataaatcattcatgtgtgttcccttttttcttcttcttcttcatgatactacatccataagcagtagcagtagttgcaacgtggtttgcttttagagcagtagcattctcatattcttgttctttctgtaatttgttcataaggttaccattcacaacggacgcatcggatgatctctgataattcttggtgtgaaataggagtatgaaccatgttgacatcatctttttttctgtacataaaaatgcagtttatatttattagaaaatgttcaggtttctactgggtattcattcttctgcgtgtaaatttcagggtagcagatgagccgtgtgcagtcactccagtggattgttcttgctatgctgaaaagcagcatgggaatctcactgttcttttgctgttatgtttgttgcaaccactaatttgactcgaccggatggatgttgggggttgtttgtttggttccaaatctaatcttacaactcaaagctttaggcagcatcccattttcttaagcaagtactcactccgtattttaatatat

SEQ ID NO: 44228 - DNA, 733 bp, Oryza sativa
gatcgagcagcaggtcgcttcgacaactcctcgatgcggcggcggcggcggttcctcggcgcggcgaccactccggcggcggcggaagcctctcgacgcgagcagcaggcggggcggggtggctcctcgatagggcacaacagaaggtttgccaaggtggattcctccttcgcttgccctgttgactagtgcggaccagcacggcgtgagaggaagattagtgttgattgtctcttcattgctgtcatgtaatttgcattcataactgctgatcgaggcgattagagaaaaagattaatctttgactaaccaccaagtgagtgctagtgctagttgtgtcaaattctgccaaaactatattcaaattataccaaaactatcatatttgtcaaagtttgtcaaaaatatgataagatttaaattatttcaaaaaatttaagctcaaaacagtttgcagctttatgtgcaaaatatgggtgaaaacaccagtgatatctacaggtaggggtaaatatgcaataagtaaaggcatatatgtattttcgtgctcgacttaacaccatcatccatccaaaacaaagggcaaatctctgctccgtttcagaaaagcagaggccaaaatgcaaatcgaaatgctaacccctaaaagataagagcaaaattataattgaactttaaaataggagtaaaagtataatagccccgaaggagaaaggtttttttttctttccag

SEQ ID NO: 44229 - DNA, 1160 bp, Oryza sativa
gcataggatatattcccttatcccccttataatagttccaaatccccagtttaactgtatgattgttgctgggaactggcgatcctgctgtcactgggaaatgcttttttcttagagacctcccattttagatgttttcaattttttactctatttgctttgtatgtcgaaatctgttgaaattgtaactaaaaacgagaaaataaaatgaaatgtgacaaggactgagcttggtaactgcctcctaccaggccctgtcccaagaaacttgtcctgaaggggccttgctgtcttgaaaacttgttctaggtgaacatcattatatttgttgtaactgttatgtacgtgcaaaactatatatgtattctcttatgtcttttaaggtaaatgaggtgttgtagaaaggtatgaagtattacttcagttttagctgatgatgataaagtgatacttcgcacttagttgttcgctttcacttgaagctttagcttcatgtttgagttgtacaaactagattttgatattgttgagcaatatttttccttgtttgttttgatgtaccagtgttttctttgtttcattttcggacgagtttctaatattttcatgggtaatttattgttttgtaggccctttcctccctgaatgttcgaagactagaatacctgccatacctgaattgcaaaatacctggactactgtttttggttttaaacctgttgaaccttccaagagacaaaaaatcaagtctctgaatatcttgattatccatggcactggtcttctagagaagcggttgcttgcaacaggcactattaaccaagagaacactactggtacaggctaccataccaaattatcatgagaatattccttgaattctcttgttaagattattgtaacaattcaattttatatctcaaacactctttgtgtttatgcagttaatgatatgatggatgctcaaacacatgttgaagcaaccggatcccggacacctgttcatttttcctgtgaattaccagtgggtggtgatcctgatattaagcatcatgatgactctcatcctttagttgggaactccaaaggcttgacacttaatctgccttgtgttcctgaagaaaaaactgcagaattgacatctccagtattagatgttg

SEQ ID NO: 44230 - DNA, 694 bp, Oryza sativa
gaaaaacaacaacaacaaaagttttttttccttactggcgaaaaaaactgtagatccgacggaaaaaagatttgattcatataaaaggcaaaaaaaaaaagtggtgacaaaaaaaacgctagatccgaatcctttaaaaacagaaaaaaagtttgattcctataaaggcaaaaaaatctaaaaaattcgttcgattccctaagaaaatggtgaaaaaatggttcgcaaaaaataaaaagctggttcatataaaataaaaaatgcaagagagaaaaaaatagaaacggcgaaacaaaatctgatttctaaccagtatatatctcttctctatctctaatttaactatttaaaaagagaaaatgcatgagaaaataaaaacggttaaaataacgtgtgaggcaaaagtcaaaaaaaagcgcaaaagcacgctaaaaatgttctctatcatcaataaaaaaataaaaagaagcgcgagaaaaattatttccattgtcgataaaaataaaaagacgcgcgaggaaaaaactatcgaaaaaacacgccatttctaaaaaaatggtttttaaaaaccgtgcaagaaaaaaacaccgtctattaaaaaaatcgccctgaaaaaactgtcagaaaaaagctaaagtgatggacgcttcagtcggataggatccatcgattttctgccatctactacatggct

SEQ ID NO: 44231 - DNA, 660 bp, Oryza sativa
tttttttttgttcgtttcttctattttcgcaggcgggccgttgccccgactgcaaagatggatgattttcgcagtcattgtggtgcaggcggacctctctcccgcctgcgaaaattagttttgccgcctgcaaaaatgctttttctagtagtgttgtatagctcattcaaacacgcatgtcgcaatgaagggggtaaaactagcttagcttagctatgcttgtcttctccaacattcccaaggcttctagttttcaaaaccctagcttagcttggcttagctcctggatcctactagctagctagcccctttcatggccaatcatcatcaacttctcagtcaattcatcaacttcatccatcccagagacctctgcaagattattgtcatcccaatcctagttgtaaaaacactttcccaatttcccaattactacttagttacttctccgccccaaaataagctaacttctcagcacacgaacgaccaaaagttaatttattttgggatgtagagaaaattttatatacttttttttcctttttgctcttcattcttactaaggtttgcctaaattcattttttctcatggagtatatgactccacacaatgaagaacacaatacgcatacgatcaacaaatcatgattcaatctttcg

SEQ ID NO: 44232 - DNA, 707 bp, Oryza sativa
atatatatattatatatatatgtctagattcattaacatatatatgaatgtgagatatgtctagattcattaacatatatatgaatgtaggtaatcttagaaagtcttataatataaaacgaatagagtaataatttgataagttatctattatcagaattttaagagtttgatcaaatatgtatatgatgttatgatagacaaatttacgtatacattttttctaaactaaaagttatttgagattgttcattaaaatttttaaagtttaaccaaatcttatcctaaattttaagaccatatcatagtcctgatggagatacttagttacacgtacacgtatgtacaccaacaacctagctagatgttcatgtttctaatcgatctccaccacatttgttttcagactaaacacatccaacatcttgcctatcattctctcgaaaatattaatttactgtaaatatatggggaggtgtactatctattttagcgtgtgcatcctgtataaaaaaaactaacttttgaccagagttcacaaaatcgacaggtttttatgaaactgctaagtcttggtttttgtgataaccgatcgacattaatcagctgtttccccatcgatagacacggtttttatcgatttttaagtcggttttcgataaaccggtgagaataggcttttttactttgaaagggctgcaggaatt

SEQ ID NO: 44233 - DNA, 1592 bp, Oryza sativa
cacattatctacgaaaaagaagtctagaacaacaagaaagttgcgactagtttaggacttcgttagacaaattgtgatagttgacatattggtggtaaagctaggagagttctatagacgcatgtataggtaatgaaccatgtcgaatccatattgtatatctgatcgaacctatatcatttttttaataatagaaaataacttttgacctccgcaatggttatatttcaagtaaatcatattattctcaatgaaccataattaccacatatatgtagtacgagaaaacaagtttcatgagaaagtgttgttctgctcttggttataatcagcacacctaagggctaaggcctttggagatggatgtgtaaaccaatataaatttgttaaagtgaacccactagaatatggcataaatactcccacaaaaatatagtactcctacatagtattagagatgattgacatgagtgaacattttcatttgcaaaatgagtcttttcagattgtggtttgttcccttgaagagcaagttctgtggcagagagaaatgtagcccccaaatcaacaaccaatcaggagtgagcatcaaggccgacatatcacagcagaggcaaggccatggagcatcaatccatgcatgctacaccaactaattataaactcccaagatcccagacaaaatgaggattgatccactaaaccctcatgacaaagataatgattaatcccctctttccttctctctctccctcttttgagtggacattagcacctgaacctgcaactaaacaccatttgtcgtgtgctgatgtgtcaatgtggcactggcttgttgcacttcatgtccgacgtgtcatgccacgtttgcagagggtggcacacggtccagtaggctacgcctagagaatgataggatcaaactctattatcagaaaaaaggtgtacagtaagaaaaaggatcgaactccattattgaaaaaaaaaaggcatagagccgtagaaaaccaaaaggcagttggaaaatttttaaggtaggaatgagctgcagctaactgcttatctgtggggtgactatttttttttgaaagagcacttagggcatagagtcccccctattccgctggattactattgatagaaggggagatgaaaggggaagaatagagagaaaacgaagagtaggggggactgaagaaggaagaaggaaatgagtccccccttaaatcttattctggatctgcccatgtgtacaaccgtgtgtaatagtggtctctctttgttgccatgtaagtaaatttgatgatgtggaagaaagaggagaggaaagataaagcatggttgctatgtatgacaacagctcagagtcgactcttaacatttattaaaggaaattttgttgcatgagggtggagaaaaggaaagaacagtagtaaaaaaaatattttggtgcattaataattaagagttcttgttgtctcaactattgtagcagtatagtctctaaataatatgtactaactaagagaccatatcggaccctacctttgtacatgcccttatacacgtactaaaattttcttacaaaactc

SEQ ID NO: 44234 - DNA, 599 bp, Oryza sativa
ctaatatttctctgtctgaaataatattgagaaacttttgtctaatcgagcacagtttggaacacatattgttcaattcctgttgggatatcagaaaattcagatgtttgtgatgctgtaacactaaccgatacgggacagatttgaacaaaattcttgcagaaatcctacaatgcaaacacggttttacctaaattgggctagtctttctccaagaataaaatagccccaaatgcctttcgtttaataaaaagcagagaacaattttaacaaacaacatgatgcacatataataaagtgcatacagttaatagttttaaatcagccacctgacaataacatgaatgatagaatctacgtatacccttacaagaaaataaaagatgattagataaggtcaagcaaaagaaaggaagccatggtaccagttgtcattatgtcttataatatgatggctacaagctatatagttctaatatgcatgctatttttaagggaaatatgagtgctgattggtgcagatgatatgcggcaatttttttttggatcaaatatgactacagagagcatgtgaatgtgatgtagatcaccaatcaatt

SEQ ID NO: 44235 - DNA, 1292 bp, Oryza sativa
gaattcctgcagccccaacaaatcaggattcaatctttcgttttcggtgtttgtattgggatttggtcaaatttgaacaaaatattgccaaataaaaaaaatcgaaaaactttaaaaaattcagcccaaataatatcgagtccaatacaacaaaaaaaattccaaaatttcggtccggaattttgaaccatggcacaaattaaacagatagagggagagagattgtttacggcaactcttgcaaaatatttcatgaagaacgtacgaaagaacaaagagaaatctaactagaaagaaagaaaaaacagattaggacataatgctagctaattaactgagacaaagatcgaataatatatactttacgacatgcattattgctgcttgcatgggggaacttatcgtcgtcatgcatcgatcttcgaattcgtcgtatgaagagacgatcgactagatttcagttgtgagacggaggatgcgtcttgggcggcgcgtagtcgacgccggcgtcgtccgctgcgccatcgctgccgccgccgtcgccggaatcaccatcatctttcccgccgacgtccgcggccgccgggaacggcgccatcgcggctccggctccggcggcctcttcctccgtcgtcctcgccgccgccgccgcaccctcgacgccgccgggctgcagccccagggcgccgtccggcagcggcgccggcgccggcgatccccgctgctcctccgccgccgcccgcatgtacctccggggagacctccacacgtgctgcatgcacacgcacacgaagataatcaaaatcaagaatccaactaattaatttattaaccaagaacacttctccactcatgcttaccatggcggcggtaatgtcgtcgtcgccgtacagcgccgccgtcgacggcgaagcggccggagcggcggcgaagaggcggcggtggttgcggctggtggcgtggcagacggagaggtggaggaggaagaagaggaggagacagaccatgcaagagcagcgcatgatctctcggcttcttcttctctactctctttttgagtcatcgactcttttttctacagggatttttgagggtttttttttttctggtcttattttgatccgaggcgtggttggggttggaatgtgacgcggtttggagatttcgcataggtatttgtagtcgttcagggactcgtattgtcatacataaccaatcaatttatgccacgtgtctaattaactaggctttgtgtattcaaagacaaccaagattatatattcatatatact

SEQ ID NO: 44236 - DNA, 700 bp, Oryza sativa
attcctgcagccccttcctagttctgaacttcttattgatgcagctttcatggttaatgttatataccatgtactattgactagcatgtgtttttccctgttcccatagttctgaatgatacacctacatgcttaatggtatatatagcatgtacagttatctggcatgtgtgtttcatagtttagaatgatgccaagtaaatctgtcatggcatcacgccaatttcctccttgtgggttcttgagcatatcatggtatatcctgtgatgtgttcactagtttgattgctataataaccgtaccaaatgctttcaggtttgttcagtggatcagctgggttttcagttctgaatgcttcccaattaggttccccttgtatcacaagttgaatatttcagtcatgaagtaccgcgtgaccaaaggagctttgctacagaattgtgctacatgagagcttaagaagctccaagttcacaagaaaagaatggcgctctgcaaatatacaaaggatggaaccagagagacatgagactggaaagctaccggcagcataattatgcagcttcttatggctaaacaccaccactcacattgaacagcattcatgacgcaacacaagtaaaagcgaaagggaacacattgagacaggaaagaagattgacagcaagaatttcggaactatgaaattggaattataac

SEQ ID NO: 44237 - DNA, 1211 bp, Oryza sativa
cagttctgacacatgctctagataaacataatataagttaaattacaactaaagtacataataataatattattggatcttagttatactatagttacgtttgaaagtttttcattaagctactcctatttcctgatcacattctaccgattacttttttttaaaaaaagaagaagtttataagaaatattatgtgcataatttcctaaaggtatattttgaaaagaaattcgtgaggcgattgggtccttatcttccatttctcttccccagattagaattatacaaatgcagcggcgccggcgtcagcattcagcagaaggcaggcatatatggtgtctgctgatgcatgtgggtcccacccgcccaaactgaccaagtgggccctccctatctacttggtactccttctctggatcttctgcgcgtaaaggtatattctcaggatcattctctccgattccggccggtcagcggctgtgtttgcatcctgttcccaacacatctctctcgttttccgcgtggactcttttcaaattaataaacgatgcgtttttttaaaaaagtttctatacgaaagttactttaaaaaatcaaattaatctatttttaaaaaaaatagctaatacttaattaatcacgtgctaatggaccgctccgttttccatgcgggagggattagttcccattactggaatccgaacacagcctcaagattttttttgcaacttgacaataagcacttcaacttgacaataagcccttaattaactagtaccccactaatcttgtgcttatttcagtgtaatgtttacagctgtaatgtatttgtcggtttggtttttttaaaaaaatgtactaattgttctacgtactggaaaaatacttcacaggtggagtatctcttttggacgacccgtcctcctttttcctcagcggttacttcctcaagctataataaatatttaagttttagaacgagatttatacagatttttagaattcaaaccaccttttttttagttttagaacaagcttgtaaaacataactagtttatgatggtacgatgataatttctttttggaaaatttaactataattttttttattttaaactaatactttctctgtttcatattataagactttctagcattactcatattcatatagatgttaagagatctagacatatctcacattcttattt

SEQ ID NO: 44238 - DNA, 921 bp, Oryza sativa
atgaagtgccctttcctcgtaggttttgccacacatgccacgaagctggtcataattcgcggacttgcggccggacatctacgtacaagagaaaactttagaatatggttccctgtagtttagttgggactcctctgattgttagaagttgttttgttttaagtacgtgaacaaatttttgagaggcgtgtgttttttcatcctatgagcaatttattaagattatgtaacctgtggattggtcagtatatacgaccttaagtaaagtatgcttctagtagtaaattgtgtcttttttgggtagtgtatttgcaccggttaaaaatggatgtctgctgtaattagtttcatttggatgatggtgctttctctataaagagagaaagagatatagtatactggtatttatgatgatcattgtttgcaaaaggagtgtgatttggtgtggatatgagttgtttttttaggtatggagatagaaattagctgtgcaatgtattgaatcctcccgttcactgaaatggacataatgatcgatagcaattgactcgttatcacgcagagtcaatgacataatttacgcagagtcaccgcatatattgaatcctcccgttgaaaatgataaatggaagtaaatgacatactgttattgtttggcatagtgaataatttccatagcacagttcgtgcaactgtcattgcaacccagacgatactttgtccatgcatagcaatgttttcatgattctgtcaagataggacataagtgtatttcgaagattacatgaaaatgttctggtaaagctagaagtagaaaattgctaaactaattgtctttaatttgtcgaagacggtccaccacatattctggtagtattgcctcgttatcacgcagagtcaaaaggtggatcaaaaattgcc

SEQ ID NO: 44239 - DNA, 3261 bp, Oryza sativa
aaacaattaatactcaattaatcatgagctaatggctcacctcgttttgcgtatcttcccaatctcctcgatcaacttctcctcaaactcaccttaagccgagcggagcgagctgagcttccaagtgttgagatcgcacatgccatgagccgcgtggagcacgccgttggatcggggctgcgcgcgcacacacacaggtttgcacccgggatccatatccaccaaaatttttccccgggtttgcagcgtaaaagcataatatcttccttttgcaggacttgccggtccgcgcgccgcggcgaggcaaagggcgaatcctctttttgtggtttcttgcagggcttgcagcgccagatcaatggtctctctcactctctacttcatcgatgatctctcgctctctctactttatcgatattggtcttcaccaatcagcggggtgaccgggcttcagctttgtcatgcgcgcatagacccacggttgatgcactgtcatgtaccgtgtgatgcatggtctctatagccatgcacgaagaagttacacatgttggctctccggccaagtgcgtccaactgtccaagatgtagatcgcactagctaacgtttttttcttttttgggttaagtacttcagtttaatccttgctcgggttaactacgtcagcctaatcatttgttatggacaattaagtacttcaattagtttaatcacatatactttacttataccgcggtgcaagtttcttgcttaattggttgctttcgtcctactcgttcacattcttaaatgaactcaatattatttctcttgaaggagataaattacaaataagcgtgggatcgaccgaacggtaagagtgacaggaataggttttagagtacatgatgcttttacgtctgttcacgccacaaatttccttcaaaaaaactagtgatttgatgtgagcgagtgacttatttacaactttagttactttccgtaggtgttatcttccactttagtttgacatcaatcgtttgctattatgtgtgcaaaattcgatcaacataatgattcagtttgagaaagataaggactacacacaacttataagtcattaggaaaaaaggttatgcatattctcaaccattgatgaaaatagtgtatataggatgatattgtaagtagtttttgtgttttttttatcagacagtgattttgtaattcacaatcgttcatcttacaacttctataatatttggatgtagattctttaaagaaatgacctatatgtattttattatatctgtaaaacatcacaaatgtaaaattcctataggaaggacgtatccaaatttaatttttacagggctatatatttcctctgtttcatattctaacacattataacattttttcttgttccaaccttttaagttggaataagtttataggaaaacataataatattttcaatacaaaacaaatagctattacaatatattcaatgttagatgtaataaaatcaatttggtgctgtgtatgtgtgtgtgtctatatatatatatatatatatatatatatatatatatatgtgtgtgtgtgtgtgtatgtatgtacatgtatgtatctgtgtgtgtgtgtggccgaaactacggtccggttcgatcctggtgcttccggattccggtgtgttcgttagtctttgttggagtatatgcatgtggggttttctcacagtttttaaagaagtcgtgcatatgcatgcatgcatggcgagtcgatcgtcagtacgtcaaccatggccgacgtcgtcactttatacgtttgttgagatcgatcgttcctggatcaaccatggtgcaaactagaacaaaaacatacagcagcagtagtacaccgatcgaccacgcgtggatgacgtacacatagtgccaaatttatatatacttttccgaatcagtatatagatgtgtgactgtgcgcgcgcgcgtttccatgcatttcagttaagtttggtggcacgtcaactgagcatgacggggtccatcggcgcccggccggacggacgcaactaccgctaacagctgaacggattcggtcatcgttggttgatacaaagatcacgagactctcctccgttacatgcatatgcatgcatctacagtttagtaatgctgtagtgcatacgcaccagatgcatgatttgcaccgacgacggacgatcgtacgttcacctgcactgcactgcgcacacacgttccaaaaaaaagcgagcaccacctgccgatcgaccttgcattgcccagtttggcttcagacgcacgtacgcgcgcgcaaacacgtacgacgctgggacgaacgatggcgcgcgcgcccgccgctcccgcgggcgctcgcgcgcgcagggtggtggtgtagtggtgtggactgtggagtagtactacggtacttcccccactactacgggccacgttgcgacacgtacacagtctcgtcgatttgggcgggctcgcgcgcgtacacggcgcacaccgttttgctgcatagacatggacaacacgaccgaaaacgacgccttctttttcacgacgtcgatcggcgcgtaattcgcgccgtcgaaaacgtgcattggctttgggggttaactgggcccttaactccccacacatgcatggtacgtgcgcggttggggaaaactagtacactagtacactacgtcgacgtttcttgccgtctgcgtgttatgctacgtgttagcggcgccgatcgagtgtaatctatactctctataaagttttaactcattaattaactctcaaacttaacatacaaacaaacgtgtcatctcatcacccactagcaataattacatatttaacatcatacaagcatgtaacatcatgtacaatctatttaattctacaaattaacatgtaagcatatccaatcatcacctcatgttatttccacagtagttttacaaatctctctatcatgtttatatatttaatatatacttatcaatatattaaagtgcaaatttcgtttgtatgtttcatgataaattctaataagccctatgatttgattgtttttattcatttaatttttctagctcaattgtaacggaaaataatgttgaaaattacttattaattttcataacaaagcgcgagaaatcacttataattagtttaggcgccggatacatgcatacggcgtgtactatgtgattagttcgttgttgcgagtactctagtttgctagcagctgtgtgt

SEQ ID NO: 44240 - DNA, 1920 bp, Oryza sativa
tacatggcaacagttcgcattatagaaatctaccaactaccatcattggatccgtcctacggctcatgatatgtccaattatacaggtttgaccggctctttactagagtatacgtatgcatgtacatgcagagaatccattatggagtatatgacattgtgtttatatacgtacagaagaacttttgtcttatatactgcctccagtcatgaaaatatatatgcatgccaaccgttttgtgcacatgtttcagataatcttttaaaaaaatagtatagtgaatttttaaatatttagtttaaaaattagtactgtatgtatagtgtttccttaaaactattttcgtaaccctgtaattttatcaaaattttcaaatatctgtcaataaaaatcagcaaccaaatttgtatttagaacaatgtgtcgatatttaatataacatatttttcaagtcaaaatttactccatcatactcaaaaattgtagcattacttcaggactctttcattttatgtttttgtcatagggcactctagtttcgtgattatttaccaaagataattcggttattattttaatatatcctctatcaatggaaatataaaactctgcaaatgaccatttacctttgggccaccttgtaagatttaaatttgaaaatatttgcaaaatttaaacattccaaaattcaaaacttgtctaaatttagtctgcatttgtttattttttttaatatatatatatatatatatatatatatatatatataattataagtttgatatcagcaattttggaaacgatttgaatcttacaaaattcagctaaatttgttcaaattcaaaacttgcaaggcggcaaagggtataattataattatctttcgcaaagttatatctgtgctctatcatggaagaaattgtattgaaataattgttaaagtgtctaaattatcgcaaaaccacaaaaccaaagtgtctcaaaacaaatgccacagtttcaaaattattggggctaataatgtagtatgtatcttcgtgatctcaaagtacggccgaagggtctaacacattgtgttcagtgcacccaacagcaccttatgggtggtgtcgaacttttcatggatttatggtgaatcaaaatcatactacaacacaatagtgacaaaaggcacatgaatcttggtcaaggcgaagctggctgctaggtgatgtgtggctatcgatcagtgtagcgaagttgtcttgctagtagttaataactagaagcaactgctgtgtttccttttctcccttcagctatctatcttggctgcacctgtctgaaggagtggaggtgtgaactgtacccagcatgacatttttcacgtcagtcaggggggagaggagacgctgcaaggtgatcagtgatcactgtcccactccacattggcacttagcccatgctgccagcaggtacggcagagcccaccccctgacgaccgatgctaactgtttgttcagagaggaaatttcgttgtgcagatcatgattaacgagatacgcttggggcttgacccggccaatcatgttggttaagacgatcaggttttggaactatacacattagaacgacacaacgaatacgtacatgatcatcaccaatcatgccgcttgtccgtgcctgcatttgcatgcatatgcatgcgagagttcggttcacacgtcctggaacgaacatgccgcaaaagacattttgtccccagctttgtgctctgttgatcgaccgattggtcaagacgaacggatgccgagacagacaaggcgggatacatcactctctctccaaaaggtgggagaagaacggggaggagaggacgccggccctggaccacgctcaagctctctctgcaaatccatctcctcgatccggtaggacac

SEQ ID NO: 44241 - DNA, 1147 bp, Oryza sativa
attcctgcagcccatttgatacacgaggcttctttggattgaattattttcggaggaaaattggatgatttcaatgcgtataggatttttattcattgggaattaaggaacgggtaacggaaaaatatggtaaatctttcacttgtaattgattatccataggaaatccatagaaattaatatccattagaacctcgcttgtttctttggaaaattcagtaaagaatcagtgtatatacatgatacaacttcaaatgaacattgttctgacacaacttaagattaaaaaaaatatttatattatacgtagtttttttttctatggatagaacacacaaccaaaggttacacgagtaacattaggtcttataactaatatacaaatgaaaaaaaaaacctagactactaatttccaatcttctcctaccttgcttcaccattccccttttgttacgcagcagcaaccagaacatcattgatgttaagattttcctaacagatagcgatctttgctgcttgatgaaacctggcacgaaaatcgctctgaggcaatctatagaagcctggatttctataaaccctcgtcgctatcccatccacttgaacacccccatcaacaggcacttgccggtcctcacagagctccctgtgtttgagatgcatagttaaaaaaaaaaagggggagaacattcgatccatagtacagaaaaaaaggcggtaccaaaaatagcacaaaatctctcctctttcaattagaagcaaatggcactaatttttgttcgatttgtagcacttctatcacatatgtcattcattaggctattccatattttccatgcttcttttcctcttgtcgatctcgccaatgcgtcggtggacggccacagtgcggcacggctgtcggagctacggctgatgcggcggcgtggggaggttgcgcgcggcgcagctaccatgactaaggccggcactacaaccagcatgtgtagcgcaacaacggcgagacgcacaacacaacaatggtgaggcgtgcggcagccaacatggcttctgggcgcaacattcgatatggctgctcgtcgagataggtgcgttatttcctggcagtttgtggcgtgtagcctcattgactacgggctgcaggaat

SEQ ID NO: 44242 - DNA, 1809 bp, Oryza sativa
ccatgcgtgacaatcatcatgaagcacattaacctaaatcgacaacatatgttgtatcatattgtcggattcggcttcatcggctaaccttgtccgactcgaactctgccgatcttagtcgtagccgattcggacttcagccgatctttactctgtttccgggataatctctatctcgattcctcctttacatctgattcttggattaccaaatttggtcgttaacaataatataagggattttaattttttgcttgtattgtttgaccactcgtcttattaaaaaaaattgtgcaaatataaaaaatgaaaagttatgcttaaagtactttggataataaagtaagtcgcaaataaaataaataataattctaaattatttttagtaagacgaatggtcaaacagtgcaagcaaaaagtcgaaattccttatacttactcgtaaagtaagtcgttttggacagcgacacggtctccaaatacaactttgacttcttgtttctataaaaatatttattgaaaagtgatatatgtatacttttatgaaagtatttttttcaagacaaatctattcatataatttttatatttttaaactcaatgacttgagagttattcatgatttatattacgagtacgaagggagtattatgggacggagggagtaagtcatatttgtaatcactatgtgctatattaaatttttaatcggaactcaaaaagtcattttagtacttattgtttacatgttcattagttttgtcacatgataaataaattaactgcatattggttttggtgtaaaaagaaataggaatttgacttttgcaaggagggagtatattgtaacagtgtcggtctctcctgcgccgttagatttgcatagtgcggtagagacgaaggaaggtaaagtgctaaactggaaaaaatagagtgtcggcccgcccaagtttagcccaagagtaattggttttgtcgacagatcgcttgacccatgatggatttggatacaaattttgctgcaagaccaagacacataaaaatatttcccagttggtcagtgttttaccatggactagtctatcttaaagcgtgcatcgcatctgcgacctagcaagctaattagatagataagttttgcccacatggacaatttccaaatctgaagtttgttttagtcacctccaactagcttaactccattgtgtgactagccgtgttcgatgatcaatgctcaaaactaacgctgtttagttttgcataattggagcagcaatacaaattaatcttcacacttgagcaattaagattgtggcctctctcttggttcttcgcccgcatcatccttagatccatgactgatttgatgacattttcctgcattgaaaaagaaagtttttgaatatacaagtagacagtgatatgagcagatcgataaacacagatcaatagttcccatgggagagcactagttttgtatgatagtgcaatggtatcatggatattgattaattcctatcattctatggttaaacctacataactttgcttctgctactgaatttttaaactgccatgctacaactatgggtggagattaagattcagacagatataacccggggccaaaacaaccacttgtgcttaaaatagacagtgcatgaccatgatatccagaaatagcatccgttttagtgttacggtggtgatccagtgcaaataaattgggtagtaattgttgcaaaaacagacagttttgcacctgtttgatatattactataagatgtatttaagggtaatagtttctg

SEQ ID NO: 44243 - DNA, 1176 bp, Oryza sativa
gtggcgccggcacaccgaggccgtcgccgccgtccgcgacatggtgatgtacatggagcggacgttcattgtgacgtaccggaaggtgtcggtccaggagctcggcgtgaagctctggcgcgacggcgtggtctgctccggcgacgtcatgccgaggctggtcgaggcggtgcggcgcgagcgggcggccgccgccgagcctggcgagctgatggccggtgtggccgagatgctgacgaagcttcgcgacaaagtgttaagccaggtcatggacgcgtcgtctgtcgacgactatagtagcgccagtttggagaagtctgtatcagagtatcagtagaggacactttaacctttagtttcatcacgtcagattaatttctttttttgttaggtacgatatattctgtgttggttaagtacttcagttgaatctctttttggttataggaacatcggtttaatctttttggttaagtatatacacttcagtttaagctctactttcaactactaccaccatagaagagtttcggtagttgtaaacatatatgctctgtttgttgattcagagttgtttgttgtggttctgaaagtccgaacgcaccacaaaattggcattattgtgatgcataattctcgttcgatcactccaaatttttttcccattccattgcatagcacaaagtggcgctaagattgaactataatacagtactatacacaacttctcgcaccccgctatatttaatgaaatagcacagtcttgtgctgattccattaaaaaaaaattctcccacactctcatctagtaaaaagttattatatcggctgggcaagcataatcaacaagttaaaaaagtggacgcttcaggactgaaaaaaaaagcatccatgattccaccatgtgggatgtttttttttttggttgtctatatatcttgtgacagaaaatcccacctcctatcattcgaattttggaccactggatacgctttaagattcgtgcagaccccctaaccctaactcctctcatcccccgtttagaacgccgccaccactcctatcctcgcgccgtcgcgcgattccaccgccaccaccactgccccaccgcgccgccgcctgcctcgccgactggccggaaagagtcaacggcgccggcaagccccctccccctct

SEQ ID NO: 44244 - DNA, 655 bp, Oryza sativa
tttcgctagtgtcaccctaccgtcaacctttgtctcatcgtcgacctcccaccccgtgattccggcgcctcctcattgcccacagttcattcgattgctatccatggttgtccacttgtcctgaataatagttcgctcaataacctgtttcaaattgagcggttggcaccgctccactcaagaaggactgggccaatgtccctccctcaagggagctatggccaatcgttatcttgccggcaaggaacatcaaggcatccgctagctaggttttggcgttgatggacatgggattgacagagtattcgttcccgcttggagtaagggtggaggagtagtagacgagttcttagataggaggcgatcaactgtcacgccccgaactagtaccgaccggaactagcctgtgacgctccaaattaacctgttaatcgataccagtcccaggaaacaatgctggtatcacaggaagacggattatcacagcaacagaagtctctttattatagagtagaggtagagtcatgttgggctgcggacagatcccgagctcacaactgcattacaaaagggaaacggaagccaggacttggaccaaacaacacaggcgcgacttgtgaactaggccgaaaccttaaaactcatcgtaaccggc

SEQ ID NO: 44245 - DNA, 683 bp, Oryza sativa
cataccaccaagccacaacaaataataatcgactacaagtatagtgtcagtataagcaatagaatttctacacttctaaaagaactcttaatatatcacgtaatagatctcataaattagaaaaaaaaaatctaagaaaaaatataaaaaagaaaatatctggtcattaatttacgcttcaactggtagatccattattttcaaccattagattggatatattccagctaaaaaccaactaatctctccctacgtacgtacgtacgcacacacacaagagatgtcaaaaaggacaaaaaaagaagaatgtatatatgatctactccgtctgtttttttttctttctttgcagcactaaagttttcctcaaattatgcatatatatagggaaactctttacgatgttatcgaaaaagtcatgccaccgtggcatcacttcatgccatcccaccaaacttttttaaagtattttttaactaatgatctaaaacgaaatcgtagacactcatataaatatgtgcacaaccatcctacgaatatacgcagtactattcacaaaaaaaatacatacgtacaataaaaaatgttgcatggaaacctattatatccttatataattatgtcattctcatccaaatagtgttcacaaaattagcacaaataattttgacaatatgaattat

SEQ ID NO: 44246 - DNA, 540 bp, Oryza sativa
atcggggatcctgctaggcgtacgcgcatgacgcagatgcagtaacgcgagagtgctggtaggctcgtgggctcttggcgtacctcttggcgtgccatggcctgatggccgtgctatacttttgcaccatgcagagctgtgctatacgtttgcacggagcggaaagattggtccctgggtgggggggctctgcggggtaagtgtttaatttgggtacctgtgtctagcttccgggcaggcagcaatacaaccagctgattaatctcatctctgcttttgagttggtcctgtgtactcccgtgctagttactgttgcgtttatgacactgtgacactgtcgtcgtgcacgtacaggacgggacgaaccgaaactgccgcttgaaacaaaccaaagacggtcacatacagcgctaccgtactagtttccttctatttgtctcctgaattccaaagtttttttttttcatatgacacacacaaaaataaaaacgatcacgagtactcttccactattcctcgcctaaaattaattaggtaact

SEQ ID NO: 44247 - DNA, 2338 bp, Oryza sativa
taatgatcctattccgtgatataagaaaatatgttgtcttctttctttctttgttttggatttttttttcataataattctgggtttactgtatattctagtgtagttttttataataattatgggtttactatataatctagagttatatgagtagcactgagtaggcgtatgatatttagttaaagaaaatgaatgcaaattcgttgttttggattttttttcttaataattttaggtttactatatattttagagttataggagtagtactgagtaggtgtggtatatttatagaaggcaaaggagtagaagttcgtgtggttggaaagggaagatagttttggaagcctctagaatctatatgtgatatttttctctatatttttccttacatatgattgttaggtgtttttttctttatgattttttcttcaaagtaagagacgccaagtgaaccaatcaaaagctagtaaaagagctagctttaccttctgcaatgtgtgagtctgtaagacctatctagtgttactgtattatttttttttcttttcttctttaccatctttacaagagggaggctagaggaggcaactgcaatgtgtgaatgtaagacctatctagtgttactgtgttattttttttcttttcttcttaccatctttacaagagggaggctattctttcttttcttttttttaaggggaggcaagacgccaaacgctatccagtgttactgtgttattttttttcttttcttctttacaagagggaggccaagacgccaaacctaccccaatttctattaatagaaatggtaagttgctataaagtttaactacagccgagtttagttctaaactttttcttcaaactttcaacttttccatcacatcaaaactttcctacacacataaactttcaacttttccgtcacattgttccaatttcaaccaaattttcaattttaacgtgaactaaacacaccctacaataaagaatagaaaacaccagacaggaggtcttttctgtgagagtggcgccacccatctagtgttagtacaaatatgcagtgctttgctgaagaagagcttgtaaagaattctgaaaaatttaaagtcggaatgacacaatgtggaggaatgttgtagcagagggaaaataaaaaaaaagagggaaaaaacatttgcaagttggtaggaattatagcactgtactaaatgaaaacaaacaggaccatgactactccctgttgtcaccgccgcccggccggccctcccccccccccccctctctctctccagggtattttggacacaaaaatctctaaaatggcatttcattcgataagcaatgtattgagtggcattttatccggttcattgtattgagtggcattttatccgaactcaccttagagagtagcgtatcgtcagttttctcgctgatatgttatacttccctcccctttcctttcggcttgtttggtaactcgagggaaagggattgggagtttagatgatgaaaataatggtgagattatgatgagaatttgatttttaattctaatatttttatttatgtcaggttattaatgaaaatagatggttgagatttgtttaagtagagttaatgaggaattctctcccaattaccacccctatccatgtattgaaaaggagaaaactcctttctcaattccccatcccatcctaccaaaattctcatgtctcccaactaaatagttaatatctccatccctctaaacttctaatcccttctaaaaactctccccaaccaaacggatcgtttatatacaccgcttctcccctttcgagcctttgaggtcccgatttctccatttgctgcacaggagaatatgtgcaagaactgaactattgtattctccctgcaatcgtcgatgcagaaattgttaaattcgacttgattggttctgcaatcgtcgatgcggaaattgttaaattcgattcgattggttatgcactcacatccatggataacaacctactatctctctctttttttttttgaagacaaacaacatgctcattgtccacatcccacaatctaatatattgacgtgcaatccttaacctgcttattatccacatcccacattctgatatattgacgtgcaatccttttacgcgttcgaaaaaaaaggggattgccatatatcattcgactgaaatatggggatgaaatcttacagattttggaccattggatccatgccaagattcgtgcaccaccttctcttctccaactccgacgggctccccttcttctccggcgccggcgacaccccaactccagc

SEQ ID NO: 44248 - DNA, 1775 bp, Oryza sativa
caatcaggcacaaaaaaaaaaactatctgaacattaattcggtcttacacctaaaactaaggtttagggtttaagaaggatacaggaattaatcgaaaaaaacctgtagagctgctcgaagttgagcttttccatgtcttgagcgtagatgtcgcggattgcgtccgtcaccgcctgacacgagctggcggcgagggcagcgtccatcctcgtcctgcggaaggggagaggttggatctgcgagcgcgtcgtcatctcgtgccgtggccgcgccgccgctgcagaaaaacgtacgggtttcgatcgggggtcggtgtataaagtgtatttataccgtctcaaactatcctatttaatttgcctctcaattccaataccgagtagaaaacacccctggagaccggggagacctcagcttggttgggctgggccatccgtgagtggagaggccggcttgaccggctgcgtgtggctgcgccgctaaacgagccgaaccgggccgtttttgatgagaacgaggcgagacaagccgggtctgagtattcgcgagagcccaaccaagccgggtctcaggccttgtctggtgagcttgtcccagctgcagcttttcctaaaaactgtttctgttagaagctgtcccaaacagtcaacagcttctgagaatctgcagttatagattctaaaaaatgaagaagccagaagctgggtttcagagcttttccagattctcagaagctggctaccaaacagctgcttctcagaatttaaagctcccccaaacaggcccttagtattcgctcgttgacttgatgagatttgctccggtccacctcgagatacagatatctcacggtaccaaatcattttttattgcttggtataataatgtcaatcctgtctagctagattcaacaatcggaaacgatattgatgtgaggtatcgatacctcgagatactttttgttggaacggagcaaatcttggactttatatgttcttcagccatatgcaacagacaacaacatgttcatgctcccatcacatctcttctttcttaaagctaatgcccactacactcctaaagctcaatatacaaacatagtatttattagcactactaagacctacatgcaagcatgccgcatcacccaattaagctcacaaaactcaacatgcaaacacatagtaattatatctacaatttattttattttaaaactaaacatacatatgctaaattatcattctcaaatcattttcataatatttcaatgcaaatcatttatcatttctccattatctaacatatatcccgcagaaaaacgcggggcatcaactagtatgaggttaggggtggagccagccaaaaataacgctgggttcactgaaaaaaaaaataactctaaaatttgggaatgaaatcttatatattttgtatcacaagtagaagtgaaatagtgttgaatgtagttttcacggacgtgcaacattgacctgttccatcctgctgagttagcatgtgatgcccacgtatcattatctccttctttcccttcttccttcctcccttctctctatctctctctctattcggcccttcctccccggccggcttctcccaagctaggggcacacctactccagcgccaccctgctcactaccacggcctacgtcgacatcattgagccaatgcaagctatctccagtcacggtcgtcgttgagacgttgactcttcgctcgcggcctcctgctctagcaccaccccactcgacg

SEQ ID NO: 44249 - DNA, 1556 bp, Oryza sativa
catcagcagttcagtagtacaatgagtcaatgacaacttttagactaataaaaaacattgcaaaggtaacctgcagctgattagtgcagagaatatcccctgcaaaaaaaaagattagtgcagagaatataccaccagcattagttgacatactgatgtgcagcaaacactgccaatcagcaatgtatagtgtaggctagtattattgaggaatttgcattgcaatccttcgaagttatcagtgttagccataaggtacagccaggttgagatattgagatgtaccaaagatgaacactataactcccagtaatcgaagtaaaactcatctcgaaacaggggaaaccgaaaaacagtagatttgttggttgactgatcaaataaagtaacactcaataaagttagaaccagagaaattgctggtatctaccatgagcaacaatttgtcagttaaatgttcatccagcttccagaataatatcaactaaaactaatccatcctaagtaatacgaggatttaactaccacaatcatttgcctaagtaataagtcaggcaactctgaatcgtcacatggtatatgctaactgaaatgtaatgctactgattctgaacacacaggtaaaacaccccagaccagcgcaataatcataggaaacataataatccgctaatggcaaacgaaaagtaagcaaagcaagaggaaaccttgcggaaaatcaaaacagaacacaaacgatctccccacaagcaaccaaaaattggggcataaatcgaattagaaaacagagagatcgaggaaacatcacccccttccttgaattcttctcggttttcccccgacttccccttcctgctccgctgcaaccacacgggggctaggtttgaaggccacccacccgcaccagcgcacagtgggagcgcgccagtccaagccgtagcggtggaatttagtgcgtagggcaagactccgatctcctacctaacaacaacccgctatactttcccctttatctctttctgagtttcttcccttcccttcacagtggcttggcttggcttctctctccggttgctccaaggtcgtcttcctcctctcgactcaaccaatcagtccttgggagtggtggtgggactggtggttcgttcacatgcgccatggctcggattccagagcttgggccagatgtcggtaagccagtgggtggggtggatacagaagagcacgtgccaaaccttccaaactcctagtgggctctagttaaataggcctttctgttgggccccggtttgtgacggctttgggcctggttcggtgctggtcaaacgggctacttgcgccatatttctgctatttttcgacttgggcgtggccatgaacgatcgacgatcttctctcccatgttcagagctaatcactggcggcggccgacgatacgatgacgtgaggtgtacgcatgtcaggacgtacgtacgttccccgtgattcacgatgagaggattagacgaaggacgaccggataacgccgcccgaattcgatcgagggctgcaggaat

SEQ ID NO: 44250 - DNA, 1108 bp, Oryza sativa
ttatattaaaatccgatagatataataaaaagcaaaaagcaattaagaaacaccataatgaacattaaattaccatatcctcaagaaaaagaccaaatccaatacaaaatttaaaatttacatgtgaagattcaaaaattacagtgtaacttacaaaagttacagtgtaagtttcataaattacactgtaacttacaagaaaatgcactgtaaatttgagtgagaaaatcgagtgagagataagaaaaaatctttcgagtgagatatagcaaaatcggtttggtagagctcatcacccagctcctgaatccttactgaatatggaatttgttggctacaatagtaaaagtagtttaattaatcctatatatatttttatataaatgtgattaagatggctcacccaaacaacattattctacccctagctctatcttaaacaattccggatccctttgacacaggcccatgcatatatagcttcatgcttactaaacgggaaaataaaaaggaaaattggtattaccatgatcccgaaaaagttaagcttgtatccttctggaagggttgggggcggtggattaggacgtaattaaataagtgttagctaaaaagcttgaaaaaaatcaatatgatttttaaaatatttttttttataaaaaagtaccatttagcaatttgaaaagtgtacgcactagaaacaatagaaacaattgagtagaagttaggaaaggggaaaaacacaccctacgactgggttcgtttgtatggttggagagagctaatcttttgtttattgtgagcacattttctaaactattaaacaatacgttttttaaaaaattcaatatcaaaattgttttaaaaataaataaataaaattttaaatttataatatttaatacttaattaatcatatgggaatcatcggcaatgttttctatgatggtgaatagctaagccaaacagctacatacctcctccgttcaaaaaagaatccaatcttaactatgaacctggacatatgcgtgtgtttatagctaggatttatttttttcaggacggagcagtagaacgtagcctaaaaaagaatgcatacatgatccat

SEQ ID NO: 44251 - DNA, 696 bp, Oryza sativa
tctagaataaaacataaaataaattctaaattgggatttgagtacaattagaaaagaattgaagaatgccactaaaatttctatcaaattataataaaccaacaagaaaagactacataccaagaagggtatatagcaaaatacattatgaaaaaaggcaccacgttcgctgtgggggctagaacttcccacattaattggagaaaaagaaaaggagagtccaactagaaatacaatttaaaaacaattgaaattcgaaattaaaaataagcaatattgaaaaaagagtccttataagaacccaatacgagattaattaatattcaaaataaaaataaaataaaattcaaaattagcaaaaataaaaggaaaagaagagttccggtagaaatacaatttaaaaataacttcggaattcccacattaattggagaaaaagaaaaggagagtccaactagaaatacaatttagaaataagtgaaatttagaattaaaaataagcaatagtgaaagaagagtcctcataagaacccaatacgagattaattaatattcataataaaaaataacatatgaaattagtaaaaaggaaaagaagagttcgagtagaaatacaatttaaaaataactaaaattcaaaattcccacattaatcggagaaaaagaaaaggagagtccaactagaaatacaattta

SEQ ID NO: 44252 - DNA, 806 bp, Oryza sativa
catattaggataacattgtatcttttttgctgcgtaccatttgatacccactttaactgaaaagaagatcatatatgtgtatgctcttactggaaaacctgatcagtagtaacttagtagatagtgacttttttttttaatcaagtgatcttattttcatcgcacttgttggggcgagtttttttttttgggggggggggggtgggggatggtaagatttcgttcttttgaattgttatacaggctcacaactctgtttctctgcaggaaaagaactatgggagtatcaaaataatgaagttgaggaatgcataaaccaatatatttggtttattttggaatatgcaaatatagccaatgacccaaaaagccatcacaaaacttggatggaggcatggtccaaaattttgagaattagttaagtctttctatcgaagatctgagatacttgtatatgatctgatggatatgaaaatgagcaagattgatgatttctcatcgccttttctctttaaaaaggaccatcatgtgcatctaacttaattatttgtttttagagaacttcacatataggcataaattaataacacaaaaccgtaggttttatgattttgttcacaatgcaaaccacatgtcagacccaagatttccttataccccgggccaaatctaattgctactatcccatatcataaatgagacccacactaatgcaaaacaaaaggtacaaattgttattgttagtttcaaaaggaaaaaaaagaaaaacaatcaagaaacaacatctaacctcaaaatgacaacta

SEQ ID NO: 44253 - DNA, 2098 bp, Oryza sativa
atttgacttccgtattatccgtaggttgtcctgcgaccttctttggaaatacatgcagcaaccttcttatgctttgtcgaaattgttgaagaaaggcactcttgcttgcattagttttgcttgctgtttactgtgatctgcttttcatctcactataaacaactaacaatgtcggaaaatattgtatcatgtcattattactgcgatatctttggtgagaaatcctaaattcacatggcttgagaattcactgttagtgaattgtgttataccagttttgcattggacccactttctgtttaatgtgatctacttttcatatcactgtaaacaactaacattgtaggaaaatattgtatcgtgtcattattactgcaatatcttggtaagaaatcctaaattcacgtgacgtgagcattcactgttagtgaattgttttataccagttttgttcactgttagcatattgttagcatttgctgttaggacatgaatggcaagcgtagagcaattctggaaataccagttctgttcccctgctatattggtgtttacaagttccacgcattccctgtttccttggtacttagcctaaaatgattgttcttgatataaatactctgtaatcccctaatttgtgctgcgtctggcattctatatgaattttgacccctttttttcccttgtgggatagcttttatgtagaaaaggaagtctaacgtgtttctccgatgtgaataacagaacagacctgccaactcttgtgaatcaccaggtttgactccttttaatctttgataatgttgaaaatgaatgtatatgaatataaatgtgatcaaagcccttaaatatcatactgttctatcgagctatcttttcttctctatatactatcatactagtgtttcacatgcaattgacattactggattgtggcagaacctgaatcagcctagtgctgttcaattttttgacaggatagcatctttttactaaacaacaactgatctatgtcaattatactggatactgattttaagaacctgtcggatattgcagaaactagaaaattgccatgcaaaacgaagttatatttctttctagttgtactatttcctacatcagatggccatgagctgaattcccttatctgtgtctgtggtgcagaaattttccatggaatttgctcctgaccattattgtctaccgggtttgcggggaattatttcttcaaattttctgatccttgttagcaagtattcagaatttagggcagtgcatggagatggggaatgtttctacaggagcttcataatttcctatctggtagctgacatgttggcctcctccctgtttctaagcatagaatgtatgcttggtgatttattccgctttgtttggcaggagcaagtccttgacagggaggacacagatgaggaacaacgcctccttgctgcccttgaaattgaagttaaaccaatggctatgcaaattgattatcctgaatgggcaactgcattttcctggggccacgaagtaatcagtcaccttctatgtatttatttgtttatctttcttatagaaacaagcttgtaagagatgattctctacaataaatgccttccttcttactactctcttatcaattatttgcttcctaaggtttttgttatatctaatgtttacctatcagagattctcatatgagttatcctattatatttattcatgtcttaatatcaacgatatgcattttgcaagcttcattgtaatatacctgctaaactcttgaattcctcttagagtgcaaaatgccatccgtttgtaaggtataccatgcgtgatttactgcatcatcgattctcaggtatttaagaagctgatagagaacataattggatggaagaatccagcatcaacatacaggtatttatatgtttggttcctatagtttcaacaaattgttgtttatccatcccactgaccacatatgggcgctttttttcagccgtaagcaggaacttctggggttcttcagcagtaaaaggatgtcgaatggcagtaagaacaacatccttcagtttatcttccttctatt

SEQ ID NO: 44254 - DNA, 2415 bp, Oryza sativa
attcctgcagccccttttgcagcaacttgtgattcttttgcatcatacatatgctgtacattctttctttcttgtgtttgtgcccatgggtggatcaattgtaatagttgtgcagttttctgaaactgtgacaaggagaagagaaacatgtgttgtaccggcgtttgagtccgtgatgtgtcctgtgatcatatgatcatgaattattcttctgaaacttgtgattaagttctcttaagagcctttgctgcagaaatttttttcccttgtagataaagaacactatattggaatcctgattagtttcgttgttctaataaacttatccacatcattcttgtccatatattgaatatttacctggacttgtctggttgggagaggataggatagaataattatcattcactgtttgattgcatttataaaacatcccatttttaaaaaagttgcaatgattgtatagatcgtatatgattaagtcatatatgatcgcattggctatgttctttgccctgggttcccaacccccctctctctcgttttccgcgctaaacggtgtggttttttaaaaaaagtttctagacgaaagttgctttaaaaaatcaaattaatctattttaagaaaaaattagctaaaacttaattaatcacgtgttaatggactgcttcgttttccgtgcggaggagatgggttcctaacccccattagcgaacacaccagtgaatgatgacgtggatgatgttttgtcacaaaaatcggctgcaaagagcaaagaactggaactcgtagatcacaactagcctcggtctcgtctagttgcccatcgtattatttatcaaaattgtataataattcgccattcacattaatgtatataaatttgattttaatacgattttgaagtattttagagtaatctattgtttatatacgtttgtatgtacactaatgtaatataaaaggcacgatttggaaaatgggtgaataaatagcacgaatttaaaactgagtcattcaatatatgggtaaaaaatacccatctctaaaatatatatatggatatccaagttagctaataactcagttagcaaactaatttcctgacgacattgcgggtagggggatttggtttgtttgccgatgggggtgccagatccactccgacaccgccggggatgatatgggatggtacgagtagaggtgaaaacggagcggatttggatggatagtagttataccatatcctaaaccatatttttttaatcggattcggagcagttgcggatagtgtgtggatgtggagcggattgttttcggatgtcggaaatggtgcagaatcggttcggacacggattaaatttatcgaatgttacgtgtatatgcaatcaatacaacatcgagttagcaatgcaatggacaataatacaataaccaataaatgacccatcgtaataattatatgcttaagtactaaacaacataaatacatgatgtccataatataaaaatacagctacgcaagtataacatgagacggtgaaaatctcagactaagaaatttaggttaattgatgaattagaccgttggatgaaccaacttatgttatatgtaatagatacagtggttacatgtgttgataattttggattatctagctaacggtctatcagataatccgcatccgcatgctttcagagataccatatccgcatccgctccatatccgccggatttctaaaagcctataccatatcctcgtttcggatggatttggagcggatcggatcggatattatccgatccgttttcacccctgggtacgagaaatagtgcgttcatgaattagatcgtaaaaaaggtgagacatatgtctggtccattaatttttatcagtcctactcaatactataaaaagatcaatcgattaaattaattttgtattgaaaacaaacttcatattaagcaatccttcttgacctagcgcactatgatatcctggcccaattaaaatgagacatgtgtaatccacgagagttgtttgtgcatgcttagtaccaccttactagtttagcaagggtggaaccagcttataaggcctcttgcctccaacggtatcactctcgggttaacccttttacatgaagcgatgatgtaagtataagtgaagtggtatatgtaagtgggcccgtttgtcggttaggctgggctgcgcagttctagagggacgactgttacacatataactaacacatggtattttctaaagcttactaattttaaaataaaaaatacttcagatttttatagattttggtatgaaaaacaccattgttacacatataactaacacatggtattttctaaagattactcattttaaaataaaaatacttcaaattttatagaattt

SEQ ID NO: 44255 - DNA, 652 bp, Oryza sativa
cgctgcaactattgaatagtcttatattggttgtgaaagggcaagtgacctagtatataagtgggggagtctctcacctcattggttaatttttgaggtgggaaagaccatttcgattctacaattgctatctgagtctggttagttcaatatctctaacctgagtggcaaagtgtgcgaaggcatgatggaccgtggatgcttgtggagcctgtatacctgagggaccgtagagaaacagtgaatggacggtgaaaggccgagggacaccaacgtatacctgagagaccataaggaaacggtgaaggggtggtgaacggctgagggacaccaatatatgaaggggggagattattgaatagtccacattggttatagaaggacaagaaacttaatatataagtgggggagcccatccctcattggctagcttttgaggtgggaaagatcatttacgatcctacagcagcagcgtgaccttgcctcacgagctgggctgcaaacccgaaaaggggaagcttagtgtgatctctcccttgtgttatgaaaactctgggctatacagacaatatccatcacaatacagagtttgggcttggctaggctgccattcaagtcatccaaggctaggttgaacggttgatgctagcct

SEQ ID NO: 44256 - DNA, 715 bp, Oryza sativa
gtgtttcataaaattatcaaaaataattgctactaccctccatcaatgcttgcatgcatgcattttatcggtctttaaaatgatttttcttctaaactacttatccaatctatgattcgattacaccgttgtattcgttgtaattaaatctttataataaaatatcacacgattaaattttgatgaaagaaaaatatatgtttcaatctattaactcttattgtttcataagtgatagcaatatgtttcaacgtgtatcttcactgtgtttcataaattttttaaatgttttagttgctgtttttttgtttcaccatatataaattaatgtttcacttgttggtcagctgcaacattttgaccgaccgatgttttttttgatatatcggacgttcgattggtagtattctccccaaagttccaaacacaccctagttgtttttttgtttcaaccgggctggggttgggaggagatggaacagatggagaccgagccaccaaaaagcccaaacctgtaacaacaccccactgacccagcagcgtaataggcctcttgcctccttgcgttgcgacccagccccctgtcccctggcctcccctcctccagcacccgttccgtctccttcgcccgccgcctacgccgtcgcgccgatctccatcaccgcgagtagcggcgccggcgtcgtgctgcttcgggcttccgccgcatattctc

SEQ ID NO: 44257 - DNA, 561 bp, Oryza sativa
tggaactcatcgttggtgccttcccatctcgtccgaactgcgacagatggctattgtggccggcatcctccccatcccatgccacctcgtgatgtctaggctagtggtcggcaggagaggagcaaggcagcgatgacaatttctagagtagctcccggttgatcctaccccagctcccctacgagctcgctgatgtcggccactgtctaccttcctagagacctcagcggcagtggaggtcgatgggtccagcacggggagctatgtggacaccatccaccgccgatcgacctatccaagaaccgccttgccggccgcatcctcgacaaggtgttcgcgatgtagaaactcaacaagccgcttgtgcttgggaacacgctcttcgggacactcctttccaagtttcatcgactacgcatcactgatctgactccggtttggcgagaatcataaatagagataaagggtaaagagggggggtggggcgttattttttttctcactgacatgtgggatttatgagcaccatgtatgacgaaactgctatcaaaatggccaagg

SEQ ID NO: 44258 - DNA, 657 bp, Oryza sativa
tacaatgataaggatactctcatttctccctcgttttttctaaccacatttctcaaactattaaacaatatatttctttctaaaacattttataaaaaaaacttctttaaaattttatattaattaaattttaaaattatttaagttaatacttaactaatcatgcgctaaagaatcactctatttcacgtgcgcgggagagaagtccccccccccccccccaaaaaaaaaaagttagctagcagaacaaagttcatatcacccataacaagtgttttactctctctgtttcacgaaataaatctaggattgggtgtgagatatattaatactatgaatctggataggctcttgtatagattcattatacgaaaggttacatccaaatttattgtactataatatgttacatctaattaaagattttttttacagagcgagtagttcatagaacaagtgtttgttagggcagtcccaaccctccacttagtatggtgtctatggcattaactacattgctatgtagtacttttaatttatgtggcactgtattaattaagagagagagtaaagagaggaagaaactgggtctcatgcaagacacagcttcaacacgagaacctatgcactagacactatcaagctttgcattggggg

SEQ ID NO: 44259 - DNA, 665 bp, Oryza sativa
agggatatgaatgccacagtagaatcccatgatgccttcgtcttaggataccgaccgatgcaacagtggatgcactagggtggcgatcacggccttgatgatgagcgagaggagtcggccaagctcgcgatgatcatggcggagcagcagcgagctaacagcgggaagcaccagaaggatgggtgtaaaaaaaaaaaccagtggtcgttgctatagctctggcccgtgtgcgtgcagtgggcgcagcgcggcatgcagctccaaattcctcccttttgtcccccgatgcaccgccactgatgatgcctcccagccccacccccataaattccatccacgccgcccggcgccccgccgctgttgccatcggatccccgcggaaatccagtatgcagcggacacccgatgcttgcgaaccgatcgaggctgcgtgcctcgattgaaaatctgcattgaattgctccggatccgtctcaccaactcatcatcaactccacgcggccgggtgcctggccaccgctgcatctctgtgcctgtccaaccccgtctggacttctgatgatgacgatgatgcgagcgcgagaccagtgtttgacacgtacaaacgcccttgctgcatcggtctatcacagtggaggcactaacgtacacggggctgcaggaat

SEQ ID NO: 44260 - DNA, 565 bp, Oryza sativa
gcctatttctcccagaaataccataatagtcaaacggttgttaacaactcttcgttaagttgtatgaaaagacattcttaccctccagacaaccatttgctcacacaatatcattttgtattgtttgctcacacaatattattttgcattgatccatatttatgttagcttccaaattcacggacatcattattttgctatcaatcaaattatttcataatgcccctgtgtcgttgcctgccacctcctcgcagcccgtcacgccgacgcctgggaccgtcgggcggacgcctgcggccgacgcgccactgcctgggagccccacgccgccacctgggaaccccgcgtcgcagcctcgccgtcgtcgcccatcaagagagttaaatcgggttaggtttaggtttttatcttttcataatttttttcctttaccggtggattgggatagaataatttggagtgagagcaatttggttattattgtaaaaaaaaattctaatagtgtggactaaacggtatgttgactgtgatggtatttctaggagaaataggtttgtacgatggt

SEQ ID NO: 44261 - DNA, 665 bp, Oryza sativa
tgaatatattattacattttaagacgaataaagtatataactaagcttgtattaggggtaccataatggtaacagtacagtaatcacaattcaagcatatttttttaaaaaataatttttaattattttttttaaaaaaggctatttttgagttgccacgcgcattaaccaaaattattgtcgatgtaagagcaagaataatagtgatagccccatcgtttggcctaaacaaccaaagaataagccaaaatttgaatttttgaagttgattttaaaatgcttttaacgtaatttttgttaatgttggcttttaagtcgctacgaacaaatctacaaaagttttacttataaattaattttaattttctaataagccaaataagccaatttggaccaaatgggcaactgatgagagcctaagtatgtatgaaggagagagaaatatattaaatgcttcaagataaataatgctctctacccttcatgataaatacatgaaatacataagtatgagaaagatataggagaaaaaaaaaaccaagtttatagctactaatattggtgtactaactttcacatgaactaatacaatgagctctatccaacagcaaacaacggacttcaacaaaggcggcaataaaccaatcggtgaagcagtgaccctg

SEQ ID NO: 44262 - DNA, 594 bp, Oryza sativa
ccatcgggctggcgtccacggaaacagcagtgatcgcgcccacgagccccatgtgagcctgtgcgacgcgcgcgcatgtacgcccggttctttcatagcctttcggctctgtctcacggttatttcaacaagctttcggccttcactcacatcctgcagctgctactgatttactgaagtgatcggtgacgatggaatgctcatgcatgctacattgctaacgacgcttcgatcgagttaattctttatgtttgcacgtacgtatacgcttggacgaagtttgttatgttcaccgcctcaccggttcacgtggttgatcggttcgtgattacgtacagaccgaaaggagggagaggagtcacgttaatttttttagggtaaagagagagctttattaatgcttaaataaagggttacacttctaatttaataaatctagaattcttgcgaaagcacacaacctccactccgcgcaggacctagaacacattgccatttatgctaaaacatgtgctaccctatttgcttatctctttatcgatttaataaatctagaattcttgcgggagcacacaacctccactccgcgcagga

SEQ ID NO: 44263 - DNA, 656 bp, Oryza sativa
ttgacttggacattttttttaaaaaaagggggagaaataaataattggctggtttgataaacatccatgttattttactttgtcacaaataataatccaagcagaaagaacctccgagataaataagtgatgaattcgctcatatcacatctcatttggggcaaaattttcgatttgagatgtgttactagtaggggcggatctacagtacaagcgtcggtgtcaggcgacaccgacgactttcggcaaaacctataacaaaactgcttttccatatgctataacactatgttttaagtataattagtatactatgacaccgataaacacgttatgacactaaataaccgattttctagatccatcactggttactagtacagtgtagtactgtatttagcaacagaaagtggcacacaaacactgacacgcatggttgagataaacagtggcaggagcccaggaaaggtaacctggctcagagaaacaggagaataaatgattgaaccaagaaaaccacaaaaaccatggacttgcagtgaaacccatagccccagcagacagtagttgatggaattaaagacaaaggcagaagtcacaggcaggccccatgcacattgagcaaaaggaagcccaagcaagtgccggaaaagata

SEQ ID NO: 44264 - DNA, 695 bp, Oryza sativa
gtactctctctataaaaaaaacgttaacctaaaataaaatgagatatagtctagtgcaataataaatttagataaaaatgatgatattagattatgtcttattttagattggatttttttatgaacggagtacgccgctagccgcgaaccctgttcaccgcccgacgagcgacgattaccggtttccaacggacagccggccctcgctgtcttagtgtcgtcaaccctcaggcaacccactccgtcctccgtgttttggcgcctgcctgtgccgcactgcagcctacagcggcgcatgcagcgtgcgtctcgcactagaggagaggcttgctgtcgtctgatcggtttgatccgctgacgaggccggtcaagcccgtaccatccagcggtaagacggaccatcaagacgggcgggaggccgtcaatgccaccaccaaaccgaaccacaccccctgtgcaccgcaaccgcaaaccccctgctcctctgcatcgccaggcgccaccccattccgctcccttccaaaaggaaacggacagaccagtaaaaccacccgagtgtgtgcagcgtgagaggctacactagagctatagtgtgtgcgagaagggggagaaaaaagaacatggcctcgtgttgcctcctcgcctgtcccctccattccccgtcacattccccacactcgcgggggctgcaggaa

SEQ ID NO: 44265 - DNA, 647 bp, Oryza sativa
tggtaagaagcagggtggcaaggaacggacaccacggatctgcaagatttgcaaacaaatggtgtttcaagatttgcacaggatatgctgcctttgtttgcaaatcatgaaactcgtcctagtgccatatatatccaaacgggttttactcgttctatatgctgatgtgacatgtcatggagatgcctacgtatcggtgagatcccaatttcagtgacatattgatagttttttttagaaaattcttttatccccctctttttaattttttaaaaaacaacttcccccatcacttttctttaattttattttttctatatggctaacatgtagtcactaccatggtatgtcacgtcagcacacggattgagtcagaactcgtttggacctatgagaccccaggataagtttggggggctgaaaaatatattttgtgattctaaaatgataaatatggttgtatgcaaaataactctggacaaaattgcacttctttttttttcataacacttggtttatggggaatttcggaagtacaaattgtgtttgtgccttcaagtaaagtattatctatttgatcacagtggattgatggttgcgcatcctatatacttatatagttcatccccactaagtgcacttaatgc

SEQ ID NO: 44266 - DNA, 715 bp, Oryza sativa
aggatcaatggattggatcatcaattctaatcagtgagaaggatcaattctaagctattgggctaaatacctatatagggtatatacctggatcggagcctccattttggctgggccctaggccatcgcccttatggccctgctccagagccggccgtccggcggggtgccagggacggtgcaattcagcctgccgccgcagtcgccggacttggagctggcctgggcaaagaccgtgttgccactgccgctgagggagcatccggtgctcgccagatggtgacgccgggggaacacgttgacggcccacacgagccctggggtgaggtgagccattagccgccgacgattgggagggcgcccgcgcgcaccgtgaaggtgcagttgttgacgatggtaacggtagcgccgcaggccaatggctggaggatgagcggcatcgagaaggtaaccggtgaagttggagactccatgctgtgaactaccagtgcgagctcaagcgtagtgctagcgtttgttgttatggatttggccgtgattgtgcaagcgtttaaacggtgtatgtgctgaccaagagctggaacatggatatggatcatatgccgtggacctgaggttgttaccgttttttttttttgacaatttggtccttttaaaaaacttattttgaaaactaaccctcgccaaaaacttcaaccaaaaatagggctgcagg

SEQ ID NO: 44267 - DNA, 660 bp, Oryza sativa
ttcctctttaaatccaggtagggagagaagccacctcgaattcaaattatccccaaattttttcctcattctttacgcttcttacatttgctcttgaatccttagagttgtcgatgaggaagtgaagccgatctcgccgccgccgaggaaggaagaggaggaggaggagccgatctcgccgccgcaaccactgaagcgggagatctggcaggagaaggcgagtgcgttctcgtcggtgggctcctcctcctcggggaagagcggcggcgccgagagcagaggtcggcgtcgcggaggccacaggagacggcgatggcagcgtccggctggagatcgaggagatcgcggcgggggatcgccgtcacgagaccaggaagcggaagaaccacctcggtgcgcgcgcgcccctcgcctctcgaattccatctccccctttcaccactgctcatcctcgacgcgatgtccatgccccctgcaggtggtggtggtgctcggcgacgacaacggcgccaacgcccctcccttgctcctgcgtcgtcgccgccttgttcccccgccgccgccttgctctccttcccacctgttggctggcgacgctggcctgcccagaaccccagagagaagagtgagagagatagagagagagaggagaaagggaga

SEQ ID NO: 44268 - DNA, 688 bp, Oryza sativa
agaaaatatggcactcataaaggtaagttggatgacttttgagttttttcggatgagtgacttatgtattgtgctttatgtccactaccatgaaacagcaaacttttctgcttaactccctatgaaactgttggtagaacaatagctcagaattcactcagaagaatgctcaagggaactgggggcaggctccttgatagcgcatagacaattggaacctagaaaatgtcaacctgaatagaattttgcgcatatgaatataattatctaattatggaggatgtttctttctggagaatcaatcaatgcctacatgtatttttgtaatggttgatctgcctttatcatgactaaggaccaattagatcttagggatgggcatggattactccttgagtacacaccaagtgacccgcgttcatccttactagaattgtaaatatgcttgaggaactttcatggccattccagattggtgttgtctaagcattgtgtttgcactagtttgatagtttgaggacagtattttgatatcttgatgctgttaaattacatatatataatgcgttgacgatgctttgatcttcagatagcatgtgagaaaatattttcatttggctgttcccttccccagaatctattggaagaggacaaggacctagcaaagcagcaacagggctgcaggaat

SEQ ID NO: 44269 - DNA, 660 bp, Oryza sativa
atgcagcagataatttatgaatgtactaggctaaccgaatacgtgcacgtatgccaaaattgacagcctgaatattcgggtgtgtgtgtctccagcagtagttcttctcgatcgacgaatctatacacaactacgtgcgtatagagacactcgtcctacttagtactcctgccgtacgtatttattgtacgtactcccttcagttggattaatttcatgagaaaagcgagagtccgatccgaatatattcatgtgggttgatatataagtttttcatttagcaactgaagacatgcttggaagtttgaaagcgcgcagggagtttcgcagcaaagttcactgcaaatgattagatcctaattcccagacaggaactaatttcaatttgtctgctacaacggatatgtcatgagtatacacggttgaaaaaatatttcaagattattattcgtgtagtacatgcagctagcatatacttatacttttgtgcatgcatggcaggcaaaactttttcttgcccgcaggctaatacagcgaacagtccacttgtaaagctgttgaaaaatccggaccaaacctgcaggggagcactagtgctagtctccgatcagaaattcgccaatagcatgtgatgtatgggcccaagctagctagcgtcca

SEQ ID NO: 44270 - DNA, 710 bp, Oryza sativa
atgagtccagtggtcgaggtaatcttgctagcttcatttcagagtcgaattgaaacttcgaaatagagcacttatcctctttccgtgaacaaggaatggaggatatcgacgccgttatatatggcagatcgttcagtgcctgtgagaggggaagttaacttgccatgaacacaccatcaaaaattcagtcattggatcaggaatagactgtaaattgcctttgctgctctagtgctatgacgagagggaggggaagtgagtcagtcatagagagtaagaattaagaatgatctaaatttagcgtgcgagtgacaaaagcgtaaggcacacgatcaggattcaggaacgatggatggttcagatagctatgttacaccgatgtcaaattaatctcgagttgcttagttagttactaaccatattgtgtgtacactaccaaagtatgttgacagttcacgtacggtcttcgttattaaccaccactagtcagtgtagggataactacattatatcacttatcaaagcataggtagtccgggccgtgggtacgtcagagggttttacacagggaagtggtacgtgttaattccttgaatcctcacagctagtagtatcgatcgaaatggatcatggatgatcatgaatgctagctttcacgtaccatctcatcaccgtgccgctccaaggaaactatggagggctgcaggaat

SEQ ID NO: 44271 - DNA, 667 bp, Oryza sativa
ttataattattaatcagttgtatagctttagcttaattttcagtggtgacaatttatagtttgacaagcaataccaaccataacatccagcatgatgcaaaagttttaaaaagttcaaaattttagtgatttttattgtcggggattttcaggatgttacacgggccaagtgccctagactcatccaacttacttctattataagaaaggaattagagataaggcaatggatcttatctcatgtaaataggaggcatgtaccggattataagagatatcacgcatgtcttagctggctccctgatgactatataagggggtcggctaaccctaattcgggtgatcgctacaagctactctcaacgtcgtattgcgaaattctgcacagatccaatctcatacgactgaactagggtattacctctcttcgagtgcctgaactagcataatcactgtgtcaccatctttcctacgtctagtgcacccgataaatattattgccgatctagaaaatcgacatatctcttgttacatgttgtaatggtcttttaggcttctttggcaaatgggatcgggaaatgatatcccatccatcgaagggtaatatcgtatcctagccatctattcttctcatctatatcttcacatctcatttagtcctagccat

SEQ ID NO: 44272 - DNA, 628 bp, Oryza sativa
agaaagcatatacttttgtgaggtcgagagaagcaggctcgccacaaaagtcctggccacaacaaactccctcctaaatcaattggctcctaaatcaattggtaaaaaagaatcaaaatcaactatactacttaaatgcgccatgtttgcaggcgcaagcgggaacgggccaaatcagctcctcccttttgattcggagaatttcttggtagagatcgaccaactggtcatataaatcaatcacggtcacttaacacacaccgttccttttcagcttgcaaatctgaagtatggttgcccacctaaaaattcagtcagtattttgagacctagccttccacgatcgatctgcacgagtgtctgtttgtctctctactaaaatccacagtggaattaatatttctacacctcgcttgtctggttgagctaggtagctagctagtccaatatgattccaaaatgaagttgtactggttggctaccattgaatatttgactagatttatacagtagagtagtgtactactgatcaaattgggggctcccttggatgtcgatagcaacattagaactttagcccgcgtggcatcatatcaacaaagttggtacaccgtgccgtgcctactta

SEQ ID NO: 44273 - DNA, 660 bp, Oryza sativa
gccctgattatataatcttcctcgttaatcacagtttctaaatcttagttaccgaatgctaattccacttacaatcatttttatttctttacaaaatgctaattgcgacacgcactcccgaatccccgccgctagtctcgcccacagaagattcgaacacatacagaattacacggaccacaatcgtttggttaccactaatcacatattctaattgatcctgttcctgatcatgtaccgaacacctgccatgccatgccacgtacgtggagtggccaccaaaccccgcgccgctcgttgccgccggcgcgagtggctgtgccggtacacggaagacgcggcttccgtgcgcgccccgatgcgggggtggcggaaaggaggacaagcgttggcagctagctgcgcgcctccacgttgttccggaacgttccatcgcatcgttaactgaaacgagaggcagtattaatcccctagttaaactctggctaagtatagcagagacgccggccgagaggagtggggggagagggaggaggaggaggagagtggctactagtactagctatctttggagtgggcgtttcttggccggcggcgatggagcaggtgcggcggaagagtagcctgaggtcgcatggctcaggcaagtcctcgccgcgg

SEQ ID NO: 44274 - DNA, 1537 bp, Oryza sativa
ttggctcggcttctgaaagatgattttctgatctttgggcagtaactgaggtggtatcactcttgtatgagtttctcctatcacctaaaacacattatatacatcaaatatgcatcagaaaggaatctcctggaaaaaaaattagaatagccaaaattgatttgcaaaaataacgcaatgttattgcaaaaattaatgaaaaaaaacgtgggaataatacacactcacaacaataagttactgggattatttgtacttccaatgttagaggctactttatacgaagagagaagaaaagagaaatagggcatctttcaacacatgatggccatggattaaaaagtgccacaatagtaagtataaaagaagtattatgtcatgacaatggtgcaaagacaaataagttgcctgcagtcttcatcatttgtacattacattctaaaaataagagctatcttctaaaagttttttgtttggtagaatataagtttgtaggacagtattacataactacctgcttcaatgtccaatttgtcgaatatgaggcagcagagtcatctgaaacaccaccaagcaatgataaaataattataggcttcatttcctccatgaccttatcaaccttcttcgttgaactggaccaacacaacaaatcccatgaattaatctaaccactcatcaattattagcatgtacatcatctatatatctgcatcatgtcatttctggtagaaacatttgcaatcttgataaaaagtatatcattccaatggatatcctgttggcagaatgttttcatataagctttctattcatagccttgtagtgatccctagcatgattttttttttggccatctatgtcattctatcaagctaggtaaagtggcatcactatattgtacaatatataatgtaccagtagaaccaataattaacatggaattttttgacaactgaattcatatgaaataatctgaagtaaagaaaaattcccttaatagaagtgaggcataattacatatgatcattagaatataattaagcttttgttaaccgaaccatggtaaagaagatgaatggtgtcctgcaagatgaatctccccgctgaaactgtaagtacctctctttcagaatagaggtagtaacaacatgaagcagttaaagtgtttcctaaaattaaacaatgatgtacacgaaaaatatggaaataaataagaaatgatgcacctgcatattgtttgtgttcttcaaacttgaatccataaaaccgggcatgaaccatgcatctgatcctgccataagccaaaagaagcaaacattaatttaaggaatatgataccccttttaatcttagttaatcctaaacagcgaacaacctagtcgagagagaatgaaccaaccccgcatactacaaaatcataagagcattatattaacttatgacagaattattccttaccttactgcatgaaagaatattcttccccatactaaatggaagcaattaaaataaaaaaggaatcattgggttgtag

SEQ ID NO: 44275 - DNA, 1906 bp, Oryza sativa
actcttgaaggttttgggctttttcagcaggtgaggaaaccgcagccgcacaccattgcctactacctgcgacactattctggcttgtagctcgacagccgaacatgtcttttttcccctaaaattcttgaaaggagtttctttagtattgttacccgataccatacacatggcagtatatatatcatttagatcttagcgctacgaatgtaatttaaattttcgcgcgcaatttctatacattatttttttaaaagaatatttttctctcgagaaaagaaaagtaaaatttgcggggctcccaaaattgccagcccgtctccctctcctcgtttcctctacctctgtgactctcttctttttttttcgtcagtctctcctctattctctctcctgtgtttccggcggaggcacgagcgcacggacagcctcctccccccgcctccacctccgcgcggtcgccgccggcgaggaggcggcgccggacgagctcctctccttccccgccacgccgtagcatcctcctcctcccccgcgcgcgcgccgctgggcgagcaagtctgggggccaggagcgagcggcgcggcgcggcccggccaggcctctcattccaccaccaccggcgcccatctcggcggctcggatcgaattcagaggtgattcgagagagactcttctctcgtagcccctccgttcactccctcctcctcctcgttgtctcgtgttccggcgtggcgtagattggagacctgtattgattttttttttttttttgcgccttcgcacgcagtttcgtcgcttgctctccgacggcggcgatgatggaggcggaggaggcgttccctccgcagaggaatccccgccgcgcgcggcgccgcgacctcaacgcactggtttgatccgattgaccccctcagtttttttttaaaaaaaaatattattgttgttatataactccccatcggtttagcggccctgtggccctgtcattgtagacgtttgatgtatgcagggtttgaggttttactgtgaaatttgactctcgtttcgaggttttacctggaatggattgtctcgattttatggggggtttagggttccttacgtgactgaatggctgtgtgtttgcagtggttcatgttctagtaaggaattgtgatttcgggtttatatatttacagcggcaggttgtttgtgagtaaaggactcgaaggttaggatttttttgtagttccaatttgttcgtatttaggctttactgttttatattggtgagttggagtgacattttagtttcctgaggcagtttagttcaacccattatactagttcatcctcgattggttttgtgtgttgcaacctctgactattaggatttagtacttaacatagatgactgctccagctcttttaatgggccaaacgaggtatcatgccgtgccatcctgatgatcctaaatttgccaaacaaagtatcatgctgtgccatcctgataatcctaaatttaggacattctatatgtgcaagttcaacgagtagtgattccatttctatgttgtagagaaggttgattttttagtgtcatcaatttgtataagctggaagacactttaggttttgaacatgttgcatttgctatgttctgatgattgaggtattgtttcaggatcccagtttagaagagtctgatggagaggacattggtgttccagaagttggcatggtgtttaataaccacatggaggtcaaccgattctaccgaaggtatgctcgccgtgttggctttggggtgtctgttaggaggtcctcattttcacaagagggcacctgcttatatctggagctcatgtgctgcaaaggagggcggccacgttatgagccaaagttcaggaaacgggcctcttc

SEQ ID NO: 44276 - DNA, 2478 bp, Oryza sativa
cataactgcatcccaggtctttgtaaatatgcagaggaagtgaagagttgcctagagaacttcaaacggatgctagcactaacaaaagtacatcaaatccatcttggctgtgatctgaagcctttgtgctgcagagattgagcacggccaagcccaagcgccattcttcatttggatcatcctggagtgaagtccagggttgaaaaatagccttcacctcatttgactttagttgattccagcaacattagccgataatgtttttgtggctctgccatgatatacaagttctgaaatcccgctgtcgtttccatggtaatatgtaaatgattttttgatggactaacctggtcatttgactggatttttttagttcggaggcttaaagactcccttagcatcatgctagccatctcaaaatatagctaagctaaaaagacatacttcaagaaagtagccaaatctcctctagctggccaaatttagtcgtcctccctcgctagccagtagccactctttccaacagaaagaggggagaggttgagtggttgacatgcaggtcccacttagggcatccatgtggatttcatctggattatttgcaaactgagggagcgaggttatgatgctcatgttttcaagctatgggtcccaacttaattcccataaactcgtatatctcaaacattgtgaaaggtatcaccagtgaaactttaccgaaacaagtatgcctcaccttaataccttatgatcccattggactatataaatcggtaatgccctaagggcatgcgcaatgcttattgccgaacgtgaatacgatagacaccataattctcttaaaaatttaagtagatctattttttttaaaaaaagttttaatttcgtagtaatatgtaattaatcatgcgctacttatcaccacgtttttccgagccatacagtctctagccaaactgcgcagtcgagtcagtcgagctagccctatacttaccgtgagcacggatgcccatgctcgagagaacattttctgcccattacccacgacgcagacacgcagtgacgctcgggtgcgactgctgtggctagccagccaaggttgtcaggacactagatagtttcgctcaaagcaatatatcgtatagtaggatcgtatcgtaatatcgagatactatgagatttttatttttaagtttaattaatatttatattaattatatatagccattctatataaaataaatatagtaatgatatatgtcatgcaaatagagatatttattaagggaaaccacattggttttgatatattttactgatttttatataaatttgagcgtatttatttacattattttcaaaacacgttatttaaaataatattttatagtatcgtagggattgtagaatcgggataccacctaagatttcgtaggataatgtagtaatgaatagtaatatcgagatactatgaaaattagtatactatgtgggatcggtattgtttcgactcgtagaatcgtagtatcgtaagatactatgatataaattgggatactaacgaccttgcggctagcgacaacgattgcagcatatccaacctattctacgtccaaattcgttgtactagaatttgattggttttttttgacatgacacaccccagtgcaataaatctgaacatagatttattataggatatattacattctattactagattagctccgtaatacaataaatctgggcatactctatactagaatatgtcacattctactggattgactattttttttttgggacatatcacatcctaatactaaattgactttttttttttggaacagggagcatgtcaaacaggtggagatctaaccgacggcgctaggcagcggctagcggcaattccgacttacgttagacaaggagtggtacctggtacatgaaaaaaaaaatcacatcttccatgacaaattttaaaaggcgcgtgaattgggtgacaatttctgaaagactgatggcaaatactgaaatccctctgcccaatttgcttcagccatctcttgctcctacaaagcaaaatgagctcagcaggaattttctcatcctgtgaaccgagatttctcccaattagagtgaatctcatgcttctccgcccagcgcctgcaaatgaactacacactaaccatgcatcgcccaaacaaggccaacggccacaatttgcacgtcccggcagggagggcgtcttacagtgtaattttagacaatagacaaagtcataaactgaaccaaacatacatttaacagatactcaggggttcaaaatagatctaaaatatggtgactagagggtagcatccaaatccagccaatccgtatttccacttccacagcaaccagttgaaatttcggttgcaatttacctgccgatctagagcgctgagcctaactatatgaaagtccacatctttacag

SEQ ID NO: 44277 - DNA, 687 bp, Oryza sativa
atttaaatttcagactcggcaacatattgaaagacctaaagtgaaattattctttcaataattagccattgatgcttgctcccccgggccgcgtgcagcccacaggtacacgtatagcccatttatgtatctacattcgcccgtttaaaaccgaggccattgccttttagccaaataaataatatgatggacaaaaaaatatagaaaaactttagacataaacactttatatgtaaaaaatacatttcatatagaaaaaatattgtacaaactttctgtgcacaatttttctacttacatataaaagttttgtatacgtgcaaaaatattctgtatattatttgaatttgtgtacaaactttacactggtggagaagtgctttttactaccggtttataaccctttgtagtcccggttttagtcctgggtgaaataaccggtagtaaaaatccatttttagtcccggttggtgttatcaaccgggactaaagatagagctaagctagctagatccggttactccattattctattctcttcttcattgtttttaatatattgatttcactccatccccatcccaaaatcccaaatcaatcatccccaaatccttgaatcctcaaatcgatcatatccaaatacatcacaaaatcttaaaaaaaaattacatcacaacttcgacaaaa

SEQ ID NO: 44278 - DNA, 1305 bp, Oryza sativa
tagtcacaaggttcggatgaacagaagacatctgagagcaaaacaacgatccccttcgcctcgatgaaatattttgccggcggcgcgccgcgcatggaaccacaagaggagctgaagaggcgtagcatatcagcgccgtgattaacgagatcagctgaagaggcggtaccagatgggctgttctgcaaaacagaagtggaggaggcgggcgtgtattcgtaaaattgccacgctaggagacttggccgtaggatgtcgatcgaacggatccggacgcacgtgtacacgagtgcagctgtactcccgtgtgcacaggatacccttcctacttataattggcttgctatttgtagagttatgcatactattgccaaatatagtcttagtcaatgaacaactaacattaacaactcctagtacctcgaggggcaagaggattggagcactgtaaaaacactaataatagtcatgggtcgtgctaatagaaattctcattttacaagaagggcaacaatcatgtttcttccgccttacacacttaattaacattggcacacgacagcggaacagctagctcatggcattcggtccaagccaagtgcacctcatatgtacgcgtgacaaagagggtagcatatatgtctggctcaaacctcactagcaacgcccgagatacgaactcttttgcttgccctgttagaactcctattctattgcatatcaacatacttttgtttgccggttcattctatttatcctcgtcgacatcacatatttacatccttcagaaatgggttaaaggacggtgatatgaatcaatgaccaggtcgtcatagagctaggttagttggcatggagctcgagaagaacggcaggctgtttggttgatagtcgaattttaccatgtcaaatcttaggtgtagcgtaatttcttatacagtgtttgattgtgtgttacacttggagttaagtcacactttattagtatgttagctcacacattatatatactcttattttcaagacaaagtttatcacaattgtgactaaccgatagtgataaagttaacctccatccaaacagtctcagctagttaaatgaggaaatgaacatagatagatagatagatagaggatgaaggaggaggagaatagttatacacggaagtattatgaacaagataaaaattaagttttagttcctccatcccacaatggggttgatcgtttgtgctactttccagctgcaggcatctggagcaacaatagtagcaatcgaaaaattaattgtggctgcagcagctg

SEQ ID NO: 44279 - DNA, 721 bp, Oryza sativa
tgaggagcttgatcgcagtgacgtagtcagcaacctcgagtgtcatctgctatattctcatcgcccaacttaagatccaaggagaaggattgctctaaataatgtacttacaatattatctaaaagaatatatctagttattagggccgtatgcattgcttgatgcatatgctggagaattttttactctactatcttaaaaggtatgtatggatacttttgattagtttaggttggttatatgcatttagtgaggaatttactttttgtgatatgatggcttttgttttgtgacaaaccaattatcttttctcttgatcatctggcaaaccatgaaatcgtttgtcttgaacccaatctttatttttgaccaatggtcctttcctgagatctgctgggaaagtataagctttttctgcctttcacagaagctatttctccctgcgcattttactctctttatgatagctcgatttttttttcatcttacaaataaaatgatgtaatgtgcattccagggtcgaacagtactctctttatgatagctcgatttttttttctcttacaaataaaatgatgtaatgtgcattccagggtcgaacagggttgaaatgttgttgaggaaaatgacaaagcaaaatagcacgtgaaggcgtgaagcgataaatcagggagatggcagccccactgcacgtttttctagtggaggggctgcaggaat

SEQ ID NO: 44280 - DNA, 671 bp, Oryza sativa
atgtccttggctcatccgctccaggctcaaattatcccgacttgggaacacaaacaccgcaaataccaacaagggcaacaataataacggagatgacattttggtatgtgtatccaaactacaccaccgcctaaagcacaagccactgatgaacacagcccagcatatcctacgcaccaatatcaccagacaaacagacacatagtcggcgacgtacaacaattagtagtactacgttacacggtgacactgccacgctctagctagtgctggtcatccaccagctgcctgaaatttatcggcgcagcgaagcggaccgagccgttgtatatggccgcggcggcgatcttggacgtggcgtgcgtcgggtgcagcaggtcccagaagaggtagtcgtgccggttgtcgcacagcgtggcgttcggcgtgcacccggactcgccgttgaacttgccggagccgcagcaagccgtcgtgacctccttgaatcctgcacaccaatgccgtgtcacgaaactctgaaccttgcgttggtcagaaatccgaaactgaagcgtagaatgttcagataccgagtcgttggggatgcttcatgatgctttgcaccacggcatgggagctcccgatggagtacttgaagccgctgaagctcacgctgaggccgtgcatgg

SEQ ID NO: 44281 - DNA, 702 bp, Oryza sativa
aatatgatcatgccatgcaaactgtcccgtaaccctggaaattcaggagaaaaggttgcatgatgtacaattctgtgagacctaccggtggggcatgggggttcagctgaacccccaaacgttttgggggagaaatatgctacctctccctccctctcctttaatttttgaccacacacagcgcctccctgttaagacacaccattaaaaaaagtagaagctcttggatcaaaggaaaagggataatgaccattagatatatgaattgcaactgcctttgttgaggaagtttgctacgtgattaactgtcaaggcaaagcagccaaaccaacactgttgtccgtaaaaaggtaaagaagccaaaacaacagtgttgtccggaaaaaaattgaagcaaaatatgttgcgactcttgccaattgtcagtaattaaccacaacagtttgacaagccgtttgcagtgcatataaagaacacgttaatttcctctaaaaccctcctcataatctccttttctttctgtacagcaaaagcacttccaaggtacacataaaaaccttccaaggcttagtcatactaccaaaaacgttcaagaaaaaaacatcagaaccatgagttaacgttgagatcaatttcaggggcggagacagcttgaagccacaccagggcttagttctattaccttgtcctagctctctataa

SEQ ID NO: 44282 - DNA, 696 bp, Oryza sativa
cgactcgatctgggggtggcaaattaatcagtgtgatcaacagggataacttatcccgtccgaccaaatccaccaaccaaaccaagacccgatttgttaggctgtgaaagacggatcagtgggaccctgatctacggaccccatatgtcaccgtccaggtctctggatctctcccgtcgtcctaatcagacaccgcgcgcgcggtgccgtcgctctcgagccgtgtcccgctcccaactcgtcacaaaagcgatcacagactcttccttcctctgctgggagagaagaaaaattggccgcgatgatgccgataaagaggaaaaagggatgagaatccgatggaaaaaaactgatgttaatctatcgctactgctgcgcactaagacgaatcgtatccgaacaagaaacgcttacgttactgttcctaaatggatcgctccgctcatcacttaaccaaaaatcgattaggaaattgacggacagcgacgcccgaagccaagtgtctcgtcgcgtaggcgtcgaggcctcgaagcagagggagcggagaggcggacgcgccgcccacgcctcctctccctcggtgacacggccgtctggctccacatggcgccgacctctcccgatgcgtccacccgtcccgaggcaccgccacgtcggaaccagccggccgccccacgcgattgccgacacgcgtcg

SEQ ID NO: 44283 - DNA, 675 bp, Oryza sativa
atcttcgtttgcttctctaatcgatcacacgaccacctaacctgtgtgccagtgtcaggcaggtagaggactactggttttatctccttggcttcgaaatgcaatcgggacgtatagagctgcttgatctgacatccacaattattgacgcctgttcactttgatatcattttcaaccttatcaaattttggtaaagttacaaaaaaaagtggctacatttagtttcttgccaaattttggtaactatataagaaatcctgccaaatgctaaaatttagtaaggtttttttggcatcaaagtaaacatgtccttggtttgttggttgcaacgaaaaaggatccgaaaaatcatatatcgttgaattgatcagcgttagacggtgagaagcctgactaaggcccagtttagttacaaagtttttttttctaaactttcaacttttcatcacatcgaacctttaatacacacaacttttctatcacatcgtatcaatttcaaccaaactttcaaacttcagtgtgaactcaacacaacctaagaaaaaaaccccagcattgcatgtagcatgcgtatgtactacaactactaccctactactatgtcatcccctctatccttagaatcatgacttcagcttagaggtgccgtcaattatggtcgaaatgggcggtgc

SEQ ID NO: 44284 - DNA, 721 bp, Oryza sativa
attcctgcagcccttcatgcatagtatatccagtcagtgacagttgacttactagcttgcttctttcttctaggacagtactatttttttcacaagagtttgtacattttggtttaatttaaattggatgtagcctggactggtatctaatctatttcaccaccatgtgtagtacgtatgtttttccgtggccaagaatattgcgttctttttctgagttaaatgctatccctggagaggttgaatctactgaaaagaggaagacctgctgatccctacactagctgtgtttcataatattcagatagttattttacttgatggctcagtgtctgataggcttagtatgttggaaatggctaccggtccccttatttatactgccagagcattcttcaagaaccatctcacttcatggaacatttacgctggtaggaattctgctaagttgcaggatatatcttgtatcagtgctagtactattgataaaggattgcaatctgccacatattttcacgatctgatgcacatttctcattggcaaatttattttctctcctgttgtttttttacagttccattcaaattctcatattagacttaaacacatttttccctttcagggatcacatgtcaagtcaggatgtggttgatttcgtacatgagaaattaaactcggtgagtcctcattttctctacatgttatgacagctatgcattt

SEQ ID NO: 44285 - DNA, 1360 bp, Oryza sativa
aggtgataaaatgaagctggctgaagatcctttcacggaagacgagcttgactactacccatttcttgagaacaatcccgttgagtttcagctgagagatgagctaccactcctggagcctggaatgaactgaagaatgctaatctgccccacttgaaaagacctcagaacagtgctattatcatcattatcctctttgcaaactctacttgctcaggagcagtttatttgtagtagtagtagtagtaactagtatcctagatgttctgctgtatgtggttggtgtgataatcattcacactttaggaagaacccaagtagcggaagcaactttagcttcctttatgttctgtgtcttggctgaaatacccatcattaagccattgtgtaaatggtagtagtagtaaactgtagtgtaaggattctgcagaagtacatgcgtgtgccacttcctctattacgaatgcgtgcacatgtgtttgatttcctgtttatattttgttcagagtttcagcttggtcaatacaatgttaggttcatctgaacgcagccatccacttgaccaccttgcatcgattcccagttcggattggatgaatttgccgttccctgttcaaaatttgacgttcgctgttcaaattggatcgtgacgaggaagccttttgccgtcgtgttcttccatcctctgcggctggttctcccgggcccacatgtcatccacccaggggaaggtgggaggaaagaccaaaaaaaataaaaaataaaaaaatgttggatcgtgacgactcaccaaggcctaggattatttatgtattgatcggtcgcaaccgcgagtccgcgacggggcgagacaccggcggccatagctcgagagctcgaggtcaacccgaaagccacgcacgcgccgcgcaatgggttccgacgccagcagcgccgccgacgcgatgggagtgctccgggcggcggtgcccctgcagccggacgccgacctcgtcctggctaccggcggcggcggcgagcgggggcaggtggtggggctcgtcctcgtcgacgtctccaacgggttctgcaccgtcggcgccgggaacctcgtgagctacctccccccctccccacgcctctccctctccctctcttctccttcgcccgtgccttaccgcgcgcgcgacgcggattgatggtggcacgcttggttggttgggctgcgccgctgcttggcgtcgtggccaaaattgcttgtgtgctggggattgggacacgagtgaatagaccactctggattactcgcaggaatatcctcctcctggcttctgccttgttttgaacgaccctgtttgttttgatctttattgtcgtattc

SEQ ID NO: 44286 - DNA, 643 bp, Oryza sativa
gcaaggcccaagaagattgtgaggagaggacatgggagatggaggtggtgagttggttgtcctataggacgaggcttgggaagtgttgatgtgcagccccatcgtttcgcttattcatggaataagccaaacgacatatttgcaaataaaaactaatttatgaatataacttttatatacgtattgttaacaatataaaagcaaatactgaaaaataaacttcgatgaaaaaccccaaaatcaattcaaaatttaaggttgaaattcaatttttggctaataagtataaccatatgcgaaaagataaggcacgtggtcttttttcgtggttgttttttgaacatgatgatgtggtcatatgtgtttacttaaaagccgcgggaatggttgagaggtagccatgccacgtcattgttttttctagaaaagaccttcttttgtgcttaatcacacttcagtttaggttaatatgatccactcgatcgtgggataagatcaatctggccattaatgtggctgctcttcctgagccataggatcggcgaaaccatattggacgggtcagatcgtttttcgcgcagatgaatagaagaaaaaaccctagccgcactcagcccagccccgcctcgcgctcctcgccttt

SEQ ID NO: 44287 - DNA, 2618 bp, Oryza sativa
catgtgtccagagcgattggtatactattaatcttatttctttctggttgtttgtacatcatatattgcatcaatagtaatcggcgttcttcttacttacatttcaggttattttgaattaaagaagaaccaaaatattcctccttcacagcagatggtgacatgtgatcctgagtttaccattgtaagtatatctaagttcttttagaggactaaaaattttgctgggtctgatctgatagcttttcttttctgttaggtggacataactgctaatactgaatttcttgtcatagcaactgacggcatctggtaggctatcaactatacaaataatagatgtgatttcttttcattatgcttgctcccgatttaaaaaaaaatatcatgcagagtatgcccacttcagttttttagatatatgcatagcagtatagcatatgtatgtaggcttatttagtgttgacacaggaggttcatatacccatgtatgcacattggttcagctaaagttaacttgattgcttcttctaagacttggattaatttaaattagatgcgtagttctctatgttttctcatggtgaaggatttgaattatttttctgaaaagaggaacatctgccaatccctgtgggcctgcactaggtattttttcatagaattcagatgattatttaacttgttggcttggtatctgatatgcttactaagctggaaatggccagcgtgccccttatatatctgacttctactgtaaggacatgcttcgagaaccatggcactacactggtaggaattatgctaaattacaggatataacttgtcactgctaatattgataaaggattgcaatctgccatatattttcagtctgatatgcagtccccatctttgacaatttcattcatattctcatagtaaagttaaactcatttttttccctttcaggggtcacatgtcaagtcaggacgtggttgatttcatacgcaaggaattacgctcggtgagtccatcttcctcatttttctctgattgtcatgacagtaatgcatagaagagtatcctttcgaatgaataaatttcaagaacctaccttcatagttcatacatgcgctcttgaatcaagtagtaattttttactccatttctaaacacatatgtgggtctgcttggctggctggttggtatttaggcaattgaaatctaaagtctacatgcctgtaaccgttcatccatttgttgcttgcaaccaacacagggggaggaaaatctgcgcgccatttgtgagaagcttcttgatcattgcttgacctcgagggacaacgtgacggtcatactggttcggttcaagcccggcgccgcggttatccctatcctgtccgacatcgatgaggagcctgtcctctccgacgttgaggaggagccccatgaacctcaacaaaatcccggggatggcggcggcggcggcggcggccagcaagacatcggtggcgaatcagaggagctcccattggcccattttcctcaggaatagttcgtgctaggatcttagctagctgcagagagttttgatgttacagtgctatctccctctttgtccaaacaaagttgatggggatgcaactaggagtagttcattaccataggagtagttccaactcgtcagcacgtactacacttacgttttgcctgagatttacctgaattcgcttcacgcacttttattactattgttctgctctggaaccctgaagattttgatcgaacgttaacagtgtttaattcgtaaatgctcactgccttttgtaacttctctagcaatgtgcatgattttgaagaattttagtgctagactgctagtgaactaaatatttgcgtgacggtgtttatcagatcagtgtatgactgtatgtaatatcctatgaccgctgaattaagctagacaataatttcaccatgacacagatcgagtcggagatgcaaagaaaggaaagaaacacagatgggagaagcccagttacggttttagcgcaagctttcaaacacgcgctttacttctaatcaacatcattaattcgatcctgattcggacatttgggatggattccttcacacgtgcgcagcctgatcagaatcggacacacccacgaggataagaggcgaggacgcgacacggcgacaccatccttcctcgcgccaccaccacgagcgtcctactatctttcatcccgccaccgcctcttgcctcctcttgctctccctcacttccggcgaccatgggggatttgatcttggatccctacatggaggacgcgatcttggatcatccctgcctcgccgaacttcttgctgattaaacagcgctcccaatgttcgactctttctccggcggcggcactccgccgattgataccgacaccttcctccgcgccatcggcgcgctgcctccgcttgcaccgccacaggaagctccgctcgcaccggcgccaccggactccccccgtacccctcacacctacggcagcctcctccccgtctacggtgatcatccactgctcaccggcgccgtcgtccaggagcccttgccgctgccagaaggcggcgatcaccctgtg

SEQ ID NO: 44288 - DNA, 1902 bp, Oryza sativa
atggtggcagttttcttggaggagaaggaggtgacgagcaccaacctatggtgatcttcgttgtctccttttattttcgatcttacttatcattcttctccaccttgttcctgttgttgcgtctactgctgcttccgtgtcgctgctgttgcggttcgcatggtctctgttggaggaggtggtaatctgtaattctgtatctgtccgtcttcttgcaactggatagtgttcatcagttcatgagttcatccttcatcgtagcacccgtttctacctacgcattttcttgatgtttcttttcctggcgttatcgatgtaaacatggccgctcgatgatctatatctgctcgtctctatcgtttacttattttggtatgtttttccagattctttctgcgtgtaggtgtgctttcctctctttttttttcccacactgggttttgacgttctgttgattcctcttattcttgttgattcttgatgatgctgtgcatgcggaaactcggtgatcttgatttataacctgtccgttcttgctgttgagtgccagcgagcagtgttactctgtttttcatgaaagtacttttcattcagtagatgtttacatccatagatgtatgagtctcttagttcttacttactatcaagcaatcaagttcaagccatctttatttgcagctcacattaaatggtctaacacttgatgatgtttcacttccccagtatggtgtgaagtgcgattctgttaagtagtttgttacccggcaccaggtgttactgaaatttgagtgggaaatcttagcctgtgattatttgtcccctttcatatcgtgtgcactgcaggctgctgcatttgttcttggcacaaactttggagtttttatttttgttctgaaatgctgaagccatttttcatggtcttcttaagtcttagtgaccctgatcagtattgaacaatgtttggttcaacagatagtacaatagtgtgttcacattagtccttacaggaaagaggcttctgccatgggtgcatctcccagccgtccactagaacaatcaccatcatctagtgaaggagagaatcacagagttaagtatgcctcatatactacgcaaggatttcgcccgcacatggaagatgcagtgagtaatcttgcactcttttaaccaattttatggccataaggtgtttacctgtaagtaaatgtgatcaaacaacaagcttgatttgtacctttcgtattatctagcttgcagttgaactagatctagatgcgaccacgtcattctttggtgtttatgatggccatggaggtttgatcttcattctcatcttttctaacaaatgtcaaacaattcatctgttagaccacttcacgcgttggttaaaatatcatagaagtcacaatcctctataaagaaaggacggcgtttcctattaggaacataataacagttgattcatccttcaatccttcgttctctatctgtacagtcatgctgagttttttacctttttctattcaggagctgaagtagcaatgtactgtgcaaaacgatttcatactatgcttcttgaggatgtagactatatcaacaatctgcccaatgcaattacgtctgtatgcttcaggttattttctacataattatttcatgtactctacatattttgtgcactcatgtttctcaatagtggaaaacggaaggacaagtgttcataattgcaatcattttcttgaaaatatagtaccatttgctggattagcaaacatgaaaatatgtaatcacctgccttcttaattacagacttgatgatgatttgcaacgatcaaatgaatggagggagtcacttaatccctgtgctaatcgcaattgtctcactaacatttgtgctaatct

SEQ ID NO: 44289 - DNA, 660 bp, Oryza sativa
tagttcaccaccatgtgtagttatgaatgtttttacgtggtgaagatttttgaattcttattttgagttaaatgttatgtccttggagaggctgaatctactgaaaagagagacatctgtcattccctgcactagctggggttttatagtattcagacaattatttaatttgatggtttggtatctgacaggcttaataagttggaaatgactgcaacgaccactggtcaccttatatatctgacttatactgcaagatcattcttcaagaaccatctcactaaatgaaacatttacacctgtaggaattgtgctaagatgtatcagtgttaatattgataaatgacagcaatctaccatatattatcacaatctgatatacgtttcccattggcaatgctatgtctcttccttttgtttcttctacagttttattcatattcacatagtaaacttaaatacatttttttttctctttcagggatggcatgagaaataacaatgttgttcagtttgtgcgtcaggaattacgtccggtgagtccttcctatttttctctacatatcatgaagtaatgcattaaaaaaacacatggcttttgctttgaaattatgttagcaggctggttctgtgatgagaacacgaagtgtagtagttata

SEQ ID NO: 44290 - DNA, 622 bp, Oryza sativa
attcctgcagccctgcaaaacttaacccgtatattattatccccttgtattcccttgcattaattatgcatctccggtgtggcttgctgagtactgtggttgtactcattcttgctcaatctttcccctcgtcagtaagagaagctttggagaagatgtcttaggtggagtcctggcttataccccagttgagcgcctgtgaagatggagccgtaggcccgctagtccgctgctgtttatttttgtttgtcaggccttaagtgcctttgtaataatgtaaatattatcgatataataaagatgtgtcttttatatcatgtttgtatggtgtaccccggcttttcctgggacggggattaatacactagcgttcgggaaaaggcaattttctcggtcgcgacagcaatcaagataaatattataaaaaatatgatataacatctgtagcccccgactcactactcaatggaagaccaattggtgtagtgaggcagaggaaaaggaaaaatatcatatagagaataaaataaatgatgacttacctttgtaatattccccttggtgatggcagaagtggccaatgtgggaacaaagtcgtccatcaataacaatgaagacacca

SEQ ID NO: 44291 - DNA, 647 bp, Oryza sativa
caaatcgagacgccgccgccacctcccatcacgtacgatccccacccgccgtcgacgacctcgaaatcccaatcgctgcgccgcgaattagtcgaagctgcagtactgcatcgccaagctcatggcggctgagggcggcagcgcgttcgctgggcagaaggtgccgctcatcgacgccagcatggctctcaagatggaggagacgtgccccaccccggaggaggtgaagcatctctcgccggccgacgagcgcctcgcggcgaaggagtactccgacggcgagctcaacaagtcccacgccgaggtctgccgtgaagctgacaagaatagcgccgcctacctgctcgccaagcgggccaagctccaggctctgatcaaggaagaatgggctaagattgacttcagccgcgtccatgtcggtgactgggacgaagaagcaggctgctacaagtagctagcccacccagctctgctgctggaacattggacactggccttattctggatggatggatgattcgcctggcccttttttctctaattagctctactagtattagttagtatcagttatgtctagctgttcgatccatcgttcgatttgtgatgtttggtactagttactaatcaatgggtatctatgttat

SEQ ID NO: 44292 - DNA, 690 bp, Oryza sativa
attcctgcagcccttcagatccaacatgtccagtctaaagataaatcctggtaaaaccttgcaagttggaatgctatatgagatttgaagaggtgaccaattgtggatgcataaatgtgaagtgttagctagaatgctagattgctgaaattggcagacagacaagtttttcttgattataaatgtcacagaattgtttggatgtgacccatattttcttagcatgcaaaccatctgcaataattgtcctgtgagtagatgaccaagttatatacacttttgggataattttattagtgggatgcaattctctttttttctcccctaatatttcacactctaaactgcaccaacttgtaggctggttagtgaatggtaaagaaaaaatgttgcacagtgtgcaatttatgtacacataccattctcatttattttccagttgtattttgataagatggttatctaaatcatattctttggtgaaagtgtaaacctccttgtaaaacaatatagatcttaatgttgcaatgctccactataggcatcactgtcataatcatgttccagtgaagatgcactgtcataatcatgttccagggaagatgtatgaattttcttagcctattatttagttcctacagaaaactagttttccacaaatggtaagagttctgctctggttattgatgt

SEQ ID NO: 44293 - DNA, 739 bp, Oryza sativa
attttcaagtcaagatttgaatactttcaacttaaatttaaaaattttcaactcatattttgaagcttccaaatcttgattttgataattttcaagtccgatttgaaaaaattcaagtcaagatttaaaaactttcaactcaaatttaaaaactttcaactaaagatttgaaaactgtcaactaaagatttgaaaactttcaacttagatttaaaatctttcgtattagatacaaaaacattcaactcaaatttgaaaaactttcatctcaaatcttaaaaactttcaactaaagagttgaaaaatctcaactcagaattaaaaactttcatctcagattcaaaaacgttcaactcaaatttgaaaactttcatctcaaaacttaaaaactttcgactcaaatcttaaaaactttcaactcaaattcaaaactttcagcagaaattagagatgaaagattcaacttctaaataaaaaatcgctgaaaaaggggaaaaagaaacgggaaaaacgcgtacgttagcttttccgtgaaaaaaaatatggacgtggacgccatccgcacgcactagcgctgtgggccttatgggcctaaaacgcacgccgcaacacacacgcgaattagctatcgccgttgcaataccgtgttgattttctatgggtttaggactgcttatccatgatggattcatgacttttgggtaaccacctttagaagaggcagtgagacctattagta

SEQ ID NO: 44294 - DNA, 654 bp, Oryza sativa
aattcctgcagcccatcttattccttctttctcccgtcttctttcctcctccgatgccggccaagcccttctcgcttcttcttccttctttccgtcctcgccgccccgcgtagctgggcgaccctgtcaagcagccatcgaccaattgcagcacctgggagcccgccgtcttctgctccaaggagtctggcagcatcactgagctagcccttttctacctccccgacgacgccgcacgcgtgccgtcggtgctcagcgagctgacggagccacgcctcccgccagcccgctcctggccaccgcctcgatggcggcagcaccgagacaaccgttgcccgccaccgcgccttccaccgtcacccgcgctagatctgatgcgacattgtcggatctgcccgcgtggggcggagcggcggctagatccgcgcagaaggaaggcagtggaggaggaggtggagccgccgcacctccctctcacccgccgcgcctcccaccatcgcccgtgccagatccgcagcaccgccgccggatccgcacatgtagggcggagtggcagctagatctgcgcaggaggaaagcggtggaagaagaggtggagccatcgcgcctcccgcccggccactcccgggcacctcctcgtcggtggcggcaggg

SEQ ID NO: 44295 - DNA, 629 bp, Oryza sativa
aggttgtgacgtggcatatctctctgccgttcatcaactttgatccaacggctgtaaatggatatgactgcttaacttgcagtcactaactaactgcacttgatattgattccagttcatgggttcatgggaagaatctactgtctccgtcaaaaaaaaataatgaacctaaaatttgatctaacatatcatagtacaacgaatctagacagtactataatgtgtcacatccagtactccctcagtctatgaaaactaactagtatcagatatgacatatcctagtattatgaatctgaacgtatatatctctagacttatagaactagaatatatcaaatatgtcacgtatggtcatagattcgtttattatgaaacgtagggagtatagtagagtgtcgtttttcttgatctgacactaattaatacggagcaagtaccggtgtcagcttttggaacgacaatatatctttctccctgatatatctttctccatttactgtagattgtacagtgcaccgatactaataactattattactccgagcatgtctaaattcgtagttcttgaataagtcatatgttactatattttagaacgggggagtacccgttatgaacaggctctg

SEQ ID NO: 44296 - DNA, 1266 bp, Oryza sativa
ttgctcttgggtgggtttgtcgattgatatcctttgaaggtgaatttatgttagttgcgaaatgcaatcattttcttattgtaagtccgaaaagaaggcaaaatttagatactaattttgtactacaactataatattgttatcgccaacaaactccttgatcgcttaaagcaatcaatgagattggtaacgacaacaatattacaatccaccaaccctgaccatttcaaactacctaattaagttccttaattatcaaagaatgacagatttcgaagtgcatggaaaattttggcgtctaggtcggttccgtccatggactaccctgaccaatccaacaaaatttcccatgcagttcgtattctgtgatggcttgataacataggaactacattaaaagtacggccaatctatcaattcatccatttcagctaaatttcaaaccctaaacctaattaagttccttaattatcaaagaatgacagatttcgaagtgcatggaaaatttcggtgtctaggtcggttccgtccatggactaccctgaccaatccaacaaaattccccatgcacttcgtattctgtgatggtttgatatcacatataacatctcacatctcaataacccctaagtcccaaagtttacatatctcaaagtgcacatatgaaatatgaactacatctcacatatgaactacttatggacaaagttcatggcaatgtaaatcagatttcatttagaacatatcagatttcagaatttcagagtatatgaaaatttcacccccaattcctgcattcagaatttcacccaaaattgcattctctcatatttcaaacactcattctctcagatactacaacatttcattgcaaaaccatatatatagccatacatcactggatttcagaatttaaatcacacttgcaacaatctgaatttatatggaaaaaagagcacgatgatatatatgcagtttcagtgcatcagtcaaacaaaacagcaaataaaatctatccaaattcatccatccatcaaccaattcatattgcacaatctgaacttatatgaaaaaaaaatagcaacaatccacaagtttcaaactagctacaatctgaacttatatgacaaaaaatagcaaaatttcatatgcagtttcagttcataattccatccaaaagttcatccaaaattttgaattgggctagctatagatatgacatctcaataatccctaagtcccaactacatctcaacagcacaactg

SEQ ID NO: 44297 - DNA, 695 bp, Oryza sativa
taacgtcacagataaaaaacgcaaacgcacggaagatgtagcacttcacccgagagtattgcaaggtattgatttccacagggaacgtgtgtgtcagctcttcttcaggttcatccaaggacacgaagctaaggtattttaaggtagagaggatttactagcgagagacaatgtctacggaaagcccaatttaatcctaacgcggtacttcgggcgctggccagctcgctgctctagatatggctctacaacgtacccggacagggaggatttcaatgtacttaaggactgtcaccacctctacacccacctcaaacctactatgagatacgaagcaaacaacggaaattaactgtagcgcccgttccgtcgtggcgcctaacgggaaaattatctcttaaaaaccctaattgcgaaatttgtttctttgattgttgtctagtgtccgtgccatctcaagatctcaatccccgatctatcgtcgagttcaattccgaatccaattccttccaaatcgaatccctccgcaaaagtctagtttgcctcccccgagttcgatgggccgaattccgctcggcccatctcttccccggccctctctctcccgggctctctctctctctctctctctctctccccctctcccccggccctctccccttcccggcgcgctccgctctccctccccccccgct

SEQ ID NO: 44298 - DNA, 1823 bp, Oryza sativa
taggcctagaggtgccttgggaatgtggagatgcttaagcatccaaagagcatctcttctctcctattgacaagtgtccatgacagtttcttcaggtataatgctcacaaccgtcattgggaggacgttatccactcagcgcaacttgggcttgggccagcggcctccgtcagggttcggctaaacccgagacggcttcgttggctccggttttcggcttagacactcattttgggcccctcattctattgctatggatgtttggcccatttggaggtgtttaattgggtctttgggtccaaacctccataagtttggatataagtttgattctctttttccttcatgtattttcttctcaacttaggtagtttgccacctgcatacgaatgtacaccaacactcgtggaaattgttagaaataaaccctaccactatgttggatgttttatatttatggtcttatgtagtagtgacggcgagaatttggtacttaacagccgtccactcttagagtttatgcaggtggcatttgacctgcaattgatgtcagccaaagcaaggcatgtttcgttgattggggccacctctgtacctgggcaagatatagtggtgtcttcaccatcagcaatatcacgtctttcccatggagtaaaaccaaatttgtttctcaaagtgcaacaacaatgcaaagtacatgcaacatcctgcttgatcaaatctacacttctgtggtcgtttcagctcaagagtatttttgtaaagaaacttccatagttgatccaggtgggatttgacctgcaattggtgtcagccaaaataaggcttgtttttatcggagtcttctgtgcctgggcaagagcctcagagtgctttatagaaggtaatagctctaggtggctccgcttttgaggatgtggcaactaaagatcaagtaatttagtaagttctttcctcgtgtccctttgactttctggtcccttagtgttgatggtatgctcatttcttatgaaatgtgaataaatgtgcatatgatgttgaacctgtgcataacattcaacaaccttttggtgcttgattaaataaattcaatcctccatttcacatcatatataatacatttcgggtttcatgcatggatccattgatgtgcttcatatatgtatctaagatcatatgaatgttagcgaatttagacgagggatggagagatcaaaacgtcttatgatgtggaagggaaggtgtagaaatttacaatctttagtgggtgtgggattgttgttgtgtgctggaccatttggaaagcaaggaataatgcccactttagagagagttttcctgctaatctcattgaattgatcttttctctctttccatggatttctgaaatagccaaactggaggccaggaaagaaagacttcgacgggttcccaaactactagaacaagttgatggcaggaagactgaaaagctatgaattggatattgtcgtattgaagattttggagcttggaagacttggtatggagagttgtagacttatcagactgaatacgtgttctgatttgaatcaggctctatgctctgtctgcctttgttaaagattttggtgcaacttgatgtaattccctgctttcttaaactattttttgaggccttgtatgccattgtggtgggatagcatcacaatggcaacaagaatttgcctgctgctataacttgtttagcttggtagatgacatcactatttatgcgtggtaatagttggatctttctgcagaattttccagagttcgagcaactcttgtgggctgcaggaatt

SEQ ID NO: 44299 - DNA, 676 bp, Oryza sativa
attcctgcagcctgctgccaccgctctccttcttcccttgcatcagccacggaggagccgtggacatgccctcgaggtgtcgttgctggaggtgctcaaggaggacttcgtggtaggaaggagccggcgtgggcttgggcatgggcacaatgacgacggtgggggaagcggatgcacccgcacgtggtggttgtgagtacagtgagaaggagacaaaggcaaaggagagaggacgggcgggatagtaggaggcaccgcccatcgatataggaggaggatggagctagcatgggcttggacatgagtgcggtgatggtggcagtggaagcagatacccctaccactgtggttgtgtggagcagacggaggtggaggcgaaggtgaggggacacgcgggactgcaggaggcaccgtctagcagtgccagcattgccataggaggaggatggagacagtgtggacttgggcgcggcatgatgacaacgacaaagatttggccgtagaagaggagagagaggagaagatgagaggaagagtgagaggaggaggtggtgaggaataaggtgatggagccaatgatatatgggatctatcgttagattggagagtgtaatgaagagtctatgcagtgaaaggcaaatttgactatcttttttttggcaatccggccaaatgg

SEQ ID NO: 44300 - DNA, 655 bp, Oryza sativa
attttagagcttttgaaatgcaagtatgttaaatcatcatcccacataattacgtaatcttatgttatctatatattttacactttgtttttacctattgatattatactaaactcccgcagcaacgcgcggggttttacctacttctttcaatggtagatcatatatctattgataataagacatctatgatgactttatcaatttgaagatatatcaagaatgactggtcggaagcaattctacttgtaataaagattttaattactatgagtattgcataataaaaagggtatatgaagagatattttaaggacgatctaatttgcagtaaacattttattatgtaagtaacgtgttttagttattacaaatttgggtgtgttttagcacatccgtgttttcacatgcaaaatctggtcatatatttgtaccttttctactggctgggagtctaggactgctgattgatgatctaatgcatttgaaacctactaatgtgactcctgtattaacaaacagtactaatgacgaaagagctccgtgactggagcagttgcagctagagctagctttcgaaagcctagcaaacctagctagcatgcgtgcgttattctctttattctctttagtactgatctctgctatagctttg

SEQ ID NO: 44301 - DNA, 1112 bp, Oryza sativa
tgaaaagaatagaggtaccagagccgggtcgtggcccgcacagaaaaatcaattttcgtgtgcaggtcatttaacaggccgctcgaccgtctcccctcctgacgctcgcgcgaggcggccgggagcggcagcgccctccccatgcccggatccggcggcggctgctgccccttgcccggatctggcggcggcggcagtcccccgtccggatttggcggcggtggcggtggggtgcccggatcttgggttagggtttccaattatttgaaattttatttttttttcggattttgattttcctgtgcgagcggcataagcggattttcgcgtgcgggtgcgccacccgcacgagaaaaacgtgattttttcagacggggcgttccagacaggcgtaaaaactgcacgcaaaaatcaaaataaccacacgcaaaaatagctattgtagtggtgagaggatggttatgattaatttgttggtccgacgggaaatggtccctggctgccgtgtgatactgcatatgtggcaagtggtgaaggaaatatttttaggcccgagcaaatttaaatatacctactatttgatacaagatttttaactttaaattaaattcaattgtgtatttgacggtgagccggacagctccttgtggtagccggacggtagctccgcccctatgtgtggcatattccaccaatagacactacaagaaactttaataccacaagatttatttctatggtataacaattttaaaattgttgtaatacataactattgccaagatgctgatgcaatgatttttttttctggcaaaaggctagttccgtggtggagttaactactcctacgcaacacttcctctgaattttttatatacacggttgacttttggacatattcatcttactatatgtaattgttatttattttatacttctatactactttaaggctgtgttcgggactccccgacacccaaaacaaagcacatattattgtatgattaattaaatatttgctaatttttttaaaaaataaattaatatgattttttaagtaactttcatatagaatttttttttaaaaaaacacaccgtttagcagtttaaaa

SEQ ID NO: 44302 - DNA, 605 bp, Oryza sativa
tgagaatttggtcgtgagctcctgctgttgaccctgggagatacaaaaatgtgctgccttcgttggatgattaggatggttgggaacttggaatccccatttcttgggagtctttggactggataatccattcaatcccaggtcaaacaaagcagaaagaatatgataagtagttaagtactagctgtagaagaaaacctgatgatttcttgattggaaatgctcaattatacaagcctgaagctagcatgtaccagcaacaccggacagtgaggttggttagccgtggtggtggagtggagctcttggcaatggctggatgccaaagctctcacctcagccgcgcctccaatgccctcttcaactcgtcgccaagctcatccgacgaaggcttcgtggcgttctcggctgcggccatgtccttgccactgccccggcgatccggcttcaccggagatgagtagtggtatggctgtgctggttgtggcggcgccggcggcgtcctccaggtgtcgggtgcgccggcggtggacaccgccgccctgcggctcccgacctcggcgcgcaggtcctccacggcgcggcgcagcatcccgctctccgcg

SEQ ID NO: 44303 - DNA, 1686 bp, Oryza sativa
ccaaggattacaaaggtgttgatgctcaagtgatatcattacacctaacaataccaagaatgacaaagtgaagatattgaagatgtgtgatacgaaatggctattatggcaagacggtgaagggcaagcgatgcttggtcacgatggaccatgcggcggtgaagggcaagcaaggggctcggcgccgaagaaccaaatccggtggtgaagggcgagtgacggctttgtcatgatgaaccgtgcgagaccatttgaagctacaagtaaccgcatcaatcatttgaagaatatatggtgaaacggtatcggcattggcgtccctcaagacaatgaaagaaagatgaaaaaaagtcattcctaatggtataattatcttcttgtttacatttgagtttaggaatgccgtactattaagagggatgcaacgtcgaggtgtttgtgtatgtctcggtgttcaaagtgacctatcatagtgctaccttgagagaaacccaagctataacctatcatttgagtggttttagaccttgtttttggttgagttgggtagtcctctgagtgagctttccatagagtccaagatcatcaaaaatggactcccgagcgaaaagttatagtcgtttttactctgtgcttttcggaaagtccaaaaaattatcgaaaactccgaaaagttttcggataaatccgaaatttttcggatattccgaaattggctgcgaatctaagatttgcttctatagattttcggacttgtccgaaaatgcttttcggaaaatccaaaaattacagtcttggcctccaacggctagtttttgagaagctcgggtatataaactcctccaccccacctttgagtggctgctgctcttggggagtattagacacatccaaagctaaatagccatccccatttccctacctctgtggtgcctctttgtgagggggatttgagaaggggagatagttggattgtgagagtgaggagttgagagctagtgagcttcactccatcctttgtagcgcctctttgtgagagggatttgagaaggggaaagagttggattgagtgattgagaaattgagagctagtgagcttcactccatactttgagcactcgagttcatagcaagcaaatcttcgattgtgtttgttactcttggggactaaggtctcctagacggctaggcgtcgccggtgagcacctaaggttgtggtgtgccacggaaagtttgtgaaggcttcgattttgcctccgcaagggaagaaatcaagagtgaaaccgaggagtgcatttgtgcaacctcgtgaggaaagggttgaaataggcctggcccttgtggctcctcaatggagacgtaggattcgtggatccgaacttcgggaaacaaatcacgcgtctcctctcttggtttgcccatttgtgcagtctctcatattgtacttgagctagtttttacccgatctacttgcatgcttaattgatttagttggtgaccttatatcttgtttagatgccttatttgtcaccttttgatttatatacattttgtttatttgagctagaagttcatagctagtgttttcttccattatccgccgaacttttcggttgagaccggaacttccaatctcatattggaagttcctatttgaaccgaaagttctcatcgggctgcaggaat

SEQ ID NO: 44304 - DNA, 1202 bp, Oryza sativa
taagactagatattcactcaacattgtaagtatattgtcccttatgtttggtgattaggggatttgagatagttgactaccatgttagaagtggtgtgagttgaagtcttgaagaatagatttgttaagaaaaaatctagaatcaagtatcaggtcaaattaagtatatggatatatgatatacctatatatactaattttgtttcatagtattttgaatattctcgggaatacccaagaaccccttacatccgccagtagctcttacaagaagtatggttgtatcttgctgggtgaccttgtagaggttgatgaggatgtcctcgacgcactcttataattggggactcggagtaccacagatgtgcggcgactttgatggcctcatggcctccatgcggttctagctctccgctggtactatttcctatgtttcatatgataatactataaggcgttttgggttttgaatagattcatacattgatccacatatatgtttcatatatgtgcataaatttatatggatgttagtgaatctacaagagagatgaagaggccaaaacatcttgtaatgtgagggagtacttatcaagctggattcataagttgggtaggttatttgatagggaggcgtgcgagtgcatcgatggcgcagccgctgctgctggtggctgcttcgggttcacgactccacatgatgcttgagaagggagagatctcgcagtggagtacatgcgagggtgttaagttcggcacggtggcatcaaggagggagccgcctaaacgatgaccccgctagcacggcggatgttactcctcctcgtagaggagagagaggtaagtgtgcaaaaagagaggcacactgaaatgtgggtccaatatattcactaacattcatatgaatttggatacatgtaagaaacatatacatgaatctattcaaatatcaaaacatcttataatgtaaaagagataaagtaatgcttataatgccgaagtctatacggattcgcgtgaaatagcctttccacgtggtgttgtgcaatttcagctttcgtctctctcccctaaccgtcggattgcggatggcgtaactcaactaattaatatgtttcttataatgcaaccagctcatctgggtttaagaactaggtttaatatgaatgcttggattaattgttatcctctcttagtataaa

SEQ ID NO: 44305 - DNA, 1102 bp, Oryza sativa
tttgatatgatttaaatcagctttaatttgcgatggataacaacacgcatgctggtaatggtcaacctctccgtgtgggaggagagccgcaagactgcttgcaatgcaaaacaagaggtttggaaacggacagtttggtggcaaaatttagaaggaatattgtactgctgcccaatatatgatgttaacaagcacgtttgagaaaaggcaagtgcacagtacgtacgtacgtacgtacatacaatcaatcaatatgtgctttaattttgtgccttttgcccttgtttgtcgctgcggagaagtgaagccgcgacgatctttcacaagatggatgtgtagcagctagctagctagctatgtggtatagggcatgtgccacactgtgtttaataattttgatattattacaaaggatacaaccgaaagtacaagtatgctgacgtactgacgttaaccagtgtgatcttctattttgccccaatttgatgttgccattttattttggtagaactgtataggatacgtaaaatgtgacttttaccctattactttttatgatatattcttagtgggtcctatcattccaccaaccctcgagacctgcatcccatccatatactatggccattttaattttttaatctattatcatgattcaaaattaaagaattgattgcacgtagaatggagatagtacgtattccccggcaccatggagatttcaacttgctcatctattactttggctttgagtttccttcacgcacctcgtgttccccatcaccatcattggcatcggctccgatgttgtaagctcatgtccgtgacttcgcgggcatgtcaaggctgagctaatatacgatgacaatgattggctagctcaggtcgtggtcgaggtcccgtctgcaagatccagtgattgagacgatgggagtgtcatctgtctagtggcaaccttcataaccattgtcaatatccttgtcgggtcagctccaatggttgtggcggtggttatcttttgcttcggttcgatgttggttgttggtggtgagtgcacgaaattcgatcagcataacaattagccgctgatttcggagatttt

SEQ ID NO: 44306 - DNA, 830 bp, Oryza sativa
aggtgttgcatttacttcgcaatgttgttgcactttgataaacaaatttgcgatttactccatggggaagaggtgttgttgctaatggtgaagacaccattgtatctgctattaatggtaaggatccaacctccagtctttgttattagtatgaatattgagggaagatgagttaagagctgtaatgaatttatctgttgatggcagtgaatgtgtaatcttttgattgactgccgatgatgatgaagccttcctcttattcatcaaatgttcggtaagaatcctcttattcttcaaatggtcagcaaaagtagacatatctagcaccactttcctcttatctatagtattcaaccgatcaagcatacccctttcctcctgttgccagcgacaaaccaccggagacaaggaggaagagagatatggggagaggagactggaggagttttcacccgagcgtgttaacgagagcttgagaaagatatgtaactagctagcaagcccgtgaacctggttggatcttgtttagagtacttcattaagtacttttcacatatgacatatcaaatcaatattcatgtgagataagcttcttcggtggataagctttggcagttctgcagagttaggtcctgcggcaaacttggaatgatggtgggacaatagcaagctcgtttgctttgtgggggtgatgggtgtcatgatatatggcaatgacaacattgtagcgtccatttttgacgagataagctatggtagctcggcgagtgtggtgctctgtggcgatgatggcatggtgccgacgtacttgttcgtgttgtgatgatgta

SEQ ID NO: 44307 - DNA, 1409 bp, Oryza sativa
ttttgaagctaaagacgaaataaattctattatctaaaaaaaatacatagtaattgatgttgatcgccatggcattccctctatgttttcatgggatttcatttcgtatagttgtgaaaggtatgcaacgtgtaatatatgaacttaatttttttacgaattccctttgacactgacatagtggtgattgataattttttctatagatcaatcacatttgcaactgttagattaacattcaacaactaacaataatatttggtattatatttatgtataccccttcgtggatcctcctaggattagaagtagatgttctaatccacaaaacaggtcagttaggattcctcgtggctttcctttttttttcatagtcctcaatagatcatctcttaataatctattttgccacacctctattacacatgtgacatgccaacttgcaaagcaatgttggtacttttgggtgtcgttcactcgttcccaatattatttatctcgactccttttgtttcctaggtctagctagctagctaggttttcttttttgaaattgaacacactttcagctagtatacatccgttctgttttactccatccattctaatataagtgcagttgtgggtttctgtgtccaatgtttaaccgttcgtcttatttaaaacatttatgaaaaaattaaaaaaattattcacacataaaatgctattcatattttatcatctaataacaataataatatcaatcattcaataagatgaacgatcaaataccagatatgtatggaaactcacaactgcacttatattgggacggaggtagtatgttgtacgaaggcattgacatactagtttcttaataatgtgtttcttaactataagaactagaggttacttaactatgtatttataaaaattattaaaactataaatgtatactctataatcgttggccgtgtgcctatggatagaggccagagatgtaacccatttctattatctaaaaaaaatgaagaatctacccgtgcaaacacaccactattttacgtatcaaatctcaaaattactccccctgaagtggtccaagtaaaaaaaatgtcaacaatatgtttttatatattaacaacaatttgcgatgtacttatatatcataatttaactgtatttatactcattctaggacatcacattttaagtatatatataatctatcactactaatgctagctagcttaaagtaattaagcgtgtggccatgcgcggcaacgtgtgcttaattaattatatgcctatatatagttaaaattaaagtactacacatatggaccacttcctaagagcgcaattagttcattttggttatgcgccctacgcacgcatgtgcttattaattaggccttgcactgttg

SEQ ID NO: 44308 - DNA, 609 bp, Oryza sativa
ttgagtccattcaagtctcagcaaattcataaatatccctagaatccaattaaaatggttttgtttcctgtttcagtagacttatagcatgtttttcttgtgtgcttcgtttgttgcttagattttgaccgtttcgtcgctccgcggtttctcgaagacgttgttgtggtctcatcagtgcaagagcaaggcaagtcatgcattaaattgatcatattgtacccaatttacaaatgtcccgcattttctattaaacgttgcattcttttacaatatcatgtgggatgggtcctattactcagctatatgttgttacccttacgccattgataacttgggttttaaaatgactagatgttggtttaggacatgcttagccatacttagttcaacaagtatacaaaaggtggatcatattaatgcatagactttgattattggcatagatttggattagtgccaccataatggtgttagttaattaaaatactctacatggtgggctgtgggtgcacggttttgctagtcgtgcccagagtgtagccttagcttattactttcctcccctttgtttcgcccttaactgttgtaactatgctcaatcacctt

SEQ ID NO: 44309 - DNA, 659 bp, Oryza sativa
aatctatttattatattattaaaacaaccttcaaaacaggcatcatgttcgctgtggaggctagaaatttcaacattaatcggagaaaaaaaagaagagtccaagtaaaaatacaatctaaaaatagctgaaattcagaattaaaagtaagcaatattgaaagagtagtccatattggaccgtaatatgagattaatcaaaattcggaataaaaataaaataaaatccgaatttagaaaaaaaagagtccatttaggaaaacaatttaaaaataactgaaattcggaattaaaaataaggaatattgaaagatgagtccatacaagaatccaatacgagattaatcaaaatttagaataaaaaataaaaattagaaaaaagaaaataatagaagagttcaagtatgaatacaatttaaaattaactgaaatttgtaattaaatataagcaatattgaaattcgtaattaaatataagcaatattgaaataagagtacatataataacccaatagtacattaattaaaattcagaataaaaaataaaataaaatacgaaattaggcaaattaaaaagagagttaaagtaggaatacaattttgaaacaactgaaattaaaaaaaataaaaaaaatcaaaacaacacaatacgaaaaataa

SEQ ID NO: 44310 - DNA, 655 bp, Oryza sativa
atacaagaatagagggcatttatcaaatatagacaataaaataaaaacataccttcatcatctccatgttctaaatgtaaagagactaaacaagatatggctcaaacaaaacattagtctcatatgcttatgtaatcacatggaaatattatatatgaatatatcaatatgtgcacggatagaaagagtgatacatatagcttgatctccatgcatttcatccttgtgatttaggtataccatcaatgaacgtttttctctcaactcatataaagtccagaaatcacctctcacatattccactttcatatccatatgagactagtagataaagaaatgcttataacaatgttagtctcatgtaattggattcgtcattaatcgtcaaaaccaaattaatggcacttgaactttcaaaaggaaccgtccatggtggcatcgggtgcatttagggatgctaaagtgcccaacattttagcctacaaaatattgatgggtataaaatggggtgggctaaatttctatttattttgaactaaaaatatatgagggatagatagggttgtgaaagaacccatgggcattgacccattatcacccccgtgcatcaaggggtgcaagttgagctgcgccatcaacatcacggcgaggtgac

SEQ ID NO: 44311 - DNA, 562 bp, Oryza sativa
attcctgcagcccaactgtttgaaaagtcgaagattgaataatgatgatttttggactttcaagtttaggggcggggcagtagaggtaaatttatcaatttactactaggtctggtgatatggtcttaggtgatgttgatccatggtggcgcaatcgatcgattatttgaggcgacatgagtatagagctgggacttgggccgtgctttcttgggccggcccaaggcacgatggcccagcacgagggaaagcacgccgagcacggcacggctatgggccgggccggcacggcccgtagttgggccgtgcctgggccgtaagttgaggcacgctgggcggcacggcacggcacggccattgggccgtgcctgggtcagcccagcacgaaaaatgcccgaaggcccaaggctggcccagcacgataaatggccgaaagtcacgagcgcaggagagcccgaagtcgccgcgagcgcgaggagatcacgagaccgcaggagcgccgaacgcgtgcgtgcgagtggcgaccccgtgattaatttcttactcttctggtttgaatgga

SEQ ID NO: 44312 - DNA, 646 bp, Oryza sativa
ttcctgcagccctccattactaacgccgattcaagtggccaccgtaccgagcaagcaaccgccgcctgccactctaatatctattataggcttgctccaattcagtgatgaacatatcagaattttgagaagaacattgtaaagttcagtaaagtttcttagcttttttcttagtgaaagcgagtagaaaagacagaaggagatcagggagaagagcggcgaaagggaagtaaaagatcatggccgtgttgatcaggaagcttgttctgtcactgatcgtgatggtgatggtgttcttggtcgtgtctggcaccgcggcggcgcggccattggtgggacaggaatggaccggagaagacaccgccggcgacgactccgtcgtcgtcaggtttctccggcagctgtatctgcacaagcttgctggtccaggtcactcctgcaagacctacagcccaaaccgtggatgctgataggatcgatggtgatttggtgaagatggcttggaagctagctagtagctaatttgtaacacagacatatatacagcaattctttttttctttttgctaatatatacaacagttcaatttgtagatttattttgcttggaaactagagatattatttttccccggtgatttttttt

SEQ ID NO: 44313 - DNA, 1721 bp, Oryza sativa
attcgctccaaaggagatcaaacatagggcctcttatttaacgtagaagttccactagacttttgcaggaaccaattcaattttgcgaggaatcaagagcataacatctcattctgcgataggcaactggccaagttgaactatctattggccaagtagtgactgaaactgtagcgggatttacgctgggctagaagaattctgcaaatggaaagcccaaaccgacagaagcatagacccaagtgacgaagacctccgatgagaccccgatccaggcaacgttgactttgacttggaatggacagttcaaattttgatcaagaattcggttctgattttatccaaaccccctatcttgttccctgtgaatccaatccatcacccttttttttttttgtcatgtcgatccgttatgtatagttttctagcttagttgcacatcaatatcatcatgcactttaacttatctactcagcatagcatggtcttccccatcatcagaacaaatgctgctaaaatgctgtcctgccaaattccgtttccttcagccaatcagcaaaaagaaactcccaattccacagtgagttccatgaaggttataatgaattcacaaaattcaaccagacaattcatagtgccaagtaacaatgcaggcctactacaagtccaccactgatatgtcatccaaagaatcgatcaagtgtgttaccatcaatcaaaatcagcaaaatcagagctttacctcaagaccgagcaaaaaatcaagcgacgttttgaacagcgacaccgactaatggcaggaccggccatatctatggctctctctgctatgcattaccactacggcgacctgttagaacagtctttggttttcagaaaagtatgagatgtgaccaggtctctggtctctgctcgatcgatcgatcgatcggtagttccagtaaaatgtcactgtccgattacctcagtatcgttttgggtggtgttgaacgccatagaattatgctagtagctgctcgcggttggagtaagtgaagtgtccggcccttttttctaacctcacctgcttgtcctctgtgtgtgcagtgtgttgttctaattgcttctgagtttgcaatagaattttataagtcatgtcgctaggatggcgacggtagatcgatcgatgccgtgccgtgacgattcagccgtcaagatatatcggttttatgcattgtccttgttctttactactattgtgtagtaattgatcaaagaacgagaccagtcagtgctgaatggtgcgcaaatgtcacttgtatgactaggattctgcttagtctagtctagattggtacagttatcctagaataaaatgcgtgcgtgtgtcctcttaggttgaactggtaagctgcagaatgtgaaaaaaagaactgaaaattagcttgtgaaaacattgttggtcagtcgtaattagcttgtgaaaattagtaactttgacggtgaaaattaggcggttcaggtgaaagtgacgcgagcctggaatgtacttactagctagtgtggcaccacctatcagctcatgaatcacgaagacatgatgcaagtgaacaagaatgaccttcttttcggcgtctcctgatcgagtcctgaactttttgtttcttcagtgcatctcttgcagaacattgattattagattggcatgatgagttcgtgtttcttgcctaataaaagggtta

SEQ ID NO: 44314 - DNA, 4566 bp, Oryza sativa
ggcgctccgcgaacggcgaccgcccgagccgccggagcggctcctgcgcctgcgggtggtggagcagctcggagagcgacaccagcacccgcccgagctgctccgcggcccccgcgacggagcccgccgacgcggccgacgccaggcggcccaccagctccctcatcgtcgccacatcctcgtcaagctggaccaccagaggatggaaccggcacggcaggctcgccgaccggacgcggtaggcctcacccttcgcggccgtcgccgccttgggcgcggggaacgagatcgtgcggcggaagccgaccaccatactccaccacctccgtcactctttgatgggatcgatcaagcgaagggtaacctgtgcaacctgtgcgcggatggcgaaggggaggggggcgcgttttaaatgggaggggggaagtgggattcggggtggaagcgtggaacgctcgaggaaggcgtgggcggcggaagcggtcatggcctcatgggtcgtcacggcgcacggccgcgcgagagtacgtagtagacggtagtagaccgcgaccacaagttgtggggagagaacccaagaatggtgtgggtttctggaccggttctattcgattccaccgtgacgcaagtcgtgcttggcacgcatagcttttgtctgattttaatccttgtgcttttgggggtgctttgggcagctagtgtacttgtgttgggtttggtgctttaaactttttcgcgttccgtgacgggcggagcagatggggcctggagatagatatcataaaccccctgcctttggatgaaatctgatggagaagaatgattcgtcgattcgcatctaccgttgtactggactactggtgccttttcttccagaacagttgtggtgaacggaacacataccatttccatatttcacagaagagggggaaaattgctgttgtaccatcaccaaaacttcaagttcgtcaaaagatgatacttggtcacgatccaaagtaccactactttcggcgttacccaagatgccacaatgagctaatgacagaggtgaatgcactgatgtacggtggagcatgtcagtaatcgaagtgaatacactacttcactggtagtggagcagttgcgttgcaataataaaacaggaagtagtagtagttgcgttacgtatgtggataacacagattaatctatactatcaaacacgggagagatatttcactctaactcatcacgtggttaattacaacttgtaaccgagtaagcgactactcatgactgtgctagtcggagaaaaaacaactgtggggcagaaaagggaaattttattatccttgagaccttgagaatatattatagtagaagatattataattttttatgtatacatgcatcaaaaatttcagtgtaaaatttacatatctcgagatattttcttaagaacgataaatttaggtagaaatacatgccagtgcagtgtgtctagccgacacttgagaccatagcgcagtgtcttcatccttcgactgaattttaggtgcggtcactccaacgacgattcagactggaaccctatcaacaacaagacctctctatcaggggagttagtccagtccagtagtcaaaatcaacctcagccgcctctggctacgttcagtgcatcagcttgccttttcacgtgtcgttagaatggctatgcatggaaccttcacacggatatagctagatgcttcgaacgagagaaactgccatgcatccctcatgctcgatcgatcgtgcattcgtgctgcatggattggggcacatggacagcatgacacatctcacaagctgctagaagttggcaccaagctctcgctcatgcatgcttaatagtgacaaagctgaaggtttcttgtcaaaaagtacatcgagaaagaaaacctggcatgggttcggcatggttcaatggttgctgttcaagacaattaacacgtgatgccattttagataagtaggcacggcacggtgtaccaactttgttgatatgatgccacgcgggctaaagttctaatgttgctatcgacatccaagggagcccccaatttgatcagtagtacactactctactgtataaatctagtcaaatattcaatggtagccaaccagtacaacttcattttggaatcatattggactagctagctacctagctcaaccagacaagcgaggtgtagaaatattaattccactgtggattttagtagagagacaaacagacactcgtgcagatcgatcgtggaaggctaggtctcaaaatactgactgaatttttaggtgggcaaccatacttcagatttgcaagctgaaaaggaacggtgtgtgttaagtgaccgtgattgatttatatgaccagttggtcgatctctaccaagaaattctccgaatcaaaagggaggagctgatttggcccgttcccgcttgcgcctgcaaacatggcgcatttaagtagtatagttgattttgattcttttttaccaattgatttaggagccaattgatttaggagggagtttgttgtggccaggacttttgtggcgagcctgcttctctcgacctcacaaaagtatatgctttctccaagtggtctaattgaaagtcatggaattgatcaggactagtgggtagaactgtagaagcactagcatattagacaaaaataaatatgttgtttatatgcgtgacatgaatgtgtcgcttgttgtcaaaaaagaactaattgatgcttgctaggttgatctgtttgacatgcatgcatgccttcagaattagaatatcagaatatcctcgcagctttcatcatacaactgatatgatgtcatctctgaattatctaactatgaacattgggtggatggaagtagtccaagtaaactaattgataccgtctttttcttttggtgttttagtaaaacggttgaatggatcaggtcagagtttctaatgaccatgctcattgtactaatgtttactgaaaaataatttatgaagcaccgtactgttcattagttaggtatagaccttgagctatgcggtgtgccccattacctggtggagtggaacctgatcatgaccaaaactgcaagtgcaaaagcaaaagaattgcctgcgaaaaagaaaagagaaaaaggagatttgactgctgttgtaccctcacagctttcagcatagaagtgtaaaaaagatacgactggtgtgccctttgatgccaccttcttaaatgtatgtttaatgttttcatctgaaacaaaagtgtccaaaccctacaatgctgcttcatgtcgatgaactccagtaccataccatctcttttgattggttctagaagcagcctgttctgctctgttggcaagttgtattcctcatgttatctgatatgtcatgcttgagtcttttactcgggcaatatgatctaggtgaacgtatgtaatccacacctgagttgttaagcttatcttttgctactaggtgaagagaacggtacatcatggagctgatatcttctccttttatcagaggggacaaaacagaaattggaaccggagggagaaatggcaaaataaatgatcttatgccgacccaaactgtgccgtaagccggcccgtaacttcttttgctggatcataaactgcaacctactccactccaggccggtgtgtcctgtacttgtgtaggtttaacttgcaggtacttgctgtgactaccaagcgacaaccagttaatcaccggtaacatcagaccaaaatttaacgcaggcagacggtgatatataagctcagcaaaagcaaagaacattatggccaatgaggtacctgacaaaaacatctagaacactaatacacagcactagttagaattgcatacgtgcctgacagcaccagacgtcaaataccacgagtaaaattattgccacaactccaagtctccaatgtacattttcgacacaagtagagacggtttcgggtttcccaccaaagcttctatacaaaaccagctcactaggaatcaattatacctaatttgaaaaaaatggtggaactatactaatcagggaagcatcccccacaatccacagcaacttgcctttattagatctctgtaatagcttccccacgctgcacgtcctggtctcacgatgaagaactggaggccttaaaagacctttccatgctttattgtttccaccaaatattgttttctttcctacttaggctgtgtttagttcctgaaattgagaagaagtttggaaaaagttggtagtttaaaaaaaagttgggagtttatgtgtaggaaagttttggatataatgtgatgtgatggaaagttgggagttgggggggggggggggggaaagtttggtgtgatctcatggaaatggcagatctcatgcttctttcagaaaaaccaatccacagccacagatccccttatgtatgacaaaatgctacttcctccgtcccaaaatataacaacttctctatcaacattccattcccaaccaatcacaacccaccaccattcactttt

SEQ ID NO: 44315 - DNA, 980 bp, Oryza sativa
aggaagaccatggaagggtgtcaagccttgagtttttcacagcgcatcaccgagcaccgtctcacctccttctccacacgtgcctacaatcttcgcttccgcctccactttgcttccaagtcttctttgagagaggaggtaaaagagaccgaggaagggatgaagcgtgatatgtgggtctcacatagtcacataagttgttttagttttttttttcaaactggtactgacaggtggctcccattaatattattatcattatttttgcgtctagtgccacataagcgttatccaaaccactttaatttagaggtaaattgacttggttttaagagtttttttaggagcacatagaaataaaagttatttacatgccaactgaaagggaaaaaaagagaaaggagacagggaacggaaaggagtaaaacatctaaagcctatcttgccacaacatttgacgaccacatactcttagctactgaaagggtcaattagccctttactgaaagggtcaattaggcctagagggggggtgaataggctaatttaaaaacttaaatgaagcggaagcaggaattttcggaactaggctggaattttcggaacttccgaaaatgcacagagcagcgaacacaggataaaaactctagatctagaagtctataacagggcaaacaaggcacaaacggcaactagaccaatagcggcacaagcaagcaaagctagaggagagggatgaagaaatatcaccaagatatagctcacaaagttgatcccgatgttcaaatccttgaggggattctactatccgttgaggagctcactaagagctgggtcttagctaaccctttcctcgataggttgcactaagcactcctccttccactaagaggtatctcttcccttgcgaagatgagatctggccttcacaaacttctcccggccaatcacaagtagatcggtggctcaggggctgcagg

SEQ ID NO: 44316 - DNA, 1616 bp, Oryza sativa
atatcgaacgataacgtcgcagtccgcagcaaacacaagcatggtagttaatcattatatcagcttatcctagtgatgcaaaatccatgcctgacataatctggaatttacctgcattgatacctgacaaactcttgtataatactgcactcatatctgtgaagtaaaatttattagcgttggattccgccgttctggtatatttagaagcttcgaatccagaactgaccaccagttaaattattgccttccctatgttcttaggcacagcgccacagaatgtacactggagtgcttgcaagcatatgaaattatcagaaccagttcagatcatgaattttgtatgcttcactcacaaaaactccaaaacgaggattattgtatttgcgagagggtatggcaattgagggagatcttatttttaagaactcgagatgttgttaaaaaaaaactctagagcacttcgtcttgttggcaccttccttggttactctaggagatcgagtataactatagtaaaactggctacttggtagttgccccatgagacataaaaatcagacaatgttatacaattctttttgtacaactatcatcatacatttggccaaaattgacatacagtattatgttggagcatactaggtttttgtttagaccttataatttgctaggcaaaaaaggtgtacaatatcctaaagaaacaggagttggaattctcatcctacactagctgattctatcacttgatggacattctgtactgggtattccttgtctgactcacaatcatatggtctgtgtagacatggaactagtgtgtactcatcgcttcacccttatacatcattccttaagcatactgtactactatatgctatctcttcccttttcctttttctgaatctgaaaaactaaagccttcatctacctcttcctattaccctatacctagtcacctaggcctcaacatatcacttgtctttctcgaactagcttctgtgctatatagaaaggaaaagcgacaaaattcacgaacagtgatgttgtagtcctttttgtgcaatcttcatatttacagaacttaaccgctcgtcttctttgagcccggagaacatgcatttcacaaaataagctctaagggtgtttgggatgcaaaaatgcagagaattttactattctgaattataactaaccaactactaccttttgtactttgcgaattgtcttcttccacattctttacagatcgcaagtgccaactcactttgtcttcagtggactagtgaatttagaatcatggtataattgatcattgggcatatggtgttattacgttttcatttatgaattatcagggataactctaatggtttagccggtgtactgagaaaactaacccactttctaaaaaacatgaatattagagaatgatctaatatcaaataaatataaggagtgatactttgaacctaagccggctagcccaccatctcatggaactagctggaagactacaggtatttctcactaacccactttctcttttgtactataaacttggagatccgtactggaattaatctagtacaatattttacatattcttcacaatt

SEQ ID NO: 44317 - DNA, 756 bp, Oryza sativa
atgtgttatttccaaatagctctcaactagctcactctttgaatctttttgagctatttgggctattgagggagggctaaaaagtattacttggatccaaatagggcatataagggcctgtttacttcgtgaaatgaaaatttttggatgtcacatcggatgtttgaccggatgtcagaaggggtttttggacacgaatgaaaaaactaattttataacttgcttagaaaccgcgagacgaatcttttgaacctaattaatccaccattagcatatgtgggttactgtagcacttatggctaatcatggactaattagactcaaaagattcgtctcacgatttcccctctaattgtgcaagtagtttttcttttaatctatatttaatgctccatgcatatatccaaagattcgatatgatatttttaggaaaaactttttgggaactaaacggggcctaagttgagtgcatgcgaggagggtactgttcactttgtttcccaaacacataggtgtacattgtacagtgaagaagagtggccttcttcctcctgtcactctctactgtagtgggagccatgctgagctgcttttcacataaccatgcccaaattataatctgtctacagtagtacaaccaaatcatggagtcttggttgtggccccaaatcaccaaagcagaatatacggtcaacttttttgtaactttttttctcccatcttagatggttgccaagtaaagttggggctgcagga

SEQ ID NO: 44318 - DNA, 975 bp, Oryza sativa
gccatgcttcttgccctaccctccccaccagtgaccaaacccctcatgtcaaaatatataatgaacgacatacgctttgagaaagtccttttagcacctaggctagccaccgcaggtttggtgaggaaaacaataccatgagaagaaaatatagtacgcatcgcgaaaacgattatgctacagacgcgctaagcgcaactacatttagatgtagaaaaaccgcatctagacaacataaaaaaaaggaaaaacacctataatattattgtaataggatcttcgagatcgactcggaacaaagcgaaatgtgtgtgtattgtattcatcatacctgaaatcttaagatgctatcacattggaaaatatatatatatatatataatagttacaaatattaattttattatcgatgttgatgtttcgcgtacgattaaatctttattttcttttataaggcatttgccagcaaaaaatgtatttgaatttttcaaatacgtgcgctgctcacattatcgtattttggcattatctcccaatctccatcccaaacagtcccaacgcttaaaaaggcgatcgcatgacctcgatgttggaccgtacgtcagatcgtgtctgctgtagatttgtcatgtgtgccgtagattttggtaccaattcggacatgcaatgagtgcgtggtggcccggatcaaggctagtacatgcaagcgggtcagccatttatgtgcgacaagcgccaagtctcgagtgatcggtccattcagccgcgcccgcctgccaacagccggacactgccactctttgcaagcatcgcttcccaaagcctgtgtgcctgcgccccgtgcggaagtggagcagcagcgaattaaatttgaaaaatactgttcattcaattttatttttaaaaatatttaagatgtaatttatttttatagaaatatacagtcgatctcatacaaccgaaaataaaaataat

SEQ ID NO: 44319 - DNA, 958 bp, Oryza sativa
ccaccacttctcccctcgctccacgacccttttcacaggctcaacactagcagcagccgccatcgccgcttagccgccttgtcgcctcgctgctgcgtcgtttgcgtcatgccgtcttgtatcctcgtcgatcctcgcccaggcgttgccctgcagcgactcgacggcagctgttaccgtcccatccatcgtcgccacaagcaagtgtcggcggcctgcctccgcctccccaagccgacaccatcccagccacaaccgctcccaatcggtgttgcatcgtcgtcgtcctagctggcaccggccgctagccccgccatcgccgcccctagccagcactacattgttgttgtcgtccctagccagcgtcggcggccagccccaaccgtcgctccgtcgtcaccgccaacatctatccctgcccgggtgcttcgagtctccgctcacccggcgggtccccagcggggctggggaagggtggggttttccaccgtctagcaatgcggggctggggcgggggataaatgcagagagcgggggccgatcaatcacctgttgctagctcctgctcaaaatacggagtgcaccaccggcagattggccgcagcaacacgaatgccacgggaagaagtattgacgaggtaggccgaaacaagtggttaggatttcaattccaaaagaaataagtttattttccctccctccctcccaaaaagaaataaaatcgacactagccaccaccctactcacgctgtcgctctccacctaccatgtcttctaggcgtcgactacctgttctccctctttcctcctgccgtcctgcgagcgccggccaagccacggccgccacctacccgtgatcttcaagggaaacgaggaatcctcatcgaggatggagacggggtggcatagagccccaggaagacggataaagaggggccacattcccactctgctgcaa

SEQ ID NO: 44320 - DNA, 688 bp, Oryza sativa
acaattcatcagcggcaagtgttgagggaggtaagacagacttattacttcgagaaatgcccttaggcttgtttagtatggtccaattgctggcccattcaggccttgtgcagacctatgggtaaacaggtcttgatctgggcattatcctcttgtgtcatcccgtacatgttaaaaaaaaggaaagaggggcatctgaacagtgtttcatccaaaattgtcccttacgcatttcctttcaaaaatcacgctccgatctataaaaaaagaaaaccacttttataatcttatcctcggtcctaaaatataagtagcttcaaagaaatatgagagaggagagaggaagatgacagagagaaagaagagtagggggttacatgagaaagaagaccatatgccctccacccctgccaagttcgtccagcattttttttccgttgacacgtggccactctattcgagatatcacaaaataaaaaaaaataaaaataaaaagaggctgtatatatctggttggatgtacaggctgggtaaaaattactcttctctaaaattaaaaaaaagagctatggtcgataagcatgtaaaaaattaaataaagcaataaaaaaattataataaatctttcacatatgtaatattaccgatttaaaagctaatgttagagaataggttatgaaaagtaact

SEQ ID NO: 44321 - DNA, 683 bp, Oryza sativa
cagcgattttctttcactagaatactggtgagtctggtagtactgtgcaaagtgggggcgaagtgcatgtgatcaagtaacaaatactcctactactactagtactacacagaaccagcaaaaaggggacctggaatggaaacgcaataacacccagaggcaagcagtggcgtcattggctatcggtgggcatggtgttcacgtgactcgagtcagggatgccatcgcttgccatttgccgatatgagcagattttttgttcttgtcacggcacaaagaccagccggtaactgatgtaaggactgaccggttgagaacgactactcttcagcctccctctgctatagtttttttagaggaaaaagacaacacttccctgatgactgtcttgccgctgctgcatgcgctaccactggatactccgttgcatagtacaggcaaagagccaatgtgatatgtcaggcctttgttccatcttcaacgtcaacactcaaaaggattgccttttggcaagtactataagcacctttatataagcccttttatgttgcccctaaatttaccacgtagattaggtgatgagtcggaggagaggagttaggagagagagaatgagccacccctcatgcaaggggcaatctccacacaatctccaagaaaaatataagatgatgtgtgagagt

SEQ ID NO: 44322 - DNA, 689 bp, Oryza sativa
aaattcgtgttaaatttaactgacattgaaactgaatacttgtcagattaggtgggggatagacaccagtaatgcagtctgaagcccatgttccccaagactgtaaaagaaggtaacaattgctgcccctgacagggtcaaactacaggcagcagcaatgactcatcagcacattacagtttatagtcaaaattccatcaaacataggtgtcaataaactctaacaaaagaatatgagtatcggcacgaattgcagttaggcaagaaagaacttaacctgccagtgagaagcgaaaccatgtctgacaacgacggcaccccgcccttgtgcggcggaagtctcggtgagatctcctcatcggaggaggacgaagacgaagtcgcggcggagcaggatgagccttgtaggaagggatcacatgcttcgtcaacgaaggagttggctccgccggaatctgggacaacggccctgagatagatggccgtcgccgcggcgacggccgccgccacctggaaggtggttgatgtctggaggaaccgcgcggtgagtgttccggagacgaaccccgctgccgacacgccggagaggagcccgacgccgccgctcgccgcctggcgccgacttggtcggcctgcgtccacaaacttcacctggtcaaggactccctgattgggcggtgggccgccca

SEQ ID NO: 44323 - DNA, 1360 bp, Oryza sativa
ccatactgcctccgctcggctatttactctgctaagtctatacccatacgagaagtacggttgtactggagtcgtttcatgcttagcttcatggctcggtccttaattgaccagggacggcactagcctttaccggacaccacccaaatcctccagccgccctagtcgaaaacatttgtttagtttttaactttctttcacaaatcatctcatcaatgtcatggcaatatggcgctcatgtctccacatgccgtatctcaactacctttcccaaggtagttgcccaagcataaagcatttgataaatatgagaatgcatgaatctaaattagcattactaagcattcgtcataagtgactagggactcatacgtaattatgggtacaagggaataatgagataagcaataatcaaaggcatggcataataacaagtaggatattcatcactgcatgcaattttatttgtaaacaaaacaatttcacaattgggatcaacatgctcaaggaatggggtgatgacttgcctgctcaggatagttcttattcttgatataatcttgatcaatcttcacctcctggaagctgcatacgctgcctcacgactaaccgatatacaaattctataatacgcgagaaaaaccaatattcaaacaacaatcaaatgtgcacaagcaaaatataatgatggtgtcgaacctagggttgctcatactattccggcttgctaatggattctaatcatgctaagggccaagattcttagtcttttatattgtcatgatggctctattggtactaactagcacaatatatgatatacacattttgctaatatgtggtttagtcaagctacaaggttatgggagggttatacgactacgcatacatctataaatggtcttatactaagggttctgttgttggatggatttagggtcaaacaaataattacatcgattaatttatattatcattttttccaatgaggcattattttaattatgatcatattttacttgtcattataaattataaaaggcttaataattatccatgctctatatgttagatctgtgaggttataggtacagattatttgtaattgtggtcccgtaatgatcaattacaggaggtcgaaatttataattagtgtttatctaatatacatatttgtcatatactccccagtttaatgtatggaaaaggtaaatcaatagcatagctataatggaatgtacattatatgtgtgtgcaacaacatatatggttttggtcgcctactgtacatgagccatttagaaaggggtaatttggaaccatgccattataattttgcaaagtttgaggggtgcaggaa

SEQ ID NO: 44324 - DNA, 1475 bp, Oryza sativa
ataagccagctgcaaacatatttaaagaagataaataaagagagaagagcagtgggctacagatttgtagccagctgtagcacggactccaagacatagtgtgtgtatgacaggtgggaccaggtattaatattatagtatataactattgtataaatgagttattagattgactatagatgaattagagttagtagttggctatactattaaacttgctctaagagcacccgcaatgttaaagtaaggtgctatctataaaacatgtatctctcagcaatagactagattaatagtaaaccatctcaatagtatgtctacatgggtatctatagctctctaatacattgtctcgtttttctctgtatactatctccaggttagtagatagctttgttctctctcttcatttaatctctttcaagtaggaaaatatgttgatatggatctcttagagcctgtagataactatctctcttcatttaatctctttcaagtaggaaaatatgttgatatggatctcttagagcctatagataactattgtggatgccctaatcagtctccgctcactttcagatttttctgacagctgcacgaacaccttttcacccgtttaccgtgccactgcagaggttgaatgattgcatcacttcttttttttactgtgtgcaagtagctattctccaagacgtacgctagcgatatggtggttagtactcgtagtttaatcctttgatcgagttggcaccacgagtgcagagagtacttaagcgggatctttgcaaactctagtttattgcgcctttttttctccactccccaaaggcacataatcgtatccaccaacttggtactagaactctcgtctttttcatccttcctactagtagtactattttcaattctacgtgcaggccagagcactcgattcgttgatcacgcacgcgcgacaagcctcgacagtcgacaagtgcaccggcacacggtcgtacgatttccagtatgtctctctctgtatcttctcgcatctaggagtagagctataggccgtcgtaggatcgcgtagaacatgggctgctttggcatcaacgtgaccatgaggcccaagagcgctggcacggacgaagttaccagccaccacgtcgttttctctcctctgttcctttgcgcgcgcgtgcgggagcgcgtgcaggctcgtgtaccgtgcggattccgtcgccaagaggtttggtacatgacacgctggggcgtgtgtttggttggcatgttctcaaacccgcattgctgcttgagcgcaagcgccaaagtgtacacgcttgttctgttcgcgtacgctgcaatatccgtctctcggagaggaggcccagatattgtcttctctctcacttctcgattacaaggcccatccaaagatggatggcccaagaaaatattacgccttgccaactgaaaagcccataagagtttcaaaa

SEQ ID NO: 44325 - DNA, 1557 bp, Oryza sativa
acatgcgagtgatggatgatgtactgatgtgttttttagagtgcactccactctactttcggagctactgctcgctgattgggtcttttgtagcttgcagccctggaactctgtttactcgtggaatacggacaccgttggtcttgcttctgggaaaagctgggataatcttgcttggctctttctgcatttggtgctggaagtttgcttcttcagtgggggaaatagcttagcgcactcttgattactagggagattagatctatgtttggtagtagctgagcctcaacgacagttgaagtctcaaccctgaaccgaacagaactactgaagtgcaggggagtatcagagaaggatcggcatttttttgatgtactagtactagaaatatcggaagaactgtatccttcaagactgttgctcctatatattttactatggtccatatactaatttacatttctaagttctatcctcatttttcacgtatatgtttttcaaattataaaatttttctatagaaaagttacttttaaaataatattaatcggttttcaagtttttaaactaatacgcaagtaattatgcgttaattcatcatcaccctgttttctgtgcccaagggaaaattcccaacccctactcccgaacacaccctagattggtgataaattggttgtcgtcaatgccaataattttatctacaaagtgaaatatcgtatttactattcagaggggcacttttttttttcatcaatccaaaacagccctacattccaaactcaataaaacgcaactggaacggatgatgggcttggtgacccactgaaaattgcagagtccgtccaattgacgataggggatgtcgtgggctgtggcctgcctgtgattcttccaaacttaactcggaagccaatatgcgggcgtaaatttcactccgtattccgcctcgacccacctacgaacgtcagcctaagtttatttttggcccctcatttatgtcgctgagactgaaattcgtcctcaaatcgcagtacaacgtgcctctcaactccccaaaccagtggccccgagatggtacggatggttgtttctactgccgtggcgtggcgttgatatggcacttaaagtatataaaaaaacccgtgagactgataccaatgaatgttcggttaaaaaaaaaatggtacgtcctattgcggtttaaggatgaattttagactgacaataaattgtggggcaatagatgagccccatgggcaggcttgtcgaggtcagcttcaaactgtgttggaatatcgaccataagctggaataacgtcagttcacgtaccgtacatctgtatgagcagacgtttgtctactccggaacatacatgcgagcagcagacgccgtccttttcattcctgatcagtttgtttgtttgtttttttttaaaaaaaagaacttgttcattgttgatcaatttgttcgatcagctgttcgaagacaggccgcctcgtctacaagaggaatatcaaacccctgcaaacaattaattccttctccccacgcat

SEQ ID NO: 44326 - DNA, 851 bp, Oryza sativa
atcgacgaatctatacacaactacgtgcgtatagagacactcgtcctacttagtactcctgccgtacgtatttattgtacgtactcccttcagttggattaatttcatgagaaaagcgagagtccgatccgaatatattcatgtgggttgatatataagtttttcatttagcaactgaagacatgcttggaagtttgaaagcgcgcagggagtttcgcagcaaagttcactgcaaatgattagatcctaattcccagacaggaactaatttcaatttgtctgctacaacggatatgtcatgagtatacacggttgaaaaaatatttcaagattattattcgtgtagtacatgcagctagcatatacttatacttttgtgcatgcatggcaggcaaaactttttcttgcccgcaggctaatacagcgaacagtccacttgtaaagctgttgaaaaatccggaccaaacctgcaggggagcactagtgctagtctccgatcagaaattcgccaatagcatgtgatgtatgggcccaagctagctagcgtccatgcaaatagggtttgacacagataactatactacttattcacatctgagtatgcatcaatattaaaacgaccgaactaactaatcccattgaaaaaaaaatgattccacctattgcgtggcgtccctttctaatctttacacagacaggtgcctatgagctgtctaattcgtaaacctctctaaataaaactctagcttcagacacgcagaaatgtaattttaatatatctatatattctcgttctccactgctcattaggacagccagtttgcgagaactctagaaagggctgcaggaat

SEQ ID NO: 44327 - DNA, 726 bp, Oryza sativa
ctactcctacagtcctactacacaaaagggttgcagttacgtgttggcccaagggtgtagcagtggcatggcctactgtgaatctgtgattgtgtatgtcacatgagtccagtggtcgaggtaatcttgctagcttcatttcagagtcgaattgaaacttcgaaatagagcacttatcctctttccgtgaacaaggaatggaggatatcgacgccgttatatatggcagatcgttcagtgcctgtgagaggggaagttaacttgccatgaacacaccatcaaaaattcagtcattggatcaggaatagactgtaaattgcctttgctgctctagtgctatgacgagagggaggggaagtgagtcagtcatagagagtaagaattaagaatgatctaaatttagcgtgcgagtgacaaaagcgtaaggcacacgatcaggattcaggaacgatggatggttcagatagctatgttacaccgatgtcaaattaatctcgagttgcttagttagttactaaccatattgtgtgtacactaccaaagtatgttgacagttcacgtacggtcttcgttattaaccaccactagtcagtgtagggataactacattatatcacttatcaaagcataggtagtccgggccgtgggtacgttcagagggttttacacagggaagtggtacgtgttaattccttgaatcctcacagctagtagtatcgatcgaaa

SEQ ID NO: 44328 - DNA, 649 bp, Oryza sativa
ctgcaccccttggccattttgatagcagtttcgtcatacatggtgctcataaatcccacatgtcagtgagaaaaaaaataacgccccaccccccctctttaccctttatctctatttatgattctcgccaaaccggagtcagatcagtgatgcgtagtcgatgaaacttggaaaggagtgtcccgaagagcgtgttcccaagcacaagcggcttgttgagtttctacatcgcgaacaccttgtcgaggatgcggccggcaaggcggttcttggataggtcgatcggcggtggatggtgtccacatagctccccgtgctggacccatcgacctccactgccgctgaggtctctaggaaggtagacagtggccgacatcagcgagctcgtaggggagctggggtaggatcaaccgggagctactctagaaattgtcatcgctgccttgctcctctcctgccgaccactagcctagacatcacgaggtggcatgggatggggaggatgccggccacaatagccatctgtcgcagttcggacgagatgggaaggcaccaacgatgagttccacacgtgacaaggagggccatggcagggagggtgtgacggtgaagctggatctgccttcgggcccttcgcgtgtagattggg

SEQ ID NO: 44329 - DNA, 671 bp, Oryza sativa
cccgatggcaagcccggccttgtcgtcgttgccagcgccaatcatgcatttgtcgccaacgtgcaagtttggagccgccggctgttaaaaaagaacgtgcttggcgtcgccgccggctgctgataacctcgcgttcatcgtcacggctagagtcatcctcatgccaacgacgacggcgtcatgctcgccaacctcgtccgttcgatgacgaaacccttatatttatatatatgacccgccatttactgcttgtttgctgatggcgaagtcctccaactcgtcgccgccaacggcgtcatcatcatatgaatcctcacctcaccgtctagtgatcacgagctcggcatccctaccggtgtctctgtcactccacagcgcctatacactgacggcttctttgtggcaaccatcggctcactcccgagtcaagccgttacgatcggaggtggctcaacatcatttgagtccggccccgattgtcggcgcatatacaagagggccaccccactcctggaacgcatctcatcgtttccaggctaggctacgcccctaacatcccctaaaactactcaatactaagtgtttactgcagtgatcagacgactgaccattgtaccatgacgatggtcggccattgccgtggaaactagaagggcgatgctaccccaact

SEQ ID NO: 44330 - DNA, 695 bp, Oryza sativa
catttaaatgtccaaagtacgtacttggcaacgtcatatttgccaacataaaatttccacatagttcttattaatcttgtattatgattaatcagtgaacggtacccttttcgtccgaaaagcatattccgtcttccacaacaatggttttttcatcaacttcgatttccacgcattcttgcatcacgtccagaaacaggcatcaccatggcgtcacaaattttaggccatgcgtgtgtttgcagtcactataatttaggccctgtttagattccatcttttttctttaaacttctaacttttccgtcacatcgaactttcctacacacacaaacttccagcttttccaccacatcgtttcaacttcttcaaacttttaattttggtgtggaactaaacacaaccctagtcacaaactaataccttctgacctaatttagagtagattatagttatttttttaactcagaatagttgtatatattatatatttgagttttgagattgcaaagcaaagcacgggtacaatactaatgtttgtatagggaaaaaaaatgaaaattcagctcaaacgaattaccaggtctaaactctaaacactgggaataatgcctttctgatgttccagaatcagatgtccaccggtgaaagtatttttcacaacaattccgtcaaatggcttgcttgctagcttg

SEQ ID NO: 44331 - DNA, 1266 bp, Oryza sativa
tattccagattctaagctactcgacccaggtaaaacttggcaacggcaaaacaaccctcttttggaaagataagtggctatcccagcgcacatagagttcgctttcccagttttattctcttttgccctacacaaggattgcacggttgaatcgcaatacaggcacaattcctggcacatccagctccatccaaacctatcctaccaagcagagtcagagctgcatgaactgctgcaaatactgcaaaaccaccacccctacccagacaacacaaacgcaagagagttttcatacccggaacccaaagtctcaacagcaaatgcctatcggatgatgtccttccatgggtcactttggactccagcagattatatttggctccacaccatcccgcaaaattgcaaggttttcctctggctggcattcagagacagattaaacaccaaagccaatatggtcaacaaaaactggaacgaagaccccactgctctttgtgccctgcgctagaaacagctgaccacatcatcttaagatgcaagcaggccaatagcctttgggaaaaattgaatttactgcagctagccaacaactcagattctatctcaaccttcctccaggcaattatagcagaaatcaaactttgaaaggaattgagccaatttggtttgctgcttgcgcatatactctatggaaagcacgcaacaaccaggtgttcgaaagacaatttgacagtctacaacacattattcaacagatctcagacaccatgcacctctggagcctaaggaccaatgaaataaacagacaaaaaattcaatcctggtgctcacggctttcatagaagattgctcattgtacatatttatgtaaattctccctttttttctgttttggtctgttctgctttttgctctttttttctctctgataattcccgcacctaatatgtaatctgtaaacctcatttcttttaatgaaatgactataaggtagagcctgttctaccttcttccgtcaaaaaagacctatatcagggtagcatgcgccaaaaactaaaaacatcgcaatttcttcttctcggaaggaaaactcaccctagctcacttggtggaggtgtgggtgtacaccctaccacccaagttctacggttcggatcctcaaggcaaggcaaacttagtacttagagcataccgcaactcccaaatgacgcatacaacaacttccaaagcatgagcttttaacacgacagattaattcaccattat

SEQ ID NO: 44332 - DNA, 1108 bp, Oryza sativa
ggctcaaccccatcctcatcggcgccgcaccaagtcgcgccacattgctgtcatcggccaccagacgaggagcaaagtgagagagagagaggaagggagagaagaggggaaagagattgtcctacgtggcatcctgacatgtgggacccacgtgggtcacacgctgactcagccgccacataggacaaatccgacgtcaatactgtcctgggatctcgggtgaccggttttgtatagttaagggaccccgcatatctggttttgcggttcgaggacatttttgtatctttgtgacaagttgagggaccttccgtgtactttttccccagaattagccatttcttaacatcttgggctttactatttgggcttatactattcgagcccactgcacgaagaaaaattagacctccaaaaatcccattgggttgtgactgaagaaaccttttcgtttatcttttatagagagaaactgaagaaacaagctgcagacttgcagagtctctcctccatagcgaggagcaaacacatcatgatttgctgaaaatctttccaacaccgatgtaccttgattcagaagcagtatgatttcttgggttacagcacatgcgcacagatcaattgcatttccgcaccaccatgatctaatcctaacggattagagcgctgctggtttgtagtagcttgttgcgatccattctcgcacaaacctgcactgttgcagccagctgcatgcggactcgtgagcatgcatgctactccagctctcgtagcctcacacgcacctacagtcgcatccaccacctggtgatcggaaaagccaattgtttacatcatttttctactgggccaggtgttcgcttaagcatgcagatgcagctcgtgctttcgtttgaaagaacagaatctctggaaggctggtggtcagccaccaaccggctcctccatcatgatccgcggatcagaggcaggcatggatgcgtccggttaatttttagggaggttcatgtgctaatcttggcttctggatacggcacagagctgcatattcttgtgtagcagaagcagtataaaatgtgtttgggttgcccacatgcatgcacacatg

SEQ ID NO: 44333 - DNA, 721 bp, Oryza sativa
tctgtgtgtgtggccggccattttatgtgtgtgtggccggacattgttgcaaggcatgggtactaagcttttcttctggggtatcctaagctcctaactgaaaattcgaagctgtcctagctagccagctgctgaaatatttactcgcagttgcagactaacagttcagagctgagctagctacggcagccagccacacatccggatccagcaacttttgccacaactttacagtcggaaaaacaaagataggaacgccaagagaggaaaaaagataaaggagtaaatacaagatcagccaggcaaggaaaagcagtaaagttcggtgtaatccgtggtgaaggctggcaatggcataagattcaaggcttcaaaagcacaggggcaaagaggtgcgaaagtatatgcgaatcagtacgtgacctgcacgatcgaggtgaggagcagccagcagcagcaagttttcactcgaggtgagacttgaccaaacgtactactgctgctgctgctgggctttactgtgatgtaaactgttagtaataaactgaacaaggcatggccactggatcagatgatggctactccaggaaggatgcaaaatgtctccccctctttgcagttgaagtttgactgcctcgtcgaatcaacggataagcaggcgatcctggccatggttaagtttcatctgccgaggtggtaaaaagccacgggctgcaggaat

SEQ ID NO: 44334 - DNA, 935 bp, Oryza sativa
cggcctgacggggcgccagtaactgggtgaggggatggaatggtccgaagcctacccattgctacgtgactcgtctgaagctctgaccacgggtcggtgactcggtgtaacttctgattcagattcccgaagcctacccattgctacctccctccaaaaagtataagcatttttaacactaatataggagtagatattaaaaatatatattaaaatgattggataaaagttataataattaagaaaagaaaatatataaatagttaaattcaattcaattggctgtgattggttgagagtaatttggatgtttggttgatgcctaaccttaccgtaactagttgtgtcatgatggcataagtgcaacttaaaaatagttagtcacaagtgtgatatacttagcttcaactttaagagaatgacataaggctaaaaaagtatggcataacatagttgcgataacgaaacaaatacatatataagaagctattgcataactaaaatatgacatggtaaagtacggtaaccaaccaaatacccttagatcagtggaaaaatagtttcattttaacatatgctattttattagaaatatcttcatcttgtcaacataggcgtgttcataaatggagaaacaatatccaaccttcatgcaacaaatcggcggcctatgatgggaacatggttcttggggcctgatccaaaaattgttggaaaggactatgattgcctttgttcgggagctgaagaatgtgtggcccatacccgtgaaatctctacatagtggcatagtgcggcataagtccagttaacatcccctatcttttcatctttactcctcaatttataataccgggttaaattaggtcctccgacaatatcgatggctggttttagtgaggtgggaagttgacccggtccactgggctacgggc

SEQ ID NO: 44335 - DNA, 683 bp, Oryza sativa
tcctgcagccccgatcaaaacatcggctgctcatgagtcgtgacttcatctagggttttctttgttgtacacatccattaaattgggctaccaactgagctagatgtggccttctttataatgggcttggtgtacacggaactaaacaggctagtaacagattatttttttaatgggccacctctatgtattgtatacttcggggcccacaggtaatccgcgggtaatttttagtccccgcccccgcccccgaaaattagcgggggcccgccctgccgcacccgcgggttagaatttccacccgcccccacccctgtaggggcgggtccccgccgggtccccggtcccactggggaaattgctacccctagcccccacgaagtcggcaaaacgtacttctacgaggttagtacaggttcgtgcgccgggggacgagcccgaactgaagctcgtagcgaggcgagtacagatttgcgctgtgcgggcatgtggcctggcatcaagtgatgcgcccctcgcgtgcctcccggctgaatcgattcctggcgcccgtgtcctcttgctggtacaaaagccgaagcccctgccgcccatccaggctccccccgtacgtgggacgcgggcacatcgggcaagatccgatgtcgccgactagtttatccgcaggctcgcccgagtcccca

SEQ ID NO: 44336 - DNA, 691 bp, Oryza sativa
aacacaggcatattttttgtacataatgaaaagcattaagaaattaaattacaccccatcatctgcatatatcagatgcacacagcccaacaaagaaaaaactcacatgaacatatcatgctatccagtagcaactggtcatgaataaccgaataacacaaaattcttagacagtactctaaaacaaaatgatgtaaatgatcctacaaaaaaatacaagtaaatactgcagtcttctccatgtctattttgatcgagaacattgctatgaactttgcataacatcattcggttatcatacagcaagtttgaatcacttgtagatgatactacatatatacatataggaatgccaccaagaacatgactggcctatgtaatgttgcactgtatttggaaagacaaaagtagtagcaacaggcacaagcaatcgatcaatgtcgtcacgatcaaacttcagactccaaattacagtaaaatgctatagtagtatcagtctgctgaaaaaactgcaaccgagattgcacacaataatgatgaaacaggatgtatttgcaattgcacgtacgtttccatgttcttgcgtgaggtagaatggcagatatgtgaccaatatataataagtaatcataggagtatacactatactaacatgtactagtatactgtcatataccagcacatactatat

SEQ ID NO: 44337 - DNA, 1548 bp, Oryza sativa
tacaatgataaggatactctcatttctccctcgttttttctaaccacatttctcaaactattaaacaatatatttctttctaaaacattttataaaaaaaacttctttaaaattttatattaattaaattttaaaattatttaagttaatacttaactaatcatgcgctaaagaatcactctatttcacgtgcgcgggagagaagtccccccccccccccccaaaaaaaaaaagttagctagcagaacaaagttcatatcacccataacaagtgttttactctctctgtttcacgaaataaatctaggattgggtgtgagatatattaatactatgaatctggataggctcttgtatagattcattatacgaaaggttacatccaaatttattgtactataatatgttacatctaattaaagattttttttacagagcgagtagttcatagaacaagtgtttgttagggcagtcccaaccctccacttagtatggtgtctatggcattaactacattgctatgtagtacttttaatttatgtggcactgtattaattaagagagagagtaaagagaggaagaaactgggtctcatgcaagacacagcttcaacacgagaacctatgcactagacactatcaagctttgcattgggggagaatagtgttttcataataggtgaaagaataattatgattggtagagaagagagatgatgtatttattaatggcccactttaagaaaccatgagttgtagagtgtagtttctattgtgatgtcttattgacatagcaccatagacattgcttatggacactatgggttgggactgctcttataattctacctagaccgacagctatctattccctccatccctcaaacactttgttttttgtcattttatttgtctaagaaacttcatctttgcaaaaatgaatgcatttgagtttgaaaaggtaggagataactgcattagagtatctgtgagatagacaaaaattaaaaaaaatggacttaagtagtagtattgttttttaagctaactgatactcatgaatatatagtactcactccatcttaaattatagcaagttttaacttttggtacgtgtattaacaagagagataaaacatttggttgtctcctcggattgttaaggtagaagaacggattagttagggctataataaaatcaagggggtagacagatagtttagtagataaagttttataaatattaggttgttatatttgggataaagtttgaacgatgaaacttattctattttaggacagatgaagtataggttatacttcaactataagttacaactaactatgttacgttctctttgtaactctatacataggattgtatttctatgacctactgattgcctgattcgttcttaagacttggttgacacaacttcgaattcaatatttctttaatctgggtattcataactcctgaaattcatatatctaaatcatcagttttagatggaatatttttttaactattgtaatttaacgtgcaaat

SEQ ID NO: 44338 - DNA, 1996 bp, Oryza sativa
gccgctccattgactagcagtttggtatactacagcacatccacacagggatatgaatgccacagtagaatcccatgatgccttcgtcttaggataccgaccgatgcaacagtggatgcactagggtggcgatcacggccttgatgatgagcgagaggagtcggccaagctcgcgatgatcatggcggagcagcagcgagctaacagcgggaagcaccagaaggatgggtgtaaaaaaaaaaaccagtggtcgttgctatagctctggcccgtgtgcgtgcagtgggcgcagcgcggcatgcagctccaaattcctcccttttgtcccccgatgcaccgccactgatgatgcctcccagccccacccccataaattccatccacgccgcccggcgccccgccgctgttgccatcggatccccgcggaaatccagtatgcagcggacacccgatgcttgcgaaccgatcgaggctgcgtgcctcgattgaaaatctgcattgaattgctccggatccgtctcaccaactcatcatcaactccacgcggccggactgcctggccaccgctgcatctctgtgcctgtccaaccccgtctggacttctgatgatgacgatgatgcgagcgcgagaccagtgtttgacacgtacaaacgcccttgctgcatcggtctatcacagtggaggcactaacgtacacgccggactgaatgcatgccggcctccatgtactccagtatagagaggttaaagtcttaaaccatgaccaactagggttacatgtttcatatatatgctcattggctcccgctaatccaaccccaattcgactgtttatcgattaggaacgttacgttacgttggttatcattatgtacgtacaggactgcagaaaaggccaaaaaggttatcttctcgtggctgaaggctattaactcgctagtttactagcagcagctggcatagtacgtcccggctacaacgccagcaatcccaatcatacacgcatgctcctccccatcaaactttacgtacgtacacgaggtatagtacgtacaagaaaaaggcaagaatattatactaatcgcgtagaactattacaccaatcagccaaaaagaagcacgggaggtggcactccagtagtcgtactcgtactgactggtggtaacgccatgagctgagaaaaggctactccattccagcaatgaatggacgacggaaagtggttttttgatcgtcttctcgcctccatggcaggcatacgcatccatcatttccaaggcagctggatgcggagcgggaagcccatcacgtctcgcattgatcctagccacgccggccggcccgtcgcagcggagcgcgggcgccaacgccactgcaggccactgcgagtctgcgactattcgatccgtagtcgtcggtgcgacgcgagcccccggttaatcatcacggggtggtgcatgccgacgcgccgatgcgcgccaggccgcgctagctgcatctgcatgcactgacgcgcgcgacgcgccgatgccactgcctcccttgcctgccgcggggcgtcagacgaaggcgcgcgatgccagctagtgcgcgcgccggtagcgatcatcgccgatccagtgaaccgtttctattcaagcctttttttttcaaaaaaataaaggtatgaattaccccctcctagcgaactcttacggtcaaccgaattatctcctctgaacctaaaaaatataaaaaaacagacatattcaccttgaacatttaataccggacaaattaccccctcaacttaatatagagcggttttgttttacgtgtcatacgtgtagaatttcagtcaacattttctgattcggggttaatccgtgtggatttgaccataggcgtatctgattttcctttgaattgaatttctctatttttctatccaaaattccatgatccaaaggagtctgaaaaggtttcagggctctggttgcattttaaagaaattt

SEQ ID NO: 44339 - DNA, 864 bp, Oryza sativa
ataacactctctctgttttatattataacttgtttaatttttttaagttaaatttatttaagtttgaccaagtttttaaaaaatataataacatttccactacaaaataaatgttgtatcaaaatatattgaatattaaaatttaatgaaattaatttgatattgtagatgttactaatatcttctataaacttagtcaaacctaaataattttgactaaatataagctaaataacctacttcctccgtcccaaaatatagtaatttttaactatgaatctggacacgaatcccaaaatatagctaaaaattgttatattttaggacggagcagcataatatgaaacgtcggtaatcaacaactaaaaacatgatttaatagaagtagataggacagttctcacttatacattgtcgtgctattttttatagtcctaacatcacgtcaaccacgtcaaatgagtgatgtgcagggtttacagtaccaacggtagccggttgattaccacgaaaactattggctaagtaggatcgagagcataaaataggcagttttctgattaagtttaaataaattcaaattgaattttaattcgactatgagttttcacttctatcattgattttctttttgttgctatgaagttaccgtttcagcttttagccacgcgaatcatcgatattgctttgtcgtaggttttcatgaaaaccgagaattcttgtctcgacatcggtttggtgaacctttggtgatgagatcgttggctcaccatatttgcaagggggaaattgctgcatgccgcacggccaccgtgacatcatttgattaagagatccactttaatttggtgcggtacagtacat

SEQ ID NO: 44340 - DNA, 1677 bp, Oryza sativa
cggggacggccaggaacacggcagcagacaccgacgacggcacccttaatggcggtgagctcgacaatgccacggcatccgtgcctaaaaccatcaagccactaactcggtgatggcggagaatagaggggtggcagctaggtcgcatcctcatatctcccctacacattccttaagatcagtgcacagctcagtcactaccaagtaccagcggtgtcaacaaactcgtcgtaggcggcaacacatgttgaggctctttgtcggcctcgcccaaaggatgtggatgagagcgacacgagggagtgggctgtcgccgccgtcagaaagggaaggagctcgggaggaggcggccacagcttttagcggtcatggaggggtagatgttagtagggcgatgaggccgttaacaccgacgagaacctcgttgttcccacccacctcattgtggccaccgaggggaataacggggaacatatgagagagtggatagaggacgatgttaatgacatgtgggccctatatgctacgtaggtgcaacatcggctaaaagaaactcctatactgctttaggatttcttctacatcggtattgtaaattaggggttaagatttgtcttgtagtttagaactcgatggtaagatgagggatgtaaagtgacttactccgccccatagtgctgataggaattttcccaaaatatgcatttcttctttctcgtgtagaactgaacattactgtatattgatgacccaataaggaaatactccaaatataacgatacaatactcgatcatcttaaaatataacacacaattagacacacacaatcatttgaatatattattacattttaggacgaataaagtatataactaagcttgtattaggggtaccataatggtaacagtacagtaatcacaattcaagcatatttttttaaaaaataatttttaattattttttttaaaaaaggctatttttgagttgccacgcgcattaaccaaaattattgtcgatgtaagagcaagaataatagtgatagccccatcgtttggcctaaacaaccaaagaataagccaaaatttgaatttttgaagttgattttaaaatgcttttaacgtaatttttgttaatgttggcttttaagtcgctacgaacaaatctacaaaagttttacttataaattaattttaattttctaataagccaaataagccaatttggaccaaatgggcaactgatgagagcctaagtatgtatgaaggagagagaaatatattaaatgcttcaagataaataatgctctctacccttcatgataaatacatgaaatacataagtatgagaaagatataggagaaaaaaaaaaccaagtttatagctactaatattggtgtactaactttcacatgaactaatacaatgagctctatccaacagcaaacaacggacttcaacaaaggcggcaataaaccaatcggtgaagcagtgaccctgcccacagaaaggctcccgttttccatccatgggatcggtcacccaaaacccaccggatgacgacgcggccgcctcccctaccccgcgccacgccaatccatcccacccccaccgtgcccatcccaaccgaaaatattcccagcatattcccccgagatcccgcatcccccctcccggcc

SEQ ID NO: 44341 - DNA, 604 bp, Oryza sativa
tgatcgatatatatcgttctctttaccctctcctcaaaatcagcataccccttcttagcatcttcatcagattccatgggaaggccaaatctgtggtaaacagtaaatggaaaccgttattaagagtgccaaggtttcagtgcaaacaataagctctttttcaacttctgtttacccatgcaaaaacctcagaagaaattgatgattctattgacagggtgtcaaactgagcaatataatagatgcaagattttgtcctatcctgaacttgaaagggccatgctggaaaaaagaacttttcagcaattaagctgcagtgtcttctattcaatagagatttgcttagatgcggtgaagataagtttgtaaattattcatgaagaggctgcatgcaactcttttctgatattgttggatttagaaactccgtgaactggcaacgtacacaagcatgtggtgctccttggcaatagacacaaatcatgaatgatattacatcagagtatcagactatatcagggacaacaaggaggattagggatcaaggacttaagaacacataacacagcgttactcttaaaactagcaaacaaggtactctcag

SEQ ID NO: 44342 - DNA, 920 bp, Oryza sativa
aggtaacgtgtacgacttggggccagaattaggaaaaagtacaccgaaggtccctcaacttgtcagcgaaataaaaaacatcctcaaatcacaaaaccagatatgcggggtcccttaactatacaaaaccggtcgcaataggtccctcggctgataccggttttatcctatgtggcgctttgaccacggtcatcggtggctgagtcaccgtgggactcacgtgggcctcacgtgtcagcttgtccaggtcagcctactctctctttcctctcttctctccctttctcctctctctctctatctctctcactcttctctctggggttctgggcaggccagcgtcgccagccaacaggtgggaaggagagcaaggcggcggcgggggaacaaggcggcgacgacgcaggagcaagggaggggcgttggcgccgttgtcgtcgccgagcaccaccaccacctgcagggggcatggacatcgcgtcgaggatgagcagtggtgaaagggggagatggaattcgagaggcgaggggcgcgcgcgcaccgaggtggttcttccgcttcctggtctcgtgacggcgatcccccgccgcgatctcctcgatctccagccggacgctgccatcgccgtctcctgtggcctccgcgacgccgacctctgctctcggcgccgccgctcttccccgaggaggaggagcccaccgacgagaacgcactcgccttctcctgccagatctcccgcttcagtggttgcggcggcgagatcggctcctcctcctcctttccttcctcggcggcggcgagatcggcttcacttcctcatcgacaactctaaggattcaagagcaaatgtaagaagcgtaaagaatgaggaaaaaatttggggataatttgaattcgaggtggcttctctgggctgcag

SEQ ID NO: 44343 - DNA, 723 bp, Oryza sativa
gagcgcgaactggcgtgggcggcgtggccagttcgacgatcgccggagcagtttgggggtttgggggcggcggcgcggcggcgttcgtcgcgcgtcggcggtgtcgtgggccagccgaaacgcgaggagagtagatgcgctgacgtggcgtcgatagctttcacggctccagctggaaagttcgggagtaacacggcgtgtttagcgagaaaatctcttgattttctttttaaagaccaagaagaaaaccattgggaactcgttgagcatacatcaattgcttcacgcgaacgagaatcacgccttccaccgcgcgagcgatattcaactgtggcatatatttaggatgtagtgatgtagtactaccgaattaattgcttagttaagggtcatttgcgaatatgatgttgcgaaaaatatactaaaacataatgagccgtttaatgcgttttcagggaacttttattatctcctttgaaacatgaaacgcatgataaaaaaacagagaaatagaaaataaaattgtaagtgtaaaatatagaactataaataaaatataggaaaaatttaggaataattgcttgattagacagcaagaaaacatatatgaattagaggagatcaaaggaaactttccttggggttcaatctcatatttaaaattcctccaaaatatatacagatagaggcatttcttagaaatattgtaggattcaatagggg

SEQ ID NO: 44344 - DNA, 956 bp, Oryza sativa
attcctgcagcccccgcgagtgtggggaatgtgacggggaatggaggggacaggcgaggaggcaacacgaggccatgttcttttttctcccccttctcgcacacactatagctctagtgtagcctctcacgctgcacacactcgggtggttttactggttttgtccgtttccttttggaagggagcggaatggggtggcgcctggcgatgcagaggagcagggggtttgcggttgcggtgcacagggggtgtggttcggtttggtggtggcattgacggcctcccgcccgtcttgatggtccgtcttaccgctggatggtacgggcttgaccggcctcgtcagcggatcaaaccgatcagacgacagcaagcctctcctctagtgcgagacgcacgctgcatgcgccgctgtaggctgcagtgcggcacaggcaggcgccaaaacacggaggacggagtgggttgcctgagggttgacgacactaagacagcgagggccggctgtccgttggaaaccggtaatcgtcgctcgtcgggcggtgaacagggttcgcggctagcggcgtactccgttcataaaaaaatccaatctaaaataagacataatctaatatcatcatttttatctaaatttattattgcactagactatatctcattttattttaggttaacgttttttttatagagagagtacttgtgttttattctagttgtgttcgtgttgcaacttgcaacattccagctaagggatgaacaacgtgcaatggccgtgatcctacccgtgggaacggttgccttcgcacagtttccctcgttcttttttccttttcgcatgagcaggagcgcaagcttcctagttcataaattgagaccggttaattaatggtactctattaatgaaaactcgaattactagtctagaaatattattttaggctttgggctgcaggaat

SEQ ID NO: 44345 - DNA, 706 bp, Oryza sativa
cttcggagggagataacactgtagcgagaatttacttggaggccaatccctatcttttccggcacttgcttgggcttccttttgctcaatgtgcatggggcctgcctgtgacttctgcctttgtctttaattccatcaactactgtctgctggggctatgggtttcactgcaagtccatggtttttgtggttttcttggttcaatcatttattctcctgtttctctgagccaggttacctttcctgggctcctgccactgtttatctcaaccatgcgtgtcagtgtttgtgtgccactttctgttgctaaatacagtactacactgtactagtaaccagtgatggatctagaaaatcggttatttagtgtcataacgtgtttatcggtgtcatagtatactaattatacttaaaacatagtgttatagcatatggaaaagcagttttgttataggttttgccgaaagtcgtcggtgtcgcctgacaccgacgcttgtactgtagatccgcccctactagtaacacatctcaaatcgaaaattttgccccaaatgagatgtgatatgagcgaattcatcacttatttatctctgaggttctttctgcttggattattatttgtgacaaagtaaaataacatggatgtttatcaaaccagccaattatttatttctccccctttttttaaaaaaaatgtccaagtcaa

SEQ ID NO: 44346 - DNA, 1990 bp, Oryza sativa
cctgcagcccccataaaacatacagaaatataaaactagctgcaaccatgtcattaaactcatctcttcaattccagaagtaaccaataccaaaacacagcttgaaaacgtaatattacaggaaaacacatcaagattgattacagtccaatgactccattataaaatgcctccaatactacaggaacggcaagagcatgacaaatttatcaaacgtctagaacaaattgtgtgcttgtacttcatatccatctcaaacatcttcttgtactttcctgaaattgtaagcttcactcatccatggccgaacacgcacgcatacatcgaagtcccgcgacgatttggacaaggggaaaaaggcggtgtcgagaggaatggatgaggcgccgccgcgaaggggagaatggcaaaccgatggtttgccttctgcagctcttcccagagaaccaaggatgcgccgccgccgccgccgccgccgcgaacgggataccaccgccgccacctagggttctgctactctgccgcgcttccccaactcagccaaaccttgcaccgatccaaaaatccctccatttacgattatacccttccaccgtggctctctcgcgctaaccacaccaatgaccaacaacggtcaggattttagtatctcatggtactagtaccacgtggtacaaaaagaaggaccgaaacaacactctaaactgtaactatggattacttttaaatttttcatcatgtaaataattactacctctatttcaggttataagatgttttaactttagttaaagtcaaactgattcaagcttgactaaacttgtaaaaaaaatattttcaacctaagataaatttattataaaaatatatttaattatcgatttaatgaaactacttatttataaatttagtcgaatttaaagtagtttgattttaatcaaagtcaaagcgtgttgtaacctacaacggagagggtatccctttaattattcttttacattcgtccaatcctatcacagtagttaaagtgctaatctcctttctacctgaccgggctcacctggctctgacgaagcatatacctccttttcatttgccatgatacttgataaatactcccgactggtgtgcgtgcccgactgcccgcatgcctatccttctttttggtctgccttaactgcttgcaagttcgtgttgtcctctcgttgaactctacaaacgcgaagctaacaagtaacaactcacgacgtaacgcgcgagcctagtttacgtgatagacgacgccacgagaggccaaaaaaacggaggacagaaaatacatctgaaaacaccaggcgcgtcgcgcagtgcatgggcacatcactgtcgacggcaagccgccaaaaccgaacagccgaacacgcacacctactactacgatttccgcggaaacacgccacgcgacagccggcgcgtgtctggtactctggtttggcccatacaactgtaccgtcctccccttgcgcatgcagagcgccatggccgctcgcgctgccgcgtcaccggccggtatgaaacgagacgaaggcgcaatctagcagcgcacgtactgtacatccttgcagttgccggagggaggctgcatagccggccgaggcgtaaagtagctggcaccgtggtgtgaactgaaatctcagggcctcgtcgcggtcgttggattgacctgctacgagccagctcaggccgtgcgcgtttactgaacagtaaatatacagacgaaaaaaaaaattgcagcagcttttcgttgcctgcaggtcgtctctcttgcgtatgaccgcacttatctgtctgtcgcgagatttcgcacgtacacgtatcgttcttctttaccggtattgatgcggtgagcatatctaggaacatatgcgaggtaggaactgtgctttttttaggtctcaagtcaagctactagggagtagaaagggagcacacacacatgatgctcggttga

SEQ ID NO: 44347 - DNA, 748 bp, Oryza sativa
tgctccaagagatgatcaaagttctcaaggacctcgacatagaatacaggatgctgccactcgacgtgaacgtgcgaaacgcgccccctatccagtccacgaggatgccaacgacatggaactattcctgattactgaatcggtgaatgcaccagatcattcagctatgagattacagagaggaggaaatgcctttgatcgagtttgagctgcaagatcctggtggcaactagcaagtgttctgcgctgcaagagcttggtaacaactagcaagtagtggatagcatgtaaaaactagcaatggttgttattgttagtgtgcttgaagccatcatcacttggtagttggtgcagtatgtaattactggtgctgtgtagttgatggataacgtagatacagagataaagagttttcattccaaatggtgaaagcagtaataaaaagttcaatgggtgaactcctatttctgattccgacggctagcccaggcaaccaacgacccttgccgtgaagctgcgaggccaatggcctgctgcgtcgttcgtcgagtctgatactctggtttttgtatctgatactctggtggagatgtagatcggcgccggctctggtggtgcgcatgaagcaccggccaccggctggtttctgtttaaatggttgcgccttccatcgcgtgctagaatagagggggcagccatggctgcatccatgttgggtccgggtgcaagtaattcaggggctgcagga

SEQ ID NO: 44348 - DNA, 754 bp, Oryza sativa
gcaacaacacacactttgcaacccgtcgaagaacggccacgccacaaacaaccgcaacacaccatagccccatcggagatcacccgatcggcgtgattggcggaagcatcgatcgatcgaccgagctcctcgcacgggctccgcccctgccgatcgcgctggaaaaaagcctgcagaagtgcagatccccgtctcccgatctcatctcatccaccacgaaatccacgatccctccacctctacggctctacagcgactccacgtgacctgacccaacccaaccaacgatcgggagccagccgcctcaaccgcgcaacagctagccagcgacgactataacggcagccgtatccttcgcaggtagaacagtatgaaaatcaccggtgattgagcagtataccaaaaagatccactctttgttagtatctgaacgatctttgattctttatcctgaagctaatgctttggctcccatgtgaatactagcagtatgctagtagtacgatgatgatgatgatgaaacaaaggaaatggagctctctaaacatgccagtactatgattatcaaaagcctaaaaaagggccccatttttatgtacagatgtctttcaaagtagcaaaattcgatcgagtttgcgtttctagtgatgtttggttgggaattcatcagaagcttgtgctcagaatgttgagcagtgagactgtggtgttcaccagagcgcggaacaccttctcgccgatgctctccacgtcc

SEQ ID NO: 44349 - DNA, 1098 bp, Oryza sativa
gatcgatgggcggccactgccgaagccatcgggctggcgtccacggaaacagcagtgatcgcgcccacgagccccatgtgagcctgtgcgacgcgcgcgcatgtacgcccggttctttcatagcctttcggctctgtctcacggttatttcaacaagctttcggccttcactcacatcctgcagctgctactgatttactgaagtgatcggtgacgatggaatgctcatgcatgctacattgctaacgacgcttcgatcgagttaattctttatgtttgcacgtacgtatacgcttggacgaagtttgttatgttcaccgcctcaccggttcacgtggttgatcggttcgtgattacgtacagaccgaaaggagggagaggagtcacgttaatttttttagggtaaagagagagctttattaatgcttaaataaagggttacacttctaatttaataaatctagaattcttgcgaaagcacacaacctccactccgcgcaggacctagaacacattgccatttatgctaaaacatgtgctaccctatttgcttatctctttatcgatttaataaatctagaattcttgcgggagcacacaacctccactccgcgcaggacctagaacacattaccatttgtgctaaaacatgtgctaccctatttgcttctctctttatcgatttaataaatctagaattcttgcgggagcacacaacctccactccgcgcaggacttggaacacattaccatttgtgctaaaacatgtgctaccctatttgcttctctctttatcttgtgcacttgcacttgctgaaggcattgcatcactcctttaatctcttcaatcgtcgtcgcccaggccgatttcaactgatcatgcctcattaaatctttaacaatttctgcattgtccatctccagcacgttaattatattggcattgatttgtacgtgtacgtactacgtactatctacctgctcgtgtgacagcaacatgcataatgcattggtagctaactaggctccaaaatgcagcagataatttatgaatgtactaggctaaccgaatacgtgcacgtatgccaaaattgacag

SEQ ID NO: 44350 - DNA, 1015 bp, Oryza sativa
ccacaactgtctccaactccaaccgtgtaccacccccactctccctgacaggtgggccatccatcgactcctaccccaacctgcccccacgctaacaaaaaataaaagtacgtccacttctgtggttaagttcttcttaatgtacatgacaataaaaagggcgaagtttttttaattaacactcaaaaaaacaatcatgagacagggactaatcaagatggcgaagttgaatagagaaatgggcgcctcacatggccgtccctctcgcggagacgggggccgggatcattggatcgatcggaagggaggccctttgcaagtaacgtgttgtcactcctcacgactcgatgactcgtggagtctacgaacatttggttaggatggcacaattgacacagacattgttagctacagcagcgcccctggcatgttctccttactgttttcgccacattgccggtggaacactgtagcactgccattaattcgaccgtcaggtattacgcatatgcagacacgtagtagtattaattatccacgtgatcggttagcatatgttagcgtacataaagttgaactatccggagtatgtatacagagcagaggtaaacagaggaatggaatcggatgaatccgttataatattgagaagaggttttgtcagaaattttcagcatatatcgcagataatattagtgtccttttcagggctctcgagccgaatccttgcgtgtttagatgatgaaacaagtctccccatgacacatagttgtagtgatagaacagtcgagcgaacgtcgttgatacgaatttttaatttaaactgtatacatcaaaaacatctcaaactaactgactagatcatagtcctaagtcctaaccgtcagttaacagacataatcagatcgaactccccccccccccctgcccccaccagaattaggacggcaatgcacatcaagcgttcaactacacttccgttcacccgacgatcatctgatggcgaatttattcg

SEQ ID NO: 44351 - DNA, 816 bp, Oryza sativa
ccatcgacaagcgcaacttcctaaaaatgtcatcgtacaagcctatttctcccagaaataccataatagtcaaacggttgttaacaactcttcgttaagttgtatgaaaagacattcttaccctccagacaaccatttgctcacacaatatcattttgtattgtttgctcacacaatattattttgcattgatccatatttatgttagcttccaaattcacggacatcattattttgctatcaatcaaattatttcataatgcccctgtgtcgttgcctgccacctcctcgcagcccgtcacgccgacgcctgggaccgtcgggcggacgcctgcggccgacgcgccactgcctgggagccccacgccgccacctgggaaccccgcgtcgcagcctcgccgtcgtcgcccatcaagagagttaaatcgggttaggtttaggtttttatcttttcataatttttttcctttaccggtggattgggatagaataatttggagtgagagcaatttggttattattgtaaaaaaaaattctaatagtgtggactaaacggtatgttgactgtgatggtatttctaggagaaataggtttgtacgatggtatttttaaaaagttatgtttgtcgatgctatttctagaattaaaatgcttgtcgatgatatttcatgaattttctcatctttataagttggtgccattaactcttggcaagcgaggtgctactgaagtaactgaaactgagcttttgctgctgcccggctgcttactttgctctgctgccttgctgctgttgctgcctagcaccgctgcta

SEQ ID NO: 44352 - DNA, 826 bp, Oryza sativa
gggcccactcatcgagtactcaagttgccaccgcctcactcctcggcggtggcctacttgtgttccttcgtcgtggctcgagcgaaacttctagagccacacaccccactctgattaatctcgtcgacgcctcactcctcatagcagccaactcactctcctccgtcgtggcttgggcagagcaacctctagagcctacgtcctcctctgactaccctcaccatcgccaccgccactagaccttgggtcccttagctcatcatctactgcctctctttcggcgctaaggtgctgatggatgaccatgactagcacctgctagagctcctcctcaaccgacgctacggtttttatatttttctaagagcggcaaatccaagctagacacctgccccatgttgactcaatgggtcaatcacggttagtttgttacttcagcaaaaagtacttcccaatccaatcagtttgcaccagtttttgaagacagggatgtattatattcgattgtatgattgagagagaagatttaatcaacaacaaaaatgagggaaaaaaatagagctattccgagtgaaaatgtagtcatgtactttacattaaccaacgagccgattctctaaggccatttttgggtgaagctcatgaaaaaggtatgcttggacataacactggtaaagaaatcatctttggtcggtcggccagatttcacaatagtcccggttgtattaaaaaccgggactatttagtcccggtttaaaagctcaaaggtactttttggtctttagtcccggttagtattaccaaccgagactaagggctgcaggaa

SEQ ID NO: 44353 - DNA, 700 bp, Oryza sativa
aaaaacacaaaaacgaaatggatattgtttgcagacatgacaaaccttagtattgataacatggtggagttccaaagcaaacctctggattgttgtatgctgaaaggtgctggaatatcaagtacatagagagggaaacagaaagcagcatgaagaaccctgaaattagtatggcccatgtgggtgctgcatattcggccatcaaaggcaggaagagcgcaggattgaccctcatgacagctggtaacacttccttgaagtccaataaacttataaggactcaacatcatatagtctccttaaccataaggcggagcatttcaattgaatgggcttggtatcatatacatataacccaatgctgccaccatatgaatcaaattcccaacccaaatagtttactatctgcaaggaaaatgtctaaataatgtaaatctaccaacagcacgaaatttcatatgagaattgggaaattgagtgactaatagaccaccctatttagagataacggtgaataattgagtatgtaaataaaatctccttgcctactccaacaggcctataggaataggagtgagcagaaatgtagaattacacagtgtgctgactaaacgaattcaccgttttaatagattcagttatgcaagaaaaacttctttcccccataaacacaatccaactaggcaactagtataggcaa

SEQ ID NO: 44354 - DNA, 2430 bp, Oryza sativa
  unsure (1)..(2430): unsure at all n locations
ccatcatcctatttaactttcccgcgagtagccttgtagaactccagcagcccagtgtactgtaattgatcgatcgtatatggccgtgttntagttcgtgtgccaaatttttatttaagcatacggatacacatttacagtattaaacatagattaatagaaaacaaattatagattccacctgtaaactgtgaaacaaatttattaaacctaattaatctatcattagtaaatatttactgtcacccgaccaccaactcggccaccgtcaccggcggccgccggctcaacattttcgagggccctaggcgaacttcacactatatgcccttaagaagttaagagtattttttttaacttgtaatatatactctataaaccacaaatactatagtaacataaataaacatttctaacgtggtaaataataaatcaagcagtttacaagttgcaatatagtaatttgtttcgataaaataatatcgatagtatgattgacaacttaaaaaaacatagtagaaacaaagtactatgacctaaaatcagtgagggaaaaatctatataatcaagggcctaggcctaatgaaaactaatccaccatataccttaatttaattagcttatggacttatggtgcactgaatggttgtatacttatattgatcccttgaacggttgaaccagaatggtagaaccctaagtccctaatctaggtaatttaatggggaacaaaaaataaattaaaagaacagttcaattcgaatcagtgaagagaatcgatggattggatcatcacctgatctagtgagaaggatcaatggattggatcatcaattctaatcagtgagaaggatcaattctaagctattgggctaaatacctatatagggtatatacctggatcggagcctccattttggctgggccctaggccatcgcccttatggccctgctccagagccggccgtccggcggggtgccagggacggtgcaattcagcctgccgccgcagtcgccggacttggagctggcctgggcaaagaccgtgttgccactgccgctgagggagcatccggtgctcgccagatggtgacgccgggggaacacgttgacggcccacacgagccctggggtgaggtgagccattagccgccgacgattgggagggcgcccgcgcgcaccgtgaaggtgcagttgttgacgatggtaacggtagcgccgcaggccaatggctggaggatgagcggcatcgagaaggtaaccggtgaagttggagactccatgctgtgaactaccagtgcgagctcaagcgtagtgctagcgtttgttgttatggattggccgtgattgtgcaagcgtttaaacagtgtatgtgctgaccaagagctggaacatggatatggatcatatgccgtggacctgaggttgttaccgttttttttttttgacaatttggtccttttaaaaaacttattttgaaaactaaccctcgccaaaaacttcaaccaaaaatagactgtgggctcagcgccagttccgttggcgctgagttccaacgggtcagcgccagtgactttggcgctgaacccttgcccacgtggatcaccagtcgatccgattgccgacgtggcgtagggtcagcgccaatgcatttggcactgacctccgtatagctcttaagtatgtgtagtatgcattggcgctgacctccgtatagctcttaactatgtgtagtatattttcaaatcaagtagtaatgtgtagcgcagtggtgaagcccatcccttggctagttggtgacctgggttcgaaacttgagctttgcaccttttttttcgcatttatatgggcaacagagaaataccaaaaaagagtgcagacatgggggatcgaacttaaaatctggtgaaaaccaaacaagcatttcaaccactgcactatcaatagatcctggtaatgaatagcacactgtctacttattatgtaccacgtccacaatcaactctgctagcgtggcaaattttagcgtcgtactggcgctgagacgttggaccatagcaccaacgggattgacgctaagtccacggtctatttttagttgaagtttttgacgagggttagttttgaaataagttttcttaaagtaccaaattgtcaaaaaacggtggttgttaagagtgattatacgtatgaaaggtaaagttggtcgtagcatcacaaattagaataaaaaattgatactctctccattcctaaatatttgacaccgttgattttttagcacatgttcgaccgttcgtcttatttaaaaactatatatgtataaatataagtatatttaacaatgaattaaatgatagaaaaagaattaataattacttaaaatttttgaataaaacgagcagtctatttaaaaaaatcaacagcat

SEQ ID NO: 44355 - DNA, 1407 bp, Oryza sativa
aaaacacgtgcacgcaggatgaaagcccttaagtccatgaaatgggccatcgaatgacactctaatagaaccttagcaaaatatgatcatgccatgcaagctgtcccgtaaccctggaaattcacgagaaaaggttgcatgatgtacaattctgtgagacctaccggtggggcatggggggtcagctgcacccccaaacgttttgggggagaaatatgctacctctccctccctctcctttaatttttgaccacacacagcgcctccctgttaagacacaccattaaaaaaagtagaagctcttggatcaaaggaaaagggataatgaccattagatatatgaattgcaactgcctttgttgaggaagtttgctacgtgattaactgtcaaggcaaagcagccaaaccaacactgttgtccgtaaaaaggtaaagaagccaaaacaacagtgttgtccggaaaaaaattgaagcaaaatatgttgcgactcttgccaattgtcagtaattaaccacaacagtttgacaagccgtttgcagtgcatataaagaacacgttaatttcctctaaaaccctcctcataatctccttttctttctgtacagcaaaagcacttccaaggtacacataaaaaccttccaaggcttagtcatactaccaaaaacgttcaagaaaaaaacatcagaaccatgagttaacgttgagatcaatttcaggggcggagacagcttgaagccacaccagggcttagttctattaccttgtcctagctctctataaattcaagcattctttctaaaattaatatggaatttgcatggggtttggatcccagaactagggcttgagctctactgccctaggcctggatccatgctgatcaatggtgagagtaataaaattcagttgcaaagatgccatgcttcaaaaattccattttgctgatgatatctcatccatcaatggtcatatgcttccattgataggtaaaagatctattgtgatattgtacgtcgatagtaaaatttagttactgtacccgcatcctcattttaccatgaacataaatatgcataatcacaaacaaacccacaacatcgtgtggggtactcttagtcagtaataaggttgttggggcttgtgttttgtggcttactaggaatggctttgttttccaaatcattgtgttaaaatcaccctagacaatcttgtataaaatgattgcgcagattcagagatggatggtcctgtaaaatgaataggagcacagtatgctgcaggtgtggtgtgatcgaattatggagcataatattcaagtgctgaagtctcctgacgtgctgccaatggagattgatggatagctgaatgtctgaagtttagctatgagaactgtaatcctgtcactt

SEQ ID NO: 44356 - DNA, 4777 bp, Oryza sativa
cctgcagcccgaagcagcacgacgccggcgccgctactcgcggtgatggagatcggcgcgacggcgtaggcggcgggcgaaggagacggaacgggtgctggaggaggggaggccaggggacagggggctgggtcgcaacgcaaggaggcaagaggcctattacgctgctgggtcagtggggtgttgttacaggtttgggctttttggtggctcggtctccatctgttccatctcctcccaaccccagcccggttgaaacaaaaaaacaactagggtgtgtttggaactttggggagaatactaccaatcgaacgtccgatatatcaaaaaaaacatcggtcggtcaaaatgttgcagctgaccaacaagtgaaacattaatttatatatggtgaaacaaaaaaacagcaactaaaacatttaaaaaatttatgaaacacagtgaagatacacgttgaaacatattgctatcacttatgaaacaataagagttaatagattgaaacatatatttttctttcatcaaaatttaatcgtgtgatattttattataaagatttaattacaacgaatacaacggtgtaatcgaatcatagattggataagtagtttagaagaaaaatcattttaaagaccgataaaatgcatgcatgcaagcattgatggagggtagtagcaattatttttgataattttatgaaacacaataaaaacaggtgctgaaacatatggatataacgtatgaaacatgaagtattaatagtttgaaacttatatttttctttaatcagaatataataatgtgatatcttgttataacgatttaattccaacaaatataatggtgtaatcggattttagatcggataaatagtttaggagaaaaaatcatttgaattttgaagacaaaccccgatacgtctctctcattctaaatgacctttccatgggtctcacaccccatgcacacttggaaacacatgcttgcatgaagcgggttcgatttttctcttttgctcggacgacacatgggaagcaatttccgaactttggataatgggatggtaaaatcttttcccaccttctaaaatggtaatttttaatcttaaccatccattcttcatatctcatctcaaccccccactcatatccctatcccaatctcacccctcttactccattatctaaggctgcaggtaaaatggttgatacctgtcgtcgggcaagcatgagaaggacagaaagttggctgccagtatggattttcagtatgttccgttgttcggtaaggcaaactcaacttgctactttgttgggcttgccttagtgaacgatttggatgattgcatgagagacgtttgctctcgaaggagagcggagttgactctcccgagcaagctatctttttcttgcccctccgggataggttgccaccggaagtgatgattttctttttatggatttgctagatttttgtcgatagaaaatagggagaaagactcttgatttttcggtcgtcggatttgcattaagattcgtgctagcgtgtggagggaaaaattcgtgtgaaaatttacttgtgcacttgcacaggatcaaactcaggacctcgtttccgcaaaccatgctagccacttgagttgccataagattttgaaagatttagacaagttacattacatacattctagttacactgtaattatatttgaaagattttagagaaattttctttcgaaagttctatagtaacttcttttatgattccaaacgactggtcttgtcacgccaggctagcatcaaccgttcaacctagccttggatgacttgaatggcagcctagccaagcccaaactctgtattgtgatggatattgtctgtatagcccagagttttcataacacaagggagagatcacactaagcttccccttttcgggtttgcagcccagctcgtgaggcaaggtcacgctgctgctgtaggatcgtaaatgatctttcccacctcaaaagctagccaatgagggatgggctcccccacttatatattaagtttcttgtccttctataaccaatgtggactattcaataatctccccccttcatatattggtgtccctcagccgttcaccaccccttcaccgtttccttatggtctctcaggtatacgttggtgtccctcggcctttcaccgtccattcactgtttctctacggtccctcaggtatacaggctccacaagcatccacggtccatcatgccttcgcacactttgccactcaggttagagatattgaactaaccagactcagatagcaattgtagaatcgtaaatggtctttcccacctcaaaaattaaccaatgaggtgagagactcccccacttatatactaggtcacttgccctttcacaaccaatataagactattcaatagttgcagcgagctgaatttgtggaaacaaaacggctgttcgtaaattgtgcacaaatttttatgacaccaaattctaccgttattaaaattatgcgtaatcttttacaagacattaccccagccctgtgtgttactagtcgcttttgcataaagtttcagaaagccctaggtcaaaggtgtagcacgaagatctgcagtggttttacctcaggtagttttactcattgtggagaacgttgtcggcgcctcggaggttcaggctgcgaggataaaattttctctttacgtacataaaattttccagttttctaattctcttaacgtacttcagttgcagtattttctcttttaccattggttatgaacatacttcagttgcagtattctgtctcaaatgactacagtatatagattaggacttaggtgtagtgatgattctctaattctctactaatcctattgacctactgcatgtaaactgcaagtctacagcatagggtcgttgaagctacttgcaagggtcgtcaggttaattaacctgtagggggagctttggaagatgcagcagtggcaggttcgtcaaatgtcaacgcgagtaacccttacgctgcccattttacaagtcccaaatgttcttgttcgcagcagtcccgggccatcagctacctctctcgagaaaagcagtacagatctttcgatctcccacacacgcctggttgcataaatctatgcgttttcaacttcacccctcctgggatatcgcaagcacgagggagatctaaccatcagatgaagtttctgaattctacgttttgttttgttgttttgattttctttaccagagcgagatcgctgtgctgcaattgccgtcgtctgtcagcttattagttcagtccaggcattatcgggagcgtgaagcggaagcaatggttagttgttgcagcaagaggatgagcgatgaattatgcatggcttctatgtcaatagaaaagtacaaaaggcaaaagcagattaaatgctgaattattgttcttcccttgccgagcagacagaccggtggttcgtggagtgaccaagcctgaaagttctgtcaaaacaagagggttggtggtttaaacatggaccgttgttgaaaaatagattcagatttcactatcaatcttttatgcatcgtggggtcatgacgggacagcgtccaaatttcgaacatgatgagcaaatatgattcacaggactggccaaatattatgcattaatagctataatcaagaatggctttggtgtatttcagagtggcacccactgcctttcaaggagataaggactaagatgtgctaatccctccaactatacatatgtaaatcattttagtcatactttgtcgtctctgttctgttcctgttatacattttctgaatgcccacgttatcatcagcaaatatctcgcaatctttctcatttccggcatacattagaagagagagtaaataaagcgtggaaatatacaaaattgcatgccaatttaaccttataacttagttcatgtgttcgagaaactaagatcagtatacttgaaaaactggtgaaaataattggtcgtagcttgttgagtaaagaccggattttgttccattataaaaaaaattgaaccagtaaatatgaaaagcattgcaagttttgtctaaatgagactgcaagaatcatgatcttacgttaaaagtttaggccggatgcaaatttacatgagattacaacaaacacgacgtcacggcaaacagctaagctcatctttttatagcccaaaaaaactttatagcttgacgaaaaataattctggagaaaacgacccgtacgtacagcggtaaagggaacagctaatcagctaccacacaacacagaatggcaaagccagctagtggataacagaacaaacaagagaagatctgtttgtttaatgtgacgaccatctggccatgtgcaaatggaatctcagcactgtggttctcgtatgctcacctcctaactaatactttccataattttccatgctcaccacaaaggcaaaagaacaaaaaaagcaggaacagattagttaatgctactagctggagtagtaagcactaagcacggacagtaaactgtcaattcttcaaaattaaccattttacatcagctgcagtggcagtaaaaacttttacagtgccacaaacaaaaaggagaagaaattcagccactcgctgaatcactctcacagtcactcaaacaccatcaggagcagttgcattgcagtccaaacaccacctcccctctcttccatccaaaattttacagtgaaaaaaaaat

SEQ ID NO: 44357 - DNA, 1008 bp, Oryza sativa
ctctttcttatatcaggggcagtgtgcgatgcatatccaatcgccatgtttggagggggaagtaacatggggagagagcgatggattggccgctagctagctctcgtagcagccatttctttgggtgcaaaccactgcataaacaaataagcaataattaataacacaaaccatactaaacaatgccttgaaccaattgatatcaaatgtaccatcgtacatagctttcttcacatggacaaagctagatcttgcgctgtatttcgcgtgcggttgctggccagggttggccaccccgggcccacatgccagccacagttatttaggaaaggctaattagtttataaaatgatgcttgattagtaacctaaagtacgagccatgggcagattagttggatcttaattcgtccgttgcaatgctgccaccttggaggttgcttcaaggaaggctcctgaccacaagcaaatactactactacagtactactatactacgctgttgaaatgcagagctttgctcctctgcggctgttcttgttcgcttgcggccggaatacatgcagccaagtacgtgagatgtacgcgctacggacaacgtgcatgtgaaggaggcgctgcttttcaggtcaacattttgtggaagggttttatgttgtgtttgcgtttgcgcagctctgctcggcgatcccagatttgcgtggaggaaactgctctggtactccatggtgacggctcaggcgcggctcaaccgttggatgctgatcggatggtcgatcgggttcggaaaaggcgtgctggttgcttcgggatgaagggcaatggttttacttgagaattactggagtagtagctgaactcggcgagtgagtgtacaggttgaccattttaactcgcactcaagttacttacagtactcctactcctaccttgtgaagcgaataatgtgatcaacattggatagcacaaaatggacgtacgacgcaggtaaacaaatgcagagttgaat

SEQ ID NO: 44358 - DNA, 924 bp, Oryza sativa
attctaggagtggagtagctgttgcggccagggttcaatattttggtttgaaattttaggaatcgcaacccccaaccccaaaaagatcgttaaaaaaaataaatttaatcaaaacttgtttaaatttcaagtttttaaggtcaaaattttcgggcaattcgggaaattttgtttctctggatgatcaaaagtatttttgatttgcaagatatagaactttggctgctactaaggctgcatttggtaccaccaattagaaacttgtctctcacgcacgtataacaaagcaagttattactccctccgtcccataatataaggtattttgatttttttcttgtattgtttgactactcgtattattcaaaaaattttggaattattatttttttgacttactttattatccaaagtactttaagcacaacttttcgttttttatatttgcacaaattcttcaaataagatgagtggtcaaacaatgcaaataaaaactcaaaatcacttatattatgggacggagggagtagcataagattaattaaatattagctaaaaactttttaaaataggataatatgatttttttaaaagcaatgttagtatataaaaattttataagagacgcatcgtattttagtaagcgtgcgaaaaaaataagagaaatgttatgggatgttccatacactcgcacgtactacaataattaggttttacgaagtccatgggcatggagtcatggacaacgtattcactaatcattgaaaagaacaggtgcgtgcatatgggaaaaaaaagaaaagagaaatagaaaactaaaaaaggatagagataataggaattattggtccatgtggtgtgtgccaacaataactcaattgatgatgtgtgcagcacaaggcatatgcgagcttcggttttttc

SEQ ID NO: 44359 - DNA, 1239 bp, Oryza sativa
tatgagaataataacatagctagatgtggaggaatcaccaaataatttaatcaatgcaataccatatagaatagcacgtatatacctaaactggttaccacttattagtaacccaacaaatccagtgcttaaacttgcccatcacatatataatatcactcatagaaactagctaatgtataatttaactataatatattcaggaatcacttggagcattgggtagtacaccttctaaagtcaaaattataatggcatggttctaattttcactttagaaggtgtactacccaatgctccaagtgattcctgaatatattatagttaaattatacattagctagtttctatgagtgatattatatatgtgatgggcaagtttaagcactggatttgttgggttactaataagtggtaaccagtttaggtatatacgtgctattctatatggtattgcattgattaaattatttggtgattcctccacatctagctatgttattattctcataaacaagttaaagatttatctatgagtattaatattttagttacaaaatatgaggctaaacttgatttaactaacctataagtcatgggtttaattatatggccatcgaatattaaataagtactagtattttcctatacatccattcatttgagacatcacttatacttagtttatgtggttgctacagtgacaaaacatgttaaatatatttatttgacatctactctactgtacaatatcaattttatttattagcacatttttaagttgaccataatctaatcatttgatattaatatattttattaaatagtgagttatataccattggaaagcttatgaatttagatgaatttaggttcaagtttcactcgaatcggagctaaaatgaataagttatgctagtttaaagattcaaatttgagttaatccgagaaattgtaaaaatgcactgttcataaatgatttatttttaatcggaaacattatccaaaacccactgtggttgacatgtgggaccggccctggttgacttagggtcaaaccttcttgtttaattaccagtgggtcccgcctgtcataggaataaaatatataattgtgttttcttacattttaactatagggacccacctgccattgagtgggctaatcaccgttagggataggattactgtgcgctaatcacatgtgggtcccacacggtttctctctctcctcatctt

SEQ ID NO: 44360 - DNA, 1175 bp, Oryza sativa
gtggatagatttatcgttcaaggatgagtgctgctactgatgacaacccggtgagcaaattcgctcaattgcagcaatcgcccttctccaaacacgggtttccttaacattaaaatgttatcaaatggaatggattaagagaagcagaggttggctaagccaaccaaattgtttactaaatccacaccagctggcctgattagtcggaatggtcagcagctgatggcgccgttgggacttcaggaatcagaacctgcttttctgcatacccaacccacaaaacggttagccaccgacactgcgctccacctcatgttcactggtctgtgcttaatgatgattagcaccagaactgctgctactattcgaactttcgaaagagggaaagcgaaagtagcgtacacacgtttatgactccattgaaacaaagggttcttggaggaatataatcctatgaattcttttattgctccaaatacagagatttaagagtaattttaacataaggtccaacctattggaaacattctgtgtgtctatctttcttctgtttcgtgtggtttcttgcgtttcatccaaacgattatttctatagattacctatgtttctcgatcaatatgatttgagatgctgagatgtttggttgatgaccaatttttatatgtgttttgaatcttactccctttatcccaaaatataacaacttttaacttttaaaatttattttaaaatgtaacaacttcttcatctacattctcttcttaacaaaatataacattccaccatttaaatttaaattcctacttgactaggaaaagtacctgtcacacaacaatgttgtcagcaaattagcaagccagcactcagttcggttcgttattattactacaacgacacttaggatatctgcatatacatatagtgcgtactttagatcgtcatgatggtgcatgaaaccattttcgttaggttagagcgggtagcacagtggcgtaggttttgatgcatgagaaattgagatttgaggaacctctctcgttgagtcattttctgccttggcagcgaacggggttcggtttgctgtgttgggtgcgacgtcgctttcatagctcgcatatgcaagatcctttgtcttgctcgccttggaacatggggcttttttcttcccgtgggg

SEQ ID NO: 44361 - DNA, 1443 bp, Oryza sativa
gttcgaagtagtggaatgattcgtctcttgatggtgtagaatgattcgaagtagtcacaaggttcggatgaacagaagacatctgagagcaaaacaacgatccccttcgcctcgatgaaatattttgccggcggcgcgccgcgcatggaaccacaagaggagctgaagaggcgtagcatatcagcgccgtgattaacgagatcagctgaagaggcggtaccagatgggctgttctgcaaaacagaagtggaggaggcgggcgtgtattcgtaaaattgccacgctaggagacttggccgtaggatgtcgatcgaacggatccggacgcacgtgtacacgagtgcagctgtactcccgtgtgcacaggatacccttcctacttataattggcttgctatttgtagagttatgcatactattgccaaatatagtcttagtcaatgaacaactaacattaacaactcctagtacctcgaggggcaagaggattggagcactgtaaaaacactaataatagtcatgggtcgtgctaatagaaattctcattttacaagaagggcaacaatcatgtttcttccgccttacacacttaattaacattggtcacacgacagcggaacagctagctcatggcattcggtccaagccaagtgcacctcatatgtacgcgtgacaaagagggtagcatatatgtctggctcaaacctcactagcaacgcccgagatacgaactcttttgcttgccctgttagaactcctattctattgcatatcaacatacttttgtttgccggttcattctatttatcctcgtcgacatcacatatttacatccttcagaaatgggttaaaggacggtgatatgaatcaatgaccaggtcgtcatagagctaggttagttggcatggagctcgagaagaacggcaggctgtttggttgatagtcgaattttaccatgtcaaatcttaggtgtagcgtaatttcttatacagtgtttgattgtgtgttacacttggagttaagtcacactttattagtatgttagctcacacattatatatactcttattttcaagacaaagtttatcacaattgtgactaaccgatagtgataaagttaacctccatccaaacagtctcagctagttaaatgaggaaatgaacatagatagatagatagatagaggatgaaggaggaggagaatagttatacacggaagtattatgaacaagataaaaattaagttttagttcctccatcccacaatggggttgatcgtttgtgctactttccagctgcaggcatctggagcaacaatagtagcaatcgaaaaattaattgtggctgcagcagctgctacggctgtgctgccacagctagcacaaacaaacaacccaaatataaataactttggatggatatgacacatactaaggctatgt

SEQ ID NO: 44362 - DNA, 762 bp, Oryza sativa
ttcctgcagcccttttttatacaatgaaagtaggattaacatgataaaaatactatatggaaccggttcattaataatttggaagctctccatctatcgctcttatttaatttgaaaaaaaatgtatatattttgtatataggtggtgaagaaaggacaattgcatttttgaagagggagggtgcggagattctggggaacctcttttgcatggtgcttctgaaaaagggatcatacaccatcacttccctgtgaattacatattgaaaccatggagaatgggtgtgaggttttaccagattatcaaatttggtatatttcaatatgtatgaccacttgtccagctagttgaaatggaatttatgattttgagagcatattggttaagtactttgtacctgtgcaggtgattataaagaccctcacagctagcctatccctgattcttcaaccttttggtgcatattgtgatggagaattcaatttgagatgcgggtaagacaattttccattttcacctcttgtgtcttgagttcagcaaagcaaaaggcattcacctttataatttgaatttcataatgcttggaaaaattttataataggaataatgcagagacagataactgcatagaagagtaatgcaatcttcttgatgactctacctgtgtcactgcataagctgttatcaccttgtctttatccccagaatatatgtgaacatctagcagtccacttcaatgaattattttatgcatgcttatc

SEQ ID NO: 44363 - DNA, 1195 bp, Oryza sativa
ttacatctataaatcgttcgacttttctcttagtttatttctttaagtttcatcaaatttgtagaaaaatatattaacatttttaatgtaaaataaatatatttaattttaaatttaatgaaactaatttagtgttataatgttgctaattttttttataaatttgatcaaaccaatagacttctgactatgaaaaaagtcaaacaacatattcatttgccggaatacattatgaacatgtcttcgataagaaccagtaagaactagtttggtatactccgatgcttttttgtttgtttatgtataattactcacatgggagtattactatttaaagtagaaactatgatgatgaaatctagaacacttaaaaaaataatgatgaaattcagaccacttaaaaaaatgattaactgttggtggaagaggaaaacgagagattttttatgcataacatgtgccctgatcttattcaactctaagtgtgtcagcatgaaagtgaatttggattgaaatggtgtaaccttttatcccatatttgtatttctctttagactttgagctgaatgtcagtggacctaaaaccactccggatttgtatttctctttagactttgagctgaatgttagtggacccaaaaccactccggattgagtagggggagttatttgttcggtttcaatagttgagggtgcaacatgtctggttttcgagttcgggggtataattcggtcgacctcgatagtacggtggggggtagtaattcgtactttttccttgtaaagcacacatgtaaagctggcatatctgttaaaaaagatatttggttaattcaactgacttgaaaagttattttttaacaaagaaaatttgtgctcctgcttctgatggattaattcaactgacttaaaaagttatttttaaaaaaaagaaaatgtgtgctcctgcttctgatgatattctgcaatgagtatattctcacagttgcagtatactagactaaatttatagtacctaataacgtgcgttttacgtgtactgttactatactgaaaagagtgagcctgtttgattacacaaattgatgtatacatatactcgagctaacacaatcaatcaaattgtttttttcctttactttcagtcatattttctactttaacatatacctaataactaggggctgcaggaatt

SEQ ID NO: 44364 - DNA, 1113 bp, Oryza sativa
ccactgcctaatcttcttctctagtgccgaccgaacgtcaccgctgccactttgatttgggaactttcacctcggggagttctagtccaattccttcccatgggagaatcaaaatttcccatgctcttcttctctagttgaggagatattagccactgcctaatcttcttctctagtgccgaccgaacgtcaccgctgccactttgatttgggaactttcacctcggggagttctagtccaattccttccatgggagaatcaaaatttcacatgctttggtttcaatctgcaacgtttggagttccgccatcagacaaattccacccgccgccaccttgccggtagcctcaaccagtgagctcctttttctggatgtgcttatcacttgttccagtgtggcaactagcacttcccacgtccttgccatgaccagcgatgttgtggttcgtctagccgcccaagcgctggtgtattttaagaaccgctggtgtattttactccagaataaacaaaccattccagagatttctcaactcccaaaacaattattccatgtttccataaattgcaatgcaataattacccaaaaatgaatttcttttggaacaaacgaaagagaccagaaataaatttatttcgggacagaaggggtattaattaaactgctgtagacggccggtcacactatctttatgctgagtcatgtgaacaggatgacccacagaaatcctcttgaataaagtgtttaataatttattatgtgtatgtgtatggctaggatacagccgtgcacgctgccaaagcatcacactagagttgctgctataactgattgtacctaacaaccatcagtaccaacaatagtgtcggtggcagtttcaataaaccatagagtcactgatataattatatgaacagatagtgtcggtggtggtttcaatcaacaatcgtcacctatataatctatatatccccaacgtttgcatcacaaaaacttttagagctccccaacctatcagccatggaacaagttcatgttgagaccaaagagaaagactcgaacttacttgcagctatttcatctgaaaccaaccacgatgacaatcccatat

SEQ ID NO: 44365 - DNA, 675 bp, Oryza sativa
ccacatccttcaccacgtcacgtcaaagcagaaaaatttaccagtatggattagttcgggtcttaattttacagagttgatcatgagtgaacgagtccagctagctctagcatgaattcatgcagatgcagcaaatcgatcgatgtggacactacagttatttctcatctactacaaacagcgtggtcaagccgacatctctctctgtttgctcgccgcgacgatctctctctgttcctgccttcttagtggccggattgaccaggcgtttactaactgcaacagacacgtacgtacacaaagagaaggagagcgcaaatccatctcgtcgattgcattttatgttgcgttcttgatgttgttggaaaaatctccatagttgctggaaaaaaatattgaagatctatcctgcgaggttggtaggattttgttttggatcggaatttggaagattgatgcatcatccgtggttgaatcttcgggctcggggttcacaagtgaaaagactaggtatagcagctatggtggaatctaacattgctaaattaaattgttcagcaagtaacgcaacaactcgcattgttggagctagttaaaaaaccatgcactttcagtaataccctccatattttcacaggtaaacccatactcgaaaatgcactgggctccttattt

SEQ ID NO: 44366 - DNA, 1277 bp, Oryza sativa
attcctgcagcccttcaaaagattaaaaattatctactccctccgtcgggagtcctaaaaataatacaattatagcattaaaaagacaaattcgaagagaaagaaaatgatcttagatatggatagaaattctaaggatgggtggctggataggaaagtactactctagaactgcattctttttaacaaattcagtgctatagttgcttttttttcgacaaaggaagtagtttaaaataactagcattgaccttcttgttgtctcaagagtatggatagtacctactatatatatacagaccttattgttgggagtccacttccacattgctaagcaacacccaatacgttaagttgttaagctactcccttcgttccatactactccccctgtttcataagtcgtttggcttttcttcttagtaaaaattctttaggtttaatcaaatttatagaaaaactttctaacatctacacctccaaattagttttaataaatttagcgttgaatatatttttgataatatagttgctttgtattaaaaatattagcataattttctataaacttagtcaaacttagaaaagtttaactatgaaaaaagtcaaacaacatacaatatgacatgggggagtataaaataagttaatttggtcctaattcaaatttctctaacattaacggaatttatgtgggtgaagcacactcatgcaccaagctatttgtgaaaagcaacgggatttcgcacgcagttacctatgccaaccgcatgcgaaaataatttcgatgaaaaaaaaattcctaaaaaaatttcatcgaaaccctagatccccaattccctgaaaccctagctcccaaagccactaccatcgtcgcagttccaactactgtcgctgcagctgaagccactaccaccgtcgctacagtcgaagctaccatcgtcatcaccgctcccaaagccattgtcgtcgtcgcggccgcagctgccgtcgccactccaattgccatgccgtggggaagaactgcccgccacggggccggtggtggcagatccgcccgccacggggacagtggtgtggcttgctccctccccaccacttcgcgggagcgccacaatagatccacccgccaaggggccggcgcatcgtctgctccctccccaccacttcgtgagggaggtggagaggccgcctttgatccattacctttgtgctcggccgttgtcggatggaaggggggaggcgataggtaagtgggagaaggatggccaacctcc

SEQ ID NO: 44367 - DNA, 1412 bp, Oryza sativa
atctttttttttccatgcgtacatcatattttaagatgatttttcgtgtgatgatacatgtcatagtgctgcagatctctgattttttttcacatttttttgactttttggatgcatttgtgatgatatatgtcttagagctacacatctctgaatcgtctttcaacttttttttgactttttaggtgtattttttagctcagcagtacgggagcacggaactgttccatagcacctgatacttcctcgggtggtctgacatgtataacaacaaccttgacatgtaagccccaatattttctgtttgtttactacacgtggcatccccgtagcgtactactgtaataaaatcatggtataaacagacctaggtataaattgcacggtattaataaaaaacaaatcgaaatacgatgatagggagaaaataaaaacaaatcttcggtgaatagtaaagtgacatgtttgaacattgttgaaggacgaatttattgtttttttctccctgcgtacatcatatttttaagctgattttttgtgtgatgatacatgtcttaaagctacacatctctaaattttttttgaactttttttttgacttttttggtgcatttttaaagtttggtagtatagaaacatgaaactgttacgtagcacctgtacttcgtcgggtgatcatcacagcaccctttccatcgaagtcgttggcttctcagccctgggtggtagtttcatggccacagtcaccgcagatatcgctggcatgtcgactttcctcttgagcgtctttctgaatacggcggcctcctcgtgcaagataatggcgaaggggacaaggtaagccacgaacatgacggcagctctgacatgtatgacagaaaccctaacatgtactccctccgtcccaaaaaaaaaaaagacaaaccctggtttccgtgcccaacgtttgaccgtctgtcttatttgaaaaagttatgaaaaaattaaaaagacaagtcacccataaaatattaatcatgttttatcatctaacaacaatgaaaatacgaattataaaaaaatttcatataagacggacagttaaagttggacacggaaacccagggtttgcctttttttaggacgaagggagtaggctccaatattttctgtttctttacaagtggcatcctcagtagcatactatctatctatctattatattattaaaacagctttgaaaggagacaccacgttcactgtggggactaaaaattcccacattaatcggagaaaaggaaaaaagagtccaagtagaaatacaatctaaaaatagctgaaattcggaattaaaagtaagcaatattgaaagaaaagtccatatagcaacctaatacgaaattaatcaaaattcagaataaaaataaaataaa

SEQ ID NO: 44368 - DNA, 973 bp, Oryza sativa
gattaattaacaaggctatacataagcagtgtggtggcggttggcgggacttctaaacacgtaacggttaaaaggaaggacgacaggtaggtcgtgaagcaatcgattaaggcggttggcgggacttctagaaagtaaaaaaaaaactacaataataatcatatttaatttttaaaatctcaattacaataaaaaaagaggcagcgatcgggtcgtataggagtacaatggcagagccgccgatggatggtgggttttttagaaagtaaaaaatgaattccaatgttagttatgttcgatttttacaatcccattgacaataaagagtatagtgacaatgtttgatgggatttctaaaaattataaaaaaatgaaacccaatgagacaataaaccataatgataatcatgtttgattctaaaatctcaatgacaataaagaagagcggcagcgagcgagccgtagaggagtacagtgacaaagtcgctgacgttttggtgcaacttctagaatgtaaaaaaataaacataaactataattatgttcgacttttaaaatagcaatgacaataaagagaagatgcagtggacggtcgtagaggagtataatggcagtgtttgacggaacttctagaaattataaagaagaagcccaacatgacaataaacttatagtttttagatccaatttttaaaggttccaaggagaataaatagaaacggtggtagatcgagcaagaaaataaagaataatataacagaagtaaggagtatcaactggtgtgacttttaaaaaactgtaaaattggaaacacaaggatgataaggtttggcctttcaaaatcttgagacaacgagataactatttaataaattttaagtaaaatcatattaaaaaatatataagtttatatgggtgctagccgcgcaattgcgcgggccacccaactagttgtaatagggctgcaggaatt

SEQ ID NO: 44369 - DNA, 671 bp, Oryza sativa
ttaaaaactctactatgatataattttgatggcacgaaattaaatttattacctccatattcaaaagtacttgattatcattttaaatttttgtcacataaatgatattctaataaaataattattggttaaagttttttctaacaaaacaaaatacacattatattttaaaattaaaatatagagagtattactatattttaactaaactataattatagttatagtgtaatacaaattatataaaacttacaaacaagttatataaaattcacaatgtagttgtaggttagttacattataagttataccatagtcaaagttccaaaatgtcgacagttttaagtctcttgtgtactcataaatttttgcctatcccttcgcgcttctaaattttgcctcatctcctacataccctaagtttcaaatttgatccctcaaaggccattccgtgagttaacgattagctgaccattagattttataaaaaaaactagctatgtggggctcactttgtggggtccaagtatcaataggtgatggcggtgaggaagactcatcgccaccgctacaaggaaagtttaaaagagtaaaacattactcttttctcttacttggagcgtgtgctagttgatttaaaaaaggtggcctccaatgtaaaagttgattca

SEQ ID NO: 44370 - DNA, 2043 bp, Oryza sativa
tgcaaaatgatatatcacttggcatttattataaactttaaaaagtacatgactggtgttcctacgaatatatgccattgcatcataaaatctatttttttccaattgtaattaacatagtaatgtaatataagccaatacatcataatatctaagtttatgagtatatatactttttccaattgtaattaacatggtaatgtaatctgaccaagttgaccacggtaaaaagctaattttgagatttgataatagcacttgacatatgaaatcgaatagatctattgcaaatttgataatagctctagagcaactaactagcaatatttgctcacttaaatatacaaataaatttgtaaaattaattttccagagtgaatatgtcagatcctttgtccgagctatcttccgaaaggctttcaaaattatgaacgcaattttgtgcagcagaggtgagtagtattgatatgtttctcatcatgctttatttatattattttcttttggatcgctacggacatgtatattaaaaactttactcacaaattaaattatttttttagttattgttaataagctacgaaacataaagaaactgatataagtaaaacaatgaagtcactcatgcatgaagaggcaaaactcccgggcacggtctgtccataaaaaaaaagttgtgtccatgtgacatgacaagtcacagccaacttctaaagagtgttaattaatacggcagaaattgaagcgtcaaaaggagcccacgcgtcccgtcagccatactagactacaggctgctacagcaatcaacaaaactagtactactcaatcgtgctataagcatatgcacttggcacgcatcttggaaccaacgagcagctgagatttatggtgcatatgaacttcggttcacatctgagtttccatatatatatatatatatatatatatatatgtatatatatgtatatgtatatatgtatatgtatatatatgtatatgtatatatgtatatgtatatatatgtatatgtatatatatatgtatatatacatatgtatatatacatatacatatatacatatgtatatatgtagagatacatgtacatatatgtatatatatacatatacatatacatatatacatatacatatatacatatatacacatatatatatatcgggtataattgatggatatatgttatacaccccactaatgttattgtaagtgcatttcaacgaattagttactgcaaataagttgatattgaaaacaaacgaggcgttaaacaaagtttttgtcaaaatttaaacaatgatatggtgctatgaagatttccagggtggtatggtacatttgtttcgctatagtttctttaggtagtgtcgaataatcgacctagctcattttcaatttcaaaagagaatgccatatcaatacaatgagaatttgagtactattgattaactccaaatgatgtctactctatacgataaattgacaaaaaaaactatttttcatcaccttcattttctctgtccttccctggaggatgcaagtatatataacagagcttgctacactgctctaagtatggtaagaccatacataatagtaaacaagaaattaaaattgtgatctgcacggatctttaggggcatgaccatgtctatgtggccaccttgtttaaaggttactgagaagaaagtcttggtagctatggtcggctactcagtttcatccattagataggtattcgtgtttaattttaacggtattgtcctatcaatgggcagaatcagtatatttaaaatatttatatatagtgttggaaataagtagacatgatcacttaggtaagtagtgggataaattttttagtgtattaatgatgtattgagcttatttttgtggtacagatataatttcatctattaaatagggagcttttaaaacaatgataatgagtagtggtgatgatatgcgaatttacatataaatggtacaaagtgatttttttttaatgggctgcaggaattc

SEQ ID NO: 44371 - DNA, 1725 bp, Oryza sativa
tacgatgatataagacttattttagtattctttttctgaataataaataagatgcccacgtatctgcacgggttttcttcctacttaggttaataatgaacggtgtttccaaaaatgaaataaagagacgtactagcgtggaactaatataaaattttttgacaaattgacctttgtacaaaacttattttaagattagactgtgctaaaacttatattctataaatgaaccgtcggctcagcgccatcaagattggcgttggggtatcacatctcagctccaacggctttggcattaagatcctagttgagggtggggagttccatagtgataattaaggtggtgccttgtttctagccggaagtgagctagtggtgcaatggtttggtagcttacttggtttatgtaatgttgtactatactttctctgccccataaaaaataaatctagtatgagatgtgacacatcctagtaacatgactgttactatggtgtgttacatcatgtgcttgcccctgtccagatttatagtattatgatgtgtcacatactggaatcggtttgttttttatgagacggatggagtaggttcaaatccctttggccgccaggtaagtcattttcattttttctctctttaaatctcaatgctacacatatatacactgctaagaaaaatctttttctcaggtagccaaaaatagtttttcaggcggggaaaggaccgcttttccccaaaggcctgtgaaaatagatattttcgcatgcgacatctctatcaatattttcagcgaacaaagaaaaaaatcgctgccaccaccgttcttgtcgccgccgttggcggcctccccctccgactgacgtctctcctccgtccgccgcccttatgtgtcttaccggccagcacgatgcgccttgagtaaagcaacgacctcatcatgtgtatcctgatcccaccggtgggcacgtaggcaacgaggaaccccgttaccaccaacggccccatcatcttcgcctgcgccgccgcttccacctgcagcgcgtcgggctcgtacttgggcagctcctcctcctcggcgtggtgcatcacctagcgcggtagcgcgcgacatctcgatgagacccgggtcgagccacactcgcccggcctcacagattgaactgcgcagcgtctcgctgtggtggtaccggaactgggagatctaggaagggaggggtcgacgctgcctgcggtgccggctccgttggctcctcctccgccaccgcttcctcctcagccgatggacaaatctgggagggagggaggattggagcgccgccgccgcttcccaacctcgtcgccaagccacttatggatagatgggccaaaaactcagaaatgacatgaccaactgggccaaaatttaaaagtctgaagtgagcaacagaagaggaggctgccgaccaaattgtgggccggttgagccagcctagggttcggctgaaccctgggttcggccgaaccaaccgtggcgcagtttgacccaggttttggctagatggctcagatagactccctatgatggttggagggtattaccgacctttccaaccgtcatacttaagctataaaaggccctcgctctctccatttcaagatacgcctcaagcaagaagcttcagtggaatagaaatagaatagaaatagaatagaatcttcagtcctcggagtcttcggaagagt

SEQ ID NO: 44372 - DNA, 1149 bp, Oryza sativa
ttcctgcagccccattggtgtgggtataatgttcatttatatgattactctaagtcacgacggtgattgtagagtagtatttggtagcataagagaggtgcttaggctactgaatatcattatttggggttatatggtgtggatatgtcgaggtgggccgcttatggtgacagctcagtacgggtattccttcgcgcgtgtatataatcctaagttactttcctgggcagggtactcctccgtatttagccccgattggatggccatgacgggttgtcgtaaggaactcgacaactaggggcggtctctcgaaacaccaagagggcattgtaagaggggtcttggctatataattatatagtagataatattgactaaagtgtatgtatgtatattagaagtataggaaatgattcttttttaattctttccacttaacctagaattagtatgtacgagaatagtgaatgcttcagctttgtgtcatttgaattgaactaacccctgcttagactttgattattacaagtaagatacaaatattagcttggttctctctattataatcttcccacgggattaaaaaaatacaatattgttggaatactcccaggtgaaatgctacaatggtatatctgtgcgcttgcggatgaaatctgtagccataatataccacgagtgtttctgtgccattgctgggaattacatttctagtaatatcgttaagaaataccaacagccgggacgggagagggaggagccgagccaccgcctcacctcctcgtcgctgagccgccgccgttgccgggagagggaggagccgagccgctgtctcccctcccctccccgagaccggctggcggtggatctgcgcacctgggcctagccggcggtggatctaggcggcgtcgtcgttgcagcaggcggcgggacccaggtgtcggcgccgttgtcatcgcggcagtcgttgtcgtcgtcggcatcggctagatgagagagagagaggagagggagggaaatgagtggtggcgatggtggaggaatttttgcaggcaaaccacgtaaagttcggtttgcgaacatcatatttttctaggcggatcccttaagaggtctgcttgttaaaataaaggggttccgcctagaaaa

SEQ ID NO: 44373 - DNA, 855 bp, Oryza sativa
cagcagcatatatagatatctacctcttgtttctttttctctatttttcgatccacttgttgattctgaatcttgtgagcatgatatcattatacctcttgttttttgtatttacagaggaattttgtatcatacttctgaattttgctcgtggaaaagcatattatactacacacttgaaaagctataaatggcttatctaagtaatagtggtatatactactaaatctaagaaatagtgtatctacttatttaaagtatatgcatcatatactgacgaaacaaaaagagaagtatatgcagatactgagcaaacaagaaagcagtatgaactcctttagcgaggagatgcagtatatagtgaccaaacaaaatagtagcatacgcagcatatactgaccaaactaaaaaaactagtatatatatgctccttcaataataatgtagtatacactggctagaaatttcaagaaaacagtatatactgttcgaaggaataagtagcatatacttataagaaaacagtatatattgttccaagaagcagtatatacttataagagagagtatgcgaacatactatatactacattgctactagagtatgcagaaagcagtacatatgtacattcatatatatactttgtgaaagaaatcagtacattcagagaaaaaatcagtataccccagctcttaaagaaatcagtatatgctcggtcaagaagaaatcagtacatactctttcggaaatcagtatatgctcggtcaagaagagatcagtacatactctttcggagaatatatcagtatatactgaacaaaaaaagtagtatatgctgctataattaagtaaaa

SEQ ID NO: 44374 - DNA, 1139 bp, Oryza sativa
tgatcagtaatttcaattgtggacttggccccaaacctctggcacatcttacaaaactccggccaggataaatgttctgttgggatatcgtaactagatatccattggtcagcttagcctgtaatgtaggcctctgccattaagaccttctcatcttcaagagtttgtgtgagaaagaagtatttttctactttgcgaatcgaagccttaggataatcaccatcgaaaataggaaaatcgacatgtttcctattggaggtggagtgtgtgttcacaatgacaatatggttcaccaaatgctttgccttgaaaaggtcctctgtcaagtagaatagatggatcacaaagaggccaaggtggttgatgttgtttaggagctggaagccaattgggattgtagggtgggtaatagtattgtgggtaaggtgggtaaggggaagtgtcagggttacgaataaggcatactctctatcctacgacttatgagatatactgataatgtataccctcacgtataaggttggttcccacatacgccgttagaaatttgcctcagattatggaaaatatttctatgagttaaggaattgccgaagtcctactcatcgcgtcggtttacataactccaagtcttacttgggggtcaaggtattccacagtataaaagggacccctagggggaggcaaagggcatcgcatctcatcgccaacacacccaccaaagtttacgaagccagagtccacggagccaactcgccgggagatcttgtcgaatcccttgactacgatctcgtcggtatcgcctgtttcgattactctctttgtaatctgttctcatcatcatcaatcccatataaactggactagggctattacctgttaaggggcctgaaccagtataattcttgtcttttgtctattttgatgtcgtactatgtagacccctgtttcaacgtaccccaatactctattcattcggtccgcgagtatcactcgtcgacaggaagcatatgcattaggtggaggtcctccttgagtatagttccatgggccaggggagccaaattgcatatgtagctgccgccctgttggtgttggtggaataggcgggaatattggtggtggtggtggtatggttg

SEQ ID NO: 44375 - DNA, 929 bp, Oryza sativa
tagtatacctaatttttatcatgtaaaataaaataagctgttgattgtttgattgatcatttagtatacttgtgagacacatgcacacatgcatgctgtaattacttgcataattggaacatcttgcaaacttgacttgtgaaacaggttgaactgtcaactgattctccaattcttggttttatgtatggtaattcataaactaatgaaaacgccctttcgccttatgtgaacaacatgaatgttacattgcacctttgtccacttgataggagcaacatattttcctggggcctccaattcctattcatcctaacaattattgtcctcaaatatcttgacccacatggacacaaacagtgaatagaagaaaataaacaggagaaaagaaaatctgaaaaatacatggggacagttttcggtgaaaacagtacatatacagtacaattcatgactaaatacagtctaaggtgcaactaaccttgcagtgagtcttcacatagaagacacagcaatagatgcccatatatatcataaactctctgcatctcctttgttcttcaatatttcttgtaatctagggaggaattcatcggtcgtgttctaaaattttattgcagttttaagataagagtgaacttgaacaggaatgcaagttttcattttatatgataacttgaataggaccggaagttctcattcttattgctggtgttatctcacaatattgctgttgtcagatagtaactgtgaaggttttcatttcctattcctattcatctacctttaaacctagtgatttagcatttcttccatttgatatggataccattacgaacgtagatacaactatttttctaatgaaagaagtatggagtatgagtgcctataaaaacatcatttggccatactagaatactctgaaaatt

SEQ ID NO: 44376 - DNA, 1955 bp, Oryza sativa
agaaacaacccaatagcacggacctggtttagcggcaacgatgccacagacatagttgtgctgccatcagcacgccaccgtcgtgcctgtggggccatcggcaagatacgacgctggccgcttgatggttgtggcaaccgctctggcgatgccactctaagcccctggataatctgcaaagatgacagtgccctcagcgcttgttgcgtcggcagtagcggcggtccaggcatcggcgacaccaaatccctaacaaatctggagtcgccgttctccatggacatctctcgctacctacctacctacctacctacctagctatagtgaccaagggcgagatgccaagatctttgttgtagcttgatttgctttgtgggggtgattcaaccctgctatgtgaaggtggtatatatatttgaaaaccagcgaggtgtaacgcacagtttgactactttccatccacaagagacaaaagggagaagctgtagtgatatcacctacttaatatttgccagcaacatattggcatgcatatctagcaaattgaacatttattgctgccaagtatagcactaggggaggttatatgtggtatgcatgcacaactcgtttgacaactacatatgaattcctggtgtttggagcaaagcatctgccaagaagaagccaacacaactgtcatcaatatttattaagctgcaaatgaatggacgcccatatgccacgctgcgtgtcccctcacacatgctcagataaaaatcggacgtcctagacctctagcgcctgctgcatgtggtcccacttaatgtgcttcagttgttgcttgcaatacattttcaatgcactatgttttttttccttcttgagcttcttcccatttaatctagctagaccaaaatttcttgagcttcttcctttcaatctagccagaccaaatgtcacgaccggaaataacccaatagacattccatacgtgagtgtattaatccttgtcccaggaggcaaggtacaccaaagttcaaatcagagttttaacaagcggaagtgtaaatagtacttatattacaagagcgaccaaaggcccaacactcagagataaatgaacaaaagcggaagactagggcaaataccacaggcgcttgacagcaggcatgagctagacaccaaaaccttcatcctccaggaactccttttctggtttggggaaaaatagagcaagattgagtgcaaccacagtactcaacaagtcacaccgataaatgcacaataaatgccaagtgagtacaaaggagtaatcatatgggttatgttttgcagaaaacaatatttaaaacacttagttgcccaaagttattttggtaaacacgatcctagaactacacaatattattaatgaaggccgtgaacccacatgaacctaccttaacccaaggactataacgagttagaccgaactagcaacctaaaccggtcccagctcgtcccaagccaacccaagccaaccattccacattttagttgttaagcaagttttaggaattaaaccactaactttggtacattgctaggcttgctcataactgagggcgcggctattcgaatagattatactctgattaaaggtgcacatctttacccacaagacacaccttcctcatgtgttaccacgtgccacatcaaatactaacaattatttatggcatctttgctgaggaatggatgttgtatcatgttcgaacctgattcgtcctcgtatcttttcttttctcttgttcctttgtcttcttaccaacaatggagcacctttctattcaaaatctttatgctccaagggctgagttctgtgaggcaccattttctacaaaacttatccgttcatctggctatgaactccatcctaacattatagccatagttcgggaacaacccttctcggggcgcgaaagagaaaactc

SEQ ID NO: 44377 - DNA, 3481 bp, Oryza sativa
agcacgcatctcgacaacttcatcgacggtgcgcagtgcgggtggacatactactagatgttagaatccatcctccctgtccatactatgatttggcttaccaaccctagatctttgtcatgtgtattaccttgttgacggctttctgatggggtgggaaatattttatctacctggagagaggctgcagtcaacaaaacagatagggagagcacgggtagaaaagtaaatggttcgcaaagtttatgttgaaaaataaatggtttctcgaggggtgtttagatttagaggtgtaaagtttctgcgtgtcacgtcggatattatatagggtgttgcatggggtgtttggacactaataagaaaactaattacagaatccgtcagtaaaccgcgagacgaatttattaagcccaattaatctatcattagcaaatgtttattataacaccacattgtcaaacatggagcaattaggcttaaaaaattcgtctcacaaattagtcgcaatctgtgtaattagttattttagtctatatttaatactttatgcagatatttaaatattcgatgtgataggttgaaaaattttaaggtgggatctaaatagcgtcctagtttagagataaaattggacttttcacaatgttgaggaagcgtgggagaccgaagctgatgaggacgggcatgggatgggagatatgcaatggctggcaactacgatggacggtttgactactcgtcttattaaaataatatatgcaaatataaaaaacaaaaaaattgtgcttcaagtactaaatcataaataaaataaataataattcaaaatttttttaataagacgaatggtcaaacaatacaataaattatcaaaattctttatattaggggacggaggggtagcattcttcacaggtgatgtgttactctttgttgcttctgatcactacaacagatagattaatttgtaacggaagaaaaagttcaacattaagtgttggaccatgtgtcagaaataattggttaatgatgatagagccacaccaggtaaccatccacactgatcctgcacatctgttcaccccttttgcatccgtcagttatgtacaagaaaaaatttcatgcatactgtgctagctactcatagccattcagaacaaggtactgatgtttcgataggtattggatagatcgattatggagacccgacgttcatgatccaaacaaaggctctggaatgatcgaactccaggcaatctgctgagattataggcatataatgatttaatttatttcataaataaattatgacattacagatgtatactagtatgaacgcatcattagatctacacatgtaaactaagcagtaaaacgtaaacagatcaaatatgtgcaacatgtcgaacacgaaccaaggtggcggaaagaccggttgctcggcaggaactactcgcggttgcgggcatcgacgaaggcgtgcagcatgcgagctaagaggaaggcgagccgtcgcggacgaacagggagcagtcgcgcgaagcgcttcccaaaaaccttattgccgccttagattgatttcgcgtgtgttgtatgtaagcggcggctcggtttatatagagataggtcgcttgatcagggcgccgcacgatctccactccgcataaccgaaccggataagtcgcgtgtaacttatccggactccacaccattttcacgcatcggatttttcggaatgtttccaaaagaaaacaaatctgaatttcccgcagcaaaacaaaactacaaaaggaggctgcatctgtgcaaggatgaggagccaattttgcggaccattcgacgcgtacgtcgtgcgcgcgccgcctgccctgcaggcaggcgaggcgagcgagcgcgcccgtgtgttccccctcttctctccactagacatgcttcaagtggctaggagggcatcctcctttttaaggaggtcccactctcctagaataagcaaggtggtactaaactctccatgcatgccatcccatgaggttggcttttgtgattttccaaagaattaatcttcgaataggctaaggcccatctattaattccaacacaatcattatggcacttctccattgattatcaaccgagcgaaatgcggttgaccttgccaagaaggttatctctacaaacaaatggtgaccgcaggacaaaacgtagaagaaacaatctggataattctgaatttaaaatgaatctcacaagttgagattccacaaaacgaactaactaagcagcgaaactgcaatggcaaaataatctatgccaaaccaacacaaatgagatcccgtccaagtcctgccccggttctccttgtcatcatttctgccagcactgatatgtcatcatttctgccatcatttctccttgtcatcatttcttctcctatctagcttatttttcgttctctttttatatttgttatatgaatatagaaaaaaattaaattttggaacttaaattatataatatcatgtttgtattaatactataaatcgacacccttgcgtctttcttatttttagctttttttatttctctctttatttgtaaatttacttgtttttaatttgaaaaaaatgaaaaaaagtaaatttgttttaaaaaatatatgtcgtttaaaaacttctttcattttgaactttacaaataagaaaaagattagtactttccatacaaatattaggagagtaattttctttccatgtaaatattaggagaaaaagttaggagactaatgttctttccatataaatattaagagggtattgggaaaataccgttctttccatattagaataagagaaaacaatacaaaaaagttactctttccaatttaaagataaaaaattaagaaagttacgttctttcgatttattttttacaggacagtaaaagaaacaaataagaaaaagaagaaaacaaggggtgactgggaatcgaacctagctggatttttcacaatttggtccttttaaaaaacttatttcgcaaatatacccctgaaaaaatggtccttttggaggcgccagagtcactggcgctgtcgtccaatgggacggcgccagtctatctggcgtcgtcctcctgctgacgtggtggggcggtgctgaggtggcagggggagcgcgccactgtggctgccccacccccagcaatttttatttttattttatttttttgatatttttttcacgtttaggagcacacaagaaccaaccatagaaaaaataaactcaaatagagattctaatatcgccgaacctgataaagcggggagaatcagatgtaactttttctgtagatgtccgtggatatattatttgcctgattctgagcacgtatgagaaagttaaacctattctaagaaatgacacccgaaaaacacctattttcggtagagttttggaaaattctacgagttacatatttcgtc

SEQ ID NO: 44378 - DNA, 2011 bp, Oryza sativa
atttgcgaaataagttttttttaaaaggactaaattataaaaaaatccaatcgaacctagcaccttttagttgcaagatgatatcacccaccactgagctaagaagagttgttgtaaacataggcgcatgtttgcgcctttatcaatgaagacctcagcgccaagtagtgtgccgctgagctttgctgatttggcttttccttgttgcgcagcgctatcgggattggcgctgaataaaaggtttatttttgcaattagtttttatcacggttcaatcctcaaataagtttcctaaaacgataattttgtcaaattttcggggttattagtctcgaaagctttgtgtcggtttgactttcgatattttctttagtagtaacctatttgagtgtaagtgaaaaataaatcaaccgagtgacagatagacagtcaaaaagattcaggagattaaatttttggtagttcgttgaggatgctctaataacaataataataaaacctcgtgtagtaagaacaatagtccccatttactgcatgaaattttttaaggtaaaatataactctcacatgttcactggcgctgcaactgctcaaacatttcctgcagagattacagctcaagatgtgtctcattgctctctgtgtttctccgctatgccgccacgtcttccacaatggaaaggcccatatatagctgtgttcggcactgctcccaaccgaagcggcctatattagcgtgtaattaattaagtattaactattttttaaaaaataattaatttaaactttttaagccactttcatatagaaacttcttttgaaaaactcactgtttaacagtttaaaaaatatgcgtgtaaaaaatgagggagcggggttggaaataagggtaccgaacacagccacgtaatcatgcaggttgcagccacgagtcgtcatctcggtgaaccgcaccgctcttccagctccatatattcggccacacccacacctagcttcgttgcagctagctaacaattggacgtgtcatcacaagcatcaaaccaatggcaactcaccagcagaagatgcagatgccgccgtcgtccaaggacgacgagccggcggcggcaacacgcccgccaccgccgaagcgggaggagcgcgccgagaaggcgccggagatggagaagaaggtggtcgtcaccgtcgtgaacggcgaggaggaggacgacgacagtgggtccacggacaacgggcgccgccgctgcgtctgctccgccgccggccagccggccgggcacttccggtgtgtgtgcgcggagacggacggtgccgacgagcccgacgagtgaattaccgagaaggtgttttcacgtgtgcctttgctacgagttttgttttgattgatgtatggagatgagggtgcacgaacttatgattgttttaattttggttgtcttaattgtcgtagtattttgttgcaagctagcaataatcataaatgggcaaaagaagagtatctcttttttttttacctcatgttccaatgttgtgtgttgttgtttcaaataaagattacaaaaatgttgtgtgcttagctaagatcaatcggtttaatcttaagccagcactctcgtcggcgaaaaagaaaagcgtgattcttttcacgaaaatgcaaaagcatgcgaagtccttaacctttttttgttgcatatttttcaacaggaattgctgataactttcaatagaaaagtttgaacttccaatggttgtttcactttcaatgtcaaattcttgacaactttccaaatacatcttttgcacacaacttattattaagaaccacattcaaataatagcaataataaacactaccaagaatagtgaaagccaaaaaggcctcgtgcagggctggactggggtcgatctggggagtattaattctcccacaacgcgcgcgcaaaataccattttcgttaaatcacagattaactgtttaccgaaacaaatggcgtacacaaacaagaac

SEQ ID NO: 44379 - DNA, 2731 bp, Oryza sativa
  unsure (1)..(2731): unsure at all n locations
cgccgtcgccgtcgagattaggcggacaaaggagagggctcaccgaaacacctttttcttatatgtatttctnactggacacaagttggccagatggtaaagtctgaaaatccacctctcttgctttactttatttgttttcctgatttgtgggtaaaaaacttagggccgctttgaatcgcaggattgagaaaacgtagtaacagaaaaaacgtaaaattttgataggaatataagtttaaaacaaagaattgcaaaacacaggaaaaatacagaaacgaccgtttgattgaaccacaggaaaaacacaaaaattggatgagagagatagactcaaaggaaagttagcaagaggttggagctcttgttaaatttcctccaaaatctctataggattgtccattccataggaatttcaaaggattggataggattcaatcctttgtttcaaagggcttcataggaatttttcttataggattgaaatcctctaaaatttctatatttttcctctaaatcaaagggcccttagttaggcctcaacaagtgaagtaggcctttcttggctggcccgtctattggccaaaccacaagttcacgttagcctggttcaccggtttttctccaaataccatccggtccttacggttcacatcaatcatcatgctacatgggtgatctttgtagcaaaccacttcaattaggatacccagctctaatttcttcgtgtaaaacggcaggccggtctagtttttcagcataccagtggctgagttcgtttaggagggttcccaatgtctctccctcattttctacacgcaagcttttcaaactgatctattaaaaagagtattttttaaaaaagattctatacgaaagttgtttaaaaaaatcatattgatttatttttttaaaaaaaagctaatactccctccatcaatttttgatagtcatatttccaaatctgaaaattttatttttgataggcatatttcaatctaacaacttattatattaatgactttcttagatttaatgcatgactcttcattcttccatacatgattggttacatgggcattgagaaatgtaaatattaatgaatcgcttgtttatgagaatgactagtagcatatttaaatggatgataagtagaattacttatccttgctctgtgtgccaagatgaaatatgactatcaaaaatagatggagggagtacttaattaatcatgtgctaatagactgctccgtgttctgtgcgggagggtaatattcccaaccatgaggaacggcactcacacacacctccttctctctccccctctttccccttgtcggctcaggcagccacacgcacacctgtgagatgaccagtgcatattcttcttcgttttgctgagtgttttccatcctgtccggtcaacgtcccatcaccgttgatggcttactctcttatcccttaaaaaaattaaatcctagcgatgaatctgtacaatagttcattgtcaagatttgagtttttttttacggagggattatgtctctagtttgctttatctcgagccttcctagcagcattagtgtcagatgtgtttatcttcctcgtggagccaagaaccaaacaatcgatctgtcgagggattggaagagtatggatacatgttgtgcatattgtttcttgctagtgtgggattgttcagtggtatatgtaactgaaattgcaatccaacaaactacctacagagttttgtttggaaccgtggccaagcagaggcacacacatatggcatgtattcctgtcatccggtatgcatgattcacatgctccgtaggattcatcttgtgttgaagtatcttatttgtgacaaagctaccaaacatatatcttgaagtctaggtgtcttgagaaaattcctaatacttcctctgtcccaaaatatagctacctaatacatgatacctctggtccagatttgtagtactaggtaatatcacatactgtactagatagctacattttagaatggagaaagtactataattttttaattcaagaaagaaagactcaagctaatctgtaggataggtgtaactcattccacttggtccccaaacaaaacacacactactacaaaaatgatttttatatacgatgacccctttcggttgcaaacggaccgtaactggcggcgtctacaaaaaatcgaactacattttcgcatacagttccttaagagaccaacatacaaaaatcttttctcgcagatgggcctcttaagggccgcatgcaaaaatatgcttattttcaaatgtggatctcttaagtggtccgtatgcagaactaccacccattcacatatttctttatctctgtccactctcttttccctctaaccacttcaaatttcttccaactcctctcctctctccccctcttgcatgcaaaactaccaccccttcacatatttttttactctatctactctcttttccctccgaccacttcaaatttcttccaactcctctcctcactctccccctctcctctcctctctctttcttttcttctttctctccctctttgagcgggcgccggtggctgggaggggcaacagtgggtgcgggggcgggagcaagggaggcgatggcgtcggtgggtagcggatcctgtggcgccgccctcgggagggtcggatccacctccctagggagtggctgcggctatggcg

SEQ ID NO: 44380 - DNA, 2581 bp, Oryza sativa
  unsure (1)..(2581): unsure at all n locations
cgcgtgtcgggcgccggccgcacgacgacatggtggcatggaggcgtcaaggcgagctcgaccaacgaaagagccaccaaggtggccgcatggtggctaccagtgaggaagaaggcagcaatgcttcgttacaaggagctagaggcaaaggggaaggattgggggctcggggttgagctcttatagtaggtcgcatgcaagtgggcgctcggttggcgaccgcgaatggcatctacattttcgtggacaacgcgaaaacggcggacattcaggaggcaaaggacggccaaagacagtggataggacagcgaaaattgaatgcgagatgctggaggagcagcagggcaagctggcacatggtcaagatggggctccaaggcgtagatgcagtcgtcatggagctcaatgttcgctaccgcaccaggacaagggggagagcaaggtggccttgcccgcgagagaaaaagcgaaaggaggaggaggaaagggagctttgcctccctccattttgggcggcggggctggcgagacatgtaggagcggcgtcaccacgttggtggcttgtggcatgtggagtcggggacgaggtgacaatggtggatgacagcaaaagtgatgaggacacaactagcccagatataaccaagactaccttatgtattaatcaaccaaaggtgcatatgctttacattagatttacttgttatatatttgaacaaacgttgctacacaatgagttttgtatgtttttgtttgcagaggtacttgcttgggcaaaggaaaagaggccgagcataacgaatacatggataataaaagaagttgattggggatcaaaccaagacatcctccaagtctacttctacctcaccacattacttttggtccatataagacaagaaataaaattctacacgttttggattcggattcgggcctcctgacagcatcaactacaaacggacctacccactgatctagaaggaatttcggggcccatgagtacttgttggaaagtgtgacatcctggcctagggcttaataggattaatagaatactcatatcaacaagttgcaacttcttttccggaagccgatctataaataactctgaggttaagcgtgcttggcctggagcaatttagagatgggtgaccggccgtgctcagcccaagggggtgtgcgccctagggcaaccctagggcgtccctaatcatatttattcagtagccgtcattgtttagagtcgggttttgcttagattaatctgtcaagaacagtttcgccgctagatcagtttgtggaatcccaagttcgagtgtttaatcattcaaatgcaatttggttgcaatctatcttgttcttgcttgtgttcttcgattcacatgcaaggattaaccttctcagcaaggtcaaccgggtttcagcatggttgataatcaggggagacgtggtgctgtgatagcggagcttagtagcatgttcgttcagaagccggatcgagttgtgtcgcgactctgcccaaattgactgtttatcaatacctattggaagatcgggacataacatcctcatcaaaaagggggtggggatggtttggcaccatgtggaaacaagcgggcgccagcgcagagttgatggtggcagtgtcctcgacggttgatggtggcagtgtcctcgacggtcggccatgacaggtcgtgagcgcgtgaagtgatggcagtgacgggatttgaatcggcaaagtggcgatggccggcgcatgtgagagagagagggggagggtattccccaaaaaaagagagagggggggggaggaagagaacacgcagtggagaaagaaagggggagaggagcacgtctcctcggtgggggcacgtgcggcgcacgtggagagggagggaggttaggatgctagtaaaaaaatacttttttttagaacaaactgaggctacagcctgagattaggattttattaagaaagctgagagtacagcaagtcttacagatggtgtggccacgaggaccgagggcaatagtaaaaagaaaaatattacccgggttgttaagggctgtggggcgagctgtttacttagacggcatgtagggtgctttgtgtgtgtatatagactggtgattccccgcactttgctgcagaaatttctaagtaacttttaatatttttttaataaatgagctaaaagtaaaaattatatcattattaacaataaataaaactggtttgcaactatgttcagagagatacatttagtagactatgtaagtagatgaaatttgatatcatacactttgattatatggatgaatatgtgttaaggattataaaaatgatagatatatactacctccatattttaatgtatgacgccgnngactntttatncanncggngaccatttgtcttatttaaaaaatttatgtaattatcatttattttattatgacttgatttgtcataaaatgttctttaagcacgacataaatattttcatatttgcacaaaaaatatgaataaaacgaatggtcacccgttgttcaaaaagtcaacggcgtcatacat

SEQ ID NO: 44381 - DNA, 764 bp, Oryza sativa
aacaaggtaattttttcatctattgttcctgcacttctatatttctttttacaattgcgtccagtagtaactttcatgatcagcatatcctgcctaaacagtcactaggatctaacacttacataatgctgtgttgattaatagtaatggttgcatgcatttgctcacagaagtaaatcaaattcatgtgtacatataatttattaatcaatatttatcatctcagggctaaatttgacttcaattcttgaatgccaacattatttgacatttaccttctatatcagattggtgtgtactttgctatgtaaaaattcagttctatagaccagtattatccaaaatttgtgacatgcaagccactatatccaatttttgccactagaataccttcaacaaagtttagacaaaatttgggttgcacttgatgccatgttaacatagccttctcacctataataaagctaacatccatggcaccttttttttttattgcagcatgagtatcctaaatactgaagcatacacatgtctggataggagccttctcattgaaagaattgaagatatacaatacaaagaaaaatgaagtttttagccataatggatcaagtgattcaacgttttggacttacctaaattcatcgattgatcaatatatatgttttgtatatgtatctagattcattaacatctatatgaatttgagtaatgctagaaagtctaacattgtggaacagaggaagtacttttttaatacacat

SEQ ID NO: 44382 - DNA, 1178 bp, Oryza sativa
tcctgcagccctatcatgttcgaccaaaagtgcagtttatcgaaaatgcagagtttaatattacactacgttctaatttagagttattttttaacttccgttaaacctttgatttgcactactctgtctaaaatatactccctccttccttttttatattatattggttagttaaaataaacaaaagaccagagggtgtaataacgtttagctacgtaaatgttcggcaggggtttcaatttctaaaaactaggtgatatctcgtgctttgctacggattaatgaatgagtatatgttaaatattgttgaaatgatgaaagttgaaatattgagaaaataatgtgaggaagatgatttgacatatacttgtcgatctctataataaatataatattatagatgatgtgtcatgcttgcatgagatttaaaataggctagaatagtaatcgtaagtgagtgaagatgtggcaggcttgcatggttttttaaatgggctagaatagtactccctccgtcccaaaatgtaagtatttttagctataaatctggacacttgtgtgtctaattttgactatattttgggacggaggtagtaattgctagtcggtgatgatgtggcttaattgtatgttaagttttagtttttaataattgtttgttggtaccaactatagaaagtatagataacaccaacagtagagtctgaagtgtgcatgtggagccacatgcacatatctattgcgtgcgaacacaagtacacatcaaagtacacatcaaacttgttttcgtctattatatttggttgattaaaacttacagccaacttctacatatttagtaccgtgaaaggaggcaataaacttggtactcgcagttaggtcgtcataaggaagtatcaggtgctatggaacagttttgtgctcccgaactaccgagcttcaaaaatgcatccaaaaagtcaaaaaaaaagtgaaaataaaatcagagatctgcagcactatgacatgtatcatcacactaaaaatcaaatcaaatacgatgtaagtagggagaaaaaaaagttaaatcttaggtgaatagtaaaatgacatgtttgaacaccgttggagcacgaatttatctttttttttccctgcgtacatcatattttaagctgatttttcgtgtggggctgcag

SEQ ID NO: 44383 - DNA, 1463 bp, Oryza sativa
cctgtccagaaccagccagggtacataaacaataatttgatacagttccacgacttacaaaaataacaaaataaaacttatacgcagcggaaaaactaaagaactagacttaattttcacgaccaaagcgaagtttcctccatagaccacacaggcaaccctcgacgtctagaacaagctcaatcctcagagaactcatcatctgaaccgacttctgcttctgggggggaggattaagcaagactgcgtaccaaccaccgtactcaagtcataccaacgggaaggtatgatgcaaggatattcaaaggaatggctcaaaggctagtttgcagtaaaagcagcatttataaatcataatttgaaagaagtaaaaatagtataagtaattaagcaatattaacatcatcactgtccaacgatatatccacgttgcaacaagcccaaccaaaaccacctaaactacaccagttctaaaagtcaaattattaagtgggactaataacggtgagctagttgatcgcccaataaccatgggcacagctattcgaatagtttactctgatcagaggtgtacaactttactcacaagacatgattccacacatgttaccatgccccgaagtaccactgcgatactgcaaaggggaaaatcatgataaaacccttcatataactctccctaaccgaacatacccacctcaggtttcaccccctccttatgccaagtcgggcagtccgctctcgtgcctaggtaaatccggctatagcaaagcccaaaatccaggtccgaactgcaccacctcctctacccttgccatggtatgttatctaggttaagttatactctagattcagcctggagtccatctggcatgtggtgagtacgagtatatattctagggattctcgagaaccgatccttaattgtcatgggcacgacttccagaactcatgcgtgtacccacgacccaccattaaagcaaattttagtttaattaaaccataaccatggtggtacatcaaaatataattaaggactgaattaaaatgaattccattgtgagctagttggtctaaacatggctaagcattcctaaaccaatcatctagtcaattataacccaagttatcaatggcataagataatcaacaggctgagaataataggcatacatcccacatgacattctaaaaggatgcaatttgatataaagcaggggattttgtaaaataggctcaatatgatcaatgatgtatgtatgacttgccttgctcttgagctgactgaacctcggcaaacacttcgaaataaacaggagcgccggaattgatggaatctaaacgacaaacaaagcacacaagaaatacaagcaataaggctactgaaacagaaaagaaacaaattttaatggattcactgcaatttgaatggacaaaaacggagctcggattattgagttatg

SEQ ID NO: 44384 - DNA, 5796 bp, Oryza sativa
  unsure (1)..(5796): unsure at all n locations
ggcgaggatgacgacgacgatgctagaggaagcctaattggagtagattaaacggatgggttagggttacagccaaaacttcaccaacacaattgtatggaagctcaccggcgacgcgaaggcgatgacgacggtggcaacaggaggcggcggcgtggcaacaggaggcagcggcgctaggactccaactaaaagaaaaaaaaagaaaaacaggggtagggtggcttatatatgggtggaggtaaaagaggtggggctagagtggagtcatcagaggggagggggagttgaactcggctcggcaggggagagggcgcgcgcgcagggaggtggagagagggggcggcggctgaataggatagggagaggggaggaaaaataggaataggaggtcaggcagagggctttcctaaaaaggaaaacaaatgcgatgccattttagaaaaagaacggaaacggtcccgcgaacaaaaacggacacggttcgccatgcaaaacgaaaccgcggacaaagaggggagtgaatcgggcacgattcacgaccaaaggctgaagagaacagaattaattactacaaatcttgacaacttaattagcaacattaactccgatgctctgtaaattccgctttaagtcctgttaatgattttaggagcaaagagaattcgaaaaaaattctccctgacaattccaattattaaatacattgttaatttaggttttctcctggttaaccaaaataatttctttagacgaattattgttgaattggaaccacgggaaaggggaaaactccggttgtgacaacaagtctctaatccatcattaaaccagattataatggcattcgccaagtctaggacaacaacagaaaacaactggatgtttctaacagagcattgctaactgtaattctaaaatttctaagcacatcatatggagttctcactagctggtttttgttacctagggttatcaaaggtaattacataatatttagtaaataaagccaaaacaagaaaatataggaaaggctaagtaagtaaaacagttatagtgcagtaagtttaataaagcgaatgcgataattcaaattaaaatacatttcgcatattgtggtgcaatatgcttaaggagaacgtgacttgccttgctcagagaaaaatggtcttcggaggcttcatagacgaactcaaattgcaccacaggaacatatgaaacaacaacaactacacccaacaaaagaaggctaaatctctagaaagaaacaaagatagtaaaagaacaacatacatgggttgtttaagttataacaaaaattaagcaacttaaacaaccaatttggagctcatatggctgagaaacgaccatccaaaattacacgctatttaagtggagattttcatgttatttaattagtattatatcattaaattatgtgcaatgcaacaacgctctaggagagaaaggatcgttccactggcaaacgaccatatgaaattatatgtcatttaagtggagattttcatgttatttaaattgtattatatcattatattatatgcaatgaaacaacgctccaagagaggaacgatggagttcctactggcagctgagacccatgggtcagacgactagcttaccgtggatcgggtttaccgtggctccgtccccatcagctgccgctcaggccgagctcgtgcttgtgcgagaagagagaggggagagagaacgtgggacccactagatggacggccggcttgacgggctagagttggccagcgggtactcaggtttggctagccagatggcttagccattcagttggagagaccgttggagtatgttttttttttgtcaaaattgctaaaatttacttggccagccatttgtctattctattcgagttgctctaagggtgtgtttagttcatgccaaaattggaagtttggttgaaattggaacgatgtgatagaaaagttggaagttcatgtatgtaggaaagtttagatgtgatgaaaaagttggaagtttgaagaaaaagttaggaactactccctccattccaaattgatctacatattaggtacactaagaccaataaaaactaataactctcttataaaatatttactctagcaaaaactcaacgcatacaccattctcactatttcctagccaatagcaaatcaagatattgtatatgggttataaatacttgtgatgcatgcatcaatgtccatttactctaatgcacaaataactaatagtcttaatgaatgaacacaaatatttagatcatttaggaataccctaaaaaaaactatatgtagatcaatttggaatggagggagtaatcaagacctaaaacagttagtggcgacgccgagcgaggtggtggcatggtcctgcagcgcccagggcgacgccagtaggcggctggaggtggtgcagcggcggtggcacttgagcagcagcgcacggcgtggagaggcacgggctggaggcagaaggagaagaagggaaggagggggctccatgataggccgggaggacctaggctaacggccggggagctcgttggccggcaatcaatggcggcagttcgccggagattaaattcagcgaatagaggtcgaaatgaaaggggaaaacatggggggaataaagaataggaggtggggaaccgatttttgcaatcaatgtggaggagaaacggccgaggaggcggatcaactcggtggcggctctagggttacgcggccgggaagaggagcggtcggcagctggaggaagacgacgacacgtcgcctccctgggctggctgggccgcgcccgagcgaggtggggagggaggcccgagcgagaggaggaggatctggccgtggcagctgcggcccaagggagagagggaaggagaggatgggaaaaggaggcccnnnagagggaaaaggtggagaggaagagtctccggcggcgggccgagggagaaagagagagctttgggccggaaaacggaaatagcccaaaagagaaggaggatttatttttagttttttcattttaaattggtttttgttgctttaaaaatatttaggtcgctctgaaaattcaagtaaaaattgagaagatatttagagcatggagaatttaataaaaatacacaaagtaacatttgaatttttcttgtccgtattgtaatgttcaagatttgttttagacttttaataatttcaattatttcttttataaaatgatttttaatttgagattaatttttcaggatgtgacaagcttcaactagctgccatcgatcaagcctcctatctgtgttgggaagcttcctttctcgttagaattataacacaactattgaaagagcaaaattgttcttaatttaatttcatcaatttggttgtatgcaactgaattgactaatatatcacgttcaaatagtttgaaactcttttagcgtgtattttgaggtggagtccaatatatatggactttttaggaaataccacgactactatagaatcaaatttttttggacaataccccctaagtaccaccatatgtaaaaatgggtacctggagggcagttcaatgatcgtttacgaaaatcaattttgcgcatgagagcgttttaacatgcccacggacaaaaataaacctagttttgcatgccgtcctttcaagatgaccgcatgcgaaaatacccttctctacccctccactcctttttctctcccacttaagtcacgtctagtcacgtccccatgtctccctcttctcttcccattccttctctcccctctctcccattccctctccgctcctctattgtctcctgcactccctctccaagtcccgacgagggtggatgagggcagcgggtgagggctagagtggtgggctcaggcgagacaaattccaccggtggaggcgacgggatgtgcagatccggcatccctctccctcccgcatgaatattgtcatcacttcgcccacacgtgtgagaatacggtgatggctttgagcgacaatggatcctagcatgatgaccatggcagcggatccagccatggtggctgcagcggattctagggtttggacttttggatctagggtttgtggatttttggtttttgccaaaattatttttgtagtcaggtggcttatgcgcccgcatgtgaaatagaatttttgcatgtggttgattttcgtatacaggtggtgtaggtgggccacccacccgcttgcgaaaattgattttgaccgcatggaaaagttatttatgtagtagtgtactcatatcattttaaaatataagatgttttggttttatcttttatgtttatataaaaaaatattaacatatgtaatgcaaaattaatttcattaaatccaccactgtatgtatttttataatatattagtttggtgttaaaaatgtcgtgacgtattttataaactgtcatacttgaaagaggtttggacaaacccaacacttcttacatttctgaagtacatgttgtttagagtataccctttacgatagttgagacttgagacaataaagactactattaagtattaacctatcaaaataaattgtgttactcttctttcctttttcccacactcatgtgtcaaaaatttattttctagagacttatttttatatttaacatcgatgtttctgtctcctataaatgacggagccaggttatgctttggtggtgcaccagaaccaccctaaatccaagatttctcctactcgtctctttaattagtttcagcaaattttctggttggcaaggctaagaggccctaagcacatgcctttagtgggtggtattaactactccctatagttatctacgtcatcgacatcagccgttggatgaaatctcaatggtttggatgtagctaaatcccaatggtgtggatcaaaatagcccacacgagatagcccatgaggctagttccaacccaatgactaatatgatgtccataccattaaataagttgacacctagaataaaagatgacgtggcaagtgaataaatgaggaaagagaagaaaatcagatcttgcatgagacatggtttctatacaacatccaaaacatcatttgagataagtagcattaaatttaagtatggaacactagtgtttgcattgaaacagagtagtgtctaagggcatgtacaacggcctttattagtggtctctctctattgccatgcaaataaatttgatgacatggaagaaatagaaagaagtatggttgttatgcatgacaacggctcagagtcgactcttagcatttattagagtaaattttgttgcatggtggtgaaatgaaggaaagaaaagtaagaaaaagtatttaaatatattaatgattagagatcattctaactgttgtaggatgctagtctctaaataatgtagagctcatgtctgactctatctttgtacctgccctaatactagttagttttttttttgatgatgtggaatttataaaaattatgtcttggttgggactggcatgagcccattcgtgcgtagcactcccctgatcccttctcctccctagtccccaccctaacctccgacctaagcgcgctgcatcgtcgcccacggcaggcagccccgagcgccgcggcacgaggtcgctctccctaattccgcagctcctagcgctgcatcgactattcgcctcccctgcctccagctccgcagcgcccgtcactccctctcccgctctgcgagaaaaggaaaccg

SEQ ID NO: 44385 - DNA, 1961 bp, Oryza sativa
caagacagtgtatcgcaaaacggtgatgatacgcgtcatgacttgggctctaattggctgattagccgtgactgattatatgttaataaaaatgtttatgagttactgggatataacttagcacgtgttgcaagcctgcaattaatatttggcaaattttcctaccggacacttaaattttatataatttgctgatcgatatcgtaaacacgtggtacggcttaacaaaataaaaaaaactagtaatttgctagaagacacttttaacttaattggtgcataccgcagcatccaccacacaacgctagtggcggctttggagtgtgtgattaggaagaaggggtgagggggcggggcaaccacatgaaacatgtctgacagcctaattacaaatttctggtttattggcaggtcatacttcttttggctgaaaattttaaattcaattaaataattgatccaaaatttaataaaaaatagtcgaatttgttcgatctaaggaatgcttaggtgaaataataacatgattaatttaaggcggccttaatttaattaggaggcgataccgcccaggatgcaacagtacagttggacctttcctcttgctaaggcgataccgcccaggagtagttttcattagccacgctgctacggctgttggcccaacgtccggatggaagaatggcccaactttgacttcaacagattaaatttcttttgaacaatttaattttgaaaacatttcgagtatcttttcaaactgtagttgaaacttatagtctctcatgtgaacgttttgtataaaatccttatgcaagtttcctatataaacttcctctaaggaaaacttttttgtgtgccaactttctttatggattttttttatcggaaaataatttgtaatgaacgttttgggtcgatgacaaaaaagtttaacgtaaaaattcaaatagtattaaagaaggaagtaagacactagtcatcgcagatcgacatggcccttcaacaaggaagatggccggtgaacatggatatgtgtaaatgagcgagaaaagaaaacaagaacgaggcaaaaaccattgtcagaaagtgcacataactttatcatttacgctagtaacagtgtgctctatggaaggggaaagggtgtgcgacgctgacggagggggagggaaagctgcgtcggtggtacggtgagggagagcggcttcgacggtgggaggagagaaaggagctctggctaaggggagagcggtctcgatagaggggagatagttgttggtgactcggttgagaaggggagggagtgacagagatgggaatgggagggtgattttatatattttttttgtttcttcgggtgtttgtgagaagcattagagttctctgtaaaattcaaaaatatgaggattgaaatatgaaataattagggttgatatgtaaaactgaagataccactccagctactctccactaagataggaaaaggcaaattttgctacaagatattatgacttcgcggttttagctgtaggacaccgcgcgaaatgacttttatggaagacactttgaaaaattggatatttgctggtggatactgtgctcattaaaataataattttgagttgaggaggagataaaatttagagtaaagtccatcaccggtccctaaacttgtactactgtgtcatcccggtccctaaactcacaaatcgaccgttcaggtcctcaaacttgtttgactgtgtcatcccggtctctaaacttgcagatcactcgtttagatcctccaactagttcagttgtatcaccccagtccctaaacttggatttgaatatcatctaggtcaaataggacggtctaaagactttatatttaaaaataattcataacttttttatgtgaactctaatgaagacaaactttatatcaaacttgtagccctcagggctgcaggaat

SEQ ID NO: 44386 - DNA, 648 bp, Oryza sativa
aattcctgcagccctggtgagctagaacgtgacttgtcatacttgccacattacgctgatctttcagattcccttttcgtcagataattgtatgatccaaactaatgaagacaagcttaattgagagaaattcccccaattcgtggacaaacagagtcacaatggcagaggaaacgaaaattaacgcgatcaaccatcaccacctgatcgacatctcaccggagttgggtggcgcgaccgccatcgatggcccaaaggagatgaaggagttgggcatcgtcgatggcgcagtggagatgaaggaattgggcgtcgctgccgccgtccatggcgcaggggagatgaaggagttgggcggcacggcctccatcgatggcgccgcggacaagaaggagctgggcggcgcggtcgccggcgccggcggcgcagcggagacaaagtggctgcgcaagctgacgtcgtcgagcgtcaacaccgccgtgctgagagacctcatcgcgcggacgcccatgctgtggtacctcggcgagcgctccggcaccatcctccggccgcgctcccggcgcgccggcgtcgacgctctgcacgcggtgcgcgccgtggccatcggcccgttccaccgtcgtgaccactggctcccttccccga

SEQ ID NO: 44387 - DNA, 1061 bp, Oryza sativa
gtcacgttctagctcaccaaatcgacaaaatcagacggctatcttgaattaattaaaaaggccaataatgaaggagaaattatgctgaatttgattatattatagaacattgggagtaaagatatggtcagattttgaaaaaaaaaaatctactgtcatattatatggacaaacagcaagaggacgaaactgacactgatggctttgtggagaaaagtagtccttgtcgatgttgttggtgtctcgtgatctctccatccgaagattaaaaaattgatgcgaattgacggcgaaatgaactcagttgtacacagttgtaaggccatcactaaccctacatatcaacgagtgtcaatagcattaaatacattgtcacataggtaaaaatctgatgtggcaaaagagttaatgaagaaaaagataaaaagagaaaaaatcatttatcatgcaagaaaccatctctacacaagaatcaaaaataaaaataaaaggataggtgaataaaaagagagaagagaaatgattggataaatatttaatttaaagacaccattcgttggatatataaatagtgtctgcataacatgaaaagcatgaaaactactcgatagtttctgggttgggaatggcttaagatgttgatggcttgtttgctgcgttggaagtattttgatgtcatggcctcatggcggttagacttatcccaatgcatcgagtcaataaatggttgtgctaaatactagtagctaatgttgttcactaacttcaaaaagcttacatcacctgcgtggaaatgtttaaaagattgcttgtcgagccctcgtgtcgagggatatacatacagtaactgaagttgatggttgaaagaaacatccatgccttgccccctttgccacaacagctaaaacatatagtttcaacagaagtaacaatcctattcgttgttcaaatcggtgattgttaggaatacctcaaggacattcaccgattcacgatgaaagacacaccttacaggtatccgtagagaatgtcccatataaattagagggctgcaggaattc

SEQ ID NO: 44388 - DNA, 630 bp, Oryza sativa
aggacctagccgatacggttaaacctaatcagctgcggctttatgatagtcagttaaagcaaaaactctaaatatgccctatcggctgtaatcctgtttgtttagtttttatcaatcattttaagacagtattatagtgtcgagggaagtccctcgatagcgggaggtcgtgaggcccccctttcgtgagttcggccgggggaagaagctcgtctcttggaaatctcgtatccgcccctagggctactagctagcttgcacacaatcgaattatactggttcgggccgctgagaagcgtaataccatactcctgtgtttgggattatggttgagtgttacaagggttccttaactccggagagttctcttgctcttcttctcctagagttcaggtctactcagcgtcgtccttcttctcgatgggcaaggacctccttttgtatctcaaggggataccacatgcaccgcctctacctactcttctttcgggtggggacccaccctatcttgaccggaactcgacccgtgccttcgcctggaagctaagccacagcttgtcctcaagtggggcccagcgccgtccctcgcctgacacgggggacagccctgtcattcccccattaatggat

SEQ ID NO: 44389 - DNA, 639 bp, Oryza sativa
aatagaggtagtaattatttacatgatgaaaaatttaaaagtaatccatagttacagtttagagtgttgtttcggtccttctttttgtaccacgtggtactagtaccatgagatactaaaatcctgaccgttgttggtcattggtgtggttagcgcgagagagccacggtggaagggtataatcgtaaatggagggatttttggatcggtgcaaggtttggctgagttggggaagcgcggcagagtagcagaaccctaggtggcggcggtggtatcccgttcgcggcggcggcggcggcggcggcgcatccttggttctctgggaagagctgcagaaggcaaaccatcggtttgccattctccccttcgcggcggcgcctcatccattcctctcgacaccgcctttttccccttgtccaaatcgtcgcgggacttcgatgtatgcgtgcgtgttcggccatggatgagtgaagcttacaatttcaggaaagtacaagaagatgtttgagatggatatgaagtacaagcacacaatttgttctagacgttgataaatttgtcatgctcttgtccgttcctgtagtattggaggcattttataatggagtcattggactgtaatcaatcttgatgtgtttt

SEQ ID NO: 44390 - DNA, 587 bp, Oryza sativa
cactcagtacttctgatacacccatgagaggcagaggattggagttggagtagaagatgaggagcacgatggaagaggggacgcgatgacggcggtgaccatgaaaagaggaagcgacaactctgttcgttctcacacagagagtagcgatttttttttggtggagggatgtcgaaggaccttgttgcaaatagaagattctgaagaatcgttaagatgtttgaccaattgaaggatctaacggttggcattgtcagatggagatatcggatggtccatattttattaatgacgtggcgcagtaattttgcagaaatgatttcacatttcacattttgattaattaagatttgacacataacgctatttgtgtcactataatcatattcacagaattgtatgattgtggtgccgtgtctttcttaaagctgacgatgagctgcacatatatgaatgacgagaatattgtttcctataaataattctgtaggacaggaaacaaaattaactaaatgccgtctaactaaacagctcgcatatcctatcttactctaaagttataacacactaatcctaaagctccacat

SEQ ID NO: 44391 - DNA, 757 bp, Oryza sativa
gaattcctgcagccctttttttattttcaatccatggcaagcgaataagcaatataccccaaatcatgtacccatacccagtagacatgacaactaacaaaaagagctgaaagtattttatgaatgagatttttagcttatagtgatgacatgatattggtgtcagagtataggtgaggcatgcaggtgcagggggactttgggaggcatagaagcaagtcaacttgtaccaagcaaacaagcatgcatacgcagccctatatagaaacggagtggagtaggtacatcttacagctgcattagtacataatggactgactcatccctggtgcaatgtgcatacgtgtcagccatatgaggtgggtacatatgaaccttggttcacttggttcatattatgcagctcctatatacacctaggtgtatgtactccctctcccatctaccgtccatcacaactagcctctcgatgaagtttgttaccggatccaccaggcagaccccttttaatttttcacgagaaaaaattttgcgtagtaattggaaaacaggaacactcggagctcgcgtataaatacctctcgtcagcctagatcgataaaccaggtcatgagctgtgtgcgatatctacggactacttggagggaacaacggcgggatccatcagttggcgtctacagcgagtcggaggcgatggtgcgatacatcggcgcggcatcttctgccgtgccgtcatcgcaggatccctacaaaatgg

SEQ ID NO: 44392 - DNA, 1521 bp, Oryza sativa
tgattagttgacctgtatatgtggtgttaatggatttttttttatttcaggttgttggtgaatctggtcttttcacgcctgatgatgttgcatacgtgcagaatgctggtgtttctgcagtaagtttactgattacccgttttcagctaagttggtcatacatgtgcttcaaatttccagctgaaatattgtacggaacgtctgaaatggattaagaatatctgtaattggacttaatatttatccacgatataacaaataacactaattctgggaaattttaataagctagtttcagaacaattttactatattctaatttagatgtaattgtagtcaaaattgcaacctttttcctcctcccaattttttttctggtactttgttgtcgtttgaattatggtgttttggaaaaattcattttcgtttagagacaacaaaagaaacactagaccgatggattgtgtttcctcctctcagatattaaattttgaattatgaatcttttgttactttattctgaaataaatccctgactttttttttgcacacatagattttggtaggagagtccctggtgaaacaggaaaatcccgggcaagccattgctggactatatggaaaggatcttttgcactgaataattgatacgcgcggtagttactgtgtgtaccaatatgggctggagaaaaaaaaaagtaaagcctacaagcctcaaatgtaattatgaataagggccatgctttctacaagtgtaatttcttttgttcacatttgtggatttttttttatttttttatactttttttaaaaaaatgaaaataaaccatctagaataatattatctatattttcagaaggaaaatatgtgttccaaatcattggtatgatttctattttttcgaaagtttgcagtgcaaccatttttgcacgaaagacacacgtaagcacacactatcacctacgcacatgacacttacaccagcgagtgcacctcctttaacgaaatgaagcaatggaggaataatgatgaattcatcaacctcgccaaattcctgatgaaatctcacacattaatgtaattatgcgaatcagaatttaaacccgcgactccattgtaatataatatgttttttttttttttgctcacagacagataatgtttcccaatgtgcagtgagacaccaaaattaaatataaaagtagcaatatcttttgtcgtataaaacagtattaatttttatatgcttaaataataccaaatctttgtcataataatatacatattctatttgagcccccaatgctggtgtactaggccagactgggagggaagcaaagacgagtggaagctggtctatctcgggccagtgtgcaaacgagagatgggggaattgggttgggccgaaagaagagtaaagaaagggaatggacgccgaatgcatactggcatttgataatctccccagatttattttgaagaggaagtttgagcatttcagtggatttttttgctctcaa

SEQ ID NO: 44393 - DNA, 847 bp, Oryza sativa
ctaagccgatgactactccgggcttaccaaatttcactgttaacagtaaggatatatgttcttttggctttagtgtatttgccgattgtgcacatacgtataggagtatgtacttatatgtatgtatacataggaatatgttctttcgggtttatccgtttttggttttctcaaatcatttttcgtacatattgtgaggccctgaatgtactaaagatgatgttcaaacttatctgaagaaaacagggattccagagctagctcaatgggaatgatggatagctaagatttcctgataccgcttcgctgtgttgattacacaaatccaagggctgagatgtgcctggacggtctacagagagcttttcgccatactgtagtcgtcatcaagtttgtcctctagttctggcgaactccatataaggcgcgacgctagctaatatcagtatgcgaaaatatgaaccctagttttattcccctcttttgttcttgcggcacactctaaatataatccaatttcagctctatttcagcatttcccatattaattgttgtgttagggtacctaattagctagctaccagcctaaattgtctaaatatttctgtttttcgtgcatatttcttcaagttcctaacaaaaggtatcagagctcagtcaatccttggcttaacctatagatctggcaattctaggctggtaagggttggggaaacaagtattccttgtgaaattccatagccaggccaataaattagatctatgggtggaggaatcgagcagtacagggaggattggggaaggctgtggttcttccctgtgaaatctccgaatctgtgctattcaa

SEQ ID NO: 44394 - DNA, 2938 bp, Oryza sativa
tttatactacatgtgtttctttttaaaaaaattagcatcttaatttaaacttttaagtaatattttttcttgtatactaaagatgtattaataatttttaggatatattaagttaagaaatttcatattaaaaaatatggtaatatgacttctttatctaattaaagacataattacatacttctatttgcttgtactacctccattcataaattgaaggattcaaattttatcctaagatataaaggattttaatactactcgtcccatccaaccatccattattcaatttttatccaacagtactctatctatcttctaactctgcacatacctcatatttaatgagtcttatttagagaggggaatcttagtatatttttttcattcttccttaattccaataaaattttaggattcaatataggatggacgtaataattaaaaagaacttcattcatatacggatttacggatttatttgtacgtttgtagattgatttagctttacatatttataggtaaatagacctcgtatatatgttgagagatacaattaagttagtagaagtcgttagatgtataatagtatgaagcaatgagtccaccatttttattaaaaaattatgaagtactgagtccaccatttttattaaaagattaaggtggatatttttagggataatttttaggattttcttttatccggtggttaatttaattgccgtaagggaaaaaaaaaaggaggtgagagccggtgggttcgtctcatctgtgaggagggaagtggatatgttcattgtacatacggattttgacggcctggtcgatcgataagttttatttttaagatatagatctaacattttaaaataaggtccacaggtttgggtaagatgatttctttttctcaaaattttttatattaagatatatggtgatttaggaatgtttataggaagctacgtggtagctcgagagaatttgtaggacatctaatgaacttttaatatataataatagataattcatgtcatattaattaatatatcaatcaataattaaataatttgtgtgtgcagtgtcctgataatctttttatgggttcaccactgaaaacaaagggtatatatccaagtgatgtcttgataattttatttttgagttcgcccctggaaattaagggtatatatatccgagttatgtattataatttttatataaaaatatatgtaccaagagattatttagctatctaattaatttttatactatgcatttggttgttagccagaaaattggaaagatggaaggggagggttagacggggagagagggagtacgtacatacatgtgcgcattacgtgaacttgtgttcggagagggggaacgtacagtttttttttggaagataaaatttaatggtgaaaattaataatctaataatttaaaatattgggtctaccgatttaaaggaaagtgtcacgtgacggtatagaagcatttgtaggagtgtcatgtggcggcttaggagtatttgtatgaagtttaatggacttttagtaaaaatacaccttgttccgatcacatataaattctccatttatcataacaactcattatcactattataaaagttgattacctattaatagatgaaattgcatatgtgcaaataaaataagcctaatatatcattaatgcactacttagctaagtctcatgtctcacttatttccaaatccatatataaatattctaaaagtatcactttctaccgactaataggataacaacctttaagttaaatatgaatgcctcgctaacgggtgatctattaccttgaaagttgggtacctcatcgatgtagctgtgtcccctcaagatcagcatgaagcacaattctaatgcataatttactataacatcctcatagagtactgtaacatacttgggtcacctcaatttagccatttttatgccacgtgatccaccaatttaaatagaaattgacagtgacattatatagtgccacataacgacctaagagcatttgtaggagcaccgcatagcaacttagaatttttttaggtagtttagtagactattagtatataatattattttcttgctgcggacagtactaccgaaactttatttccttttcaatcctactgttttttttaacagttactatgtatacatatgatctaatggtctaaacaggtgcaccaatttaaacaaaaatcgagagtgagactatacagtaccacgtggtggcctaggagcatttgtaagagctccatatggcgacttagaagtgtttgtaggatcacaatttttttttagaattacatagtacaacgcagacactcacaacgcatgcgcattcacccatatgaacacacgcacgcaaccctacccctaagagcatcttgggccggcaaattagatatataattttaaaataattttaaaagatgaacatttatagatggttgatttgatatttgatatttatattatagatctagtttaacactacatgcaatatatttcatctttatattgtagatagttctattttaaaggccatcgatttttttcagatggtactaagtacttatgttttaatttggctctatctttatagtaagtacgtgcatttgtttttgaaccggcaaatattatgtacatgagaaaggtgttacatatttaatagtataaaataaaaggtccactaatttgaaaatcaataacacatatagataaaataatgaatccatctcaatttaagtgaaaatcaacattaaaattagttcaactgcatgtgtatatttgtgggccaatatatttcaactttatattgtagatatttgctttttgatagtactaatcatgtatgttttattttggttgtcgtatggggctgcaggaa

SEQ ID NO: 44395 - DNA, 2304 bp, Oryza sativa
attcctgcagccccatctgccacgatttctctataattttttttcatcggccttaattgcttttataattctctaacctattagctttatagtatatcatatttgtgttatgccacgatttcttcataattttttttatcggcattaattgcttttataattctccaaacccattagctttatattatatcatatttaaataatatttataagtaattatttgtaatattcttcatcatttgaaaagatggtagacttattttcttcagaaaacatgtcaacaaaagtaaaactaaggtgttttgtccagattcgtagctagagtttgtctttttctgggacagagtagtacatacatgtgaataacaaaattgaaaaaccaaaagtgaattaggccatgtttagattctatgccaaaactttacaccatgttcacatcagatgtttgaacacctgaatgaaataataaatatcggccaaaacaataactaattgcacatattgcgattaatttgcgagacgaatcttttaagcctaattgctctatgatttgacaatgtggtgctacagtaaacatttgctaatgacggaataattagacttataaattcgttagtattcgtctcgcggtttactaacgaattttgtaattagtttttttattagtgcccaaacaccccatgcgacaccctatataatactcgatgtgacacgccaaaactttacacccctggatctaaacacccccttaatcatcagccatggcgggacatacgagcaatagcaggatgactacggtgacgccctagggaagcttccctccgtccggcccttagccgcagttccggcggcggtaggttattttaatctcaattaagttggacggctaaaaatattggacccactgaattaagtaaaaattgagggatggattttattagcgtcacgtggtagcttgaaagcattttatggattggcacgtggcagtgtgagagcattttaagaaagttcaaatggacttttagtattcaacaattaatataaaacaaaattattaaattatctaatattattaaattattataaattatggtccttgatgcaataattcaataacataatccgggttatcgaattttgttatagtttctccgtttcacaatgtaaaactttccagcattacccatattcatatagatattaatgaatctaaacatatatgtgtctagattcattagcatctatataaatgtggacaatgctagaaaattttacattgtgaaacagagggagtatttattaagagaaagcgggctaatctaatggtctaacatattgcgtgtttttatagtatagaaaatcttattttaaaaagatggtctaattttttctactgatgtgcatacatataaattttaagtgcgttatagttcttttacatacgtaagcatgtttttatttttttagtaggtttttttatagtttttcttctcgtacttacgtatgattcttgattttttaaatgaacagttccatagctttttccctcataagtaggcatgctagttttacccatatgcacgggatactaacagcaagcaaatagatctaatctaccggtctaaaattatgggcccactaatttaaatgaaaatcaacagtgagattataaaatgccatgtggcgacttaggagcgttcgtagggacgccacatggcggattaggagcgtttatagaaagattaatggacttttagtatataatagatagaagatagatagataatagatagatagatagataatagatagatagataatagaagatagatagatagatagatagatagatagatagatgactattgttccctgttagtggtgcgagaagatcatcaacaacaatgacgccgatgactcctaccagatgttgtggcgctctcctcgaccgaattgcatttcctgctcaagctgttgttgcagttccgcatatggcgttgttgcagtactccgaccagcacttctgctaccaccagtggtgcccaaccaccattgcggagggcggcaaactgatgagggccaacgggaagacgatgttggtaaaggccgccgctttccacaccttgccattgctctgtgccaccactcgtcgtcgcgttgcgctgccgcttgatgtgaaaggcttgcagccacatcaggttgctatcgctacccagctccctcgagctcttccgacacgtcaccccactatcacctatcaccaccctatcctgatatcctcaacctcccgacgccctacaacca

SEQ ID NO: 44396 - DNA, 3362 bp, Oryza sativa
  unsure (1)..(3362): unsure at all n locations
ctatagtgctataaaaaattctccaaatattgggccgtatagcctggccgagatattcgcaaacagtccagctaatgttctgtggtaatggcccggtggaccgatttatgcaatggagtcaagcaaataatctggccgttcattttctatcgggagtgactattcatttgtcgtcgggtgatttctagtaaaaaatcacccagattttttttacccttagatttacatccaacagactacaaaagaaaataaaaattatatatttacttacacaacatttttatcaaaattacagtacacttacatgtcatatcaactaaatttacaaatgtaattttagttatataggactgtaattttatattttaaagaaaaataaaaattacatatttacttacataacatttttatcaaaattaaagtgcacttatatgtcatatcaacagaatttacaaatgtaattttagttatataggactgtaattttgtattttattttttactttagtttcaaatgagagtgaggagagagaacaacgcacgtgccgattttttagagcaaataaaaaagagcgactttaaccgtccgacgacgctgttacacgcggcccaactgaatcctatgcgggtttcccagcccaatatatacgcacgaatcttggtacacatcgaatggccgaaaaaacgtcaaatctgagagaaaaaatcacacgacaaatctatagcaaaatcgttttctatcagacacggctgataatcatccaaatgaactgcacttttattctgcctttatgcccatgaatgcaggacaaccaacgtaaccaaacacccataaagtaatgtaaatgtgctccaagaaatttaaatggaactgcttaagttggttttaccgtcaaaacaacaatcacttccattgtgtttgtgctttgataaatgctgaggttcagataagacaagatcatgtgatagctgtgtttctgcaaaccatcatatcatgtctttttcagagataaatgtgggctccacccaagctaacaatacctggaaatacttggcaacggatcagcatccatctttaggccaattgcagaagcaaccctatggatatttctttagcccatcaccattgcaccaaaatatcatttcagagaagcacatgatgtaagcatttttttcagattatttttaccaagtattcagatgattttttagataatggatcaatagctgactctatatccaaaaaggatgcatagtcaagtattcagaagaatgactgtccaatctccaatgtattaaagataattactttttatgtctgtgataaactgtactacattcgtttaaaattaattgtttatctatatttgaccggtgcatcttgaatcaaaggaattaggaggaatttcataggatataaatccttttttttctatttggccctttgatataaagggttggagcttttcaaatcccgtgaaattcctacggaataacttattgcgtgtagattttaaagaaaacttagcaagatctccaacttttgaaaaaaaaaactcttttgagctatatcttttcatgtgattcccatgtttttttcagactaatcgagcgaccattcctgcgtttttttatgtaagtaatcctctgttttgtacttaaatccctatcaaaatcctgtgtttcaaagaagccctaaatttttaaaatttgtgtagtttaacaacatccaaattatatctattattctaaagctggcagtgcctgctgccatttgattggtccgattggaatcacatttatacgtcgacacatgtccagctaaaatgcttagtcgcgattcgtggggaagcagcgcgagcaccgagcaactgcaaagatggttggcaggctgtcgcaggcctaccgagtcgagcacctggatgcccaataaccacacatgcacatgaagcccagccaaatacgtgaatgctttttgtgtctatgcttgtgctatatataaaaatatttaatttagatgatcacaagattttattcacataccaaacttattggtgtgtatatattagttattatgcacactaggcttgtgcacacaattttctttttaaaaaccaaaattattgattcgtcaatcaattgataatttatttttcaaaatatcaaataacaaatacaagtaaatgtcacatcatgccaaacgtatatatgtgcgctcaccgttcatactatgtgctgccctcgcttacactcatttttaatttgtaatattaagggtacttgttttggtaacataaaaacatgagataacacatggaataattagtggccaatngttggtttgcataataagctgaataaaaacaaacaaggtaaaaaaaatatttgcctaaggaaaaaatggatttatcagcttttagcgaggctaaaaagaggtataggtgattcagaaaagaattggcattgggccacacaaaaacgctatatctggattcttattggacaacattagtactttcggctcaatttggagcacttaaaatgtaggagtttatagatcctgtttgcacagcgccatatctaagacaaaagttaaatttgaagtttgtatgataaataatagtgatttaaaattttatattttatctaggatgggaacaaaataattcatcgaaacgttatcgagataatcttaaatctgaagtagtgccaaacaaatgccataatatatacgggctaaaattagttagcgcgtcaacggacgcgcctattttctagtattataaaaatacttctaatgacgaatctgaaaatatgaatcttgtcatgttaaactatatgatttataaaatttgatcaaaaattaaaatgtttgagtgcaaaccctcttcaagtaatttcaaatggataataaggttcagtaatcagtgtactccttttcatcggtcaagctttcgtccctttttttttctactagttgagaagaaggtatcacttgtagtgaggtagattccatttccaaagcctgaaaccgcaatcttgatttatcatctggacggtgacctttcaagaaaaacacccgatcagatcctaaatacctctgaactacaaagtttatccaattcattacatatcaaacagcagagagatcgaatctacatccctcgtacagctcggttacatgtggatccgatgaagatttacataaaaaatattacccatggtccgggtatccatggatacccgacccgatgagcacgggcgtgggagtgactttttacctatgggctcatccgcccaagacccgaagacgtcatgggcaataggcgggtttcattttttacccatggggctgcaggaat

SEQ ID NO: 44397 - DNA, 592 bp, Oryza sativa
atttgcatatctctctaatttcatcctgctctgaattcttcaataaaaaaagaaaccttgctaaccattgggttaatttggtactctcgccgtttgagaatataagatattttggttttaacctaagtcaaactttcgaagttccaccaagtttataggtaaaatagcaacatgtctcgcatgaccaatgatattataaaagtataatccatttttgtatttaatgaaattaatttggtgccgtatatgatgtttcatttttctataaacttgatcaaatttaaaagcaatttaagttaggataaatagagaacatttcgtatgtgcccatcagttttcgctgaattctttctatgttgaattttagttttatcctctacgtgcacatgagtttttattttgatccccactatacccatgccgttagttgaatgtaacttgaccgttaaatttttcaaaaattgactatattgcccttcttatacctactttaaaaacataaatcccaatgtgaaagaaatctataataaaataaaaaaggaacaaaattatatgacaccggatttaaaacataaatctcaatgttataaac

SEQ ID NO: 44398 - DNA, 688 bp, Oryza sativa
aaacatacgcacacaactcaaatgggaagaggcctaattgggccaggatgtcacactccaacacagctctccgatctccactgctaacctaccgcggccctgacctcctcgagaatcacttacacttccacaactcttgattgcgtcatgccctattgcttatacaccgccattacagcaatccatccggtaacacctcatcatcaacacctttccatcagcttccaaagtccacccgctccaactttcgattgatcgcctatcagtttagtcatgagccgaaacgaagaaatcacatgttgtcatcccatgccgccgaacaacccgagcactacatctagtagtttgcttgtcaaatgcagctcatcaaaaggcctggacaaccccgttcggagcgtttgatttcaccgaccaagaacaccgatcatctccagcttcgatcaacctgagcgtgtggccccacgtctccctgttgagagtagctcactagaaagtccaggccacctacctgaagtgtctgatccaccaattggatcgccaatcgctttcgccaccatcaacccgagcaccacatctggtcgtctatttgttgaaagtagccagtgaatggtttagactgccgccctaaagtgtccggtttcaccgattgaattccgttgatcgccgagatgctccaccttgtgtcatg

SEQ ID NO: 44399 - DNA, 691 bp, Oryza sativa
attcctgcagcccttcctttttttttttccttcttttgcttaatatggctttgatttttttaaaacaagagtttttttcatggagaggaccaaaatgcccctcacccctccctcccatctctctctcctccggagtccggacacctctactctccccgtcttctctccctctctcctcatcctcctccgtgttcctgatctgcgcacgcacggccgccctcctcctcctccccccgcgcttcgcttcctcgcgcgcgcgcgtcatcgaagctggcctagagactcctcggcgagaggacggttctcccccctctcccgccccccgcgcgcgcgcggcaggtttgggagatcgacggtggtcggtggcctcctccctcctgtcctgcccggttcgagtcgaattgaaaggtagtattatgttcttgtctacgtagctctctccccctcctcaattccacctcatgagccggcgattggggatttgatggtttatcttgcccccctctccaaccagtttcttccgcatttccccccaaattttgctgaaaaagaatttgggggcgttttgggcactttatattcttacttgtatgtagtacaattttatttacgagatcggcaaaaaaaaagttttcttttattgcagaaaatcaagagaggatgatacgctttgttggactttccctgatct

SEQ ID NO: 44400 - DNA, 675 bp, Oryza sativa
tcgtttggtaaaacatgagctaccctattcgctgacatacgaatccaaacgaccctaaactcctggaaagagctcagcaagattttcaaatcttgaatcatcgtcctataaagcgaacgagtaaagatcacatcaactagtatttgttggactaccattggagcctctagttcactcaccaactgcactgctcttcgacaagccaatatttctgacattgtggcattacaaactgaaggacataagtgagaagttggtactaaaaactcacctatgtcatcccttacaacagctccagtagcaccctaaaaattttcgtcctgaaagctacatcggtctttactttcaaccaccccattggaggtttctaccattgttgtgtcggttgctggaccttagatgccttcttttcattcaagttcgcccattcttccaattggaacataatcctttccactacacaagaaggattctccggtgtgtcaacatgccaagcatcatttctatcaaattttaatttttaacaatccgttcccaaaacatatatgctataggtcatttttaacccgaaatatcacaaattcgtactagtctataggaggagttgacaaatgaatttcaaaatcttttcgaaacactttggttctgtttgtaatgattaataagtggtttcaa

SEQ ID NO: 44401 - DNA, 1921 bp, Oryza sativa
agctccgatttctggactaattatgattggatgatcgaaaatgatgtacctctgagttgaatgatcaattgagctctctgaaaataaggatactgttgtttttgctttggaaaactctatgaatcatactgctcaatctatgtatggaactggagtatgtcttttcatggggttgtggattagaatgctggacattttttgaaagcattttcctggtggcctgcccggaatccaggcaactacggtggctgctactctcggctactgggcacccaaactgtctgccgctcaatgaagtctccttccatacttggctatgcaagtatcggaagaccatatcggaaaaacagcggcgaggtttcgacactatcgtcactctaggagcatggtgaatatggaaggagcggatttcccgtgtgtttcgaacatcaccagcggaactagactgatgttgccaaggcaatgacggagaaagcaagctttggagattggcgagggcagctgtccctcatctaaagtctaggtctaggtagcatcatgtcgctgggagaataggattgttttcctcccttttttttttcttcttttaccccgtctcagcccttcctccttttctttcttcctgtgactatcttacatttgttttacttctcttcatataaagatgcacaagttttttgcgtattcccgaaaaaaaaagacatttctccctctgaagattaaacattttctatggttggctacaggattcagtgtacagttcagttgataaggagaaaatggggagattctacttcaggcgtgtttgtgtgctagatatgaaaatgcaaaactttaaattggtgcaaacctagtggcttctctaaattattatatttgacttgcacactatcctttctccaagtacaaatgtaaatttcctcaaaaaaactgtagtaattaccaatttaccagtaatgcgctgtaacctttctcaaatagacaacatcttataattcataccataaatctctaaaatatggaaaatatattgatatatattatgtgaaaaacaccattactagatttgaatatttttgaaatgtgcaattagaaagcataatgaccaaatatgtactttagaacgtattgatatatcctagaagacaagtaaaaaccacataaatgaagttttaattaattatacctcaataaaaataaagtatccctctgtctcaaaaaagaatgtattttagtttttggttttgtatttttagttgtggggtccattatacctcttattatcactttatctttttcttcttagtttagccatctagatcttgtttggcacagctcgagattagaatatcttagagttgggtattttgaacttcataaatcaatggatctggatatgtgattatgctgataacattagataaatcattttattcttattttatttgatattgaaaattttaaaccactatatttaacacataaactttaaatctatagtagatctgaaatttgaagctatggagttatgccaaacatgacctttgtactacctcctcctcatttttttttattaatgaagggtatagcatttttttaggaatgctaccagactccattcggacaggatgaaaccttagaggtgtcacctgatacctcgacggtatcctgttcgtacgggatgatacctcagagatatcgtctgatatagatctcttcctgaaccaaacatgaatctttcaattcatttggctctcacgctccctttttttctttttctttttttgctatggctacttccattttttttatgtaatgagcctatcctctaccctctcttttatgtttacatttcaatataccgcaacccatataatactagataaatattaagaggataaaaatctatcatgggcaacaa

SEQ ID NO: 44402 - DNA, 2349 bp, Oryza sativa
gatacaacattggatggtgctttcactagaattgcatgaggagcacaacattcccattgttagtcaatagataccctatacaatgtacatgctaattgacaaacaatctcaaatcttcaagtatttcacatgtctccagtctgattttatgaactttctattgcatgacaaggaaatggataatatacattacatactgactcttaacctaggtgtgtaggacatgtgaaataacaaatgtgattgcacacgcactttatttatttctctattgaattacaatgaaggaagtgtataagctaattgataaaaaaaatcacagatattcaagtatttcgcatgtcccaaatctctgtttttttaatctttcaagtgaatgacaagcaaagaaatggatatatacacattgaatctgatcttaagcatgcagaatatgtgaaaataacaaatgtaattgcaaataagtcctcatggctacaacacatatttcaggaggaagaaattctactgcacaaataggccataggccataggttattcaatctccaagatgaactcaccagacccaaggacgatgagagaccgcattccagcagctgaagctgagagtttcgaaggcatgtgaccgctgtgatacatcacatatgcgaagcggacaagaagcaaagacacaagtactggaaaggcgcaacacacggccatggagacatccggccccatctctgtcagggctgacgagataagatatcacgcaggattttgctgttggatattcagcgttaaaaaaactgtgccatacaaataaaaaataggcatcaacatgctcttaaaaaaacagtagcacaaatagttcattctgggagatgtcttgagtagtttgaatgaattatataacaattgaagaaaaatacaatttcatgtgtaacaagcagttcattctagagatgtctcaagtagtttgaaaaccttttatctttatgtattatcattggtaaggtatgtagattggaagggagatgcggcatcaactctgaacttgaaagatatttataataaaatcgagcaagcttaactaaattttcattgccataagcagaaaatgattcagtggctaactggtactctatttggaacattcaacaaatatgccctcctcacttcatctctattttcaggagcataattggtctattgatattcgttagtatgttggatctgcaaatagatttagagaatgaagtctagaaataaaccaaagaatagcatgacataatcagggcctgtttggtagggctccaactcctagatcttagctcctaactccaactccaatgggagcttgctcctataggatctagaggtgggctgaaagtgtttggctagtttgatcagctctagaaatctttgaagagtgaaggaagcaaagatggacaattttatccttcggttttctgaactgaaaaggttgcaagttttctttgctggtagctactttaaacacagacactcatttaccatatggctagtaccaattagttctttactgtactttattctataacaacatgctacattcattaaatcaattttctgaactttgtgcaatccactgaaaatatttctgaacaaattctctcctcatcactactctatagttctatatgaaattccacatacacacacataggagaagttttcagatctaaatattttctatttgttctacgcacagtagcaacaaatcaaccaatatattcaatcattcgaatagagagtagagcagatttaaaggcaaaaggtggggaaaattttagggtttgggaaaaagagtaccttgccactagcgccccctgtcagccgtcctgcgtcgttgttagccgctgtgcttgacctcaaccgccgtgcgccacattcagccactacgcggcagccctccgccgccgagccaccctcactgtagggcgtagccagcaggcgagcaggaggcgggaagcgaactagccaagcagatcggcctcccgcggctctgggctcctcgccggctagcgaagcagatcggcggccggcccctcgccagtcgcgggatcgcagctcgcgcactctccgtcgccgccgtaccgcccgtcgcccgccgcaatcgcacgctcacacccgcagccagccgtccccactcccgtgtcctgtacgcagcagcccaccaaatgagttagtgggccaaatgattagattggcctctaaatgggcctttaaacatgcaggttcccttctgccatcactcctcttcatcttcctcgagcttctaaggcctgttttttttttaaaaaaaaactttatgcatttattaaatat

SEQ ID NO: 44403 - DNA, 720 bp, Oryza sativa
ttcctgcagcccaaacgaggggctttctctcccaatcacccagcaacgaacgaagccatagctgagcaaagaatgacaagggtaacaatggcacataccatatcaaatttaactttttaataagaagttatctgatcaagatggtatggctacaaatagaccaagcttctgaaagtgaatatacccaacgggcgtgctaaaaaaaaaagcaatcaattgagagtcaaatgttgctttcaaaaactttatctgctcttcagcacacctttgaggaaaatgaaatggcatgactgcaagctaacatttaacgcttagtagcactaaataaaagacatatgtaacgagagcagaattcgtaattcaaaattgtggtgccaaagaagccaatcaaggaagcacaaaattcatatgaagttgtcaaccgctagaaaaatgaagtaatggatctatgtttagtttgtgctagttcaggcaaaacaatcagacatgcacaggtttgaaggaaacccttccttctctgatttcttactcaacacagcagacttaaggccaaaatgaaaagaatactttttactgcacacctgcatggaacaaaacagtatgaagaaccaatcagaaaataaggcgatcacaatgttaacttacagatagtttctcctcttcggttgtcaatggcctgtctacacggtatgttttgtttagtcgtctagcccaccacca

SEQ ID NO: 44404 - DNA, 2279 bp, Oryza sativa
agtacaacttcacaaggaccaaatgcaatggttggtttacatgttctccagcacaatacttcccatgacaatgactaggaacattcctaagttgtagtacaaagatttccttcaaaacagcagatgtcatgccatgcaactcatttccctaattaatgctcatcatattttctgaactatcaaacttaattagcctctaatcctaaacaggatgacgccatatggcccatatccatcttctgacataattttccgaataacaacagtgcacgaaatgtcactgactaaaaagaaaccatagaacctcgccaaaaaaaaaaagagaaaaagaaaaagaaagaaaccatcgaaaaagaggcataggcatcatccgggattcaaggaaatctggaaatatatggtggtactaccttgaactcgtagacggtcaagctattcggaacgtagaatacgtcgattgcgctgaagtcgacaagatcgaagtagcggccatcgttcccgatacgcgagcggaaatcctcgtcccttgccacctataagcagcgcagagcaagaaacccaagaaagaagcatcagaatccaaaccaaaccacccccggcccgctccacggattcgtgtgcttgtgcgggggagaatccaatcggtcagcgccaagaagaggggatgaggggaacggagaagatcgccgcaaccacgggatgcaccttgataatctggtggtgcagcggcagcggcggcggcggcggcggcatggcagcgatggagggttttgcgcggcggtggtggcggtggtggtggaggttttgcacgggaggaggtggggtgggggagaattccgttggcgtgctggatagggctgtcaaaaaaaaaaaaaaaaaaagctcgagactcgcaagctactcgaactcgactcgttataggctcggctcgctcgagcttgaaatgaggctcgtgcactttaacgagccgagctcgaatagctcggtaaagactcgagtactagttagtaactgctatgtctcatgctttaccttggtctccaataaaaaatcatcgatgcttttccttggtctgctactactccaacattagtctatgtgaagtacagaagcaatcaattcttgaatactactcccaaagctagtagtagtagcaaagcagactactcctgtgctagtactagtagtacagtacactagtgctcccgtatggccgtatctctacacaacgtgcccagctgcagctctctgtcagcttctctactttttgaaatatgtacacatgcttgtgttgcgttgatgcgagctcgattaggctcgaggctcgtccgagccgatcccgagcttgactgcaagctcgaaggttagtccaggctcgactcgagttcataccgagctcgagcctaaggatctaagctcgctcgagctcggctcgttgacagtcctagtgctggatgcgcgttagaaatgggaatagcacatgagagcatctccaacggattagttattttgagctctccaaatactcatttggccagccatctaaaaaaaattagagagtcaaatttatctatcattccaacagtctctctattctagccatgggacccacgtgtcagtccctctatccttcttttccccttctcagggccgacgcaggccgggggacgccgccgccaccaccacgacgaagcgagacgccgccggtgccatccagcccaccaccgctgccgccgccgaaggcgagggccatcccgctcctgcgcatccaggacccaccgccgccgccaccacgacgaagccgagacgccgccgccacctccagcttcaacgacggcgacggtgtgcagggccaagctcgcctcctcaccgccctcccgagccgcacccgcagcgctggggaggtgtaggcggaggcggcggaagccgcgcgacggaggttgccccctcctcccgaatccacgccacgctgccccgaacccacgtcacgccggaggcaacggaggtcgggcagagccggatccaaacgacggcaacggcaacctcggggacaacggcggtggatggcgatgactggcgacggtgcagacgacggcgacaacgactggtgacctcgacgacgatggtggcgctccggcgtgggttcaagacgtgcgcagtcgttctctccgccgccggcccgcccttctgcgccgtatcgaggagggcatggctgtgtcagcggtggcgttgagatcgtggctgtgcacggtggcggcagcgtcgagtcgtggctggag

SEQ ID NO: 44405 - DNA, 1544 bp, Oryza sativa
tcagcctctcctatccccagctccccttctctcccctctctggctctccctctggtctgccgagtgccgacaatgcacatcgcacgagcggcgcgcagggtgcacaagcacggggagggcacaggcgtggtggccggcgagctgcgcggcggtcagcgtggtgcacaggcgcggcggccggtgaaggcacaggcgcggcagcggcaattcacgggccggcttcacgcactaagagtcaattatgtacaattatgctatttttgatggtgtgtgaattatgtacaatatttgttcttgtcgaatcgatgattgtcttgtattttttgtgctgatgggatggagattttatccaatgtggggccccggtcggggtgcggagccccggaggggtcggggacgggacctgatttggccccgcatctccattcggggccgggggcggggggtgaagtcggggttaggacggggccgttccaacccaacccagccccacccgctccgttaccattcctttcctatacacaatgtaactattattttagttttagttcatccatgcttcttgcagctccatttatgcttatgtattttcgacaccccctgtcctctgaaaatcaggtatcttttctatgcaaatataacaagttagaaagtttcacaaccatataatcatataagagttctgaagtataaatgatggatggccttagaagaatgagggcagctccagcacaggattccgttacgataggaagtcactggataactaaacaagattttatacgtcttttttcggactgagcaccatgttgtccatgtgattgcccccactcgctgccttcgcacagaaacctcaccagtggcgccttccctagctaggagcctgctcggtatcgcgtgcctttgagtgcgatacctcgccagtggcagcactccgagcagaactgcaccggcggcgctttccccagccaggagcctgctcggtattgtagctatgctcgctgactccttcccttgtggaccacatcaataataggaaaaggatgtagtgtgtcgaggggagaaaggaggaagaaaataggagtcaaaggtaaatggctcacctactggccaagcgggtgacagcccgagctccctcctcacagcatgatacctgatacctggtacttggtaacctggtatctatgggtatcagctggtacctaggtaccaacccttataccacagggtatcagtatcatggatgatacatgaggtatcatggatgttacccgaggaatcatcatgcctgataccatggggtatcatggatgatacctgaggtatcaggcttgatacctgatatcaattgaggatgaaacggatggcatacttgtagacaacgtagacgagcagcgaagagctagcgaggaacacaatgcgacaacctcgagacctacaggaaacaccttgcgacctccactttgtcaactccaagatcaccctccacggtggggaatgactgcctccactttgtcgccgatgccccaagcctcatccttctc

SEQ ID NO: 44406 - DNA, 1184 bp, Oryza sativa
taattgcagctcatgattttctagaaaaatatatattcaagtaaatttttatagtgaattttaccttaactaaatcgtataaaagattaaaatagttttcacccgttgcaacgcacgtgcattttttctagttatataaaaagaagaaaaatgttgatgtttaaagaaggaaaaactaaaatacaaccccgcaggggagaacataatctaatagagtctaaccaatcaaagatctggtgttgattggtgttagctttttctttgggcgtggaaaaaggttttccattactcattacttgaacaatcgtcacagatcagttatgatagtctattggcattattgttattggtaaaccgtgtttatccacataaataagtatatgaattaaagaaaaacatgaagtggaactccttacatgttcacaagctgaaatttataagaagatttaataatatgaaaataattttgtacaaaacatgttaaaatatgataacacatttttttcttaaaaaataaaagcaaagtgttaaaagaattataaacatttcatagaaatattgaaaacatgaaaacacctgtggtataagtcactaacttccggaagcaagcttaacttatatctgtgcagctattgtttttcagaccaaaaggacgaaatgcattcatagacagtctgctgcacacacccaaaaacaaacccaaaaagaactaacgggctgttcagattggtgtcattttaaattatactattttttataatattgtcaaagatgtacatacatttagtttttttcaccaaactttggtaatattgtcaacttaccaaaattttagcaaaatttggtaaggtttattttggctataatctgaataacccctaaattaaagtgtggcagaaatacaaaatttattggacaggttgacgaaactatcttgatatcagacctttaccctaaaatatataaaaacttcaaaagcctttatgttacttacttcctccgtttcacaatttaagtcattcactatatagattcattaacatcaatatgaatgtgggaaatgctagaatgacttacattgtgaaatggagggagtaacttacaactcgtaaactaagtgtgtgtttagttcgcgaaaagaaattttttttgtgtcacatcggacgtttgaccgaatgtcgaag

SEQ ID NO: 44407 - DNA, 692 bp, Oryza sativa
atcaagacaataattagtcgtaaatgcaaacacatgtgttgactctagaacttaattcggatggattaatttgaccataagaaaccaaactagttgaattacgccgtaatacagataaatcctaatagatctattttagaagatgataagttcataaataatatccaaattcggcatggttcacattaaaattagaaattatagacgaggaaggaaaccaatctgctgccgtgttacacggtaaccgcagtttgcaaccgtcaataggagaccctatccactacgaaatccgttggatccctcgtgctccgcaatctcagccgtccgtttccccctatagtcccccttacctccccttctacagttctacgaagtacgatccaaacaccagcggcgaaggcgacgaagacgagggcaaaaacaccagaaggggaaaacttttgctctcccggcgatctcgagatctctcaagatggtaatcccccatccaatttctctctacttttcctcggatttgcgccgcactcccgatcgatgtcttcgacgcggttaactgcgatggatttgcgcgagatcggatctatggtctagaatttcgagtcgattaggcttttttttgggtggtgttttgcgttgggtgatttcagattggaagtagaacggggggacgaggattctggggctgcaggaat

SEQ ID NO: 44408 - DNA, 1658 bp, Oryza sativa
  unsure (1)..(1658): unsure at all n locations
aatctaaaagtggcaaatagttaaatgccccgagagagatggggaagagaggggagaagggaagagagaggaggaaaaagactgcccactgggttcctcgctgatttagctgggttgagcacaatcgacttgccacatcagctgaaatatgatgcaatactaccatagagcttaggtactccggtattatgagttaatgggttatatctagtattgtgatgtaaagaagaacatgatttaaactcctatacctaaaagttaacttattgagaaacatgcactcctctacattttggcatgtttggcatagctctagctccacccaaaaagaaagtagagcttatttggagtgctttcacgaaatgaattaaagatgtggagttgaatttatgttgttagagcatcaacaatagttatcctatttcctttccaaaactgattttgagggtttttagtgaaaaaaaatcggatccaacagatcgcaaaatccttgcactagttttggtgttcccatccccatgtacttcgctatgtggatttgagggcgagagagcgactcccaatctctcgttcgcacgtttgtcctctccttgtttgttgggagcgcgggtgatcgcgatctctttctgcgtgcgtggaagaaagaaaaaagaaaatttctgttggtagtttaaccgaagggcccacttttaatttttgagattgaatttagactgtgtctcttagagggagaagtttttacactccctattttcagtttaggaaacccaaaaatcaaattttagggatagattagtgctaatctgttggcattaccaccggtcctcctataatcccaaaaatgttttttggttttctaaactgaaaatagaaagtgaaaaaactcttcaattatcctaaaattgtttttgggttttcctaaactgaaaatagaaagtaaaaaaactcttcactccaacagatagcctaaattcaatcctcaaaattaaaattaaaaatgcgcccttatgttaaactagcaacataaatttccgtttttccctcccgttcgcacagaaacagactgttaaactaccaacagaaatttccatttttccctcccactcgcgcaganacagatcgctatctcccaagcgcgatagcccacgcgctccctgtcccgacgttgccttcgtgcggcaaggggaggagagaggcgtgagtatgagattgggagtgcctgagaaaacgcatcgagtgaggaatcgggagaagggagcttcaaaactcgagcagcagattaaaggattagttagagctgtttttttaattaaaatcctttaaaatcagttttggtaattagggcctgtttggtacagctccaactcctaaatttagcttcaggagttgggtctggagtggagttgtggagctgcctaaacccagctccacaactctagttcattttgtgagagagctccacccagctccactcccagttttggtggagctgaaactgtttggctgagctccagctccaagagagatggagctggagctgtgccaatcaggctctagatgtcactaaacccaactcctaccattaattcagtaaacccaactcctaccattaattcaggagttggaacctaaaattttttccaatgggctgcaggaat

SEQ ID NO: 44409 - DNA, 1359 bp, Oryza sativa
tcggagtccgcgcccgccaccctcgccctccactgctgttgcccgagccctcgcctctgccgccaccctcgcctgccaccgccaccactgtcgctagagcccgccgttggaggaaagagaggggagaggagtaggcggcagtgagattgagggccaccggatccacgcggggcggcgctgttctcggccgccttgtcggcggtggcgccgcccactccttctcggtgagaagaggagaggagagaaagagagagagggggaaaggagaggaagagacataaggagaaaagaggaagagagagaggagaggtggtgaaaaaaaatctgaagtgttgaaaggaaaagaggagggtattttcgcatacgagccacttaagaggctcgcatgtgaaaatttatttttcatgcggccccttaagagaatcatatgggaaaataagctcatttttgcgtgcagctccttaagtgacccgtatgcgataatagatttttttttacatatggacctattaaaaagtagtatgtgacaaatgaagatcgatttttgcaaacgtaactgttatggtccgcctacaaccagtactcatacaggaaaatatttttctcgtagtagttgggcaacgtcagtaggcatggcgcacgggagaactactttagcgtcccaaatcaagatgaaaatcaaaagagccaaaaaaaaatatcgattgtaatccggtgaaaattatgtcgcccaaacccgaaaagagttactcccatgtactagaaatataaaaataccgctaattgcacgtgtaattttatataatactctctccatccctaaatatttgacgccgttgacttaaaagaaattgaaacgatgtgacggaaaaattgaaaatttgaagaaaaaagttggaatctaaacatgtcctaacactacatacacgtgtaattttatatattacaatgtaattacactcaattttaataaatcttgactatagatatatatttaaaattcaacatatctaaagactttaaacctacccaaaatgctcgtccctcaatgttttgcgctggcgtggacgttgccgcgtcgcgacacgtcaacgcgcgctgaagagaggctggatttcacggcctcctatgcgactgcctcgcctctgtaaatttttttttttaaaaaaaagccctctcttttatatatttcatggcccaacgggaaacctgtacgtccagaccataatgctgtggaggttgtatgggcttgaaacgatggtcgtcgtaaaatttaaacttctttgcctggtgttttgtgacgacaaaattatacttcgtcgtgaaatttaaacttcattttattagtataaatcatga

SEQ ID NO: 44410 - DNA, 1393 bp, Oryza sativa
attcctgcagccctaattattattaatatgttggtctgctgcttgaatatatatatatactccaggtggcaaggacagaggatttctcgagtattgggaaacatggccgctacttcgatctcgtcgacttcagcgtcatcgaggggttcaaagtcccggcggacatgaccatctgcagtttcaaggtagtaaaataataataattatattccattatcctaagaaaaaaaatccttcttaaatcacgggaagatattttctttctttgtattaattggtcagcattacttggacacttgactctagtttattttgatggttcagggaaaaagaaacgctaatgatcgagcatggggtaaatgaatgaattgcatgacctgacatctgatattttgaactagccattgtcactgttgtagcgagtattgtcctggaaaccaaccaaccattgcattaggcagtggcggagttagaaattactgaagaatatagttaaaataggactcaaattaatagagtgttgattttgtaaaaaaattatatgatgatttaacaaaatttaaacatgattttagagggctcaatttttagctgccctatgtctgcatccgcttatgtcgttaggcatcctagcttgtgaaatttatactaatttatactagctgaatgataatgctttgctaagaataaaaataaatatattgtaatattaactaaataaataaataaataaatattctatgaaatatgttacctatcattttattgtaggaatattcatcttattttattttttatgttgttacccatttagattcaattattttcaatattaaaaagtagggtacctttgacagaggtgactgatttactaccactgtcaccacttttcttaaaggatcgagtacagaaatatgctagtttaggatacttctgccctaatataatgagagtatttgccaaatgtatatgctttacacatgtagactaacaaccctgcctgactgtttatcagcctgtcattgtaatgtttcctactccagtactgatagattcaacttgtcacaggagaggctcacagaggaatttggaacccctgtgcaatgtcaacgcctgtggtggtggactagacggcagaacaacacataccgtgttgacaggccattgacaaccgaagaggagaaaatacctgtaagtaaacattgtgatcacctgactggctcttcatactgttttgttctatgcagtaaaaatgaggcattatatactaagaatatagtatataatgactcattttctagtggttgaaaacttcacatgaattttgccctccatcattttccatgtcatttccctaaaagttgtgctgaagagagcagataaagttctcaca

SEQ ID NO: 44411 - DNA, 683 bp, Oryza sativa
gatgtatgtgaaagattcatggacggtttcacatgttcttcaaacactaagaaatctagctggttgcgtggaagtggcagaatagaattgtataaggtcaggcttttgtactgatgcaagctagcttctctgattttcaattgaacagatttatctcgtctgtagtgttttctcaacttctttttatcgaatacgcaagagaattatgtatcatttgtattaagaagatgttctctcactttctggcatgcaggaaataaaatttgacccatgggtgttgtgcgaagccattgaccttcatcgtaccttttcagaaaatgaggtatgtttatgagtacacttctcctcgcttctgcgctttcctcactctcccttaatcaagatttaaattcgttactttctttctgcagattgtaactggggacattatttgctaccagaaaatcttgaagacacaggacttgccaaaatatcattctgttgcatcttttctccagcatatttgtgatcagaaggtagccgttctgctttgttatcttcttgcatgctgtaggtgactttctcgtattttgcagtcaacttttttttactgttcctcctcgattccttgtatgctttctttggcatccctaacagtatctttatggttaggccttgtttagttccaaaaatttttgcctaaa

SEQ ID NO: 44412 - DNA, 670 bp, Oryza sativa
ccagcagaggcagcaaaaccagcaatgattcaaacaagtagtgttttgctaggccgaggaagaatttccatatcttaagtccatgcatgccgtcagcagagggcaaaacgtcgtgtggctggccaaatagcacagcagcaactgctgctttcttccttgttacagggcatcaccaatggacacattagtttggtgatatcagctggctgtatctatcttataatgatggatgcttatgtcttatgtcttcatgcggtcctctattgatttaagggtttcatggtaaatctgcctcatctatactaatataaaaaggaggagttgtgcctagcaatcctacatgtgaaatcacctcccatctcatccgtccatctactatctcatctcatctccaccgtcaattcgtttcgctatcctccttgctccaccgattccaatgattatagcgaccttatcctctccaccgtccacgcgcgagcctgtgccatctctgctgcgcaccccgcctccgccgcattcaatccatcgccgcaacgacaaatcctcaaatccgacgcgctctcccaatcgtcgtcgttgcctcctccactccgcctcggtcctcctcgcctcctcgctcctccttgcgtggcgccgctccgccgtcgtccccttgcttcgctccccctct

SEQ ID NO: 44413 - DNA, 677 bp, Oryza sativa
aataagttcgctttgggtctctcatgttgatgtgcttcaattacatccctaaatcacaaagtacaatgcatccctaagacaatatagcaggcggttttgaatgacatgacgctaacgtaccttgtgccttggcctccggtcaccaccgcacctgccctgcttgctgtacaccgccattgctaataatttcatccacctctactccccgtccgttggcgcccacttccgcgtgcccctcctcacagagaaggcgatcagtagcatcgataggaagaccaacccttacctactcaacccgctcacaggcgcatgtgtcgcgctcctaccagccatgacgcttgagtttgttacaaggttcgttttctcccccagtgacggtggctgccaaggtgtcacatgcatcatcgactttcataggtcgggcacccccgacgacaagcaggtcatggcatgaagagcgaggctgtggatgtaccgtcttgtcgcgatatcggcatgcccatccgccaccaccaccggcgactgtgtaatcctcctcctacacatgccagactaggagctcttcttcaccaagttgggcgacgagcattgcaccccgctcttcggtacttgggatagctatgggctatggcagtgtccgggaggagttgcggatctaggagtaggacttggggacc

SEQ ID NO: 44414 - DNA, 1432 bp, Oryza sativa
attcctgcagcccaatgcatgttctatcggaacacaataaatgcatacaaggcacaattaaagatactactactatatcgatcatatttagagcaagtttaatagtatagccactattggctctaaattatttatagtcaatttaatagctagtttatacaatattacctataaacatacactacacaattaatatctggctccacctgtcatacacacatacatcttggaggctgttttgcagctgactataaaaccgtagtccgttgctcttatatatatctcttattttatcttctcgaaatgtgtttgtagagtatgctattgtacctgctcctcttattgatcatatctcacgacctgtttagctatcaacggtttgacggttaatttaggtgtacgtccaaccatcattaatatattcgggtagtaactataaaaaatgagccatgcacggatggcagccagatacacataacatggggcggatagtagacggatggttaatttgccccaaaagtacgtaagagtagttatattgctggtcgatattctctagcttgtcacatggatgctactgcaatagtacagccaagctactagatttcagtatttgtacatacaccctattagaatcaatatctttgctagctgggccagttatgagtgggcaggaaaccgaatcgaaccgtacttttcttgttcttgcttcttggtgttcggtttctgtttcattttgttgtcggtctattttacgatttttaattgcccgaaatagatgggcccactccaattctattgttacatgaaagactaagtcccgctactgtctctactactttatcccccctccttcccttcgggagaatttactatttgtcactctaccaaaataccagtgttcagatgccactctcctaaattttattcccaaataccactcgggcccacatgtcaatctcatctaacaccgggtcctgcaccacttttgtttgaatgccacttttgttttctagctagctatcaattatatatcctataacatgataaagaactgatgtttcatcattttgtacccgtgggcacggttttaagccacaatccatgtccgatgaaaaataaatacatgtgtgaaatcaaaagagaggccaatgtaatgcaggccggtgcccgagtgatgaaatgtgaagatagaaggtgactatataatgcaatggttgcactgtcaatactgttgggccgacggcgaggctctagtatagggtggtgctgggggcaacaaagccaccgaggccgagtttagttccaaattatttattcaaacttctaacttgtctattacatcaaaactttcctacacacataaactttcaacttttccgtcgtatcatttcaatttcaatcaaacttctaattttagggctgcaggaat

SEQ ID NO: 44415 - DNA, 914 bp, Oryza sativa
aaaagtgcggtctttttgagattgaggtagtaagttctacaaaatgaccaggatgcaatgtaaaataatgtaaggctttgcttgtgaatatttatcaactttttcttatttgtgcgtataactaattaataaatatactctcatgcatcatcagggcatctccctagcgatcttctcagctatttccaaagtatttactataggtaacatgggcattttattccatcattctcttggttttgtactactcgttaatcagtactgcatgcacagtggtctgtcagcggcgagagccatgtgcaccaccattgatatatgctgtagcggattgatggtggcgccgttggcaattgaatgcctcttcatcaattgcaaatgattactaattagcttctccctagtgcctccagttacttagaacagatacagtagcatactataaattaactataaatgaatttcgaggagataaaagaagagaaaaaaagattagcagctacagatttgtagccaactgcagtatggactcaaatatgcaatatgtgtatgaaagataggatcagatattaatagtgtaatatatatttacagataactattgtataaattggctagagatgatatggaactagaagtgggttgtactattaaacttgctcttactgagttaatggtcaccataatatatactccctcataaaaataaggtagacttatttcattctctagttttctaaataaaattattatattggtagtctagataatccaaaacttaaatgaagagacaaattaaatggttgatattggaacacaaataatcatctaaatacttatttgtcgcatgcacatatatatttcttggtttttgttacgtgcaagatgagttaaaaagtaataagtctaacaaaaaa

SEQ ID NO: 44416 - DNA, 1318 bp, Oryza sativa
aaacataagtcacgtataaggtactattcatgttttatcattccataacaataaaaatattaattataaaaaaaatcaaataagacagacgatcaaagttgagcacgaaaacttataattgtacttaaaataggacagagaaagtaggtaagagtggaagggtaattgagggtaaaattgggagaaatttgaatgagaagtggttaatgagaccattagtactctcctgttataattattttgggacaaatttaaatcctagaaatataattattatggcacggatgtagtacttttcatagatttagggtaacttggtctttgacaatttggtcataaatggttcgtactcctgtaattgaggtaattattggtggtttactcgtaaatcactcattcttataagatgaagattaaatacaagcatatataaaatgagaaaaccattaacacacgactaattatgttttaattattttaaacttaaaattttgatttatctgatattttagaacaacttctgtatataaattttttgtgtaaaatataccatttagcagtaggaaccggactagtatgattggatggagcagaaaaaaaaatgaaggaataaaaaagaagagagaagcgagatttctatctttttataatgttatttttcaattaatgcaagcattacgtaacaacttaacatccggtgtttccaagaagataaaaacagaaaatagttaaattaaaagtgccgaaagaagtactacggactaagtgactccggcttgggcgcccgatcggtttggagaaaaatcgggcgctgatatcagcgtccgatttacgtgcaaaactacttcaaactgatttttctcttaaattatttatccaaatcatgatccgattacaccattaaattcgttgcaattaaatcttcaaaacaagatcacacatggatatattccgacgaaaaaaattagcttattattgaattatttttaaatgttgcacgatattccaccaggtatattggaattgtttcactaagtagatcgaaaatttttcactcgtttaaatcgggtggttttttaccttatataaaaacaatgtttcagcaaatagcgaaagaatatttcagttcactgcaatatttgatccatacatagtgaaacattataagtacactaggtgaaacatttttcggtggaacaaaaaaataaacgaattcccttaataaggggtttgcaaaatatctaggtttttttgttgcaatggagtattttagttcactgtaacattagatctatacataatgaaagggctgcaggaa

SEQ ID NO: 44417 - DNA, 1036 bp, Oryza sativa
atctctttttttatactatctcttaatttctgcacatagttattactgacatgagtaccctttggtctaatattattttttttctttccgcaaagtagggagttgatgggcatggcactggtggagaaagagtctttactctcggtttagaaccctatgtactcccggttttacaaccgggaatacaaatccgggactaaagatacccatctttagtcccgggtaaaataactgggactaaaaatccatctttagtcccggactaaagatgaatagcagccacgtcctagctttttcttttatttattgtttttttttgctgcttgtatgtattccccacccaaatacacgaaccatccacaatccacaaatcaagcacaacaaaattatccacaatacatccacatccacaatccacaaaccaatcacaaaatcatctctaaatcaacccacaaaatgctccaccaaaatatacaaatcattcaaaaaaacattcgcagtcgccgccgcccggccgtggactgccggccgccgcgtgggtcaccgccgcccggccgccttgcacccggccaccactgtccgccgccttgcggccgaccctccgtgctggcctccgtggccgccgtgctagcctccgctgccgccgccgggggcagccctccgtgcgcgacggccgccgccctccgccactgtcgcccggccgcctcccctctcggatccaatggaggggaggccgccgccaccgccgcccggccgcctcccgctgccagaggggagccggaggggaggggagggggagagaatgaggggaagaagagggttgagaggagaggagaggaggaggaggaggagaagtgagaaagaggaggaggagaagtgggaaggagaagggataagatagggcggggaggacggtgcgctgctgaccggtggcgcatggcgatctttactcccggttggtgttaccgggagtaaagcttatgtcgatctttttttcccggttggtaacccggtttgtgttacgggctgcaggaat

SEQ ID NO: 44418 - DNA, 1427 bp, Oryza sativa
atgggtgcttagctgtggtggcgggtgtgggggcaggttatgttatgtgttttgtgcctaattaattcagagtacagtgaactctgcaacattaaaagtgttaaaattttcacttagcatcaaactggagcaaaataaagttgcatctacgcaagccagacacacacccctggtccgcgttcttaaacctaacataaacagtggaaagggattccgactgagctgaaatggttagaatgcccattggtgcaagttctaatattttcatccatcctcataagcaaatcccctaaacaagagcgcaagtcctggttggatgcactgtaccgtgtgaccatgggtcaatgcagttattatttttaaggccacaatgacacaacatatcatagtccattgcaccaatggagattcactgcaataatgcccgtgcagcctgctgcacacaccccatacccccaccaaaaaaagaaaagagaactaaatgagagtaaaaaatggcagaaatatgacttagatcttatgtataaatcgccaaaatatttttcattggacaatttgtgaaactatctcagtatcagacctttaacatgaaagtcaaaaacctttacacttggaactcgtagcctaaccataaagatactgttagggatgatcaaaagtcaaagaaagcatataaggaagaacaatatgtaaaaagtttactgaaaaatgtcacctacagcagggaagatagcaaagcagaacagctaccttatgatcacaaacatgctggagaaaagatgcaacagaagaatatattcgccagttttgtggcaggcttttctggtagcaaataatgtccccagttgtaatctgtagaaagaaaataatacatggatggggagtgcaaaagagactaagagaggataggttaaaagaaacaaaccccactatctgaaaaggttaaatgaatgtcaatagcttcacacatcactgatggatcaaattttatctcctgcttatcaaagtgagaaaccagtacaaatgagataaatctgtttatttcagagtcagggaacctatttgcatcggtacaaaacctgacctcatacaattctattggttcgcttgcacaaaaaccagctagacttcttagttttggaagaatatctgaaggcctcgatgaaactttcacatacagcgagccaacatacttaattcctcgttcagaagaggagcaaaatttagtatcatcaactgataaataagacaaaataagttgtaacaaaaaagtgctgactgtagctgtgctttttctgggtcaaaaagctttagaaacaccagcgcatcatcttcgttgatctctgagtggttgggaatgagggtggagcacctacaacatgccaatattttgagacttcaacagaatgataaatcgatggatgaaa

SEQ ID NO: 44419 - DNA, 1055 bp, Oryza sativa
attcctgcagccctgcaacttcaagatggggaggaagatgagacaatctggaagtgggcaccaaatggaaaatacactccctgctcggcctacagcatgttcttcatggcaaacacggtggcgcgatgtggtactctgatttggcaaacaagagcgctgtcaaaggtgaaattctttatgtggttggccgaaaaagggcgatgcctcacggcggataatctaagtaagcgtggctggccgcaccagcaggtttgccaactttgcttggtgggtgatgaagattgtgaacacctatttgtgtcttgcacctacacgaccagggtgtggagaatgatcaagggctggattggggttggcttcctgctgccatctgagtcaggcttggacttgggcgaatggtggttagcgatgcggcaaaattttcggaacaactacagggacgccattgacagccttgtgctgcttgtttgttggatggtttggaaggaaagaaatgcgcgtgtgtttcagaaccagcggcgctcagccggtttcctgtttggttcaatcaaagaggaagtggcgatttggaaggaagctggggttttcagaaatataggagagtagtctcttagtgtaatctttggcttttgggaagttgctccggtgacaatttccattacttcgacagcttcttgttgaagtaataactttgtatatttgtatatattcttcaatcttaagtaaatttggttggcctttcttggctggcccggcaaaaaaaaaaaaagaaagtctgacctcgtacaattctatcatttcgcttaaacagaaaccagctagacttcttagttttggaagaatttctgaaggcctcgatgcaactttcacggacagcaatccaacatacctaatttctcattcaaagaaacaaattttagtcagccttatcaactgataaataagacaaaaaaatgcagcaaagaagttgaccttagctgtgctttccctgggtcataatgctttagaaacaccagtgcatcatccatgttgctccatgttggtagggaattagt

SEQ ID NO: 44420 - DNA, 1433 bp, Oryza sativa
cagcactaaacaaaatgcatctgcaatctaagtaagcaggattcataattcaaaattatggtgcagaatgaagccaataatggaagggaaaaaatcatgtgaaacctctagaaaaatgaggtaatggatctatttgtagtttataatacttcagtctgaccgatcagacatgcacaggcttgaagggaacccttcattctctaatttcttactcagcacataactgtttaggttcaaatgaaagagcattttttactgcatgggacaaaacagtattaagaaccaacagaaaataaggtgatcacaatgttttactgacaggtagattctcctcttcggttgtcaacggcctgtcaacacggtatgtgttgttctgacgtctagcccaccaccacaggcgttgacattgcagaggggttccaaatttctccgtgagcttctcctgtaaaaagttgaacctatcagaactctatatgaaatatgaaacataagaacgacaagctgcacaataaacaatcatacagggttgtcagcttacatgtgtaaagttatacatctcgcaaataaccacgctgtccttattagagcaaacctaaaatagcatatttaaaagagacaatagttgggagctggctgtattgtaccaattgtcttttttggagtgtatagattttttttagataatggaataaagaaccccgcgtctacagcttgcaatgcacacagccatgagtggcgtatataggataagttcacaaggaaaccaaatgcaatggttggttacatggtttccaggataaatactcgtcatgacaatgactacgaactttctaagttgtgcattggttcccataagatataaaatgtcaagtcaagcgatccatttccttaatgctcattatcatttttttttcttctgaatctgttcaaaaaacatttttttccctgactctgttccaaaaaaaaaactgaacaatcaaaacaaattagtccttattttcctatataggatataggatgccaggatggtgccaaatccatcccagaccatttattcttgacataattttccgaatagtcatcttctaatgtttgtcagattcctctatacattccacaacaatatgtgaaaggactaagagtacaactactacagtagtaagcaactcattagaagaagcagcacacccatcttatgggattcactaccttgaatcggaggatggtcatggtaggcgggacgttgaatccctcgattgcgctgaagtcgatgagatcgaagtagtggccatcttccccaatacgcgagcggaaatcctcttcccttaccacctaatcagaccaacaaacccaacaagtggtcaagaatccgaatccccaatggattttgcgctggtgcggagaatccaatctgcgcgagaagaaggggtcgc

SEQ ID NO: 44421 - DNA, 677 bp, Oryza sativa
aaatagaagctttaatcgttttttctgttgtgatttgacgcatgtaaagaatgttcatggttaattcttgttatccagttgaagcatgtgtactactgaaccatatgtactgttggaaatttggaataaaaatggttcacgccactccaatgtatgattgttatcagtttggtgaagcagacctcttcttgcattagccgatgtgcttggcatatcaggataataaatttgacactgtcgaaggaaagaattctgacggttcaaaagctttgagagagtttttaatcctctgacactgttgcttatagaatatacatgtaggaacatatctgcaaatgccaaggaaaattctagaaaagttggacatgtactcctagaattatacatatatgtaaagtctcatattcaaattcattatattttaactgtaacaaaaaattgaaaaaatcacatggtattaagagtaaaaattatctttttttaggctaaaatataatgaatttgaagataaaatttcacacgtaggtgtaatactactgaaatcatatgtacaattttttctataattttctatgatatttgctagtttttttttaggggaaggtcagtagctctttattcagttaccatggtttgattacagtccattagcaaatcttaggaactccgagagtccg

SEQ ID NO: 44422 - DNA, 650 bp, Oryza sativa
caaaaaaaaaaaacactatttagtagtttgaaaagcgtgcgcgcggaatacgagggagaggattgggaacctcttgtgccgaacacacccaggatagttattacttgtagccttgactagaaatatgccatgtccattttattttcttcaaatactgtaagattatatttatttgcatattgcatctggttacgttgcaagccaaatgttctccctcctccaatcattccctacagaagcaaatgttctggttctgctaatgtgttaatattaataccacatgtctctgtatgctggattcattttggccatatgtgtcttgcacaggtttatgtccaaacgagttatatattgtaaatagtgcataaatgtctgacaatttgatcttcctttgcattggtttggtctttttggaatatccctgtacatgttcattgtctgcctgtacatgttcatcgcctgctgctctattttctcagcctgtacttacataagcataatttgaagtatcaattatcatatctcttccaacatgctattttaacaaactcttgtgcaccgcactgttgagggaattaagtatatactttgtgtaacaattactactatccacaagagactcagcattatggaacacctattgatccttt

SEQ ID NO: 44423 - DNA, 540 bp, Oryza sativa
caaatcacaaccgagaaagaataggcaatgcggagctgaattctcattgtcaaggcggaagatggtcaggcgcttccagcggacgacagtgaggaggccccggcggtcatcccaggcgaagaggttggcgccattggtcttcccgatgacgacgacggtctcgagcccggggaggcaatggaggttgacatggaggcacggagtagatgggtgatgcgggcggcggcgccggtcggggtagatcggcgatgcaggccacgatagggcgcgatggagaatcggcgatgctggtttcggcgtcggtcggcggcggttggcgtgaggggcgaggcggcgtcgcgggtggcgaggaggcgtcgcgatggcggggcgtcggcggcgtgagggtgcagcgtcggtggcgtgagggtgcagcgttggcagagctgggtgagtgcgagagagaggagggcagagacggggttctcggcgtgattgggttacgcgcgtgagggaaggggagaggaggaatgcaggcaggtgtgggtgccaaacgcgtgc

SEQ ID NO: 44424 - DNA, 1844 bp, Oryza sativa
ccctcggtcaccatgccgagacaatataaatcacttagatcgaagtatatattaatagtgagattatagatgttcatagcatagccgattaggtagatctagcatgtataggctaatactccgataccactccatattaagatattaaggcaagtaaaatatatcaaacaaaagcctaatatacctaaatgcaacaagatcttaacatagagggcagatctagcatgtcaattaagcatatacgatataaaactaaatcaggtaagatcggctgaaatcccaatactattctaatcaacaaccaaaagcaggctagggattgagattctaatcacgacttataaggtcaaactcaactgatgcagttataagtatgaaaagaagaataatatcgagacaatcaagccgttggatgtttcatagagtagtggatatcctgtataatctaagccaacatagatatttaacctaatcggctgccttccaataatagatgttagctggttggaggttagataacgatattgtcgaagattatacataatatatgataactcgacgaattacataaacaagattagagtatcatgaagatggaagcactaatcccgagaatacaagccaccataacaagttttacctctagttgaagatcgaaaccgatgcagctcaacccgaaagcaagaacttgtcgaaacaaaacgaaagtaaaagggtggcgatgggccgagattgtattgaacgtgtgttgttgtattacatggggctcggggtctatttatactcgaaaatatgtccgtgtcggacacgactcttatctctaacaaactctaagatatcataagtctttacggcagacttttgcccaaacatatctctaaggaaattacatgaaatatcctaattaatagatacaattgccttttgaggactcaatccgtgcatggcaatcctcatgaagcacattaactcaacccgacaacgtgtaacgagtcactttgtcggaatcggcttaatcgaccgaccttgtccgactcgaactctgtcgatcttgatcgtagccgattcggacttttagcctattcttgctctgtttccggaacgatctctatcttggattccgcctcgatttaactccatctccgatacttgaattaccaaatttggttgttaacagatagatggttactttcttctttgtgaagaatcctagtactaaagcactcaataataatactaagcgacgaacccgcaacgatgggaatgtatctcacttaagcaagtaaattaaataccaaaagagaaatcacgaatacttagggtgtgtttgaggagattggggagatacgcaaaacgaggtgagccattagctcatgattaattgagtattaactattttaaatttcaaaaatagattaatatgatttttaaagcaactttcctatagaattttttttgcaaaaaatgcaccgtttagtagtttgaaaagcgtgcacgcggaaaacaagaatcaatctcccctatctccccagaacgaacagagccttactttattaaagaagcatccgttgaggtaaaagagagaagagagtgacgatagctctggcactcctctagaccttctcctcactctttacctatttcctccacactactaaagtgatgtctaagatatgaacttaagttgtactccattttgttgtgcattttggaaatgagtgagctccttcttttatagcctccaatgacggttgtggaggtcggagcaccacaattgtcattgggaggtgatccagagcctacacgtggaaggtggtgatggatggaggcaaggtctgatcagt

SEQ ID NO: 44425 - DNA, 3296 bp, Oryza sativa
aaaaggtaagacaagacacacctaaatccaaaccacaacgagaaagcaaatcagcaatgagcctagagcacactagtagagaaatgatttttctggacaccggccccggtagatttcagacgggccgtaagtagcgttgtctggaaaaaccgggcgaccggtgccaggctatcgcccgcataggaaaatgcattatcccgtgcaggcgtctaatccgaccgtacgggataatcctcgttatcttgtgcggtcgacttaagaggaccgcacggaaaaattgattttcgcgtgcgggcctcttaagtggaccgcacgggaaaatacctctccctcttttccctcttacccacttcagaattttcacatcatcactcttccttttccctctcacccacttcaaaatttttcacatcctctatcttccttttaccttttattctccctcactcactcctctctctccctttcctctcctctccccctcccctctctctctctctgcctctttcttctcctcccctccccactgagcgcacggggcgtcgccaccgccgccgccggcggcgcgggaagcggcgacggctactggtggaggcggcgcagcggtgacggcggacggtcgtggtggaggccgagagcggcggtggcgcgacgacggcgaccacgagcagcggcagtgcggcaacggtgacaacgacaggagcagcggcagcgcaacgacggtggccatgagcggcggtggggagcggcggctgcacgacgacgggagcggtagcggtgcaatgacggcgacgacgaggacgatggcgaccatgagcggcggctgcgcgaccacgacgacgacgggatttttttgattttattttttttcggtattttttcgtgcgggtggtataatttgaccgcacaggatagtcgacttaacacaaccgcacaggataatcaattatcccatacggttggaccgcctgcatgcaaaaaaatattgattttcgcagaccctggatgcagacgggcgctacttatgtacggaaaaatggatagtaacaacatggaaaaatggattatgtaccggtggcagtactaacaaaccatactgccgttagtattaatattaatattaatgataccaatggtccatcgagtttgtttttcaactcccttatctaccttatctaccttgacaatataacttacttttaaatatagttttaggcaaaggctgaccagcggtgaagtttaagtttaaataattttaataacaattattaaaaaccgagcgcgcgattactctctaatgcgcgctctaacaaaatgaaaaattctacgggatgtttttcctccgtatgataaaagcatattccgctgctgcctgctggcacgtaaaagtggaaaaagaaaagaagaaagaaaaagaaagtggtcgccaactgcagcggggctcacttacgcaggcatcacaggcagcgacggtgtctccctaaaaagtcagcgggactagcttgtcacagtccacattccaacctcttgtcctgcacagtaaacgccgtcctctcgtgaatttttccacccgctctgcatccgctataggagggtaaacatgcggtacgaaccctaacctatgtaaaaatttgtgtaaacccccgatcaaaaagtcatgtaaattcgttaaccaaatcacacatgttagatatataaggggatgttacaccaccacatagaatttcctattcaaacaaaaaataataaatttcgaactgggactttgtttggtaaatttaaattatccccttttttttatcaaggtttacacgagttttcatctagataggtgagggcttgcgctatatatttacctcgctatattaccatcggccaggacagatggtttctgtataataaccgaacagcgtctctttgtggcgtttttgcactctattccttttatacttgcttacaattatgcatactgtataatgataaaatattgagagaattattagtgtagattacctgcttgaatataacgatacattaaatattataagtagtagtagtagtagaaggttatttttggagtgtggagtaaataatcggtaaacaattttaaaagaccaagactatagggcataatccagcagctcgtacagctcaactacaactactcaccctagctaaggccctgtttaaatccctggcaaaatttttaaccctgtcacatcgaatacttaacacatgcatggagtattaaatataaataaaaaaataactaattacacatattgcgtgtaaattgcgagacaaatcttttaagtgtaattgctccatgatttgacagattaattatacttaataaattcatctcgcagtttacatgcggaatctataatttgttttattattaaactatgtttccatatatcggtatatccgatgcgacatgctaaagtagtttttttatttttttgctaacaaaaattggccgatcagaatttcattaagattgtgagggggttgttacacagattggttacgtttcgtgttaaactgtcgagttgggggattgtttagtggaatttaccctttcctttttcttttccagcaaaataaaagaccaagcaccttgtacatacattttcattaaaccaaggggcgtttacgcaaaaccccccataataataacaaacataacctaatcctccacggtttaccgctaatccggagctgagggcggcgcgcggtgacgcgagccgagcccaagcaaagcaacaaggacacggacacacacacccactcctccatcttcctcttctagaaacacgacgcgcacaggcagacaaagaggagaagaagaaaagcggcaaaagccggaaaagaatctcctaatcggcggaaaataaaaaagagagagtagttcttgcaatcttgcttcgcctgcaaggaatcctctccggctctccgccctggtaagaatccctctctctctctctgcaatcgatgcttgattttggtctgtttttatccaagaaggtcaagcagagctggtcttgctgtgttgtgttggacttggatagatgagatgagcggtttcttgatttctttgcctgggatggggtagggagcgttgtgttcttgggggggaattgggagggttttgggtctaattggtgtcactttcctgatcaccgagtcgtcgtccgcggagaagactgacctggtattcgactgttcattcatcctgtggtctgagatgagacaagtaacttgttttttctttttttttttaaaaaaatctg

SEQ ID NO: 44426 - DNA, 619 bp, Oryza sativa
tcgagcttcggcccaaaatcaacatatcctttgggcttttggactatgttgggctctgaagctaagcttagttcacttcacagccagcgccgacgagaggaggagcagatcggctagggttccggcgatggcctcctcggcggcggcgcggcggcggcaggagatggcggcggaggggcagcgccacctggaggagaccatcgccgccgcgttccagatcctctcctccatgaacgacgagctctgcaaccccacgctctggtcctcctcctccgccgccgccgccgcggcgggcggcgccggcggactccagcaccacggcaacaaccaccaccaccaccaccagcaccaccaccaccacggcggtctccctccgccgccgccgccgctgcactccgcggactccgacgccgccgacgccgccgggggagggcccgggggcgcgccgggctccggcgggtcgctcgacgaggccaggcaccggtacaaggtcgccatggcggcgctccgcacgtccatcgccgccgtgtcgtcctgtgctcaggtcagcacacgaatttacccgacattgcatgctcccgtagtatgtatgcaaccacgaaatgcgtgtttctagtga

SEQ ID NO: 44427 - DNA, 629 bp, Oryza sativa
ttattggattaagttggatcatgcatgcatgcaatctcgttggacacaatcatttctatatatgtaactttagtaattataaaaacgagaaatcatcatgtactccctctaacgagggcatcactcctcttatacgcacgctacttctcaagttatttcgcaaggtccaatcactagagctcacgcccgatagtaatttacagatgagctcgtttataagtacttctttatgtgctcttgagaatagattgctacctaatgatttaattatgattaggaactatggatataaccatggagcacttggagagaggctaagaaatggacaaggtcatcatgtacgtttaagtcaagatggagatccaactcatatcaagttcgagtccacttcaggttctaggagcagttcacactaaattctttgcccaggttgtatttggactccaattttgacgttctacatatgtatggaaagctaacaagaccaccttttcaatggatctggtcccacgtcaaacttccttttgagtcaacgggaatcttcaaaacaagaaggcgtttagaatatgtccgggtgttgcgtcaccgtctttgggcccgttgggccgtgtatcgtgttggtgtctaat

SEQ ID NO: 44428 - DNA, 723 bp, Oryza sativa
tatatgattctatttttagcagtaagtgtaatcctgatgtgcaaaatatggtgctatggagaaacctcataacagtttacttctttgtaatgatgttgtggttttcttcgtaggagatgggatcgacagaacacaaagctgatcaagctgagattgagagattggaagaacatgcatctgctttgagaaaggtactatcttgggaatgttctagcaatataatcaatatcattttgctgtattcagaatttttccctgaaccagttggtaactggtgcttatttagccatgtcaatcccaaatatttcccaaacaacctgttttgaacataatgtgtgtgtgtgtgtgtgtgtgtatatatatatatatatatatatatatatatatatatatgttccttttatgcttcaatcattttaattcaaaaagtcctgagaagagtgtaatccccaatttttacctgaaaccattttagatagccaggatctagtttggcaagctgtgatactgtgttgcttgtagtgttttggatagtcatgttcatctgttgaactcgtcaaaaaagcgttccatcttgatctttcctggcaatattcatgcttgttaagttgttatcttatcattgttttttctgcactggatactgcatgtcattattgtttgcatacttggatttgcctgctagtttagaacttactccctccgtcccaagggctgcaggaa

SEQ ID NO: 44429 - DNA, 1453 bp, Oryza sativa
taaattacttctagatttcagtaagttacttcttagatatataaaagtaaattcagtaaagcttaaaagtaatttacatatattatagaagtaacttataacaaaaagaaactttaatttagaactatatctagattcattaacatctatatgaatgtgggcaatgctaaaatgacttacattatgaaatggggggagtaactctctgtagtagaaataattatattttgagtgagctgaaataagaaactatgtagagtaaattcgcaagtaaaatgtagagaagatttataaagtccacaaaatataaaattaactaaaaacaataataaacataatcaacttagagtattatgaatgtatagaagtaatttagtcaaatctcaaagtaacttatatatatgataaaagtaacttatgtatataataaaagtaatttataaatataaatagtttttcatcataatataatcatgtaagatcttattgtaaagatttaattgcaacaaacgtaatggtgtaatcagattgtagatcggataagtaatttgagagaaaattcttaaaaagaaaaaaaatagacatgcattgtgtgcactagtaacaagaggaccttttctcacgtagctgtactagcagcacatgaccttctctcacgcactattagcgcttgaccttctctcacgaatgagtacgtcgctctttaacactaaatcgagagcgttctcggtttagattttgcgtttttataaatagggtcatttcgtaagagcttgttttcacttttgtttaccagcttctattccttcgttatctgaaagcacgttttccgaatcattaagcattatgatttttattaaaaaaatctaaaaaaagttgttttaaaaattcatattaatttatttttaaaatttgttaaactaaataatacttcctccgtttcacaatgtaagtcattctagcatttttcacattcatattgttgttaatgaatctagacatatgaatgtggaaaatgttagaatgacttacattgtgaaacggagaaagtaatatttaattaattatgtactgataagccattgggcatcatcttttcgtttatacttatgcttatcagccaaaatttaaatttcgaccttaaatttggagctgatttttaggttttttttatcgaagtttatttctcagcatttgcttttagatcgttaagaacacgtatataaaagttttattacaaattattacttttttacaaatataccctatgtcgtttcgcttggctccgattatgttttagctacgcacgcagaagagaagttaccccgagacacgacattttcctttgttgatagtgatcgggcgatgcgacagaggagggaggcggccgtttttttctcgtttgctaacgttggcgtaacgtacggtgaggaacatgcagttacggttaccg

SEQ ID NO: 44430 - DNA, 727 bp, Oryza sativa
acttaaattttgctatttcagaatttttgtccaaatttttgaactttctccaaatgacaaaaatgaccaacttaatacaaattttgaaagtttacatgtaatttggatatgacaaaaacttttaaaatttggacaaaaattctgaaatatcatattttaagtttttggccaagttttggatggatgtttacaatctgatgtttataatatgatattttggaatttttgtcctagaggtattttggttatttggacaaaattgtacaatactaacataggctaaccggatgataatggtaaatcgtagaggttaaataaaattcgatggcatattgtagaacgtgacaaagtcaatggtaaatcgtagacttgtgacaaactcagtgtcatataatagattctatatatattattaaccagcatccatagcttggtaagattagtcgtgtcgtgctcttttggtctttgttagtttgtgtatcacaatgagtttttgcatgtttatgtactgaaatgcaccatctaataagtttgtgtaatgctaattaataaccaatgcaattcactcattaataaccttgctatttatgttaaataaatacattgaaaatgtaggggggagtagttaatttatgtgttttgaggagaaactatgcagcaaacaagggcagcaagcaagaaaagaaagaaaggaattaattcacatacaagcatagggctgcaggaa

SEQ ID NO: 44431 - DNA, 848 bp, Oryza sativa
taacatttgtgcctcttcttaattttcaacatgtcagcagacatcgtcacgtcccttttaacttgtattccctccttttctacacgaaaacgattcccgaattgctaaacgacgcgtcttaaattttacttcctccattctacgatgtaagactttctagcattgcccacatttatttagatgttaatgaatctagacgtatgtatgtgtttagattcattaacatctatatatatgtgagcaatgctagaaaatcttacattgtgaaacggtgggagtataaaagaatgttgttttttaaaaaatcatattaatttatttttcaagtctttttcatctaatactttatactaatcatatgctaatccatcgctctgttttgcgtgctaaatactccctccatcacataatataagggattttaaatggatgtgacacatacttgtaaaatgaatctggacagaccgtcacatccacccaaaatctcttatatttcctttgtcccattttaagtgcagccatggtttttcgtgtccaactttgaccgtccgtcttatttaaaaaaataaaaaataagttacgagtaaagtccaattcatgttttattatctcattacaacaaaaatactaattataaaatatttccaaataagacggatgatcaaaataagacgcggaaatctataggtgcacttaaaatgggacggaggaagcattatggaacacagcctaaatctttttaaagccatttttttccttttaaagagatatatactattgctattaattaatacataataatcctgagggggataataagctagtgttaatctgacagctcgatcctg

SEQ ID NO: 44432 - DNA, 708 bp, Oryza sativa
ctgcagccctttgcaccttccttaaaactttaattccgttatgaagctggatcacatcaattgggaactcttgtgtgctaccatattgctcttgctatagctagctgctagtactgaacattgtcatttctgtggaagtgtaacctaaggagaagctgcagtttgtttccatttactgttgctgaaaaactatgattcttatatattgtagattgcctaagcttctgaatataatgtaacatagcatgtgtatcttagtgatcttcatgtccagtaatttcagttccattttatgtctgccattataacaactgattctggctgctactgacaaccaaatgaatctctgaaccaaaccatggattgagggaaacacaattttgctcagatctctgctcttaactcataccactagctatgaaacagcttccacatttttctcttgtgtgcatgtttacttctccaagattctgaagtttacttgtgtaagtgcatcaagatcatcatctgcttgacagctccagctctgcagcagtagcagcaacaacaccacattactgcaatcctcaacagctgctgtttttttttctactgtgttcaactactcttacctctgaactagtatggcagtctttaagtgtgttcttaattaatgttcagttacagtctctgcatgatagcgggctggcatcgtcaggctccatctac

SEQ ID NO: 44433 - DNA, 625 bp, Oryza sativa
aaaaggggaataatttatatatatatatttgttttttttacagggacagcctgacctactctttttctactgctactggtactgcccttctctctcccatttggtattacacaaaatttggggctttgactaaaagtcttgagctaaaaaagctttcattttttagagcttttgctgctcctcccttctcttctccctcgaaagaaaataaaaattcgggggcaggaaaaaaaaattgcaaattttttttgcgggccgacgagctgatccgcatgggtgcgcgctgaatcgacgaatcccccccccccccccaccgcctctttcttggctctcgatcgaggtgtttctcgccgccggccgtggcggcgagcggcagatctgggggcttggggcttggggccggctagggtttgagcttgaagctttcctttcttggagaagctctccgatctcgtctcgtctcctcgcgagctgcgccgatcttccgtctcgcgaagctggggggcatcctggtgagcatcctgtcactttttttttttggtctcgaatttgctcgcgttaaccctagcttctcttgttcttgttcttctagatctggaggtgttttctcttaattttgccttaa

SEQ ID NO: 44434 - DNA, 704 bp, Oryza sativa
cgacacatgtacatatgcttttaaggtatgcgggattatcagagttctgttgttgcttcatgtcacaaaggagaggaccattttattggtaccatttatccatatcatgatggccatggtaaagttgatccgcacatatagcgtaatcaaatctcatgcttactgtcataagttagtaactttaaacattttttttgtgattaaatgatttacaacccaatcaaaacaccttgaattacttcaaggcaaattaggaattacatatcttggtaaagagctcatatcattattttattttgtttttaattaaaactttcatttttcctcagtaaatcatgaagttacaagattattattttggttttttcgtcaacgaacaaatcattccatgagaatgtcaatgtatgcctgtatcatgctcaaacacctcgatctaattttcagatgatgttaacgattgattgctgcaggatagaggcatacaaagtgcaggcaataattatgtttttaagatagctcaaaagaatatttagtgaaattttatctggggtgaatatgctgggattgcgagtcctccatctttaattgtttcagggtagaggcatacaaagtacagacaatatttatttcaggagttctgtcctgaagctattgttttttctgcagtcccttcagcgacatctggaaacctaggatctcaccta

SEQ ID NO: 44435 - DNA, 727 bp, Oryza sativa
tttatattatatcatgcaaaatttgtattttttatgcaaacaactatgtatcgtatgatacatgtagctgagaacgtgcattgcacgtgcacgattactagtactaatataaaaaggagttcacccctagcaatcctactggtgaaatcaaccactctcatctcatccgtccatctgacatctcatttaatctgagccgtccgctgtacaccgtagatctatctccaccagcgatttcgccccccacgcggtgactgtgacgcgcaaatccccggggccgcctgcatcctcactctgcgcctcctctcctcgcgacggtgtcagacccaagaaaattcagagccaaaaaatagaattctcccctctctctcaatctgttgggcgccgcaagactcggaaaaaactagggttctaagctactaagacaataatttggttcttgttgcccttctcattagtctcgctgggttatatactcccgagcggatccaaagcatcagttttaacctcattatagcttagattcagcatccaggtaaaagtaaacgagcatcagctcttaaacaaaaattacatgacagtgaataagagaacagcgaatcgccaccgtcgaatcccgctgtaaatacgaatcttcgcatctccaccgttcattctcattaaatgacgtcagccaaacggtatcaccattcttcagactttcttcagttatctgggctgcaggaat

SEQ ID NO: 44436 - DNA, 703 bp, Oryza sativa
cccccccccccccccccccgtgcgcgcatggatcaggcgggctgggttctccccctttgtgtggatcccgccgcctctcctcttccctcacacatggtagggagggaacgacaaccgaggtggcatggagagcccaccaaatctgcagatgacaccagtgggagggtggatctggcaggctctccccctcttgtgtggatcatgtcgcctctcctcccctgcacatggattcagtgggccgggccctccccctccacgtggatcctgccacctcttccgccccttcatcgcgcatggatccggcgttgcgcatcgacggcgaggaggagaaacaatgactacggcaacggtggccgggagagcttgctggattttctggcggcagcgacaggaggggcgatgggagacatggagaccgggaatggcatcggcggtggcaatgatgatgatcgttgtcacaccctgaagttctcctcccaagcctaaaatttaatttataaatgaccctaagaaaatgccggtgcaaatcaagagaaaaccctaagaaagtaatacaaataataatcgaatctggcatgtggaatttttcttgagttctacatgtcgaaattcactaacaggatttttagtggaattttcagagccctagaattttaaccaattaaaattgagcaagcaatattttaattccgggctgcaggaa

SEQ ID NO: 44437 - DNA, 692 bp, Oryza sativa
tcctaaatcatgttgagatctccaagctcaatacagaaaggaaaatatataacataaatgaaaaagcaaaattctatttcagatttagctaccttttgaggtagagaactactgctcttggtctctttggcttcattgacatacggtgcaacaaacgcaaataatgatcttgcttcatcatgagacaatggctacaaaaatgaaagacggtgcaacatacgcaacaagtactgataatcctgcatataacatattcggggtgctacttatggtcaaagcattattcaactactggcagcttcaataatcattcatatgctatgccatccagaccaatctgaattatgtttgctaaaacctgaacacaagtgaatgaaacacagaagtggcattcacggttttacacgctagactgtaaagactaataatcagtaagtaaagaatccacagttaatcttccctgaacagaaccaagtgcatctaaaatagcagatgcgcatttatcttcaaggtaagatccttcaggtgtcaaagttaaccaaaattcacaagcagcacttaagtaatatagcttgtgaatttgtggttttaatagccagctgttccaaatgtttcagtaactaaagatccacagttaatcttccctggacagaaccaagtgcatctaaaacagcagatgcacatttatcttc

SEQ ID NO: 44438 - DNA, 549 bp, Oryza sativa
attccgtcaatttcatccaaaaataataatttccagaggggaagatatgtggtgcattcagatccaatgcggatggggaagaactcggctccggcggcaactggggacgacgtcggctccggggaagaccacggctccggcggtggctggggacgacctcgtctccggcgtgggcagcgggggtggcagcggaaggggacgacctcgctgccccgtcgcgaggagggaggatgcgcgcggagcgaggaggcggcggggattcgcgggcgcggaggagaagctaggaggcgcggggattcgtggggcgggcggcgaggaggagcgaggaggcggcgggctatggcagcgggggaggagcgaggaggcgggggcggagttatcgcggtggggaggagcgagggggcggaggagggggtggggatttgtgcggcatagtcatcgcgtcatttctgaattggtggaatcgctcatcgtgcgcacagtgaggaggatagcggatggatgagattagatcagatggcggatggacggtacgggttgatctgggtg

SEQ ID NO: 44439 - DNA, 1635 bp, Oryza sativa
aggtttcgaatccaggtcgtttaacccaccatcttgtggagctagccggaagacccctgagcgtttctcagggggatgatgagctagtcaaaggtggatgcatggaacgcggataacaggatgagtgatatacttcctccgtttcatattataagactttctagcattgcccacattcatatatatgttaatgaatctatacatatacctagattcattaacatctatataaatgtgggcaatgctagaaagtcttataacctgaaacggagggagtatgtaaaagtctaggctgcatatcaagatcgtttaactacggttttttttttttagcgtgggagagctcgtcaagagaggatgataagcttagtcgtcttctgttttttcctcggttatgaaacttggagtctaggaattctataacttctacgtatcccatatgtgcatatatagaagctggatttctgtgtattacttaaaaaaagaaagaaagagagaaatagggtcgtgcagtacatatatatatatatatacatatatatgtatatatatgtatatatatgtatatatatgtatatacatatatgtatatacatatatatacatatatgtatatacatatatatacatatatatgtcatatatatacatgtgtatatatatatatacatgtatatacatgtatatatatatatacagatgtatatatatgacatatacacacacgtacgtatatatatattgatgacatatatatgcctgactgaacggactataattagagagatgtttaattagtaacacaaaataacccataaatatgtaccgtacataagtgccgacctaatatgcctggggatgattaattaactaaatggtgtcgaccgcgcgcaaacccagatccagcttgacaagagagtttgatgtttttaattagttagttaaagtgacatctggactattctgttatatataagctgaaagcatataacgaccaaacagttaagcacatgaatgcctggtctctgtgcaccatgcatgcatgtatggtttgtcgttagacatggcactatacatatatgtttgcatgcttgcctagacagacccaccacatgatgagtagtgctgatcactatgcttaattattagataatattagtcgacaaaagctgcctatcaatgatttatatatatgtagagtgtactaaacaacttatacatgcatagtatttattttatcttaaaaacttaattagtagtatatatgcatgggctatgcagacatttagaaaataaacatggtgggcacatacacatagttagaaaaagaaaacagtaccatttgtataaggacttaattttacaaataagattggccacctagctagtggaaatacacacacacacacacacacctcatataccatatatttgtaacctctcgctaatggaaagtagagataatatttgctaactagctaatggacttatcatcatgcatgttgttattggtcccatatatatatacattgtaaatatatgtatctatattattgcataatcaactaattaattagacttttcaaatgattcacacctttgaatatgtaagatcagagttgggcatatataggg

SEQ ID NO: 44440 - DNA, 713 bp, Oryza sativa
aacgcgtggtgcaggtcctccgcatcttattaccctcctctacgacttaattgaagcattatccttctcaacgacttaattgtatcagcaagcaaagctaatgcacacacaaaaaaaaaagctacccgattggatacgactgacaattcagcaaaagattcggtctttatccgataactcgtctatcattctgatattaaaatgatagaattaatcaaagcgaccgccaagtagattaagcacagcaaaacggaattgctattatacaatcacatctcaaaaagtgtgccgatgctataatatccattgtgaacgcacaatgcgtgcacgaatgcacaaaacagaataatttctggagaaggtgtggagacagcacgttgaaattatgatgacacttcgacagtaagtactcaaaaactccacgcacaagagcaaaataatcacaatcatccaaagatcaaagggattaaataaaaggcgagctagctagtagcaaacagtgctgggtaacagcagcaaggatttatgacaaataaaaccaccatatggtctttcaccaaacgtgacttctatgcaatgtagctctggataattatgagggacaaacattacgcaccggcactcaattcccaacgaattctttcatgctcttcaaccaaaccagatactccttctcatccttgctcatcatgtactcgcacagccagtcatgc

SEQ ID NO: 44441 - DNA, 657 bp, Oryza sativa
gagtatccacgccaccctgattgaacacacctggaagccgtgattgaacacacctggaaggcctcgaaacggtcaagaatgtgggatgtgggtgtaggaggcacagaagaaaagaaggtcagggatgctggggttgaagctagtatggagagcgggcgcaggccgaccctgaggaaaccggtgcactggcggcctcctcgccaccaacccctcgacgtcgtcggtggtagctagtagccacgaagacgacgatgcaacgaggacgagtggagcttgtggtaattgggagggcgccaacctggatctatagcgagccccatccttttcaatgtcaggaatgagaagaaccgtcaggaggagctcgagatggctggcggcatagcagcaagcttgagcggagcgggtggggctgttgggaggatctcgtcatcatcgacccactcccattctcgctggagctgatgatgcccttatccacgaacaccgacaccgccgcgcccccgaatccaatgctagcttgccaccatgtagctcgttagagcatcctcaaaattgtttgtgagcatgaactctatcctgggaaacttcttagtgaaaaacgtgtgaacaaaatatggcgaccgagtgatcgaagcaatagtgccgggctgcaggaat

SEQ ID NO: 44442 - DNA, 686 bp, Oryza sativa
atatggaaatacaacccattcttgtggtagagcattttccagtcatggctagaaaatgacatccttctacaccagccagagtagtacccttttttctgatatggttacctgttaatgcattcaaatattactcctttttatgtgcttaactctggatgagatcacacatgaatatgattgttagggtgtcatgctctctgttattatcctgaaaacaccgtcattattgaaactgaggtagtcaagaccctgctggtttaaacaaagtgcggtgtgcatggtgttatgtgatagtttcgaattataactttttaattaagtagatctggacacacatagacttacaatctccataatggctataatcctttgtagaagtaccttctattccaggtttcaccatatcagtataaatgctttatgcatagacaaatcaaactaactaatcatgcacatggttaaaatgatggcaaagcagaataagcattcttctgatattatgtcttcagggtcttgtggcaaatcatgctgatatagctgactacttcaatcgaagaggagtctctgcaatatttctcttcaggtggaacctcctccgtcagttggtatctcaacttgcgaataatcatgacagatacctcaagcagttgaatggaacgcacaaggcccatgttcacacggcatat

SEQ ID NO: 44443 - DNA, 726 bp, Oryza sativa
tcctgcagcccagactgtgccttttcattaaataaagcgggagaaaaatacagcccctatgggcaagaaaagggaaaaaaaaactctgtacactatacagtgtgaggcgaaaagtcacgtaagcgctttgctcctgtcattgcccatgtttgcgcctcttcatttattttggcaaaaaggaaagacgtcgtggcctcatcatgcttgaagattcgttggttactctccttcaaatctccaaaacaacaaggaagatgagagtgcgcagtccatttctgtaactcccgctgtgtttgctagagattcccaccagtctgggtcgcctcccattctctagggtcaagctgttggtaagccacccagacagctagcatgctccatattctttttgtgtatctacaactgacaacaagatgtagagccgtttcgccttctctacggcagaggggacaaagcctattattttgccatcctctaattgcgagccagtcgaaggtccaaaccctgttttggatgacaagccatgcgcggaatttacatttccccggtgccaaactttccaaatgagcgagtgaaaaatcgtttttgcgccccaaggcactatgctgacgacgccgagtattagccaaaatttattaattttgtttctacttattgaatttgaatttgtatgttggtgaatgccatatctcatattgatttatcatgtgattttttaacaatttt

SEQ ID NO: 44444 - DNA, 711 bp, Oryza sativa
attcctgcagcccgggtgcttagggttcttctggtttagcggtgtagactgtagaggggagagagaccctcacctcggtagtcgacgccggagttgagcttgacgacgacggggcgtcccctgatcgacttgaggaagtccgagggcgtcttcaccgcccctccgccgccgccgccggacttgtccgcgccgccgccggtgctcatctctctcgctgtcgccgcgtgcgtgtagagttggggttgggtgagaaagagagagggacgccgcaaggagggaggggtttgctttggttaggttttgttgctttgggcctctccttgcctttcagtgatgggccgggccttgggggctgggtttctcgctcgtttgctcccttcatctgatcctgaccgtttgcttgcgcccgatccaacggttgagatgtgctcctattataaagactttcaccgtgatatattatacatgctccctccgtacttgtaaaggaagttgtttaggacaatgtttaagtcaaaccttgggaatataaatcatgataactctcaagttgttgagtttgaaaatataaattttatataaatagatttgtcttgaaaaatactttcataaaagtacacatatatcacttttcaataaatatttttatagaaacaagaagttaaagttgtgtcttggagatcgtgtcgctatccaaaacgacttctttta

SEQ ID NO: 44445 - DNA, 681 bp, Oryza sativa
atatcgctgctggcaccatcgacgaggaggcatgcaactcttttttttataaatttggttaaactaaaatagtttgattagaaaacctttaatatgaaacgatgagagtatcttctattcatggcatcaacgaaatgttcgtgcagtagaacagggatgaaagggaggaggatgagaaaaaatagaccgtggtgggtaatttttgtcatatgatttataaacacgatagattaatatctattaatatgtattatatcactctataaagatagattaatatgtattatatcactctataaagatgtaaattaaaatttaacttacgcaagttgtagaaaaaaaacaacaaattcgacatcgtagaatcaacgtagcagtatgacggggttttgtacaattttaaccaactcaaacaaactttaatgtccaagcgattcaaattcgaagaggaaatttatgagatttacttccaatgctgcagttctgcgaatacagttaaaattgatttgaaaagaatcgcttgctactttatactctactgtaccatgtaccaatttgcacggcagaattcgagacgataaatcatcgtactacatataggtataaagaatatcataagacgcacagtcttgttgaaagtaaaccatctccaacgcatctgtctgatcaatgatcattgtg

SEQ ID NO: 44446 - DNA, 692 bp, Oryza sativa
catttatttaaagtaggatagacaaatagagattcacgtgtcagtgataggagtggtggtgacagattcactgccaccattactaccaccatttaaaatagtgtagatgtggactggtatcatagttatacgttattctcatgaaaatctatatatagtacactaaagtaggatttcaaaatttgttattaatcgattaattgatatttttaagatagaaatttgcgaccaagtgtcaaacaatgtgtaatattagttccttctcaagtttaaccataaaccatattcttgaaacaatgccttttaatttgttgggtgatttctataaaatcaacctataaaatcaaaattaagctagatgggaggtgcgtggttttaccactaccacaattaggcttcgttcgaaccaactgttctgctgggattttttgacggcatacaaaacgagataggacattagtatatggttaatcgagtatcaattactaaaaattttaagaatggatttattatttttaagaaacttatttataaattttttttttacatgggacacaccgtttagctgctaaaaaagtgtgatcgtggagaacgatgaaatagttgtttcgaatatagttgcctagaacttagtcttagaagcaagggtggccaagggaaaaatacggatcatgaccttagggcaagggcaa

SEQ ID NO: 44447 - DNA, 744 bp, Oryza sativa
taaattcacgtgaacgaataaatgttacagtactgcagtctaatgacagataatgcttctttattaaaaacaaggacttgacagctttgcataaatgccatcaacaaatacaaacactccatgctacacccagatatagtctactgtcaaagaactgaatgaagaaatgcaacctggtgactgatcaaagataacacactgcttccaaaagtgcacaccatttgacaatgtctaaagctgtgctctcctttgtagcaaccattattacagttatattgcaacagtgaattggaaaattttcataaaattgagatatccgatatatttgatcataagtccattgttaatctaataaataagattgcaatgaaattctggtacatcactttgtaaaatgaaaattcatggttccacgtgtcaatgttaaatgggctaaaaagaacaaggatatactccactactctatttcatcaatttgaggtgtccatgctttttgcatatgtatggggcttgcaaaacaatgggaattggacaggatgataagaagattaatctcccttctaccacaagtttgggccgcatttggagtgtgggaaacaactacctgccaaatttctacattctaaacatatccttatggtatacatcgaaagcttattgattgtttatttaaataaaataggatgagagtggaaattcttgctatgaacaatgcttgacatactaagcagcagggctgcagga

SEQ ID NO: 44448 - DNA, 573 bp, Oryza sativa
tccctgccatacattcggagagattcacaagttaatgttgggattactaaatagagttgaaggtggactaggcatgatttgcaagttaatgttgggattattaaatagagttaagggtggactaggcatgatttgcacggctgtaagtttgatatgaccactaaggccccgtttggtagggctccaaactctaactcttagctccaaactacaacttcaatgagagctagctcctgttagagttggagacttgttaaaaagcgtttggctaggtttcagccccagatctgaaaaaaaatgaaaaagaaaggaaacgagacgccggctgtttgccgacccaggcgcgcacctgtgcaacgtcccgcgcgcgccgcccgtcgtcgtcccggtcgccgtcgcccgtcgccgcagacgccgccgtcgcccgccgcctcccgccgccaccatcgcccgccgccgacgatgccgccgtcgctcgctgacaaagatgctgccgtcgccaccgccgttgcctgccaccgtcaacgctgccgctgccgctgccgctgccgttcgccgacacagatgttgtcg

SEQ ID NO: 44449 - DNA, 803 bp, Oryza sativa
cgaagttttaagtttcttgaaacgaaggagaaaacgatgaacttaactacaaggcagcggcgaatgcaggcagaaatgacaacaaaggataaagtttgcaaggattcgtccttgaagctagcaaggaaaggtgggtggaacactggaactgaagcaaaaaacagtggagaaaaaaaatgagaaaaataaaaaggaaaaagaaaatctcaccttgttgccgaactggtagcaccaccaatcctcgccgccgccgccgccgccggcgggcttctcctccgccttggaaccccccatctcctccggcaggaaacgtagctccccgccttgaacacgccaccgcccacgccccaaccacccgcacaaaagactcgctctccctctccctctctccgccgacgccgacgcggccgcctcttcacgggcgcattaactccggaaacccccgccgccgccgccgcgcgcgcgggggaggaggaggaggagggcaccgcactctccgctgcagcagcgtcggctctagcgccggtggcggcggaggaggcaaggcgaggcggcggcgggcggcgcggcgcggcgcgagggcgaatgggcgatgagctgtctctcgctttggagactgggcgagttttggaggctttagctcctcggctcggctcaggctcgggatcgggatcggctcggctcgcgtacggtggagagaagtactagtaggagtggaactgactactgctgctgacttcgctttaaaagagttctctagtccgttttgtgcattcgggtccttgtgcaaatagcattttcta

SEQ ID NO: 44450 - DNA, 2526 bp, Oryza sativa
ttatgagtttataaaaaaagacttttaatatatgttttacgatttatcttattcaaaaaattatataaatatgaaaaaatataaaccatttcaagtacctttaataaaaaaatcacaacaaaataaatgatttcatattttttattaagaaaataagcgatgtcatacattaaaaaatgagaagcgagtaccatgcacacgttacttccattataattcatgtttattttcacagtcattttgtttgtaggacatcagcaatatcctaaccatgtgttttattttttcaatcaaagttcttgtcagattttaatttcctgaagataataaatttctagttacctaaaattatacaatgtatgttacgtctaaaattgcgagactacacggtcactgatggagaaatcgtttttagtaccggttcgtaacccccctatagtcccagtttttaaaccggaactagaaatctgggactaaagatccctatctttagtcccggttcaaatacccgggactaaaatcgatctttagtccactaaagatgggagcgggtagtcacggttagtttttttttccatttattgctacttactacttaaatctctaatttattttctcccaaattaggtgggatgcatattcccaaatcaaaccccaaaatcacagtaacatcccaaatacacaaatcaattatatacaccacagattatacatcccaaatcaaaccccaaatcaaaaaaacatcccaaatacacaaatcatgtacatctcagatccatgcaatgagattctaaaaaagaaattatacatatcaatccatacaatgaatcacaaattcttcatctcaatatatacatgaataacaaattcttcaaaaaaaaagaagcaaagccgccggccggctgagctggctgccgcctcccctcctccccggccgccgccgcgccgcctccgccggccggcccgcccaccccctcctgctacgcacaccggagtcgggaagggataagaaggaaaagagataaggaggaagggaagaagggatgagataaggattagagatggagggagagaggagtttgtgtggataagaaaagaggataagtaatacggattatatagtgcgttttgatctttaatcctggttcgtaataccaaccgggactaaagattcgtaacaccaaccaggactaaagatcacgtgatctttagtcccagttggtgttacgaatcgggattaaagatccgatctttactcccagttggtaactccaaccgggactaaagatcctagagggtctgacaacacctgacagcatgtgaaccgagactaaagaccaaccgggactaaagatcacgtagtcccgttctgcttataaaccgggactaaaaaccatctttagtcccggtttttactgcaaccgggactattgtggtttttggtcgaccggacaaagatggtttctccactagtgggtgtaactttagtttatttttactataattttgttaatgggtgtggatttgcttgtttgatacaagtttgaatattaacttgttatattttattttttaaaaaaatattaaccatataaatttatattacgtctaggttaaaataataagtttgaccctttacttaaaaagtggttatgcttaaataggaaatgaggagagttatcaaggtggttagatatttacctatttattaaaggtactatttttctaataataaaatttattctaccctttacttcaaagaattatagccaattattacaaacttacagtttagaacgactgtgaattaacagagaaacaagagaactaactggaacacactaattagggatgcatggggtgaagaacctttccgtggaacgtggcgtagttggctcgcgttaggccgatggatcacatgtggatcgcgttagggattcatataaatataaatgttaatgaatatagatatctaatgctagaaaattttacattgtaaaacggaaagtatatactctctccgtctaaaaaaagacaaaccctggttttcgtgtccaacgtttaaccgtccgtcttatttgaaaaaattgtgataaaaattaaaaagataagtcacgcataaagtattaattatgttttaccatctaacaataatgaaaatactaattataaaaaaatttcatataggatggacagtcaaatgttggcacggaaacccagggtttgttttttttttgacggagggagtagacatgatcagaaagggctcgatcagtcgacacacatccaccatgtttataattaattaattagtataattgttacctgtagcttagcctagctagtaccgtacggagtgaggatataattaagcgggtcagcccaccaagactggctcgtttaaatagcctacacgcgcgcaggttcgctgccggtatacgtaattaacatggtttttcacttacgtgcgattttactgtcagaatttcagagtataaatccgtcaaaagtttatcttcttttacg

SEQ ID NO: 44451 - DNA, 1161 bp, Oryza sativa
cgctagctctacaacttattattaagatgttttgtcaattttactcgtacatggagtccttatatgccatggagtcctttctcatggttcatgaatatcatgatgcctcttcccctctcgatctctataaaacccgtatgggcatgagagaaaggtgtgttatctaagcagccgatcaatgataaaaaaaataattattgttcaggaaaaaatattattttaacttgtccgggtgtataattaattagaaataagttttaattttgacttaaaaaacttgaggcagatactccctttctttaaagagaaaaaaggaatagaggttggtagtacgcgtaaggggaaaggaaaactcaactctgacgcatccgtcctagttaattaaaccagagaaattccacatcaattgggatattttgtgtgaactggatgaatataattaacaagttggtcggcaacaaagagctggtggtaatgtcatggtctcatggagtagctagcagaaagtgcatgccagaaagctgagaagaatattaccctagtagctgatcaaagatgaaaaattcagatgatgtgtttcactgatatcatttgacatcaattcgatgtgtgcgctgctgctttttctccacgactttgcgttattctcaagtagatcccatacactcacatagcaaaagtgcgatgatgcgtttcgttataaactagtatatataacgaaactaaaagggtataggataatggaagcgtgcacaaagcagtataggagctttagagtatttaacctcgacaaccactaagacgacaaccactaagaccctgtttagctcccataacaaaaattttcacactgtgacatcgaatgtttggacacatacatatagtattaaatgtaggaaaaaaacaattacatgtaaattgcgagacaaatcttttttaagcttaattgcgccatgatttaacaatgtggtgctacactaaatatttactaataacagattaattaggattaataaattcgtctcgcagtttcctgacggaatctatagcttgttttgttattagacgatgtttaatactttaaatatgtatccgtatatccgatgtaatacccaagcccaaaatttttttccagctaaacaaggcccaaggggctgcagg

SEQ ID NO: 44452 - DNA, 1240 bp, Oryza sativa
cctgcagccctgataggtatgtaatagccctactgctattggccgaagccggtattgcttttatatattagtatcgcacgagtacaatatctaggatgacctaatctaatcaatgcttcctcgaacatgaactctgtgagattggagatgtttctagatccctcatgtctgtctctatgactcctacattgggtttgtctagatttgtattatcttgtattcacctcttattggtgtgtcccctctcctcttgggatcttgtatttatactttgggtgacccctagtccaaatagaactaggcaacgtatggatacaatacgagtagtccttgtcctgctcaaggaggattttgcttctctttccttatccagaacaccttccatatatatgagacttgatttcatgcaagatttggcatatggtggatcccactgaggctaacgcaaaagtattaggtatgtcttatctataacactgatattagtacctaacatccgtccgtctcactggtggagaaaccatctttcgtcggtcggccgaattccacaatagtcctggatgcaataaaaaccgtggctaaagatgatctttagtcccggttcaaaagggtaacgggcatatttaatctttagtcccggttcaaatgctgtcagggcctgtcaggccccccggaatctttagtcccggttggtaacaccaaccgggactaaagataccaacctggactaaagatctcggggatctttagccccggttggtaacaccaaccgggactaagtcccacccctatatatatgtcttcttcctcctccagctgcccgagcaagcttcaaaatttcttcaaaaaagaagggaggtcatgccaaaatttctagtgaatttattttggtgattacatacaaatcggaggtgtctaaaaggttggcaactaaatcctccaatgttttgttgtcatattacatttgcagctatgttttgcacacttttttgtctccaaaatttagttgtaagttgatgagagagaaaatttatgtggggaagaacgaatatatagaaatttagttgatttgctaaagaaggttttataaaatagttgagaaggaaaactatagtgaaagttaatcttgaatactagagaacaaactaaaatgaaaattaagagaagtaaaacacattaaaattagtttaaaactttagaaatagtaaataagaattatttggtgtaatattttatgatt

SEQ ID NO: 44453 - DNA, 2456 bp, Oryza sativa
tctagagattaccatgttattagtgggataaaaagagagataagtaggcataaaacttatccaatgtaggaaataataaaaaaaacaaagctatagaaaaaggcacaatacacatccatactaactttcatgtttttatattatgtatgtttatagtacactatatgtatatattagttttcactactacataaattttaataggaaacacccttaaatgtgccagtttaactaaaaccggcatgcatataaggctttccctgtccttttaattcgtcatatggatctaaaatttaaaaccgacacatataacccactataagtttgttttttttagaaaaacgacaccaataatatttctaacatctaggggatataagtgtcggttttttttaaaaaaaacaactgacactttaggatgctgagccgagccaagagccagttgggccaggtgtggagcacgagaaagaagagaaaaacaaatattttaagtctcgtgactctcatccttatcctctttgtcctcccgccttgtttccttccctctgcacttctctctccgcacctctctcccatctttcaacacagcggtggtagatgtggctcctcgacatggcggcagcacggtggccatgcagtggcgggcacgtctcctcagcattgtggtggccactagcacaacgacgcagcagaggccgggtctccctggcgcagcggcggatgccatatccgaagcagtagattttgattggattaatctgggcatctcatgtacttgattattttgtgatgattttgattggattgggatttagttttgtgttagatttgtgatgcatcgagtcttattttttttcattcctataaccttaaaggtgctagtttctaaacaaacactcttaattcttcacatcaacctgtaaggtgtcgattgggaaatgcgataactatgccaggtttccaatcgacatctatgtttatgtcgtagtgttttgatgaagaattaagtcaagtgaccactaaccaataaacagcaaaaacattttaagataaaaatacatatcagttcaagtgggctgtgcttgtacctaagcgtatctggtcaaacccaagaaacaaaatttaatcggttacacatagaccatacgtagcaggcgtatcttgcttgtacagcacgccgagccatccatcagacgtgccgagtgtttggttacacatgtcgccgtcgatcctacacatgatttggacaatctgagataggttaaattcacgcactttacggtcgcaaaagctcccaactttatatctttgtttcgctgtcattagagtacaggtgtagcactgaaagtacctgcagccacatgttgctcacactgccgtggctgctcggcagttatttctccccaattgaaaaatggtgtacttctgagttgcttgccaatggcatcatatcatatggactaacctatctgtatattgaaagcgacaactaatttggaagatagtattaagcagacatggcctattgccctgctttataacttgccatgtttaccttccgttttcgaagttaaaaccgctcccaaccaaaatccaacaaaaccgatcaaaatttcatacataaacaagctaaaaacaatatattttcataaacctccaaccatcatctgtgaaccctggaacttactagcattttggggacggtggtctatatataagttgatcatgccacttgaccgaagtaatgaaaaataattttaatggacataaattaaaaaacctccccaaattagtttcaaattaggttttaaaattcaaaattacgcagtaaaattaactggtggatcacagcgttgaagttaaatgctcccggtgcctgcattgcatctgaatgtttcggtacttgcgtgggactgaggtggtggttgctgcatggacagcaatggcggcttgctgattttgttcgccgcaggtgagtctctatcgctcagtactgcgtttggagtgagtgcgagaaacttctttgcagtattcaccatgagtcattaagaaaagtttaaccctttagtagcaagtcctaatcatagattagtaaccgagcaaagtagtgtttgctttactactggctactgaatattgagcttaagcataccgggggaatcaagccgtactaacagtacatcaaattatggctggctacctgtaaagttcagaaaacaggcatcagaaaaatggttgtgaaatagtattttgttagtttagaggagtataattaatagtactagaggatatgattgtatttctctgtatttttcagtagtgaaaactttacctatatctgaagtggcacataagtattcaagaactactcatttcaaaattttgtattttagaacggaggaagtaacattcatcggttcatcttcgccctaatagtattcaatgaagacggtctt

SEQ ID NO: 44454 - DNA, 1547 bp, Oryza sativa
attgattcaattccaacggatttaaccggaatgtcatttgtggtttgtccatgctcactccgggatggcgacgagcaccggccgccacggtctcctcatcatcagccgccgccggagcccgccgaacatgaaccgccgccggcactgcacggccgcaccatcacggccgccgcccgacgacgtcgtcaccatgccgtgcgccggccgagccatcactgggtgatgcagccccggtggtggtagcacgaccaccggcgcctgaccatctttcttggcgcacagcgacgcgttccggcaggtcacggcggcgtcgtcgatggcgccgtcgtcgtcggcgtcgtccgacaccaggagctcctccaaagagcttctgctggtcaagaggaggctgctcttctcgccgtcgtcctcctccccggcagccgcataatccggcctgtaactcttgcggcggcagcagagaaggcggcgcacgagcacccagaagctcttcacccttggcctgtagagcgtcgtcctggccatctatcctccagcctccaggtcgctcctgctgccgatctcagctaggacagtacagttatatactactcctagcagctagctagtagtactagtattctctctcacttaatttttcagctggttggtagccctgagatactgttgctcacttggagatgatctgggattctggagctaatcctcgaattgtgctttaccgtctttaaaatttgccatatggaattcttttattattcctatgtcatctgtccgtgctagacctcaacttcaggaataatgttatcacgccacccctgaatgtatagcttcacactttcttagacacctttcttatgccaaggtgaaatctgtaaaatcagtcatgaaatatactgtattctacgtgacgatttcatagtttaggagtggcttgtgagagccgcaatacgcagcaggctgccatatggaggctacgagaggaagacgcgggagttgtctgctgatccagcgtccaaaaagaaagaaagaaaaatgcgcgggagagtacgtcgcatcagcatcaccgtcaggcgctaactgcccgggcgctaaaagacgcgcgaaatttggtgcgatactgttcgaatcatcgggggagtctccccctctgcttattacaccagtgtatgcatgtcatcttcggatcccagtgagatttggacgaaacaaaagcatcgatttatgcgttggggggtgatggggtgatttgacgcgttcattcgagcaagtcgctctgtgactttgttcccatgtgacatgggaatggtgtgtcgtcttaatgaaagaacttgtctgataatgttgaagtggggaccatggaagatgtgcttagtactattatcattatctacatggataaaatcactgatatttagagatagagataattgtacaatatcatagtccactatacgtgaacaaaatcgaaaaaggcaagctcgcaagttagcgaaatagtgaaaactttatcctgtaattaaggcccaccaatacctcttctccca

SEQ ID NO: 44455 - DNA, 621 bp, Oryza sativa
gcgggatggaggctgagtgtgggccggtggcagccgggcgcgagccaacggtagggaggccggccggcgggatgcaggaagagcgcgggccggcaacggccgggcgagggccagtgggatggaggccggccggcggtggcccggcgcgggccggaggcctcgccctcccctccccagatccggacggagaagaagctgcgggatgggggtgatttgatttttttgagtttttttatctttttttttatgatttgtggatgttgtgatttgtgaatgttttgaatgaatatgtgaatcgatattgtgaatgaatctgcgatgttgtgaatgagtctgtgaatcgttgttgtgaatgaatctgtgaatcaatattgtgaacgtatttgtgatgttgtgaatgaatctatgaatggatattgtgaatgaatttgtgatgtatttgtgatgaatctgtgaatcgtctgtgaatgaaaagatatgaaaggaggaaaaataaaagaaaaagccgaaggagaaaaaaaaattagtcctcccggttggtaacactaaccgggactaaagatgcaaccgtcttttgtcctagctggtgttaccaaccgggactaatgatccatctttagt

SEQ ID NO: 44456 - DNA, 627 bp, Oryza sativa
ccaagggaggaaggagagatttatttggttttctttatattctaattgattaaatgaactttgtgctattaaaattacttcttgagctgcgaaaattcgcgggaaatttgagagagtatattagggcacaaagaatattacaaaatattcccggctaatgatttttaaaggaaattttaatttcctcaataattctcttgattaaattgatttaatttttatttaaattctagaaaatgcattattaaatgattttttaatcccgaacgaaaattggggcactacagttgccggggatgcaagctcttgcatacctcacagactagcgtggagaatgagaaggaggccaagctagaggaggcccgtgtggaggaggtttgatccgcttgcggttcgggcagcttgggacggcggtggcgatcttgcagctcgccgccccctatgacgatgccattgttgctcgggtcgtctctgctgtgacgatgtcattgttgaccccaccgctgatatgcccaaagctcaacctccaccacccatctcctcacgattcggtggttgatagccctcccaagccagattcctcaagcctcttttgcaggtttcctcttccccagaccttgcccgttg

SEQ ID NO: 44457 - DNA, 2094 bp, Oryza sativa
aggatggagaggatgcatgcacaggatggagataagggaggagaagaaaaattgataaggatgggagatggagagagagaggggctgtgcatgcacaggatgcagagagaagcgccggagacttggtgcgcgcgtgtgggtggacgtttttcttcctggttgttaaacaaccgggacaaaaatagatctttagtcctggttggttacagaaaaaatccacaagcatacggatataccattatagcatttcacccgggagtattccagggtatcgtatttatttaattctaagggaagatattgaaagagagaaccatgctaatgattatatacatatatattacttgccttcatcaaagcctagtaggggttaattcagcatatgggtagagtgacacgaagcgaagcttttagattccctctaataatgatcctaaactaagtagtcgcttttagattccctctaataatgatcctaaactaagtagaaggagaaatagaaaagaactcaattcctatacttctaatatacactcaatctttagtctacaattgctagtatacaatcatgtggccaatatcccctaatagtgccctcctggtgtttcgagagaccaccctgggttgccgaattccttacgacaacctgtcatggccgtccaaccggggctaaatacggaggaatttgtcttaggaatatatactatcgtggaggaagacctgtactgagctatcatcatcagcggcccacctctacagatccgtagcatatatgcccagataatgatacttattaatctaagtacctcgtttacattaataaataccactctgggaagctaaccatacaattaatacgacacaaatgtaaagtaaagccgatactcagactaaacaaagtaccgaaagtatataaagaagaatatttcattaatgctggaagtcttacaaaagccgatagaaaagatactagagccatacccgaactctttcgaagactccgaggactccgaaaactattctattctactttagttagcacaaaaactactaaataaagtgtagagagaaatcttgagcttgcttgactgtgttgagaagtgaagtgagctcctccttttatagggtcggtatgacggttatggagaaggcaaaatgtcctttctgcccctgaaccgtcattggcaagtgatcctggatgaccatgtgtagggccagccggagccacagctgccaggggttcggccgaacctgggtcggcccagcaggcccccaagtacagtagagtggctgacaggtgggtcctcatgatggttatggtagttgatgcagttttcaggacggttacacctatcatgtgggcccatcttatccatatgcttgcttaggagtgagttttcctcatttcttctcattttatttgctcagtacatgcaacaaattattctccaagtacaagtggaactaaattatttcaaaacaaaatatgcattatgagcataaccaattctctattattttagttatattagcggtcgaaattggtctataacgaccgtcaacagggatcaattttagatgaattttgcaagttgaatggctcaattcgttattcatatgaactatatatgaattttagaaattttgagccatttaaatggatttctggaattattatcgatttatgacgcaattaataattattttacaaagggaaaagccgattgctgatgtcagcaaggggagaggtgtggaccacatccacaaagggcaggccccactagtcagcggagccaaaggtgctagtcgaccgtggaccgagtccacagtggcggtgcacggcggaagggtgggttggctcgctagccaacccgactgggcggtggcggcgccagcctgacgaccaccggcggcaacaccggctgtgagtggcggcacggggagcggcggaaggaaccgagaaaaaggagatgggtgctcaccgaggggcacggagatggagggaggtggctggcagagctcagggcgaaggaaggcagcagcgctccggtgatgggcggcgccctggaagaggcggacgggcttgccctcgat

SEQ ID NO: 44458 - DNA, 1399 bp, Oryza sativa
caaaagcttagattaataataattcgatcacacggacatatctttcacaactatatcaaagtgattaggcagaaagcacacaacatgttgttactagaatagaaaaccgtgtttgattagtgaacaacttataacacagtataattgagtggtttacaccttttgagtggtttataagcgctatttaccactcttagttttgggaaatattcttatatatatgattaatcataacatgctttaaaatctaattgcatcatcgactatgcagtaagagattattttggagcttttccatggttattgctcccctatgcgtggacatagcttaatctgaataaactttataaatatccacacatctcacaaaatgagtgtctaaatgcctctaaacttctgagatcattggactttagaaatatgagcatgttacttaagattgtcatgcaaataatgcaaaacattcttaataccagtggtctagtctggatttaattaaatactgccaagattcccagtaaaaatatatgccaaatctgtatgcatccagatttgagctaatctcaagcttctctctgctgaatcataaatgattatctttataatttaattttagcttgactaactataactaaattctctcaaattatttctttatgtcaatatatgacttattgatataagccagtactccttcagaccaaaataactcagggaaaaattttctcggtttctaacagcaatatgcattgcttgacaataaaatgtcattagtatagagtaccggtgaatgaaattcccacctttaattttcatgcacttgtccacctcacttgaattgttcgaaatttccattagagtcaggcttaattttattaacccacttaaatggcccagtattttgactcattcagaaacttctacaaaattctttattttgttcatcaatctcaattattcttgtatggttcaaaaaccatttagatgaacactttaatgtcttattttgttcatccatctcaatttattcttagatggttggaaaaccatttggatgaatgcttatttttaatgtcttataaggtgaacaagctttatttagtgtttaccaccataatcagatctcataacttcatttgattttagcattagtgtcttacatttcttaaaggaaatcggaggtcgcttatgggtaaacatagccataaataatcatttgttggctaatttcttaacttagtgaaattttcacttaaagctaaacaatgccattaaaatctaagggaaagaatatctctatctcattagacgttccaaactcccctaggtatgtgacataagcgacaatgacacaatttcaatgacgtcttacttccatcattatagaataattattgtc

SEQ ID NO: 44459 - DNA, 822 bp, Oryza sativa
catatgggtgctggattttgcaaccagaacctttgagttctctcaaaggtgcctttgaggtctcaggaatgaaaagaaaaaaaggccgggtcgttgcatcagcttgatcaagccgatgcatcgggcaattagtccccatcaccccaaccatatttcatcgcacttttaactacatttaatccaagaaaatacaagaacaataagaacacaaaaacataaacataaacaacacaagcaatgtgaaaggaggggagggcgctaccgcctcctcccctcccgccgaatctgacggaggggagggcaccactgccgctgcctcccctctcgtcgaatttgttggaggggagggtgccgctgccacctctgagtcgctgggccgccgcagcctccccttctgccggatttggcgaaggggagggcgccaccaccaggtaatgcggtggagagagagggagcaagagttagctgagagagggggagagagagagggataggggaggaggcggagaggataagggagaggggtaataaagaaatagagcaaggggtgatcaaaagggagagatattggtggaaacaagctgtgattcggcttagtcgggtggttttcttaataagtgccattatttcataaaactgacacctacattataaatatagttatcggtttttaaaaaatcaggacctatgatatattataggtgttgatttttatttagaaccgacacctatctctcaacaaaggtaccggttctagccgatggtgtgtcatggatgcgcgttttggatggaaaaagcaagataggtgacggttttagcatt

SEQ ID NO: 44460 - DNA, 1822 bp, Oryza sativa
tgcataagtgcttggaaaaaaaattgaatgacttgtctcataaaaaactttagaaaatacctcacatgatgatattctaatgaaaaaaatgcatacgagtgaactgtggaaatttgatgtttcaattggcataatactctgttgcacattttatgtttagatctattttttaaatttttttcaatattttagccattgggacttgacgtttcacgtggctgttggtgttgcaatcactattttttaaaagttgcatttctttgaagagttttatcaagaaaattgaaacatttgagccagtgcagaaactatttcctacatgtggtgaaagcacctgattcttaggataaattagccatccaatctttagccatgtgctgaactcttgttgggcctgaatatccattacagaacacactagaaacgggttgtgtcatgtgttaatcgcaataactaaattattaaattttgtcatattttttagcaattattgctgccatgttttaatagattcaggctactaataattatccaacaaaactaatctaaaaaaaggaagaaaatggtaaatgtcgatcagctaaaagtaatgacggctcgctgtgttcaccacctgtagcaatattttaactatactcccttcatctcaaattttaactaccattatggttcatatgtagtacgaatgaagcaatattttgggacggaattaaggagtatacaggtgcagtaccatgaatacacttcctttcttatcatgtgaaacctcgttccacttgttctctcttgataccaaaacaggtcgccctgtaaacatcatgccccaaccatcgacattacctcctacctgtaattaagggcgtcgcataacgatgaacacatacgacaaaattgattgctgcaacaactcatgctctgcaacttgtttcatggcctacctagttgcaacttgcaagtgaggaggtggatgtgtccttggccatgtaccgcatgtatcccatgtatcgaacaagtgaggaagaacatatccccctatgtgttcgatacatgggactgggaaccatcttcttcacacggaaaacggagcggtccattagcgattgattaattaagtattcgctattttttttaaaaaatagattaatttgattttttaagcaactttcgtataaaattttttttgcaaaaaaaaaggtacagtttgaaaagtgtgcgcgcaaaaaacgagaaaaataggttgggaacaccctgaaacgaatgctattcttccctctactttcctaactcaggccctatttacttcccaaaacataaattttcatgttgtcacaatgaatgtttgaacacatgtatggagtattaaatgtaggaaaaaacaattaccagaccctaatggggtttcctgacagaatctataatttgtttcattattatactacgtttaatactttaaatgtgtgtccgtatatccgatgtgaaaatcaaacctaaaaattttcccgaactaaacaaggcctcacctcattctttttacccgtgcacgcttttcaaactgctaaataatgatattttttttcaaatattttctacaggaaacttgctttaaaaacctatctatatatctatctatactaatcgggcactttgaaagagctctcactttaatcagaaaactccgaccgttggttaaatgagccgtagcatcagaacaatgaattacaatctaataatctataacgctgttggctaattaagtctttaaacgtgatgccgtgatgggctcttttcaaagcccatatactctccaaccatgctcttttat

SEQ ID NO: 44461 - DNA, 938 bp, Oryza sativa
atttttccatgctaaggcctgccgagtagcaaagacgaagactgtaaagggcgaaaaataagaaacatggtgcatcgaatagatgcacctaattaggtgttgcccccgactatatgattagttaacaaactaaacatgtagtcaagaacaaaataatcgcataatcatgcatcatatgacaaaagcatatgcggcgtccaacaaaacattcagccgactgctttccagccatagtaaaaagaatccgagtgaataacactctaaaaggttcacaaatgaacatatttgacaggcatccgagtaaaaaactctaaagataatccatcaaatgttataaaaattatggtaattaataagtctaatagcctaggctatgactctcaccataattaaaataggcatataacacgccaagagaatgaccattgtaaaaacaagtcatctcaaatcaacccagatagcttttgcagcctaaaaaagcttacaaaaatagtataacacttttctgtcgagtacatttcaatttgcattgcaataattccgaagaattatataactgcattaaaaaggattttatcagcattgggccacaccattgcgagcataaattgccaaagcaaaaatgcctaagtccctaaggagcacaacgggccacgctgttaataatattgggctgaagtactgttcaggcctaggcacattagcacccccgaaacccttaacaaaaaatcccgaagtctaagcggcgcttcgtcttccccgccggaactctcaccatttcccccattccttgctatagtacagagctgcgccggcgaaactagggttcaccattccactccaatccacctccaaaaagttcacaaaaatcctccacgcaactcatcgcttcaattccacatctctccccagccatccctcgaatcaaatcaactcat

SEQ ID NO: 44462 - DNA, 835 bp, Oryza sativa
tcgctacttatcactgtaatcgggagtttgcagcaatcatgtaataaataaatatattcatgattataaacaatgagtttgttatgtttatggaagattcatgttgaggatgcaatgtaccaatgctaagcacctttccttttaggcaatgcttagtattcatgtaatgagggagaaatgtgtaatacagacaagttctatgaggattcttttggaagatgcggatatgtgattatgtgtataattgcttactgataaaggagacctagggtctcattccagaggaactatgttctaacctcgagttaataatcaacctgatgatggaaatgaaaatcaagcgattaaccaaagagacatttgtttggacaagagtttcagatgtgtctttttcggatgtcagggttgaatgtgtaaaggaatactttgaatgctaaataatgacaacatgaagggaatagtgggaagtaaactgaatgtaaagaaagtgaatccgagttgcctgttcgtgggaactattcctagttatgaaccaagtgaaatgttcgaagatagtctatagaggtcagattaaaatcgcatctaacaacaaagcttcagatttggcaggaaaacgatcagacaataacaagttcagcagtaaagtcaattaggaagacgtcaaagcatgtcaagtgggataagttggttctgttgagaaacataattcaaaggcaaagttatcgacccttgcatcgaatagcagaagtagctagcacccggagaccaggaaaactaatatgaggcagtttgtggcaaattagaagtaaatgacaagcatgatattcttatgatg

SEQ ID NO: 44463 - DNA, 719 bp, Oryza sativa
tgaggtgagagaggaaacaagccaggaaagaatagaccagaactagagacaggaccttaaaggaactaactcttcttattgatgtattgtttgttttgcttattctgcaagttgcttaagcaaacaacctagcatggttacatcacaccccactgatgcaaaccacgcgctacacacacaagcaaggaaacacacaactaacgactctaccctagagggcggcttaggttctgcgactggttctccaagatcttcactccttcttcacagctggcttcactgcttcctacacttcgctagcggatcctgcagtcttccggagcttcggcaaacaattggcgacatcttcttcttcgcaaagctgaccatctagtactagttgaaatttgaaggaagaaaagagtaaaccttttgcaaatagcattaggggaaggagaaaaagaggaactttcgcaaatagttttatttataaaatatgtccttaggttttatccacttggcttatcctacagtcgagatggctctgataccagcttgtcacgaccgggaaaattgccttttcccgaacgctagtgcattaatccccgtcccaggaaaagccggggtacaccacacaaacatgatataaaagacacatctttattatatcgataatatgtacattatcaccaaagcgccctaagcctgacaatcaaaaataaacagcagcgactagcggg

SEQ ID NO: 44464 - DNA, 1037 bp, Oryza sativa
aaatagcatctgtgtgtaaagtatgtaaaacattttcaatagtttagggtgtagaatgagctaaaaactagtttatgggctaagtacttcaatgaaataatttagaagagtgaaatggtgttaattttctcattaatatagatatattactatacaaacatgcaagttaaatttgatccatagatcgaagaaaaaaataaattactcttgctaatacttgtactatttacagttaaaattttcttcttcatttgcttgtaatatgtttgatttaatctagtgtgattttaaggaaaagacgtgcatttgtaaagtgatatatcacccacgcatataatttatattttcaattttttcataagtactttttggttgacaggaaaaaaaaacatccccggaaaaaaaccatcaccgctttgtagcaaacattttaataaaatgatttgctaagcattctgattagcaaagaggtaattaaatggatgcttttcgtgaaccttttgggtatttcatccccaagagctgggtcactaccaaagaaacgatatattttaccgtagggcccaaaacacaaatatatcagttagagatactttaatatcggttataaaagtcaagttcctacaaacatctttggttgtggtgtgtgttactaactatactaaaatgcatctttaaaatgcatctttagtactgtttggtaacactaatctgtactaaagatatttttagtactgttggaacaccaacagttactaaatatacctctttagctagaaagaaagcatctccatctaaattagatgtgtgtagtagataggacgtatgagggctaaggtgagagatattgagttcaaaatccatatcccatatattttttttgatttagtatgtattttagatcgagatgtttagtcacgatttattagtttcggctgcaacaaccaaaaataaaaaaaataaaggggtttttaaccggtggtaaagattctctctaccagtgagccagtgagtataacaatgtcaagaattgattt

SEQ ID NO: 44465 - DNA, 690 bp, Oryza sativa
ctatgagtcataaatgaggtagaatatcttctcttattagagctcttgatgagctcccacttattttattatttatgtaatggaagcataataccttatgaacttgaatcacttgatttactttagctttatctaagtaataatagatgtcagaaatttctaagggtgaagtgtctcgaccttaatgagacgtatattctcccctagaaatgtggccgaaaaataatgccataatttcgacaatgtctcataatgattcaacccaaaataatgccattaatcttcttatttaactactttcttaaatcaggacattaagcatgtccctattgcttgcaaagaacttacagaagaaaatttcaagagtagcatacataggacatagaggcaattttatttccccttgagaggaaagtgagctttattattattaaatttggagttgctacaaccccttagtaaagcttcatcttttccatcaaatgacaagattaataggatcttacatagtttgcctcttagtcttctatatttcttattgatttgtggaatgatgaaccaagtcaattatggtccactttgtcttagtattacaactctgaaaatgaccgtagcctaatgggagaagaatcatatgaaatggacaagtggcgcatatgaaatgtgtgatgtccatcccactatgtttgc

SEQ ID NO: 44466 - DNA, 1516 bp, Oryza sativa
aaggtcctaggaatgaaaaaaaaaagagaccggctcgatgcatgcatcgaataagtccccttcaccccaaccagatctgattacacttttaattacatttaatccaagaaaatgcaagaacactaataacacaagaacatcaacaacacaagcaatgagaggggaggggagggcgctaccgccgggtggtgcggtggagagagagggatagggaggaggcggagaggataagggggagagaggggggtaataaaaagagtgagtgaggggcgatcaaaagggagagatataggtggaaacaagtcgtgattcggcttattctactcagtctgtcggttttcttaacaagtgccattttttttataaaaacaaacctacaatataaatatagttatcggttcttgaaaaaccaggacctaaaacatattataggtaacggtttttatttaaagcggaccctatctctcaacaaaggtaccggttctagccgatggtgtgccatggatgcgcgttttgggtggaaaacgcacaatagctaggtttcggttttaacatttccggcaaatatactgccgatcgttatgttattgcatgcgcttctacaatttcattcaccaaaaggctaatatgctggagtgcatgctagcatgatgatcaacattttaaatcatttgcgctattctaagctagtaataggtatgcactgtgcttttgctagccacctaatagaaacaaactaaagggactaaaagtaacgcactgatctataaatatcaattgtttgtacaactatatattatatcaccacatgaggatcactatcatatgcgggaatatgtgggatcccagttgcttctgacacagctgtatttcctaaaactctcctattccacaatctccaagtgaatctagttaattagtagttaactaatttccttgaagaaatctctcttctcaaaatcatatggaatgagtgttcttgagttcatgttttagcttacaacatttcaaattacagcatattaatttcacagggatttaggtcctgtttgggactactccagattttagacccataatagacttgaagtttatacattcaattacagttgctttaaaaatttaagtttcatctgcaatatgcacaaaaactttatctaaatgttatcaatgtaatcatagatctagatccatgaatttgtgaacctaggaatatccagctccgagaaattttggattcagagttgtgccaaagagggccttaatattacgcgtaatggcggaaacagaactccagtctcggacataaattttaagaatttaaacattgttttcttctgacctgaaaaaaaatgctggaaagaatattctgccaggtgggccaacacagaactaaaatttcaatccagaatttaacatctgcctccaacctatgtaaatagtgagaataattctaaaaataagtcgagaggtactttgtaatgcatctatcgtcctaccaaaagttgagtgtaaa

SEQ ID NO: 44467 - DNA, 1233 bp, Oryza sativa
agaaattttttttttcaggtggaaaaaacacgtttttacatatttgatcatgaagtgttttacgcaaaactagatggtagtaacgtgtgattaatttagttttaattattacaaacttgaaaatggattaatatgatattttagagtaactttcatatataaagttttcgcaaaaaacatcgtttagcagtttgaaaaacgtgcaacgagattctataatttcatctaataattgttgaacattcgaaagcatccatatcatggatgtcagctcgagagggatagacataagaggggcagcgtaaccggaaatgctactgagcgagggatcgccctcgctcgcccagggcgatcatttccacccccgcccccccttccctccctccacctctccatctggtttccttttttggcaccgcattactttccgattttagtaaatttatatacctaaagtttacacatctaaagtttagagcccaaaaatttataagtcaaaagtttatatatccgattcaaatttgaatttgaattcaaatattttttatatatagtatttctatacatctaaagtttatagacctaaagtttataagtcaaaagtttatatacccgtttcaaatttgaatttgaattcaaatatcttattcaaatttgaatttgaattcaaatatttttcatatgtagtatttctatacatcgaaagtttatacacctaaagtttatagacctaagtttatatacccgattcaaatttgaatttgaattatatctgattcaaatttgaatttgaattcaaatcttttctatacatagtatttctatacatctaaagcttatacacctaaagtttatagacccaaagtttataagtcaaaagtttacatacccgattcaaatttgaatttgaattcaaattttttatatatagaatttctagacataaatttttctaacttttgtttttaaaaaacaattgtgtggtctactgtagtacaaagaggagaaggggaggagaaagaggggagaggagggaggagtatagggggaggggggccagatccgatcacccaggcgatcgcctggcgatcgatcgcccattagggcccccccaagtccagggtttggctagtttccgagctaatgaatgtgtattttagtttctacttttaataatagagttatgagccgataacatttcgatagaatcgggctcgaatgtggttggatatg

SEQ ID NO: 44468 - DNA, 523 bp, Oryza sativa
tagcaccacatgagcatcactaccatatgggggaatatgtggtgggatcctagttgcttctaccacagctgtatttgctaaaactcctcttccacaatctccaagtgaatctagttagtagctaactcatttccttgaaggaatctctcttctcagaatcataaggaacgagtgttctagagtttatgttttagctgacaacatgtcaaattacagcattcttaatttcaccaggatttaggtcatgtttggcattactccagatctcaaagccataatagatttgaagtttatacattaaattacagtgctaatttagaaatataagtttcatctgcaatatgcaaaaaaaaatgtaaatgttatcaatgtaattatagacgatgtagatccacgccaaaaaaaaaaaatcaatccagaatttaacatctgcttccaacctatgtaaatagtgagaaaaattctaaaaataagtcgagatgtactttgtaatgcagctaccatcttacattgtcaaaagggc

SEQ ID NO: 44469 - DNA, 1040 bp, Oryza sativa
cattcctgaacaaaatcaataaatatttagacagagacatcctatcttactataaagttatcccccactaactccttaagctcattatcatccactaacaagatgccacatcaacatcaactaacaatcatcacatttaaacatcatgcaaacatgctatatctttatagtttttataatttaagatcttttcaaatacaaacatgttaaattatcatctaacataattcacataatgtttcaatgtatatttttattatgttttatgatatcctatatacttatataatttatcctcacttagttagtgcttaaatgattaatctatggtctaagttatctttctccttttttcttctaattaagtcatatcacatcaattgtttttagcctttagatgattaatctatggtccaaactatctccctacttttcttcttccataaagtcaatcgccattctacatactatttaaatttacattatcataaaccacattaatttattaatttacttaatctgatgttatctatctatcttacacgttatttttttttattgttatcatactaaattcccgcagtaatgcgcggggtttcacctagtatctatatatactggatcccaagccaataaagggataatcatactctaaataagaacaattttgtagttttgacttttgacagttgttgagaaataccataatttggaatattagcttgtagtacctcctgttacttttaaaaaacaacataccaaaaggtatttaaatttacactaaaacataccataatacatcctcgagaaactgtaaaaagcctcgttaaataagctacctggattgtggcatgtgaaggatctcccaggcagactggacgactcaataatcctgataatataaagccactattcatcattatatcttctatgaataaagacaaggcacatgaagattgaaaacgtacgaaaatatatagacgaatgaaactagaagaacgccaaaacgtaacgttgatacgaagatggaattttcattt

SEQ ID NO: 44470 - DNA, 1312 bp, Oryza sativa
cctcggcattgctctttcgtcgaaggccaggtttgctacgctgcatctgagcttgaggtagctcagaaccgggaatcctgcctcgtggaagatgatcctttcttcaggggcgtcactgacatggagcgacagtacggtgagttcagacaatccaccaagaacatccatgtcgccatcaccgagtttcctgactgcaatcttcagaatgcagaggctgccaagctctctgatccagtttggaagcgtggagaatgtgcagacatgaggtgacagatcaattctctgaagcaaccgaggaggagtgcacatttgccatgacattcttgtagtagctgaactgaaatgagcagtggatgatgtcccgttcaagaagccagcagctagagctaaagatttgaggttgacaaggctctcgatgacagaaccgaaaatgttcatggtttcccaaagaagctggactgactgaaaataacagcaggtcagatgaagatcctgaagattgatcagatcaacaaggctcttaacattttctatgctgctaccactgagatcaagatatgcagattcccggcagctcggtaggaattttgacgtgggaccaaaaccatctgaaagtagactccataagctttccaacaagtactcatgggccccgaaattccttctagatcagcggctaggtcgaagttgatgctgtcaggaggcccgaatccgaatccaaaacgtgtggaattttatctcttgtcttctatggaccaaaagtgacgtggtgaaatgaaagaagacttggagaaggtattgatatggtccccaatcaacttctttgatcatccatgaattctttacgctcagtctcttttctttcgcccaagaaagtacctctgcaaacaaaaacacaggaaactcattgtgtagcaacgtttgttcaaatatataacatgtaaatctaatatagaacatatgcacctttggttgattaatacataagatagtcatggttatatctgagctagttgtgtcctcatcatcctccccttcttgattggaaactgtcctcagtttcaccttgtcatggagcgtattgtacttatctttgtctattacaacatcctgtgctgaacatttcttgatgaccatatgattggatcctaaaatctttgtagtcgaaaaactacaacactctccttcttgcaaaccaacctgtaactcatttaaacaactagaggaactagatagataattatttatatacatgcggtcctctagacaatacatttcatcatgaaaaggatgtatagtaaaattcgaacaa

SEQ ID NO: 44471 - DNA, 694 bp, Oryza sativa
gagattaaatcattagcactaatattatctttcagatgtaagtgttatagttttgtaattatattggtgctaaacttgtaattttaggatgaattttgttaataaatctgtaattttgtgatactttattttaatatgtagtttcacgataattttactttttttaaaagaaaataagatcaacctagaaggaactagattgactttgttttaagaagaaaacaaacaactaaattcctctcgatgaggataaacttaggtggtctaggcgtgcacctacaccgtcaaacaactaagccagcctcagtttctaagagaaatttatttctacgtatgtagttttatgataatttgattaaagtatttctagtttgacgaaaattggttaaagtatttatataaaatttactcttcataaaatactcattccattttagatataattaattctttgaactataattttaactgttagtttcatttatgaaatacccgtatatctatgatattatggcggtacattttaaatgcatcaatgttttattttgagcaaaatttcatacataaaaccatatataaggtttagcacaagtcacataaccacacactttctggtattattatttcatgaaacctcatcttaagcaaatcttatctatcttacacatggagtcgctggtaggttgtcatggcc

SEQ ID NO: 44472 - DNA, 2293 bp, Oryza sativa
ttagatgtatagaaatactatatatatagaaaatatttgaattcaaattcaaatttgaaacgggtatataaacttttgacttataaactttaggtctataaacttaggtgtataaactttagatgtatagaaatactatatatataaaaaatatttgaattcaaattcaaatttgaatcggatatataaacttttgatctctaaactttagatgtgtaaacttgatgtgtataaatttactaaaataagaaagtaatgcggtgccaaaaaagaaaaagggaggagggaggggatcgatcgctacccccgtctccagaggatcgatcgcccattagggtttatcgattacggacggaaccactcccattaacgttatcgttatcttgatctaaccaaacgccaccccagttgcaagctgctcctcacaccgatttctcccggccgcgtcaccaaccaacgtggcgtcgtcgatctcctccgcgcatccgccggacctccctcaccaatctgctctgtccgtgtcaccaacgacggccgcgtcaagtacttgcgccgccgacgccggatcggcgggaatcgtgctcgaatgggccaggggcaaacggcgccggccggctcttctcctcgtcctcccggtctagccaaaggtgccaccctaatcatctcctatgacggacaacggtgccacacctcctctgatccaagctgacttgacctgttgagattgccccaatgtcaccgccgtggtcactgctgggatgggaagcacgggtcacgacgcggaggtcacctgggccaacttcgacggctcgtctttggcgtcgccttcttcgtttatcaggtactgcttgccagcctcccactccctcccaattgccaaccgccttgcagcgcatagtatctgcttgctgcccttcgaaagtaggagtagtgttctgtacatgtatcgagttaagttagaaccttggctgctattttgcctcttgtagaaatttgatattataccattgcaaaaagggaaaaaagttggttttgctaaaactgtcattgtggagatgggtttcgctaaattatccttttcaaccggtgcatcattgctaaaatgctatctcggacgaaaataccctttaacttcttccaagcttctcccttgtttgctcgccggtgacgaccagaaaaggggtggcacgggatggaggcaacgagccggtgagcagtggcacgcacgatctgcgacgccggtttggctcaacgccaagccgccgtcgaccacgagtcccaccgccttgctatcccgcgcctcaccggatcgccggctcctacacaacgacctgctgcacactaccgcacgcatcctgacgaattcaccccaaacaccctgctcgactccgacatactcctccggcgctaccaagatttgcaaactagtacaagcgtgtatccatctcagggacagagaaagcaagcacaaccgttcttattgatcccactgtttacacccaaatttggcacctagagataaaataggagaaattgccaaaatttgaaagtctgctggttttcctctgtggggccgatctgaccgtcgtgtgtgggccggtcagaccgctggttgatggccggtcaaaccggcggtatgtggccggtctgatcggcaaagtccgagtccgggtctgtttcgccgggtcttgaagtttccttactcgggaaggcatgtttcaggtttcctctggattctatcccgagttggacgtggaggagggcttgtagagggcaagaccaacccctgtataagggatatggccggttcaattgtaactaaccaatctacaatcaatcgaatcatttttcatattgcttttagttttctcttagtttgtccatctttgtcgatttgtgccgtaaaccatccgctgacgctgcgagagtgcgacacctctttatagatttgtcctgaaaaccttccgttttgcccacgagacgggtagttacctagaaatcggcttcgctagccggtttagttatcaaaacctatcttggtctagtttttgctagattgaggtggttgacaactctaggatcaccacaaggcattaggtgttgtgatcgtggttgtcaacttgtcacaaaaagttaccaatacgattttttgacacctctttgtaggtttatcctgaaaaccttccatttttcccacgagacgggtagttacctagaaatcggcttcgctagccgtttagttattaaaacccatcttgatctagtttttgctagattgaggtggttggcgact

SEQ ID NO: 44473 - DNA, 1769 bp, Oryza sativa
ttggatttttagataatgaaatgaggattggatttttagataatgaaatgaggattggatgcctaacaaacactatgagactgcaagtttcttggagacaacttttactgctagcaattgtcaaaatgacattgacctatcttttggctgttttaggtcagtttggagatttataacctgaagtcatctgtattgtaggtgattgtaaatattgtagaagcccatgtagaggcacaaactactttatttttggcttttggaaatctaatttgaccttatggagaaagttaggccatccttagcttataatattgctattgtagtccaatgcatgttcaaaagtagcatcagtatactaaacagaacagatacttattctactgctttgtatttttcaggtaagatccaccttggactagtccatgctatatggctacaacaacgcaggcattgcagtagttctctgatagggaaaccaacttattagttctattctgttaatgttcttcagagttcaaataccttaatgaagagctttcttataaagagggagaatttttactattcattttgttattattcatgtcaactatggaggtgatgaggaaaatataccctggccaggatataggatgaacctgtcccacttttttatctttagtgtacctctccaaccactaccaaggctaacatggtggcctagtatatatcagaccaggaaatgggggaggagtgttctaaggaaatacacctagtacaggtaccaacaaaaatgtgttagtgggcccatatgtcagtgaaaggtgggttctatactttaaagggtgctaaacactagagggaagaacaaacttagtgtttgtactgtggcacttctttgcattggtacattgagtacaacattgtgcatgccatgtaagcccttttcaatgatcaaagcacacctcaagttcatttcattggaaaatgatcattaaatcttcagcatttaatttgtcaatatttttatcatgcatatctgtctttcatagttattgatgcatgtgtaactgattatgataacttgcaatctgtttagtttaaaaacttacaatttcttatgcacaagatgtttggcagggtgcgccaggctggtgagcacgcaagttaacaacacaactgctatattttcaaacatatctttcaggtaagtatctgtcagagtgcttagtgcttaattaattcacatgatgtagaattaattgaacgcctttttcttcttatatatgtgatcctttttttttgtaggcatcaactctgctgactgcctgatcagctctaccaaaatatggatctgcaaacgcaaatgtcatatgttggcagttcttttaaagaaaaacagatgtgcaggaaaattgtgagcaaactcgtaaggtaaatagcagtctctgcttctccggtaaatgtagttgattttctcatggaaatatggcaaaatgatgtttacattgttttacgctggaggtctagtctccagctttaataaaatcaaatggtgcattcttctaatgagatggattgttttccatctccagattcacatatactacattaagcttttagctcaatgctttctcgttcccaaactgtttatgcttttatgtatttcaccatatatactccaaatccttaagaaggtgattgtgttggggacccaatgaaggctttttgtgattctatgaagttttagtaatacacttggtacgaattataatgtagttcatgacata

SEQ ID NO: 44474 - DNA, 571 bp, Oryza sativa
ctaaagattctggtctagctccaaacaacttgtgctaaaatatttgctactgaggctatatttagatctaggggtgtaaagttttgccatatcacatcagatatacggacacatatttaaagtattaaatgtagactaataacaaaacacattacagaatccgtctgtaaactgcgagacgaatttattaagcctaattaatccatcgttagcaaatatttactgtagcaccacattgtcagatcatggagcaattagacttaaaagattcatcttgtaatttacacgtaatctgtgtaattagttatttttttgtttatatttaatactctatacatatacccaaatatttgatgtgattgggtgaaaaattttaccagatgatctaaacagggcctaagttgggcttccgtttcatattttggttcaattagttggtcgttggtatatgttacgtccatcttattaaaaggtgaagtttgagcaggaggcatgtcaagtttgtcatttcaagggaaaaatggttgtccctcccacctttgtttgacattaatgttacccctgtttaggg

SEQ ID NO: 44475 - DNA, 1145 bp, Oryza sativa
ttacatagaattgtctttattcagtagcttatttgtagcacatttattgtctgaaatagtactccaggacccctcaacaattagatgattgatgatactttatatatatttcttggagatatgtctaatttcatctactgctgagtttcatcaagtaaatcttttgatatcttcttgctgtgcagacctttctgtatatgatggtccctagaaaaatattatttcaattactgtgaattctgtgtcactgtgtgttacacataagtggacattaaaaaaaatcctgtttaattacatgccaaaccacataaaattttatagtgtttaggatgtccataaaatgctttactcacatcataacaaatgtcttcgtgtgctctgatattttacatgatatcctagaaaactgtcaatgcttatgcagctttatcagtagcccatgctccgttcatcaatctgttgttgtttttttttaccaactgtaaatctgccattgattcggggtgaaaattgcacatttgtcaccttttgtctaaactagtggatgaatagatagccaaaaaagcaatggcagatctgcaaagtccaataagtatcatggccacttgtatagatttccctttttgttagattgcttgtatgctttactagagccactcaacagaattgcaagcctgcaattacttgtatcttattcttctgtaattttagccgagttaatgtaatttcaacagagttaatgggttagggaatgtggacctaaatccatgcaggctgcccttcatcacacaccatatgcatcatcagtccagtatttctctctcattaaaacaatatgccaatggtccctctggtttttgataaagccttgcagtccatgaacattcatggaatattgaattggtttttagtcaatctaatgaaagacaataatatagttcatgagttgatttctgagtggtccttttgatgtcatattttgttaatagattttgccaaaatgcattttccattagttttgtactacagattttaagttgtagtttggttaacttgtacaattgtcttttatatttttactattgtgaaaaacaggtgggagtggttctcttatcctgggtatttatcctatctaaatgaatatt

SEQ ID NO: 44476 - DNA, 1190 bp, Oryza sativa
ctaggcgatttattacccaaggttgacaaagaacagatatcaagtaaacatggcacaagcgagcagataggtaatacccagatcccatgtaattagcaaaacatgcatatttatttgtaaacggtaaaacatttataaattgggatcaacatgctcaaggggaatgtgtgacttgccttgcttcttcactttgatcttccgaactcttttcctcgcgaccgcggacttccgaaacgacggattctacacgctggcacgcaaaatgaggaaaaactctaataaaaaccaaggaaacagtacataaaaactaaacaaacatgtagagctcaattttagatgaattttgcaagttgaacggctcaattcggagttcgaatgaattagatatgaattttagaagttttgagccatttaaatgaatttctagaattattaacgaattatgacgcaaatattatttatttttccaaaggaaaagagggttgctgacatcatcaaaggggaggggcggcgccggcaagcgggccctaccggtcagtggcacaagggcgccggtccaccgtggaccgggaccaccgaggcggtccaccgccggtccacgggaaccgacggcccggattggccccagccgatcggacggccacggggcgcgcggctggggcacggtcacggctcaaagccggccagccgagtgatggcgcacggcagcgcggccaccggcgacgacggccgacgacggcgcgggaagcggcagcgcatgcgggcggtggcggcgcacgctagggagcggcggcacgggctcctcgggaagacggcgcgatggagctccggcgacgggcgtcgctcatgaaggggcggacgggctcggcctcggtttgaggaaaatcaaggaggggctagggaggtgagaactggtgcgaggtaaatggaaacgactgccgaccacgacaatacgaggaggagctcaccggcgacgagggaggtggagctcgggcggatttccggcgaagagggccagtggccgaggatctccccgtccctgtggagccgagggaggcgacgacgcgggtcggcgaggaccgaagcggcgttgcgacgcggctggaggtggccatggtgagggagaaaggtggtgcgcctggcggcggcgttcccgaggcgaaatgggaaaatggagtagggaccggggt

SEQ ID NO: 44477 - DNA, 2805 bp, Oryza sativa
ggactcgggagagggggcaaacgaaagaggagatcacggggaaggtttatatgagctcgaatcgaagagatcaagccgcaaacgtgaggaatcgagtcgggaagatctcggactcggttttggagataaactcgaaaacgaattcaaatctcatccaaacctcaaccatttgctttgattcttgggggaaaaggaagaggagaccgagaggaacaaaacccctcaatcaatcggagaagacggagtcggattcggccggatttggggcgggaaacggcggctagggttcggctcggcggcgcccggccggaggttgacgaagggcctgacaggtgggccccacctgtcagcgcctggaggagagaggggcgcgcgggcgcgggcggcttgggccgacctgggccgagcgcggggaaagagagagaaggagggaggagttgggccggattcggcccaacggcctaggaggggactttttgaactttttaaacaaaaacaatttgtaaaatgttgtttcaattattaaaaatacttcccttgctcaaataattcccagaaaattctagaaaatagtatttaataaaattttatctagctcatttttatattgaaaattttcctagaaaattagggtttaacttgtaggcttttaaataatttctaaaaattcccatttaaacaacaatttatacatttaaaatttttagggtgtgacattaaagtggtaatgctgaaataatccattgtagtatagtagcttataagacataagcaaccctttgacatgttcatcaatgtgctatttatcagaaacatctattttaaatcgtgaagtactatttctcatcttgttcttggggactatctgctcctggtactggtgatggcattctctgtccttgtgctgaaatcttgcttaaatcaatagagttgctttagttttttttttctgtttcttgattcctgtattgttctttgggaagacgagggttcagttgggttccattggttgttgccatgcatctctcttcttgatttttatgtgtgtgtgcagtatctttcgtgatgattctgtaccggcagtttgtggtacaaacaggggaggaaaccaaaattagctttctaatgtgtagtaaataaatttctagtattgctggaagttgacatgtttaattagaaagagtaaacaaagtaactccaagaattaaaaaaaaaaggtaactacaagaattaaaaaaaaggcagcaatgtgcatttcacatgttatcctcccacaatcatgtatttaaatgtaatgagtatcccttcagcaaactttagtaagagggtatctatagagggtatgcacaaacatataggcacaatatgcaatacctgagtatgcagtccctcctccttgaagaatttgtgagggagattccttgccccgtgagcctattaaggagcaaaagtttgaaaaaaaatttagcaagcttaagagttagaaatgtccaacatcgccgcaatgataagatgagataattctgaaattcaacttaaaatgcagttgatagtgagtgatactgtcatggctattatgtgtgcatgcataccccaattcatagatctggctgatgcaaagtatggttctatgtcgtttgtatataataatatagagtgttcaattaaatatacaagttaaatttataatgtaccagagtttttcttagctgtgcacttatccatattaagattataaccccagattataactacgggtatctataggtagataagcaaaatagagtgaaccgaccacagcatagaccgttttacattaaaatgaatagtgctcccatagaccatttgtcccataagatgtatactcccctgaatttgttagctatagaatgtgagaatacaattattgtggactgtaaaaaagaaaccatttttattttggtcatagattcagaaaagaaaatgagtctgaatgaatatttgttaattaaattggtcctaagtgtatttgtcccctaggtacgtattatttgaggggcaatatttttatgaagataggtagataagcatcctccagaaaatcaaatgaacacctaaacatcacagaggatgcaaatgccgtcaagaggcaaattcgctaagcaaaccgttgctttcctggctatacgacttgaagaatgatacatggtgtctacttcccacaatgataaaatcacacccggggaagatagctaattgtctggttaaatttcagcaaatgaaagctctattcgcaggagcggagttggcaacatcggggaaaatgaaaggttggctacctgcgcgagcgctgggcacatccacgtcggatagatatagtgcgcgtggtggtggaattttgctaaaaaaaaccctccggtttgtgcgtaattcggttgaagcccctcgcgaacagttcatgtgaggtggtactatacgtggaggcactttggaaatccagatattgcacatgaaggagagaaaaactgcgaataaggactacagatccaccaacatgttctctaaaaacaaagtaaaataaaacatatacacactttacatcaaatgcctctaaaactattatctttaaaataactagttttacataagctgaactttagaggtttatataaaattcatcttagatccttttcgagtaaacccaagttatgtagaatcaccaaaacatatacttccaagttataaaataaaattatacacttactgtataataaaagcctctaaatatttatgtaaggaataaccaatattgaacagcctttaatt

SEQ ID NO: 44478 - DNA, 1037 bp, Oryza sativa
ggataccgatagggggagagtgtgcctagacttcactcaatgtcagttcatttcgtatatagtacaaccacatgtgctagtatgggatagcccaagcttagtaaattattgatggtttagccttacattctggtaggccggtgtgtatcagttcggataactcaaaggaacttcatatttaccccgacgtggtagtttaggtgactaagtctttccaatacaacatggtgggttcccgttgtgtccgccaccacgttgttaagtttaaggcatgggcccgccacttaacggctcgaggtcatatttccagtatgactaggatggaggaacacatatcgtgctggtgtaaggctaaatcatgaattttggaaaagctttgttgtgagtaataaatcggatacttatgtatcgcatgccatgcttttgcatgattattatttcgcatcatgtgggtaaagtgtacaaactctacagagttaaaactaatcgattagccgtgctcgcggtcatgagcggcgtgtagatatgtattgagtatagacttgtatttattcttctaaatgctgaaatttaccattaaattatgttgaaatttgagaatgaactccttgctgccatgcatggcaatgaggtgtatatttatacatgattaatgactactttgatgcccaatatgtcaagtactagcttgctgaaatttttttgaaagcaaaatccgatttggaaatttttatgtaaataaaactcgctttatgctaaaaagatccatattatgccttccttgattatatgccttacatagttacatgtagagtgttaggcttgtcgtggtgcttgccagtatattatttctaataatgtactaactcttgctattggattaactatttgattgcaggtcttagacttagtcttttgagtgatgcgggtgatcgaatgcttcttctaggacttgaacttaatggggtaaacccctagtcggtgtgcttgaggattgggtagtcaagcttccgctgttctctgatatatttatttgg

SEQ ID NO: 44479 - DNA, 1554 bp, Oryza sativa
gatctagtttttgctagattgaggtggttggcgactctaggatcaccgcaaagcattaggtgctgcgatcgtggttgtcaacttgtcacaaaaagttgccaacacgattttttgacacctctttatagatttatcctgaaaaccttccgttttgcccacgagacgggtagttacctagaaatcggctttgctagccggtttagttatcaaaacccatcttggtctagtttttgctagattgaggtggttgatgactctaggatcaccgcaaggcattagcattaggtgctgcgatcgtggttgtcaacttgtcacaaaaagttgccaccacccactagagacaaaagaaacaccaaccaaacaattgagcaagaacaacatcatgcgaggtgatttggagattgacaaaaaaaaattaaggaagagcaaagggagatggggactgtgattttcgaggaggaaaagacggtgccactgtggcggagcacaagtgccggcgggatcgtcgggaatcacgcggtggctggccaaagttcttgccccgttcatgtcgtggttgctggccagcgagcaaagttgaaggagtcagatggaagggaagaagatgtggatggaggggtaatttcgtctaaaatggcattctagtgtttggtcactgtttaaaaatggaattttagcgaacacatctcccgaggatggcattttggtgaaacccaattctaataatggcataatcttaattttctagcctatggtggtctctctctctctggctcagaatcatgtagtatttgtgtttattgttgcttggttggactgtaggtcctggtgttctgacagcgccatcactttggatcttttgcctttcatcttccggtttctacttgccggccagcctagctatggaaaagtatggatttgttttactatggcagcttggctgttcactctaatcatgaggacggattgaacgcgttatacgacctcaatcgaagtaataactcttgtgagagatgtaatgttcattgttttcccttgcttttggtcatatactcaatgaccaggtggttgggttagaaagatacttgagaaaaaaatcgaagtttgtagacaaaatagaattggtgtgcaagctttagttgaaaatggtaaatgcaggctatagcatgggagaatttcaacttaatcattgtattttactttgactcactaaagagaagagaaggaacatttaataaataagtttgttcgcccggcgagaataaagaaatgtatttcattgttgtttcatttcatggaaggaagaagaacatcctgctatttacactggtggagaaaccatctttggtcggtcggacagatttcacaatagtcctggttgtattaaaaaccgggactaaaaatatctttagtcccggtttaaaatctcagaggtacttttttgatctttattcccggttggtgttaccaaccgggactaaaaatctatttatagtcccgattggtgttacaaaccgggaaaaaagatcgacatacactttactctcggttggt

SEQ ID NO: 44480 - DNA, 698 bp, Oryza sativa
tcgtgctcaagataggtggcaaccggccggcgagatgggcggggcatcgtgggggtggtggagaggttaaccggcggcgaattttcgtggggagagtggggaaaagggtggaggacgtggggcgacggggtcccacgaccggcgggctcgcgcgcggggtggaggaggtcggaaacggcggtgtcgtggggtggctcgggcggccctggcgattgcagccggccagccaaaggtaggaggaggagctgacaagtggggccttgggtcccacctgtcggggagagagagagagaggggaaaacgggcgagggaggtaaagtagacttgagggagagagagagccgagcgggccgagggagaaggccggcccgagagggagagaaaagggcgcgtgggccgcgggagggaaggaagacttgggccgaaaatggcccaaagagaggaagggggattttaattgtttttctttttattttaattgatgcaatgatctttgtgctattaaaactatttctcgagctccgaaaattcacggaaaatttcggagagtacattagggcacaaagaatattacaaaatattctcggccaataatttttaaagggaatttttaattccctcaataattcacttgattaagttgatttaacttttatttaatttctagaaaatgcattattaaatggggctgcaggaat

SEQ ID NO: 44481 - DNA, 705 bp, Oryza sativa
tcagtttgtcagaatcttgtctaaaattcccagttaagttccaggattatatttaatcagcaaagaatgtgatacaaactaatcagttctacctaatctttttgtatttgagtgttacctaaattcagaagttgttgttagtgctaaagctaaactcatagatcaatttttccccctctatgattgggaaattattctcgcaggtatctcatcgtaattgatgatataagggtagaacagtggtgtaatatggagcctgctttccctgccgatcatggtatcagcagcagaatagtggtgaccacgagtattcaatcaattgccaatgcatgcagcatcccaaaaggctacatctacaaaatggaaaaactagatgctgaatgctccaaaaacctgttcttcagaagcgcctctatcgaggaatgctcacctgacatagagagaggttcagaatcacttcggaagaaatgtgatggcctcccactggctctgatctgcgtaggccagttcttgcgcacagaaggagctctaacagggcatgcaattacatctgcagcaaactactccttccgtccaaaaaaaaaaaaaaaaaaacaaaccctgggttttcatgtccaactttgactatccgttttatatgaaatttttttataattcgtattttcattgttgttagatgataaaatatgattaatattttatgcg

SEQ ID NO: 44482 - DNA, 720 bp, Oryza sativa
gattccggcctccgtacggtccataacagtttgtccggaatgggattctggcccacccttcgtaaggtctggacgggattacggcctgcgtgcggtccacataagttgctccgttatcaaaactagtaatatgcccgtgctaaacgctacggtgtatgtctttaataatttttagaatttcatgttagaaaaagtttatatgatctatgcatttgaactttaattcaattcatatcctacataaaatatatttcatgtaaagtgcagtactatgatattgcgcgggcacaataaaactttacaagataaggcctacatgtaagtgataggagaaaaactaaaaagcgtagggcccacttgtctgccctattctccctctctgtctttccccccaaaaaaacagcagagcaagcagcggcgacagcgatggtgatggtgatggtagtggtgcaggctatatgcggtggatggcgatggcggtggtgcgggctatctgcggtgcattatccatttaagttgtatgatgaaccatatagaaaaataataatccagaacaattttgtaagcatatgtatccctttatataatacaaaccatatttacaatctcaaatgacagcctggtgaaaactgacgcatctagtgtgagatagtatgtagaagataatcacacggcattccatataaaaggtgatggcgtgctgtaccaaacaagaggtcg

SEQ ID NO: 44483 - DNA, 702 bp, Oryza sativa
ccgacgctattcacatttgaacatacgttttaactattcgtattattaaaacatatatatacaaatatgtaaaaatataagtgtaaagttacaataaaataaataataattacatatttttttaaaaaaaataagaggcataatcaaatctatatccagaagttgacggcgtcatcttttagaaccaggcgtcatcttttagaaccagacgtagtattttaaagatgttacatagatgaaaagaagatgacagattctagacaatggcagtaggtaaagagtggaatttcagaatgaaaaagggaaaagcattgctgatgcatgatgcaaagttgcattcagagatctggtgctaacttcggatggggacacaataatcgataccatattttgtcaaagattcaggctatgaaactttgacacgccaaaggaaagtaaacagatactcatatacatatcatttccagtggaacaaagagatttaatatttgttagatagaaaaagtgcaggtcagaatttgcctttttccaggttgtggaaagagcttcaattggataataccggtctcagcatgcagctcacaacaatggaagttatatttacttgagaaagtttcaacaacttctgcgttttcgagaaaaaaggaagtttcaagtttcaacaactcagaacataaacttatcagcacatttattagtttt

SEQ ID NO: 44484 - DNA, 620 bp, Oryza sativa
gtagccaccggacagaggcggcgccgacatccgcagcttcttggaggaatctgcctttgaagcttcaccatgctcccatggctggttcttgctgttgggggagctcaaaagggcccccattttgagcacttctcctttctatctgcaaattcccaaagagaacagtaatctcagcatggtgttaaagctcacaacttccttctctaacctgtggagaaatcaatatttcgcaacatgaatagcaagataatatgaaagggaaactgggtacgtcaaattcagaagataccacgaaaaaaaaatcccactttatccacgaaagcggcggcaatggatggatgattgggtacaagaggagacgagattgggaggaggaaggagatggggattaatcaagaacagcccaagtgtactacaggttcaactggatgcgacaatatcgtccaggtttaacgtcgtttgcatcaaacaataacatccaattgcaattgaattagcatcgagatctctctctttgctcctaatcaccaccccaagattcgattccgaacaaaccccagtaggcggttcgtcagaagaatcttccgaacatcaaagaacaccacctcctcacccaacaa

SEQ ID NO: 44485 - DNA, 617 bp, Oryza sativa
ctgcaccccgagtatagccatgttgttaacacgacaagcggctggacgggcgaaccgggtttacaacggcgaattgcctcctcgggtaaacacccacaaagctgacgacgatgtagggccttcgtgaaaacgaattgcgcggacaaaagtgaagcttgcccctaggaagcgaagggttcctgttcgtcggactccgacgccgacgacgaggacgatgccgaagaacgcgacggcgaggaggaggaagaggaggaggccatggccgataaggccgtgaacgaggcgatcgaagaccgcgtcgacacccctagctacactcctaccccaagtcccggtcacaacgagactggggtggagtcgaacagctcccccgttcgacggaaggatttggaaggagcgaaggctctagttgcgttctcctcgggcacggtggcgaagggaggtccggtgaagaaaagaaatctcccaaaaaaaaggaaaaaagggggaaaccctttccggtttcgggaaaccaattttccgggccccccccgcgtttcagcgacgatgagtcttctgacgagactccgacctcgcctgctggccgcagtttggacctctcaactgctccccttgct

SEQ ID NO: 44486 - DNA, 520 bp, Oryza sativa
cttgtgggttgaggatcaccgtatgcccagaccaagctcactgacatgggaagaacgatggtcgacaatacttttccatatattccttctgaaaacggctgaggtggcgcacatgaatgtattatttctgaaaggtggcgcacttgggccttccttgagttctcaaaaaaaagaaaaaggtgcaaacacgtcgtattattttttggaggaaaatacattgtattctgaaatgaagtaaaacaggtcgcacgagttctaacacgtgtatatatggtacaacacacatgtatccatattaccttgtaagtcgtatgtaataaaatcaatttcttgctacagtttggaaaggtacataatatagatgataccctgtgtgttgtttgcatggacttttagtaatataaagcaatacaagttgtatatgtaagatgcctgcgaaagggcatgtagtctagtggttgcagtgacttgcgttgcaccgcaaggtccttagttcaaatctccataggagagaattatt

SEQ ID NO: 44487 - DNA, 551 bp, Oryza sativa
attatagtaaattgtgtttattgctaatttgtctctgattctctagaaatacaattattatgtaatggaggcagcagttgattaataaaacaagtaacacttccaaatctcttatatttatggataaatcttaagcctcaaaatcttttatatttatagacgacgggagtacttgactctttcttttttcctttcatagtgttggtgatggagctgcaactttgatgtataaaatattttcatcaacaaaagggtctgatgacataaattttagacagctaaatgtagctttgaacatatgctagtacaatatcgaatgttattcctggcatatattatagtagcggtaaataatattactcaagtcaaattttatttccgacaattaatcgcccacatggtgtagtaaatttccagctatggtcgctagtaaaatggactgatgaaatattccatagtgacggcaacaaatggacacaacaattaagccgaaaaagagacaattgcgtagaacaccacccagcacctctgtctgaagtctctaattaacc

SEQ ID NO: 44488 - DNA, 757 bp, Oryza sativa
  unsure (1)..(757): unsure at all n locations
tttaattgatttttatagcacaaaatatgcttccaaagtgaatttttaagtaaaagaatanaatcagatcattttggatgtgtctgaaatctgaatttacggctgaaaacaagctcttaatgattctctgaacttgaacatgtccctgaaactgaataaaatttatgtaaagaatattgaggacaaatttatcaggtgtatacaatatgattgctctatttagagatttgtgccatttcagcaccctgcctgtatatctctaaaatctggctactacattatgcagagacaaattagtaataatctgatataaagtaagaggacaaaccagaacaaattatcttccacagatatcttttatgcacatgaaaagaaaagggtttgtcaaattaactcctttttgccacaggttccagtattgtctattaaatctaatgtgcttctaattaatcctatatacacaatatgctaaattttcagtattttaagcactgtgctaccatttgcagaaaaataattggttaataaactaacagtacactgctattaccagctgttctgataagtggtaattagttgggtgttgtaagtatgcaggtagaaagtgataatagaaaagtgtgccaatcaaagagctgttgtgggttcccagtgacaaaaaagatgagtctttagaaggacttctagagcaaagtgttacagcaaggtttgttgaaaatttaggagttggcacaagaatggaagagggctgcaggaa

SEQ ID NO: 44489 - DNA, 812 bp, Oryza sativa
aaacgactccacttaaaagggcatgcaacacaaggatatcctaccagcttgccatatatacattaaaagagagtaagagacacttatacagttatcacctactactataaaaaataagcagatcatacgatttacttggcaattagtcactgtgcctctaacagtggaaatataacagagtatttggccatagctggaaaagcaaagaagactctaaggtgggcaaaactgagaagtggcaaaagatggaagtgaatcttacttagtgccaacagacaaattttcccattgaaaaagaaaagtaataaactttttaccctgatttagaatgcagctatgatcacatggccatttgagagtatgaaataagctttcaatcttaactcagaacaccatataggattatacagacatttacgaatagcaggtggcaataaatttagctgctaaggtgcttttgttaacatttgtcaaatgtaaacaggtttgattaactactgttaatcatgacataatgcaagaataagttgctgcaaagatagaagtccatttgttcaattttcatttccacgcgcagcgcttgctgaggactactccttggcacaggacaagcttcaaggaacaaaaacactctaattttctgctctcatcttacttcgataaggcatttttttccttaaataaacaccgcacacaagcaattgcactaaaaatggctctgtcagaccaaatgccgccacatatatattccatccgattatacagaacacaataagtgctacttcctccgtttcacaatgtaagtcattcta

SEQ ID NO: 44490 - DNA, 2707 bp, Oryza sativa
taaacagctatggggactccactccacaagcaactcgacccgaacaaagcctaatcctcctgatcatcaccttcactgaagtactcctcctctgatgaatgaatattgtaagaatgagcatatgacatactcaataagccacacagcaaatatgcaagtgcacaggataacaaaggatggcataataaagctcatttgcataaacggcatttaataaacatttgagagaatagtaaaacagtggagtaatttaagcaatattaaataaacaccatacaacacacccgtgttgcataggcccaaccacatttgaacaaccaaccccggttgtacaaaccaaacctccataccaggaatataccattccaaaccaggagtcaatttaataatcacagtattatcattattaatgagtaatgtgagactaatcacgaaaaatattgttagacccacccttaaccacgggcacggctattcgaatagttctactttggccagagatgtaccactgtacccacaagacacaactccacaacatgtcaccatgcgcctcaggaattcttctatggcggcgacccacaatattctcgacataggattcggatacacaatgaaacctcacaaactagatgaacaacacattgcccgtgcaacgcaccttttcactacggattcacaaaaccacatgctttgataggttgatccacttgactacgcaaaagtggatctattgccccctcaattccctgcaaggaaaagcaagaacaatctatggcagaactcccaattcatctctctagtttggcggcagcaacacaaaacctaggagaagaacaagagcaatcatgctgcaattttcattagaataaacatggtctgaccttggcgggtcatgtacaaaggcatatataaccatttcatggattagaaactaactaggaatcaaatacaacatagtatggaaacttttctgcaacaccgtcagtttgtttcggctcttgcggtggaaccaaaaggtttttgtttccgtgggcctctccatcacatgggacatgacgttagctttctaacaagtgctcgcacatccaaaacggactccaaacgagagagaaacaagcattttagtccaggtatatccaggcggcccaaaccaagtccaaactgaatcttttcttccttatcttcaaactcctcatttcagaaggcttcaattcatggggaacttgtagatggattccatcccaacccaagatgggcattaggatagtagaactccatccaagcatttcgtgcaaggcccatgttcaacatcaatagagctgctcgtgcatcaatcagtctgcttgtgcaacatgccttcaacttgcaattgttggtgatagagaactctgaatgatgtgcctctacctccttctgaacccacatgcacgccaatggttcatatatctcatgtctgataaagtgacaaatattatgtagcatcaagttctcatatatttctcggatagacttatggagaaacgagttcaccttattttctaatccgcatgcacaagtaatccccgccatttatctttcacatattgtatactctccgtatatatccgcagcaacccacaggaaatctagttccttatatgattagacgcaaagaaaaaaactataacctataattatctgctttgggtattgcatccaagattagaatggccaggaacagccatcacacctacaattccaatcatttcaaactagtacctacacattccagaacaaactttgtatgtgcaagctataagactaaactgacaataaatccaaattgactccaaagtgtccatcctcaaatttatttttgataatgatctccatgacaaacttgatatgcgctccaagattcatagaaccctaaaaaggcagtcaatctcagacaaacaaccttgaaatttctaactttcactggtggaaaaaccatctttggtcggtgtaacgccccgattttcgttcggaataaaaatcaattaataatgcattttctagaaattaaataaaagttaaatcaacttaatcaagtgaattattgggagaattaaaattttccctttaaaaatcattggccgggaatattttgtaatattctttgtgccctaatgtactctccggaattttccgtgaattttcggagctcgagaaatagttttaatagcacaaagatcattgcatcaattaaaataaaaagaaaacaaataaaatcctccttcctctctttgggccattttcggcccaaatacctccccctccttcctctcccgcggcccgcgcgcctcctccctctctcgggccggctcccttctcccctggcccgctcgcaaaagtctattttgcgtccctccttctctcccttcgccgacaggtgggaccggcggtcccacccgtcagctcctcctcctacctctcgccggccaaccccaaccgccattgccgtccacgtcgccacaaaatccagtgccctcccgcacccgagctcgcatccaacgacgtgggcacgatcgcctccacgtcctccaccattttccccgctcgtcccacaaaaaccggcgccggccgagccgccatcaccccacgtcggcatcccacttccccggcggttgccgccccgactccgcctctcccgggctcgattcggccctccctcccctataaaaac

SEQ ID NO: 44491 - DNA, 693 bp, Oryza sativa
gccgccgtcctcctgcatctctcctcgagctcgaacaaaaaaccaccgcggacgctatcatctccaccacgtccctctctttctccgcctcctctcgtcggcgaccaaagtaaaaaaaaaaaaaatacagaagcaccaccgcgcgtctccacgtcccagaagaaaccgcatcagcctgcgtcgccggaattggctaactcgaagaaccttagcttctagccgccagcatcatcaatcatgaaattcgccaccacagtgaccactcgttctcaattgaaggtgccagcctcttctacgtgttcttccctcaccttccccgccgagatagctgtcagaactctccagcactgccccatcgccttcctgctctgttcagccgccgtcggcctgcacggtgtccggccgctccatgcccaaccacggccaccaccacgctcccctccccttgaaacacaacgacccccaccaccctcaccgaggatcatcagagccgccgccgccatggacaacaccacctttctggctttctccattgctcgttgtcgtcagcttcgccgccgtgtgcccatgaggcaaatttttcgtccgaaggaggtacgtagctagatgataaacagaactgtttatttgacgcgcgccacgggcgatgatggacgaaatcggactgtgaaatacaaatttatggacgacgat

SEQ ID NO: 44492 - DNA, 1636 bp, Oryza sativa
  unsure (1)..(1636): unsure at all n locations
ttgttgtctcattaagtaccaccgtcgtcgctgccaccatatctttgttgttgtcgggatataaaaaaaggtcagaagtttctgttggtcaggtttagagttgtaaattgctagggtttctatcgtgtgattctgttttgtacgtgaggaagaaggaaggggacaagagttttgtagattggattcggtttccatctttccatacgtgatgaaggaggaaggggacgagagttttgtacttgtagattggattcagtttccacgaagtgtgggggcgagtcggtctctgtactacgtctaaaggctgaaccctcactcagccgattcctctccaccaggaatgtccgattcttatctaagtttgagtcacattgtccctaaattttgagtcgtgtcaaacatctaggtgagaaatatgagtcaaaatctgtttgcaaaaattaaactacgggacaagagcattccagttttgcatagtcttaattttagggtttacacttttacatttgagtccctatattttctatatgtatgtttgagtccccatgatctcaaataatttgaggtccttgagtttattttgctaaaaagataaaaaaagaaaaaaaagcagaaatgtgcttaaaaagtagtaaataaaagttgtgcaaaaaagagtgaaagcagaaaggtggaaaaaaagataagcagtaaaaaaaagaaagaaaagaaaaattcatttgtgatatatgatattgctttcatatatcagagttgtgcttgagttgtttcaaatataatctagtagtatcatttttgtccagattttcgtctctagtatacgttctagcctaggaccagcatggtactgactttaaacgattattcaacttttcattatctgatctgagcatttcctattcttttgttacatatttaagcctaccagatctcgctagattttattacagcgtacacatgtgtttgccaacacatcgttacatctaacctccattgggtcttggttgagtcaatgtatgtcatcatttcggttgatgtaagaacttgtaatgttcttacctctcctttcgcaactgacctctctttttccacgtgcacgattttcaaactactaaaatatgtttttgtaaatattttctaggcnaaaaagaatttacaaaaatcatattaatcatttttcaaaaaaatgcttaattaatcttgtgctaatggactgctccattttgcgtgcgttgaggatttgttcccacaatctagaatgaacacagcctaagagctttgctaaaagtttgagagtgtgtagcttaccacctagtagttgataggagtgtacataatttgttatgtttcttgttttctattaacagtggcagggatatgcaagaccattggacatgacattgcttaatatcgacatctttatcaagacatgagaagtgatcaacaagattttaatgaggtacatgatggtgttctatctaagatcaggtctacactatcttattttgaaggaaagtatgatccacatgcttacattaaataggagctagcggttgataaagaatttcaaaagcttaacttgtctgagaaacatatagttatgtattaaaaatgcttcttattattagaaacatat

SEQ ID NO: 44493 - DNA, 1751 bp, Oryza sativa
ggtgataacttgactgagaaggcaccgaatccgttgagaggtttactggtatataattaaagcgctcacacattagctaccgaggaagatattcctatgctctatcttatatcgattgattggttaaactattgcaattgcctcattcatcctattatcatattaacaaagtacggagattgaaaaaagattagccacctagtttttttggtcagaacgaaatgcagtcaactctggtgaaactcagaagtcggtaacatagctatgtgtggttttgttcactactagaaaaaccatttttccaggtgatgatatatttttgccaaacggataggcctctcggaaccaaatgatcgcctatgaaaatgtaaatgggggttgagactgtcatccgcctacgaaaatagatttttgcaggcggatgatataagctgccatctgcggtaatcattttcataggcggactagataaggcatccgctaatcgcagggcggatgccttatgttgtccgcctccgaaaatcgtgcctgtaactcaccctaaaataatatctaagtcatcttatcctttcctccaccatcatcctctccatcaccatcatcctctccaccactcatttctctccaccacccttctctctctcgcgcacggctcagagggcaaaggcggcgtcggcttcgaggaggagtggctgggggaggggcgccgttgacggtggctccgacgaacagtggcgacggcaacagcgacggcacggccagaggagggagggtggcagcgggtgagtggtgtttttttttgttcgccgataacattttcataggcgggtggctatagcgcatgcgaagatggagatgccgcctgcgaaaatcatttttgcaggcgggacaaatgtccgcctgcaaaaatcatgtattttcacaggccttgaagtgcgggggaagtagatggccacctggaaaattcgttttggcctgtttatgttttttctagtagtggttgtgggctaaatttctgaattggctgaatcttttgggagacctgaacttactagggacatcatgcttaaattttggcagaaaccagatgaccctaacctgaaggttaacgcactgatggtgattttgatgataacacccgctcaaggtggctggggttttgttgttagggatactgatggccaggtggttgaagcagatgctggaatggaagcttatcgcacggctcttttttatgcttccgaagttggcaggggcgtgttaccttaaggtaatggcctacaaagctctatgcttggggcgttatttagagaggctaaatatctcgtatcaacatgatttatagaagtataaaggcttcactcctaaagaactgatctttgatcggatgccaaaaatcatatttttagccacgattcaatagctgttagctcatgtcaggctatatttagtccaggttggtgttaccaacccggactaaagatgcctctagggttagtttaaaaagaaaacatcgccatctaagttagatgtgtgtagtaggtaggatggtaacgcacgtaagggttgagatgagagatctttagttcgaattctacatcccacacatttttttgacttaatatgcatctttagtcccgattatttcaaccgggactaaagatgggcggattatgcatccaaaaaacggttgcgaaccaggactaaagtccctttctccacagtgcttactgtaatgctagattatgttt

SEQ ID NO: 44494 - DNA, 734 bp, Oryza sativa
agacagtaaagagggtgggtgaaggaaaaaataattcttccgcctccatcaattctccattttctttgccaggcatagtctcagaatatttcgttatttttaaatggacaacaattgttaggaaagtatcttatttccggtcagcattatgctatatagtcacgcttctaaaatttttttaaaaaaagacctctgtggtactgatatatggtataaacaggcatataacacctgaataattgaggcgaggcaatcgtgggagagaggcaattctgtacccctgtgcccttatcgttttgaaaagaagcaatttttgtagggtggcaataacatacagcactcgttataactcagtgatacttcaggcaagaaaaccaataggagaaattgtacatcaagtaggagacattaactgtacaacaaattgtacaccagtaaagtatataaccaattgctaaagggacgttaaccgtataactaataggagaaattgtggttacctttggttcctgtccgaactgtttgggaggacccaaagggtaattgggatttgaagaatgaagcatggtgtcgaccaactctggaatttcagttgttcgctaatacttctgctaggtgatggcgatggtccataaaacaaatgctatgccacatacactcaaacaatattaccatttgacaccacttaagaaaaaaaaaacgaagggggaggagaactgcgtcttacactgagc

SEQ ID NO: 44495 - DNA, 720 bp, Oryza sativa
tttgaccgattagtctctcctgcatgcatgcatatatgtatgtatatactttatatacatacgtatgtatataaagtatatatgtgtatatataggtaaattaactggtgctacatagagtatgggttccaaaattcaaattgagaatatacctaatttgaatgagtatgaaagttttttaaatgtttagatatgaacattaacttctttactaacaagttttttagattttggttctaggtatataacatttaaacatataattcgttaggtatgtaataatgaattgtgaaataaagttgagtttgagttattttgttgttaggtatttgtatgaatcaaattcatatacctaatatacctaggtatatactcacaatttaaaaatttttaaaaatttgagagaatttgtgtgttttataccttggagcccgagcaccatggagtcccatatgggtatcatatatatatatatatatatatatatatatatatatatatatatatatatatatatatatatatatatatatatatatatatatatatatataaagtatatatatatgtgtgtgtatatatattgtatatatatatttttatgtaaaaaaatatgtacatatatacaaaattcaaaatatatatatacaaattttgtatatgtacatatgaaaaacacatatacaaactttgtatacgtgtatataaaggttttatacg

SEQ ID NO: 44496 - DNA, 708 bp, Oryza sativa
tgcatccccattgatctaggttggcaaatcttactacactatttcgttccctcgtaagtattaagttcttttagggcaagtactataaggttctaagcacaaactccaaagtgccatgtatgcttaaataatgatgtggaggagagaaaagaagagaaaggggaggagccacccctcatgcaaggggcaatctccaaacaaacttcaagaaacaagagaaaataagagggctgattggtggcaagtgtattgggactagtgtattaaatgcaatgcatttacataagttaattttaatttttggatggatgatgtggataaaattggaggtgaccaccacatctattataaaacttgcccttatggaacatatttttagatttaattccaatgataggcttgaagatattttgcaattttttacttattgaagttgatgtgatggagctaacatcagctggaagtcaccttgaaaatggcacatttgtgtcttgcccattaactgtcaagtatggcacaattattagtgtgttttcccctttctgcggtgcagggagacgcatatacatatgtatccctctattctctggatcaaagagtgcagaggtccttcaattgcattctaaggggatagggttcataattgaatcgtttagtgatgtttgcaatctcacaaactcagatgtcgttagcctctctagaagacaa

SEQ ID NO: 44497 - DNA, 662 bp, Oryza sativa
aaattaatgggttacaaaggcttaatttggtaggatcatttcttgaatggctctgagacggcagctgggttatgggagtccaagctcgtatatgcagcagcgtctgttacaggtaccgatttgaccgatttgacagtaccactaacggattaatagggattctggatgtcaaagatttgtttgacccactcgtaattttggtcttaataagtagcaatttaaggtaacaagaaatttaaactcgaaaacaattcaggtaactgaaatgcagcaaatattaaattagtatacctaactgatgatcacaagagtcacatttcatcattggtatattattgtcgaacactattccatgaaactcagtgctacatcatatcttactccatttttctatataatcggtacccacgaagaaacatttacaataaaccaaaacatacaagaagtcacatcatcaataattttaaactatcaaatcacattagtaaaaaataataaccgtttcatcgagaagctacttatccatctaattcaatcatttattagctatccattcacttccctttgcttgacctcatagtcgcatatagcgttattacatatgttgtatataacattgtatttttcccttccaagtactggaagataaagctaattttttt

SEQ ID NO: 44498 - DNA, 1308 bp, Oryza sativa
  unsure (1)..(1308): unsure at all n locations
tattaatatctggtccctatcatacacacattacgtcctagagtctgtgctgcagctggctatagatctatagctcgttgctcttctctcttcctttatctcgtaaaatatctttatagctggctatagcctgctattgtacctgctctaagggcttcttcgaattgtaggaactttagaggatccatttcctataggatttaagtatttttcacttattcggtttggaggaattgggcatgtgaaaaattggaggatttttccttcgcctgtgatttcatataattccatagggaactgaatgttggacgtccttttcattttcctatgtgccgaacaatatgttgtggagatgcatttgatagtgcaaacaatatgttgtggagatgcatttgatagtgcagtgatgtgcggtttaacccggaggtctctattcaatcccctaacacccctataatttcttcttagaaattgtttggagagatgtctctctctccaatctcttttttttttggaataatgtgttgcgtatttttcatgtgttttnnatcctatatttaccatatgtaccctagcctatttctacctattcctatgatttttgcattcctatgttccaaataagccctaagactgtaagtggggtgggccacgccgctaacccgctgggctaacccgccccaccaacccgctagcctacttaggctagcccgctgaagctgatgtgggtttatgcagcaaacccacaccgtccagtgacgctgcaaccaaggtgcatgactgatgcacgcaaaaaaaaatttcatcccgattagtttgttgcttccatggcatccaccatgaagacgtcgagccggccggtcttcgccaggtgccaccgctaatcactgcaaaggtacacgcccatcgtcctattccccaatggcaggttgtggcaccttgcgccgtccacaacctgctcggcacatgcgtcgctggcgaagcagtggacgataaagcttcctctaacacagttgacatcgtcgacgacgtcgaggaccacggcgaatgttggagcaggaacaaacctcgacccctaagcagtatgtcttcaagctaataagaggcttcccgccatggcaccgttgtaggccatcatgatcaattcattatggcgtgatgtgggctaacgtgcgatcaaatgcgaggactaggtgagcagccgagcagccatggcattgaccgatcgtcatacatgatgcagactaacttgtgggtttcaacgggaatccacaataacccagcggttcatacgtgggttcatgcatt

SEQ ID NO: 44499 - DNA, 509 bp, Oryza sativa
ccagtactctatcaaattagactcaactgcatgttgtattttttttatttcttcattgaagtttttcatgtgcaaaatgttagaccaaagcaaggtatatagtaagaaatgtgtatgattactactatgatagtgcagtggcaagcggtgtgtggtttcaaccccgaggtcccgtgtttaatccccaacgtgctcacaatttattcttaaaaatgtttggagggacgtctctccctccaaatctccttttttttatgattactactatgaaatttaataatttactaacaaatgtggatttttccctatatacagtagatttttgggacacaattatttttccaccagcacgatgagcatgtctatatgccctatatttttattataaagtgggaaaaaaaaggaatcctctgtgcagagctcaaatggatttttcatgtgcgaaactctgaattacgattcatgtcaggcacgttttttggtgtgctactatgaaatttaataattta

SEQ ID NO: 44500 - DNA, 1111 bp, Oryza sativa
ttgatatggatttggttttccgcacgctttttactgttttccatgagtgatgtattaattatgataacataaagtcacccttaaatatataattttattacaataccgtatgattttttattttcaagatatgccggcttatccattaaagatgtatatcttagaaactatacggtatgcgtatatgtgtttaaggggtgagtatatgtgttatgattgttcgtgtttgtagcatatttctaaaataatacacccatttttcaataatcaaataatataaaaataagatcacacgactaaaacatttgaccatttaaattttctggagaagatgggacgtctgatttgaagtttcttccattttcgtcacttcccaaatcccccgaaaaaaaaatctccagctgccaaagtcctccgtcactggatcgcatgactcgcgtctcgtcgccccttccttccgcttcagagttgggctgtgtttagttctacactaaaattataagtttgaagaaattgaaatgatatgatagaaaagttgaaagtttgtgtgcaggaaaatttgatgtgacgaaaaagttagaagtttgtgtaggaaagttagaatctacacagggcaggcacacacaacccacatcaaacacggcggccacctgctgccgcacaagaccacaaagcccccaaccacgacaccgcaccacatccccgccgcacaccgccagtacaggtgtccggtggtgtcccctccctcctccggtcagccatccccccacgcacgcacccgccaactacttgacggcttgacgcccgacctttcccccacaacgaccaactactttgcagccttgcaggcagcgcgagggagggaggagaggcgggggccattgccagccgctccagcaacggcgggcgccaccacaatctccctgtccctgcagggggtagggggggtttggatcacagcgaggataatcggagggtgtcggggcctgatccgtttgctgccgagatctcacaagagcagcgagaaacaccccatggtgagcctcctcacctgattctttttaaattggtttgttcgatgggggaaggcttttcatttgtcctagtgctg

SEQ ID NO: 44501 - DNA, 1338 bp, Oryza sativa
gaaagtgcatgattttcacacgagaggcacacaccgttactccctattattcctgaatggcaacggaggcatgcatgctgcacgcacggagtttatactaggccggttgtctaaatggtggagggacacgtggcagtaaataaacaggtaaaagatggaccaagctggcaaggagattagccagctttagatatataaactagaaaacacagcgcggcaaaagccgcgccttacggtgattgttctatttatttgaacattttctcatggccaacaggtggaaacagagatatatagtttagggaagttgaacaaggcacttgacaaaaaatatataaacattattgtcactaaagaagaaaaaaaattcaacacactccaaatttgtttggtactttttatttcaaattccaaacatacgtaatttttggaggcacgcgtagcatatattcagtaaagaaagtttcatataaactaactattcaataaaattcaagggtctatgcattttctttcttgccttctttgctggcaagagttttctgctaggaacttgatacatattggaccagtttagctagagatctggtgtgctctcaataacactaagcccaacttccttaacatcaacaacattatagcgatcctctttgcagagaaacttaagagcaacctggtagccatcccagaaagaaaaatccttcactttctctcacctctccaagatattcagcaattataggctttggatttatcttcattgactttagcctgacagagtttcggagaatataaagtgccagctccagttgatctttctgaccataaaatcctgtaatgtagatcattttaagatgggaatgagggtgtgaaggaagactcctcaactcagcatgatcctcactataaaaagatccagtaagagtcacccaaagaaaaacaatagtcccacgtttgctatcatttgatagaactttcacatctctgaaaacaaagaatggacttcggcagccattgatcatttctattttgcaaattaatgttaaaccaagtgatggtgcatgctagtctgattattaaatctttattctttgatgtttgcaatatggtagttaggaatggaactaaagacttagaatataggtggcggcatagtgatgactgatattgcaataaaatcatatgatcagccttgagcagctctcaatgttgacattgaccaaaattaacttattttattatcataaggatccaaagaagaatgacaatatggcatggcatacaaagggattctagtgaaggccaatcgacgatattgactaagatgatatgatacaa

SEQ ID NO: 44502 - DNA, 1230 bp, Oryza sativa
tccaacagattctagtacataacaacataacacttgtgcagcacctctcagtaaaaacctgatattgtaaaacggcaaatttaagtagagataaaagtcaaaaactaatttgtaaccacaacacttcacacatgagctgacacatacaatgcaagaactgtcaaggaagatggataaacaacagaatataattaggatatggtctcgattctgttggcatttaactactatccacagattatacagcaaagaaggcatatacacattatgtgttgatctgttactctcttagcattaaaaataaaccactacacatgcattaaaatgtgacatgcatatacctggtttgaagaacacggatagaccaaaatatattgcgtctatatcatcatctcctttttagctcgctgtaatgcccttctcctgaacgccaccaccgacctcctcgctcccatccaacgacgaggaggaggggccagcggcagggacgaagctaagtagtgttatggggttcctaggcacccggttgcaaaagaaaaattagtgcttaataccccttagtaaccatatgtgcaccccctcagctaagcttggtgtacccccacgctagaaatcaggccattgaagcacgaacagcctacaaccataaccacgataggagcccagttcagtcctgcttgcctcatcagcgtgaggacgtacgcacacgcacgcctcttctctttttttttctttctggcgactcgctcttcctctttgtccctaccagtgccgacgcctcttgccgctaatgccacaattaatcctcgcctcttaccgccaatgccataattaatcctggatgactaattaatcgacgcctcagcaagatgatgggatgtcaccgaggctgggcacaggcaattccttgcctcctctatcttctgttctatttgctaattctttaccagtcaatggattcatttgaatagctccttcacttttcaattacgcgataatagctatctttttttccagatcgaatggttatggttagtgcagttttttatctctgcttctttgttagtgcattccactgttattgctgatgataacaacacgcaaaaaaattataatttactataatattgttttaaaaaatatataaattactccctccgtttaaaaatataaaaagttttagagttggacacgattattaagaaagtttggatgagtagtgaatgtagg

SEQ ID NO: 44503 - DNA, 1794 bp, Oryza sativa
  unsure (1)..(1794): unsure at all n locations
ctagcagcaaaaatttaaagcaattgttccaaatttaaaataccctcattaaagtacatccaatcattaacatttaaaaaaaatagggcgagggggcgaagcatctagtccctattattaattttggtaattaatgataagtgctaattatagactaactattctatttgagtgatataattgagttagaaccacatgatgtatatgccaatgatgtatatgccaaggatgattaccatggattaaaatttatggcacaaagaaattaatggaataaggtggtaaatctagcctgattattttaatcgatcgaggcgttgggcgattgaatttttgctaagtttatttctaactttgacatactatcaagaggggtagtgactttggtaaataagtgatcaaaataacacagtaggtcatttgcatgagggcttggttcgataattttattcatcttattttttgtccaaggtcggtttgaccatgggctccagggcagtctgactggcgtgccctagtctttctgaccaggctgggctcggtctaaccgggcacctggcaagttggttggatggccacgtcttggggatccaaagtcaccagagccgatggcagtctgaccgagccggggccagtcagattggagccaccaacagtctgaccggcaagtattcccacgtgcattcaatgcacaacaacggctagttttctaggcgttgccctagaggccaatctgaccgatcaccccttggcagtctcactggcaggcatctgagagttagggtattggctccaacgactagttttgatgggtggggtataaatactcccccaccagcaacgaggggcctctcttggcacactattcacttgcatatactcaatacattcactctttgaccaaattcgttgtgattgtttgagagtagtttgattcaagacaagtgcattgcattattgtttaagctaatgtgatacttgatcatctctaagccgggttgttattacttttggaggttgccgcctcctagacgatgttggtatttgctacggtcacaggtacatccgcaagtgcacggatacgctatagcatgctatccatgagcatttccaagggtatatatttatatttccgaagagaaagcggcgacgcaaaaatatagtttatacatcattaatcaatttataattaactcatcatagtctaaacatgggttagaataaatatgattgagtgtattatgtattatgccttgtaagtaaatacataagagaattacgatacaatgtctagtatacacttaatacataatacataagtcttacaaggcntaaagggtccttgggacagacctccacgaggtcagtaaaattcactcataccctctattttttgcctttttcaccctatacttgtaggattaggtaaccaattgtggtgcaatgtctctcgtatgaatcctgtctctagttagttgcttgtcaatctcttccttgatgcacaacgtactcttgatcaagtgacccacatgatagtacaagatttatttttcatcataagattttaatgcaaaagtaattagtcagtatgcccccagcgttttttatacaactaaaataataaaaatgattaatcctattgaagtataaaaataagtaacccatagtacgctcacgataagatgaacatacatggttgtcttataaccacacttccgaaagaacatacgcgtggtcataaacatggttgcttaaggtaaaagtataactgaccgctgcacagggctgcaggaa

SEQ ID NO: 44504 - DNA, 715 bp, Oryza sativa
ccaccttgcttattctaggagagggtgacctccttaaaagggaggatgccctcctagccacttgaagcatgtgtggtggagagaagaggggaaacacacgcacgcgctcgatggcctgccctggcagggcagggcaggcggcaccgtgcacgacgtacgcgttgaatggtccacaaaattggctcctcacccttgcgcagatgcagcttccttttgtagttttgttttgctgcgggaaattcggatttgttttgttttggaaacattccgaaaaatccggtgcgtgaaaacggcatggagttcggataggttacgcacgacttatccggttcggtttacgcgggcgccctgatcaggcgatctatctctatataaaccgagccgccgccttcacgcaacacacgcgaaaccaatctagggtttgcctcctactctgtactgcgccgtcgctcgtagactactccatcccgctcaccggcgtgcaccggcgatcgggagagcaggtctccgaaacctctaccttcgacgtcctacaccgggagaaggcggcaataaggtttttgggaagcgcttcgcgcgactgctccctgtttgtccgcgacggctcgccttcctctccgctcgcgtgcttcgcgtcttcgtcgacgctcgcaaccgcgagtagttcctgccgagcaaccggtctttccaccacctcggtacgtgttcgacatgt

SEQ ID NO: 44505 - DNA, 645 bp, Oryza sativa
tgcttagaaataaacacattcaataactataaatgtaaatgcatctgaaaaattgaagcactaaaaatgaacttattctctttttttcggcctgagagacctcaaatagacttatttccggcccttgccggtaggcccacggccttttgcgcacgcacgggcgcacttcccctccccaggccacaacctgggcttgggccgaaaaagtgacctcactctcgatccctcttgggccgatttcgacccggccgacgccggccgtccgatctctagggttttgatcggacagccgagcgtcgatatcggcgaaacaaaaccccctccctctcctcagccgccgaaactctagcccatttccttccctccatctctctcttcgccgccctcccctctgcgcccccgagcggcggctacggcgccccgcgagcggcggcggcggcggcgccctcccccaccaccggcggcggatctagcgggaggggcccccaccatcgacggcggcggcatcctcctcccgagagcggcgacgccctcccccaccaccgacggctgcggcggcggcaccctcccccaccaccggtggcggatctagcgggaggggagacggcggcaacgctctcccctccaccggatccagtaggaggg

SEQ ID NO: 44506 - DNA, 2037 bp, Oryza sativa
agtttagtatgtaaaacaattttcccattagaatgtagatctaaggagttcggtaagtggtcacctagttggaagggtccttatcggatattttgaatcattcgagggaatgcatattttattgaaactttacgaggagaacggtttcaaagagtgatcaatgggaaatatttgaagaaatttttcctgagtatctggtaagatgcttaggaggtaataaggccagtaattagattatcaccctaagatcacgtgttctatgtttttcggctcacaattcgacaaaaggcagggtggcatgtcttaccgcccaaatttggcacctagaaaagaaatatggaaaatatggctgaatttggaacatatcgggtctcttccgtgatgacggtctgaccgccaccataaggccggtctgaccgacggcatggggctggtctaaccggcaacatgtggccggtcagactggccgagtctgacttcgagtctaattttatcgagtctcgggtttccccaattttattgggtctcgggtttccttgtaattggtctctacccccgagtaagacatggagaaggccctgtacgagataagaccaacccatttataaaggctatgattggtgcaattgagcacacaatctacttccaacacttttagccaattgaattgctttttcaatatggcatttactttttgcctagtttctagtctagttcatccatctttgttgatttgtatagtaaatcgtctgcctttgttgtaggagtgtgaatcatctttataggtttgtcccaataaccttccattccacccacgagataggtgtttatctctattttatctaaatgagctccgctagccggttttgatttacaaaactcatcttaatttggatttgttcagatcaaggtggttggcgactcccaaattacagcaaagcattggttgtccggtcatgattggcgatgtgatcaaaaaagtttccaataagaccatactcgtctgaacatgcccattaaaactatgacaaaaagtaagatacatatagggtggagctgatgtgaataggcgcctgatcttctcacatagatactattggtttgatttatctacgtgaagacgtgtcatgagttcttcccattgattgtttttcttctgttgttcatcgagtgatacaattaaattaagcacatttgggatgaaattacatggagaggtctagtgcgtactatataactagctaggaccccatgcattgccgcaggcatatgatgaaattagaagttatttcaatcttttgccaatcaatgaaatattctttatacatgtatcgattgttacacgggtttatatatacatgacctctaatcgtttacttatctacctaaagtgggcataactcaatcatcataacataatggaggcattgaatttgtgagagaaccatttcctccattagctaattaaagaggctaacagagcatgcatactcaattcacttcaaatccactgaaagatgtacttgcagaatatggatgaacaaattccttatacttggtagcaccaatagaaaaatctcttcatagaagcggcagcaccagcttaatgaaatacgtatttatcctactcactaattggtgagctgaaataatagacctggaggctatcaaaatataatatacccaagcaagtacattggtgtaaaatcaaaggtgtttttgattattattctgtgatgaacaattggcattggagattattggttttgatatttggaatttatttgcgaagtgattttggagatgatcgggattttacaggcgatctacaggtactgctgattgggtccggtcagaccgggcacgggttgccggtcagaccggcagtgatggagcggtcagaccagcgcagccccggtctgaacggccgactctgtgtcgtttttgattttgggttgtttgtttggatatccgtgattgtttcatgattaaggattctagatggatactatgcgtatgtaatactgtcgtttgcta

SEQ ID NO: 44507 - DNA, 704 bp, Oryza sativa
aggtttaacaaaattttgagtgatcttagatctgttgattcttcttatgatgttaattatacacaatctgagatttctcgccactttttgaatggttttgacatgtctatttgggagatgaaagttacatctattcaggaatccgttgatatgtctactttgactttggattcgctttacacaaaactgaaaacacatgagatgagcattctttctcgtaaagttgattttaagtcgagtgctttggtttcttcctcaacttctttggatgttgattcttcttcatcgaagtttccgcaattgctttgtgtaatgccatgtccgatgatcaactctaacaattcgaggaggaggacctggttttgttatctaacagactttctcaagctgtgactaatgttaggtacaggaaaagaggtggtccaaatctttgctttgaatgtggtggtacggatcactttcgttcgcgttgtcctaagcttgggagagcaaggagggaagataatggtgatgagaagaccaatgataacaagccgaagggtacagtcaaagggaggaagatcaaggagactctcaagaaggcttttgatcaagtctacgccgtgtttgagccactaagcgatcgtagatggtgagagtggagatgaagataagggaaagaacatctccggtgtttgcttcatggcgcgtggggctgcaggaat

SEQ ID NO: 44508 - DNA, 598 bp, Oryza sativa
tattggaagctataggagcaaaacatgtataagtttttggtggctcggaattgatagtgcaacaagttgccggggtgcataagtgttttgatgggtcattaaatagatatttagatcaatgcttagacacattatcaccaatttttatgattttgttattagaacatgttgctagagaaactttaaggcaaatgatttggctcaacaagcatctggttatcatgttaaaaaaaaggagtattcttcatttagaaaaaacggtgcttcaattcaagagtttggacaaaattggcgatgggccgtctgacagacgcaccggggccaatctgaccagggaggaccggtggtctgaccagcctggcatagccggtctaaccagagaccttacctgacctgatcgacctattatggctagtctaaccagattccaacaatcagctaggtggcacgagttcatgaacaagttggaggccgaattaattgtaaattcggacgtttgtccctaggaattagaaaatgattggagtgtccctttgatagattatttgaaatatccaatttttagggttgatcggaaaatttggtgtcaagcttttaa

SEQ ID NO: 44509 - DNA, 655 bp, Oryza sativa
  unsure (1)..(655): unsure at all n locations
ttgagggaaactatcaaagcttgaatgaactcaagagcaaactttggagagggaatgaaaatatgttgaagtggggtggaattccctctctcggccggctggcttttatagggtacccacaacggtcagaaattacatgtgggacccgctagccattaccttgccaaaagtggcaggtaaccgttgcctggccggttcgaccgaaccagtgggttcgaccgaacccttggtgggcccaaccggccccactttcggccattgggttctaacggtcagtgtggtcatggcacagtgaattttcgttaaaaattttattttggtttgctctaaaaaattcatttgaagaatttcctcaaaattcaaaaaaaaaatcctaaatgcaattttaaaaaccaaacatgcattgatgcaaggaatttaaattgttgaaaataaacatgcggatacatatcaatttaccagttggcgaaggtcgcgtcattttaggtccgacgtgcaagaccgtacctcctttcatttcagttcgtggattttccacccgtctatggaggtgatagagtgggcgtctttggcttttccttccacaccttatttggttntggtgtgaaagacggctttctctgagccgactgttccaccttcttggccgatgtac

SEQ ID NO: 44510 - DNA, 677 bp, Oryza sativa
cacttccaacacccatgtactagtattttattctattaatcacttttccgtactaatatctaatatcatttctcctcaatttttatctcttctaccacctccgtcctataatataaggatttttagaattagacgtgggtattaaaaaagtgggtagaattaaatgaaagaagattgtgtgttgtcgaatgacaattgcgtttgtcaagaaacttggttcactcttgattgaaaagtaaaacaatgtgtattgatattgcattttgttggtatgccacattatatatcccttggggtttatttatagtcttagtataaactcatgcactctaaggctaataaatacagagaaatttacatgtatactcttgtgatatagatatatataaaggtagttgtagataatttagccatggacttctcagtgggccataacatgggcctaatttgacgaatcagcccctacaggcatagagttctctacttctgatggcaaaggcgcttggctcagtggcgaatgcttccatcttcacccaatcggtatttcactctggtgctttgctttggacagtggcttgtttcggcagactcggttgaaggcccctgtaacatgctttcaacattgtaattggttgagaagtggaggtatgtgaaaagattgaatggcggagggctat

SEQ ID NO: 44511 - DNA, 815 bp, Oryza sativa
ttcctgcagccctactggccatcatgtctgcaaacaaacagatttattacaccttctaatgagggacatatctgtgtaactgtaaagttaacactttttttttagaataaagttaacacttttctttaaacaagagcacagtaattaaagtaacttgccatgcatgcatgcaacttctgaacatgaaaagtaactctaggaacttaattagtggcataatttatactagtaaagatgagtagaaaattaacaagttctgtacagtgcttaatttgaagggctagctagctagctagctagaaaccatagtattaactaatcagagaaaaacaacaaaatttgaagggctagctagcttaatttatgggtattttgtgacttaatttatatagctagtttaacacaagttactagctagcttaacacaaattactagctagtatcacaaacaaatagctacttgttttgtgatactagcaaaaggtaaggaactctgacaactttgattaaacattgaagaaatatatattagttacaagagcgaggttttacggtttacgtaattaaagatttgaaaactcactgtttttaacacttgatcatgtgttattcatcttcaacttctttttgactcaattcaaggtcaatacacacacgtgaatcacggggtgtactcgattctccgggatcctttgagcttctggtaacttgctcacttgacgtgctttctccagagttaagctgaaattaattaatcaagatgatgtaaattgtatatttatatatcaataatattctacgacatttttgtatgt

SEQ ID NO: 44512 - DNA, 1550 bp, Oryza sativa
cctgtcattgtaccgttttctctctatttgcaaaggtggtgggctgtcatgatgactgatggtgccatggtgttgtcatccctgacagcacacttgataaattaagtagagagagcattactataatgtgagaaccaacagtattattttcctcgacttctgcaacaagtacattgttttattaagctattctattatctaaagctatttggcggtatctcgcatatgatatggtacgaggagggcaggttatagataccttaatttgtgtgctggtgatgtccctcctattggtttaggacacgtttcgccaccatcccgcaaagtgtggctggtttccggtttactgctttccgaatgataaactgtgtgcgctctattattaaatagagaaaaatctttgtctttcctttgcagttctcgctctatctcttccatgcttttgagttttgtcttatcccttacatagccctaagttttcttttgagcttttctgtatatactcattttgttagttcatctcaattgagcttttctaatgattatattgtctctcactcatagataagaacataatatatctagaagaaaatctttagttataaaacttaaagggagaaagttgagtgaccccgaatttgaacaataaaatttaaattttttaaatgaattgcaataaaatttgatgaaattacaaaagggaaaatgacacatatcatcactgtttctatcttaaactaaaatttgtattttaatttaaaatcaacttcaaacaaatttgaacaaatttctatgaagagatacaagtgaaattatcattgaaaacttcatcaaacataactagaattaatttcaaaatttgaatttttgttttcaaattaatttgggtgtcaaataattctatccctttcgatgttaatttttgagttgaaattgctttcaacacaagacttaggctttttaagttgactgttatatgtagtctaaggaatggctataaaggtgattgaaaacaaaaactaaagggcatgaaagggatgagtaaaaactcaggggcacacaattttctcttaataatatgctagcttagtaagcgagaaatgtaaatacacattttatttttctatttggtggtatctcgcatatgacatgatatgaggagggcaggttataggtacctaaattcgtgtgctagctatgtgcttcccgttggttttatacacattttgccaccatcccacaaaatgtgtctggtttctggtttactgctttccggatgactatctgtgggtgctacaatattaaatgctagcttattaggaggcggaaaatgtaaattggcaaccagtcaattatacatgtgtttgttagctccatggtttgctcttcagctttgctgcaaccaaaatttaaatattttaaaacttaattttagaattgattttaatgtttattcaacacagtttattttcaatattgacttttaagtcgtcaagaacacatatgtaaaagttttactataattttttttgttgctaatgagcattatg

SEQ ID NO: 44513 - DNA, 3124 bp, Oryza sativa
agactccacaccatagcatcggggtctcaagctgggcaagtgccaatgaggaccgatggcatgcacctcatcacatacaatgggaggacaaccaaccccccagatcaagtggagtacctccatctacaagtgaatgtcgctcgagttcctctcgttgggacttgggtgaaatcactaggagaatggatacccttgatatgcagacaggagagatccagtacaacctcacggaacacatagcacagacgcaagaatggtaacaaactgctgatgctcagttcgccaacttcaccaacatgatgcagcaatagcatgatgaccttcaagcgtacttccgcttctaggggttcaatccttatcaaggaccttgagcgaaagacaagcttggggggagactccccccactgaggtaacttgtatcacattgcatatttccctttctaattgcatatttgctttccaattgcattttataaacttgaaaacaatataaaaatttgcaaaatagaaaattccaaaaagataggataggtttgagtcattctagttaagataagctagttctctttagtaaaatgatgaatagttgctctgtgttatatctcttatatatgggttcataggtaagtgctctctcaaaggttaaatataagtagccaacaattatctgcgagcctgaggaaaatgagctgcacttgctaatttgagtctaggttgttgcgagatatgatatagtaaataagagttgcgatgatcctgatcctagtttgacttgaattccggatgttttgtttttttcaaaatgataaaaatgagagttcctcatttgatataaattcctacagagccaaaactgtgctatcatgattgaaccatatagattttggttacttgccattccattgaactttgtcaaactcttgtgacttgtggatacttctcatgctctatgatcaagatcatatacccacatttatgcacatgctaaactcctatactaggagctagcattataccattccattccatttccatactaccataaaaataaattctccatgctttcatgtgctttctttttctaaaaagaaaaaaattcttttggaaaaaaaaatagaaggagggaacggaatggatatgaaaaaataaataaagttatgctctcacaagcatgagcatgatgttgaaaaaaaagtgtagccatgccctctcctaatcaataaaagaaggatttttaggagaagaaagtaagcacaaaggagaagcattttctttattttccttcataaaccatttccaccttatatcacacaatttgcacgatcttgatcttgagtatgtttagttatctgctttagtctaagtttttgacttagtaataaatgtgaatgcaagtatgccatgtttgatccctaccgggctccacatatcaaaccttagagtaggaatcaaaaaggcaaaattggtgaggaattcatattgatacacttagagaaactgagtgaatcatttgaggaacttggctttctttgcaaattcatttgaaaacttccggaatgaaagttgaataaagattgggtaattggtgctctaattgctgttatgtttttcaaccgcccaaggcaaggagaagcagtgtctcatgggaatcaggggtaagggtaagccaccgtgccaaagattatttaatctgagagatagtacatataccttggacctgtacctttgagatatacagcatagtagcaactcctgatcaacaaccaagtttttatttccttttgtccttcactcgggacgagcaaaagttcaagcttggggggttttgttgacgatcgttatcgatcagtttcgaccgtcaatattaccaaaatagaggaaaactagtgatgcttgcaatgcatatacatgttagaataataatattccactagtattaggtttactaaccttttgcagagaataaccataaagtggaggagaatcgacatcaactcagatgataaatcaatcggacgatgtcgacgatcagacttatgtatgaatgggccaagaactcagaattgacactaattgggccgaaattcacaagtctacgaagtgaagcaatggaggaggccgccaaccaaaacttgagcttgttgggccaggcccctggttcggccgaacgaggggattcggctgaacctcccgtggcgccgatgaatgcagggttttgatggacggctgggattgatccccaatgacggttggagggtattaccgaccattccaaccgtcacaaccgtcattacctgcctataaaagaagttaccattctcacttcacacacacacctcaagcaagagctctctcccattctctcaagttagtttagtgttattatgctaatggaataggaataaagtagaaatcgggagtccggaagcctttggaagagtggggattcggccgaacctcccgtggcgccgatggatgcagggctttgatggacggctgggattgatccccaatgacggttggagggtattaccgaccattccaactgtcacaaccgtcattacttgcctataaaaggagttgccattctcacttcacacacacacctcaagcaagagctctctcatattctctcaagcctttggaagagttcgggtatggctctagtagctttccttttctcttttgtaagctttgtactattattagaatactcttctttatacatttatggtattgaaatactgtccgagtatattaatgccaactttacattatgttcatgttatactgaatatgctgctagcttttctgggagatgctttggtgcgggtataatgtttgcttatgcaattactctatgtcataacgatgatattagagtactatctgatagtttagacgtggcatctagattacgggatatctcattatttggggttatatgctgcggatgagaggtgggccgctgatattgatagctcaataagggtattcctccacgcgtgtatatgatcctaagttaattctctagggagggtactcctccatatttagccccggttgtatggtcatgacgggctgtcgtaaggaactcggtagtcaggggtggcttcgcgaagta

SEQ ID NO: 44514 - DNA, 664 bp, Oryza sativa
tgcaatatattcggataagtttcataatagaacttgactattaggattagtttcctaatatgactcttaagtattttcccattaggactcatatatttctcctttatatatcccttgaaagtcgcatgagtagggtgcgatagcccaatgtatcccctgcgtttgtatccaactcctctatactgatcattgtcggttggtgcccgtggtttttttcccgcaagggtttttacgtaaaattcgtgtctccgttgtgcatctattttcattacagcacatatatatatcttctccctcctttgtgttgacacactatgtatatgttcttgctgataattctccattccttctctaggctaggtacatattgtggcttaattagccgcttagccggcaacaccatttatcttctcttttcccatccattgtttttctaaattccaggatatcatatctgtacatatatacgcccaacatcttatcaagctcacacatgcattgcctagaccaagataattaaactggtgtgtgtatatgatcgatgcatgtggtgcttttgcactgtcacttaaaaaaatgggttttatatacttgattttgcaaagcctcaagagctaattaagctcacatgatacacatctcggcgcagatgctacaacctgta

SEQ ID NO: 44515 - DNA, 663 bp, Oryza sativa
aaatagatgaattattatagattatttttgggtaatccctataagtaatcgattcacggtagaaattcggatttaattactagggattttagccgtgtattatatttaatcatttagtcataaactaaattaaatcgtataatatttctaggatttcgtccgatatttagctcatgatagaaatttctaacctattatatggatataatgctcgggaagattaaattaaaacttatgacaacgaaataattatacccgcaaaatagcttaaatcgaaattgggttgccgtagttcgcagatagtaaagttaataaaaaggaataaacccggggtcccacttgtcagttggtacaaggctgtggatatgtcttggattaaaaataaatcgtttatgaacagtagcttttcgcaatttctcggattaattcaaatttgaatctttacactagcataacttattcattttaactcggatttgagtgaaacttgaacctaaattcatctaaattcataagctttccaatgatatataattcactatttaaaaaaatatatttataattataaattaattaataccaaatgattagataatagttaacctaaatagtgtgccaatgaataaaaatggatattgtacagtagcataattatctttaaca

SEQ ID NO: 44516 - DNA, 1763 bp, Oryza sativa
ttcctgcagccctgtgggatgggatattgcatggtgatttttatgctgatggagccacttcctgagaggagggaaggtggacgtcctcagaaaaccatgacgactcaatggcgggaagctatccttgggatcacaatggatggtggacagaaccgttgttgtttaatgtgaacactggaactaaaatttgatcagtctatgataggtcttaggcttgtgaaaatatttgcaaaacgcagctttatgcaaaagaacctaaaaccattccttgaataccctctatcatatgcattgttgttgtggtggcttgctgagtacggttggtactcacccttgctatttatatatcttttaggagagtgttgaagagaagcccttgtcggtacgcttgcgtatcccacgagatgatcagagtgcggtcttgttctaggtctcgttccccagtcgactgcctgtggcatgttaaccgggcccttatattattttgtcttccgctgttgttctctgatagttgttggcctaactggccctaatgtaagtgtttaactcttttagcctaaattcattcgtgatatgttgtgatccaactatgtatgtgtgtaccaactactgatccagggattggtacggataaacacagaagatttccgatttccaaaatcgggggtctacaaaaaccctatcgctagatttggtgatagacattagtaagttttatgttggaattgatggtcaaatttggtcgttaaggagcgtcaaaatgcatgcagagcaaacgagcaacttttggccgagaagttagcagtgagagcaaagctagcaaggctaagagcgcaagcatctgattcttctctatttatcggagatccaatgcgtggcactctccaaaaagagtgccttattctttggtttgtgccaagtatttgctcgtggctttgttttttttagaccgactcagtgcagtttctaggtgacagggattgatgaatgatgtgagggatagttgttgcacaataacagaacaaattaaaggaataatttaggagaagattgaagcttagtcttctaacattcttttttattcaagctttctttcttggtatttcgttcttctgtttcaaggcttggagtctgttaactcctctatgtgtggatacagtggctggcataggcggatctataaggtggtccgagtggtcaaaaaagtgatgatcaaccctattatatatatcccgaaccaatccttagtggtatgatgcaatgttttacaacatactactaaaagagaaagagcatggtagttgtaggggatcttaccatgacaacacacacctccggggagcattcagaggtatctcgttgacggagggagttcacccagcactgataaggtcgccaaatgtgcaccgaaaattgctttcccctttcttttttgaagggaaaaagagttgtattgattaagtaacactatcgcaatcttgctgcaaaatctgttgatcacaaaacaatgcttgatcacgccaaaccgcttaatgagccatccgtttagcatattgagcaagttcaagcgtctcagatctaagagcacaaggcagtgtttggcatctacatctggttgcaatcatgtcgactttcgttaggcagaagcgttggccggtttgacgacataaccacgacgaggtggtataatgccgagagaagatcttcatgcacacaatctggatgaagggggggcagcgatgaataaggagcccattgaagat

SEQ ID NO: 44517 - DNA, 649 bp, Oryza sativa
gggcatcttcgctttcaccatcgaccgcattcgtcaccgccgactggtgtcttcattgttattgatggacgactttgttcccacattggccacctctgccatcaccaaggggaatattacgaagctaagtcatcattgattttttttatatgatattttccttttcctctgcctccctacatcaactggttcgccgttgactagtgagtcgggggctacatatgttatatcatattttttaacaattttcataatatttatcttgattgcttgcgatataatctgagtacaaaagtgcctatcgagttatggagttctatcttcctatgctttccgtttggtttgtcgatggatggttgccttcgggccgattcctagcacccgggggctcgttggatggaccgagtaaaggtgctaagtattactcaaaaaaattcaaaagcatagagataagataatttattttctgctcttaacaattgcaaaagtacccgagtagtaaactctgatccgtgaaactttgttccattaatgacgaactcatgtcactcgtatgcatgcttgggaagtgcctagaccgactcccggtgcttggggactatgactagtcgggcagagtgtttaaacgtaaggagttatccgctcgggg

SEQ ID NO: 44518 - DNA, 694 bp, Oryza sativa
attcctgcagccttattatggctaaaaagcagtcggctagaatgcctctttaggcgccgcgtatgcttttgccatctgatgcacgattgtgctattattttgttctcaactatatgtttagtttgttaactaatcacatagttgggggctacacctaattaggtgcatctattcgatgcaccatattctttatcttttcgccctttacagtcttcgtcttcgctactcggcaggccttgacatgaaaagtttgaagcactcggactatttttgagatggctacgatggctgactgcaaaggtctcgggggctactgtggagattatggatatcccatatctacacggcgatggtatttggactgggtacaggatacctaatgtagatagaatatcttatctgtatctcgggtttgtttcttaacttgtgtatcaaggaaacaccctgagacttagtcggttacgactatatttcatctgtatttgcatattccgttagggatatagattatcttttgtaacacggactcctccccatatataaggggggtccgggtgcctctaggggcagatgttgattttccctaaatcatacaatcaataatacactcggcggattcatccccggacaggagtagggtattacttcttttataagaaggcctgaacctgtataaatcctttgtctccaaacc

SEQ ID NO: 44519 - DNA, 1705 bp, Oryza sativa
ggcaagtttgtcaaagaattcatgcggccgcaacaccgcttcacgccatctcgctaaattttttgaaattattttttactaatgatggataaggcaatcacgtttccttaaaaaaagcaatcacgagcgcatatataaacgtgtgctcacccatcatataaatacacatacacacacctaccctaagagaaaaaatatttgtctccaaaaaagaggaaaaagtatgtgcttagtatttgctagaaaaaacatatacacatgtcatcgaaaatgtcgcatagaaccacattatatctttttaattatgtcattctcatctatataatgttaataattaggacaaataattttgacaatatagattattcaatcgtatattacccatgaacatacataggtaaatcagatgtataataaaagaaaaaacaaaacaaaaaatatattagcttatatatttgtgaacgatggtgagagatcagattatatataaccgggacaattcgtaccgttcttattgtttaagggtgtaatcagacattttccttaaaagtcttccacataaggatttataataaaaaattaatcaacactaaacttcctacaaacactcctaagcctccacgtggcatcctataaatgctcctaagccgccacgtggcactctaataaattagagaaattcttaaaaggacacaacgtataatcattaatttttattaaattttgtagaccattatttgtaaccattagatttattagaaaaaacatatacgtacgtctgctcacccccccctccccccaaattctttcacccctttttttacctattttttatcctattttcatgcttttagaaaagcaaaaattgtatgccaaacaattaggaaatgcagcatctaaattataatgctaatatttgatctgcttatgtctttagatattttacattttaaaactcatgtcctcttttattcaactgtaaagagagaaatgtcacattaattggggatacattttctgacttttgcgtgtcatttaagcaattttaaaactataaaaattaatgatatatatttttgtcatcgtatataacttgataataattaaattagatctaataaaagtaaataaaagtaaaatgaacagatctatgagtaatattaaaaaaaataccccccccaaacattgtaacacagtaaaaaatacgcatcttataaatactcctaagatattatgacgttctcttaaatcggagataatacactcttaagatattacgtcgttctcttaaataagagaaaatcgtaaaaattctgacaagaaaacaaaacattcgaccatcagcttcgacttaaacatctgacataattttagtttgttagattaatcatttagaaaaagaacatccgaaatgtcccttcctccctgctcgcgtacagcatgcgccattcttttctctctattttttaaatctccttagcaactgaaattaaaattatctatatgtaaaaaagacacaaatggacctccatctattacttatatcctgtcaggtgtctaacgactttctactaacttaattaatttctcttaacatacctatgagggctatgtacctatataaattgaccttgatacttttaaaatgatctttttaggagataaataaatattcataagaaagatgatcatagcatcccaatta

SEQ ID NO: 44520 - DNA, 1794 bp, Oryza sativa
attcctgcagcccaatatatcttacttaaatatgaaaagtaaatatcatcaagaaataacaaaacacttactcgtattaaggcaaacgtctgtagaggtacaagctaggataagagtgccaacagacccaacacttccccaggagaagagtgctgatagccctagcaattctctagacttcctctatctccctactctaggcactagctaagtagagcttcacttttagaatgaatcatatgatcttctatcttggtgtgtcttgagaatgagagtgtcaaagtgacttgagagagagtggagatgctaagagaatattctccctctatctcctctcaagcctccacctctcctcaaaccatcattcgatggtggtttcctgccttaagccttgcgccactgacttaaggattatgataaccgtcgccacgtgaagctgggcaagaggggagccaccccaggttcggcttgcgccgcctttcacctgggtcgctgcctagtgggcacccaagttggtttggggtgtatggatgaagttgaggcagttctcctcctggtgtggactatttgatccctgttctctcctctatttggttggagttgtgctttctcttaatttgcacaagtaatcacctgcatacaaatattcatcaacacttgtggaagtggttagtaataaaactgtaacatcctgaaaattcccaacaataaaaatcactaaaatttcgaactttttaaaactttttgcatcatgctggatgttatggttgcttttatttgccaagctataaattgtcacaatggaaaattaaactaaagttatacagctaagtaataatcataataataagatattattatgaaccctataaatatttacgcacgagaaaacaaagccagacaaagggaaggttaattaccaatttaatttatagatcaaatattaaatacttgaaccatgaaatataaacacttaggaaatgataatcattcaaataaatggaactctatctatagagtagttttactgggaaaaattaattagatattatataatttgaattgaatcacaaatgctaaattatagaaatccatgtggtggtaaaaccaatccaaaaagataaaccaatatatgtgaaaacatataaataccaaaatcccaaatatagggaattataaaaatctaggatatatattaaatattggacaatattaaattttgggaaaattcacatttgagcacttaatagggtcacccaaatgcttaggagtaaatacaaattaaaataaagattaggtggatagaaataaataaaatattatcgcgaccatatttggatcaattaaatttaagtacgatggaataagaattaatcctaattaaaactcaaataaattatataaaaataaaatatgagtaatattaatctagggtgaattcattagttgagataacacaaatattgagtaaacttcatttatgcaagatttagaaattatagaatcaaatttatatggaaaataaactgaaatcgggataaataggaaaatacactgttcattatggcgtaggtgttcgatgtggtccctagccttccccctcctctcccacctctgcccctagccgccccgagccgcgccatcgccgcctgccgcgcgcgcctcgcaccccgagccgtcgcgccgctgtcccgccgccccgcgcgcccacgcgccccgtcaccgcccatcccgtcaccgcgcgtcgccgcctcgcgccccgagccgccgtgcgccgtcgccatcgtcgcctgc

SEQ ID NO: 44521 - DNA, 932 bp, Oryza sativa
aacagagccatcttaaaatcaacatgtattgtatagcttacagtaaacagcaactactcaaatatatgatccaataataagatattgttgcttacacatatactatacatcccattatagtggtacggtatagtattaatttgcgtgttgcatatattaaattaggagggagtgtatgacaaacatgtatattagataaatactagttataaatcttgaccttatataattataattatagttcaactgtaaattaggattattcattgtaaaattatgtgatgggataatctgtaaccataatatgattaacctaaacaactttaacatatagagcatggataattattaaccttttataatttattgtgacaagtaaaatatgttcataattaaagtaaagcttccatcaataaaataaataatacaaatgattcactgtaattatttgaatgatcctaaatccatctaacaacagaacctctagtatataaccgtcctatttagatagatgcatgcttagccataatccttccataagctatttgatagactaaaccaccgattagccaaatatatatgtatcccataaatgctatgttggttaactcctaaataggccacgttgacaatagaaagattaagaaaccttagcccctagcatgattgggatccattagcaaacacgaatagtacattttgttgcgcatatttgattgttgtttgaatattggtttttctcgcgtattatagaccttgtgtatcggttagtcgtgaggcaacgtctgcaacttccaggaggtgaaggttgatcaagattatatcaataataaggattatcctgagcaaggcaagtcatcactattccttgaacatgttgatcctaattgcgagattgttttgtttacaaataaaatttgggctgcaggaat

SEQ ID NO: 44522 - DNA, 1528 bp, Oryza sativa
ttcctgcagcccgtgactgctgccatactggacgcctggtcccgttaattggccataagcccacaaggtgggtcacagcggcgaggatgccgtcgacaactcgacatcgtggtgtttcagactgagaccgaggataaggatgctggatgctccatactggacggcagccgagcgaatgttatctggtgtactgtccgggaatattgaaactgggatttgaagttgtacgaacttgaatttttatttcaactagcaaaaatgcccgtgcgttgcaacgggtaaaaaaaataatccaatgacaatagacatttttcaagcgtacccatatcaatgataatgtttctatggatcgttgtagctaacacaattagaaaattagagcatctttatgtaatgacccaaactcgatgatggcaatctttttaccaatgcttgctttaactaaaataattggattattcatataacaatatacatataataaaaaaaatattctttcaatattattcttgcaaccaataataggttaatcaaatcctacactcaggatcaagtctacacaaaatagtcaccgtgcactcttctctaaataacaattaaaaatatgtttatttttaatactattttcatataatatgttattaaaaaaagtctgataatgataattgcatacaaaaagtgcagggattagatgaggaaacaaatgatgtgtaggaaatgatgtgtaggagatggaaaaatatcgatggatcttatccgacccaagcgtccatcaattttatctcgctttgagtcggacggtttctcggagcggttctttttataaacggcggtttttttctcgcattgagttggatggtttcctctattttttttttcgaaatgatggtttttttctcgcattaagtcggacggttttctcgatccttattttgaaacatcggtttttttcgcgtgttgagtccgtttgttttttttggatctgttattttataaacagtgtttcatcggttagttttttcagagcggcttttttttataaacagtttttttttcttgtgtggttttttgaaaccatttttttagaaatggtgtatttctttctgatagtttttaatagcattttttttgtttttttcagacgaaggaaaccgtatttttcccgcgcatttttttggaaattatttttttcttgcgcatttttttcctttttaacggatgatggaaacttctctttctaaaaagttagattagattgatagattagattagagttaaagagatatatacggataacaaggggcgactttaagtttggtcgggtcgttttttcctccttttctttttacggagtttgagttagatgttttttttcttttttttttattacggacgagaaaacctctttttcacgagtcggactttttttttctctacgggagtcggtcctttttttcctttttttacgacagaaggttttttagagatagatatttatttttaattaggtatttattcacgcgtgttt

SEQ ID NO: 44523 - DNA, 1758 bp, Oryza sativa
tatacccataatcattggatttcaatgtacggtgacaaatggtcttgatgcaaagaacttttcatcctctacgtcaacatcaccttttactgtattcgaatctgtgatgaggaatgcgcatgttaacttggttttattagcatttgacctggtacacgaggccaaagccgatggcatgaagcaggccatacatgacatctccaaggataaataatatagaataatgataattttatctgttcagtataccgttgataaaacaaggaacaaataagtctaggagcttcatcggttacccatattctctaataaaccaaaacaatttattagagaatagcaattagtttgcaggcaaaacatttatatatttgttcgtagtgacttaaaagtcaatattaaaaagaaattacattgaaaatattttaaaatcaacttcaaaagcaaatttaaaaatttaaatttttgcttttctttgatttattagtccagcagatggggcttagacaggtaggtctaagttgggctcccaatcgtctaactaatgtagcgtccaacaaggacgagaagaaaacccgcatcagcagcgatcgcaaggcttgcacggctacaccacgagtttttttttttgttagattattaatttgtttattaagaattcactggcgtgctgctttctgaaacttgcctcgtttccttgttgcttgggcgcatagtgcgcacgctgaaaacgagtggaatgcaaatgcctttttttctctttcttttctgtttttgcaggaatgttctccgaaaacagagtgcagtagattgttttgctccgcagttcgtagtataagagcaaatgctggaaaatgtatgtgaattcacataaaaaatatatatttcagtacaaatccgttgtcacaggcttggaacatcgcctgatcgccacatagtggcctggtggtgttcatacataccgccagttttcagttttcttcttaaatagtacaaaatacacatatagagggaaatttcaggagaaaatcagcattcgctttcattggatattcatcttatacataggagtaatacttatctatagaatttatagaatttcacaattcatatcagctctagatcggattatccatgaaaccaagaaacatctaccacacatacattttcttcaagaacaacgagccttacgagtgaatttccccccatccatgcggtgaatgaactatttctctgtaaaataaatccaagaaagatccaatggggctcaaattgtcgccaccatgaggacaacatccaatccaatccaatgcataggtccaatccaccttcagtaacttactgaccaaccaatgcaaattcaagaaagcagataatgacgaagaaattgacttgatattaccatggatcaaaagtccacaagttattagcttcgtccattgatagcatcactcaagaacattaccatgaaaaaaagagagaaatcatggtaatagtagagacgtacatcaagttcaacatactagagagcaatagatacttgggttggggaggggcaccagctgctggggctgccctcgcttcgctgcaaaatcttggtttattttggcgtcggtggtggcgccgccgccgctgccggggcggttacttcttcttgtggagcagggcgacggtgccgtccttcttggcgacgaccaccgaggtggccatgccgaggaacatgccgtgctcgacgacgccggtgatccgtaggaggcggtc

SEQ ID NO: 44524 - DNA, 3773 bp, Oryza sativa
attcctgcagcccggaaaaagcgtttgtcgaccgtcgcctttttttttttttttttttttggcgctagagaacgagcaccggggattcgaaaaggatttgcgctggcgagtgttgactggtctagtatactgtagtacccttttcacgcgtataacgctgtggctgacggtaaattgatggagccacacgttaatctcttttcatgtttcacctaatatctcgtctcaaaatataagtaaataagaagacattttctaatactacaaatctgatcagaaagcatgtccaaattctttttcgaaaaatgctacaggacatgatgatatctcttatgtatcggctaatatccattcggacgggatgatactggtatcggacgatatctcagagatattatcccgcccgaacgggaaactgtcatgtagcattcctcatattttctagttctatgaatctaaatagcataatctgggtttctatatcctaagatagagggagtaaatattatgtccacatgctaatatgcacacgtataacaacaagcacacatctctatactaccttcgtttcaaaatttaacaacctgactcatcctaaaactacgaatttggataaagtgtatgtctagattcgtaattctaggatatatctaatcccattatagattgctatattttgagatggatggaataatatttgccgaaatattggtaaattgaccattttacataagctattttaagaatagattatgccaaaaactaaatttagaaatggattgtgacctcagcatcagcgggttagtgctgaaatcttgtctgatgtggcaatatttgccacatcatcaaatctccatattggcgctgacctttgttcaatatacaaagcagttatggtggcgttagcgcagtggtagacactcttgctcctatccaaaggtcctggagtcaaatgccagctcaatatctgtttatcctaagtactcatttggtaggtcaaatcttttttaaattcattcctttttagcttggaataaataaatttgagaacttattttaagtttgtttaggaaggtcatattttttaaattcatttttatttttaacatatttgagaaaataaattataatattaatcttactgaaatatttagctcaataactatacatttttcaaaaaaaagagatgaaaactgtataatttaattttcaaatccgtcggaacccactactttgaacagttggtgtccaacaaggcgtctcatggtggatgaaaaccggaactgggtagaaaccaagtttggggtaatttgcatgatattgaatgttggacgaggttggatgtctggtttagagttgaagggtgtgttttatgcaaaacaaagaattcaggggtgtaaaatggacttatctcttaaaacaactatgacatggtaaacattatatctattgaactttacatttgcaattctgtatatatggaatgcttgccattattgcaaacataatttcgaatcgaaaaataagctctcgtaaaaatcacagagaagataaagaagaaccgtcatttctcttcgctcatgtgcatgattcatgatgcctgaggccaaacaaagaaagcttgacagaatgatccatgttgcttgaacacagatgtagaccttataacagcgtgattcacgcttgctaagacatctcgagtacacataacctacgttcatgcctttaagatgaatagatgatgcaatatctcacttttttagctaccttttgcttttaagattgaggcgacaaaattttcattaattaattgtgcaactagattgctttcacaatcacaagtcaaaggtcgcaggagacaaaattaaatccaatgaggataaactttataatagtataaataaacattataggccaccactaagtagcttttagatttctctatttttaaatgaattattgttattcctcgtcgtcactttacgaagttggtgccctccatattatcgtcgcccatctgtggtcggctacaatgtagtgagagaaagcaaccatttatgtcctctgatataaatatgcaagtaaatttctcgtatgttatatattgtgcatcaatgttagtatatccacattaaaatgtcagtatatccaaaatacattaaaaacataagaattttataggcttagttaaatttggatttgtttatttttgttgcatatctgaatttatacgaacccaatgatcaagtgaaactcatcaaaccccaaaatactatagaaataaatatttttttgttattagcatatggaattacttattaatgctgaatgataaaaggttcagtcgtttaaccataaagttccagtgttatatgtttgtgccatgttctaggggtgcatgtgtacgtgtgtatgtttatgtggtggtgtggcatggttctgtgactgtgtgcgtctataattgtactctcttcttaaaaataaaaaataaatagatccttgatagtgtgttttattgctctataagatggaggattaatttatgaattgagaaaatcgtcaacactcaaggaccaaagctttgaccagaatattactttgaatatccgtcctgatctgtctgactaaataagcaattgaaaagtgtcgcttctgctggacttcccattttcttgcaagaaatttgttgacaccgcatggatttgaagattagactttgtaattttaagcaccgagcatattcttttgtactgtataccttaatttggtaagaactctctaagactgagtattcaagagtactaggattttgtttagggacggcaacaagaaattggataaagggtttctttttttttttctgttcgagtcgatcagacaaactttgaaggtattcctggccacatttgagtgaatttggagaacttttggggggcgcctaatgcgcgactgaccgcgcgtggggtaggcgcgcggcgccccctagtactactgttactagtactgtacactagtatagtacactagtactactagtatttactactagtaatagtactactacactactattactactatactactactactactaacaaatatatatttttatgtataaaaaaatatacacatatacaaactttgtatacaatatgtataaactttgtatacgatgtgtgcaaatttgtatacgaaatatataaactttgtagacgtacgtattaaaaataataaaaaaaacacatcatgtgtatacgtatacaagtatacaaaccttagatacgaacgtgtatataaagtttctatacacatatacaaactttatatatgacgtatacaaagtttttatatatacgtatacaaactttgtatacatatatataaaaagtttgtatacgtatatgtaaaaaaccgaaaaggaaaaaagggaaagaaaaaaaaaaggaaagaaaaccagaaaggagaaaccgaacaaggaaaaaaaaaggaaaatcgcgcggtcccaccttacgcacgcgctgccgccgcggccctctccgcgcgcgccacgtgcctcgccgcgcgggagggcgcgcgcgcgactagccgcgcattagcaatttcggaacttttgtgctgcaagttcgctttattcccttggctagtacataattttgccaacgcagagagatttgacatgaaacagaatcatatgctccgggaatttaggaaaatccctctggtctccaagcaaagtccatgggtttcaccagaatccaaatcattttaga

SEQ ID NO: 44525 - DNA, 641 bp, Oryza sativa
cacgttttgaaggtggatttgggtggattggtgaaccctagttcgccggcgcagctctttactgtagcgtggagtggggaaaatggcgagcgttccggcggggaagacgaagcatcgcttggatctcggatttcttgttaagggtatcggaagtgcaaatgggcctaggcctgaacagtacctcagcccaatacttttaacagcgtggcccattgtgttccttagggacttaggcattttttgctttggcaatttatgcgcacaatagtgttgcccaatgttgataaaatcctttttatgcggtcatataattctttagaattattgcaatgcagattaaaaggtgcctgacagaaaggtgttatactgctttttgttagctttattaggctacaaaagctgtcttggttaatttggaatgacttatttttatcatagtcacttccttggtatgttatatacctattttcattatggtaaatagtcatagcctaggctattagacttattcattaccataatttttataatacttggtgggtaatctttagaattttatattcggatgtctatcaagtgtgttcattcgtgaaccttttagagtgttaaccactcggatttcttttattatggctaaaaag

SEQ ID NO: 44526 - DNA, 658 bp, Oryza sativa
tgtgatttggatggatgaaacacatcctaatagtttaaatctgaacagaggtaaatcaaaatttgtagtactcaaatatatgttattcatttaaaatctcttatatgttaagatgtagatagtaataatgtgacggagagtgtaataaatatggactcttattccgtactatggtctgttgtccgtcttaatggaattaaaagcgcttcatcagcaagcgagagtgaggcgtggtccctgccgcgtctctgtccgtgtcataaagtagctcctaactgcattttctaacactatttaacagttactatttatttattttcttattccctcgtatttaaaatatatagctatcatctcaacagaatactaccttccttatgtagaaaactaacctaggctaggctgtgtttagattcagggtgtaatattttggtatgtcacatcggatatatggatacacatttggagtattaaatatagtctaataaaaaaataaattacaaaatccgtctataaatcgcgagatgaatatattaagcctaattaatcgtcgttagcaaatgtttactgcagcaccatattgctaaatcatggtgcaattagacttaaaagatttgtttcacaatttacacgcaatctgtgtaattagttatttttt

SEQ ID NO: 44527 - DNA, 601 bp, Oryza sativa
cagtagcgccgtgggattacatataaacaacagaaaataccaagagattaatctgaaatttaaagatcaatctaataaacaacaataagttgaaagggaaaaaacccggcgaagtcggagattgaattgttgaacttgccgagattgatctcctctatcggactgactccgagacggagaaaattagtcattggtgttgcactgtgttgctaggactgatcaagcgatccatagctcgtcatgtgtagagttttttttttttttgagatacgtcatgtgtagagttatggatgtacatattgcccgtattctcggcagcagatggctgttagatcttgatcgatgtcctgcaaacaaccacgtacagctcccgaatatatgcaaaacaagcaacaaagtatatcgttagcctgttattagcaagtagagagataatgactatatatggatcaatttgccctgtacgtatccagcaatattgaatgcgtgtatggctggattaattaatccatgcatggcgattgaattgacacgtcctgtacatctccagcgatctcgtcacgtgaactttcgtgcttgtcctgcctgcccacgacttgga

SEQ ID NO: 44528 - DNA, 1252 bp, Oryza sativa
aactatcatgttcttagtttaagtaagaagatagaattagggagtatattacgattaaattattgttaatctgattcaccttgtactttcatcaggtcatatgcacaatccaaatctctagagttcaatggataagaagaacaaatcagaactcgcatcgactgatctgcacatgaaccctcatcagaatggtcaatgaagagattgcgtggccacgaggttacaacataatatttatcatataaagatttcactgcaattggtgaatctttagtaatttgatccataggcgaagtttctcctataatctccagctttcttcatggaactgcagtttgctgctgatatacaggagagtaaaaccaacttaatctaccaaggcaagtgcctgtaaaagaaaaaaaaagatgtcttaaacaaaaagtacattgaatgaagggtaacaaagcaattgtagagtgatgtgagtttgtcttttaggtttgtttttcaggaagctacgaatttagtcctaagataaacttttgatcctttgggagccctttcctaggttgggttaccctacagaatggtctaaattctaggctgtttgaaccaaccttctgctggaaagcagctttctggaagctcaaagatttgcataaataatttttttttcaggaagttcatgcttgctgctttctacatgtactatttggttcaaaatgatatttactttaaaaacaatgcaatgatttgctttgttttatactcaattttaatttacggaaaatcacaaaagaaacaaagggggcaaacggtaaactaaactgcaacccaaaaggacacccaccattctatgatttgacccaagaacatttcagttatagttagctggggacttttttttttcagaattgaaatttaagtgcttctgcatacgcatctgggtaactgggttgttttggcaagaaatttagtggcaatgtggtagctaatttgttaatccaaaattatcatgaacttcatctctactttgtcttgtgactaaccattgctggtcaaagatggaaatacatgcagttccaacttccaagtttcatgtggtcagtagtgaggacttacatggaagaaacctctcaacttccaaagctcaagttgatgtatggtggtgtttggttggaggaactaaagtggggctaaactttagtccctctcacaaaagcataagtttctatggtagggacttatgtttttgtgagagggactaaat

SEQ ID NO: 44529 - DNA, 1007 bp, Oryza sativa
ggagccgcaatgcatgcgtgtcgactgtatagatacaggatttaatcacgggcagtttcttgtttcacatgtactccgttctattaaaaaaaaccaatctagtattatatgtgccacattttattactacgaatttagacatatatatattcagatttatcgtactagaatatgtcacatccgattctaaattcgttttttatcggacggacggagggtgtacacatcctacacatttttctttctttttttattttttttaagaactacgcatcctactcctacaacaaggtgcattaatgtgagctagctagctagatagccacaactcatatccttcatgcggcatgcatgcatatgccatcatccttgaattgcgttcgatatattattgctgttttcttgaaaacttatactccatatatattattgttgttgtagatagacatggataaaatgctcttgcaccaaacgtcatgactcgggatacatatagtgctcaaatatgaatttcgcaagatgtatagatttatttatttcttcaacaaaaactggaccaaagtttggatatgcgtgacatgctttttaaaaattactaaacgatatgtttcgtgcgaaaacttcctatataaaagttgctctaaagtttggatattttacaaaataaataactaaaagtcaattaaaaaattaatcatacgttgataccatatcgttttgcgtaaaacacttaggccgtgtttagatgctgtaaaaaattggccaattttttttgacgtatacggatatacatttgaagtattaataatgtaaactaataacaaaacaaattataggttccgactataaactgtgagacgaatctttttagcctatgtgctaatcatgacgtaattaggctcaaaagattcatctcgtgatttacagccggactgtgcaattagtttttgtttttgtccacatttgatgctccatacatgtgtctaaatatttgatgtgacgaaaaa

SEQ ID NO: 44530 - DNA, 684 bp, Oryza sativa
aaaatcctgcacaagaaagaagaatcttagtgtgtacttgatagaagaaaacttggagaaagcaaggcttggtaaaacattaagcacagagagggatctaatatgaaactgttttttttttactcttttcacaaacaacataaatcaaaaatagcatacacctacccaagagctaaattggactgtcattccccattgtctatggcacctggattgtatttaacataattagtacttgtgttttcctctttgtattgggggattaggggttttattgttatacaccatatttatatatactgcaccattgggctgtaatgaatacaagcgcaattcatagcatggtatcaaggccaaaggtcttgatttcgaatctagacatgagggggagtgttgaagtaaagagtaaattgcctggtgccctactccatcagattaagcttttagttcaactagctagtgcatgcaactcaaaagatcggaccttcccccatgttgagatgaaacatttcctcaagcattaaaaaagtttcactggtaccagatagaacatatgcatatggtaccatcttattaattggcagtgatgtacatccaaatcatatagtcagactaaaaaaaaaactatttctcccacaaaattactccctccatctacttttgatagtcatatttccaaatctg

SEQ ID NO: 44531 - DNA, 1432 bp, Oryza sativa
ttggtctgtgtgccaagatgaaatatgactatcaaaagtagatggagggagtattaaatactccttccatttcatattataagtcgctttgactttttcctttgtcaaacttttttaaagtttgaccaagtttgtagaaaaatatagcaacatttccaacacaaaagcaaacatattatcaaaatatattcaatgttacatttaataaactaatttggtgttgtagatgctgctacattttcctataaacttggtcagatgtaaagaagtttgattaggaaaaaagtcaaagcgatttataatatggaacggagggagtatcaagtttcttgggtgccaagcatgagatgtacccccctccatccttatttagatgatgttttagggtattggttttgtttttgaatagctttttatgttttgtaggtattatgttcccaaattacccctaataaaagtagtaggtatattgctccaatgaactcatttatttctaaccactagcatatttcgtctagagcttggcttggctgtaacacgaccactagcacaatcctgttcagccacgcaccatgtctacttgtgatgaaattgaacaagctggactagcatagtaatgtggacagctcagtagaaataaagtatattaattaggggtaagacagtctcaagtaacacaattgaacatcaccctagcctgtgtgtttggcccaagatgacaagtaattcaatggagggagtagcaaacttgacttgaatccacatttcacgtcaaagttgcctgaattcgtatagcggtttcaactatatttacaacttaccgttatccactataaggtcagtactgagacaattatgccaaaaccagattgatcaatacataagagggaagataaacccctagttgtcgtttgctctatcatgcatgcatgccgccatccaaagtcatcctgctcgtttcacccattgcaacagacaacaaggagggcaggcagaccagggaagttcagaaacctaccggagtgtcagaaacgggcaggcagcattttgatgcagctctccaccagaaatactcacctcacaaatgttcgcggtaaagcaaccgatctaacacgcatccaggatcatgcatcaatggtattgtaatgtgctaccttttggtgttgaaaaaaggctaccttttcaagcattcccaactcatagcagccttattttgacatgaagcctgatgcttaaacatcaagttgggattataggcgagtaaccccccctaccgcggaacagataacctcgaacaaacccaaactacagcacgattcgacaacacaattaactgaaatacgaaatgaactgatggacaaaccctaggattggagccccccaacaccaaactaaaccaccatgattcgaacccaacacgccaaacccaaaa

SEQ ID NO: 44532 - DNA, 1635 bp, Oryza sativa
gttccatttttgctcttttggaactttaggttgagtgtagatgggtaatagttttttttttgttgatcagggtttcacatgtatatgtaacttttgttgttcgatatgttataattgtcggtatatataaagatactgaaggatagattaatcttcgtaggaagtcaaggagaggatagctaaattcactaaccaaactagctgcggaatatttgatgggtagttgctaaagtagcaagaaattaatgttacatgtgtcaagtaacattagagatcaagatggtgataaccgatgaaatagttagtgtatctaacatggggaatatccagtgaaaaccatcaaataagtgaaaaccataactaaaagttttgtaaattcatgaaaaaattactagagataagtataggtatgaagtacattcatatcaaatcttaagtccaaactaaaattcatttgagagaaaaaaaaagacaaatttggggtgaatagtgcttttcatgaatttataaaacttttagatatggttttcacgggttttcacttatttgatggttttcaccggatatgtccccattcaacattgtgacatagggttgcgacgtggttttcatcacaacatatgatataagtaaattggcgcgaaggaaaacatgtagaagaattcaaaaagagaaattttggtcgttaagagtgtgatcattatacaaaacgaaacgatatcttacttacttttgcctttttatattttttactatgtcactcggtaatgtattggagaacaccattttttcctcatacatgttagagtttattgaacttatttcctgtatatgttttgaacgttactcttagtgtttactccatattatgatatattcttttttatcagcaaccatgtgcaactatcccctttttttatatatctaattgtttggcatacatttatccaccccagggaccgaggtaggcctagtaatccttatgtgaatttcataaaaacatcatataatatctaaaattaccatgactctgttagcccaactccaggttacagcacgtttagttcaatatactccgtctatatcgatcacaacattattaataaataataaccacacctagccgcgctaaactagttgtcccaaacaacagtacttattcaagattgatcctatgaaatatggccctttttgcaaattgatcttaaacaattattctttaccccaacctgtcttacacggcagtaacacaactagtctaagttttgtctccaacaaaacccaaaattctaatcatgtctgcttcgatattaaggctctctgtcaatatttatagtatcacaaccgttattatattgttatattttatattactttattttgtatatttagttgcagcgtcggaagaagagtgggcctaagacagagaaacccctctcatcgatcgttcgcttgcaacagcttatcattaaccacaaccaaatagagagtgtaaatttttaaacttaatttagggctaattttgagttttttttgtcatattctgcttattttacatcggcttttaaatctcaattgataaaaaattaaaagctatgcatgtaaattattttacacgttcaaagctctatgtgt

SEQ ID NO: 44533 - DNA, 723 bp, Oryza sativa
aaaatgcatcatttatcagtcatacaaaatgtgggagtggcctaacaggacagtgcctaagactaatcaaatgtcatattgagtgtagaaaacattttatcagtgcattaattattacaaagttgaataataagtttatttgatttttaaaagaagaacttctacttaaaaagaattcagcgtcccacgataatttattactactccactaggtcgtaggaggttcaaaagaacaagacacaaattgtcaaattttctagtattattttagggaataggccgagtagaatttgctatgtgtgaccatttattccaacatatttggctcgaaagccaaaattacacgtgaaatcaaccccacaaacagcttctgtattcagaatctggatggtcaaattagtattagcatggttttttaaataaaaaattggttgaaactaaatataatgttagcctcaataatattgctccctttatagccttataggtacatgcctaattgtaagatagtttaggatcgtgacttattttgttgtaacctattttgtttgaaagccaaaattacttttggaagcaattcccaacaacttgtgacatcaaaatgaagatgatcagattagctagcctgtttttttaagggtgtgttcagatgccccattttccaacccctcttcctcgttttccacgcgcatgcttttcaaactgctaaagggctgcaggaat

SEQ ID NO: 44534 - DNA, 621 bp, Oryza sativa
tcccaaacatcccattggattaataaatttttatatgttctgtggctttcatgtgtaatacgttccttcatcttatctttcacatttaagacatgcaaacaattctttattaaggctaggaaaccaaatattcagtatgggcactcaaattcgaacatagtggatgagacatatactcacaactccaccaaatatccagaaatcatctcctcgttttacctctaaaacccaataacttaaacaatccatgcagtatataagttgtactactctaaaaaaataaaccctagctacgaatctgaacataaatatgtctaggttggtaagtaggattgtttttttttcttttttacatagggggtacgatatttcacattcaaagctcatggtaaaagacagctgttctttttaacttgcaatatcaggcaaatgacttacatcaatgacacagcaaatgcacacaacaaccatccccatggtgggccctcactgtcagccacaaatgctcacaaatatctaccccaaccacagggcccacaccccagaacaaagcctgcacacatcatgtaccactcctgacacaagccctactgtggtatggtagccatccccatgtaaaaa

SEQ ID NO: 44535 - DNA, 732 bp, Oryza sativa
attcctgcagccctataactcaatgatttcgactgaacatcacataccttatgggctcttgtgaagtcagatttgtggtagcgattggaccaggagatgatcaatctcaaacagtgatcagcgtattatcatagcaattatttttctccattttgtttcatgatcattcagtcagttaggtcacttttgtaccaagttgcttgtagagaaatcaaggatgtctttgggaagatgtggcatcaacgacctgataagacgtgagaagacacacattttatggacggcgagcttctgatcaaagaaagttcagaagaatctgatcattcagaagaattcttttggacttagcacatttcacaagctacaaaatgcaaccatatctgcaactctgcaagcatgattgtgggggactttgttctgtttctccttgaattgtgtgacccaaagaggggaagatttgatgccattgaagcaagtgtagtgtagtgtacagagtacagtatactgtagcagctcacatggaaggctagtgtctttgttgataccatgctatgcttccagctgaggagaagaatcttggcacaggacaattgattctcaagtcccaactttctcttattgtagctggtcacagttccaggactgacttcagagttctagattgcgacagagttggaagaacgatatactccctccgttcctaaatataagcgtttctggctatgcacctga

SEQ ID NO: 44536 - DNA, 1418 bp, Oryza sativa
gggcacgggctttgtcccctgcttcatacccgccatcgccgggccgagcctcctcagagtcttgatggcaacctgggtcttctcttcagacttgctcactcccctccttactattgagaacccgccccggccaagaacatccacaacttcatagtcatcggacaactttctgctctcagtcttggacattatggacttcgactgcctgctctgaagaacttgataaattgaggaaccgaataacaagactcaattggcagtaatccagtagcaaagctgtgtcctgaaagaagtaatcagtagcgcaggaagaacaaatgaatcatatgggtatctgcaggaagtaggagaaagagaatttggggaacagcagagcacaaactggaaggagcagttaggagtacaaagcaagctccttctcctgaagacctgatcagtaaacaaaacaatatgagagagcattatatagagtaatgtgagtactgaaggttgtgacgatggaagaaagggacatgtgcaacaaccaacacaagggaataaaccctatcaaggatttctttttgtgcagagaacaaggtgacaagaagagagaaatgagatgattggaagaagatgacaggccaaaatagtttttgttgacctggttgccactgcttggagctgctctgaattggtcttcactcggtgaggcctaactgtagtttactgctttgtcttagacagttgtaagcacaattccactgtagctgacaacatcataaacatggaaggtaagctctcctcatgcaaattaacacaagatgtaaattggccaggtatggtctggtcaaacggctggagaggaacaaatgaatcattttgatagacatttgtgccatacaaattgacaaatcttcactctggcatgagtttcctctttccaacttaaccattcatcatagaaatcgataaggaaaccaaaattgcagaggcaaatgtaaaaacaaaaagattatatggctcatgaaattacaatatgtaagcaaaacttccatagaaccatatgttaccactgtgacaataacgggttcacagctccagatatatcatgaatgccctaaacagatgcttccacaaggacaacgcccagacaaaaatgcatcacataaacaaaaaaataataattttctagatgaactatgccgaatctccaaagctcaatggctcttgtgacgcttagggtttatctttccataggctgcttgcctttcggtggtcatcttcaactccctcctcctacgcttccttcgttcacttctggttgattttgccttgccatctgcatccccctgttcattcggcagctccttctctggttctgatgaagcagggccttcctcagacttagacttcttctttttgaccttcttgccttcttt

SEQ ID NO: 44537 - DNA, 906 bp, Oryza sativa
ctgccgctgcagtggcgacggcgacgacggcggcggcgaagctgggggtaattagggttttcgcgaatcgagaggagcaaaccaatattaaaggaggcaaatgacatatgggtcccacctttactgaaggcccatctgtgaattttacggcccaagaggacggaggcccaggggcaaacgcgtaatttcggcagcgaggcggcacctatatacaccgcgtcgagctaaaccctaaccagccgcccattcgcgccgccgccgcagaagccaccgcgccccgcagctctcgtcgtcgtcgccgcggccgctcgatcacgatggctcccaccaagaaggcggtaaggttcctgatcgattgcgcctccctccccctcctcgtcgcgctctcccgctgcgcatctcaccatttcgttgcgatgtttttgctggtttctgattggtgggttgtggcgatgatgcagaagaagagcacggacaacatcaacaacaagctgcagctggtgatgaagagcggcaagtacacgctcggctacaagaccgtcctcaagacgctgcgcaactccaagggtatcgatcccgaccgattttttgttgttttgttcgatctggtagtgttagtggatgttgattgattagtttgctcgcttaatccgaattgtagggtaggtgggagtgttatgattgattgatgcgttgctagctaatcatagtctgcctatagatctgcgtgttagtttgtgcgataattttcgggtagattggactgtcttatgtttatttatgggtggaattgttgtaaatcctttggaagttgatcggctgtaaatttaagtttagatggattgtggttgcaattatttgggatgcgttgtgaattgagttgcattgcggttgggctgcaggaat

SEQ ID NO: 44538 - DNA, 1588 bp, Oryza sativa
acaaaaggcagttaaataactaatctaaacaacacgaacattaacaccatcaacgaataataccggagagtccccgcaaaaaaaaaataccggagagaaaaaaattctctggtctctggtcaaaaatggcgagagatgcttgtatcagcacgagaaaattattgcacgagatcaaagataaaaggagaggtaggtgtcctgtttttaattgttttgctaatgataatgacgatacagaagatggattaagaccttaattaccatgtacagggcataattgtgtgttcatactgattgaggccgacatgaacggctacgggcaccaaccaacgtgccgtctcaatcgcatcattttccactgccgatttgggatttgttttttgcgtgataacaaatctagcaaggagatgcctaaccttgcaaaaaagacagaaaataatcagctctgaaagtgttatctgatttactacataataacaatataaaattaacggtctcgttgcaaggaccacttgttgatttctttgtcaatattaggaatactagcatattgcccgttacaaagggattttaattaaataaatttattattaacatgttattatcatctcgtaatcattgtacatgtgaaccttattaaatctatatttttttccttcccaccaaagtaagagttggtgagagtagttgatatatgagcactctaaccctacatgtctttttttttttgttaaaagatgggagttggcattggggtggtggcaccactactcccttttacaaggactcaaggatagatagtaatgggatgataaaaatactggtatgagataaatacatgtgaaaaacatagaaacaatggagaaacttgtttaaaacgtataagaaaaacatagtattagaaatatgtttttttttcactaagatacttaaccatatcataatgtaatcttgtgatacctacttgaaaaataaaaaactatccgcttgtgaaattacttattttattatacataggtactatatatatatatatatatatatatatatatatatatagatagatagatgtgttgtcggtaggcaccaccatacaccgatggattggataggatatcaacgtttttctttttcaagttagataggagtccttaaccggttcacgttctctatcgtaatggtattatcattacatctattataatgatttttcgttatatagatattatattagtagatcctcacctgtacttaaccatatcagaatgtgaatcttgtggtggtctacttgattttgttttatttttaaaaaaatctaacccaagtggtgcattacactgtagtcctcaggattgaaatggacatgacggcataagacggtacgacctgcttgcgacaggatcgtcttaactttcacctgcaatcttcagttaaaaccgtgacaaaacacatgtctcacctacactctcatgccttctcaaaaatcacaacctacttgtactactaactacttctacttaaccatcaaactgcaaaacctgttgcagaattgaggaaatttcagagcagagagcccacagttttttcg

SEQ ID NO: 44539 - DNA, 1474 bp, Oryza sativa
tctatttctagggagaatgttgaggcaaacttacgatgctgacaagctggttaggtgccgagttggattagacatcgttggttttagtttaagaattgggaagaggttaagaacctagtggaatccactgcgaggggaagtgctgaagtgatagggattaaccctgctaaggaacagagcagagaccatcacaaatccttacaaaaagaaaaaaaagaagaagaacttgtttcggtagatctcgatgaaaagctgcagctcctttacaattatgttccgcacgaagtccacaagaaaaaagacagtgattttagtatgattagtagtaacttgcaaccgaagcgacattttcccctggggtaagagcaaaagagccacgcgatccaccgttgcagagatcaatgatcatatggtcttgtgagtttttttcttaagaacatagtctttccgtaaaagaaaaccaattattctactaaaaaaatcacattccttttatattggtttttttttgacgggaaagtatggtcttgtaagttgtgaggctttctcttgacacgttgtactactgtgcatatcacaacacgttatcttaccgcgtcagcgtcggacctttaagcagcggttacttttttccttttttaatatagttaattccagtatgggatgtgacatatcatacgaatctaaatatgtatatatctagattcgcagtactaagatatgccacatctcatgctagattaacttatttttttatggaagattaacttatttttaaacggtggcagtagtgaaattcaaatagctttgatttaaaaacacttttgaatttgagctcaaattttaaaacagttttccccgtgtaaaccggcacgagataagagataaccgcaaaaaccaaatacttgtattcctacttgttattatcgattttcaacgatcgatgatatttcaaaccataccattttagggtaaagttgctaatgatgtgcatatatttagtttcttgccaaattttaataaatacataataaatcctgtgaaaattttcacaatattattaacttaccaatattttggcaatagatttattttgactataatgtaaacaacctctaacttattgagtactaccttcaatctacaagagattttagcaatacgatatatagtagatggagatagtataaagctgtgtgcatataccgaagccgagtaacgaagaacaatgtgatatgcagttgcgacgcaaaggaacactctatctgcgtggataaggtggacttgattcgtcgatggcgacgatggcgagacctgcgcggcgacaagagacagagacggagtcaagcgtgacagacaggcacagaccaccacctgctcctattcatggtcctcgtttgtgccgtgcttatcctccattctctcactgctccctccacattttcgtcgaggagacaaaatgtccactattatt

SEQ ID NO: 44540 - DNA, 649 bp, Oryza sativa
gtgtataaaaaacttttggggtgacgggcaaatttgaagtggaaagaaaaaattgctaactagatccggccttgagtggaaagcagaatactgggtctatcccggctgggctcgggagcctggaccggtgctaccttaactggaccgtattctttagcagacctgagccggagaaatgggcttaagaaggaagagccttatgacacgtctctcaaatggtgtttctcacatacaaccagatgacgggtccaatcccaacttctcttgggaaattaacacatttgagtttcctaaattggaagatgaatcactcgaatggggcaacgccactaacacaaggcagtatcctagttctcaactggctcactcatgtcactgaataatctagaggggaaccttggcttcttgtcttaccttattaatagccgacaaatttggagcattaccttggatggctattctttcaccggggatgttcccgagcataccggatacctgtctgagcaatggaggatattttccgtgagcgataataagctaacgcgtggggtcccatcgtcactgttgaggttgagcaggcttgaacagcggcaacttgctggaaaccacgtcactgggccaatcccatatccataaccctgaagccaaa

SEQ ID NO: 44541 - DNA, 577 bp, Oryza sativa
atgaagcattagatgtagataaatgaaaaactaattacacaggtagggaggaaatcgcgagacgaatcttttaagtctaattagttcatgattaactataagtgctacagtaactcacatgtgctaatgacgggttaattaggctcaaaatattcgtctcgcggtttctagacgagttatgaaattagtttttttattcgtgtctgaaaaccccttccgacatccgtcaaacgtccaatatggcacccaaaaatttttatttcctcaactaaacacaccctaagtgaacacatttatatctggcaaggtggacgcggtggtgtgtaacctgaatttttttttagaaaaaaagacgcatcactctatatatacgtgtgtaccctgcaggacaagccagtgtcacacgacgcctccgaattcattttcgattcctctcctctcctctccttccaccgcctaacgaaccactcgccatcaaagcccccagagagcgcgccatggcggcgcagcggcggtggccgacgtcgacgctggcggcggtggcagtcgccgtagtagtactactggcggcgtcggc

SEQ ID NO: 44542 - DNA, 739 bp, Oryza sativa
aggagtgatttattagatgcctaattccttctctatccatattaaatatggtgatgtgctaattggaatcaacaagttgttatatcctaggtagtttaagcctatcactagcttatgtgcattgtgcgcaggaaatgaagcgacctggacagtatagaaactaagcactctgcagtaatgggatgcatgcatgtaggggaaagcgactaaaacatcaaaaattagcatactttggttctatccccaaaacgtcaacaagattagaactcgagggagtatcaaaaagtagataatttattcctcaattttttattcccatcccaccaaaactcccacaccctctaaacaaacataacaattaatagtctcatccctctaatctcccaatccctcatataagctccctccaaccaaacccaccctctaggtgctcatatgctggtgagaaccaattttgaacactacatttgagaaaataacacactatgttagtaatttagtatggcacgtgaaaatgagacaacaacacaacactacttagaccaacagtggttgaaacactaaattaaatcaccaaaacactagtccacctacaagccacaaatactcatatttaaaagaaatttatccctttttatatattccacatgcaaagactcatctcccccccctaaaaacaaaatgtgagcaacaaatttgtcaacagtatatctagaattgagatgcatgaatagtataa

SEQ ID NO: 44543 - DNA, 7233 bp, Oryza sativa
tggtccgcatgtcatttactcggatggtcccacgtgtcagtgtcacgaatggcaatataataaaagtgacgacatgatagtagcaaatctcaccatttttttctacgctaggaaggatgagaagatactgatgatgtgggaagaaaagctagaagcaagaggagtaatcaattgtgtgaaggtggctgtgtggacgtggattcatgtttccatcctcgggagatgtgagacatgtgccctcgtcgctacatcagcacaacagcccataccactggccctagctactgtacatagcagcaaataactggaaatgggttttggcagcgtttggttcttgtagctaggtttaattcctttgtttagataaaaaatagacactactgcaacagattaaattagtttatggtgttagcattaccctttttgatcaatgaatgtatacctctccagcaagtagtaaatgtgtcatggacacacatatatatagatagttgatatccaatgcaatatgcgaaaagcataaatggcatggtttatttgattccggcggtagtataatctttcagtgtgtgtgacacacatatatctcacatagtaaaaatggtatatatgaagaaagaaaaaatgttaactatccatatcctatacatatgcaagacatatatatatatatatagataggaaatatagcggaataactataagtctataatattatcaaagaacaaataaaaacaaaacagtctacccgcaaaataaaagtaaaaacaaaacaggaaagtagatgaattaacatcatatatatgcatcgatctttcctgccattttctctaagaatttttgttcgctaagaattaatgttgattctcagtcgatttaaaaagggaaaactacgcatgattcaaaaagagaaaaaatgataatagacacaaaataggggatcgatccatatataaggaccaaagcgcatttcttattcttactgctattaatttgtcaagcaactcttcacggagttttcggattaatccatttggcattgatcatctctctcctgagtatatatgtcactactgtttgtggtttcatgcatgaacaaaatttacaccagcagtttgattaaatgcgttttactcttagttacttgagaaacactgaggggtcttccggctagctccaaaaggtggtgagctaaatgacctgagtttaaagcctcactctttctaattatttgatattaggaccttgcctaatatttacatttttttactcaattttacctttcacaattaagcgcctttaatttgtgtaaaattttggcatgcgcatgccgtcagtcgtctgcaaatttatctccaggtcattttgtaaattattttcatcatcttgctcatgagtagtgatcacttttctattgatgaaattcccagctcgggatataatttatggagatcgatacactttatatattttgaaccccttttttcagcctgttaattaacgttcatatataggtgtactagcaggaattaatcgtatctttcgtgacgatctcagctgtcgatagtctacaacttctggatatattatacttatcgtccttatacagattacctgcagcaacgtatcttttgatcaacttcatcgcttctagaattctcaattaacctgcaggacagtgtctataatttctgacaaaaggcacacgttaatttctgagcagtgcgtacgtttttgtttctgttcctttcttctgctcgtttgcgttctttttccagttagtttcttcacatggcctcaattatataattaattagctagctagcttagttcacatttgcatcggatcgatctttggacaaatatatatttgcagtgattagcaataaggaatctcttcagttttcccccttttttcatcttcgtttagtttacggattacttcgtaaattaagtttgaactgcatgagtgtgttgatctgtaccacttcttttgtttgatctatattaggtaaattaagctgcaaccttccaagcaatactggaagtatatttgctgtctgtcacatgtctcacatcatattattgtaggccaaattaaacccgggcaattaaatacaaggaatcgcaacaacattaacttaggttacgagcatttttacgggatgtatacgtatgtctactgcatgtcatatataccttttgtggatgcatgcgtggataatatatatatctgccttcgatctgtaatacctttcatgcaagaagttaatttgaagctgcatttttgcacactctttgaaggaattgatcattatatatacatcctagcatttgtgagcataaggcacaaaataattcaattaattactgagtagagaattttcttttcaagagagagactagcaaatacaataataaaacacacagcataacgtaatctacaccatgtctaactacatatatacacctgcgataagctaattggctatgcttgcaaacgccaattaatgtgtagttaaaaacccgactaaaacacttttgtaatttggatacggtgatttgtacgtaataaacattcaaatgaacccgtaaaaaaatatgcatatgccttttactagaaaatatatgtaactaataactattatagaatttttaagcgtttcgtgctttatcttatcatgcaaaacatgcatagtataggtccttcttttgacaactgaagttctcgatcagtatttgcagtacattttgcaaaatagtgggccagctagtaggatttttttatacacagcacatacatcttgttaaaaaaaaatagtgcgtctagtgtgagtggttttacaaaatagaggacatgttcattccaatatttaaaaacaaaccatgaaataaatccgttggattacatatcatggccaccaattgtataaacataagcgttcaaaaattacttccaaaatttagatggtagtgatttgggaccatacatatgccaaaagtagattttctaaataacaagattaatttaatcagtaaaagccactaggaaatgttacgattatttactatgattttattttactttagaaaacatatatatgccctgttttggaattgagcaggtttatttatgtcaatatacaattttgcctgagacgacgtgtccttttcctctgaaccacttaccaattcaaaattcttacatttatgtacttgcacattctattatgtctagtactaaacaaaggtataatttgttaaatctaagcaatttaaggtatactaagactgcccctaatttgccataacttataaaacaaagtacttaaaattaaattccttcttgtataaaaaaagatttccttctcgaatttaaaacaacattagtacgttcatttcattcacaaggtcactttcaagaaataagggcaaccgatgggtttctccccaatctcatcagtcatgcagcagaggcagctgcagggaggggttgcagaagcatctgtgcacagagaatccaggatctgaaatgggtgagggtgagagatcgaatcagatgccaacaccacccgatccatccatccatccatccacaacagcatagagacccccactagcttttgctccactcacgcaaacctatgcagagggccagccaaaaggaaaccctaaccctaaccctaaccacaggtggcttaaccctaacccaaccctaaccggggtgcaggcaattaaataatggtgacaataaaataatgagaaaatgggtgtgtggggctaggaggagtagtagtaccagtagcttggtgggggaaagcaatcaaagcattcaaggagggggactgtgtgaagcaaaaggacaaaataatggtggtggtttgctgctgctgctgtgatgccttttcattttggtgaggcaatgtgcacaccaaatagtgcacctcagaaagcaacatctctctctctctcgtggtggagtatacactgcaatatattaattgcatgagtttaaggggggaatggatgtttaggggctgatttggtcagggtttggtgggtcatatacagggggtttgtttggattgatgcttattaatttgttttatagaaatatgaggatatctgatatactctgaaatttgactgttcatatgttcagaaataaaaaattgtatcattaaacatatctgtaataattttatgattatatcttttaaaaagtatatatagtcaaaattacaactcgaaaaccatgaaaagtcaaaacgtcaagtaaaatagaacaataacaaattatgttgaatcagccattttatcatctttctagtcaatagctgttaattagctttgtgtgtttaactcaacaaaacaaatacggagtagtatggtaacacagttaaacacttaaactacgtatataattttataaattatttcctatcattaaaaacctatctgttacgtgttagctagtgttgttttatttttttaaccccttagtttacagaaaattctctatatccaaatctctattagtaatttgttttttcttccctataattcgtgagcgcatgtgcatacacacacacacacacatatatatatatatatatatatatatatatatgcatgcaaaccttttaatttgtgtgattgtgtcccatcctctcttttcaggctgatatgcatctcccctttacccccacctaccactccttgccgcttagtttccttgtatgtgttcattgtgcgctccatccacaccaaactcactcatgtttccctctttttcccacttttgagcaacatgactatgttatgacaaagatagatcggtgctcttgctgctaataagggcccgtttgaaactctatatattgaagtagcatgcatattaccactgattaattaagtactaattattataagtttgaaaaattatttgattttagaaaaaaattatatattgaaaatatttgcacgaaacgtgttgtttatagttcgggaagcgtgctaaaggaaaatggaaaagttgtagtttggaggtgaagtttaacactcaaatgtccttgatttttatctaccattgtgcgctccaatccacccggccacaccaattttttaaaacatattttggttaatgtatagtagaagcattccaaaaaagaggtgcagacagaaaataatccaattaattagacagtacaattttcatactttcaagcagaggaggtgcaagacaaaagaagattaacaagagggtattatacttgcgagggcaattttgcacttactggcctaaactacaatgggaaggtagatcggagagaaacggaaatatttgctacgcgtgtgtgtgagagagagagagagctagatcagggcaaaatggagaaaaccaaaaatatcaatctagcaaagagaaatttaagaattaaaacaatggaataggtagattgaatcaaacataaggaagaaaaaaaaaggggagaaaatgaaagcgcaagctaaaaaaagaacataattaattacgatgatgaactcagcccgttcatggagataaatagcatgactgtcgttagatgtaccacacgccaacgcctactagagggggagagggtgtgttaggggcggggggtgttccagactatacgtctttcattcatataatctgattaatatgtatggtgaatttaggtaaaacagcgaatccaaaatataaagaaattatcacacattattcagatccaacaaagagaatagaaggattaaaacaaggatccagtaaataaaatcatacggagaataaggaaaaagaaaagggagatcacaaaaaaaaatacattaaatggtctacaatatcaaaggtaaatccacaacgcaaacaaaattatcaaacattttgtaaatgatctgaatttttcaccatttccaagcatgaggaggaatctcacggtcgaaagtttggaagtgaaaatgggccggcatagaccatgcacacattttgcactagaatagtagctattgtggaagaagataaaacgctatatatatgttttggtcgtgaaacagtacatattgtaccatagtagaaaaaatgttacagatctaaaagggaaatgctaacgacatcgtacagacaaattaagataggaaaacaagagaattcacatgatattgcataattacaatactccacatctctacaagctgtgtcctttgggacaaatagggaattctatataaagactccaagtacgtacagttttctcgaactttcttattgagtttcttttgtgacatcacgaaccaaaaaaaccatggcactaattgacaccgtatcttttacaaattcatgcactatcgaaacgtaccccagattatattatattagaaatataaattaattaaccctctgaattgtcgtttatatataggaagctaattactaagagagatctggtatgcatatatagaagaaaaaagagaaaatcccctatgtacccatgaaagttcacctaatcccttctatacctctgaattttgctcaatcccttacatacccctgaattttagtttgaatcccttccatgccctttccgctagttgacagttagttgaccgttaaattcttttgaaaaagttcattttgccctttgctatgaagaaacataataaattaatgaagtatattgttggaatataaaaatttattggatgagactattatatttatgagtatgtgatgcaccatattatttgtgacaaatttacttttacatatgatataaaaagttgatacttatttattagttattaaaagttcttttatgtagcataggtgttttcatagtaatacaacaaatttgtttatcacttcagaacacatatgctaaaaaaatcttttaatagccaataaataagtattaatgttttatgtcatatctaaaagtatatttatcgcgaatagtatggtgcataactatctcatatacataatagtctcatataacaaatttctatgctccaacaatatactctattaatttatatgcttctttataccaaagggcaaaatggactttttcataataatttaacggtcaactagtggaaagggtatggaaggaatccaaactaaaattcaggggtatgtaagggattgagcaaaattcaggggtacacaagggattaggtgaactttcaagggtacacaggggattttctcaa

SEQ ID NO: 44544 - DNA, 1551 bp, Oryza sativa
ccaatagtaattttattactatgaattagccgctaaatatgttagaaataattgttttgagttttataaaatccattcataatcataatcattgccaccttatttaattacttattataggagatgccttgattgattgtttaattatctgcccaaacccctccatatctgtactgatagtaatttaattactatgaatcagccgctgcaaaatttccgtatgcatgtacatatgttgcttttttaatctaaagtccttttatattttatatatattacaaataatagtactgagttttataaaaatctatccataatcataatatttgccaccctatttaattattatttatattcaacaaaggccaatgtcgaatccatgagaattattttaatttgtagtaaatatttaaattgctattttttttgtcaataatattctttcgatcctggatggatagcaacgaacgtttcctaaaggcacgtttttttttcttggactaaccagtcaatcggattgattccccatcttccatatcctttctgtttttatcgctccgcaggcggcggcggcggttcccggcgaccgtgggcttgtgacagaggacaccggaggggtgagccgatgacctgattctgcgtcccctgaagggcttgctccgacgacgccggactgatcagcctaccgccggtgacggtggcttcagaatccacggccagccaccattgtttcaaagaatcctgaaaacgtgagatctgcatcccccatccctacatactcatctcatctatctatttaactatcatcaagcatagcttcatcaatccgtgcatttttttttggatagattcaagttgctcatggttcttttaatttcacccatccttctgtagatgaagcggaagggcaagatgccagaaaaagtcaggagtatcaaattcactgaatcacaatccataactacctccctacattcccattttttttttataaaaataacatttaataaaaaccttcgaaattacagcgcacaattcactatcaaagcttccagaaacagtaattttaacgtccagtaaaaattttactaccgactcaattaatatattaaaaaaaccataagtaagggcaaaaatcatcgctgtgcactaattgaatcaatagtaaattgttttctaactgaaaaaatgaggttcttatcgtaagataattactaaatcgcacgtaacttttccctccgtgatgacagtgcgatcgaggatgagattctgcaagcatctatcaacaatagtacattttttgctaacgatatatttatatagtcatagtaaatgagttactaagtcaaaccttcagaggttacaggtgtgacacacgcgttactcggctcgttattgcggaagcaaaccaaataatcctcagtaactccattactgctagaccaaacatcataattaagtaactactttactcacacaaactaaaaaatattactcggttggttagtgcagaagcaaaccaaataatcttcagtaagggctgcaggaatt

SEQ ID NO: 44545 - DNA, 2362 bp, Oryza sativa
acaaacgagaccacacgcacagtgagaggaggacataaaagcagaagggccccattttaaaagcagtaacaagcattgagagtaggcaataaaataaggccagttgtgttcgctaggggaggatgagaacctgcacagtacgcacggagaacgatgtagtgtatcagcgcgtgattaattaagtattagctattttttagaaaaacaatggatcaatatgatggtttaacaaacattcgtatagaaactttttgcaaaaaacgaaccgtttagcagtttgaatcacgcgcgcgcgaaaaaacagcctctcaattttttttcatgtttcccaaatagtaatgtaaaattttgataggagtacttatttgtcaagaaagtactacccctgttttgttttgaacttctttaaatttgggcaagtttataaaaaaaaattagcaacatctacaacaccaaattagttcccgttaaattaacatttaatattttttataatatatttgttttatgctgaaaatattgatatgttttcctataaacttggttaaacttaaaaaaattatctacgagaaaaaaaatcaaagcagactaatctatacttctactacttaaaaagaaaaaaaagtttcagtctatgtaaagataacaaaaaacacatgcagaaaaaaaaatcctctgagaaaaaactattagaaaaaatcggtgtttataaaatatccggataaaaaaaaccaccagttataacaaaaccgtcttattcaacgcgagaaaaaaaaccaccgcttataacaaaaccgtctgactcaacgacaacaaaaaaaaccatgtttataaacaaatttgcaacaaaaatactccaaaaaactgtcagaaaaaaatcattgtttatataaactatgaataaaaaaccatccgactgtacacaaaaaatcattgtttatataaactatgaataaaaaaccatccgactgtacacaataaaaaaccactgtttataaaatttctgtgcagaaaaaaaaacgctcaaaaaactgtcagaaaagatcgttgtttataaaaaaatacggataaaaaaatttcctactcaaagcaagaaaaaaaaacgccgtttctaaaagaatagtttgagaaaactgtccaactcaacgcggaaaaaaccaccatttataaaagaactgtccaactcaatgcgagaaaaaaccacggtttatgaaagaaaatctgtttcgaaccgtgcaatgcgaaaaaaaaactttcctacttcgaagaaaacatctgattcgaggaaaaaaattgtaacatttatatcgtcaggtctacgacgtcggtttggtttttacaaagcattggttaaatgttctgatgttctgatctaaaataagtcttgcttgagccttttctttctccgaacgagatcaaattaatggatgcttgggtaggatagaatccatagattgtttccatctcttacacgacttttgctccctcatctattgtcctgtattggaggttatgcccatctatagataattattagactactttgttaaatatagctactattctttataacgtatcatatgaaaataataaaaaaatatatgtttttaatttttatttagagaagggtgcacggtggctctattttgtttagagttgaccatagaggccgtgtcgatttgattgatcctattattattggttgaaagaattagattgaaagagtatttcagattatatgcattttactagataaataatccaattcttttgggtaaagcagccattgataaggttaccaccgtcgagattggaccattacattgaagatgttcccgtttttcttatgatatgtcttagctataacaaccgatataaatattatcattgatatggttatgtatgaaaagcgtattttataatcgaattttttttcatctgttccaacgcacggatatttttttttagtatagtagcatatatgcccgattcatacgtaccagtataatggccttgatttcgatcgtgccgagctgaacaccagcgtccatgtccgtctcgttgacgtcgagcaacacgtccacgaaatcccggtgatcgccgccgccgccgtcgtccatctgcctaccgacctcacggcggcggcgacggtggtcgtcgatcaccttctcgaggatgccgtccagcgcctcaaatgtgcgctgcaccttcacctccattccgttcaaagcgtccacccacccgagccatggcaggagctcccccatcggctcttgcccgagtagctccacgaagtcgtcgaacagcttcctcagcacgcgccccctgtcgaagtcgccgtacaagccacgcgcgctctcgt

SEQ ID NO: 44546 - DNA, 3130 bp, Oryza sativa
gatttgatgataagcctgataaaactatacattgatatacttatcgagttatttggcccagttctgaagtatagtaggaaaaatatggtcacttcacggcaggctgcctgaagatgcaaaatcagctgcaagtcacatggcatgccaataagcccatgaccatttgtaattttgtactgacgtagtgaagattacagcctccctacgataaaactcaatgaggtcagatttattctgcattagctcatgttaagattgaatacgagatctccgggttaaaatcacacacctcttgttatcaagtgcatctcatggttccaaatttccaactttacacttagcagttagcactggttgtggatgggatcgatgcatggatgatcgaatctcttcgcctttgcgttttgcaagagcccatggctccatgtccgtccatggcgtgcacatggcaacagcgtctcacgctcgcgatcgaggagcctgataagcctgaggcactgcatgcgtcgacacgatcgaccggtcatctcagccagtggtggctttccggtcaactttctcccctccctagcaagcacaccatgctccccagcaatggcagcaatggcaatggcgctctctctgtcaggtatcttttgtcacatcacctgggactgcgaggtgtcgccacacatgcatgcaatcccgaatgcatttgcaatttatttggatttgcatttgctttgcgttgcatgatgatgccattatactatggcccccccattgcttgctcctctcgtgctcacacgaggtcacacactttgttcttgccttcagtcttcagagccagtacgatcacctgtgtgaatatatatgtcacatcgataaagcagtgtacgtagtaggtgaggagcagtgcaactctggtgatgaatggtgatcgattatgatgacgatgatgatgcagtggaagcactgtattccttcgctgtagagattggaggatcgatcagcaacaccacatgtgcatcggtctgtctttgggcgattcattgggggtgtctctggtttggtccttgttgccattggcttctttggaatgcttaaaaaaaatttctccaaaacatggctccatttcagttctgtactgctccctccgtcccaatatattaaaacctagaaaatgtcccatcctgtcctagattttaatatattgggacggagggagtagtagagagcagtgatgctgtttaagatgtttacgttggagactttggaggagagagagcctccaaaacagcagtcatggagtcattttacatggactcatcaaggtgaccactcgcctgcaaagtgcatcgtttgctgtcagcatgcagttcagttcagcgttcagcactgcgactgctcgagacgaatgttcaactcatcaatatatctgggttccaaaaagtgtgtggagccaaagctccaagcatcatctacagaagtgcagagaaggaaccctctcttcttgtgatctcttcgtccttctctcgggtgcaataattcagaggggccaattcaacagtgcatctggggctagaaatagaagagctatttggctacaaatctagctcttgtccccctcacgggtgcactgatcaaacaatataggagtggtgtcttaactctctaaccactgtttgagctttgagccagtcaggtttacacagttcatattgctgtagcatgctttgctctctgtgtgtgcgtgtgcagtgctctgtctgaagcatgacaagagctaataaacaacatgagctagtattactgtagtagtactcccttggtacaggaaccaaagtccggactgctgtaatttgggaaaagaagagattcggggttgtttgaagtcttgcatatccgtctgttgcaaacggttcaattccaatatctcgttcacggttcaccaaggccgtgtttagattaccccaaacttccaactttttatcgtatcatatcacatcaaaaactttcctatgcacgtaaacttccaactttttttccaaactcctaacttttcctaaacttccaacttttttcaagaactaaacacacctcaaattcacgtctcatagacaaatcctcaaaaaacaccatattaagaggtgtcaaatcctcaaactccccttcacagatttaagaaagatgcgccaatgggatatgaatttgcgtggttgatacaaataaatataatagaaagaaatttacttatagaatagaatagcttgtcagtctatatatgaacctgtgtcaaaaccaggacggagccaggagagtaccaggtaggaacaagtacacccaagattttcagggaccagggattatgcatgtatttgactagtagtacttcgtatgttaattcaatcataacacgaagtgggagtaaggtgcaaaaagaacctttttgcatggacgattcttggtttgtaactagggcctggtttagttcccaactttttcttcaaatttcttcaaatattcaattttttcatcatatcaaaaaatttcctacatacaaactttcaacttttccgtcacatcgttccaatttcaattaaacttttaaatttaacgtgaattaaacacaccctaagtaatttattgtttaaatttcttagctagtaattatttagaaagtgtttgagaggaggggaaaggttaagatacgcaaaacaagttgagttattagcgtataattaattaagtatcatttatctatatgttttttcaacgccgattcaaaccctcatgttgttgccacgccgatatgcctcctcatgcgtatccttcttcaattgattgtaaaaatcgattctccactactctctcgtcattgttcccatgtttttctatttcatttctaatttaattcatcggattgaatctccattttaaatcgtagttttcatctaagttttacatatttgctccgattttaataaaaaatacacgtgtcagttttatggaggttgaagacacagctggctatacgttttggacctatagctctacttataatcaaagagagacagaccaagccgagagatagtggattgggttagtaaaaaaaaagaaggaatgaataggctttcaaaataatatatgg

SEQ ID NO: 44547 - DNA, 547 bp, Oryza sativa
attcctgcagcccaatgttgcaacagattgtgcgcgccggcaaagccatcagcccatgccccatgcccgttaccgtgccgtgtcaccaacaaatcaaaccgagcgccaggtgatagccagaggccgccgacctggcctgacaccggtgggtgggtgtgtgacagtgtgagaggaacaagaggaattcgcgtgaaacatcgccaaaaaacgcccaaatttctcgtgggattcgtgtgaaatccgagcaaaactcgcaaaaaccggtcgactcgtgcgtgcgtgccctaccccgtgtcggcgtgtctcgcggtgtcccaatgggacccatctctggtcgttgcctgtcgtccgtctctggttaccatgcgacgcgacgcgatgcgaagcgacggctcgcgtcgcgagtcgcgcgacccaccaccgacccggcccaccgcgagcgagcgcatctccgcgcgccacgaggccgccgctggcaggtgggacccacgtggcccaccaccaccacctcctcgtcctcttcctccacctccccccctctctctct

SEQ ID NO: 44548 - DNA, 3341 bp, Oryza sativa
cccggtgtgatagttgtattcatagagaccaatttgcaaaacacataagtacagccaaaccctcagccaggaatctttgaacacccctgcacacccggagaagaggagaagcagccccgaagctaaccacgaagtaatgatccaccagatgccatctttgtgtcgcatcgatggacaagaaaacatctaacaaacctgtcacccactgtacatacatcatttgaattactgtagttgatcaccatcaaacattcaggagccagccaaaaacgccatcctgttctgcattctgcatgcatgactgatgagaaaccaggtcatcagtctccgcacctccacagtaccgcgtgtgaactcggcgaccgttccaatgccagatttttcacctcatcccggtggaaatttcatcgcgtgaattcagcatgtggttggctggcggcaacgcaaggcgtctatatatgccgggaacgacagcgatgtctggaagcttccactctctttggtgtcatggtgtgcgttactaccttacctgcgctttgcccccaagagaactaggccatatttaagttcctaaaaacttttcgcaaaaatatcacatcgaatttatatatatatatatatatataaaatattaaatataaataaaagaaattaattgcacaatttgcatgtaaatcatgagacgaatcttttgagcctgattagtccatgattagtcataagtgctaccgtaacccacatgtgctaatgacagcttaattaagctcaaaagattcgttttgcggtttacaagcgagttatgaagttagttttttattcgtgtccaaaaacacctttcaacttttagtcaaacgtccgatgtgacacctaaaaatttttatttcaccaactaacaagcactaattaaacactgcaacttttactatgttacacacaggaggcgcctgtacaattaatactataacatgcagcagatgcatttcaaggcaactgaaaagtacttggttaattaactatcctcagcttcaggtttctgaagattgattactatctgatcctatcattgctcggtgttctagatgaacaacgactttttgatgcaagtctcagtgatgatttcagctgagttagcttgccctgatcttctagattgtacagccgaggatcagtacagacacatggtctgaactatgacaaaaaatgtgatgaacttttgttgggattgtaacatgtgacagtcgtattaatatacagtatctgcttctagaacgaggcatgcggcaagacaaacgtaccgtccggattcaggtgattctgttattgacaatttaacaaacctcaatctaattattatgacaagatattggtcatcgttttctcagaaaagcatctccctggtaattaattcttttagtgactagagtctcatcggttatccaaatttactaataaatcaattaatttataggtaaaaatattatatatttattcgtagagacttaaaagctaacgctaataagatattatattgaaaatatcttaaaattaattttaaaattaaattcgaaaatttaaattttggtttttctttgattcaatggagctcctagttaacagttactaatacggagtaaaatttgacagatttcaacgaagaaatttgtcgaagtttttcgaacatcggactcagaacttaattactcttctgactgcctcttgttagggtaccggatatgatcgacgactgtgcaggtttatgccttggttaacaagaaagatgtgagaacaattttctaaggttggaaaatatgtgcacgtcaccaatcctccaggattattgttcaacccaagaatcttagaatcgttacttcaagtgaaacaaatatactgtacttatctgcagtctgcagagacttttatttcctgtaatatttgtgttgaatctcatggccttattaatgattttttttctttcctaaaacgtctggagggacatgaatcatgctgtagttatccttttttccttctcaataattcaaaattcattcagggacacaaaatactgtcggcaatggtggtctgcggggggaaaaaaaagcctttttttcaggtcagattctatctaaatgtattcttttttttttttgcataatctatctaaatgtatttgatttgaatacaataaggaacttttaaatactggtttattcttgtatctttaggaaataccgattgacttcattgactgcatagtaaccgaagtgaaatatctttcttttttttaaaaaaaaagtcaacccaagaatcaaaattttaaaaaatcactaaagactcctttggaacaaggaagtttggagcatttgatgaaataatccgttataacatagtatctcaaatttcaaatcataagcttttgagattgttcatttcagttggttgtcgcagctacacaatttacggcttgttcgtagtagtaaaagctttctcccgcagtagctgatggtgcgatgactacggctttttggagctgtagtcgagcggctgtgccatgccgctgcagcctaaaaaatcaccgtaacatgccctttgtaaagttgtaggccctgtttgatacagctccaacctataaatttaactctagaagttaagtgtgaagtggagttgtggagctgcctaaacccaactctacaactctagtatattttgtgaaagagctccacccaactccactcctaattttaatggagctgaaactgtttggctgagctctagctccaggaggggtggagctcgagctgaagctgtgacaaatagtcccgtactctcaaaacaacacttcaacacgagctgcgcagtgcacctgaaaatctgacggccccaaccaacgaacgcccgtgagttagggcctgtttggggagctttagattcttacaagcagttgtttggtagccagcttctgagaatctggaaaagttctgaaatccagcttctccagcttttggcttcttagttcatttttgagaactacagattctcaaaagctgtgaactatttaagacaacttttagcagaagcagtttttctgcagctgggacaagctccccaaatagggccttagacctaacccgccccgttccgtttcgccgcggaaactgaacggaccacgtggcccccctcaccgtcacgcaacgcgaatacgctatcacgaacggcatccagccacctgtccacgtcgcctccgttccgcaatccgtccccaccaccgcggcagccgctgccaccgccggtctccctcctcctccaccaccactccatcccccgcttcgcttcgcctccacaaa

SEQ ID NO: 44549 - DNA, 3003 bp, Oryza sativa
gagcggggatgttcatgtgttcatgtcccattgggttcgtctgcagcgttggattaaaattgtgtggtttgtagagagcaggatgaggagggggtaaatgaaggggaatataataaacgtttggcccggccaaacctggtccattatgttagcccggcccatttagggagcgacccaaaattcagtccctaaatgggcctaccaatttggccctgtggttcacgtggcaatttttttaattatttttagaactttaggggtatttttttaaaaaaaaacgaactctctcaatacgaatggttaaatgtttatatttatattttttaaataagaatggttaaattttatatgaaaagtaaattacatcatacattgggatgaagagagtgtttatgtatttatacaaaatctagatcttatcatcctgtctaccatggcaacacccccgtggcatgacatatgtagtggcgtagctaggatttaaagtaaaggtggttcatctatatgtagtatgtcaattaaaagggtgatccgctatacaatttttattatattaactagcacatatactataattttaaatttttaggtggtccattgaccacggtgccacctagctagctacgccactggacgtatgtattgttttgccacactatttaaactaggagtccaaaatatttaagttccaaagcaaattttgggttctatttttagaattttctattaaaatggttttcaaatttttaaaaatcctcaggaatgcagccgagcgtccgaagcttgtgcactgcatgagcgttactcacactgtgtcacactgtcccgggtcaaatgtgcaggcaggtggcggtggatgtgcaggtatcgtgtacgtatgcaacgctgcgacttgttagagcaagtttaatagtgtagccagctactagctccaatttatttagagcaagtataatagtgggttataagctggctaaatggtaaggtggaggagagaagagaggagagagaggagaagcgggctgtaaacttaccgccggtttggacacaagaaccaaaaaactctgtgagagagacaagtagaccatgtattaattataaagagctacactattatatgggtagactgagagaaggctatagaaaaccttatagccaacaggtcggctgtattattagccttgctcttatagccaatctaatagcttattcatataatagttatctatgaacatatactacatcattaatatatagtttcacctttcatacacacgatgtattagaatccgtgttacagctgattatatatctgtagcccgctttccttctatcttttatcttatcttctcttctcttctcttctctatgtgcttacagataactattatatgaataagctattagattggctataaataaattgaagttagtagctagctacactattaaacttgctctaacaagtcgtagcgttgcatacgtactcgctcgttccatacgtactcgcagcgtaacaaaatttgcttctcttctctatatgcttacaggtaactattatatgaataagctattagatataacaagtcacagcgttacatacgtactcgctcgttcaatacgtactcgcagcgtaacaaaatttgcttctctatgtacaatagtctgctattgtactcgctcgttacgtgcggccacaccgttagtcagaggaacagagggatcgaacgacgccaaatgagggggagaaaacgggaagcaacagcggcgtgaggcgagggatctcgggttctcgctggcttcacgcaattgccaacatcctcgagtagaagtgtaggcgtcactcgatccgtgtagaacaactgaactaccagacgttcgtccgtcctgggaccgaccgaaattaacggtcgccggcatgcaccagtagtcgttggtgtcggcttcaccagtggcccagaatcgcccaaccgggcagtttcgcgtccgcgacctgcaaattttccaatttcactaatccctccctgtgattgattaatctggagtattcggtattccacccacgtggccgtgagcacgagacggcacgagaactcgacgaggcatcgtgtgctgtgtgcgcgcgtttgtacgttgctcagcgagcgaatgctaccggcaagtgtcaagtggcaccgcgtttcgcgcggcgctcctcccgtttagcccacacaggcacacgcaccggcacgcgctccgcaggcggatccaatgtgggtacaaggggattagtctcacaaaacccatagataccccctaaaccctcctcttaatttttttatcatagttgataagatataggtgctaaaggtatcataataatattttagcatagtttaatactgagattatatgtttatatcggtgtactgggtatgttgagtcccctaactttttatttctgatctgcccctgcggacatacacgagcttttgcacgcacgcggtgtgccccggcaggccggcaccgtgctacattgccacgttggtgtgcctgaaaagcggctcaacttgagtgacatttgagctagcatagctatatcttgacacgtcatttttttccctctacgaggtcatgttcttttcagctgtgtcggatcggattatttgctcctatctctaaaacggcattttaaaagataactttattctacttcattgcttagactatttgttctagtttttcaaaatatatttctcaaaatatctaattcattttaataattttcacgaacgcgcaaaaggatcgcatgttaatatattagaataaaatagagtttgtttacccaacgcaatcagccagaccggcttataccaaggaaaggaagatatttcaataattaagtagtgggcaattcatggcaataattcacatagtaatctagataaaaaagaaataagaagacacgaaccaagtgatgggaaatgtaaaagtttttcaggtgggggggggggggtgaagctt

SEQ ID NO: 44550 - DNA, 632 bp, Oryza sativa
ttggctggcataaacaacatgggggtccagccggaggtgacgagtgtagcagcgcacatgtggaagatcggatgctattatgttcatgaagttcatggcgaattccgcattgatgagaaggctttcaacatgaatggcttatatattaggaaaggttatcaagtctactttccatcgaatcaaacggcatgtcattccgagctttctaccaacggcaattgcaagttgaagacatcctgtgcgggcagaccgggtgtcgcgcaagtaacaacaatggtgatgagcgtcggctttgcacggcatggttggatggagttatactatcctatggcccatcttgggttgggaaggagtctatctattatttctccacggattgaagccttccaaaaccatcagtttcaagataagaaagaaaagattcagttcggactcggtttgggccagcttggacatacatggactaaaacgcttgtttctctctcgttcgtagtccgttttggacgtgtgagcactcgttggaaagctaacttcatgccccaggtggtggatagggctcaggacacaaatttgttctggttccaccgcaagagccgaaacaaattgacggtgctgcagagaagttccatatt

SEQ ID NO: 44551 - DNA, 1243 bp, Oryza sativa
ttcctgcagcccaagaacagttaatgcgaactgtttttttccttgtgtaacacgcatattccgtttaacttaaatctgcatccagaagtgcaggtatttctctctttgctaaatgaaaatatcgaagatgttcagagagcatgcgagcttcactttcagacctgatacaatgtccaaaaaatctcaactcctgtttacagaattacagctgaagaatttcaggtcgtgtatccaaacttatgtattgacctcctattaaaaggacttagcaaatttcaccatgaattcaccatcgctgatgaaaaggaacgaatgctagccggtcattgctgaagaggtgccatacctttatgtacggtgtttccttcagagaaaaggccagcaactgcatgctctcgaatagaggaagatccaaatatccaatggaatgtaccctgtagcagtaccatcatctcaattcaaaccatgagaacaatttgagctcgtggctgccgagggccaacgcaaagcttagaatcacaatcactgatctactgaagatcaagaaaggcaggttgcttttagtagtagataggcatgcagatgagcgacagggaggaccattgctggagcacaatattccaaaggaaacctgaaagagagatcaagagatggtgcatcggcaaataaaggttcatggctcggttgttcctctcgaatagtcctcgttctgccaaggagcatatgccatcttagatccatatctcgaggccgatggcgagctatataagcgaggtcaaggcacaaccatgttcttccaagagagcttgcagcaccaaaaaaaaaaaaaaaaggttcttccaagagagcttcaaaattcagaaatgttaaggttcaggatttcagattcagccacagtatgcagtgtgcgaccggcgaattacagggcggtttctcctttggcacgtacggaggcaaggcatgcggtgaaaaatctctagctagccatgcgtgccaaaggagaattgccctgcgattcaccaacacagccatgcagttctcgtcccataatgcaatctcatttcgcaatgcatgttcagaacttcacattagctcgcttttgtcactgaatatgataataatggactgccttgctgcaggtttactcaggatggttctcacagcaggcaatcgctcctgcagttgctctgcatgattagaaataggacaaatagggtttattgatatggttaagagcaagagt

SEQ ID NO: 44552 - DNA, 2205 bp, Oryza sativa
ttaagcggttgcgttagttaatcgcgtactctgtatagtatatagctatagtgattctcttttttttttcctttatccctaggagttgtattttctcctgctctattcaatgaaaaggcactctcgcgctgttttccattaaaagaaagagaagaaatgagcaactacaccagccgacaccaacacaatgcagatcgcccagcgcaagatcgaaaacgagcagtcgtcaaatggaaactgaaacagttagctgcgcaaaagtttaatcacaaaaatcggggccgttaaatatcttcagaagttcagatatatcatatatattgtgctacgaataatgccgattcgatctcctcgcggtgcttgcgtgactatgctggcctctctgcacgctgcctataaatacgatgagaattcgaatcctcggagaagcagatatagctagctatacatgcatacaggcaaagaccagcgaggtgtctctgactttatggggcccatgcattactgggcaggtctcccttggcagtggccgatcgagctgatcaaaccacgcaaaagccactgccaaaggagacttgcccagcaatgcagatttgaggccacaaagatcacattttatttcccttgtaatcatattaccatagtgcgcagagatgtcgtcgtcctcggctgcagatcggtctgcatttctttgcttcttctgcatgcgatcgagtcgtcgtctggactatactatcggcgacgcatcacgcattctgcattcaatattcatgccggccggcgtgctgattcccggtcaataacatggacgaactcgatcactgcatgctgcatgcatgatgcatttggctaacgctgtgtttagttcgtctgttcctgtgccacaattttttaaagtatatggacatacatttaaagtattaaacatacactaataacaaaacaaattacagattccgcctgtaaactgcgagacgaatccattaagcctaattaatccatcattagtaaatatttactgtagtaccacattgtcaaattatggcgtaattagactcaaaatattcgtctcgcaatttacatgcaaactgtgcaattatttttttttctccacatttaatgctccatgcttatgtccaaacatttgatgtgacagaaaaattgaaagtttgacgaaaaaattttgaatctaaacacagcctaagtgcaaattggcatttcatttagaggttgtcgaacatacttttttaaacactaaatacccatgctttattatgtatagaataaaatatataatatgccatagacatatttgcttatttgatatatgatgaataaatatgagactattatataatattagaaaatatcatgaactattttgtaaaaaaatacaaaaataatggtggtatccaccactgttttctataatagtatatagactcgcactaatctatactactttaaagatgttggtggtggtgaactagtgatgccatcaccaccctaactaccatatgagggccgtgaaaagtgaggagaaaactttacatttttcctatccacgcaagcaaatcaacccccccaaaaaaatgttaatcaaacactcttattatggaattcttcgtcgctctatgatgtactattagacgataagaataacttattttagagacttcaaaaatatatagaatgaactatttttttttagaaaaaatccattgcaatgccatggcattatgctagtttacaaaaggtacaaaagtagttgtggtggcatcaccactctagtgtcttttatagtactttggatgtcctataataattgtatttctattatttgaatttgtctcaaaataattactgcaacagagtattaatggtctcattaatcacttctcatttaaatttctccatattttacccttaattacccttccactcttatctatacactatttagtaagaaaaatcatagtatttcgcttcttaaaccttataatatgtactaaacaatctagaattataattattctgtgacgaaggtagtagcatagatacaaaattttctgaggaggggaaataaagtctcaacatgtaaatctggcctattcaacatgttcagatcagatatcttcgcaaaaaagttgctttaaaaagttatattaaattatttttcaagatttttagctaatacttaattaa

SEQ ID NO: 44553 - DNA, 1393 bp, Oryza sativa
  unsure (1)..(1393): unsure at all n locations
atctctcgcgcgcgcgcttacgtacgccacgcgcagaacgctcccgctcgcgtcaaccttgtattgcagccgcatgagcctgaaaaacacgtgagtaccccgcgcggggcgcgcgcgatacgtacgagtagtaacctgtagaaggacgaggatcttctaccataataacattatcattacaatcacaatcactaatacgtgggtttcacttttctatcgtttcacacaacagtatatataatggtagtgtcattataatagatagaactcgtgtacatcagcaaacgaccggtttcaccgatctcgcccttgccgcgcgctgctccgcctatcttgccgctgcacgtacacacaaaagaaaacgtgagctcgatcgagtgccccgatcgggcgagtccccgcgaaacacgtttatcgagttcgggttttcacagcgcgcgtcgtggcgcctttgcttgcctaaccttggcaggcgcatggatctgatcgatcgacgagctgcatcatgcatgggcaaatagggcaatgcagtgcggacgtgcggtgggagtgggacgggttcagcgcaggaaccaagaaaccggcagcgaacatgctcatggatatccctattccttctctcttttgatctcgcatgcgggcactttttccccttgattcgatccttgttttccagtggtctcaaggggaatcaatctgcaaaatcctgccttttttctgaagtagcacacgatcgaggccctttgagcctgtccgacagaccggtgatatgtccagctctgggtggtagctgcagaggcttcctggaggctggagatcagcttgctactaaattgcgttgtgtactgctgcattattatggtgatgaaatgacctgtgtgactgaaagtctgaaaccagtggagaaaatcagattgagctagatttctcagcagatatttgatgctacttaactttacatggtctggacagcaagaagctaggctaagaataaacggggaagtagccccatgacctaaaaagattggagatatatgcactacaatgatctctccatttcagactttgttcctgtaagtgggcacaatctagagagcaggcattgtcctacagtatatcctatcagcctccgtgtgcctttgcaggaggagcagagaaaggccgtgnnnnnnnnnnnnnnnnnnagctgcaaaaagccttgctgcctttcaccatgcaggagcgagtataaatatcactgcacaatgatcagtgaactgtgcgctctacacatgaaactaaatgtggcacacggatagaaataggttgagaccatgagatgtgcagctgcattgctgggcaagttgtcctttggcagatgttgcagttcatcatcgatgctgggggttaccag

SEQ ID NO: 44554 - DNA, 736 bp, Oryza sativa
gcgctcgatctctctctctctctctctctctctctctctctctctctctctctctctctgagctgttcctctggggtgtctctccctctctcctgttcttgcgttgaagaaagaagaggctcccgcctcccaccgtccgattggatcggatggtcgagacggcacgtgctagcgtacgcgtatctcccgtctcccttgcctcccaccgtccgattggatcggatggtcgagacggcacgtgctcgcgtacgcgtgtctcccgtctctctttcttctcaaacgtttaaggcttaacggaatccaatgctactataaattccaactatttggtagcccgcgcaattacgcacctagcccccatataaaattatttatatatatattgggcttgatcggtatagcttgctgcgtctgtagctgtgctgcatctacagtatcaatagcatatttttgaattggagctgttgcagtgtagccgcagcaaagctgaaccgatcaagcccattttaatatgtctttttgaaagaccaaatattatcataacagtatttctaattttatttttttaaaaaaatcacaccagttgctacgccttacttttatcatcccttctttatttacatacttgatctaccactgtttttattaattcttctcgaaacctttaaaaattaaaccttataatttttagagttttttttgtctcgttggtttcattttaacaaattttagaagt

SEQ ID NO: 44555 - DNA, 3482 bp, Oryza sativa
gctagaatgacttacattacgaaacggagggagtattttttttaaaggacagcaaaagctttgccatgtatatattaatagagaagatagtagtaattttttttcctaaatgttaaaactttgaaggagaaaaaaaatgtgcagcaactatccacatagtataaaggaataagaatccgtcaatataatttcgttaaaaaaagaatttgtcaatataagggctacaaaacaccatctcaagccagtgtctactcaagaaagaaaaaaggagctcatatggtctggcccaaagctgagaggctaacacaacacaagcttgcagcccagcacaaactaagcctgatctaaagcaggcccagtccaaacttcaatacagctaaagaaatgtttggcataaatctatcgattggatggatgattaatggaacagttgttactaatttgacaacccagagatcggtttgccccaaaaattggattcatgagataaaaataagatgaaaaagtgaccaaccttgaccatacacccatgaccttgcctttcttgacctttatacacttgatgtgcactaattagaaaatttgtatctacgcatgatactaatggccttgaaataatattgcaaaggaatgaacttacagagtcctagttttcatatacatagtactacataaagagccacgttgatcatctacaagactcgcgggaacaatacctgacatatagaagtatgttcacaaatacaagaataataaagtaggtagtcagtatataaatagatagcaacacttgtatgacagattatagatgaacttgtgctttgttgcctgcagggtggtcacatattagtaagcacatttttaggatattagcaatgaaatttcaaattttagaaataacttacataaatttcgaaaatagtctgggagttagaatttcacaaataaacttacataagttagtgacaacctaaaattagcaatcaatttcactgctctttcttttgctttcatatgtaaaaagggaaatataagtctcggaattctattgctaagatgatggcctgcaagatttccatttctgtaaaaactgccagttgcaagagttgttggtcatactcattatctctatggttgagaattatgatcgctaggatgccgagtctttcctttggggaaatggtgcattctattctgtatatatatagatagatagctctttctgggtactctcaaacctttcctataatagacggctttggcaaaataagcattaagtttctctataaacacctttgaaaagggaaaaaaatcagtgaaagaggtataccgaaggagaaaagaactatagtcacaatatgttcattatgctccaggttgtgtacacattgtgattatagttgtgcaaggccacatcgtcattccctataaatcagacggtgacatgaaacaaaatcacaatatcataccacctactttgccggtagaatgcaagcctcaaatccatcgggtcactagaatatgaatgagctaatgtattgacaatctacttcaattagttatatcttattagctaatatacaaagccttgcatatccaaaaggataaaaaataatagataaattaccaaaatgtgtaactcttggaggctgcagcaccataccatcctccaatccaagcacgaatctagttggcagaatagcaccaaactctatgatggcttaaaagcttgacctgccgtgccttgcaggtgatgtttatgtctggcaggttatgcaacacgctcatgagctcgtcatcgggctgttacgaaatacaacaaacgtgcatagtttgcataaaaaaatgtgcatttggaggaaactcatgttctgaggtggtaagaagggttctttgggacctggtcggggtaattgtgcttttggtcttttggtcattataccttgctgaagaaaataacaaattccaggagccactgtatcctttttcaatcaagaaattagccgcatcaactccaatatggatttgcgtaagatttttccttcagcctataacatttccctaagaacatcgaaacaaataaattagccatgaaaagaagagtagcagttaggttttgtcatggaagtaaaaaagatagtacatgatgagcaggaaaataagtaaaaaccatgcatctactttgtttgtgcatttattaaaatctgaagaaacaaaagtgtgtgtggatatataaactcataaaaacacaatgatatatacctgtaattgaaatgccactttctcagtgataccttcctaaacaaataacttatgtacaaatgcaagcatatctttaccatcaacataacaaaaaaatagaacaaagacatttttttttattttgacagtgaatttgaaaaatagggcacatcagtgcccctaggatacattcattagtgggcctaaatgcattagggtcaggttatttttcagtatatctcaaagctaacaggaaactaaacctgaattaattggttacatggctgcagcttttgtcaatgaaaaaaattaggcaaaacaagttaaaatggatgtggcaaacaatgctaggaatgcccaatgtggcagatctacaagttcattggtatgttcatctgttcatggattcatgccctttggattgactttctcatgtgcaaacaaacgatatttggaactgactttatctggttacctttttgataattccggtgttcattaagcaggcctcttataaacattatattgtatgattctatgacaaaacatccagagagaagagatcgatcacacatagcaacctgcttgtgcagcagatcgccggcgagagagtataacagaagccacctggcgtccgtgcccacggcgacggccactctctcaccagcctccccggcgtcctccccagcgagcgggatccactccacggcggagatccggccgtcgtcgggccccagcgcgggcctcaccgtgaccctgccacctcctccggcgaccggggcaaccgcgagcacggaccgcgccgcaacggcgacggcgagggcgcgcgcgcgcggcgcgaggggagggagcacggcggggtcgtccagccacccctccctctcgccggggcccacggcggcgaggtcctcggaggccgacgtgaggagagccacctccgccaggtagcctcgcggcgccatggggaggggaagcttcgaggcggcggcggcggcgtgagagggagagggagagcacgggtgggacgagagggaggaggggactggggcggcggctagggttggggaggcgccggcgccggcggcgtgagaggagagggaggaggagaggcgggcggaggcggctagggttggggccttgggggcgggttagtgcgcggagctttgcgaaaaagcccctagtctttctagtttcacacagcagtcccaacgcgcgattttcccctccttctcatgtaatat

SEQ ID NO: 44556 - DNA, 8591 bp, Oryza sativa
cacctcacaggtgctattcgcgggggactgcggccgaattacggcgaaccggagggctatttcgaaaaatcgccacctcgctcgccccatgcgcgacgcttaataattccccgaagagtgagagaaggcaaaaaggttgggttcgatccccaatcgcgatgtgctagggtttggaggcccgtgctcagtcctcgccgccgccgggcgccatcctccccccctgcacctgctaaggtcagctttctttctttccgtgtctttaagttccctgttgagattcgatttggattccttgctgctcaatctcatgggggcctgcacctcacctgacctgcttcgatcacatctcggactgatttcgttttgtttttggttttagcccctttttttttcttataagcagcaagcgctcgccggaaattccaagcagagagacgcacggatcagatcgccgacatgtctaggcgtttcttgtttcagaaattttcagtgctgtccggatcgatgcctaatcgtcctacctccgctgtatgtatacacgctcctccaaatctttcaaattttttatttttctttcacaacagggaagaacataattgctcttttcctcctttcagcaaggaggagacgtttctgctatccacgatgctctccgtcgttttagcacggtgcttcccaattaccatggccttcctgtctctgtaagtagctattactcaatttctttgcctagcactagttttacactttcaaaccggccaatttataattcctttcctttcctttttttcttttttttaaaaaaaaacatgaacaaggcggtgccttttcttttgtttcctttctcacatctatgcaatttctgataattttgatttttccacaatataagagtgaacttgtatgcctttggtgaaaaaaatattaatttccttatactgccttccaatgcagcaagcaaagtgcctgaattctattcaaagccctcacgcagccaccaaattaaaccacccaacaattggtgtggttccttttgccagccggactttcttctcttatacaaaaccctaccacctgccttctctgggtgaaaccaattaccctgattatgtagcagcagacattaaagcgtaagtctgagtactagcctgtatcattttacttcctgttactttaattgatgtgtttattgttggcttagcccgagtcttgttctactccctccgtttcaggttataagacgttttgactttggtcaaagtcaaagtgctttaagtttgttcaagtttgtagaaaaaaatagtatcattttcaacctaagacaaatttattatgaaagtatattcaattattgatttgatgaaactattattagtattataaatattactatatttgtctgtcaaacttgaaacagtttgactttgaccaaagtcaaaacgtcttataacctgaaacggagggagtactatagataaactaaatttcagcttatttggtcttttctttatttatggggtcatttgagagcatattgtcattgtaccgttagatctggttacagggacggctgttaaggagttacaggccagatgatgattttattgtttgtttgttaatatgtgagcaacgctaagaaaattttagttcatcagttggctccttcccatagtacgtgattgttggaaagcaaatactagtaatctaggtcgatcaaattaaacataatcgaatcaaagaacctgtttacaggaaaaaggtaagctttgctcccctgaactttagctatgggaatttttgtaacataggttctgatcccatctatcatcccataaattttcaacttagaacacagcttgtacgacaggaagcaaaaatggcagttgtttttagggattaaaacaagctatcacttcttttggtgaaatagttccgctgtagaaaaatggactgattaacttagttatgcgacatgagcatctgcatgtatagtttctcgttttctggagaaatctccagttcaattgaacctatgaaaactcgatttctctatgttcacgaagaaattattaaaggtagggataggcatgatctctttctcaccaaatttctaagaccaaactcaacttcgtttggaaagttaaaataagacaaattttgcatgaaacttccctatcactatccgtgcaaagtttgtatttcttgtatcttgcaagcaaatttgaatttggtcttgaaattttgtggagatatagaccatgcctatacctaccactaatatttatggatgagagtcatctcgctgggatgtactagaaagtaggggtggtctattttgtttattttgaatgaatgggtttattgttggcttattgtaaattgcatttcaacttattccatttttattctcccgtgttgcattttgagcatattatgtcgttatggttgctctattgttttttctaaattgggtcatttcccttctattttctccgtcccataatatcacaaaatttgttggacatgagacttgttcagattcgccaatcctaggttgctatgggacagggagagtataaaatattgaactttacatcatcacaatcagaagcataaaatcgcatcagggagagaggtgaaggggagtaagaggctgacgagtgggtcccacaccttttccacccgagtttgccatgagggcaaaagtggcaaatagttaagaccatctctaagaaagggcaaaaaaaaaaacataagaagggtattttcgtattttgataattgtcaaacctaaaagtgacaaatagttaaattccccgtatcagcttacagttactgatggtgtctctgcctctctgcacgttattaacaccgttcgcgaacatacttttttttttcaagatataaatagataaaaatttagcctttggttcaacagaagctagctacattagagttggataacttaaggtgcttaattataaacaacagccgcccacacattaccaaggataacttaaggtacccaatacataatcataaaggttggttgcatgtttctcatatcgatcgccggtgcttctaaacctcatcttcgtcaattcgacgcaatcatttcggcaacgaagtagcctgaaacaacggctggaataatcacagccaagttcaaacgtctctttgctgtcttgagccttaagtagttactagaggctggggcgcgccattgcgcgccgcctgcacggattaaaatctacgatgagggaaatctacgataatttgataagtgacatcatagattacagttcaacagttgtggatatcaatagcatcgtaattagtattgcttcgtccgtggtaaatatcttactacagatggacactttattatcaacgtagagcatctctgttgaaatttcggttcattagagactcatggttcacatgaatatacaatattttcattacataataacccaaaattaatagaaaaataatccctggtacacattgctatacactttgggtttttgcaaataggacaactgaagaataatgggcccaacttttcaagattacattcagcatcccatcatattctgaagaatccaaacatgttggaatgtaaataagtacatgaaagcatacgttagccaatgaaatcatatattgagaagcacatgcagataaataccataccctaataaaaccttaccgcactaagtgcccgagcacggaaaaactgttaataggtcaaccagtgataatggaacaccaaaattccattgatgtttatttatgagctagcagctaattagaagtgggcaaaatttactcagctagtaatatatatcatgcaaaatcacattcaacacatcaaccagaaaatatgatttttaccatttaagtaatgtcattcaatcctgctacccatctatcctcacagctgaagttgtagccatacaagataacagtaaattataagtggaagcaaagctatagaggagctattgtgccattcatgcaataattaatattaggatatctcaaactgaaagtgagaaaagcatgaatatctcaacgactaatcaatctacagagggcccccatcttactgatatatagaaagtagtggtggtgatggtagtagtctatgatgaataatattgtaaatgattaaatcattttgttagctacttatctgtatatgcatgtgtctatttaggtttagggataccttttctttctagtttacaacttcaactatatttagtttagatccattgcaacgagcaggcaccattgaatcccttttctaatgtaacagaatgttatgcccaattttactttcccttgtttcatctggtccaatcgtactattatatggtttcattgaacctgagaaaagtggtacacagtcaattaacatatagagtaaaacatctaactataaatatttgcagaggaaatgcatagagcaaaccacaaacattgataaccaccatcttatcaaagaatcgaggttgcaaaacactgatgcattatatatcataaacaggttccaagattgtattaatatgagagctgcataatccaatatgagttatttaaatatcacttaaatacgattaaaaagaaattaagcattgtagaaaaacatggatctttaaatgccacatttctataactcagaatgaagtttagaataaaggtgagaccattgtcagatttattgggactacagacaacttcaactgatagagaacctaactattttactttgcttcatgaagggtggccactactaatgccttactcataaattctggaaatacttgaacattacagacataagactgtaaggtgcaaccagatccctttttttcctcttctataattcggagtttttcaaaggagacatatgattgcgaaatgcattaaacttgtatacagtaaacttatttagcagtacatgagtacatgaccaggcaaaatatggaaagaaaaaaaaatagaagttatggagaaatcatcagataggatatatctactgaacttaactattgcactaagggcaatacatatatgtttctgctgttattagaagcatgcgattctcgagtttggggattgttttcgcatagaggaggtcgatgacatacagtagtaggtgatcactaatatatcagttgatgccttcccagaagtaacatcaacatatattgaacaaacgcacgaaaaataattccagcatatgtgtcaacctgatgaaggaggaggagcatagcaaagaccaagccagtgcctttggatgatggcagctgctggacttggaaacctgggcaacaccagcagctaaaccaaccaggcatcgcaattaaccagcaaaacttgtgaccgctgatgggcactctgcttaacagggagatgtggagcagaacaatatatgacctagataaatggaaataaaaaatgatcacttaaacaacacacataacattaatatgctttttagtgagtagacaaatcatatgatgaacaaatagatgtagaattacagtaagaaaaacatgcttcttttcaatctgtaaattatgtgcgctaagtgtattaagtagaacattgaaaggtgccaagaacaaacccgggtggtgtgcctcctagattggccgcccacttcctctacctcttgtcgttctgccggggtccgccgccgcgatgccctggccatccccatcgaccttggctccagatctgccaccatccttggatcctcttctttccatcataccattcgctacctgcatctaatgccgctgctcatgaattttccatgtgaaagactaaccatgacttataccttagtaacatcttacttaaatcaagcatagtagcagcttactaaaattgtaagaaaaatgaaagtaagaaaaaatctcgagtgaaacaagacaatcccatggatgtaatttttcaactggcaagcaaaatttacccaggtaacaatacgctaatatgtatgaactatcaattcctgacctaaaaatttaccagtactacaggattaaatgtgaaaattgggactggcaaacatgatagcttaaaaaacttcaaagcaatgccctatagaaatgtcagttatcagaaaaatgaaccaatagataatgtcacaccattgggaaaaaaaattatcattggcaactccgttgtgatttaaatagcagaaaaatgcaatcttggaactatctacaaaataacttttcctcttcagcacaaaagcacaacatgtaaactaatgctctactattgctagttttaactgcagcgaaattcatcagtacattgatcagtgtattttttatgttaatagcaccatgtttctgggagcacacagttcaggaagcaaagttacaaagcatagtaagcatgatataagcatgatataaggatagacctcactgctttccctttcacactgcaggtttgccttgctaagcaaagcctaaaactctaccaatgttaagtgaagggaaggagctaaatatgaaggtaaacaataaggaagtagcattatttactgggacacagtatagtttacagatgattcttctttttgtctgtaatacatccattatgttcatcctaccatgaaaaccaaagtgataggacaggcaaaatagaagtaactattgacgagctataggaaaagagaactgaaaagcaggaacagtgcatctcctgaaatgcaagtaggagttaattacattggatagctgttaattgatgacccttagatatattagtggaatgagtaagcatgttaaaggtgaaagctgtagttttgaaatatttagtattacaggtaagcacttagtcatcagttaacaattggagaaaagcaggcaatgcctgaaaaataatctctgaaggagaatacatgaatacgatttctcgagcaattttgctactacatcgcgtgataggtgagcattgatcattaaccagggagaagccgcaactcatttgctataggtattagatattgcttgaatgtgaaatgtactatcccagaaaccataataagtacctcaaggtcaggacagcggtagaataagggatctcgagcattgactaccaccaccagtttcatggaagaaaagagaataaaagtaagtatattaggaactaaaaataatccaaagaggttctactctttaatccagtaaaagcaaatatgattgagcacaacagagtagcacttccaggggaaaaaatgcaataatactacggaacattgaaagcaaagtcattatgtgagccaaaatttgcaaagcattgcctttaaaaatgcatgtcctacttattttttttttggagaaatgcttggttttagtatcataagtactggcaagcaatcaaccacaagagcgatggatgaaactgatagtgaaggttaagcgttactcaccagatcactacgttcaaggactctccagagctgtctccagatgtcaacgttcttctcaaagggtgtaagcacaagcttgtcattttcttccagtttgcagaaatggatcactctcacaaggtgtctatattcaaacatttaaattgacaagcaatggcattaagtactacattttttgaattgttacagccaacatatgctatttacaacttatgcataaatagtaattggtttaatttgcccaagaaacaaatatgcaacaccaatgctcatgatcagattatacataaggtggttcaaacagaaatgttcaagagaaagctcatcctcgcattagtcttatcttgtaccataaccagattatacaagataataagaaatgctgatagttggatatcagtcccaaggtcccaaacacgcttttgcaagtgaatctccatttcactatgaatttccaagcataatgaataagctacaactcggtcatatagcactaactcagatgaaatttcatatatgaggttgttcaactaacaaaatagagctagaaatactgtctccgcaaaactattatgtcacttaatcatgtcgaaagaatggcaagcaaaaaatagatatgaaacatagacttgaattgaacccacttcaattgaagcacctccacatggcacaagacagaaattagccatcacgtgtagataggctaaatatagaatgagcattgtattatatatatcctataacgacaatgccaatatttatctacgatcatatggaaaataaatcaatctttcgcataaattgaggaagagtaagaatgcatgtgatgtcaatacttataatagaaaaatataaatggggtgcttttagagcaatttatgtattacaaatggaatagtatatagttctgccctctacctgaactaaccaaattaaatacataattttgcaaagagaatatgttttttctaaagaatcataagaaattctagcggactatatacactttctaaatatgcaaatcaactgaagacttcacccaaaataaaaaagtggaaatacaaccattaaccagcatcaaccatgacacatggattgtggtgtggagaaaacaaagtgggaggaa

SEQ ID NO: 44557 - DNA, 1759 bp, Oryza sativa
aaacactctaaaactaaagaatggcatgtaagttaacaattggagaaaatcaggcaatgcctgaaaaataatgaggtagctcatagcctcataccctcactgccctcacttgcccccaactccactttatctcatcctccgccagccatagaagcagagaacaggagggataatatcagcctcccagctccaagctcctgaatcctagcttgcccagcagcctgccaacggtggtctgccccatgcagcaagcaaaaagtcttttagttacttttttatgcactgtggaaacatattcagccaagcttcaagagtttcaaacaaaccaaacgaagcattgtacaaaatagttattacagttgaaggaaccaacaaacataaaaataattgttcctacatagaaaccagtaccaaacaaaatgtgtcgaatcacaaattttggtctctgctcttgcaatgaacagtgcaatataaaataaactggaacatacacagcgattccgtcgtactataggatatgcattttgagtagattcttactttgaacgaagtcagccgcacggcaaaggtcctcaaattatggtatacaaagataatctctagttggtaacaccaggctttcaattccaggaacctgtgatcaaacacaaatttcagttatgtgaccaagaactggtagttgtttgaacatcctctcatgagcagcagttacaaacatagatatgtaaagttagggaaatttgcacataacttgtaaattacataaaaacagcaccagcctgagtaggcaacatgcaaagatagatcaaatgtacagttacatgtaaaacaagcagattgtattgcacgaacatttcaatacctaattagcattttttttttgaactggaacattggttcatttaaccttgtcatttaggttaaccacgaggagtttacatatcaataacctttggctctttaatctaccttaattatcacagccaggtaataacaatgcactaacaaacaacgatttgctgaaccgtcagcgaaataaaaagatattgagtatttttctcaaaccattgatcatatcagtggacatctatatggcaaacagtgacaccttcagtaattgctctattcacattgcaatattgcaccactgagaccattggaacttgattgcactatatgcacaacgtattttacaacaaggccatgtccacctcaatgatatcagagcaaccaacaaataataaacaggagcaatacatgcagaaaggaattaataaacaaatgctgcaatacttgcttgacagaacttcttcatattattcagcccacgtattggtcaaatagtggaacgatttggttgtgtgactacctcttacaggcacatgggaaccagccactcgtaggatttgttcagttcacgacactgcaaactccaagctccttcaacagaaggtcttgtggaatggaatggcaccgagcagaagatgctgatcaaacctaaagaaaaatacacaatcagagcacagcaaactaaaactccaaatgaatcaaaacatcaagactgtaggaaaagtagtagctccccaacatcaagactggatccacactctgaagaagttggtggaagcgcgaccatcggccaccacgtgctgcctggtggtgttttcaacaacaaatccacaggcgaactgatcacctggacagcactttggtgccaccattgccgctcagtgtaggagccagctaagcattggtttaa

SEQ ID NO: 44558 - DNA, 647 bp, Oryza sativa
aaaggaaacatgctttttacaatgagggctagtctacagccggaagtgacctctgacaagcagagcacacgcctcctgccctgctcgcccgcttttccggtggacgcccatttcaaccttcatttaatggccagcgacttccttgccatacttgcgctgaagcctggaatggatctgaccgggactgacataccaactccaggagttagcacgccagctccggctagggacgagagccaggaagctctcatcattccgacgggacggggcgaggcgtgtgacaggccgcctgttgccacctaacccgcgatctgaccggtcacacaccgcgaccggtcacggaccggataagcgtgcgctgcgccgcattaaatgcggcgtggcgcgctcgtccaacctgctataaatgcggttaggtgagcccgctgtgctcacctaacccacacacgtggcgccaaaaccacagggggtcggggcgccccagccctcggggccgaaacgggagcggcccgacccttcggggagacagagggaggggtggccacgtcaccctcgggcccgacccccccgagggggtcaggccacgtgggtgaccgcggctacccaagcctctagtcacgatacccccagccccatgtcaccgacag

SEQ ID NO: 44559 - DNA, 1280 bp, Oryza sativa
cctgcagccccacgattatgggccgtgttttcagcctattgaattgtactccctccgtcctaaatatttttagacacgccggtaacttttttttaaacatgtttgatcgtttattttatttaaatttttttattaattattatttttgatcgctgaaactgaaaagcatgttcgtttgctcaatgtggttacacaaactagtgctactatgtcataatacgttctatatgctccgctagtattagcaatttcactatacaaaccgaaccaccaaacttcaattcctggggatccaggtaggagtacatccaaatgaacatatgtgcatacaataattatacaaaaagcgatgtaaagctgcaaaccaacgagacaaggtagcggtggataggatatgtaaaaagtaataggtgatttcccgtgctttgctgcggaaattactaagcaattctcaatatttttttttgacaatcaagttagaagtcaaaagaaaaaaaaagaaacatcaggtttatcagtcaaatgatacccgtgctttagtattgataagtatatgttaaatattgtaaaagtgacagatagatttgttaaaatattgtacaaatgatatgagaggtgatgattggatatgcttgcattttgatttgtagtattaaataaattgtatatcatgttgtatacttgcatgagattaaatatgtaactattgctagtggttgatgatgtggcatggttacatgttaagctttagacttagtgtgctttaactttatagaaaacatagattggcaagacggttgatgcaatgtcttcaaagcgtgcaagtgcataagataaagaaataagcgaatagggtagctcataaccttgctcaactaggcatgagttcaagatcaagcactgagtggagattgtgtgcacatgtgtgtatcctggacctgttaaaccaggaatgtatcccctatcttaatcattaataaagttctatctttatgttaaaaaaattaattaacaaaaccacaaatagaatcccaaatactattaaaaggagggacgataaacacatcgttaagcaatatggtcatggcaattggtgggattgctacaaagtaaaaaaaataataatcatgtttgattttaaaatctcgatgacattaaagaggggaggcagcgtgtgagccgtaaatgactatagtgacaaagcagttaattgtttggcgggacttatagagagtgaaaaaaatgaacccaaacgataattaagttcgatttttaaaatc

SEQ ID NO: 44560 - DNA, 1008 bp, Oryza sativa
attcctgcagccctatccctaggagcacatccgaaagactgggccgatatattttgaaattaacgaagtcatcgcgggcgtctcgctgtcggtgagtacgtcacctaccactaaaataataattagccataaatataaacacccacactactaggaaaatcattttcccaagaggccaaaaatattttttccaggcgggagaaatgaccgcttgtaagcaaaggcttacgaaaatagatgatttttacagacgttagatccacccacctgcaaaaatattttcagcgaacaaaaaaaatccgccgccaccacccctacctgccggcgctggcgccggcgctagcctccccatctggcccttccccctccgaccgatggctctcctcctccgtccgccgctgctgccggctggctcgcctcttccgtccagatctaggaggggatggggcgacgctctctgcggtggccgccgccgtcggctcctcccccgccactgtcgcctccaccgctggtagacggatctgggaggaagggagggaggattggagcgccgctgccaccaccccttctcgtcgccaagctgctgctagccctccttgtcgctgctgtcaccgggccaggagagggaggagctgaaccaccgcctcacctccttgttgtgaccgacgcctccactcctcatcattgagccaccgccatcggctggagagggagcagccgagccgctgcctcacctcctcgtcgccgcggcctcccctccccctcccctagaccggtcgctggcggatccgtgtgcccggggcgagccagtagtggatctaggaggagtcattgtcatcgtcgtagctggcggcgagaccaaggtgtccgcgtcgtcgtcgtcgtcgcagccagtggtgaacctccttggagccgccgacgctcctcagccgatgtgtgatgagagagagaagggggcggaaaatgagtggtggagaggataaggatggtgaaggagaagataaggat

SEQ ID NO: 44561 - DNA, 8698 bp, Oryza sativa
ctacgtgggtatgaaggagtattccatgaactaacaacaatcttgatagagtggcatctattactgatgttgattttgttctctgttgcttctgatgatttattttgtccccttgctgaacttgatctcagtcccatgtacattgaatcttgtctagaatcccggcttgattcgtccgatggttttatgtggtacatttatcggaacacgaatcagcacatgcatgtgcaccaaattcctggcttcattcatcgacctcaagaactatccacggtcttaggaaccattgccgcaagaagtaatttagagtgaattccgtcttcattctttcataagatggcatttcctctattatgattatggatcgacagatctactctcaggaaagcgtggattgatcgtttttatgtacttgacgcgtctttcagtctgtcaattaattcacttcataattgatgccgtttctctcacccccactgtttctagcacttgatgattaatacattatccaaattatttcttattttttattaatacatgatccaaattatttcttttttttctcataaagcaatatcacctttgttttgcttttgaatgaccaatctatattgtctccttcctttttgttttttcttttatgaagccaactcaccttaattttactttttgaaatattatcaccttagtttttttaaatgattaatcaaaagatgcaaattatttaaggctatatcgtctagctatcttaaaatttgtttatactattatcatacaaaactcaaacaacaccacgtgcggggttttatttagttggacataacttgcacacggagaaagatcatgcaaacttatatgtgaatagaaataacgctattaccatcttttttttaaaaaaaaactgacaattgagtcttagaaaatccaacataatggcatgacaatggaaaatgaacaaaactaacgtttgaggtatcaaaattcaaatgtagctaagaagtgaagaaaatgagaaacgaacatgctttgtggtaaaagattttcctaagaaaaaagcaagaagaggaggtaattattttttttatttgtgcaaaattcagttataaccattaattaattctaaggccttttttttcaagcttgttcatgatgtcagtgcaatagattatttgctctagagctctaaatatatgttttctcaaagaaaaattattttacttacattatttagactatttggtttaagcttttctttcaattttgtttcctaaaatatttaatttatccgtataataagtatataatcagcataaatagtttaccaataatttatttccaccatactaaaatatagcaaatattggattagacacaacgtacttgattattatatctaattcattactagttggcatattttggtacggatagagaaaataaaaatagctgaaatttatcatctttgagcgtatgtaagtgttgtagtataaataaatttattttgcccgtcggtttttggatgaagcaaataaactccctccctctccctccctccctccgtatacccaaatatataaactaggatttgtatttgtttcacatgattgaatacattaatgtcgaagctttaagaaacgggaagagactagtaattgagaatatactagagcatgcactaaacagcacaaatctggaggggaatggatgtctgcagttggatagggtcgtcgcaataatgaaaatagtgacaaaaattcctctaatcatatcgatcgatggatgatgctggatcactgccacgtctgcactgcacgcccacatgcgtgtgtacacctccgcaccacacaactctgacttttcgtctctcttctcttccttaatttcttcctagagtatacgtatgtctagatcatgcatgtatacatatatacgtagtagaagatcgctgtacacgctatcacgctgacgctggtgagtcagatcgcgatgtatacacgtgctcatatgagtattaggcgtggactagggatggcaacgggggcgggttgggctagaactcctccgaccccgacccccgacttcacctcccgcccccggccctgactatggatgcgggatgaaaacatcacccgcccctgaccctgcggggccccgcaaacccgaccggggccccgcatttggtagcatctctatccaatcagctcaaaaaatacaacacaattatcatttcagcaaaaacaaatattgtgcatagttaacacaccatcaaaaatagcatgaatacttaaatatcatcataaaaattcagccaaggaattagctgtaagtttacattacctattatatgggttttttggctttctttgacctatactttaaagtttatatgtacccccgggccccacgggtcacccgcgggtgaaattagtcccccgtcccctccccgcccaaatgcggggctccatacccgacgcacccgtgggtcgaaaatctcctccgcccccgtcctacccccgtaggggcgggtccccgcaggggactcggccccgcgggggaaattgtcatccctagtgtggacccactaaggcatgctgtggcgtgtgccccccaccccagcttcctgtaggtgttttgtagctcctatgaggagaagttgaataggtgttagattattttcgattcattgtgtcacatttttttaattagatatggggatatattctaacccatctcagttgttacaacttacaaatattctcttaacaagtgtctaaaatttaactttttaaatatttaatcaataatattttattacaaattaagttttatttgataaaataatttcattgtattaacatttaaatttacttttatatatgattttaatttttacatttgaagggtcttataataacatgtatagcatatctatcctatccaaattttaccacctatcaaatagtaatatcaaggcgactgtacctcccaaatctctcgttcaagctctctattagagaaaaagatagaccatccaaactgctatacaataaataccgttcggacgaaatgataccggagaaaaagatagaccatccaaactgctatacaataaataccgttcggacagaatgataccggttaagtatcaggacttaatacctattaagtatcagggcatttaaccagtatcatcatgtcatgatacttaattggtatcaggcaatttctgccaggtatcaggtaatacttacccattggtacttgatgttgatacctgttaataccacctgatactcgtcgataccagagcgcaatacctgccagatatcatgtgtttcttactaggtatcaggagctaggcaccgagacatcgtcactgctagccttgtcctccacatcgagcccgtcctccgctgtccaagccccatgccgaggctcgacgccggcgaccgaatcttccgctgtcatgccccacgccagggctggtcgccggtggccgcgtcttccatcgtacacgcccacgccgaggctcgttagtcccatgctagaactcatcacccgtggcgccgcatatcttctccggtgatgtgctccccgacgaagcagtgaggcgaggcagcgggggccttctccagtgagctcccttctctcccttcttcttctgctgttgcatgcccgatgccagcgttgctccgttgccgcatgcctgtgcttgtgctctggggaatgagggagacggataccgtcgcaggtgctaggcgtgagataccggtatctagcttttccaaattgctaatccggaaatactatataacagtctcccgtccgaacatggcgactgaataatcatctacttaaacatcttatccatatcagtataccaagtatttggtcttatcctatccctgtatttcttcttcccctcccccccttcccccctctcaccctcatggctcatcagcggtgagcaccatgtggtcatcggtccgtgtggtcaacagcgacttgtgctgttgtggaaaaccaactcaacttgaggtggagaaatcgcaggggccattcttgaggctttttcgaggtggtggcaaatcggattggcgagctttttattagttttccgtgtggtttttaagcattttttaaggtgatttctcaggctagttttgctcattgatttgagttagctagtcatattgaaggactttgcgtgctttttcctacgcttgattgtttgtttttaggggcaatggaatatgtaggaattttctggctataggggtagtttgttgttattttttattagatttttcctagaattgaaattatttctattgattttccttgagttttctcttgatacattgtgttttacgtgtagttggctagttgcttacgcaggtagagaaaagagaagggtttattgaagtatacctttctaactatatcttgtactacctccgttttaggttacaagactttctagcattgctcatatttatatagatgttaatgaatctaggcagatatatatgattcattaacatatatatgaatgtggataatgctagaaaatatctagatttattttaatatatatataaatgtagacaatagtagaaaatagtataacttcttgaacatatatgatcacgtaaaagagcaatcgtccatcagtgcttccaatttttcttccagacgtttcttcttttttctttttttttttgtgggggtggggtggggggggggggggttcaaacaaattaagccgaaagaaacctttttttttattttaagaaacaaaatctcttcagatgatgatctaaacatgagcagcaggcggtacattggaaggaggagaagcatggtgaggcggcggcgcaggtggtggtgatgaagcaggggggaggggcatgtggcggcagagagggcaggtgttgtggttggcgagccaccggtagatgcattccttgtggaactcgtgcctgcacgccaccagcgtgcagcacctctccccctcctccaactcccccaggcatatgctgcactccgacgattcatcccgctgccggcgatggtgcgtgtggtccggcagccagatcttcggatcgggcggcggcgcaccggcatgtcgacgttggcgatcgacacagcagaggaggacgacgcacacggcgtacagggtgctgccggcgagggctcctgtgagcaaggagaacccgaacgcctgccagatgggcagctctttcaagaacagcatcgcgcaactatatcttgatatttctgttttttccaattccacttgaattgtgttcgttctgcgccgcccatgcatatatgcgtaataatgtgttgcaagcatcaaacagttattattatatgttgcaccctttatatatatgcagatccaaaaatagtagcatcagtgtattttaggtatctgtgtgcacaatatatggatctcttgttagctcggacttgatttttaatccttttgagatgagataaaaatattgttatgatccagcagtccatgcatacatacaagaaagaaatggatcaactacgatattattattgcctgttgattggatctttaattaatcgccggagaaaaaaaaagatcgatctgtgatgtgagatgctctggtccatgtatgaggaggcgaagcaagggtcgccgtggctgtggcgcaggacaggaggacggtcacgtgtcagaaacggatttactttttgctaatccaattcagagtcgatgatcgatccatcgacatatacgtacgtacgtacacaagaaaatcgagacatatcgatcgactcgagtgtgtgcagtgcatggacgcggaggatttcatggacagctggctcatgtggggcaacatctttttcttcttcctcgccctcgccatcaccgtggaggtcgatctcatccgcctccgccgcaacgacgacggcaataacaagtcggcgcaccagtacgacatgctgatcgagaggctgctgctgctacgacctaaagacgaccaagacaacgagcagtgcgtcatctgtctgtcggagaacgaggacgatgtcgacggcggcggcggcgagcgggggagagggaggatgctgccggggtgcgcgcacgcgtttcacaaggattgcgtcgtcaagtggctgcgcaaccgcacaacatgcccgctctgccgttctgacgtcgccgtcgccgccgccgccgccgcagataacatggtctgacgctatctcagatttcactaactatctctcacctccgtcttaaaataaattaacctagaaacagtagaaacagtagatagtatcttatccaatcatactttgatttattttgagacggagagagaagtactaactcatttgattgagagcatatatatatatatatatatatatatatatatatatgcatctgacctctatacgtatgtccagtcagtgcttatgtatgctgctagtatttttatacaagtatattttgagatgtataattgatagatgtatttcatgcaagagtatattgagatgtatagctgacatttttctatttttagaaaagatatgtaattaattgtttggaagcttcggaagtttggttacatacacttaattactgtattattatgacaactagcagaatggcccgcgcaaagcatccatagataatcatctattttttacattattttctttaaaattgtcaatagtcatagcgttgttttggaattttttttaaaaaacccaaccttatcttcatcgagtttttttttcaacttataaaagttagaccaactatcaccccttgctcctttgccgcttcgtcacggcttttattcatcctcattgggacctttaagaaattaggcctatcattttctcattggttccttttatagtattttaaagtcttaaagaaaacacggtcaccctactcctttatggctgcccgctatcccatgccctttattattttcattgggattttaaaaattaaacccaatcattgtcggggttcatttttttactttctaaatgtcccgtttgtgaacctgctactttacgatctactcgttgccctcccctttatcattattggggttctaaaatcgttattgaaattctgttttatagtttttagatgtcccatcaacatgtcactctactccaatatggctcacctgccaccccctctttattgtcatttgctgcccctctgctcgctctcccatgccaatcaccatctccgtactcctttgtcgcctatcgactcgttagcccgtgtcgtctctcttcttcgttgttgtcgctacctaacaaaatcaaaatttattgtcgacgtgattaggttagatatcccgccaactattgttgatatacctccttccctatcttactcgttttacacctatcgaatcacccattcatagctcctaatattcgttactttagcagctcgccctctcgccaccctagcaggacttagcccaatgtgtatttttaattgtcaatcttcgattttatcattttggtaatcaaaatagattacataagtactgtaattcttacggaactcttcatttatctgttttcttaatctacagtcttaaaatctagtagatataaaaaaataaatgtaattcttacagaactcttcatttatctggttttcttaatctacaatcttaaaatctagtttcatcattttcaataaaccaaagtgaacattggtacttgttttaggtcctatatatccatcacaacagcccacttcgtttgcttaaatatttttatttagaatttcaattatttctagattatattattactttaaatttcatttttttaaagtttatttataattagtttgaaccaaatttcagaatttattttatttttattcagaattttagttactcttacttttggatatttatatattgcattatactatgtacaattcttcatatgcggcatttactttttaaaaatttttatgttattttttttcctaattttagtgatgttttaattttatttggagttagaattaataatattcttttataatttttttaattatgaattttaattaatcttgtgttgggttctatgtgaaatgttcttccaaaattccttatactttattccgaacattttattatttctaaattgtattcctatttgaactctcatttttatttttctaatttcagaatttattttattttttattccgaaatttaatactcgtgttatgttctaaatgatctcttctttcaatagtccttaattattattttaaattgattatttctaagcctctaaagtgaccatggtatcttatttttgagttattttgaactgcatgtctttaaaatgtatggttcatggattattgctttgagttaggacatgttatttattaacactcttcgctttttaactaaccaaaatcatgtaaaaaataaaaatggaagtatttctttaaaaataaaaattgacaaatataggctttgtagtatttacgattagaaacttgaaagcaaaagcgaaccatctatatgaaccacacgtatatttgaaaagtagcatgtgctagtcaataaaaactttttgtaattatattagtgaatgaataggattacggctagtcacttttagattgaagggctgcaggaat

SEQ ID NO: 44562 - DNA, 705 bp, Oryza sativa
gatgactaacgaatgaacctctgaactaaaattgacgctcatttaatacattcgtaatcaaagtcatatgatcggtgttttcatctatgtgtagaaataaacaacgggaaacagccgatatagctaaattttgcccaaaaaattacatgtcttgtcatttcacttacaattatatgcacatatatgactaaagtttctacatatatattgtaatttatgaaccaatgaatcaccaaatatggaggacttatgtggaatatgcaaataaacaaagagaaaccatttgtgtgcacgtggaacccgcgtcacaaggggtaaaattacaatgttgtatattttatacattttacatttttaaaatgtagttaatgatcaaactatcatgactctccaatgtctcaaatcaaagctgcagctatatatatacaaaacacattgtggtttgatgcacttttctgttgcactggaaaatatataccaatcaaagcagaatactgtaaaataagaagtaactctttctagtctataataaaaccttcacttttgaaacctactacagactcatacttgagtcaagttgaaggttcaggcattcagctatcttgaaaataaacaatctgaagtgagttcatcagatgctttttcactgtgccatacaacatatctcggagagctaaggggactgaaatataccttacatttcga

SEQ ID NO: 44563 - DNA, 689 bp, Oryza sativa
gcatccttatatggatggttattttggctttacacaaataagaggcattagtgacagggtgcaagttttctgtggattctgtttatgagagacacatcacatggcatgcaattatgtgtttgtgcatttgttgtatgaaacacttgaatatttctttgttctttcttttaaagaatgtattcttatatatttctatatttaatatggaactatggattgatgatgatatcatattaaaataagggattatgtctagtggttcttggtgacgctccactggcattccgaagtagtattagctagaaggaatgatgacgccatagaaattaaatgtactgccaatctggaacctgtttcaacagtccttgtctggctctattctttgggttgtttcgcggtcagcatggggatgtgggactgtatattactcaatggttgagagtggagttcaattgactgtctgtccaaactaaataactgataagaaccacgcctgaatccatggatggatgagtgttgtttatgtgaaatttattaactggttgtttcaccatagaaaaatcaatattgttttttggatatatatatttttacattgtagatgtctgacacatttgtttagaaaatgtgttcagttcataatgttgattggtttgcctgcatctcttttgacttttttgtgaatgaca

SEQ ID NO: 44564 - DNA, 1786 bp, Oryza sativa
acggattacattcatcggtgacgggcttttatttaggcccgataaagaccagcagcaggccaccagggtggcctgcgccttgtaataaaaagaaagaaaaatgttgctcgtcaagggattcgaaccagggtttaccttaccgccggtaaccgcgcggttaccgcggttaccgggcttactgcgggggtacggtaatataagtaccgcagtaacctccttaaattcaaataaatttaaaaaataatttaaatttttgataaattttgcacggttttgtacggttaccgcggggtaaccggtaatcctggccccgacggtttgggaaaccctgattcgaacctacaactacatgaacaataagcctaaggactaaccactgagccactcaagtgttttgtcacagtacatgcacttttctttatatatcaaaatgttatcaggtaatggacctgcatcactactcgtgggttcatcataaaattcacaagaatagtggcacatttttacttttaatgcgtgaataaaattttaaagtagtttatctcgctcatatgaactcgaaattggacgattcctttttcagtattcttataaaaatattgtctacaatttcaagcacttatagcatgccgttaagtaaacagtgaagactcatatattgaaattcaaaattttgaattgtagaacaagtgtggtttttctttttaatctctggctaaaacttgtaggttgtctttctcccccatactaactttaaatttgattattcttttttctaaaattctctaaattcgtgatctatcaatttattgtgttattacaactattatttttgccatactttcatgtgactttgttttatcaattgaagatttaaatttcaaaaagtgataacttcaaacgacattttgaagcagtaaatgatttcagctgaaaaagtcatgaacacaaaaattgtagaactgatcgagatctacaaaatttattttggtcgttcattcaacaaactgataataatgttgttcacaaaatttacacatctctcttataatttatgaaaccatatgggagatacgtaaattttgtgaacaacgttactatcactttgtcggatgaacaaatgaccaaaataaaaactgtagatatagatggattatacaattttgttgttgatgactttttcagttgaagttgttcactaataaaaaattctatttaaagttctcaaactttgaatttcaaatttcaaattgttcaaatagagacagatggagaaatgaccaaaataaaaattttgcatcttgatgagctctacaactttttttttggtgaattttccatttgaaatcatttattaaccccaattattgttcgaagttgtcaaaatttgaaaattcaaaatttgaattattcaaatgaactttttcgtaaaaaagaccaatacaatagttgtagatctcgatgagttatataattttatttcttataatttttgcatttgaaacacaaaaatcggcctaaaattaaatttaaagttctcataaattgaaattaaaaaaataccacatatgttagtaggcctaaaccctgaaatcggcccgttacagaactcggcccataaatttctggccattgattcttggtcgaatggctatcgttgcgccaatgaagcatatgtagggttgcaaaccctaaccctccgcacttcatctcgcatcgcgttcgccgccgctcggatccccttcccacgcgtccctcctcctcccttcgtccaccatccacaacc

SEQ ID NO: 44565 - DNA, 2438 bp, Oryza sativa
tggattttttttctttttctacaaaaatactacaaatttctagcacggcatatacttccttcatcccaaaataaacatgtgagtcctctacgagctatatgtttgaatctgcatatgtttgcatggcctaaacaggttattatattgtacataaatgaatgttttataagttgctatatttatttccaccatatacgtttgtatatcataagtgtaatttatctatatttattcttgcttggtagcttgaattaattgaaggtcatggtataatttatataactgaaacaatcaaatgcggcagagatatgcgtacagttggaattaattgaagctaatatatgtgttgcactgttgcatggttgagaagatttggcgggtcattatcgatcgatcagagcaaatattaatggtgagaattaatgtttacctttaaaatgtcctgctactgcgaaaactatatacatttttcctccgcacgctgaaaaagatagaaggtgtgcatatagccttttgttacagtttccaaattccaactttaataattaaaacttttaaatatattgtcactaaccacgaaatcaattgaaagtaatacaaatccaatacatgtcacctatatgaccctaaatatatattactagaaaaaatgcctatgctttacaacgggtaaagtcctttttttatatacaataactgttaggagctaagtaataaattaaaatattataatcgctaaacattataattaaaaagttaatgaaaattattcttgtttttggtcgaaagcccatttcttttttccttttcagtctcggcctactacgctacatgttttcgccccagcccacaagtgaagctgcagtcccagcttgtacactctactaagtcttcaacctcgcgaaagtattctcgtgcccatgaaataccagagctgatcctcctcgtcaaattcggccgaatcttttttgatctctcaaaattaatagagggcttttgatccactcgatctgctctatccgtttttccaatattagaatgaaccaaactcaccgatcggccttatcagagcaaattagaggcggcgcgtgcggatcggactggaggagattgaataaaaaggaaaaaaactcgtgacccactaaaaaatcgaatgaaaaaaaggcaagtggagaagggaaaaaaccaggcccacaaaaaaacgaaaaaaaaccaaaagaactaatcgtatggtgggaaaaaaaccaggcacacaaaaaccggacggaaaaaaggcaggttgagaagggaaacacaccgggcccacaaaaacgcaaaaaaaccaatccaacggtggaaaaaaaggggaaaaaaccaagacagagagaaacggcgcacggataaaaaaaaggagtcggacaaaaaaaaatcgtgcgttgtgttggtgtgctgaacggagtcggaaaataaaatcccgtgttattgggctgacgtacgaaactcacgggcaaaaacaccttgaatttttataataggtaaagatttttgaaaaaaaacattagtatcagcttataattatttttggaaaactacaaatgttacttctccaaatacgtgttcaacgatcgcgcgaggagcgatcgagcggggcaacattattacaacaatgacttttcaacagaaaaatttaaagctatgactgttagccatatttaatgaagtcattgaatatcaactgaagacctgctggccagattgttgattggctgtaacaggatagccatcgatcgacgccggtaaaatcgtgaatcctagacacaaactattttatcatgattgcggttgggcaaatttagcttggcatgcagatcgacatcgtgttgactgatcatgagtcgtcgcatgagcacacagatcgacaccagatgagtccatttctgatggctgtagaggtaccgcaccctgagggaaccggtagagaataaccgcacacacacgatcgcttccatacacgttgcagtatacttatatccgttttaattaaatatatggtacggttaacttttgaaaataatgttagatcgatcattcgtttccttcaaaaccttaatttatatgtgcatcgttttttttaaaaaaaacttttacactaaaggttactttattcaagatttattttttcatatttacactaatttttaaaataaaaacaatcaaatataatgtctaaaagtgaataaaaccttatattacaaaactgagagagtatgccagttacttaattttcctagctaaatatatataattgtaactgatcaacatttatcagttcaaccgaaacaaagctcgatatatatattattagcgaaaaatcaaatctaatgttcaaaagaataattaattgccttaattagaagatgaatgctctatagagctagaagcaagtatagtagtagtga

SEQ ID NO: 44566 - DNA, 1864 bp, Oryza sativa
catcatagaaaaaaaaatcctaaaatcaaactccaaatttaaattttatctgataagtcgattgacataagcatagtcagcctgctaacctgtttcggaatccacgcggtgtagcgcgtgaaatcttttctagtagctctaatacaaacaaatgcagtcgcgagatactcgttcgtacagttggaattaattgaagcaattaatatatgtgttgcattgttgcacggctgagaagatttagctggtcattatcgattgagcagagcaaatattaatgcatcactttgtgactttgtgagagaatttttgactccttaatatgttctgctactattaaagtattaatactatcctgctgaaaaagatataaggtgtacagccttcaatttgatacagtttccagtgttaaactttaatatcattaaaatttctaaatatattatcactaaccaggaaattaattgaaagtgatacaaatccaatacatggcacatatgtgatgctaaatatattacccgctccgttactgaacaatgcacaatcaaacttggcatgacctacagaattaatctttaactttaaatttctcatatattataatatttatgatcacaaatcataattataagaaagcaaattaaaatatcaatctaataatactattttcatcaaataaaatttaatttataataaaataattattgaccagatatttaaacaattgaatattagaatacgtgtgtgtcttattcagtgagaactgagatggagggagtagtattttcacaaaaattaattggtattagcttaattatttttgaaaaaactacaaatgtaattttctccaaatactccctccatctacttttgatatataggtatattttcaaatctgaaaaatttacttttgttaggcatatttcaattgaaccacctatcatcttaatgattttttcagatttaatgtgtgactttttatttttccacataagattgactacataggaatcgagaaatgtaaatattaatgaattgcttgtctacgagtaataactagtagcatgtttaaatggatgataaatagaattacttgtcctttgtcattgtgccaagatgaaatatagagaacgtatgtacgcgaggagctacaggggctacattattactataaacaatgacttttcaatagaaaatttaaagctatcactattagcgatatatttaatgaagtgattgaagatcagctatagtgaagacctgttggcagatttttgattggctgtaacaggatggataaccatccatcgacgccggtaaaataatcctatacacatacaaactactcttataatcatgcatgcacgcagcggggggcaatatggcaattactcctatagtcctatttgcttggcatgcatatattacacacatgcattctcctacatatcgtgttgactgcagatgagtcgtcgcatgagcagacaccagatgatgaatccatttctgctggcggtagaggtacgccgccatgaggaaccggccgtacctagacaataacatcacacacagtagcatccccacacgttgcattgtactgcatctgtttccaaatatgtgatattgttattttttgaatttgatgtttggctattcattttatttaaaactacttatgtatatttattttattgccacttgtttttattgttacatataagaaatttaaacacaacctacgtatttacatatttattacatgcactacttaatttttaaataaaagaaacggtcaacacataacgtttaacagtaaaccatgtcatgagtaaaaaaatagagagagtagtactattaaattaatttt

SEQ ID NO: 44567 - DNA, 2061 bp, Oryza sativa
tgagacgaatttttaggctaattaatccatgattatagtctatgtgatgctagcattaaatatgtgctaattatagattaattaggcttaaaaaatttatctcgtgaattagctctcatttatgcaattagttttctaattagtctatatttaatactcgaaattagcgtctaaacatccgatgtgacaaggactatatttgacactaactagaagtattaaatataaattaataataaaacaaattacataaatgagagttaatttgcgatacaaattttataagcctaattaatccataattagcatatttttacggtagcttcacataggctaatcatgaattaattaggctcaatagatttatctcgcgaattagtctaagattatagaataggttttgtcattagtctacgtttaatacttctaattaatatcaaacattctatgtgatttagtccctggattcaaacaggacataagtccaggcatgcttctctcaggtagcaaccaaattaaacatgctcggagtaatactactactagcaaggatccatcagaaggaagcaagaaagagagattaacttacttcttagcaatggaaccagaaggaggttggaactgaaactgcttttgctccttgcgatgaatagagagcgctaattgttgacgagagaaatagagaggagctgaagatcgaaagagcgtgagtagggaaatgtttttattcgccaaggacaacatatgagggttgatgcaggcaggggttaggtaggagatgaagacaggacagaagaaaagaggcgtggcacatctcagactttcagatacacctaccactccgaaagttccaagctccccacgaacttaaggaaaaaaaaacaagaagagcagctaaattgctaatagaaggggtaggtaccatgttctagatcgtggccaaaacatatacaggttcacaccgaacgatgcatttagcttcagatgtttagcttgatgtcattttaaatcatatctttttttaagttgttaaatatgtacattaatttagttttttttatcaaactttagtactccctccgttccaaaatataggtatttttagactttgacacggtcaacgagatattatttttgaccaataatatctataaaagtaaaatattttaaataaaaagagttatacattattgatagtttgtttaatgataaatctaataacattaattttatatgaatgatcttttttatcttttctattaatagtcaaagttgaaaatgtctgacttgtcactatgctaaaaatgcttatattttgggatgcagggagtaaatacgtaataaatcatgtcaaaacttggcaatattgccaaattgacaaaatttgataaggtttattttggctacaatctaaggcatagcggcacgacacctccctccactgcgcagtgcctcatccctcgccctcgagccacacgcatacaagcttagctcccgaggaggcctcaccgaccaagcaagcagcggggtgcacatccaccggcgcacgggtgctcgctagctcacgccgcgttcgtcgaccgcgcctgcaccgtctcctccctcccaccgtacatccccacggcgggtcagttcctcgtctccggtccctgactagcgctcgcggaggtccagggcggccgcgttcgcctccctcagctgcctcttctccgcccctctctcgccgtgcggatccgcggcggtggccccaaaccaagtgcttaactagcgctctcctcgccaccacctccccgcggacggtggagttgaccgtggctgtgtgcacgctagcctcgcatggcttgcgttaggaggctaggcattgaggtcgacattgtcggtgccaggagctccgccgcgagctggtcatggctcatcaagcagtgagagaagcaatttggtctcatcaaaccgcattctagcgaaaatggagaaaatagctaagtggctgtgatcacacactctatattggcattttagcgaaaccttttttttttaacgtggcgaaatgtccattttctc

SEQ ID NO: 44568 - DNA, 1034 bp, Oryza sativa
taatttatatggaattaaggagataagattagatatgccaatgacaaaggagattataatttataagatcagtcattttatataccttcttgcccattaattcagctcttactgtgagaactgagtctccagaactgttttcatttatgcccatataaatttccattgctccatatacaccgaaacttaaaacttttactggaatgtcgttcaccagcattgtatagcaaatattacagttaccatctggcaatatgaagccaagaaagaatgcattctgcaatcctatttgtgtttgcccatctggatcagcttctcgagctcctcaccatggtacttgctttggtacttgctgaatattccacctttcatgggctactgatctagcgaagcgtccacattgaaatttagttcatcacttctaggcagaggacagagttcaacttcattctccttttctgcatttcagtagccaatttagccagtgcagtttactgacaacagacattcagtggagtagacatccaaaatttcacatattgcaatggaaatggatagaaacccaatattttcattttgtctgatgcatgttgggaaacaatgcacttctccaaagtcctaaccacaatgattgtgacatactcaaaaacgaggactctcagtggaacaggcacatttcagaacaagaagaagattatctcccatctgctgcgtatcaatacattaatagtttaatacgactcaaagttcttacgaaattcacagttcagcagtcttcactttgagaattagcagcagtattggcctaaacaccacagaaggtaattttagaaatatgaaattatgaataaacaatattcagatagataaaaaagttacttgagaaacgtgaactcacccgttggaactacagtctagcggtaaaaccgaagtgtagcaaagtggacttctggaaatgaagctgaatattacactgtacagcttgtggcgggtttattggctacctaaaattaacttggctgtttgcagcatgc

SEQ ID NO: 44569 - DNA, 801 bp, Oryza sativa
aggatatataatgcttgtctttgtaagcatgctgtatcgatcatagcatcaagttaattgtaagcttgcttcgtttcttctaagcatttgtttctactcgttcgtaatagtgacttttctttttctttttttttttgagaactcgtaatgacttttcttgctgctccatctcatttctcagtttttatgtatttccacgagcagtcggtccatcgctctcaagcttgtgtgggttcaaagtacacgcaccagcccacttgaacatttgcaagagactcagacaagggccgcccaaccagatagataagatacacatgcagacatgcttgtgcatcagtccaggcgaatccggcggctacccggatatatcatctgctcctttttcacaaggggataatgatagtctaatctcacatctgcaattccttttcttttgactgggatacatccacccaacaactctgaggacttactcggttcatagggttttcaaatcattggtagaaaaaaaatgggattaggatgactcgtgcactccaattcatagaaatttttccaagagatcacccataatataaaaaaaaacttatagaattaggttgtaagaatagattcctagaattggataggatttattcctatgaaatgaatgatggtaaaaaaaaattcctaaggtttcaattcatacaaaaaacctttgaaaatcctttaaatcgaatgcggcaccggcagaggcagtgagtgagctagtgagctttcatcatgccgcaatcatgtccatgagcgcaacaaaatagttag

SEQ ID NO: 44570 - DNA, 768 bp, Oryza sativa
tgggttatgcactggccaggtgatatacaggggtttccaatgtgctaacgtggatgttgttttgaattgtttattgttgtcatcacttgaaactgccgataaattcaccattcgttttttcccttgcctgtactgctctggtgggttgaacatatatgagatttagttttttttttgacatatatgccttgggcctaactattaactaagaaattgcatttacatggtctgagctaaaccatgaatatatcctcgaatagttggattggacgagttgctagcttggaactaagtacagggccctatacaaatggaatacatgattgtgtaatccttgttcttttaccccttcctccccaccttggtttgtggccgttgggattttatggttggcttggctcttggctgtactgcattttcagaagttgcatggtgaactgtgtatacctgaacttttctggtattcttcgacatgtgtttggtgttgaaaatattgttctaggcaactaataataatttgtatgctgcaactgatggttcaatttttattacatctgttgactagtcatgcattattaaaaacagattcgttcatcttcgtggaactcagactttgtctggttatgatttatgcagggaggcagtggtgctgaatggacctcaggaagctagtaagatttgctcatcaacaggggcacatgttggcggtggctttttttcaactaatcctgatgtacagtcagtttggtcgttcaatcaaaaagagac

SEQ ID NO: 44571 - DNA, 1437 bp, Oryza sativa
cctgcagccctcaagaattagtagaaagaaacgctagaagatgatatggagagaggaactgcataccttccggtgacaggaagaagaggagattcaggtaacaaaaggtgaactttttggatctgtccctcacttctttctcaacacctgtttgggtagagagagagagtttttgagtggtagtatcaggagtggatgcgaggacagcgagaagacggggttctcttttatacagggggaaccgatcaagaagaggagaggaggcagccgccagttggagaagaaacagtggtgccttgcattattagcagagattgatttgacgttaatgaccctgatttggctgcgccgcgtttcctgggcaccgcatcgcataaagagcatatccatccgactcacccctgactagtcgcccttcaccacagcaatcattcatttggcttggcttggattggtttggcttggcttggggcttaatgataatttaattaattatttcacaattgatgatggtacagctcatcattgtgttcttgaaacaggtacagcacataatgtaccactaatcaccttgcctaatcctatttatagatctgaaggctgtgatgctgtcttacagaaaatgagcacttgtttccttctttaatctgattccgttaactgcaacttttattttctgaggaaccaatgttaattgaggcatttgttagagtagttttccatgtgatgttgtgtttaatttggtttggagttactcaaatgcatggcattggctcatctctcatgatctgatcctttgctgactcatcaatgggttggctgttcttcaggtattggaccaccggaaatggttggtgacttgcagccatttatccgtgtgctactagctggatctttggtgagcggtattcaattatcaccgtatatacttatttcctccattcaaaaataaatttattttttacataaatatgaatatagtcaaattcatgtatagaactgaacttatttaattttagcatggatgtagacatgtagtatttgtttcggtcaggcatcattggtttttattgacatcggcctgtctatattttaccaatgaataatcagcttatccataagtttttcagaatatgttgttatgcatattgaccttagatttaaaaataattacttaagttactagaagaaaaacatacttacaaattaacctcaaagaaaaccgatcaatacaaacttggcagctgtacagataatgtacagatagccgatgacggctcaattggtttgcatcaatcaagcctttcatgagagcgaaaaaaaatctgtgccacttccaagaaatgtctttgtccaaaattaattatctgcacacgatatgtggagtccatgcgttgtgttgcctgcgtgtgacaaaaggaattacattggaatttg

SEQ ID NO: 44572 - DNA, 1114 bp, Oryza sativa
  unsure (1)..(1114): unsure at all n locations
ggagcccatggcgcagtcggactcttcggttgacggcggctggatacgcggtggcaacgaggaggcggcggcggccaggagatgctccaccggccccacgcgcacgcgcgccggcgggatccgcgcgtcgtcgccggagtccttccgcgacgacctcagctgcacaggcgttggcggggatggcagggagggcagcgccccgatcgccgtcggcaaggcggcatcggcgcggcggtggagatggccatggccgccggcgagctcttcacgcgcgggacggaggaagnnnnnnnnnnnnnnnnnnnnnnnnnnnngatggcattttggcgaagacacctggttgaggatggtatttcagcgaaacccgtttttataatggtagtctagtgaagccattcttatgggatgattcttatgggatggtagatatgcaattttctcacttttacggggtgggtgggctaaaaagtggagccacgctgacacgcacgcgccgttcgccgccggcatcttcccggcgatctgctccggctccggtgggcacctcctcgacggtacgcagccactgccccctccgcgtatttcttcctattggttatctccagttttccggcgagcgcactcgcgcgcgccggataccttgtggacgatctggaaactctgcacgctgccaggaggctagcggagtagtggaggagggcgtggtgagggtcgggaggcagggatggagttggacggggagacgaggtgtagcaccggcgctgaggtttgatggtacttctcctgcatctacgaccccgagtttgctcagttgctgtcttgcgggaacaggcagtttctcattcatggataatctgaggaagtcagatggattgatgtctcatggctgtgaattttcagtgtctctggcgatttgctgtttttcgtgttcttatcagaatacatgagcttatctctgaagagattgcaaagggcaatattaagtaagctcttctctttttttaagcaatgtactcatcctactgttgatttgattaagttaagagttaagagtgactagccgtctagccgtattcgattccttctatttgcaggtccgaaagggctgcaggaa

SEQ ID NO: 44573 - DNA, 609 bp, Oryza sativa
ctgtggttggattagggttgagagggggtggaacctggacgacgtcctcggcgcggtcgttgcagcggtgcgccttgggctcccgcttgtccccctccggcaagccccatgggctctccctcctcggcaccggcctcccctcgctcatcctcctccaaccacctccctcctcactgcaaagaagatcgaaatggctcaaattcgcaaagcaagaggcattcccatgaaaccccagatcatcgcgacgcgtccgagggagagatcggaggaggctgactcacctagcaaccaccctacctcttccgcgccgcgtgcgatcccaagacgagacggcggccggcggcggcggctggttgccctccactggtcggagtccaagcggaagcgacgggtagacgaagaggccgaggggagaaaatccggcccaactttttttgttcggtgccgcctcagatgcccaataaggcccaacattttcggcccataacgagttgggcttggaattaccagtccaaccttacaatgacagatggggcccacctgcagcgaagagcgagcgtttaagcatgcgcaaacagagctaaatcgagcatctcccaagactctgtc

SEQ ID NO: 44574 - DNA, 2660 bp, Oryza sativa
gtactacgtacctttgctgtcaggctgggcacgagcttggagtacgccggcggtggcggtggcgaggcagagaagaaacaacgacgaccgtgccgccattgttgccggtgatgaacgacgctccattgcacatgcagccatgcatgcaggtagcaaagctgctactctctagggacgtgctccatctatttgtaatccagcattccagctagtaaacaagtgaccaagctaataatctcactgtcacaagctaataataactagccaattgatcatcacaaaactcaatcttgattaatttaaccacgtcactacgtcagcgcatctatccagattccagtaacaaagagcgcctcgctttgtgggtcatatagatattcttccactgacgagtggggctattcagaatttacactggccacctctttgtgggcccggcatgtcaatgaccctgagggaagaggcgagtgtatcacatgggccgggagttgacttgtagcccgctggtcaactgctttgctgggcgaaggacttggaggcccgagatcggtggccacggcccgtcgacttgaccttattttccgcgccggaaactatgagcaacaagattattatgcacttgcccactacgtaaaagaatttgttctctctgtcagagaatgcatctgaatctgatctggcagttttgcacaagagacaggcagcgcaagaagatatattttgcctctgacggactgcggctaattagtactaaacataattaggtacctaaaagttttagtaggagtatctacacgactctttggattaaatgatttggtgttttctaaatctccaattaaaacttgcatgcaggtactctagaacaacacaattcagttttaggctcagctgtaacggcgttaaaagaaccaggacaatattcatctcgcataccggaaactggaaacaccggttatgcaagtattcgtcaatcatgcatgagatttagtaataggattgctatgtaagtaatatcttttcaaccaatagggctccaaagaaacatttcaagatcttcatcctgctgtgcctttggtgtctctggcttcacagacacgacgtggtgttccgcaatgctcaaccatcactgctttcagccctgtcaaaatgccaataggaagttaacctctgggcggttcgctttggtccgaaagaccgtgatattattctggcttggaaaaatgtaatttcatcctctgttcatgctctaaattagttgtaatctggactgtaatccatcttgtactcaagtgctattgcttattgacagtttgaatgaaattcaggtggggaatctctcccctccagtgacttggtaaaaaaaaatattttcaaccaatggcaattgtttcttgatttgttcttatctaatgtgcagccaagtcttggcggagctggcggcacaagaaaggagcacatccaaggctacggaagtcattaagggtgtgtttggtttctcgtatgtccccagcctggccgtatccctcatccaggatgccctcagcctggctagggtaatgcaattggttgtgtttggttacttgcatgggtttatcctggatgatatgagatgttgtttgggaggagctgcgggagggaaggtgaggcaaacgagcacacccgctcagcaacgagcactcccgccggctacgagagttcgcagcagagggagcacccacgacggtgcacaggagccccaaaccctagcttcttctcctggggagtgaaatgaggaggggatgtggccgtgcggggaggtaaccctcgcctgcaacgaggggttgtgtgggtgcagttgcgctgcaccggatcagcctggatgcgcagcgatgctcccccctcgcgtttctgctcaacttggcccagacggcgattttgaatccgcctagcctgactcgcgggccggtccagccaaccaaacaagttggattttgctggcttgatgcgatgcaggtgcggtgcacccattcaaatacgccctaattgatgaaggtggaggcgcggggaaggagcaactacaagtggtcactagcggaggcggccatgtggtcgccggcagagatggctgagtagggatggagcaacccctcacggggaggaagcaacggcaagcagctggagtctgtggacagcagaaaaagtaaatagtagaaaatccttttatcaggaatttttgtctaacaaaacgaccttagaaactctaactaggaatgaggctactgagtagcagtaatgagcaaaatattaacctcttccgtgttatgcttgctcctgaattcttgaagtcatttatggcttcttggagtgcgtgatgagtcggcagcaaattattcgcgggcttgatctctctcctctcacccccatcgtcatcggctcacatcattttattacacttactcttatgagtgaatacaatggatgtgacccttgttcatgttacatgatttccattgcttgctagtccactaagtgacatggattccatttgatatctcatcttacattatcaagcaaagtacatttattgtgggaaatcataaaatttggattctaaattcttgataactatattccaagataaaaaaaattattaggtgtatattgacttttctcttctt

SEQ ID NO: 44575 - DNA, 1123 bp, Oryza sativa
accgtgggtagtactcagtcttgctctcttttcccccacaccagagttgaagtccttctcagttgaagatgtctcgaagaggttggtttcgtcgctgccgtcaaggattgcctgtggaatggagtcgcccgctgcaggagtcaagtcttcaggcttagctcgcttttctctttttccgctgcatttgtaatcttttatatttttgtaagacgtggatctgtatgtcaacaattgtcgtttgtgtaccctggctggtcctggacaggggtttaatgcacattcagcttagaaattctggttcgtgaatttctgggcgtgacacaccagcacctccacctccacctccattaggggcagcagcagcacctacacctgcacctccccttccccttccccttccccttgtagttccacttgcactagcactaagtaatgcaaaaaattagcaatgacaaaataaacaaaatcagcattggattagttaaaaacaaggaaaaatgctagtagcaatgaatgattcacactgatgtgggtgcatcacttgggtcattgatcccctctcctgttccactttgtgaagatgagagcttcctcttttgacttgctgtgagacctccctggcaatgcttcgctgtatggccaagctcatgacattcactgcattttttccttttactagtgctagcctcatcagaagctcttatcctagccactcttggtcttccaggtttccttctcaacctaggcttcttgattttatagcctagatcaacatgtgcccactcatccttagatgccattggattgaactgtcctgcataagccattttcaacatctctatagagaagcacttatccacaaaatcatccatttgtacctccctattaagctttgcaatgaaagccaaagcatgatcacaaggctttccactcacttgccaagccctacaagtacatgtcctttccttcaaatttactgcatgtgtaatggtgcccacagttacttcaacagttccagacccacatatcaatacctcatggtttttgagggtcttgctttttgcattcagagtgttagtaatagatgggattatcctttcatccattttacagggctgcagga

SEQ ID NO: 44576 - DNA, 682 bp, Oryza sativa
aacgtcaatattgacacatcatatctggagccatctgattatatctgaatggattgaacatcttatgaactttactcaacacaaaagttcccacagataatcattatagttaaggcaggaaaacaaaacagaaaaattggagcagtccaaaatttatataaactaaacataaattgcagccaagtggtagaatgctcaacacaatccatgtagtgcaggtatcagcttttcaaatgtgcatgcatataataataaagcagaagtaactaatggttgtgctggacatgtaacatatgtatgaagaacattatacctccagtgaagatttctcctcatgtaatgcttccatatccagttgaatgcgttgcagctgcataacataagcaaatatataaaagagattcagtagcattgggacgactataactgtttgctagcgagatggattgcatagatcataatcaaacctgtgcttcattatcatgtttatcatcagctttgttgaatctatcatccttttttctatcttcgttatcagaggagttcaaactttctgatgaattagtttttccaccctcaagcttctttctatgccttccctcaatgaaagatccatggaatacataaatacaattgcaccaaacgaccaaattgcaagacaaaaacatgcagcggttacatg

SEQ ID NO: 44577 - DNA, 974 bp, Oryza sativa
agcaggacatgtaatttcttttgactatgaatcctggagccaaaatggccaatctgatcagctcatgccgtgccaactgagcacccacgttgcatcaccgcttactgaacggtatcctaggacttgctaacggccatgcgtggttggatcatgccattatgcggtgacaaatgaacaaaaccctgccgcatttcagtgccggttgtcgatcaatcaggccatagcttagcccattggcacgaactgaactgttaccgatcagctcaaactttttttaatccccatagcccagtattattactgtattttgttcaaagattagaccagagtgtgcattgtacgcagtgccaaagattctcctaagccgcagacccatttacgatccgttcgtccgtttctggtccccttggaagtagcaaaacgtctcaagactgaagagtgagcccatgtcactggcatagtccatgcataagaccaaagagcaatttcagaggccagccagtcccaattgtttttacctaccagtttactccaagataatgccggcctctagctagctgcatgtgccaatgagacccgttcagtttgaactttgcatccatggagacagtaatactctctggccagctgaaggtagaagaagaagaaggcaatgatgaggaatgaatgacattagcagttacagacttacagttagcagtgcacagtcattgcagtattcaggttcttccccctgttcatcttgtagataatttctttcttgaatatacagtgattagtactatctgctttagttttggatcctttttctctagatggaatcatggaatgtgtgttgcgtgtcttgttaaaaatggagtggtttgattggcagcaatcggattgtccggcgaggaaggggagtcgccggagaaggggagatgccgacggtgtgggcggcgctcaagaagtcgctcaactggggctgcaggaat

SEQ ID NO: 44578 - DNA, 554 bp, Oryza sativa
  unsure (1)..(554): unsure at all n locations
aggagaggaggaaggggaggagtttgaggagaggggatgaggaagagagttagagatgatagatccgatgagagggtgtgagattcgatctttctaagttgtaactgtggaggaccaactgggtctaaagtggtgatctttagtctcggttattaacaccaaccgagactaaagatcctcggccccctgacatacatctgacaagggatgaaccgtgtcggtgatatgggaccgggagtattgcgcccggaggcttgaggcagatggaatcgcccacgtggcttggcaccttcggggacgtcgggcccgagggtgaggtgtccaccctcctcctgatttccccgagggggggtcgggtggctnctgccccnnccctgngggccggggtgcccccgccccctgtggggtttgccctctgtccctcggttgggtgccctcggttcggctctccttcccgcttttcttgcggtctggttccgcgtgtctcgttgcttgccgcgccgtgctgcgcgctcttttttccggtctgtgtcccgtctccgcccggtcggttc

SEQ ID NO: 44579 - DNA, 934 bp, Oryza sativa
  unsure (1)..(934): unsure at all n locations
attcctgcagccctatcttctcctatattaagtttttttttatacggagggagtatacaggagagtaccaatgtaagtggatttggttatgcactagacgtagtacacataagtaggtgtaggagaaagaagataccatttggaatttgttctagaaggttaatttggttttattattggttgcgacgttgccgtccgaggagatcgttttctattgtttagaggtgaagtctacctttttcatgtattcgacacgcgtaatttctttttctacgagatggcatgcaatttttactttaactccctttatcgtgaatatgtggatttaatttaaaatttggtggagtggtacatgatattatactcaggttgtagaccttttcccgtattttctgtattatactccctccgttttaaatatttgacgccgttgactattttaaatatgtttgatcatttgtcttattaaaaaaatttaagtaattattttttttctatcatttgattcattgttaaatatacttatatgtatatatatagttttatatatttcacaaaagtttttgaataagacgaacgatcaaacatgtgctaaaaaatctacggtgttaaatatttagaaacggaaggagtatttgagagccacgaggaggatatgggccaagcatgaaaaaaggccaacttagtcttggctctcagttcagtttgcattccagcttgtagcctgtaggcccaaatatagcccaatgaattattttcgaggtagaataactggctagatgagaccattgcagtgcagtaatattgtcaaatcaactaatcacaaggacaaaattcactaaattattatttattccatggacaaaaaattacatagactctgcacaaatatctatcatgacttaatcacatctcanaaccctaaactctgagt

SEQ ID NO: 44580 - DNA, 1965 bp, Oryza sativa
gcggctttggctgattgttgtgcagagcaacgtgggatcgctcgcaatttatagcgttagaatgtagagatttggagtttgaatgttcgtgtaataagattggactctggattaatttcttgtacgtaaaagcagattttagtttgaacgttcatgtaacgagattgaactctcgactgattttcgtacgtgattaagagatatctaatgaacttattacgggtgcaaagtgtatgatgttttctcatctgtgctttcgtttaacgttaaggatgcaatagagaacatcatgatacagcctgcaatcctgacgatctcaaactacatgggtgaaatttttcaaattttcagatataagttgacagaatttgtaagtttgcagttgttttcatacacacaggaggagaggagaacgccattgttacggcacatggagtctgaagctaatacttcgtcctgatacttatctgaattctggattacgctggctgaacaatttttgcgagtccaaccagtgtgaagctgtctcttttgttttgattgcctcgaagagataatataagctcgtagtagtaataattcttaatttctggtgatattgaggacatataactcttttttttcagataaaccgcagagtattcctttgttttacctcaaaaaagaaaagtatgtcgttgtccagagttaaaacttcaatttgtaattatcagaactatactgaagatacgggactctgcagtcctgaacaaataaatgccgtctcgtcatttggatatatcatatatgcatagttacggcaattgcgtgatgaagtctggagctgatacttctgtttgtaataaaccagagatttaaaccaaacacaagaattttgatgagtccaatcagtgtgaagttctatctctgggttcgcttgtcttccagatcacacagcttctagctattctgaatttagattgatattgaaaacacagaattcttcatatttttagataaaccggagtactatttcttttatgggaacagagagttttttttctatgttttcctccagcattggtcttccagaatgtttgggttaatgagaagcctaccaaagcaaagcgtttgtcgatcatttattttatagattctggagagtcccgtttatctgtttgaatcttttcttccggacatcacagatcttcaaaagttcagaatagatttggcttcgaattttaggatttcactacagcttgcaagctgcaagcaacaggggcatcaatctggcaagcaacaacagggcatcaacacgcatagcggttcaatagattacgtaactcgacacaggcagcacacagtaaaacatatactagcataaaaacctgagataatatagcatcagcactggcaatctggcacaagtcaaacagcctcaaaatcatagtacatctcaagagataagagataacaacgcattacaggagcaacagctgccaagtgccaagtcggcggctaggaagagaggacaaagcattactggagcaacagttgccaagtcggcgcagcagcaactttttcagccgtagccaagccaccatcagcaatatacaagctaaagaagaacagtgagcacatcagccatagccaagcaatctgcaatcagaagggtttgatctgcaatcaaagagaaaactatgtgccaaaccggtagcaatacaaatgtgtacagtacacagtcagaacaagagcataatttagacaaatttgtttgtcagatcaaatttttaagcaaaacataagaaacagcacaaaagggtatagcagaagcaaaatttggacacaatgattagggatcacttattcattatagttcttccatgctgctctaccacagcaaaacgtttcagacaccatcaaaccagacttaaggatacacattacaggtaaatagtacacaatgaaacgggacacgaccaagga

SEQ ID NO: 44581 - DNA, 681 bp, Oryza sativa
attcctgcagccctataagctttgtgttaaagttttgaccctcttcgtcaggttatagacaccgacgtatcagcggcgtagtaaggcccacaagatggataccatttcttattggctgctgtgatgattttcggttaatggcatattcaatggtagagataaatacgatctcctagacgacttaagattatttaaagaacatatttttataaaagttaagacgatgaaggctctaaccattaacttaaaaaatattacttttattattgtctctcatgcaaaacatgtttccatattataaatactagagttattgctgagctgtctttactcatagcaatgacgtctctctcttacatgtgaacaaatattcttaataattagcaacgctaagagatcagtattaacaaccattatacatgtccttagctgtagctagaatgtaatttttgaaacataagtttaaattagtttaaatgtttcttcatcgtattttctattttaccttttaagtactgctaagagtatataatgtaaagatcttattctaaaatcattttcggttgggataagtcgatctatttctctcccccctcaactatcatgccattaatctcgactttaatgtttttaattagatcgagtacatggtaacatgaaatggtacaatcatcatatatg

SEQ ID NO: 44582 - DNA, 861 bp, Oryza sativa
gaacaccgccgccaccacatcgccgccagcaccgccgccgacaccaccagcagcacgtcgttcatgtccaccatcttcgacctcgccgccgccgtcgaacactcgatcgatcgatcactctcagcttcttcacctcgtagcttggtatagctcgccggagtggaggaagagtgggtgggtgggagagatatatagcggcggaggcatgtacacagtggggtggggggagtaaatgcggagccatctaccatctgaaagggagacatgaatgctcgctccagtgtgacattaatggcgagctcgtgaaagctcagctctctgccctaaccctaaccctagccgtggtagtggaaaatggaagaaaaaccagcggcttggcccgtgatgagctaacctggctgtccaccatggccatggccgctgctgttttttttttttcttcagccgttagccatttgcttcccgcgctttaattcccgcgttcggttgggaagacgacccacacactcatcactcggagtagtactctactgacgcgtttgcaaagtagcaaactggcggctgcacacggtttttcgtttatgcacagtaaaagcatctccaacaatcacttcaaatttgactctccaaatatcgggcctgttcattttaatgttattttcaaccttaccaaattttggtaagttgccaaaaaaatggctacatttagtttgctgccaaattttggtaactatataagaaacgtaccaaaattttggcaactatatcaaaatttggtaatgtttttttttatcaatgtgaacaggcccatctatttggtcaactctccatttaatttagcaagttaaactctcttttact

SEQ ID NO: 44583 - DNA, 675 bp, Oryza sativa
caaaagagagaggaaatgggtcccagaaaagcgcaaaagggacggaacttggggggttgcttgcctccgcaactgtcgcttggcttgcgcgcgtcgccggcgacgtcgaagccgccggaatccgggaggcgccacgcctgggcgcccccgccgaagcagcatctcgcggcgcgtggcgtggtgatgatgcgtgtggagacgaagccacgcaacgcaacgaggaagacgacgagcgtatgctgggctgggccttatccgaaaacgggtgtcggcccatatcaacccaggacgttcggcccacgttacttgaccacaaacgggattgcggacgacgagcggcccacgacatttgggccttaaccggattgctgacgtgcgtgatagtaagtctattttgcctccctcatgttctctgcgagtcagcctgccacgtcaacaggaaccaccctacaaaccatctaagggttgatctgctacggttttcgcttattcgaatcgtttattagcaaataaaaatttatttatgagtaaaatgtttatatatgtccataataacttaaagcaaatgttgtaaaatataagcattttaaaaaaacaaaaaagcaaattcaaaactaagttctcaaattcaaattttggctcataaatataagcataaccaaacaataagaccga

SEQ ID NO: 44584 - DNA, 680 bp, Oryza sativa
  unsure (1)..(680): unsure at all n locations
agttcttttcccatcaaactatgagatccaccagtaaacttcaaaccatcaacaaaaggacctagagaatccaatatttcctgaaatagaacaggaaatgacagccttgagaacgagctgttttattccttgaaatccctaaccaggaggttcattctgttttcaagtgatgtactcctatctagattctagaattttcttcatttgaaaggaaacagtaatataaaatcttcctagtcacagcttcaatgcagcaataaagtagccagaagttcatttgcattgcaagtaagcatcctcaattctcaaattctcaaatggcattaagcacttcatataatcacgggaccatgctatgtcgacataagagggaacagcttggttaagaatctaactgataaaactagctgtagctgctacgcattctgacatccacaaatgtaccacttgatctacaaactgacactgatcgttgatcgcacagactgaagattccaatatggtggccctgtttaggaattaacaaataaacaatcaagtcacgaagaattatgcagcagatagggcttcatttcaaacacgattcggtgggaatcagaacgcgattaaaagttaaaactacaccaaattccacaacccagcagcgattcgtagaagcatgaaacanaaatggggatgga

SEQ ID NO: 44585 - DNA, 695 bp, Oryza sativa
ttcgtgcggcaggcagggagggagctctcttcgccggcggtggtgtggcgatgcgaggaggtgggcggtcgcgtgcggtggtgcggcgacgcggggaggcgggaggcgagacgccggcgactcgcgacgacgaccttgacgccgctcggggcggagctcggcggcggcggctcgcgacgacctcaacggcggatctagaagggggcggcggcggagctcgaggcggagctcggcggtggcggtggcggtggccggccgcatgacgacggggcggcgggggctggccgcgcgacgacggggcggtggcgccctcatcattggtgcgtgccgcgtggagagagagggggaaacaggcgtgggtcccacatatggttagccggttttggctggccaactttggctagtctggtggggaatttagccagccagatggcttggagaggtatttagctagtctgttggagtagattttttgtgcaagttagccaaattttaacttggaaagccatttggctaggctcttggagatgctctaatgtattttactcatttgagtaaagtgtacgagcggtccttaaacttgtagaggtgtgtcatcttggtccctaaactctcaaaatgcatatccaaatcccagaacttgtcatagtgtgtcatctaggtcccaaatcgccacaaccccgggctgcaggaat

SEQ ID NO: 44586 - DNA, 889 bp, Oryza sativa
gatcgatcagacaaagctgggttgctgggtatttgtagtggtgatacagaaattcagaattaatgaattggagacttggtaataataagcctagtcagaggctttgtctgaatgcaatggacgtgtcactttacaaggagttagcacttgccacaggttgtcactttgattattactaattgggtatttcattggcataatatgtgttgtacaggtgatggtctgacagagtgacaagtgctcatgaaaattcacagtttaatgcttcgatttggatacgtatccaacgtcattttcagatgagggatgactcgagaagtcgagatgttaacccacacacatggcgaggcttgaggcgacgacaccatgcgttggtcggcagtagtagaaggattcagaaaagaattctctgcataggcggcgagcagctaatcttatctatgcacagagagagattcagagaagaatttgagttcatcttgtagttcagaaaggacaatcattcatgtcatagaaaaatttcagaagcctcctggatcgaatatagtaggtgtgttggaacattgtgagaggaatctctgaacaaacagcagtagtaacattcagtaaaaaaaaaaattctgagaatttgatttggtaggggctcttgcgtcctcctagaatgctcaaagatgctgtaaaaagtttcaggattggtcaagaaggcagggagcatggagccaccaaatatgacaatttttttcaggaatagacaaaagacttgcgcatccacaaaatctgacaatgtcttcagagaataattgttcagactaggtggaacatttttgtttattcaccattttcaggtccggtcaacttttcaaacttcagaaatagccaaaactcaaaa

SEQ ID NO: 44587 - DNA, 741 bp, Oryza sativa
gatatgcagtctcttgcaggctacatcagggtcgttgggatatggaagatgctccatttttatttgtgctgaaagatacacattgttaatacaggatattaacttgtaggctagtcaacagctatgctctttttgtggaactttatgcaaacaattgaaagatgcagtttcttgcaggctacaaacaaacaaacatagctaccaagttgaagatgatggcatccaaaagcaaaacaaacatctcatcttttgttttctttttttttcctgaagacgagatctaatctgaacgatcatgccttgcacctactatacccaaccactggcattgtttgcaatttaggatgtgggcaacatacttagacctatgatggattcctggaccaaatacttgcagatatggtccatgacagtcacaccacatctagctatctacatacatagtaacaaccactttactgatgtagaaactagaaagttaaaatacttgtcattaatcaccacactgtgattgacaacttgtcaagtgtactcgtagtggttggtatattaagatgctgcttaggtgagcactataatgaaggctgaagcaacagagtaaatgagtaatctcgcattagaatatgatactcttcaccaacttctcttcgctgtctttctgataccgtataactgaatattggtaagaaaaccgaagtgtggtaagcttggaggattcagaatgtaccggggctgcaggaa

SEQ ID NO: 44588 - DNA, 832 bp, Oryza sativa
agtacagggtcaggaagcagtacacttccaaagaattcagagatgttgagctagatttcaatagctatcttccaaagcaatagcacaagacatcctgtattcagatgtagcacgacaatcagacaagcagctgtgttcgagaaaccaaattcagaaaattactgaagcattgttcttccttttcctctgagtcacttgctcgctatctgaagactgaagaggaggcaaaagaagtgaagtgggataagcgcataactctgatgaaacaaaaagacctgtgactttgtgacattgttagtaggacattatgtcattaccttactgaagttacagggaagcttgttgcagtatagtaagactggagagttcattgcgttatatatatatatccttgaattcattatgctttttgtctgaacaagagaaatggccgtgaataagagcaaatatgaatgggattgttagttttcggctgaaagctcagagtgtgtaattcgttcaaaaaaaaaaagaagctcagagtgtgtctctagactgtagttctctacttatttccacaaccaaaagagctggctacaagaagcaatattgtcgaagaaatttttcatgtcatgtataaacattgtgtcaaagaatctgaatggacagacttctaaatatatactctctgatcatgactactagatcttggtattgaaacaaaataggtctactagatcaagatattgtttccgacaataatgatttgtggcaaagatcaaaagaattttgtccaaaaaaatatgtcaaaagaagaacgatctgtgcggtgtgccatttgggctgcaggaat

SEQ ID NO: 44589 - DNA, 1171 bp, Oryza sativa
taaatctttcatggcaaatgattctatctgcatgttttccagttcagagcggaaaggctaatgggcgggtgatcgctcccccacccgcccagcgaaaagttagaaaaatttatgtatagaaatattatatataaaaaatttgaattcaaattcaaatttgaatcgggtatgtaaacttttgacttataaactttgggtctataaattttagatgtatagaaatactatatatagaaaatatttgaattcaaattcaaatttgaataagatataattcaaattcaaatttgaatcgggtatataaactttagatctataaacttttaggtgtataaactttagatgcatagaaatactatatatgaaaaatatttcaattcaaattcaaatttgaatcggatatttgaattcaaattcaaatttaaaatgggtatataaacttttgacttataaactttaggtctataaactttagatctatataaactttaggtgtataaactttagatgtatagaaatactatatataaaaaaatatttgaattcaaattcaaatttgaatcggatatataaacttttgacttataaacttttggtctctaaacgttagatgtgtaaactttaggtgtataaatttactaaaataggaaagtaacgcggtgccaaaaaagaaaaccaggttgagggagggaggggggaggtggagagcgaatctgatcgctaccctatctccacggcgatccatagcccatcaggggtacccagttcagagaacaagtcaagcgcctatgggccgtggccagtggccaccgatctcgggcctcgagtcgtgccccagccaagcagttgaccagctgccatccaagtcaactacgtgcccatgtgatctgctcgtctttgctctcttcccgggcttgcagccttgctgacttgcagggtcattgacatgccggtcctacaaagaggtggccagtaaaatgtcagaaaaggcccactcgtcagtgacagtccacatatatgtgtgaagacggcgcttggcaagctatgttactagacagatgtgctgacgtggttaaactaatcacgatggagtctttgtgatgatcattaggctataatagtagtactagctggagtaagtgatagtaataagattattagcttgattact

SEQ ID NO: 44590 - DNA, 926 bp, Oryza sativa
tcctgcagcccctgcttctctgcggtttgagcgagcgagggaggaagaggaggggaggagacgaagatggccggggtggcggcgttgcagggcgcgatggcgtccctctccatctctgcgccgggggcggcgagcaccagcagcttctggggccacccgctctccaccttcgccgccgcgccggctggggtttgtgccgactcccaaccctgattctcatttttcgcattcctttatgtttgctctgctcttatgattcgctggaaaagtagaaatgccagcttgcactgagatttaggattttagagctcaccaacagcgtggcattgcaatggtgatgtctacatcgcctcactgtactgttgttgccttcaggagttcaggctcaggacctcaactagccaacaaccaacgttgtgtcaaaattttgtggtatattttttttagagaaaaggtctcaaggattttgtggtatagttgaacctagttggctagtataaggagggtttatatgaattaatgaatgcttgaaatctcaagtttgagtatatcaactgagtgaattcagaagttagaaattgtgttgtctaccatgggatgtggcctgttatgtttcagtttaaacttgaatattatttttttcctatggtggtataagcgatggatacccaatattcagcctttcaagcagaggattatttttctgaaagatgtgccctctagtgagacagaccatttcttgttctaacctgctgtatagatcacatttcgctggctagaaacaattttgcctttgaactttaaattactcaacagtagaaatttcacagaagacttccatgggaaaatgatggaaactcatttcactcggggatagcctgtagcaaatgattggcacactcggtatacttatcagactgaacttg

SEQ ID NO: 44591 - DNA, 1480 bp, Oryza sativa
attcctgcagcccaaaactgcaaaaggaggctgcatctgcgcaagggtgaggagccaatttttcggaccattcgacgcgtacgtcgtgcacgcgcgccccctgccctgccctgccaggcgaggcgagcgagcgcgcgtgtgtttcccctcttctctccaccacacatgcttaagtggctaggagggcatcctcccttttaaggaggtccccctctcctagaataagcaaggtggtactaaactccacatgcatgccatcctatgaggtgggcttttgtgattttccaaagaattaatcttcgagtgggctaaggcccatcattaattccaacactagctagtagtttgcgtcattgattctcaaaattttcatacaaatataccccctcctcctcacatcgatctcttcaaaatccttatattatgggatggatggagtagatagatactatgtagtaccagtgagcaatgatagttgtgatgtagacatgcatctgcatgccacagctaattacaccctcgtgttgatgtagtcacgtagatgtcagcgttaaatggatgttttgatgttttctgaagttgtagtatagtactccgtagtaggtctaacgttgcattcttatttaacactgcatacatatcacttaagatattcctagcttagctaccgtccacatacttgaggttcctagctagatgacaatactacgtgcaagccattgcaggagctgaatatcttgtagtacttgcgcatagttgcatggtccagaaaaacagatatccagtacatctctcgttttctcccattaattgcagagtactgggtatctgatcagttaatgaaatccgcaaactgctgaacaaccatctacctgtagatttcaattgaggatttggactaagataatatacaaatggtttttaggtacaaacttcagagaaactgcacttgcactggttttctatgaaattcaaccactcagttttgtcaccgaaccatttgaaatgggttatttggattattttcatataaggataaactaaatacttttagaaataaacttacttaacaaaataacaaatactatgctgagtgaagaagtatagtgctgtagaataagtagtttagaagcaatatcatagaaaaaaaagtttttcgagaaaacatttctttttagacgtggagtaaataatctaatatagtaattgaaaagcactctcttcgtttttttaatgaataacactgttcacttttaaacatatattttatcattcatctattaaaaaaattttatgtaaatgtataagatataaatcatgcttaaaatactttaagtgataaaacaactaacaacaaaataaattataattacgtaaatttttaaaaagatgaatgggtaaacatgtgataaaaagttaacggtgtcatttattaaaaaacgaacgaaggtagtagatgcttttaatttacttctgaact

SEQ ID NO: 44592 - DNA, 795 bp, Oryza sativa
gtcagaccggccagggcacgccggtcagaccgccactatgtggccggtctgaccgcccctggtcaggccgagcccagtgaaagcaaaggtgattatgtgtgtgtgatgaaaatgtgagcacaagtgaaaatgcaatgacctaatgtggcaatttaatcatctctttgctaggtcattacccccctttatagtacggcgaaactaacaaataaacttgcaaatttgatcgtccttcacctcgatcaattttaaaattaaaacactagttttaccgttttcttttcttcgcttcgcgccatcaaattttaatccatcgatagtcatccatgcgcacacatgacgtggacctaacttaaaatatatctcaatagcaatggttagtccataattatcgcttgtcattaattaccaaaattaacaacgggggcctagatgcttcaatctccccctttttggtaattgatgacaaacaccacaaatatatataatcaaacatagaacacatggatatatactgcaaaggaaatcaaaagcttcccctaaacatgtgcataacaatcacaaatagcaaatatggagccaatgcacatttcaatttcacaattcaacatatcacaaacacaagagcaatatctcaatgtgaagttcaagaaatattcatccatgagtataagatggtcacatatatatcaatatcacatacaccatccatcatcgcacaagttcacatcacaaaagtcataaatcatcctaaaagggctcacaaataaacataggctattgggctgcaggaat

SEQ ID NO: 44593 - DNA, 687 bp, Oryza sativa
actattctaaaattgcttatattttgaaaattagttgcggtcgatcaaaaccccagtttcagcttatgacagcatcgtttctgaaaagaaaagtaaaaccattcacctaagctaatgattggttaacttgacacaaacggcagccaaagatcgattttcacgttatatcctaattaagtcgattgattactagtcttcaggatacacaactcgatcaggtttggtgttttatctagcttgatgtagctagctatgtggtgtttgcaaatgcgtagtacaagccaccgacaaatagtgaattggtgatgtgatatcgtgctgcaaaatctgcaatatgcagagaacgatagttaacttttgcaaattctttgtgtgttgagtcggcaactaggacacgctctcactctcactcacatcacaccccagtaatgctgtccccaaagattcagaagatgaaagatatatagcctcaatcacaccgatttccatgtagtaacaatactaacaaacaacgatcctaataggaacactacagatgccgaatttctatccattatctaaaaaactctcgtgccacgacaatccagaattgaacagacagctacgtccaacagggagggttggatctacttaattcatagaaggccaaaacttagctgaatcttgttcacgggtatcgcatcaaat

SEQ ID NO: 44594 - DNA, 1099 bp, Oryza sativa
ccccaaaatttgtgagttcaatctatgtcgagacgttctaatatgtgtaagatctcttcactcctttttttccttttgattttctctctttctgcttcactgatctggctagaatgagatttttattcttgaatccagtaagtgtttggtaataatcatggctatctcaaaaatgtgtagttcatgacgacgaggtgaacgtatgttccaagcaataataattccatttttcacttaataagaaaaactaaattagtgcaatggttttttttctacttaattagccagatcgtcttactcaccacatatgtagtggcgatctggctaagtagaaaaaaagagtttcttcggcatagctctagttgccgttgatcgtgaatgattcctactcgtctgactatacctttataaacatataagcattagattgatactgacttttctggcgtggttagagtcattggctgtggtgcaattgagtaaaaagtagtggtagtagaaacccatcccattgcattgtaaactatccgcatcaagtcaaaatgcatataaccctgatctgttatgtaattttctatgagtatattttataaatataaggcatcgttttatatttagtgttgggtccttagattttgagggacgactctgcacgttacatgctctactaagaggaatcgcgcgagaaagatccatttgaaaaaaaaaaatcatccatcaagtagatggaatcgtgtcaatttcgcaactgcagcgcacgcgcttgaagaaaaatgtaaacatttcctgccaataactaaagttaaaaaaaatagataaatgatgatcaataatacaacgagaactttcttgttaaaatggactccctccagtcatgtatataccaaaaactactagtacaaagcaaataatgcggcatatttacaataaaaaataatttgtgaataaaatttttatgtgcgtactcttaatgatgtaaaagcaaatgctgaaaaataaactaccataaaaaaaacccaaaatcaactccaaatagcttataagcataagtatatacataaaaaatatgaggctatatacttcttgtgctacagtctgc

SEQ ID NO: 44595 - DNA, 2246 bp, Oryza sativa
gttgtcatacgctgtctcgtgttgtccattctcgtggagtagaaaattgtagtagtggacaattttcaaacttcaatgtccaaagaaagaacatagttgagctgtcaattcttatttacctgtagaatctgatggatcataaacagaaaaagtatccttacactgctgaaatgcttgataagagttactaaaaaaacaagagcaaggcgacagtgctactgcctttttccagaacaaaattatcagtacatctgatatctcttagttatataatatctggacagaattattaaattcttctctaatatattttactaattaactatgttgtcatgagtcatgagtaatatctcgtgacaaacaaatgaacaattgtgcatagcaatactgctagtaatcagaaccctagacgttgtgcaattggcttgggtgacttgggaccatgtagttttgctaatgatgcagctatgctgttagtctttttgtatacgaaatatttatgctctgtatgcatggttatcattagggcctgttcactttgatgccattttcaaccttaccaaattttggtaaagttaccaaaaaaagtggctacatttagtttcctgccaaattttagtaactatataagaaattctgccaaaattttggtaaggtttttttggcatcaaagtgaacaggcccttagtgaaagtatctatgcatatgcataatgcaagtattgtttgttaggaatgtacatgctctccaaaattccgtggttttgttcgttgaatcatataccttagagatgatgtcctaattcgtatgcaagtgtttacatttttatcgcatatttacagatcatatgtatatctgctagctgtgatattgttagtctccatggtgtgtttcctagttggcctcgtaacatcagaatccccccagtattatctacctgatttagtggcctctctgatcgacagaacttaatgtaagcagcggctaactgataaaatatttgcacaggacatatgtggaactaagtacgcgattcatggcatgtttaatttttctaggaactaccattgctttcatctactccaatgcattgttcttgcaaagggaatatagccttttttagctcacgaacatgtgagcacacagccacacaacacggaggatgcagatgtttagggaggagaaaaaggctacagattctttcgtaatccaccctgtcctttgttcttttcctgccattcggaatttagtggtgacccaatgacaaagacctttccagtgtttccaattccaaggctgcaagtattaccgtgaatctttctgtcacaccataaaaatattacaccccttttttgggtcctgtagtttatcctttaacctaaagatcttgattttctacaggtggagcctatgatgattaaccatctggaattaatgcataccacataccagtctttcaatggtgaaattgagcaagggatctgctgcaaacttttgtggccatgtggggttttacctgaaatttcaggtattcctcaagcttttacctcttgcagacttcaactggtaatttaagttcactagtctccttccagtctcgtataatggtggtacaatttacatctggttcagtagaaagtagtaaatagaaacaaattatcaaaacaagcagtaattccacctattgagctgcagtagagtgtgattgtcagcttgaagcccatgcactatctctatcatggaatggatcaatgccatgtgttattcctgagagcaacccttgtgatatgcactcccgagagtggcttcagatagcttccatgtttggcaacttttcctatggaggaagcaaattaattgccacggaatggtgtgtaacgaaaagaaatgaagttatcgaattcaatcaatagtttccacagttgtgaaagagggattaacctgtgagttagtcacagctgacaaacttctatgacaactgacaggaggaaattggggacgcagctaacttgaagtaaaggtgtttggatagctagagtgataaccaaaaaagtgggcaagttcacacgctctaacagcaggaccataggatattccatatgctgctgctgctgtattattgatgagccaccagcattctgtagctgttttcttgctctcttaatttgcaacagaaatcactattatgatctgaggattgccctgcagttcagtacaatcatggcatcgtactgtacacacttttg

SEQ ID NO: 44596 - DNA, 1020 bp, Oryza sativa
agtatggcttccatggtagaaaagaggataaaaggcagtaagtgtattgttacctcccctgggggttgctgctgtgcgctgcagctgagcatggtggtgagggacagcatcctttcttcctctcacctgccatattttcatctcctaacgttagctccttcccacattcttctgtgtcccggtggctctgattataacctgaggtaacagaagagaagatatagaaaaaaaagaacagctgctcaaattaaggaactagagtaagctgctcgttttcccttgtcctaccttctagtgtggccccaacaatcgcaaaaaatcctctctttgccccagttgtgccgatgctggtggtaggctttgaatgtgtagggaagcaaccgatggatggttctgaggaactctctcgttgttgctgctgtatcttctctcttgaatcagctgctctctcttcctgttggacaccagggaggccgagcttaagctctagctccttatcctcatcggcatctaagtttgtgttccttgatccttctccatctgcttctttcaccttccattctctcccgtcagggatgaggtgtagcagcgtgggagggaggcctttgtccttgaattcttcttccataggacttgatctgctataggaaatatgaattctctaagaaaaaggaacaagaggaaaatctttgtgttaaaatgaatagatggtggtatgtggagctgaggaaggactacagtgccaatgttaagggcttcaacactcaaaaactctaccataaatgatatactacatatgaagttgggaaacgatgggaagaatgcaagtatgcagctacttgaagagttcagttttgcactcaacttaggccggagaaagtgtcaaaacaaacgtgtaacatattctaaggtcaaagtgaaagctggaaagagaaaccgggaagagataggacttgtgatcatcaaatcaattcatgtcacaacctcaaagacgttttcgagcaagggaaatggagcctg

SEQ ID NO: 44597 - DNA, 536 bp, Oryza sativa
attcctgcagcccgaaatacacattttctggaatattagggtatttttatgttggtaggtatataattaaattaatgttcaagtaaagtaagtgtgagaaataaaatattatgtttggatttaatttttattaaattttctatattaattacactctttgaaattttcttggaatttacatagcttaattggtaattttggtaattttgataatacaaatatcatttcagcatttatttaaataaaagtcaaaataaaaatcatttttctctatgggcccttttcagcccattttcttctttagcctgcaagcgcaaaagtctacttaatacccccatactcctcctctcacttgctagtccaccggccggcgtgcggcccaaaccctcgatcgatctgagccgttcattttgatggacggctcagatcaattccaaattgatgaccctaaccctccccctcccccttcccccagctgagccggccaccaccctgcgcccaacgcctcctctccccctccctctctccccaccggc

SEQ ID NO: 44598 - DNA, 767 bp, Oryza sativa
tagttgtaatacttacaatgattgttcgattggtttgttaatcgatctttgatttttttttatctgtccggcgtacacgagtaggctttggccgtcgtacggatgtaattgcgcgtgtatatggagggtgccgcttttctgattgacggacccaaaattactatgacgaaaggaaaaatatgaatctttatattagttatagattatagatatagatatataccttgttaaacattagtagtgtttctactatccatcattcgcttacgtaagcatgatgttgcccccgctttaggttggagtccgattttgctttactaagggttatgaatgattttttgtccattatcgctctatataccagccgcgtacgatggaaaaatcataaaattaaatatcgataataagaaattcaatcgggcaaaactcaatacaaaatccagtcatgcaggactaaacggaccgagaacaccaccataaaattcaatcagctctgctcgtagcccacgccctcacctcgtgccactggacattggcccgcttcgcgggacagcggggaggcggaggcgaccattggcggctcagacacaacctagtgccccgcaacacccaccgtgtaccgccaggttttgaccggcacgacggggcaacgtggaggagaggttgctgatttttttttcataaacttggtcaaatttaaagaagcttgactaagaaaaaaaatcatatgactataatataaaacagaggaaatatttaaatataca

SEQ ID NO: 44599 - DNA, 1930 bp, Oryza sativa
attatgcaactctatttgcatactacaccttcttttttctgtgggggagcatattggtccttttgactgttacattgggcttcattgccaaaaaagaaaaaaaaaagcaactgatcatttttggtaaagtcaaaaattggcaatgctaaaagtttgtaaaattttggcaacataaagatatgaaagtgatgtttaatttgatgccttaccaaaatttagtatagtttttatgagtagaagttcctagaattaccaaatgttggtagggattgaaaaggttacatggtaaagtcttgtttattttgttgtcttaccaaactttgataataccaaactttggtatggttgattttagtaataaattgaataagcccataattccatgcggaattgctattatatactattcttaattgttgctctctactgttaaagaaagttcactgcactagattttaaaacactgttttattggatggaacatttagttaagggtatttgtggagctacaacaatgtaattaattaatttcagtttgttattcacggaagattcatccaactaccataattcgtggaaaaaaaacaaatttcataacataaatgaataaatggtatactacggtaccttttccgtttcgatttaccatatggtattatttacgcgtcttgtttattgtccgattttgttatacacattttgttatgaaccacaccaagacaagtttgtggagtccaagttgtgccttaattagccctcaccaggtctatgaatattacattataatttagacatgtttagattcgtactatttatttgccatatcaaatataaataattatggggagagttatttcgagccatagatttaccattaagctcttatattgttcttttgacacaataagctattatattgtttatacccacacttcatcaatccattggctatcttttttatcgtgggtgcatcaaaatgttttactatagttccctagattttgtggtgtgccaaaccaacatgtataaaaatgtaagaatatacatgaagagcaaccaaatttgaaccaagaacttcacaatccagtactaagatatagccatatactttgacacgaaggtttaaaagtaataagagcgtagccgtcatagcgtatcacataaactaattgaaaatatgtcacattcaaatatttcaaaacatccttttcaatacgaacgatgaaatcaagctttgattactctaaaaaaaccatgtagcttgttagacttcctcacccggacttagtagatagatcgctcataagcctggttggccaaattctttctattgtcatcgtgtatacggaatcgacaaccactcccttagaaaaatcgtccatgagaccaatgacatggtgtcatggaagaaatctgccaaaggaagagcagtaaaacgagcatgttcaggagggcagaattgcaaaactgcctaatcactttcccccatcgccggtcaccgcctctgctttctttttggttcggaacacgtcacgttgacggcgaccgggccagcctaattacccaacccatcgctttcgccccgtagcttccacagatcggccagatgccaaaacccacgcagcatattcccatcgtgcaacgcctgtgcgctcacagccgtcagatcaaagatcggacgggacggggcgctccgtgccgactcggaaaccgcttcacgctctggcctgggccccgcccccgcgttcggaacatgggctgaacgaaatattattctggcccatttgatccccacggctcgcaccatgtgggccgagcccgagattgcagtcaattacggcccacgaagaggcggatgcgagtcgtcttcatctcgtccgacgcttcaacccgcaccgatcctgcgccaccccttcgccggcggcttctc

SEQ ID NO: 44600 - DNA, 690 bp, Oryza sativa
attcctgcagcccttagcaatagccatggaaaaaaattgcaaaaaaaaaaaaaaatcggtggccgccgacgccatcaccgccaccggagggaaaagagaggcagcaaagggagccgccgctgccggatccacccgcggtggccgccaccgccgacggatccacccgcggatgaagccgacgccgtcatcgccgtcaatgccgtcgttgagagggcgtcatcaccgtcaaggccaacgaggagagggagagggggagggacggccgtcgctgccgtctccgtcgcaccccgccgtcgctgcgccgtgccggtgagacgggaaggagagcgggagacggagcgcgaacgccaacgccgtcgtcgccgccgttgggagggcgccgtctccgccgcaccctgtcgtcgccgcgccatgccggcgagaagggagggagaagggaagggaagcagcatcggtggtgggagagacggcgccggtggtgggggaggcggccagcttgggggagggggagaagcgggagatggggagagggagcggcaccgccggaggggaggggaggggaagcggcgccggtggggagagagggagggggagaggaggcgttgggcccatggtggtggccggctcagctgggggaagggggagggggagggttaggggcattaatttgaattgatctgagccgtccat

SEQ ID NO: 44601 - DNA, 1109 bp, Oryza sativa
agcaaacgtggtgcctcctttcaaaactgtatggcacagtaatataataaaatggttttagagggaaccatttgaatatgtgtccgatcttttgagttgtgtcattgttgttatttgtaatcgttttgtgatcagatatggcggtaaattttattttgtttcagtcaatttttttatcgttagagttatcctgggattcatgctatttgggggttctcaaaggagaggacagctctcagagcggagtgcttgatgtagttaattgcatgtgttaccagtcatgatgcatggatacgtgatattggtacggtgatacgggaattttgaaaaacatcaacatgacgatacggtgagtatataaaaaatatttttaaaaaactaaaatatagagaaggtaaaacaataagattaccttaacaaaacaaaattctatgcattgttgcctcttacaaacaagtaacaagcttaacaccttgtaaccttaaataataaatatggtcagtactaaacttataaaatatattagtagtgtagcattggggttttaatgggctattgaacaagtggttatagggctaggtatcagagaagtatccaataagtatggtacgagtatcgttaattattttttattttttcactgtttagtgtccgtgtccgatactccttcgataccgtatcgatggagtatccgatacacgtacggcaagaaaataaagtatcggtgtttcacactcagtggtgagtatgggtgttcttttagtatttggtgaggcttccatgtcttctcccactcgttgtagccttctgccagcagtgagtgatgatgagtctgcatcttcttgctctttgaccagtgtggtcacgctgtgtgcgcttttgggttggtttgccctctacggttatggggtagggatgtagggtgttgattttgaagtcatgctgggagagagtgacggaggaaggtggtttcagggcttagtgaaatgaaaatttttgggtgtcacatcagacgtttaaccggatgtcagaaggggttttcggacacgaataagaaaactaatttcataactcgcctagaaatcgcgagacgaatcttttgagcctaa

SEQ ID NO: 44602 - DNA, 668 bp, Oryza sativa
tgaattgtccagcactttcaaaacaaatatatgctagtgacatgagtgacatatacattatcctaactgtacaagaattcagcaaacacgaagcattggattggtttgattcgttattttctttcttttttttcgtttttgttatgtaggaagccacgtgaagtgcacggtatatttcacagcatttacccgctaacatggagtacccgaccagtatccgacttcccaattttttgatggctcataactattttctctaattttattttcaatggctcgtgactatttatctgtgatgatatatagacacgtacttcgtcccgaaagaagccaacctacttctagtatagcggatctgaatatattcataaacatataaacaaatagggccgttttgatttgctaccaaaactgagacataccaatattttggttattggaatagtaaactggctagtttggattgtgatctaatcaatggtagtgcctaaatttaaattggtagcaacggctaaattcaaattgatattgtcatcggccggaagtgcctagaagtaaccccacacaactaccattgtaattatttacgctatataattaccatgatgagcaaaatgaacctaattatgcatatttcttatcatcttatttgtgcttattctgcaaca

SEQ ID NO: 44603 - DNA, 741 bp, Oryza sativa
tacctctcatcgaaagatcgggccacaaaccctagcgggttcgcattagtataagagtatgctaacattcaaaatttatcctaaacaaacttgcccacttattttctcatctcaatcaaattacaaccatcactcacttaattccacatctctccttaatttcataaaaaaagaacttttaaaacacataggagtagtagaccttttataaacatctacgctaataaaactaagatgaagtaagatcacttcataagcaattccgtttactattttgtgaattactccctccatcccaaaataaacataaccatgagttttcgtaccaaactttgatcatccgtcttatttaaattttttaatgattagtatttttagtgttattagattataaaacataaatagtactttatgcgtgatttatgttttttagctttttcaaaaaaaaattaaataagacgaacgattaaagttgggtacgaaagcttatagctgtgtttattttgggacggagggtgtatatcctataataacctcatagttacagttaatacataattacagcatcgtgaatctttgctgatggtggtggttgctgatggtggtgcggcccgtgacgagagagagatggaatttagagctgaccaggtgatgttaggtcgtacaaagctgtcttgggcgtgatccatgtaagaggagaccagagaataagctttgcctcactgccaggagacaaggcaa

SEQ ID NO: 44604 - DNA, 949 bp, Oryza sativa
tctaaaatataagatataaccacccctaatctaaagaccaagaaaataattataatcatcttgtagttttgtagtttagatcatcctaataaatataatgcatgcatccaatagaattagagaacatgagagtggaggatttaaaaaagtaataatttaatggagaagggattatagttaattgcctacatgcatgcatgccttatattatggaacatctagaaaaagtggttgtgccttatattatggaatggagggagtaataagtaaggtaaggcttaacaaaagtaggtctctttgttatcaaaattttcacaatgtgtatgaggcaataagatgggtctcatgaacataaaaaatctaatagtctaatgagaaagatagaaagaagagagttaacacatagatgagaaaataatgtttttttatttcttactaccaggttatagtgttattgcatggtagttgttggtactatttccacaattatttactacttactataacggttgcatttatgcttactacctggttttagaacacattgtggatgttcttagagtataaaagcaggtagtaagcaataaaataaccttacaaccacaccaacaaacattgttaaagctagcaatagcaactatgtctgctaccaacaataagcaacttaactatagtatttatacagtgagcaatgtgcgtgcagagtatgtgaggctagggattttggtctttttttcccctcttgtggactctatcttatgttcaccttttacattcacacattatgacatagagtatgtattatttccctaaaaattagagtatgtattagctactacccactgattcgtaaatccaccttattaccaattttgacaataaacattactattacccttatatctatatggagggaattgacttttgcattgaccttgcccatccttat

SEQ ID NO: 44605 - DNA, 1687 bp, Oryza sativa
tcatattaatttttaaattttaggtatatgttaattttgactaatatttttctcataaataaatagacaataaatcattattttatatttctcctataaaatgtgaatagtgaattatataatttgaaaattatattataagtgtatataatttaatgtttgacttatctctactattataaaaattgaagatgtttttgccggtattttggtacatcatctgtgtatgagtcagtttttaagtttgtttgcttttggaaatacatattcgtatttaagtcggttttcaagatcgttcacttttggtaatccataaggaattatgtaagaaatttgtttaaaaaactcgcatgctaacttgagatgatctactcctaactgcatcatgattttctaaaaaaatatatatccaagcgaaatcccacagtgaattttatcttaactaaaccatataacaataatgagattaaaatatacttcacccgttacaacgcacgggcattttttttctagtagataatcatgcaactgtaaaacgaaactctctcatgccagcaatgaccacgcgttccttctcccttgaaagccgtggaataccaagcgatagttcgaactgaaacattcattcgctatttgctgaaacattgtttttatataaggtgaaacaacacccgatttaaacgagtgaaacattttcgatctacttagtgaaacaattccgatatatctggtggaacatcgtgcaatatttaaaaataattcaataataagctaaaattttttttcgtcggaatatatccatgtgtggtcttgttttgaagatttaattgcaacgaatttaatggtgtaatcagatcataatttggataagtactttaagagataaatcagtttaaagtaattttatacgtaaatcgagcgctgacgtcagcacctgattttaccatctcccgattgggcgcccgacccagagtcatctccctaagaaaataccgtctcccccaaaaaaaaaaaagttctccaagaaaaaaaaaacctaacccatcataagaaaccggtaccggaaaaaatcgactcatcataatttatgttccattcatgttacaaagcacggacacctaactcgtcatttagaaagcgatgtagagatgcatcgtactaattaagttgccatgataaagaaaacggtccattaactagaaatagttgcacaaaatggatacaatttactcccagtatttcataaactacctttaaatatatatttatctcgagacaaaacgctgaattatttgtcagagaactattctggtttccatcaatcaatgtcataataacccccaaaacaatttttgccacatgggctgcgaatgtaacggagtacttaggcaattgacaggcctacatgcttttagggcatgtttagttggtgaaataaaaacttttggatgttacattggacgtgtttgatcgaatgttggaaggggttttcggacacgaatgaaaaaactaatttcataactcgcctagaaaccgcgagacgaatcttttgagcctaattagtctgtcattagcatatatgggttactgtagcacttatggctaatcatggactaattaggcttaaaaaattcgtctcgcgattttacatgcaaactgtgcaattaatttttctttttatcaatat

SEQ ID NO: 44606 - DNA, 645 bp, Oryza sativa
tatataagtaagtacatatttgtatagggtgatgaggtgctcagtaacatctgtagcatatataagagattcatggcatgccatcgaccccttcctttatcacaatgccatgctcatgcatgcctcttttagcggagatgccagcagtactctccaagagcccagatggggaatatgttgcggtagttggggtaattgaagaagagggagcaattgaagcatccaacgtgttcctaacatcagtacaggagcacaagcaaaacatgagatagaccttaatatgttcacacaagtaatgctgaatcaccttagaacatccccaggagttaaactaattggccatctaattagtttcttttcaagtttccataatgacagttaaagatggaattgtatgtcttaaaatccttgtacagaaggtattgtatggtagatctcagttccttacatgttgcgaagtcctgatttttatctaatgtaaacaccatggttctttcctaaaaaccacttgatttgtgcgaggaagcaatagcccatggttcagttcttttctgaatgtaaacagaactatattgagcagtataatgtaaaatttagtctagccatactatgtattacttgatgaccatagttcacatcagagaa

SEQ ID NO: 44607 - DNA, 686 bp, Oryza sativa
gtttggttatgaattggatgtagagtaaattacaagttcaattttattactaaaatttcactttataccactatttaaataatacattttttactttggattaagtaaaattatatttgttgtaatttggattgcctccgtcttctcgagtagtatatccatggttttcattataccggcttttttacattaggaattcccctcctgaagctatatgtaggccatacctttaatataggattagttggtatgaagagataagtgagctgagatagtctaaaccagtacagaggtaacattaactagtctaaactaaaatgattagataaagagtggtccaacttaaaactttgataatgaaagatagtcaaagtgcaattcaatcttagatttatatacacgactctttacatctatttccacgtatataattatattttgtacataatgtatattagatatacaaaacgagtgttgatatataactcttatcttatgtttctatagatacaattgtacttatcaatctagattcatctcaatataatgatttgttttttcttcaattaatatggtaatatttagacatctagaacgagtatggtgactcattttcaaacaatattaatataatataattataaataaactttttttctaaccgtatttccaaaaaacctaattaa

SEQ ID NO: 44608 - DNA, 679 bp, Oryza sativa
tacgtattcaattctggatgctccgcaattcgcaaaaaatatgtttgcgtgcagggaaactgcttctcgtttcctccatttccctccatttcccaacatttctcctcgttttccgcgcggacgtttttcaaactattaaatagtgcgtttttttaaaaaaagatttctatacaaaagttacttaaaaaatcataataatctatttttgaaaaaaaattaacaaatacttaattaatcacccgctaatcgctgctccgttttcccgaacgcagccttaggggtagttgtgaacttgtgatcgacacattttcggttatactttcacgacccgtgccttcccgaaattttgaacaccacacaactacgacctgtgccacatcaatatagacttacgaaacctcccattatatctcgagaaaatatcggtctcatatttttattaatctattgtcctaaaacatatagctactctttaacatttaaatctccttttctaaattatagatatctatccacttgccttttcatttcaaccaatcagaaacatttttaaaaagtttaaaggtgacaacatttcgagataataggagggtaccgacaaattttgttatacgccactttaatttgtaaacattttgaaatttgccacctaatttgtgtggcttttagaatttaccac

SEQ ID NO: 44609 - DNA, 686 bp, Oryza sativa
ttttaacaaaatttgcatgttaattaggtttttccttcataatttagattttttttgtagtttttttaaaatctagtctaattttcataattataatccacgtaattaatatgttttaaattttcactcacaatatgttaaagaatgaaagaaaatacaatgataatatcagttgttttgaggacatattatgttagagttaaaagtattttatattaaggattagatgtatgaaaattcaaataatttgaggtaattaaaagatattcgatgtatgcttaaaaaatatatggtttttaaaattaaaccccaaataatcttttattagaatcaaatacttaaaagatattcgatgtatgctaaaaatatatagttttttaaattaagccctaaataatcttgtattagaatcatatattttaaacttcctataatattactcttgaaactctaacaacaatcctaatttcgttaaaactcttcgatcataagcctcaaagcttagattagaggtacattttgagatatcaaatattttacaaatcctaaccaatatacattatttttctttgtatgaaccaatgttaggtgatgatgaacacaccgcccataccttatcatcccacatcttatatatacccaacacttaataaataaaaaaattattacaagtctttctaaaaagg

SEQ ID NO: 44610 - DNA, 520 bp, Oryza sativa
ttcacctcaaaacgcacaaaaaagaccacaaattttcaaccttgccatgagcagcagcatcagattaacattatactagaggagaggagagagcatccaaaatacagcagagattaaacagcaagaactgaagaagtcttcgatcaaactaggtcgatgatggaagaagaggagagagagagagagagagatgatgatgacctgctcgctgtggccttgcgggaagtagacgacgaggctgcccaccggcggcagcgacacgagcgggccggcgcacgcgtgccacagctccgagttgatcgccgccgccttccgctcccctgcaccgccgcagccgccgcgtcagccaccgccaccagacgagcgaggagaagagaaaaaaaaaagcagtataccttcgcatgcggccacggcggcggtggcggaggaggaggccgccgccgccgcggtcaccgcggagctcgccggcgtctgctgctgcttcatgctcgccatggcagttcacttcagagtcctcctc

SEQ ID NO: 44611 - DNA, 2820 bp, Oryza sativa
cttctattggagaaaaaaaaatactagtagaatattgttttttttaacagtggcagggtttagttcccttcaaacttcaaaaaattccgtcacattaaatgtttgacacatatatggagcattaaatatggacgaaaaaaaatcaattgcacagtttacatgtaaattgggagacgaatcttttgagcctaattacgccatgatttgataatgtgatgctacagtaaacatttgctaatgacaaattaattaggcttaataaatttgtctcgcagtttacaggtggaatctgtaacttgttttgttattagtctacatttaatacttcaaatgtgtgtccatatatttaaaaagaattggcacacgaactaaacatacggctagtgtaaaaaaaattgtttccttgcgaagagtaataacttttgtgtgggcatgcaaatatgcaatcggccgtttgggaaaatgtcgggaagatatacgttggtcctccgtgctctccctcttatcataaaaccatgaatatataggtggaaatagtatgacagtcttgagttagcatatatatttggtagagtttcaaatctctgtgtttggcagagttttaatgtctgaaatagcttagttgtggagctgacaaaaagcaatctcacccttcttatgtttttccaatagtggatccttctaaattgctcttaaaaattaagaatctagtattatttaattcgggcgactgtatactaaacagatatccgaaactgataatagtattaagtatctagggaagtccatcatactacaactactccctccgttccaaaatataagtattttttatcctgacatatggtctccgagatgctactttgatcaacaatatctataaaagtaagatattttaaataaaaaagttgcatattagaatagtttgttcaataataaatctagtaacatcaattttacatgattgattttttttccctattaatggttaaaataaaaaatgtttgacttgttacttttctaaaaatgtttatattttagaacggaggaattactatgttactatctccatttgaaaaagaatcaatttctaaggataaatttggatctagaatcatacctaaagttgattctttgaatgaggatgtaccactcggcaaagactttttttttccgaaagaccctaggcaaagactcaacaagacgagtggacgatgttagtcacgatcgagtagctaggatatatggtacgattagttgggatgttcaaggaaatcccgcgatttgtccagctaattataaatcgatcctggagcatgtcttctgtaagctagcttgttcgatcgacgtcctcatcatcaaacgccatttgtgtgttttgtactactagtacgtgtgtgttgcgtccacttgacacattggtgataatttgctaatcattttgtcagctctgcatcgtggaaacacaatgctcactactagtagtatactagcatgtagcgtgctcgtccgttcatcctagtattttcataaaaataaacgtttcagagcaggtacaatagtaggctataaaccagctgtaaatataatttaagaagataaataagaagagaaaagagcagcgggctatatatttatagccagctgtagcacagatttcaagacgcagtgtgtgtatgacaggtgggaccaggtattaatagtgtagtatgtaactattgtatggataagctattagattggttatagataaattaaagctagtagttggcttggataagctattagattggttatagataaattaaagctagtagttggctatactattaaacttgctcttagagtatatccatacaaacatgccaaacttaccgtcttggcactaacatatttatatggtctgctcatggtgtgttttgtagtacacgctccttaatttctactccctcgtctttcgcacgtacgttttccgaacatctaagcattgtatattaaaaaaggttatatagaaattatttttagaaaaacatattaaaccggccatttttcaaggtttttatagctaatacttagttgatcgtgtgctaatgagtcaccctgtttgcatgcaccctcaatagcctcatggcatgatcataccaatgcacagaatttaaacgatttttgcgagagttttagccatttagtcctataagaaacattctaaaattctgttgtttcaaaggagaaatcagttgcttaacctttaaaaaaagagcgggtacaataagctgatactataagtataaatgaggcgtacaagttatcacatcatacttgtatttatgtggaggagagagaagaaaaacgagctctaaatttatagtcaaccgtacagcacaaacttcaatatactgtgtgagagagataagtgtgttagatattaatgatacaatatgtctatatctatatattacttagtattccatgagtaaactattaggttggtcatatataatgccttaattttttaagctagtagttattatattattaaacttgttctatgattttttttatagtatgttaagagggttgggattgtgattagcaaaatgagtgcagggttacgataaaatattaaaatgagtgagagggagatgataatggaaggcagaagaaatcgactaacctctaatatccaaaagagaatcatgttgataggtgatttttttttctcttaatccattatccaaactggctcaaacaccacctaagatggtatttgaatcttctgaagatggagatgaagatgaatattaagttttttacgtaaaa

SEQ ID NO: 44612 - DNA, 3915 bp, Oryza sativa
caagactcatgtccaagcccaaccctgacccatctgccttacgacagtgtacggcttcgactgcgaggggtcgatccgacatgggcagggagggagggcagcaaggggttgcgatgcgtcgtcgtgctcgtcgttgccgacgcccgcggcacggcgacacgtccggcggtcgccgtgcgtcgtgccggccggcgaggggacctttttattactatatcccctttccagcatggactactactaccactctttttcactcctctagctgctgctctgctcagaggctcgtgagctattcgtagctaggctttcgccagccggcggcgaggagttggatgacactgacgcacgtactgtcgctgcacagcggttagagcaagtttaagagcacccgcaatggtaaagtaagttgctatctataaaacatgtacatctcagcaatagactcaattaatagtaaaccaccttaatagtatgtctacattggtatctataattctctcatgcattgcctcgtttttctctatagactatctctaagttagtagatagctttgctctctctcttcatttaataccttccaagtagaaaaatatgctgacatggatctcttgtagagagcctatagataaccattgtgggtgccctaatagtatagctaattattaattccaatttatctatagccaatctaatagtttattcatataatagttatatactacactattaatatatggtcccatctgttatacacactgcatcttggagtccatgctatagctggctacaaatctgtagcccgctactcttctctctccttattatctacttaaaatatgtttataagccaggcttatagcttacgcaattgtacctgttcttaacggtggccggcgcggtgacgcatgcagtactagtgcagagaggtggtcggattccgaggagctctcctgttctgttattgtcctttcaaacttctaaaaattttatggaacattaaatatagataaatgttgtatttagattgatccaaagtttaaaatttggttgaaattggagacgatgtgactgaaaagttgtgtgtatgaaaggtttgatggaatggaaagttggaagtctagaaaaaaaaactttggaactaaacacacccaaaataactaattatgagacaaatcttttaagctaaattacgctatgatttaacaatatgatgctacagtaaacatttgttaatgatggaataattagacttaataaatttgtctcacaatttacagacggaatttgtaatttattttattattagtctatatttaatactatatttttatatattgtccatatacttgaaaatattttggtcagacaactaaaccgtactacatcggttgtgtagttggcacgcttcttcatcagtgtggcctcggtgcccgcgccgccgcgtgcgccgctctttcatcggtgcccgagctcaacacacacacacacacacagccctgccctgccttctctcatgcgagacccctccaccgaatgtagtttcggcttggctagctccagagaaaaccatagaaaaaaattccattttggttatttgagacacaggattataaaaacgtaaaagtagaataaaaaatacatgaatgaatataagtagaaagtcatgtgtagaatagagtatcgaaaaatggtcgttgtttcaaaataaatcaacttttgtgttgattgagagatacgtaaaacgagatgagccattaacgtatgattaattaagtattaactatttttaaacttcaaaaatggattaatatgattttttaaagcaactttcctatagaatttttttttaaaaaaacacaccgtttaatacttcggaaagcgtgcgtgtggaatacgaaacaaactcaaagaacacaccgttttatcatatcgtaggttgtttaattttggactgaaggagtatgcattagatggagcatatgaaaaacataatgaagggccccctttaaaatgtaagattgtcaaaaacacgagaatagaaaaaacatagaaatatgatgttatgtccgttggatttctaagagatttgaaaacacaagaaagtttcaaaactaccgtttgatagccatacaggaaaaacgtaggaattcaagacacggaaagaagaaaatgtgaggtaagacctcaatgatatttcttgaattttctcaaaacaatggtacttccttcattttattctctccatatcaatgaggggtacagtgatattttaatcacctacctaatttgtttttaactagctataactatgtcttgttccatagtaagattaatacgacctcatacctcatactctttatttcattctatgtggtctccctagtttcatgtgtttctttctatacaagttatccaaaggcataattttctaaattcttatgttttgggttcctataaggttctatagcttacaacatttattcatgtatttttcttgttcccgcatttcaaaggaggccatagactcgtgaagtgagcgtaactcaactggttaggttccttgtggtggaaccacccggttttaaatcctaaatttgatacgagtgctcgcatttacggctaattattatttcagtggtagacgatgtacccgtgaatagcaaggcgccagtagtgacttcgtcaatctcaagatatacccgtccagttcggaggtgctcataggggtagggtcaacagcgaagctagtggtgactttgtcaatctctagatatgccggttcagtcttccggaagtgcttataggggtagggctaacagcgagacgctagtggtgacttcgtcaatctctagatatgccggtccagttttccggaggtgctcgtagagtgtgcgtatgtacgtttatagggatgagtgtacgtgtgttgtgagcgcctgcgtttatacatgtttctaagaaaagaggccatagactcaaagcccgaattaaactggctccaactaatttagaaaaatcggtttcactttagtaaacatgattaattattagagtggtagattagcagtaattgtactaccatacacgtcacatgagtacatgatggtgctccgtacttgtatatgtaagcacccatacttctacttgaaacctcgacagcgacaagtgccaagcactagctagagaaccgaagaaaagacatggcaaggtcaaatggccacgtagcaactcatcaccaaaaagatagtactactacaaattatttttcttttttttaaaaaaaaactcaacagcaagaagccaagatacccggtacttgtagtggtacaacatgtgtaggcaggtcaggtcaggtcatgtggtcaaccagccaatggaaagcaaccgagagatgccttccatggattaatgtgcatggtagtagcaaatggtggccagcatatcgttcgatttttcagacacgggacaaaaatcgtagggactcaatcttttcgctttatacttatccgttaaaatttaaattttcaatcttaatttaaagctgattttaatttttttttattttttagcattttacttttagatttctagtaacacgtatataaaagttttatttaccaattacttctcgtttgtgaatatacgtttggcttattccacgaataaaccaaacaatgagaccggtactcgattcaccttttaaacctctcccttgtcttatgaagtataatgaactaaaaggacaagtaatttactcctttcatcttaaaaatacaaaatttgaaaataaatttggacagtgatagaaaagttagaagtttgaagaaaaagtttggaagtaacacaaaggctaattcacctccaggtggagttaccgtccgtactgaaaacattcatacggcagacatatt

SEQ ID NO: 44613 - DNA, 1263 bp, Oryza sativa
acgggggtttgggcgtaggtcggggttggggaggggcggcggcgcgtgagagcgagagagagggggcggagaagagggcgcggtggagacgatcctcagcgttggattttaagcagagatgatcctgaccgttctacgaggaataaaagaatgagtgatgagtaaaatcatttgttgaattataaggtatatagatagaagaagaagaggatgtggatgctcaccaggatcccctcctgtgctcgccagatggagaccggcgcccctctcctgttcagccacgagatggcgcaaccgtgcaaggagcggaggagacgagtcaggggatttttcttttacgcaaagggaagagggaagatacttgagtgcctcacctttatctcaaatttagtgatgttatccattttatttatcatgactgatggtggttcacagagaaaaaacgcaacaaatttggttgaggatttatatcagtgccgctccatctaccaccaccgctctttctccatgaggcaccatcgttcctcctgctccatctaccaccactgctctttcttcatgaggcaccatcgttcctcctcttcactttcacatgtgcaattgcactctctagtcactgatttgtctttccgcctcccgtattttcatgcacgctattgtcatggtcgtcgttgaggccagggtatcggccttgcaaggactcaggacgataggagctgacctgaccgagagcgaatacgctagatctaggctcctccttgttggatctggcggttcctagctattagagggaaaaagaaaaaggagagagagtgtgtgtatggagtggttgtagagtcactggatttggaggtgaagcaacggtgattccaccggacttgaagatggatagaatggggttgtctaaattgaaacaaaaatataaagttagctattttataaatgaaaataatgattaaagaatgatataatatgaaaatttttaaaaatacgttgtacaaaatgaatttactatttttgtccattagccgtagtctcatgctatcctaagtcactacagatttatcgttactatatggtatggttgggcggtctacttaactattactaataatctcatgatatgttaaaacataacaatacagagttctacttaaaaaaagataaaaaaaataataccctcgattttgctcaataataaagtattcgattgtggtcccttttctcactgccgaataactcatgactatctcttatatgtat

SEQ ID NO: 44614 - DNA, 1305 bp, Oryza sativa
ttagaggttacgggcttatttagtttggaatcaatttttgtactatcaaagttagttttggcactatcaaattaggtagtattgaatttgaactattatgggtaaatttggtaacaaatcaaacatgcacttgctactattaaagttagtaaaaattttagtagggtaataaattggtatcaaaccaaacaagccctacatcatcatacagaacatagagaaacaatgagtcatgaaacttgaagagggttgatttggtttgtgacataaattggccttaccaatttttatcaatgctaaattctgacaagtttatagctaattttagtaagacaattgtatttgaattgaagccaaaatagtctaagttaacttttaaaatggcatatttcttaagcatgccaaaatttggcttcaaaccaaagacactaaacactattgaaactaccaaattttgacaaattttgacatggctaattttagtaagacaaagttgtatttgaattgaaactaaaatagtctacgttaactattgaaatggcctattttttaggcatgccaaaattgacttcaaaccaaaaccaaataggcactaaacactatttaaattactactcccttcatattaatgtgttaaaaatatttgaccattcgttttattcaaatttttcttgtaaatatgaaaatatttatgtcatgcttaaagaacatttgatggtgaatcaagtcacaataaaataaataataattacataaataataattacataatttttttaaagaacatatgatgaatcaagtcacaataaaataaataataattatataattcttttaataaaacgaatgatcaaatgttgaaaaaaaagtcaataacgtcatatattataaataataattacataattcttttaataatacgaatgatcaaacgttgaaaaaaaagtcaataacgccatatattatgaaggacgtcatatatcatgaaggtagtaatatacaaatagacactctaaacactacatatattatgaagataatatacaaatagacactaaacactaagaccaatttacgcctcaaagcaaacaacaaagcaaaccagcccgaaaccagacagatacagatactcagaagatactcagaagctgctactgatcttgttcttgacataaatatagttacagccttttttttggattttcggattgttctccaaaatcaccatccaaactcaccggccaaaagattagtacagcactaaaactagaactctaaacatctcctaaactcgtctactaattg

SEQ ID NO: 44615 - DNA, 1024 bp, Oryza sativa
atgagagccaaagcccaatatcgggccgttcactctgggccaacggcccatgcccgacggccgacgtgtctcgccgtccgtcggccacgcggtcggccgccgagacgcttccaggatactacacgtctctgcacacgcgtcagcaagctcctgtgcttgcaccgtctacttatctcaattctcaagctctcagctatggagtaaactatacttgcatcttgggtatttttttcagagcaaatcgagatcgatccgacagaagcgagcgatcatggggcacggcaaggaggtgaagacgaggccggatcccaaggtggagatccaggttaggtttgctgcttaatttaattaatttctccccatttgatcgcattttgtatttcttttttacagtttagttcagatcagtgttagcttagcttgcggagtggattaatggcgatcgatgtggtgggatgggatgcaggagaagggcgagatcttcttcttctatcgtcccaaggtcggcaaggacgaggcgcgcggccccgacgacgtgcagcggatgtacatcgtcctccgccccgaggccaccggcgacggcggcgaccgcgccgtcgaggacaagcaggcgccggactccggcaaggagggccacaagaatcagcagccgcagaacagcgacggcgatggcggcggcgaaggcggacacggcaaggaggtcgtctcggtgacagagagttgcagatttttcagagattttcaggttaaatttgatggatgccggtgttgttgcattgcaggaggtgaacgtcgaggagcaggcgctgctccggctgatcgtgatggggaagaagagcctgccggacccggcggcgaagcgcggccgcccgtactggggttacgtcgagctcgtcaccaccgacgtcgaacacatcaaagacgcgctcaaggaaggtacaaaacgcattcaaattttaatttcgttgttccaaatcgaaatgtgaacttcttatgtatgaatttgttgcgatcgattttgcag

SEQ ID NO: 44616 - DNA, 763 bp, Oryza sativa
ttctgagataaagaacctccagatgttggatataaactccccatcatgttcagcatttgaggtgatcctgatatcagaaatttaaaaaaaagaagaagaagctgaatgaaaagactcacgggctttcacctcaatagatataagctaatacatgatatacctcttgttaaacagtaaaatattatagatacatgacatcacaaacatataaaatataatgtttctaagtatttactcagcatcatattacttacataaatcatattgtgatgccaaaaaaaataacagttataaaaataagcaatagatattctagcatccgatgcatgcatgccaggaggaggaataccaatatttcctctaactctgacacctatcaaatgatagtactgttggaattttcatttctaatcttaatcctatcaaatgcaaccgactggtgttcttttaggacgcagcgcgacagcagatgctaagattgaccaggttataactttggacgttacaattacattacaaatgtggtaaggaaacatgaaagagattgtaaaacataagctggactgtgttggataaacagtgaaggcaccaattactttcagcagataggttgtggttggagcttttcttcaggtatgactgatttaggtgggaagcttgttaaggtcctaggatttttcttgtttctgatcatgatcccacttaccaaaacttttttgtttgctcactaacagcacaaggatcctacttttagaggataaca

SEQ ID NO: 44617 - DNA, 1065 bp, Oryza sativa
tgtttttttcaaaaacatcacatcgaatcttcaaacacatgcatgaagcattaaatatagataaaaacaaaaactaattgcatagttagggggaaaattgcgagacgaatcttttgagcctaattagtccttgattagccataagtgctatagtaacccacatgtactaatgatggattaattaggctcaaaacattcgtctcgcggtttccatgcgatttatgaaattagtttttttattcgtgtccaaaaacccctttcgatatccggtcaaacgtctaatatgacacctaaaaattttcatttcacgaactaaacgggcctaactgaactctgcacaagtactaccaaaagttgctgtgattattgcgttgcggcagcaagtgcatgcacggatttgaaatcttaatttggacgcttgaagagaagtattagcgctatttggttagcaactaattttgtcacacgtcgctttaggtaaaccacacttctttcagaagatagtgttggtttatatcataactctattttatctaaattttaatcacctggcccacatgtcatacacaatatttcttgtctattttttttctaagcttagtttattatttgagtgaaatacatggccggtccctaaatttgtgttgtggtgtcagttagatccgtgaacttgaaacttgtacatttagatccgtgaacttggtttaatgtaccaactcggtccaaacgtcctttgagtgcgtttgaccgccaacgtagcatgccacgtaggcaacacttttgctcttagccccctccacatcacaattcacaacacgtcgcatatatctccttgtagctatatagtgacaccagaatccaaaaaaaaaaatcctcaaatctccatattattcttctccttgcatgtgtagaaaatgcggtcctgattagcaattgccattgctctgcgctccaaaatgaccttatcattgcataacgggctcttgatcaacaacaccttcttccggcgacttcaagaagaggacaagcttggagaatcaggatacctagcgtgcaagccgcatt

SEQ ID NO: 44618 - DNA, 721 bp, Oryza sativa
cccatcacattgctgcatactgcatagaacatgtgaaaccaaataaaagaaatttatggcgttttcaagtttccaattccgatcttccttaacgaaaactagatgcagaactgcgaccagattgttttcacttgctgcaacgtttatcattgatagagacttcttactgaatcagcacatcaagctcttatatactacatctggttgttgttgttgttgttttatggacagttttcatttccaatgcatacaggtacctttatgtttgtgcagcgacagtatgcacttgcgctggagtgttcattatagccgtgacagcagtttacacttgcactgttttttccttcaggatgagaaactacaaggataaatcctataattagttttaaaattagtagttcttatatagtcatttatcagaaaggaagagtaacattgccttcatcgagaaccttttttacggtgtgtttttttttttggggggggggggggggcggggtccattttgttgtctagtttagaaaaactttagatcatacaattccctcttcaagggtgtaaacacacatatctagagattttctgatgtatgtatttctgttatactagcatgttcaacttgaatatttgttctctattattagtctggtaaatgttgcggtttgcatggttcaactggggatgttgtcttcgaaattcgacagtcacattggaaatatac

SEQ ID NO: 44619 - DNA, 786 bp, Oryza sativa
ggtgcccgggctccaaggtataaaacacacaaattctctcaaatttttaaaaattttcaaattgtgagtatatacctaggtatatgaatttgattcatacatatacctaacaagaaaacaacttaaactcaactttatttcacaattcattattacatacctaacgaattatatgtttgaatgttatatatctagaaccaaaatctaacaaaaaaaaaaggttcaaactcagttcaaacttgtttgaacttattagtaaagaagttaatgttcatatctaaacatttaaaaaaatttcatactcattcaaattgggtatatactcaatttgaatcttggagcccatactccatatagcaccaattaatatatatatatatatatatgtcgagattcattaacatatatatgaatgtggacaatactaaaaagtcttataatatgaaacagaggaagtacataaatttctcagcagaaatgcggccatttcttttctttagctgatgttttagtccatttctattctttagctgatgtttttagtcaacattgcaagtttgcgtgaaataatctgttctgcaaatgggatgttgacagattttgtgctgcagatccgtgcctacgatacacttaaagttacatacgactaagattgtatgggcacgggaaaaactaaaattgtatgctacttacacttggaagttacatacgacttgcacttgaattacatttgtaattatatctaagttaatataattacaacataattatactataattacattt

SEQ ID NO: 44620 - DNA, 689 bp, Oryza sativa
attcctgcagcccatgagacattctaatactacgaaactggacaaagagtatgtccaaaattgtaagactataatgtgtcacattctttcaaaatcctttttattacgggacggatagagtacaatcctgccgcagttagcagtagaagttgccataaaagagtctttgttgtactattgtctggagtgaaaataagccccttttcaaattagaagtgccttagaatttaagactcgtgtacgctctacgcggttcctacatactttatcgaacgtgagtgatggcagattgcagagcttgctcaatgctcggctagctcaaatatccgtcggtacagcccaagtaaccaacgtaaacagggaaaggaaattgtggcgtgaaccttatgatgctcggagctgaaagctcgggacgcttgcaaaataaggcgaatcaacgcatggtagctagtaggagattgcccgtgatgtccgggcggcccatgcccatgtgcagctaacatggcgtgggggcacgaaatggatggttaattagtcacttgatagactacttctttttgaaagattggcacgcatgttctctttgaaaggaacggattatgacgggaaagctaaccgcgattttgttttcttgtcctccaatacgtgatctttgaaacatcgatggttccgaattcatcacgctatca

SEQ ID NO: 44621 - DNA, 659 bp, Oryza sativa
gaagtgtcgtgaactgaaatctgattattctttttattttccactgaaagaaaatgacaaacctaactagtagaggactatttggacaggacgaagaagttgacacatacacataggataaaaaaccatcataacgctcttggataaaaaaaataaaaatctcttaattaattaattaaattttgttatacctggtgcatatgtgtacaacgagatgctactgttgagtagagagggaaggcagatgaggcacacggcatgggcctgatcgatcgatgttttgggccaccgctacagtgcatccgatcataagattctttttgcatggatggaccacttccattggcatcagatcactgtgctccaactccttacctctccctccctgtatctccatgtctccatatctctctctctctctctctctatctatctatctatttctctctctagatatataaatagagagagaagataatagtcttctccatatgcagtagtcgccggcggcaaggtcggcatgatagatagatatacgtacaatgtggctggtggcttcttccttgatccaaatttaaaactagcttcaatttgcagtagatatatatttaggctatgctcaggaggaagagttaggaacccctcctttgcagcacgca

SEQ ID NO: 44622 - DNA, 967 bp, Oryza sativa
caaatagatttttttgtggtcaccaaatagagtttttttttggtggtacgttggttagacttatttttactaccattgccgccgatgcctctatttttatgtatagcgattagaatagaaattccataataaattaatataagtcacatgaagttaattttacccaaaattagatctgaatcagtctagaacaattctcctgcacatagatgggacattatattaagccctgcaggaggaacatgtgccacctacatctacaaggcatgactaaacatgcatagcgcatatataattaacacggccatattggttattcgttgcagcaaaccggcgtgcaagccctgtaatatgaatatatatatccatgaaacaatattggcgtttaaggcgatcctggctcaagatgggataccatcgcaacatcatacatgattttatttctttttttatatatagaatatcatatgattttctttctctttttttagaatattgatattctcttttcaagaaaaaaaatactcatttctcttttaatacatgtgatcattaatcttatttaaaaaattatgatttgatttattattaaaagttctttaagcatgtcttatatttcttttatgtttctacaaaagttttcaacaagacaaatgattaaagatatgttaaaaagtcagttatgtcatatattaacttggtagatagcatggttttatttgtcgataaccaaaaacattatgatcttttcgaacgaattttcgatcaccatcacgaattcacgctggatcgaattctggtagctagagtgactatatatgcgaatataatgatatgaatttcttaactcagataacaatatcaaaaatcaggctgcctgcattatctcggtcatcgtcgaagcaactaaaaatgtgacccagtacggtattaatttggcgtacggccggcatatagcggggtgcag

SEQ ID NO: 44623 - DNA, 2904 bp, Oryza sativa
ttggtaagatgacttttgagacggcaaccaagtttattgtggaagcagcttctcatggagagtctgacacactggacggcccttcggcaagcgtctgtctggggaaacctgttaaggtggggacgggttcctttggcttgctgcagaatttttccctggagcaacctgttgcgatgtaagcatacatgtagcatcatcagcctgtttgctttactggattagtccaattttgatggaggctgccatagagcagtaggaatgtgttacatatacggtactttttgctagcaagtgcagcaagttatgtcagttctcagttgtgtttgtgtagcaggaaacgaacatgtgaacactgatactccctttggtagtagtatggacattagtctctgtgtagactgtgtggagtatcaggctggcagcagcagtagcagcatgatcttggtttctttgccattttagatgcatttcagcacccttgttttttctgcctttaaacccaaatccgatagccactttgccgttgctgtctgcatgaggttaagatggcagctgagggggaatatatctaggactccagctgcaatatcttttctataattgagtgtgcaagacagcatcctctgattcagggcctgtttagatccctggcaaaaaattttaccctgttatatcgaatgtttagacatatgtatagagtattaaatatatggaaaaaaactaattacacagattatgtataaattgcgagacgaatctttagtgtcccgcccagcggatccctcgatgcgacacgttgcgggctttctgtcctggcccatcccactttgggcttcacggaagctcccgctgccgatcacaatttcgttctctctaataaaaaaagcagaccacgagcatcgcaaatacacccgtttatcaattaatgctagctgctgcattgcttgcatcgcaaattcgcatagatggacggatgctgcattgcttgcatgggggtgaaaacgctaggaaacggtcgaaatttacgatacccaaaaagggtaatggtcagaaacaacggtactccttatacaaaaatgatgctcaggcgatcgagttcatcgcatatatccttccggactatcctttaaaaaacatccatctctatagtgaagaaaaaaataacttttatacatgtgttctacatacatatgagtagatggatctccttcttctcccttgtggttctctatctctgctctctttatggctgacgagctgtgccttttataggcggtagcggcgtatgcgagacccagcgccgccagcctctatacggttgcgtgatccgatatctccgcacagccgcgcgcgatggatatatactatccggcagtttgtttggatggatagagcttgaccgtgcttatcttctgatcggtttgttgcttcgatcaacttgtagatgggcatagccgcgtacacgtacgcactttttgaagtagttggtggtgcgtcaggatgccatcgacgttggtgatgaaagatggggtcgatgcaaccgttgaccttagtgaagtagacaaactcgtgccgggatgccgtcggcgccgtagtaggatgagggcgccaagttgccctcgatcttgccggagtagatgatgtcatgtcgagaagccatcgacaatgtagagggacggtgggattggtgtagacctagtttggatagagcaggtgatgaagtgccagaaaaccgtcggcgatgtagatgggagacaggttggttctgctgaagtaaatgatgacatgccgaaatgtcgtcagcgatgtaaatggaagacttggtgatgcggcctccaatctggttgaagtagatgatgtcatgccggaatgacgtcgacagtgtaaattgggtatgggtggcattgcccccaatcacgttgaagcagatgatgaagtgtcgtgaagccattgatggtgtagacggaaaatgggtaggtgttactccctgtctttatgaggtaggtgacgtcacgtcaggatgtcgtcagtgttgtagacggaatattgggtggcgttgcccctaattttgtaagtgagtgctggtaagccattagcagtatagatgaaagatgtgattaatgttgcttcccgtcttgatgaggttggcaatatcatgccaaggtgcgtcggtgttgtagtacaacatgaatatggactattcggatttggagacagaggaattgaagtactaaattcacatggattggatgcgccaaccgttgtcgttcggttactgcagagcgagtaccctcgacgtcacacacacacacggcgacggacagcgacggcacggcgcgtaccgcccggtcggcagcggcgacggcggggcagagcgcggtggctgtcacggccggccggccatggacgcaacgcacgagatccgacagctatcatcagctgagctgagctagctagcctgtctgcaccaatgcacatgcaatcatatctcacccggccctggatcgttcgatcacattctccgattcgcaattttgcaatgaattaattgataatggatttcacgaacgtgcaaaagcaaaaggattgcacgtcaatatattagaagaaaaaaagttatagttacacaacgcaatcagctagaccgaccaatttatgctagagaagggaaaaagcttagaaaattacgacggctaaacataaactctaagtaatgggaagaataatcgataatggatggatataggtgtgaggatacgtacgggctggcgatcgatgcattatgccatcctttgctgctgctgatgctggcatgactccactgttgttcgccatgagaaagatctgtccttttgctaagtactaccacaactccatcgtatcattcaccagcaagggctgcag

SEQ ID NO: 44624 - DNA, 2120 bp, Oryza sativa
tatacatatatgtatgtacaccgatcatgttatacatcgatcgagtacaattaattaatattccgttaaatttgccgctttgctggccctctgcatgcagattcttctccagatcgatcgatggagactgtgtggaattaatctgacgcaagtaaatgcttccacctgccgcgatctaattaataaactaaaaaatatatatacatatatcatcgatcgtcgtcgttttgttcgtacccacaactgcaaatatagcaagcaaagcacatgcatgatcgatcaagcatccaagcctctctcacatgctcgtcagatcatatatactgtgccctgagatcgatattgacagagagagaaacccaattataatcaagaacaaagactgatatattactgtgcattaatcgtactagcagctagtgtatgtgttcaattcgatttcgccgtcgccgacggcgatcaaggcgatcgaatcgatcgatcgaacgaccccaccaacacataaccacgcatcctgttcatccacagtccttgcattacatcgcattgcattatgcatggtagctgcatccactatactcatcatcatcattccgctccatcgcgtgcgtgtgtgtacgtacgtgcagctacctagctagattaattatctcgatatggatgcagatttgcagagcgagaggcaagagggcaaacagtctctagtctctacacctgcataagctcaggaagagagtaattgtgctgtccccggctggtcgatcgatcgacgacgacgacgcagctagcagaagaagtactgtaccttgctgtgttggcgtctgaattcgatctgatcgatcgaggtgaagagtgatcagggctaattgcgagctaggcgatttattctgggatatggtgatagatatgcagaaattaattgaagattcagacacggagccgtatgtatatatcgatatcaacagtttcctcgatctgatgctgcgtggctgcactacctgcatattgcatcattgcatggatgcatatataatgatgagtttatgaccggctggtccggttgggttttcgatctaggtcatatcgatcgatctctgtgggtcatggtgtctacccagatgcatgctctgcatgcaggtggccacttttgagagatgcaggagattgttgactacaaccttttccattttcagtctggaattttgttgctgttaaaattaattttctccaagattcttgctccgacgaacttcagcttacgagtcgcactcggtttaacgtagttcttgttttgacgtactgtaccccccaccttccagtaaccgcgcacttcagcaggttgctgatgtatgctacttcctccattccaaaatataataatttttagcctttaggatttatctcaaaatatagcaattttttcatcaagattctattcccaaccaattacaaccctagctttaccattcaattttcctaactacctccacttatcatccaatcataacctttcttatttaattctatcaactttcttaataactgtgttcaaccctaaaaatccttataatctaggacggaggtagtactttaattttctcgtacaagacttttaagcttccaaagaaaaaaaattcttgctccggtgaactccaccgagctagtcaattaaattcccctctactttgcgggcaacaatgttatactcctccgttttatattataagtcgtttgattttttgttagttattttttaagtttaagcatgttcgtagaaaaatatactaatattttcaacataaaataaaaatattattaaaatatatttaatgctaaatttaatgaaactaatttagtgttgtacttgatgttgctaaatttttctataaatttgatcaaacctaaagaactagctaggtggcctgcgcaattgcgcggctagcacccaaacaaaatcatatattttttagtatgatttttacttaaaatttattaaatagttatctcattgtcttaagactttgaaagacgaaaccttatcatcctcatgtttctaattatatagtttttaaaagtcacaccaattgctaccccttatgtcatctcctgggctgcaggaa

SEQ ID NO: 44625 - DNA, 657 bp, Oryza sativa
ttggcattcaagatcaaggcaagcgagtagttccaactgtaaatgtctaggggtttttttgcccccattttcaccatgcgttgttcatatagcctcgccgagatctcgttatccttggaccctttagatttttttcccatgatcgaataggatatacgtgtgcatacacaccactacagacacataccacgtgcatactcataggagtgcattcttaatacgacacagacacatgcattattcaaaaaaatgcatggtagcatcaaattaattgatcttgatcttactaaatttttatcgaaggtagatccatgtatgtaatacttgtctgcataaggattttcatatcgatgtatgattgtttaaaatttgattaataatttttgcttcaaaattgcttcttattcagaacatgttctccgaaaatataaatgtatatctcgtgatattttgcccgagaccgcgaccatcagtgctctcctagctttttcccccaaaattaacgaccgagatattatatcgaacatatataatctgttccatacacgtgtgcatgacaacatggacccatctgtctgtgggactaccttgtgggctttaggcccagatgggggcccaagatgtcagccctagctatgggcttaggtaagctagcta

SEQ ID NO: 44626 - DNA, 755 bp, Oryza sativa
tcctgcagccccatgaataaattaaatttgtttgcgtgcttgcaatgcctgatatacatatatgcatctattaattgagttagatttattagttggcatacacctaattttctctccgcggttctttttgacgccgcatggcctttttgaaaaagctctatcacgctcatttggacaagtagtacaataattaagtaactgatctatatgtattatactgtaaacgcgttgattaatttccaaaaaatatctgcatgtacgtactgcatcatccagtactatatatatatacacgtatgtagtgaagtagtggacagcaaaaagttttaaatatatgatcgagttttcacataaataagttaaccaacttgtttctgtaggaagaaggggagaaaatactttcacatgtttcaccagctactgtaattaattactctgaagagagatgataagtaataagtagctagtgtttgctgtgaggtcctgttcaggatcgatgaagagagatgataagctgattagctggaactggaagactaatataaatgaatcaattaaatgttatatactacccccctccagtccttatttataccctgtcaccaatcactattcatatttaaactactttgaccatttatcctttttttttcaaaaattttctgaatacttaaatagatatcatcttatcaaattgtattacatactaatcataagaattaaaaattcattcatcacaatctaaccatttaaaa

SEQ ID NO: 44627 - DNA, 718 bp, Oryza sativa
cgaaatatgcgctaagatcatccgtacgtgcgtcagcggcaggagaccacgggatgcaagttctgattggttatttggcttcgacttcgaggaaacgttcttcagagattatacaatatacgcgcttagttggttggatgccgcgggttcgttacggatttgttcgtcgattttgcatatcatcactgcctcttgagtcttgacttcgttttgcgcgagctcatcgccgtcggttggtttcgatttcttccttgaattaaagttccgaagaaacggcccgatcaagagtacttttactattcttttcaagaaaacaaatacttttacaacaatatctacaaataacgagatgttttatgatgacctctactaatagtagtaagcggtttttcaatggtctttactagtagtaaggtgcttctataatgttatagtaaggtgttttccatcacaggcgtgtattaggaaggtgaatcaatgtgatgtttggactggaatactgcattttctttttttttcttttttttgtgggaaactgtatggttccatggcagatgcaaatggacacatgggtgtgttggcccgtgctctgattctgcagtctctaccgtgccaaatcacgcatgaaaagaatcctcgtcgttgtactcatagctactacctccgttttcagattataagattttctagcattatctatattcatacatatatatga

SEQ ID NO: 44628 - DNA, 938 bp, Oryza sativa
cagcgttgcactaatctgaattcaagtcaacattgcactaaaaaacggttttgctggctctctgccaggtatatcaatgttaaacatttttttgaaggaaaaacagaatgattgtgccttttcattaaatataacgggagaaaaatacaaccctaggataagagaaaaactctattacaatgttgcacaatttaattcaaacatcgcactaaacaatggctttgctggctctctaccaggtatatcaatagtctgacaggaggggtcaaacatttttttaaggataaacagaaagactatgccttttcattaaatataataagaaaggaaaaactctataccctatacccctatatagtagtgtgaggcaaaaagttcacgtaagcagaaatatgtttcaaaaaatattttaagcagaaaaccatctcttcaaattcaggtagaaagttggagcttctgtttaaaaagtttggagttaacattctgatgctcttctaaagaactggagagaactggtaaattcaagtaaagaactggagagaacattgaaaaaaatttctccagcactaccctgcattcataatcagccctccgtaaagctgggccaagtgtcctcaaattttcaattccactattactccctccattaaaaaaatgtaaggtatattttttgttgtcaccaacaccaaataggaattaactcttccctatgcaataaactaagaaactatatgtatcatagcaactaatgagtattaaaataactgcttggcttccaatcaacagttaatttaatatatggagactaaaaaaattcccaactcttttgaaaaaaaactcaaaaaatgaaatatactcaacacttttgcatggagggatcaataaaccacaagtccacactgctagccctcagaacatgagcctatccacaagacgta

SEQ ID NO: 44629 - DNA, 2302 bp, Oryza sativa
aggaagccgacgcgcgtagctcctcccccgcccgccaccacccgcgcccatcgcatccagctcatctccgtcggctgccgcccgtcttcgccggcggcgtggagcggggcgatggctggcgtagcacgcaggccgccgagtaggtgattcgcggatccggcgccgcggagcggggcagtggcggacgacgacgacgacgatggtgacgagtttgaggaggaggaggacgcgcgcagctcctcccctgcctctactataactcattgttctccgaactcgccaaaggccctaggttcgaatccattgccgcccgccgctcgtgcgcagctcctccccctgcgcgagcacggccggcggccagcggagagcgacatgtgggcccaatggcatttttgacatttcacgcgatttctctctcctcttcaaccggaaattattattttaatcggcgcggtgtccataggcaaattaccacgtttatggagtgtttttcccaaaagtgagtttgggtagtgtcctaaagctaaaaccacatataaggagtgtcctgtagcaaaatttccctatactttatcattttgaaaaacatgtactaatagaaaccgacatagaaactatggccaaaggcctgtttagttggtgaaataaaattttttgggtatcacatcggacgtttaactggatgccagaaggggttttcggacaggaatgaaaaaactaatttcataactcacttggaaactgcgagacgaatcttttgagcctaattaatctgtcgttagcacatgtaggttactgtagcacttatagctaatcatggactaattatgctcaaaagattcgtcttacgatttacatacaaactgtgcaattagtttttctttttatctatatttaatgctccatgcatatgtccaaagattcgatgtgatgtttttgggaaaagttttttgggtaactaaacttctcaacccaatgattaggatggtgtccatagcattaaataagctgccacctagaattaaaaataatgtggcaagtgaataaatgaggaaagagaaaaaaaccatgtcttgcatgagacatagtttctacacaacattcaagacatcatgtgagataagtagcattaaatttaattatagaatattggtatttgcattttagaagagtagtgtctagtactagtttcttgaggccatccccaacctagaaactatctagtagtttccatacttgacatgtcatatagacaccatgcgtagaaaatatgtttttaatggatggtgtcttcaaattaagttctcatccaatcccctctcttctctctccttttatccacctatccccttaattttattcttggttcttgtgtagaaatggtttcttgcatgagaaatggtttcttcatatttttacctctctcatcattaactcttttgccatatagaatttttgcttatgtgtcaatgtatttaatgctatggaaaatagatgacatggagggttgagaatggcctaataatgtggagtttatggaaactatgtttagtgtcttggtttgggaatggcctaaacagcccgtaaattagaaaccggtgcctatgaactgtgagatttcagtactgcatgatcccagtacattgaccagctgaatttgcgtactactactgtcaatctgccgtagcagtggtttttaactgcgacgaacttgccaaatcagccaatcagtatttgttgcgagtttgtgaattgttagtttgtgactcatgacggcggcagctgttgcacagctcagaaacgcgtccagtggcacgaacaatacataccgtcagatcggtagtactacgggttattaagctggctgacgccttggagcctggaacatcgaccagctgtgttgcatggaccagccgcgcagtcaaagcctcaaaggcttctgattgaaccaaatatgtaaaacgaggaggcgctcgtacgatggtggccaagtaatgcgtgcccacgaccacgctgccggccgcgaagaagacgagtcgacgacgtgacatcgcctcctctttcgtactctgaggttcagacatggaccggtacattctgtgtaggcaattgcctgaagtctgaacaattctgcttaagaaagaaaatgaattagtgcctaaagaccaaccaacggttgccacaaatttctttcacatcacaattcacaagcagaagtgcaggacaccctcaacttctgcttgataaaacaagtcttcgtttaatttcaacagcgagtaatgcagacaacaggcagaacgaa

SEQ ID NO: 44630 - DNA, 677 bp, Oryza sativa
ggtgttaatgcaaataataggagtttgtctaacaagtttagcaaaattttaatttattagtgtacaatcgacatgcaagatttacaaacattttcaataacctccaaacataggttcaaagtgatcaaaagagatagggaggtgggacttgccttgtaactagaaaatgtcagcacctaaatcatttcttcaccgtttaagcaatcatctatacaaagtacacgttatgcaattaaacaccgaaatatgcgaaaaatccaaaatgctctaaaatgcatgatttgtgcacagtgggttggtattggtataagatgaatttaggtgaaagaattttttgttttatctctttttatttgagagttatgaattttagaagtttgcttggtatagggtagtgcctaagtattataaaatatttttgcaaagtgacttttattagatttgacttctcaggagtatagagatgtttttttctaagactaacacatttggtttcacaatttttggagttaatatgaattctttatgcattttacaagttataacgtgttgtaggtgtatattgtagtcaagacgagtgaagtgacaaggagccaagagataggatagcgtgctcgagttctagcacaagtgtttgactcgggcaatcaaagttgagggaaagtaccattgagcaa

SEQ ID NO: 44631 - DNA, 714 bp, Oryza sativa
cctgcagccccggatgggaggaaaagaggggaggctgggagccggcggcggttggttttgatttttttttttttttggagtctctatgtgatacacggctgaaaaaaattgtagttacagcccaatttatagccatacgatgcgcgcacgtgtcgtcatcccactgctccgttgcctcttccacgcgccccttgcctttgttttgggtcggatcttgtttgcaggcctgtttgtcatcttcagaaaagcccagcaaaacaacacgctctatccgaacaagtttattggatctgggcttcaagcccgtttgttgtcaaaaatagaaaacaaaacgtataagttcacttgacgtccctctatttgtcacccagtccgaaattcatccgtgtaccgtaaaaccggatacagcgcatcccctaacttacaaaacagtacaaacaagttccctcggtagtattatgccaggttatggctgacctggcacctacgtagctcctttgactaggtcttcgccctccgtcgcattgacatgacgcttacgtggcaatttgatcctggaaaaataattaaagccatgggaccaacatgtcagtttcacatgcaaaataataaaaaatagtggggcccatgtgaccccacatatcatccacactactcttgcttttaataatttaattaatttatcaatagaccatgccattaaaaacatatacc

SEQ ID NO: 44632 - DNA, 793 bp, Oryza sativa
ccaaagttgttaatgacgtcttgcctctctagagcctcaccttgttgcatcctgcacgcattgtgcgtatcaaattggacatctataatctcggtgtttggtagcctatcctgtacatgggtttgtacaattggatcgattacctcatacataaccactgcgtgttgggctatcggcaccggcacaccgccgtcctacagctagagtatatatgatactgacacatcacacaagcaaccgctcaatattgcatctaattataaacattttgttagaatgatgataaaataattctctctgaaaagagagaaacacctgtcaaaattagggtggaaaacaatcagataattgtcattgattaatatttgataatagtgtagaaagatgactttttatataggatcagagcctccaaaataataaccttatatcctattaggattgatatgtatgaatagtatatgtatacaaggatgtataaagataaatctagtcgactagaaaaaaaaaagaggaaattctgatgacagagtttgctagatgtaatcggcgaattggtcttcaagtaccgatctccttgattggataattcagatatggttttggtgtcattagtttgattatgggttcgattactcgatgtcctaactccctcttgggtgggggcggattcagaaatgatggggaggagggattcatctttttcttatgctttcggcccccctacttttctttccccttccttccctctctctctctatgaggatccaacggggtagggggcttgagcccc

SEQ ID NO: 44633 - DNA, 644 bp, Oryza sativa
aatttatcgatcaaagctcttatggctgagtttagttttaaattttttttcttcaaacttttaacttttccatcacatcaaaactgtactacacacataaactttcaacttttccgtcacatggttctaatttcaaccaaacttttaattttagcgtgaactaaacacaccctatatctaggtaggcaaggggaagcacgtaacaatacgatttacttgcacttttgctaaaaataatattacgccgctggacacgtactactatatgatcaagccacgagagacaatattccatccaagtttcatttatgaggatctatgtcgctacaaaactcaacttcttgtcttgtccgaggaagcaaaacagttcatgagcagcaggaatttttttttttgatagagcataacttcggatatgcacatgcatggacattggatatacacgcacgaatttccaggccctcgtcagctcaccgataggccatctcttcagcaactgtgtgaacctttttatgggattagagaatttcgttcaaatgtttatatgagtaaattaatggtcgtcttaattaatttctttatattctaaacgtacagatatgttcatattaattccgtctcaaaattgcaactcaaaaaatcag

SEQ ID NO: 44634 - DNA, 678 bp, Oryza sativa
aaaaaaaaagtatatctaatattgtttttattttttttaaaaaaaatagaatcttcactggcgggccatgtgtcggaacaaggacggtccatatcttcgctgtcgggccacgtgtccatctatagaagccttagttcatttttcctagcatgccacgtggcctaaaataatgtgagccgccagcaaagaactatcttcgctggcggccgacctaaggctaccgcaagcggagatatttctttgctggcggctgtgttatgtctgccgccagcaaagacatgtcttctttggcagcaatcctaaggctaccgccagcgaagacatgtctttgctggtggacgttcctttgtcagccgccagcgaagatgtattttggctggcggtaaataaccacgagcgaagatcgacattttcactggcctttgctttgtggcggctgcgatttccaccagcggaaacccaaaatggccgccacgaaagatggtttttgtagtagtggtatcagcaaacggatggccgctaaatccaccaagcagttggcgacgctgctaccagcttgtgataattagataaggtagagttaatattgatgtgacatatatacatcatcgagcgatgtaagtcaattagtgtctattcgcttaattggtgactcatcagagcctgttcataatgggt

SEQ ID NO: 44635 - DNA, 1958 bp, Oryza sativa
gacttaatattgatgagatatatatacatcatcgagtgatgcaagtcaactagtgtctattcgcttaattggtgactcatcagagcctgttcataacgggtactcccccgttctaaaatatagtaacatatgacttattcaagaactacgaatttagacatgctcggagtaataatagttattagtatcggtgcactgtacaatctacagtaaatggagaaagatatatcagggagaaagatatattgtcgttccaaaagctgacaccggtacttgctccgtattaattagtgtcagatcaagaaaaacgacactctactatactccctacgtttcataataaacgaatctatgaccatacgtgacatatttgatatattctagttctataagtctagagatatatacgttcagattcataatactaggatatgtcatatctgatactagttagttttcatagactgagggagtactggatgtgacacattatagtactgtctagattcgttgtactatgatatgttagatcaaattttaggttcattatttttttttgacggagacagtagattcttcccatgaacccatgaactggaatcaatatcaagtgcagttagttagtgactgcaagttaagcagtcatatccatttacagccgttggatcaaagttgatgaacggcagagagatatgccacgtcacaacctggctggcagagctaagtacatgccacagtgcgcaacaggactttatgtgcgtgctacagtaccctggccgaatctgagctgttcttatttgatctaacggtgaggcaacgactgctaaagttgcagtccctattacaactgcaggggatcctgatccgtaagaataaatctgaatataatgcacgtctagatacatcccttgggttaaactttatttttggcacaaagagtatcacttatgcacattgccactacaatcattgtccgtccgataagaaattaatggttccttttggcagatgtgtgggttctctgccataacactagatactgtatcattgattttcctcgacgtcacctcattttgttttcatgcggtccgtacgttgaaccgcatgaaaaaaatggagggaccagagccgggtcgtcgcccgcacaggaaaatcaattttcgtgtgcaggtcatttaacaggccgctcgaccttctcccctcctgacgctcgcgcgaggcggccgggagcggcagcgccctccccatgcccggatccggcggcggctgttgccccttgcccggatctggcggcggcggcagtcccccgtccggatttggcggcggtggcggtggggtgcccggatcttgggttagggtttccaattatttgaaattttatttttttttcggattttgattttcctgtgcgagcggcataagcggattttcgcgtgcgggtgcgccacccgcacgagaaaaacgtgattttttcagacggggcgttccagacaggcgtaaaaactgcacgcaaaaatcaaaataaccacacgcaaaaatagctattgtagtggtgagaggatggttatgattaatttgttggtccgacgggaaatggtccctggctgccgtgtgatactgcatatgtggcaagtggtgaaggaaatatttttaggcccgagcaaatttaaatatacctactatttgatacaagatttttaactttaaattaaattcaattgtgtatttgacggtgagccggacagctccttgtggtagccggacggtagctccgcccctatgtgtggcatattccaccaatagacactacaagaaactttaataccacaagatttatttctatggtataacaattttaaaattgttgtaatacataactattgccaagatgctgatgcaatgatttttttttctggcaaaaggctagttccgtggtggagttaactactcctacgcaa

SEQ ID NO: 44636 - DNA, 1450 bp, Oryza sativa
cctgcagccccgcagttgtgcgtcattgttagacataataaaaaaaagagaaagtaaaaaagaaggaacaaaggagagaactcacagggcagccgctgaccaaacagagcgctcatcgccattgatgtggtgttttgtggctaggacatcatgtctagaggcctcgagtgccaggaccagggtgaacttttctcagaactactctctcacaaaatcaatactaataggtctcactgcctcttctaaaggtggttacccaaaagtcatgaatccatcatggataagcagtcctaaacccatagaaaatcaacacggtattgcaacggcgatagctaattcgcgtgtgtgttgcggcgtgcgttttaggcccataaggcccacagcgctagtgcgtgcggatggcgtccacgtccatattttttttcacggaaaagctaacgtacgcgtttttcccgtttctttttcccctttttcagcgattttttatttagaagttgaatctttcatctctaatttctgctgaaagttttgaatttgagttgaaagtttttaagatttgagtcgaaagtttttaagttttgagatgaaagttttcaaatttgagttgaacgtttttgaatctgagatgaaagtttttaattctgagttgagatttttcaactctttagttgaaagtttttaagatttgagatgaaagtttttcaaatttgagttgaatgtttttgtatctaatacgaaagattttaaatctaagttgaaagttttcaaatctttagttgacagttttcaaatctttagttgaaagtttttaaatttgagttgaaagtttttaaatcttgacttgaattttttcaaatcggacttgaaaattatcaaaatcaagatttggaagcttcaaaatatgagttgaaaatttttaaatttaagttgaaagtattcaaatcttgacttgaaaatttttaaatatgagggtttcaatctagacttgatagttttcaaatcttagttaaaatgtttccaaatcttgaataaatctgattcgaaagtttgtttcaatcaactaaacaaagggaagaaacagacacatgatgaattcttattgaaaaaaaagaaacaagaaaaaacagcgctaagtgctattagtggaaaaaagacgctaagtgctcttagggctgcgaatgtgagcgccgcgtccgttcctagcgcttaagcgccgaacaggaaccccgtagtgcaacatggataagtagtgcgttagctcacctattggggaagtcaacacacagtttgtataggtctgtgaaaattgtattacacaaatggtggcttcacatggcctatttttataggcagacctttttagtggccatctagaaaatcaatttttacatgtcagattaaaccacctgtgaatttttctagcccacctgtgaaaatagatacctcacat

SEQ ID NO: 44637 - DNA, 740 bp, Oryza sativa
gtgccattgcgttgttcttatcaatttttgctttgttgagttctgcgttacatcgtcgaatcgagttgctggtcttagcgtctagtccgtttagagttttgagttctagtcatgttttgttccacaatcgtcgccgccatcatgtctctattgtcgtcgggacctaagaaaacggaatcggcttgctgccacggttctatttttgtagttttcagaagttttttgtcggtcagttttggagttgcatctaggttttgcttaagtttctggtttgcccgtgaatagatcggccgtgcttgttgccggcgtagagaggaggaggaagaatttccaaatctgtttttggaagtacgagagtttaatttggaaagaaatagtagatcagattgattgaaaatcagtttctctttttcctagtggtgccgtatccatccacacgtcgcccaccaccaccgtgaggagtccgaccccctccctctcctctcggtttcggtttcggtttcaatgcataccgtgagttgctagacaccttggtgaatttttgtttggtgtcagtttcgtgatctgtttggaaaaacggaaccagtataaatttagcattccattttttgtataattttaattttcggtttggaacttttccatttgacttcctgtaatttttttatttatatttgagtccctgtaatcgtgcattgaggtccttgagttgtttttgcagaaaaaaaagaaagtaagaa

SEQ ID NO: 44638 - DNA, 741 bp, Oryza sativa
ttcctgcagcccgttggctacttaacacacgttgaaaacggaacgtacgtggattaaaatctcaactcctccctaaaaaaaaataatctatgtttcacttttcaaattcaaagctacgtatgacactcaaccactaaatttataatcatacattatgaaaacttacaagcgtgtgatattatgaaattttttagccatgccatatctgaatatagtttggcagactatatatatttttaatcaatacaacttgactacatgtagtggcaagcttaaccatcatgaggaaaaaagttagataccacgaagaagccaaatatcaatactattgagagaaatatgaacttacttacaaatttaacgcagatagataggggattcgatggcggccctgacaactgggttagcccaactctataactaagttaagaattgagcttttaactgggtgtactaagtggttggagatgtatttttcatctttcatcatccttgaagataatcttgagctgaacaactataaagataaaaaaaatgactattaacatttaaaacaacagatgttacttgctagggtgataaaaactactaacctctgaactactatatttataaataaattaatggcaagacagaaggagccgccactcatctgtacttatacctacttcagaacggcatttttctttttgattttgccgcccctttacgggaagtaatactattgcaaatccgacatac

SEQ ID NO: 44639 - DNA, 833 bp, Oryza sativa
ttcctgcagccccatttgtgcagtctctcatattgtacttgagctagtttttacccgatctacttgcatgcttaattgatttagttggtgaccttatatcttgtttagatgccttatttgtcaccttttgatttatatacattttgtttatttgagctagaagttcatagctagtgttttcttccattatccgccgaacttttcggttgagaccggaacttccaatctcatattggaagttcctatttgaaccgaaagttctcatcattctaatatgctatgaagttgtgataacttttaggaacgcctattcatccccctctaggcgacattaaggtcctttcacattcctttccacccactcctcacccttcggctgctcttgctcccctaccttcatcctcgctctggtgcctccccttgtcccccttcctcttctcgctggtggcacttgatgcctaggctgaagttcgagaaggagctcaaggctcgagcttgacatctgggagctaccaagtgggggtggagcaactacttagtgctggcaagagagtcgaggaagcagtggagggtggagcactactaccatgggtagtgctcccatgcgccattgtcagtgttcactaattgaggtgccggtgcaagccaaaatttgctggggtagtagggcagttcaagtcaggccactctgactgccctcaccaccctccatggaggatgtacccccaagcttagttgccatctccgcttctgttgtgagttcctcacctccgcctggttcccttctactgattggaatgaggagagaagatcacgatacagagaaaggagat

SEQ ID NO: 44640 - DNA, 1769 bp, Oryza sativa
cagatatctgatttaatagtataacagaaaagttaattatccacaataaaaagggaaatttatctaggttcattagcatcaatatgaatgtgagaaatgctagaatgacttacattgtgaaacggaggaagtatatgtcaagccataacacatcgaccttatacatgaacaagttagaaattagagacaatccaagaaatatcattgacacacgcccaatttctagaaatgttatcgataagtgcgagttccatgaaataccttcgtacaaatgattttgtcccaaaaatacgacgtcgttagggttccgtccatctcgcaccgttaaattaaatacactatttatcctatagcatttaatagagagttgctaatggaactctaatagcgatgacattttcgagacaaaatcgattgtacgatggtattttatagaactcacacttgtcaatgatatttcttggattctctataaattaataagagatcatagctaagcctttgcaatatatgtatgcatgcgcaaaatttaattacaatgaccagctacagttagtttgacatattccatgagagaaaaggagtcaacttgctctaacttttggaataatttatcgaagtcaatcataataacacggatggttaggttaaaaaccacatgagctcgatctggttaaacaaccacaacgacactccatcatgcatttggatcacatgcaacagtgcaaggcctaattaataagcacatgcgtgcgtagggcgcataaccaaaatgaactaattgcgctcttaggaagtggtccatatgtgtagtactttattttaactatatataggcatataattaattaagcacacgttgccgcgcatggccacacgcttaattactttaagctagctagcattagtagtgatagattatatatatacttaaaatgtgatgtcctagaatgagtataaatacagttaaattatgatatataagtacatcgcaaattgttgttaatatataaaaacatattgttgacattttttttacttggaccacttcagggggagtaattttgagatttgatacgtaaaatagtggtgtgtttgcacgggtagattcttcattttttttagataatagaaatgggttacatctctggcctctatccataggcacacggccaacgattatagagtatacatttatagttttaataatttttataaatacatagttaagtaacctctagttcttatagttaagaaacacattattaagaaactagtatgtcaatgccttcgtacaacatactacctccgtcccaatataagtgcagttgtgagtttccatacatatctggtatttgatcgttcatcttattgaatgattgatattattattgttattagatgataaaatatgaatagcattttatgtgtgaataatttttttaattttttcataaatgttttaaataagacgaacggttaaacattggacacagaaacccacaactgcacttatattagaatggatggagtaaaacagaacggatgtatactagctgaaagtgtgttcaatttcaaaaaagaaaacctagctagctagctagacctaggaaacaaaaggagtcgagataaataatattgggaacgagtgaacgacacccaaaagtaccaacattgctttgcaagttggcatgtcacatgtgtaatagaggtgtggcaaaatagattattaagagatgatctattgaggactatgaaaaaaaaaggaa

SEQ ID NO: 44641 - DNA, 632 bp, Oryza sativa
atgggtggggtgttcgcggtgttttgcagaagaagacgcggaggggatcaacaacaagctgcagctggtgatgaagagcggcaagtacaccctcggctacaagaccgtcctcaagaccctccgcaactccaaaggtagcttttgattcgtttcctagtcaccgctctagcttcattcgttcatcagtcaagcctggtacatatagtgtgataaatctaaatcatttggaattgggggtggggtggggggctgtaaattttcggggaacacatcttattatgttatattccagagtatagcatggatcttgggcagttttgccatgacagaaagttgccctctgtcgtttggatgttgtcatttttactcatgtggatgtcagaatgggactggagtttggctcttcggcttgccctttttgtgtcttagagatgaatgcagcgcccaacaacaattcatctttccttgctggtgttctccttgatcaagtctaggggactaagtgagattgaaacatttactgcgtcactgactcaccgttgcttgtatgcgcatcactagttgtttctactataacttacaataatgtaaatgtcctcagttgagagaacttttgtcagccgtatagtaat

SEQ ID NO: 44642 - DNA, 748 bp, Oryza sativa
atcgtcatatgaaaaatctcttgactttctatagatgatgaggagatgacgagcagaccggtgagcgacctggaaaaatcccttcgcatgtttgtcttggagaacgaattggtaatgcccgcagaagtctgcgtgaagctagccaacttgtatgccatgctgaaacagtgggaaaaggttagggagtacagacaaaaagcggcagaattccacgcaaagacgagtgatgcgttgttcgacacttccactgtttagtactacctcttttaatgtatgacaccgttaactttttattcaacgtttgaccatacatctcatttaaaaaattcatgcaattatcatttattttattatgatttaattcgtcattaaatgttctttaaacacgacataaatatttttatatttacacaaaatttttgaataaaacgaatggtcaaacgttggtcgaaaagtcaacggcgtcatacattaaaatacggagggagtatatctgtatatgtaggatgttgactgtcaaattgtgagatgccaagatgatcaatatatatatatttttgaaatctagccagccgagctggtttatattcagaaggaaaacactgtacagaggtcacatatatcccatacatcggattccagagttgcactgttccagagatggcgttgttcgagcatatatcccatacatcgtaatcacacggggtttgctcgagctgctgcgccctcaagaagacgggctgcagga

SEQ ID NO: 44643 - DNA, 712 bp, Oryza sativa
cagagtgcaacaacattgcgaagaacatgcaacctcttctccatggagcttaatcaaatcgacacacatcttctccatggagtgaatcccaaatttgtttctcagagtgcaacaacattgcgaagaacatgcaacaccctgcttgatcaaatcgacacttttgtggtcacttcagctcaagagtattttgtaaataaactctttgttggtattttttaacgtcacagataaaaaacgcaaacgcacggaagatgtagcacttcacccgagagtattgcaaggtattgatttccacagggaacgtgtgtgtcagctcttcttcaggttcatccaaggacacgaagctaaggtattttaaggtagagaggatttactagcgagagacaatgtctacggaaagcccaatttaatcctaacgcggtacttcgggcgctggccagctcgctgctctagatatggctctacaacgtacccggacagggaggatttcaatgtacttaaggactgtcaccacctctacacccacctcaaacctactatgagatacgaagcaaacaacggaaattaactgtagcgcccgttccgtcgtggcgcctaacgggaaaattatctcttaaaaaccctaattgcgaaatttgtttctttgattgttgtctagtgtccgtgccatctcaagatctcaatccccgatctatcgtcgagttcaattccg

SEQ ID NO: 44644 - DNA, 677 bp, Oryza sativa
ttgtcaagattttataagtgaacaggatcaatggcttaggttgctttcctttgaatgtagatgcgcgtgctggcatgatatttagaaaataggttttcccttgaatgcacattctattagttaatttaaatgaacaaaatctttatgcattttttcattactttcgagagaagaggacactgtaacaaaggccaatatagaggtaactttctgattgttatatacatggtaatcctggcggcggctatcctacccacgacgaggctacccaggtttttgcttgactccctgattgattcaggttcttgttgccaaaccattctccttcggggtatcagggctactccagcgaggagcagcagccaccttactactaccttgccgtcgcacaatttctgttcatctttttactggaagttatgctaattgactaaaactgtgatggtactacacattgacttgacaattgacatatgtattgcctacaatgagggttctgtagtaggtgcttgatggaataccccagtgaggaaatttgtttttgttctgtaccagagaaaaggtagcgaggagatctgtgagtgaaaaaaaaataacagttcaatgtccaggccacccctttatatttaccagttgtaacttcctcttttgattgcattcagttgactctgcaaagt

SEQ ID NO: 44645 - DNA, 2108 bp, Oryza sativa
attcgcttagtaggtttctagctagttcaaatggataaaccgtgtgtatgattaattctgaatttcgttctctttacgtcgcatgatttattatcgagaagaatatttatcccaaagagtcaggattgctaaaattatgggggtcttagtttcagtcacgtcatgtatcctatatgatactctactaagtatgcttctctctatctctctcatttcctcttccaagtagataataattaaattaattttactcctaattcttataaactgtgtactaaaaaacaaaaggtaaatattgaaacttataatgtaattatagtttatgttttgaaatttagcgtgtaattaactacaatgcaagtgtatgcaatatattgtagttacctttcggttttcataaaagaaaatgtatctccaaattaggctgctaaattatacttgtaaatgaagctctatatattaactgaaatacttgttaggaaaaattgatataaggactaacccaaacgaatgaacatgaacactgaacagaaagctgcaaactacatgtacatatgcattgcatacgggatataccgggcatatggaaaattaaatatagttgattgcattcagagaattatagatcaatatatttttatctgcttctactgtcattaaacaacttgtcaaaatcagaattgacaacttagaacttgcaagtttaatggaataaaaaaacacattcaatatgtaaaagatgatcagcaaatagttgatcattccaatcaaaaccataaattgagtgcgtcctaattaaatagactgctaaatatgtattgcaaattgaacatgcaaaccatgcaaattcaaaggaatacatatatatgtatattgtagatgcagcaatagatctgtagcagatgcagtgacggatgtgcaagtaattttttattttgtagcaaacttttttcccccaaaattcatttggttaaatttcgtttcaggttaaaatttattcaatctttatggagtaaaaacagtacgtcaaaccagagacttaatagggatgaacgatacctctggagcgatcactgattcactggaaacttttaacttctcctcgtgattgaggcaaattgtcgctgatcgggaccacagtctgggatcaaggtcgactgcagcctatgcatatctcgtcgccctcgctcacgtccttctcgatcgcgttcgccgtttctttatcgcttcttaatttccaatctgatttctcacgatggaacttggagataaattagatgggttctgtccttccatcgataactggatagataggatttgcaaggagcccactgagtttaagattgattggcccacgatgttaaagtattgcaggatctacggtgtagattaaacgacttatctaattgacgcttagatctttctggttaacgtgagagctccaaaaaagtgcccgattagtataggtatagattgcccaatttgttctgtaaccgcaagatgccatgaactatatatttaagaacttgtttcacaaaactatatatttaagaacttgttttacaaaactataaatttagtgtactcgtttatcacagaactatacatttagtgtcttcatttatcacaaaagtacaaatttagtgtctccattatcataaaattacaaatttaatgtcttcattatcacaaaactactggttttaacaatgctaaaacctgtattttgtgataatgaagacaataaaccagttttgtgataaatgaatatattaaatctgtagttgtgtgatatatcgtgcaaagtatctatagttttatgataagcgaagacactgaatctatagttttgtggaacatgttattagatctgtagttttataatagattgtgtaaaatatctataattttatgaaatatactcaatatttttttctaacatgaaattttaagaattattaaagacaaatagaattataccgtggctccactactcaaccaatcacaatcctccaccatttacttctacgtactttcttaataaccgtgtccaactctaaaaatgcttataatgtgagacggagggagtaaaacagggctgcaggaat

SEQ ID NO: 44646 - DNA, 672 bp, Oryza sativa
tatcttcatccagaaaggaaaacatatattatcgtgcaaacatctgatcatctactagacagatcatagatacttgaattagagggcacagacggctcttcaaggatcgaaaaagatgaatgtgtcaaatcacctatgctaaaataaagctcaattaaggaggggccaaagtacaggcaagacaaaaaaaacatgtactgcaaatggctaactgaaacttgccactttcaagagcaagtgcagcaacagaaaaactttcgattgcaagtgcagcaacagaaaactaataatcctcatgtacaactaatctgcgtgcattatcctgaagatgaacatggagctggcaaatgcaggctcatgcagttattgtagatatgaaagatgcagatgccatctcgctgtcaaacaaagctgatcctgcagtatccagttcctcttctttctagccaaggcttattaaatgaggtgcatccagaagttagtagcttgagttgatgatttttccggtggggttggctgacatctcagccatgtacaagcacttcttccctcatcaatgtttctgaagaattgatcagatccagcaaccagcatggtaagcatcatgtcatcagagccagggaaactactgctccctccgtcccataatataagggaatttgagtttttgct

SEQ ID NO: 44647 - DNA, 648 bp, Oryza sativa
tttgaaatgagcccataatgacaaggaagaccattctaagcatggctaagctttatagtaacctagtgtcaccaaaactcatatataaagtggtatagccatattgttcctaaggttaggaatgaggaatatggatatatgtggagttaaggtgataatgcaaataataggagtttatctaacaagtttaacaaaattttaatttattagtgtacaatcgacatgcaagatttgcaaacattttcaataacctccaaaagataggttcaaagtgatcaaagagagggagatgggacttgccttgaatcaggaaaatgtcagcacctaaatcacttcttcaccgattaagcaatcatctatacaaagtacacgttatgcaattaaacaccgaaatatgcgaaaaatccaaaatgttctaaaatgcgtgatttgtgcacagagaataggtactggtataaaatgaatttaggtgaaagaatttctattttatctcattttatttgggagttatgaattttagaagtttcgtcggtatagtgtaggatttacttagttactattgtgaaatgctgttgtaaggtgattcttattaagtttatgtttgctggggtgaatatatttgttttctaagactaacacatttggttt

SEQ ID NO: 44648 - DNA, 1361 bp, Oryza sativa
agaaatgaaaaatctgttggaaataatgcatacttagccattaattttattccaagcattattatttgaaagcatatacagcaagcataacctacttgcgacatgataggacaagaaaaactcataaattctatcatgctagatatcaaacaaggcataaataaccaagccaagtaggtcattaggctaatcacaatgctaatctagccgcaatattttaatctagatgaacagtaccatgcatataaaaaactcaggtacgaacaaaactagattagaaatgcaccggttcctttcctttgtaaacgaaagaattcactcactgaatggatcgacggagatcagcgagttgaagcagtgcagtcaatcgatgatgtcgagcggccgcgtagaaatacgctgcccagaaacctttacaccgcccccgtgcaggtgcgaatgcggcgaaggctcggagacaccgctcgccggaatgctcgttgcacgacgagcaccacggccggcttggatcgacggcgacgcaacacgacggcagtttaggaatttcagagtagatggctattgtgttctgtgtccttcaaagacgtctccttgactcctatatagagctaacactgaacggcagcccacgctcaatccgttgctcctccgcgtcaaagccggatcggctccgtgagaaacgcagccgccaaacggccacaagcgcacgttctctcttcacgtgagaaccaagtcttcaggtgattgactcgatcagcagaggttgttttatgcaagcatcttgtcatccaacacatgctgatcgtgcggctaagcattaggcatttaaattgatgaaatgatcaatgtttccaagcatgttatttccatcaaaatcaacaaccatttttacacaaagtgatgaaaacagtgatgataaaatggagtcaatgaagaatcattagcaaccattatcgttttgagaatatatatagcaaattaatatgaggatctagtgaatttgattatatatttgatggtctgattcggacaggaaatctgtagtaacaatactctttcaagtttcttcttcatgttgataaactttgacatgtcaagtttagtgattaagtaaacacataaatacttgctacattcaagaatgaaccacatgttacccaagaatatgctgagagcgctcaaaatatggtttatctgcctcaccaaaaaacatatagagatgagagcaatgtaattttgaaaacatgtgcatgatacaaactaatagaaacaggaaaaattacataccgtacatgaaaaatccttgtgtccaactcaagcaaaaaaattctatgcagatcttgtagtgaaaagataattgt

SEQ ID NO: 44649 - DNA, 2190 bp, Oryza sativa
ctcgctcaacctcacatgtgcccatagccatagagctctgctattgctacgatcggtatatatatttttattcacacatggttgtaatcaagatgctagtttgatgtgtctaatccataaatcatcgtcgagctttgcatggttagcaaattgcctgttgccggcccacatgcatgctgttggttgccacttgtgcttcacttggtggattttcatggtgtttgtccgattttgaaaaaaaaaaacttatcttttggtttaatgtctcgagtgatttttttaaaagtcggaacacgatcttaaattgatatatgatgacacaatcttaaatttattgtcatttttttataagttttgatgtccgattggatgacatgcaaattgccaaatacatcaaatatatttttctacttttttaggatatatctttctacaagttaaaattgtacgtgtaaactttgtcttaattttctgtactactttgaaaagagtagtagtggtggcagcgaatcatccaccccacctatttccattgtaatttaacaatttatcccattaacttctctgtattaaaaatcaattaaatctaaatggatagccacatataaagttaaattaaggtgaatattccttatagcaaaatgatagataacacgtttcatggagaatatatcttttatttattttgaatattattattatatttcttttaccctagcaaagattcagctagtctattatatttataaatgctagtgaagtggtatatgatgaaataatatatagtatctcaaatgttcgaatgacttgcaaaggttctcaataaaaatttaaagaatatacatttttacaagtgaaacaatagtcaacacgtgtcttaaattcaagttgtgattttaatcataaataacacaaaaggtgcaaatagataaaaaaaattgaatgtataatttaaaaattaaaagttataattatttaattttattgttacaaataatatataatctaaagttattgtatttaaaatttttcgttggaaatatttccgtaatgaagggaaaaatttaagaaaaataaacggagaagacgttcgtaagtgactggatcctctcgtacgggtatggcatgtctcctttgtttttaatctaactagctaggtggcccgcgtaattacgcggctagcatcatacaaaattttttaattttttttacacgtggttttctttaaaatttgttaaatagtcatctcgttggcttaggattttgatagactgaaccttatcatcattgggtttttaattttatagtttttaaaattcatactagccgttacctcttactccttttctatcgctttgtttgcttccacggtccgccacgatttctacttatgcaccatgaactttaaagatcttatagctttaaagttcagtgtcacatcatttttatttttatattttttagaagtactatcaaacgtcgccactgtactcctttacaatccgcccgctgtacccctctttagtgttattttgatttgaaaaatcaaacttgatcaagtttggtttcttttttttttactttctggaagtcccgtcaataactgcgacccaacttctttatggtctacccgccacccctcctcttaattgtcattggtattccaaaaatcaaacctaaccattattcgggtgttattctatagttttaatgtcacatcaaccatcatcaccatactcctttatggctcacccttgtgccccctctctttagtatcatttgtgactattgtattctagatagattgttcttttaatattccttatagtttatttcgaattttttatttctaaattgtattcctacttttaactctttttataatttcaaaatttatttttatttttattccgtattttgattaatgttgtattgtgtttaacctagactgttctttcattattcctaatttttttattcccgcacaattgcacggctagtatccatacaaaattatatatttttataatgattatctttaaaatttgttaaattcttattgtcttaaaaaccttatcatcatcaggtttgccgtccctttgtttacttgcttgacctactatggttctatttatccttcttggaacctcaaaagttttttttttcgaattttagcatttccacgtgtat

SEQ ID NO: 44650 - DNA, 1829 bp, Oryza sativa
aggattacaagatagagactttatccttacggtataaagctctacatatactttacaattgtaaccgattgggactaggggatattaccttgatacacaagttaacataatacccgcgtccttttatatacatattctatccacatgaactatcccctatagcagttagatagcatagccatgtgggtatatggtacccataatctccacagtagcccctaagaccttcatagttgacaaaataatcttctaccgagtcatctgtactaatataaaaagcaccagttcatcaaatccagatgttttctaacctttagatctaatcatccgacagctcatatcaagagttggatcaaccactgcgattaacgatctcccacgtctaaacagtggttagggatcgatcaaagcgaaaaagaaaacgaaaaaagcttctttgctcgccgcctcctcgtgcagtcgcgcgccctacctcgcacgcaccgggcgccgctgccgactccgggcgcgcgcccgccagagccgctcgcgggttcaccggcagaaaatcacgcacgcaatttgtcaccccgccgccgtcgcatgccatccttcgcacgtcgttgcacccccgtccccctccaccgctgacttcaccccgcggcgcggccgctacaagtcgctgcagccctgtcactccctctccgttccctcgcccatcgtcgcgcccctgtcccctccgccaccaacttcgccccgcagcatggccgctccaatccgccgtacccgtcccgcacatcgaccatatcccgccccgcgtcatttgccgcccacgctgcctccggatcacccatatccgacctccagcctcgtcagattggcgccgccgccgaccctaagcttgtcgtcgagcattcaccgtcgccccatctgccccccatgccgatccatccctagcgccgtcgccgattcaccaccaccaggtcacgtccatcgtcttcttgatttgctccttccgcttcttatttatcctttcttttgttgatttgatcagaaactttatcctttcttttgttgatttgatcagaaacggcaatgaattttattttaacagagagagggggggggcaggggagggggaattgattgaaaaaatgaaaactggagtttgtttgagtcaatcaaattcaaatatgaataaacatgggaattttctgtttctttagctaggccatgtgcatttcacatttgtaatgttgatggaaaagctacagataggggcagagagtaactggagaaaatagaaatagaaatagaaatgagtagcgatgttagtagcgtacatactttacgcaagtcaatgaggatcaagaggaggaggaggcggtatcctagctaactggtcgtctcgtggaggtaaaaaaaatttctttgattccggcgaacctatggctatgtttcgttgataacttctaaagttcttcctgttgttcatcctgctatacatggtgttcttttaagtctttcctccaatcgcctccttatgttctattataccagtggtgccgtaccaatggctatgatgtgcagtccatatatagaatcaatcactgaaaaaaaatgagtttagataagtcacagccattaggactatattaaatgagtaatgaatcattgtatttgcactttttgcagaatcatggcagtaattacatggtcaggttgtgaccaaaaaaaaaatcagagatacatatgctcaggttttgatcaatgaaccacttgtagacattctcagattttggcaaaaatgcacagatacactacaaactcaagacacgttctttgaattt

SEQ ID NO: 44651 - DNA, 585 bp, Oryza sativa
gtaattaaaatagggatttcttaatatgtattgctctttggatgatttcagtatttcaacgagttcttaatagacctttttttttcatctgtgcatgcaagaggatgcaacctacttgggatggtggcacctctagccataggtttggaggagggcaacaagcagatgcaccaaagggagctcaaatatgaggaattatgtggcaaaaatagcttgctgaagaggaatcttggtaagatatgacataagttcagaaagttaatcactgctgcaaccatctctggtgagtctttttgagaaagaccacataggaaagggacgagatgagcacttctagctacagatgcttaggcaaagttgggattccatacaaaggaaatgtatttaactttgtatgaattgtacatatgcactaaaaacatataaatctgctctcttatgtgtggcttcccaagtttgataaactagccgtcaacccgtgccttgcacgggttattggtattggtagtataaagatcaaaattttaaccatacgttcactaggttggccatattcgaattgtagcatgttagattgaaataagg

SEQ ID NO: 44652 - DNA, 660 bp, Oryza sativa
tcgctgatatgttggtctcacttatcgcatcatctaaaattggacactatatatactatcctaagaccttaagtatattggttttgtaggttgagtgacgcgctatttctggtattgcgtatgaagggcgtaaattcaaactcggcgtcgagatgtgggccgagccgcacagttttgtgggccttgcgctaactaaattgtctgtgggctgctgggcctcttcttcgtgttgactgtgatccgagtatctgacgtgtgtccgttgcatgtgtcgtatgtgtacgtatggtgccacctggtgtagtagcggcgtttcggtgttttgcatcgtaactccatcgatcgtcgtgttgtggttgatcgatggcgatgagggatgaatcacgtcttcacgtgatcgttgtacgtatctgctggatatgtactacttttatattttaatatatgacaccgttaattttttattaacgttagactatttgtcttcttaaaaaaattatataactatcatttattttattatgacttgacttatcatcaaataatctttaagcatgatataaatatttttatatttacgtgaaaattttgaataaaaaaattatcaaatattatttaaaaattcaggcgtcatatatttagcgagtatattattcaatt

SEQ ID NO: 44653 - DNA, 708 bp, Oryza sativa
agttaaaggggtttgtcatattacctatcatctttttttatatgtcgaataaatttatgaatgtgtatcttagatagaaatcggagatgtaaaccatttctgagaatcaagggaactgtataattaaagcaaacattattattcgtacccactttatgcgtgatgcactgggagcaatgttctaaatctctggagagagtggatggggaggagaatagctaggatataccaattttgacgctacgatttatcggccgctaatagctacacttagctggagatagccgctataatagccgaagatagctgcacttagcggcagaaaaactgaaaaatagactcgcaaagttcagcctaaaaggccacaagcccagcccaaaactaaaccataaatcccccactccccatccatactcgtgttctcttctcccctagtccccgactcgcttccccagagtagcggtggcagtctttttggttgcgagatataaaagttgaatttaaacttgtatatttgtagagcgatatatcacatgttaatacatcttctcaatttttttaaatctttttcataactatttgagtgacatgtaaataacgaggggatatccccttgagggatcagaatagtttccgcactcactagcttttagccctaatatgctactgcactcaaggaccaaactacattcgtggggctgcaggaat

SEQ ID NO: 44654 - DNA, 979 bp, Oryza sativa
ataacataaatcaaaattttctatcgcgtaaactaggaaccatgcaagtattagatcatagatcgttaccactcgacgcgctgcgcagcggaagaagacgttgagaagtcaaaggaactctcgcgaagtagcgcgcgtcgatgtagatgaagtagtcgatctcaccggctcaaccttctcctcctcgtgcgttctcctcgccgtactcccacgccgattagcaccgcaaaccagtggcgcctctaccggtatccacacgtacagggacggaacgccacgcacagatgtgctagcacccgcgcgtggctagggttttgctcgggagggaagtgacggctagggtttctcacatgatgcaatgcctccgccggtcacacccctcacgaatatataggatccatcactcgggcctccaaggcccgtaggactcctatttggatccctatccgaattaagctcatattggatctctatccaatctccttattccgacccattaagcgtgcgaccctgtaggttcatatatactcagctgtaacccgaaaactccttttcggtccacgcatcaacagcggtccctagcagaacgtattgacccaccgggcatacataaagatcatatcggctaaacctctagtgtatacttgtatgaactcctttgcctcacgatatcgattaagctcaaggctagatatgtgccatcctctaatagctcaatcattcactcgaacctgttgatagattatataacttgtgattgactcctcaatcacctttgacatggccatgcacttccataatctacaacatcgaggggcccagagatatctctccataggaggggcaaatcccattttgattattcatatcccactacatgtttcatagcatacccgaaaactacttttataactacccaattacggagtagcgtttagcagtccctaagtaagctactacatatgttgagaaccatgat

SEQ ID NO: 44655 - DNA, 1113 bp, Oryza sativa
atgacgtattgtaaggacctagccgatgcaacctggatcgagtcggctgtaaagtataggataaacaaaggtacgtaatcctaaaacatgttgcatcggctgtagataaaaaagggaggggcggctagggcttcgccccgagctaccggcgcgtgggcgacgcgaagtgcttaagcagactatagcaccaagcaattaatcaagatctgtccggtaagtaacaaataattcctgtaccatactcggatactagggtacaagagttgtatccaaatacatacatacatacatacatacgtgtacaattatcgtatccgagtataaccagacgatacgtgctaggggatcagtatataccccaccgagcgcgagaaagctaatggacgatcgatcgcccagagcgatcacccctctactcctcacgtagttttctttttttggcaccgtattacttttctattttagtaaatttatgcacctaaagtttgtacacttcaagtttacacatctaaagtttatacacctaaagtttatagacccaaagtttataagtcaaaaatttatatacccctcaagtatttgaattcaaatttgaatttaaattcaaatattttttatatataatacccctcaagtttacacatgtaaagtttatacacctataatttatagacccaaagtatataaatcaaaagtttatatgccctattcaaatttgaatttgaattcaaatattttttatatatagtatttctatacataaatttttttctaactcgttttttttaaaaaatttatggtgtagtatgaagagaagaagggaggagaaagaggagaggagtgtgtaaggggagggatggggggtgatcgctcacccgcccattagcgccccccgaaggcggcgtgggtggtggggacgacgggcatcgtgctggcggtgccgctcatctggatcatggaccgggagcagatgcaggttgagtacgagtccgtcctcgaggccgagcagcggacgctcctcggcctctgatcctagctcggttcacgggtaacccctcctcgccatcagcgacagcggtagcatcgtggatctaggtttttaatcttgctttt

SEQ ID NO: 44656 - DNA, 1118 bp, Oryza sativa
tccatctcagcctcaccaaccttagtatgcaccttaccccattccaccattcgccttaattcagcagcagacggaaacatggtgcggaaagtatcatcaccattgtcatgaacaacccacctccatctaccaggaattaacctttccaactcaactataacatcatttacagaaagcttaccctttgataccttaatcaaagctgccctaggctcatgtttaattttgtgaccagctgagagaggaatatgaaaaaaaacccagaccatcagcagcataaccacataactgagcagtaggtttaactgtagatctaaaagttgggcaacggatagcaacatgatccacactttcacaaatttcacagtaaaacttagaagaacaatcctgcatcgtatgcccctttgtaagacatctaaagcaataaggtttacctgatcctttactttctacctttgacttgcctttgccaacatcaaccaaacaagctgccatctcatgttgaaccggctcaccatgaacctgagactccttgccacctccacataccgaagcggaaggagcaagagcaaaagcaccaaaagctcctccactaggtacagaacccccagcaggaccaccagcagtaggaccactagaaatattggagaccattgcccccgaacctctagtctgaatcccacctccatccacctttaacctatcctattgggtgtttcctttacttgaatcagcaattttcattaacgaaacagtctccgatgcaacagccgatgtagcagccaacacaccaccagttagcaaaagatcacctgccccaactgacccggcaccaggagtagcatcattcgtcgggaagccagcctgcaacccaccacctggcacaccaccggtcagcaaagcaccagactgcaaaccaccggcagccatctgcaatctaccacccggcgcaccactagtcggcacagcgccagccggcaaaaccccagtcagcacaccaccaccagccatctgcaatccaccacctggcgcaacaccagtcagcaaagcgccagccggcaacacacctccgccagcagccgggaaaacaggagcagacatccctggtaccgcaccaa

SEQ ID NO: 44657 - DNA, 697 bp, Oryza sativa
aaatgctattgagctacagtactctggaaaaagttttcatatgtgcagaggatatcagatccaaacgcattctctccctactttgtacaagaaaacatatactccctccgtattttaacgtatgacgccgttgactttttaaccaacgtttgaccactcgtcttattcaaaaattttatgcaaatataaaaatacttatgtcatgcttaaagaacatttgatgataaatcaagtcacaataaaataaattataattacataaattttttgaataagatggaaggtcaaatgtttatcaaaaagtcaacaacgtcgtatattaaaatacggagggagtatgaaagtgagacttgtctctcaatccaaccaagaagcgataggttggactaactctcgtcctcaaacaaggagcaagtacaggtaacataagttatacataagaatctatactaaactgtataaatattttcccttgctttgacaaacttgctgtatcagatattcagatatcagcatggagaattcctcaggttcggggaaggtggctctccagctcttagtgttcctccgagctccgtcggcactagaggaacaagagagtggagcacatctgtgatcagtggcctgtagcttggttcagcctgcacgcatagaacagccactgctgcaacctgcacatggtatgggaatatgtatt

SEQ ID NO: 44658 - DNA, 2212 bp, Oryza sativa
catactaattcattatgtatgtcattattagtatttctttgtggtatcgtttacacaaacagaacgaaagcagaagaaagctgctgtgagggggtcctgttacaaagacaagtggtaaatgtcatcttttgctcgagatttggacggagggtcaacatgaagcggctggagtagcagaagaggaagatctgatgcaatcatggcttaagttgcctcctttcaggtcttgtgcttctatgaggtgaaaggtgcttttgcctgtatgtttctgcctgttttgctgagaaaggtgcttttgcctgagtatgaaacttgtaggtctgtggtgatataaggccatgtacaacgttccaccctatcatgtggtctaagcctccacgtcggagccgagcacccatggtagtgggaaccgtggttccatgaacccttgccgtgcatacctgcagaggtcacagttacctcagcgtgcttcagctcaagaggtgtgaaaccacttctcgggggtcacgtgttggggagaaccagagcctcgtgacgcgcttggggaaaaggagaggtcgagaaggacttcccgtggtcgtcgtcgccgctcaccgccaccgttgtggtcgtgtcactgctcgccaaatccgccgctgccagatccagcgagctcgtggccggattcggtgagctcatggccggatccatcgccgccggtggcccctcaccgtcacgagaagggggtgggaggggagaggccagccgatgtggccagatccggcgccgggatcctccgccgccaccgctcgcagagaagggagggggagaggccggaggtggaagaggagcactgcagcggtaaatggagaggagggggagaggcgccactggcagaagaggagtcgccggcgttcggatgcggagaagaggaggtgacgcgaaaaagggaaggggtgcctatgatacgaatagagtgcggtaatggagagaagaaggtgggtgtgagaggttaacagtgggtccatatgtagattagaggtatccatgttttttttatatggaataaaattgttaatcttataataataaatattgtaagggctgacatataaataaccagggtcgaaacacaaaatatactcaacagtagtctccattgtagattgtgtggcttttatgtgatcttatcctatttggtatgttgagacctctattgtacatgccctaagttaacaaggcttggtcctgctcctcgggtgatttttgtctgtaagtcatggggtgtctagctcttgtgaagggtgggatggcacctgacacaatctatctagctgcggaattttttttaaagaaacacaatacaagtgtaggcgttcaaacgcacacatgcgcactctaccatcattaacattttctaaaaactgagtcgatattaccttaagatagacgaagtctttatatatgtctcgcaattgacaggtacgccacttaccactgaaaaaaataattatctttaaatctagatgggtcaattccaccataagaaatcaaaccaattaacctatgttcacttaacagtcagtcgtcaagttaaaaaaagaggaaaacggtgtttttttttctccttttttatataaggtttacatttctattaatgaaaatggggggctatgtccttgataagaaaattaatttatgttttgcatatttgcctaaaaattccaaacactcaacagcatcagggagtactacagtagctgttgtacaagcaagtgccaggataagctaagcaccaaaagaagccgacctaataacttcgctacagtaaccatgagaggactcccccatcccccgagcattatctccacacccgtctcgtctccttgtacgttaatccagcatcagctctgtgtgggtcccacctgtctgtcactcactggccaccgacaaggcaacaaccagtgacgtcgtcctttggtaaattgttgcaagaagaagcaggggaccgacggcactatttgcctttcttctgttatgatcataacctattcctatcctatatcctatcacaacaacaaactacggtactttgctcatcaagaacgaaataatgggatcgttagtacttagcacgtattagagtgctactttcttccgttcatcgaccatcgtatctagaaaaatggtcggcagcgcataattgatcaccatctgtgtgggctgcaggaat

SEQ ID NO: 44659 - DNA, 1963 bp, Oryza sativa
gagtaagcagcatcctaattcctgaagtatgtctccacaactacaaaactttgccatcatgcagtattaacaattaagctagatgttgcttcggtgacagcgcaagtaggttgaatatttatgaggaagatttggacttggaaagtaacttcaataataaggctatgtctagttcccaactttttcttcaaacttctaacttttccatcacatcaaaacttttttacacatataaaacttccaacttttccatcacatcgtttcaattttaatcaaattttcaattttagcgtgaactaaacacaccctataaggctataactctaattatcattcatatgttcaaattgtcaaggaaaatgacactaaatcgaatgttttacctgcttgacgatcggtgagagtattcaacctataagcctgaagcctgaagaagataagcagacctttttttttttttggcggggaagataagcacaatactgcagtgaatttacaaccgagatgtatcaaggaaacaaaactgaatgcaagagaaattgattttatcctaaggggggtttgagccacatgcaaagacagtggatcaaattcaagttgcaattgattgggccagcatgggcctaaatggctagtgagagctatatcaaattggattggatttttctccagtagtattcagtagtctgccctcagcttatatacttcctgatttgggcattctgtgttcttagagatggcattgtatgggccaaaacctttccttgtggctgcatcaagcacgcccattattccctttcaacctaccatttcattttgtcatatgtaattagctaattatgtagtaccgaaggtgtttaaaaggcattactaattcctgcaaacctgttcgagtgaagcaacgaagaacttaggactagaccacgttatttgcatttactgcgttatactgatgaagaggaaatttcagagaaacatagactaatatgcagggaaaaatgagtgtctaatctgaaactctgaatcccagcacatgtaaaatctcgtctctgaaactctgatgaataggagtttattacagtttcgaattcatccttcatatgctcttgtttcttacctcgtctatgaaactcaattacatcgtgtttgcaacaattctactctatctgcaattcattaaaatccaagaagatcagaggagcctgagctatcaatcccaatagactaccctaaaccaaatttgtctacggattaattgacccaagttggtcatgaaagtttcctattgttagccagccaggcaggcagtctacgcaagtagcaccaagacgtcaaggtcacctatttatacaattgtatagaaacaaaacatcaaattcttcaatttgattcttcagagaaaggttgatggggacaccatttgatattgacaaggctggggactcgtaaaatgtcatttagctgaccttgactcgcatcgttttgatccgaggaccaatgtgttacttttagtaaatcacttaaatgaatgttcatctcccttctcccactcatgcattaacctataccattatgttatttcggtgaagtctatttcggtggtattggtgttttggttgcaattggtgtttttctggtgtttagtgtacctataacgattgatctatgatgatgttttcagtgtgaaccgtttttttagatcgatgtgtatctcttctttatcaatgaaatgggacacagcttctgcctttggttttttgtttttctgctctttttttaaaaaaaacactaagtctatcgaaacatttgtcttttgcaaatctgcttcactctgtactgggcatttgatcttatattcatgatggtatatccaatcaaccggtaccatctcaatttatagaagtgcaagttttgcatgagaacaaaaaaaaactagaatattagggaaggacataatatcaaa

SEQ ID NO: 44660 - DNA, 679 bp, Oryza sativa
cactggctggcaccgcccttcccaacctcggcgccagggtggttggcgccgccctctgcctccctgcaaattgaagatccatattgcacaaatgtaccaattcacagttcgcaattcaaatcacaattcacagattcgtacagactaaaacaggttccaattgcacaaatcacaatgccaaaagtccatcacatagtcctcagatagtccatcacatattccacacatcaaacaatgccaaaagtccatcacatatcccacacatcaaacaatgcaaaaagtccatcctatattccacacatgaaacaatgtcaaaagtccatcacatagtcctcacatagtccatcacattttatatcacatagtgcaccacatatgtcatactaccaaccaatagattaacttcatacaaattacttcttccgttgcagccgaattgcttgcgagcccggagtgtacctacatttgaaaatccaatgtttaaaacattttaaaaacaaaataagggaaatcaaataacatttgagaatggtaagctcattttacctctttttcgctgcccgagtggatcacaagttgtattgcgtgggttgcgtcccctgaggcgcgtcgggaagctgtgacatgtctatctcctcggcgtctggtgcgacgtagtcctcatcctcctcgtcctcat

SEQ ID NO: 44661 - DNA, 695 bp, Oryza sativa
aaacagcaaataggtgtcgacgctgtagataccggaagtgctaaaaccggcacctataggtcttttttcacctccacggattgaaaacaaagaaaaatcggcacctttaagtgattataggtacattaggtgtcatttttcaaaaaaaaacaacaccttaaattatttataggagtcgaattttttaatgaaccgacacctataataaattaaaggtgacacattttaaaaaccgagccgagccgaggagcggataagaccgagtgagcggtcgacagcgctgaatgagcggacaactctctctctctctctatctctctctctctctcgctctcatcagcgcggctcccatgggtggcggtggcgccctcctctctaccagatccagccgggggggaggaggcggcgactgcggcggcgggaggcgccctcccctccgccagatcttgccgggaggggagtcggcaacagcaggaggtgctgtgacggcccgacagcggcctccccacccagtggtggtggcggcccgacagcagaggcggctaaggtggcccttgaagaagttattcatgttgtgttccccttgaaggaggtgttcatgttgtgttcttgtgctcggttgtaaggggttgaacgggagaagggaattgcttattcgagccgatgcattgagccggtatttttttttttttgcg

SEQ ID NO: 44662 - DNA, 705 bp, Oryza sativa
atataatgaaataaaatgaggtatctaacttagtgatagggattattacctagtgttggtgaaatatgtgtatgcaggtattttatggatgaaaaccacccgtcatgcgacaaaatacacctccggacaatcaggacaattttaggcggattggagggtccatatgtcaatcaaaaccaattagaattaagccaaatcaaagtacatgatgttgggggcccattaagcaacctcctagtcgaagaagaggccggaaggtgggcttttgggttcggccgaaccaccagttcggccaaacccttcctagcacctcccaccatctgcttcctcatgtacctgcctgattactcctcaatgacggttggagggcatttaggacatttctcatagctgtaaccgtcatatagagcctataaaaagagaagctcatcttacttccatcacacacaactttgagctgaatcacaggaggctcttattttatatttttttgactgagagaacccaagtagaaaagatgtgtttgtcctcggtccagcaacatgtagccttcgctaggtctggttcaaacaggaatgaagcctcactctcttcctacactacagtgcacttcgaaccagaccttaccgggatatatgccacttgtttgaggggtaaactaatcatttctaattgtttctatctcttaataataaaataatggcc

SEQ ID NO: 44663 - DNA, 605 bp, Oryza sativa
aaaataagttttcaaaaaggacccaattataaaaatttgaggtccaccgggtgtcatggcgctgccgtacgccgaagggccaccgtcgtctgcctcccgtcgtggtgccgccatctgacgcagccccttcaccggcagccgggcgccagagctccgcaaccaggcaagcgcagccgcacatccctcactgcctagtacttttcgttcttctactccgctccactctctttccaatccaggcttatctaaaatttgttcccctttgttattttcttggtacaagactactagtgccatatcttgttagatgcgatgtattttgatggatgcttgagtggtaatgcatctagatatccagcaactagcagttctaatggttgtatggctgctaatgcggctgggcattggaggagatagctttgagttgtttcatggttatgttggacgactgattttcttaagcaaactgaccttgagagagtccagaatatgttggtgtattggacccactatttttacacttatttaatttgctataccatgttccttataaaatgccgtatccctttatcgccgtatcacgtatccgtatccgtatctccgta

SEQ ID NO: 44664 - DNA, 503 bp, Oryza sativa
aactgtaaccaaataggactagtatattcgacacctattctaacataatatgttgatagcaatgtaaaaatggtttacctactttccagataatttcgtaaattcgcttaccaatagacaaaggttctgaaaaccaacagacacaaatcgattattgacatgtatacctatttttaagcatacaaaaatagctgcagtaatggttaatattgttttggctgactgcaaatattgttaagtgcatgatggactcacacctagttaagagtttgaatgctttgattacagtcaaaacggtaaaactagaagaaatgtaacataacttacaaagcttgggtgcagtctttttctggaaatgccaggttctacctagcacaacataatcaatgctaccaccaattccatgtgcttattgagtcacagcccctacccacatgatactgatctaatcaccaaaaagaacaggtcgaagcatgtacatgatgaaacggggctgcaggaat

SEQ ID NO: 44665 - DNA, 649 bp, Oryza sativa
aaaattccgatacgtcatccgtgtttgagttggttctatatcacggtatccatttcgacgtgactctagaacaactattatacacccccttcctagcccaacgcctccctctccctctccctctcctagtgcacccaacccagccagcccacaccatcccaccgccccatccagcgtgcctccactcagcgccacacgcccctcccctaatcagtgtctttttctctcttttttcccctatttctccttttctcttctcccgatcatcctgacctctccttccgtttccaatctcctccctttttcctccttttctcttttttttctgtttcaaatttctctactcacaaatatttttctattgaaattaccattaaggtgtgtatgtcgcaagtttgttattttgcaaatgcttttcatctacaagtaaaaaaaaactttcactacttgaataatcaaaacttcaatctttaataaatgacgtatagcagaatagacatgcatcaacttatggaatattcacccaatagatttgtgaggctatggaaatgtgtacataagggattcttcgtgtgatgacgtatgaagcgagcgcaaccgggttcaatactatatactctctccatccaaaagtctgagactattctat

SEQ ID NO: 44666 - DNA, 2283 bp, Oryza sativa
tccccgtgttttatgatattcttgtcataattatcttcatttgcgcaacaatcttgaataatcacattgtccagcctgttttgatttcctccagatggtttattcttaagacgacaatttgacatatcaggcatgctgtgggctggattatcatcattgatcgtaccagatttacatatgcattcccgctacatcatagttcaaatcgtcagttagaaatgcatgatgataagatcccagggcataatgaatgaagtatattatctaaaacaataatgagataacgatgtatatgttatcacaattaatagatcgtgcaaataacatgattttgtaacatcataaatttactcttcaaggttctcatttgcacttgcagggaataaacaaagattgcttgcatcacagcatttaaaagtttacttgtcaatagtttgtgtatagcctgacattttattgaccacaacaaataaagaattaatacaggacaaccatatttcactcccctacatctagctcgtatgaacagtttgccatttgattctgagcttatggtagcaaaattatgtacaatgcacctaaggtaaaccagcttgctctctcttttcctccctggattaccccaaccacacatgcaacaagggagatcttgtttcttactacaactaccagtcatatctagggtgattgaaattgagataattgtttatgggacaatcataagaagatttataaatggtagaaagtcagttcaatgattggattaaggatcctgtgggatcatagcaacgtggcagttattctagcttttctaggataaagaagactggaatactttgtaaccaatatgctataacaagcacccaatatgctaaaataagcatttatgtgatcttaaggcatccacatttctttaactctgctctgctctccagtctctgctctcctcgttcactgctttgcatttgtttattctctgctctgactaacggtcctaagcagtgcctagacatcagccctgccaataatctagagtctagtgccttctttaacactgagctcatgccatgtcggagaaaggagcgggaggtggctcatgctgccagaatggaagctccctcaccaatggtttgacaagagaagggaagaggttgcagagggcatttcggtcttattcatgggtctgttaacaggacatggatggcactggcatatgaggaggaaaagttcaacctgagtggaatggaaggaacatgttttttctaatactaacaaataagggattctaggaactctcatatgcatggaattttctctgtacaaacctcaaatttgcacgacctatctatgtctcaaatatccagttcgacaattcacaaacagcgcgtacttattgactttccaggccaatgtaccacttttataatcattgacaccacaaggaacaagcaatccacaaattttctggtaggtcccaatcgaagtgtttatttcttttgcagtatcctagtacatgttctttcctcccccgtacaagtgacgaaacagcataaatttctaatctccatctaaacagagttgactgtctccactaagataataccggaaatccatgtactcattaaaatttcccattactaccaaaacatccagtccacaaatacatcaattaggaacgtataaatgctgcgagactgaaacatatggtctaggcagctacaattataaacttccaaacaccccacaccaaggcattatatatattccttcgcacgcgaaacatccgtaaatgcgtaaagcgcatacatctagcgcgcctacgaattatcccaaaatctatcacatccaaattgcaatggtacagtacacatggagagcatgatgatcatcaaaagctagtggagcaatcaaaccaagcaagcaagagggcgaatttacctccggcgaagacaggagcgacgccagcgcctgcagcttgctcatgctgaggttgaactgcgccgccacctcctccaccctgtccctcacaccctccccaccaccaccaccacaccccctcccacacccacccatcgcccacaccagcagcaagcaccccaggaacccggccaccgccccggcaccggcgtgcgccgccttccctcgccgtgccccgcagccgccgccgccgccgcactctccgaccctgctcatctcactgccgccgccgccgccccaaagcctccaagaaacgcgccacactagcagagaagaaatccggggcgagctagctctgacgggggc

SEQ ID NO: 44667 - DNA, 4889 bp, Oryza sativa
ttctctttcctgctgctttcatagtggtggtggtgcttgtgcttctcactctctctctgcccttctccatctgctactactactagtactgtcttttggttctagagagaggatttctctaacatatgctgctgctgttgctgttgtttagacggaggaatcagatggggatgaggtattgagatggagaggggaattcttggtttttttttctctttgatgtggagaaagtgttttcttcaaggtgcatatcattatctcatcatcctgtgggtcctaatggagccctctccctagcttgattgacatagcttgtttagagatttttttttctttcatttctttctcccttaccttgcaagacaatttttttggggggaggtggaggcatgtgtcaagattgtttggaaaattcaagctcattagctttgtggtttctagtgatcggggctgtccctttcatggcccaattattgtatcgtgttggcgacggtgacgagagaacttgaaccattagtccatccatagcaacgggagggaaaaaaataaatatgccacaaaggagacgtgttgtatgaacacgagctcgcatgcaccacaaacatttgtgtcgtggtgggaacattggtcgagttgtcgacaacggtgatggcgtgctacgttgttttctgcttgtttctggttgctttcgtgccaaatgtctagtttcttttttcaagttgttgggaaatcaaataatttgtgctgagattgaagtaaacaaattagcttgcaaccaacttgattgctacttaattttttctttagcttagctaaaccatcttaaaacaaactagtagaatttatcgactcttgctacaagttgaggttataacgatgctcaagtagtaatatcctagcaattatctatatgtagtaagtactactaagtacttattgggataaaccaaacctctgtccatgtccaatacaggtgagaggatgggaattggggatgaaaaaacaagatctttgctcgatgtcctacatgttgtcctttagcaaaatttagtgattggagaaaaactagctccaacaaaaatgtcctatggccctatttgcttagacttataagccaacttataagtcgaaaagtttaaacctaaacaaacaagtagcttttttttgtttttttaaagccataaaccactactacactattaaaaaaccaaaagttagatttgagaatattttctttttggcttatataaggtagatgtatgactccatcattaaatttaggactttaaatccactatctcataaataatattccttctctcttattttcaggttcctcctatctaccctctaacatcccttatatttgaaagatggaagttcatcccctattgtcatttctatataatgagaaaattacttctatacctctaaaattttaaccaatccttacgcccctgaattttcctcattctcttatatactcctaaattttggttgtgatccttctcatatttttccgttagttgaccactagttgaccttgtaatgagcacataaaagccagttttacccttagatatgtaaaaaaaatctaccgttgaaaatatagttgtttattgcgcacctagtttttattgcatggggaagtattatacgtaaaatgttaatacatatgaaaaaaatgcatgtgtagcatttttctataataggaagaaaaacaatcaaatctatctcgtatatcattttcttttagataaggtatacaaccgacggtaaatctattgcactactatcacaaagttatgctacatatactagttttagtaaataaaaatgaatgtttaatttctatacttcttcgatacataagggcaaaatagaccttttcaaagcaaataaatgatcaattaacagaaaggacatgtaagggatcaaaaccaaaatttagcggatataaagaagtgagagcagaacattgagcatacagggaatttactccaatatataatggaggggatttgctcgagagtgaagaaatgaatgggaggaattttttggactatcccaacacaaaaaaattaaaaatataagggataagttttgttgacgcttctcgagatgctctatacaattttttatgttggtgtggtattgttttgggaatctacacgctctaaccataatacatctgagctaacctatttagtatttacatactaatacaaattatttttctgcttaggataaatttcatctgatgaaacggccgagttatacattactaaaaagaatgacttgctctcttcataaacaagtcaattttacaagtcggtcgttatccaaacatgactatatgacttaatgtcttaaaactatttgattatgctatacttgcatctaataaatatgctgggtttcaagaaaaggaacacgcggtgggtgcacaactgcacactacacaaatgctttactttttgacagaaacacacagactgctgcagaagttggttgaagtttgacctttttgagagtgggtcagtcttttcggattaatctataatagtccagcactactttggttgagcttgcacctttgtcctgctttatggcctttactgtttggtggctgctaacctaaagaaattagaaaagcactaggtgctggttcaatgcacatgtacttcttggaattcttctattttttaagatcaaggattgcgtaagtacctggtttgttacccagattaattaagtgtttcataattttgttcttctgcagaaaatttaaaggtcttattaatatcgttcagttttggtacttcttgtgaaggtcgcaatcggagattcggcaaagcaggttgggtgccagtagattctagagagtttgattattgcatcttcgatatcgtaacctgtaattatctttttaagataataaaaatggtttacatctttggcttatgccctaagacacatagccataaatttattcaacaaataaaaaaaaagagaataggtgatgggacgaacccccaactcccctttattgttagctagcgttaaaccacatagattcagtcaacaattcaaataaaactacgctatccatcgtggaataaaaaacctttcgctcccaattccaaaagtatagcactattgcgcatgatatcatgcttctcctgcggtagcgtcgtatattaagagtggagtcaatagaaaaaaaacacaaagataacctacaccgggttagacaattgattaccattaaaaacttggtcattgcgatatcgccaaattatacatttttttttgtcatctcaatgagagataaaggtctacagtatacaaattagttagagttgaactatatattaaggccttagttaaaattgatgaattatcttatttttttagcaatttaagggtataaataaataaatgaatcaactcttacaaagttgaaaagttgttatagaacagtattctaagtaaattttatacagatttttttcataaaacgtgccgtttaagtagcttgagaagcatgcaaataaaaatccaaattgtagaataataaaaaaaggtgtgttatgttattttgccttttttgttgcatgataaaagcatatgtgcatacaccacacttcatgcatacatccgcaagtatgctatcttaattaatccacaccgtttagaagttcaagaagcatacgtataaaaatcgagcgaacataagttgaaaaagaatacaccattgaatctataggagttttggaggattagttcatgtgattttaggtatgttcagattgtagctaaaataaaccctaccaaattttgacaataccaaaattttggtaagttggcaatattaccaattttttaggatttcttatgtatttactaaaatttgacaaaaaactaaatgtatacacatctttgacaactttgaaaaaatagtatggtttaaaattacatcaatctgagtagcccccttatattcatgtgccccaaggagggcctttataccggtaataagaaatggaatatcatggagaatatgccaaatttatcagtgcgtctgatcagattatgcctttctgatcccttgattccttagccttcacaattccgccaatttagccatggcaacctgaaaatattttccaaatcaaataagattagcacgtgcccaatttaagaaaaagagaaaaaaataataccaatacaaactcatgccattaattcttttaactctgaccaaaatttaattaccgtggggagaaggagacctgtgtggcaattaatcccagatcatatcgcctgcaaaacaaatcggatggaatgaatgcacatgtggtacaacagattggaacgatagagaatctgggcacagtgtaacccactgtttgagcacagcaaagtaaccagagcaaacgaatttaaggcgatttacctgcaatttaccggctgtttttttttttttgaacgaaagcaatttaccggatgtttggcgtagagaaattggtcaaattgtcctggccgagcatgtgctgttttggtgtactacctcccaatgcagtcaggtggccatattgcgtgcactgtaggggctgcatttgatgtttgccctgctgaattaattgacagttggatgcatcttgcatatgaagctgaagctaaccagcttgggcttttaactatttgctactcgttacgaatgatacttaacgatttgccactagacccacatgtcatagacacatgagggcccacatatcatagacggtgagtggcaaatcattaattgtcatatcacaagagtagcaaatagttaaatttcccgattatataagtaggacttatacttttaccgcatggttaat

SEQ ID NO: 44668 - DNA, 2353 bp, Oryza sativa
gagtgtagactgtagagggaccaagatgaaaaccctcaaagggacagaacggattcagaaagaaactcacgtaaggagttatctttttcgtataatataggtggtgcagtacaggccttaggctcgcaggcggggcatgatgcgtacgtccaattcggcagctaccgtacgtccttatgcacaccccatactccactgcaatttcgatcgcactccacctgcaagagcgctctggaaataggggcgtgtttcacgttaaattagaagtttagttaaaattggaacgatgtgacggaaaaattagaaatttatgtgtgtaggaaagttttaatgtgatgaaaaaattgaaagtttgaaaaaaaaaagtttacaactaaacacggtgtgtgcaccgcctcacgaatctccaagcactgatatgaaaattactagcctgcagcagcctttgtacagtactctctctagcttgtctcctgcatgccctggtcagatgttctagcgatttttttgaatttgagctagacatttcactttttttttcgttcagcactcatgaaaataaagccgagctagaaactataaaaaaacattaaaattaactaatcctaaaattaaattctaaaatttaaaatgaactttggattataatgaacaaacagtgtttgattggatatttgacatttggccatttgggacaacttatttcataaatggatcacgatcgaaagaccataaaaaaaaccccctaaactcagtactattgagactgacgctgaggccgaacatctcagtgctaacctcgatgcaatgacccctatgccgtatctcctgtcacatcggatgtttgacactaattagaagtattaaaattagactaacgataaaacatattccataacactggactaattcgcgagacgaatctattgagcctaattaatccataattagcctatgtgatgctacagtaaacatgtgctaattatgggttaattaggcttgaaaaatttgtctcgcgaattagctcttatttatacaattagttttataattagtctatatttaatactcaaaattagcgttaaaacatcctatgtgtagttcttggatccaaacaccacccaagtggcataggggtggctagcgtggcaagtggttagcactctatcaaggatgcagctaatctctctagctcagttcccagtgtcgttagcgctaagataagacaccataaagttgttagcgtcgaggtaaggcattaccataaaattcatatgccaacctatctctcacgcacattttctacaaaacatgcagttcaggctgggctatattgaaacaaggggttttaagggatgttagaggagttcagtccgatgaaaaaaatttctatgtggtgctttggattaaagcaatagccatccaaaaatcatagaaaatcctttggattggttcaaaagatagaaatttcttaaaaatcatttgtgtatatctctcttctgatttctgcattttttctgcgctccatccaaactatcctttgtgtagtttccctacatattttcaatccatagaatttgaagtgttaggacacttcactcatgtatttttttctattattgtgttttgagaatcccgtgttacaaaaaaaaaaaagccttagactgttcagaagtgactctgaaggtaacaactgatctagatataacccttgtggatcaatattgttattaccttgacagattgatttttcactttatataggtaatgctcagattgaagtcgatctatatgcattttcgttctcaaaatcttcaggttttgttgggaaaatcggtaggtaatagctatgtttgacagtttgagggttgtaagtaggtggagaattagggctcaaatggtggatcatgagtaatggaactttcttgttgatttgtgatagcagtacatttgctttcatggtagatttgtgaggggataactggtattatatatctttttccatccatgtgaaatggcaacacattggttttttggatatgatgatgttgagggaaattttgataattaagaagaaacatctttaaccaaacatacatccaagcattgtttgaaacttaaaaaataatcctaaaaattaaattctactacctccgtcatatattacttgtcgctttaactttttgcaagtaacgtttgaccattcgttttatttaaaaaattagtgcaaatataaaaaaatgataagtcatacttaaagtattttttataataaaacaaatcacaaacaaaataaatgataattttaaaaaaattttgaataagacaaatgattaaactttagaaaaactga

SEQ ID NO: 44669 - DNA, 1043 bp, Oryza sativa
gtaataaggggcacatgagcttgccgcgtatggttgtaatctccagaccgtgtcttcctgggcaggctgcccgcctggtctggaacggctggtatccagcgattctgctggtttggtaatataaatctctcggtttccctaaaaaaaaaaacagctagcttcagggagcgagggagtctttaaattaataaattaaagctcttcaatgactgatgatgcatgcaggaccaaaaaatagtcgaaggagattcataaaaataatttggcacgtgtggatccaaattaatgtctcgccgatgaaggtgctcaatattttacacccgttaatttgcatcgaacaaagcatatatgcacgcgcattaatattacatatggctcgaccactatgttttcaactccctctatctcgaaataagatcagttttactagcccttatttgttcaaaaataagttaatctttaaacaatcagtaaatgacaaatataataaaagtagacaaagtgtgaaacaacttattgggagcagagaaaatagaggaggactggtatggtaggataagtgaaaaatatataaatttattttgggatggaggtatatatgtaccttttgtatttcagatatatatagtaccattgaaaataaatatagagaggatttaaagataaggtataatagtacaaagctaagtattcaaaaacaatcatcacgatcattgcttgtgcctctttacgttatcggaaagtactgtttggtaggcaggtcgaagagaccaacggccggcgctatataaatatatctacaaaaagcacggccaataatcctacttgaactgagttaattgtatattattatatactccctcttccaaaaataaatataagaatctaaaaccggatgagaatctacctgtctagattaatttgtagtactagaaaatatccattcaattttaggtttttatattttgggatagagagggagtatagaacatgacattatgcaatattaacacggcaaattaagttgatatgatcgttcatga

SEQ ID NO: 44670 - DNA, 6759 bp, Oryza sativa
ccaattttaccgagttagacactgattagaatgcgacgtgcatacacgaggtggacatgagacatgctatctttgtaaacttgacttgtgctttaatattctttgttttaccctttacatcatttccttttttttctcttcctgtaatgtaatctttaggtcttattgaatctttctactgaacaaatatatatatgtgcgtaacattcttcttacgtgtgtatttatataacatcctaattaacacttgaattagcaagattagccttattttggttttggttcgcgcatgccctcgacaagtttgcataccaaaataagtgttttacaagtttatatactatattgcacccatctgataagttcttgtatcgctaatataatttactcttttattatttttgtaattctgaccacataactcacttttctatcaatgtctagcatctattttggcaaagatatatcgtgcatatggatggggtaatttgtcggtgcatcggagccgatttgtttaaggttgttaatgtgcatttaggaagttgtttggagtagtctaaactataacgacggtaaaactactcggtctaagaaaaaaagattgacctaagggtggtttaaaatgaacatttagcaataaaatatgacctaaattgcaattcactctataaaatgctctgatctacattaaggctgtgtttagattcaggggtgaaaatttttgtcatgttgcatcggatatacgaacacacatttaaagtattaaacgtagtctaataacaaaacaaattacagaattcatcagtaaaccacgagacgaattgattaagcctaattaatctgtcattagtaaatgtttactgtagcaccacattgtcaaattatggagccattaggcttaaaaaattcgtctcgcaaattagtcacaatttgtataattagttatcttttagccaatatttaatacttcatgcaggtgtttaaggttcgatgtgacagggtaaaaaattttagggtagtatctaaacaaggcctaacacacacaatttgcatatatgggtcccttggcctttgccgtctaatcaaacgtaaaatgagaagaagcaagcatcaatcagaacaataattggcaacagtgccaggacacatacacatcaaacacatacagcaagtcccaatcagcagcagaagatgtcactgtttattttgagaggctttgcagtttgcatgcatcacattctccatgtgatgaagggtgacaaaagaagttacagctaaccatggccaacgtcgatcatccacacaccagggtcacaagcacaacaagcacacaacacagacacatcacaaaagctgtctgaatgattctccagagagccattggctctagctgcagcagagctgagttacctacctatacctagctagcaggcatgcagctaccacctactccattcatcccaaaataaatcaaattcttagagtttaaattttgttcgaaaataaattaattcttacctttttacctacccttgatccaaagatgagaagttttctcttcaacacttcttaacttcccactcaccaacaccaatactatttttctgttaatgaggacaagtattttttccctcgttagaaattatcttaaaatataagagtatggtttattttaaaacgcaagaaggagcaagatcatcatcagctagtggagcatgtggcctactgcaagatgcaacatcatatgtgtgcactgtggctgtggcagtggaaaggacagtggaaaaggatagctatagctctggatgaagctgggattggatgcaatgcaatgcagtgcagtgcaagcctgctggctgctggctgctgctgttgcatgctggtgcttcttttgggtgtcactccagtgccaagaaaaaaaaaagcctgtgtgccattttgcttccatgtgcacaaatggaggagaaagcctgcaccaacaaattggtgttgcattgcatggataggggtggtagtccttttctttcattggttgcttttggatcactgctactttgtctagtgcatgattggccaattcagtgcttaattgcagttcacatagtagctacaatatgatccttagatttagggcctatttatatctcaccccaaaattttacatcatgtcacatcgaacgcttgaacacctgcatgaagtattaaatataggctaaaaataattaattgcacagattgcgactactttgcgagacgaatcttttaagcctaattgctccatgatttgacaatgtggtgctacagtaaacatgtgctaatgacggattaattaggcttaataaatttgtctcgcggtttactgacagatactgtaattagtttttttttattagtgcccgaacaccccataggacaccctatataatacccgatgtgatacgccaaaactttacacccctagatctaaacacacccttaagtggtggttctacatatttatcttacactagctacaaactgtgccatgacatagaagacctatgtaggtgttattttctcctgcaaggacaagctgtaatttccatttttatgtctagaaataaaggtaaatttagtgtggttattataaattgttttatgtttctccatatggaatggataaaatgatgtaatacctccgtccaaaaataaattcatttttaactcatttcacacataccaatacaaaaccaaaaaggctacaatacaattactttatataattccattacaactattccttattttatctactcccaataaaattattacgtactttcacaaactacaatgcaatgattactctaaaaataaagttatttggggccaaatggaaggggctaaaaatgaacttaatatagaattggggaagtacatgcctaatttagtttattattaatacttatagtagtaatgggcatgtttgtgctgagcaatggatcgatctcattattgatgagagtatgtaaacattaactcaacaaggtttgacaagaatttctcaaaattaaatggcgtgtagggaaaaaattatattgctgaaatgtgttggcttataaagcacagccaaattttaaaattttcaaacttaataaaaaaattagtttaaatatgtaagtcaagcctggaataccttaatttattgataaaaaaagtcacaacaaaataatgatacttacatacagatttaaaataaaacaaatggttaaatatgtcatatccaagtcaatgtaaccaacgtagcatattttactctgtagaatatagtagacaagaaaaccaacaacaacaatatggagaaacctctgaattgtcaggctgtgtgtgcatgatcatctacaattgcgactagtgcttgtataatatttgagcatgcatataacaaatatatatgattctactagagaataatatttcaaataggcccactcagcccatatgtaatctagacttctacatgggtccaaaatgggcttaacaaggttgttgttgcttctcagagatgttagtacaaacaaatttcccgaacgtattacttgcttaaaaatagttttttttttgcaaaatttatctgacctagcattattatttaaaaaacttaattgtggcaattaaatgaaaacttccataggccttgttaaaaacaggaatacgtccatattgttttgtctataaataagaatttcacatagacgcctaggtttgaactgatggggttaacttgaatggttcaagagagtgtattgtatctggtatagaagttaagcaggttttctttttagactaatgagatagtattaaaaactttgttaacactacatcatgatagcaacatcaggcacggatggttgactaatgtgaaacatataacgcaccatatatatggtgattaagcaagagatgcacagtcctgaccatcataaaaattgtagcataatacttagtcaaagccccttttcattttgtatatacattttgttaaaattttcattatgataatgactatgcatcttgcttaatcaccatatggtgcgttttatttatcaaatatatctaggttaacctgctctcacaaaagtccaactttctccaactgtagctagtaaaagaaaaaaaaacagaatactaagtgcattaggtttgcatgcttcatcaatccttttaactgctcatttggcttatcacttccattggttcatggttagatctatatgcatctcccaacaccactgttcagcatcagtaccaaacaagaagaagcatcaaaatagcatcatatgctctgcatgcatatccatggacaaatgtgcttttggattgaagatccagagacatcctgtgttggaacggttcaccatctctgagcctcctgtcccaatccatgacatcaggcaaatggttaaacgatgtgaccatcagaaaatctgcttggagagacaaacaaagctggttattcttagttttttttcattttggtagattaaaatatacttaattattgtgtagtgttatgatagagtccttttctgcaaatatataagacttaagtgtgtcttctagctaccattatataacttttcaaatccagagcagttgagagtttttaggcttcacaaaactggagttaaaattaacttgaaattgtgtgagttctatcactaggagaacaatcttgttaaatacctagcaaccattacagggcttaagaggcagagaaaaatagcgttgatgaaaataatgttttacttttttaaaaaaagaaaaggaaagaaaatggtgttttccatgtaagtcagcttaatatcattgcgataactaaggttatacccaggggcgaagctagcatcaaaacaaggggtgcactactattgagaatttagaaaatttcagtacaacactgtacattctagtgtttttaagtgagaaattaggaatttgggggttcatgtgctgcctccccccgcaacataatatagcctcgccactggttatacctaaataagattttggttatattgtcgaatattggtatcatagcatgcaaagagaggttttgtgacaaagaagctacaaatgaactctggctaccctgtacatttttaatatttatatatactatgtacttggaaccaatttattatagttattgctaaaaataatataatgtaagacacataaatgtattcttttacaatgaaaagaactttgaaattatatacttatatatatccagatgttaattttgttcaaattttgtactactatatataatatggtcccacgcgctaattaactagcctccatggagctaggagacccaaacccacaattgtgaatatctccataaagaatagatactacccacaattggttatgtgtccctacaaactgtaaagcaccctgtcaactactggtgaacatgttccaaacatgtcactctactataaatatgtccgccacaaccataaaacacatcgctaacaagcttgttgactgtaaattcatcccaaactagtaaacgagttttcgaacatgtttgccaactgtaaattcattcaacacgattgggaaaaacatcatttcagtttatacaattatgagacaattatcttcactccagttataataatttttttctttaattttacaaacataagtattatatttagatatgtgtatgtacatgtgcaattttgcggtcccaaataatgctcgcttttacagccgtgaacttgttttacagaaaaccaccaaggatatacttgtagcgtctatagctcaatagatgttgctgacaggaatctgtaggatctcccatggttaattaacaccctagccaagttagcagcctgatagtggtgtagcaaaggcccatatggcctaggtgtggttgtagttggtagttcagtaccaccttagaggtttatctaggtgaggtaagcttatataccctatgagttaaccttttatccgaagtaagcatgaacgtgtaagtgagataatatgcaacgagagtacggtagtgtggattttggtggcaaggccgtatttgcatatgccttatttatgcatgcaatgctacaaagtgctccattcgcatctctaggcgttctttctaatagaattggatatttagaattggagtaaacatccatatctctaggtggctatttagatttggatataatcctatatcaaatggagaaaatagaaaccgcaaattttaccacgcaactaattactgattttgccaaaagagttctctcatgtgctgcaatctgatgtccgtgatatgttctttacattgatctccgtatttcctcgatagagagaaaatgagtggcacggtggagggggaggagggaaagttggcatggtgtctttgttagggttgtctattggatcacctaggtttagatctagtcgggtggttctatttgcaatggatgaacaacaatagatgaatgaacaaagagggagtgagaggatttagggttgtgaccagtcgttgttgaggaagaggaagtccggccggccatcgtcgttgtcgtcgcgggcttgacgtggacggcggcgacgatgtgctcggttccgatggcggtgatacggttgcagcagcgacggtgtcgacgacgaggcgtggcgctgcggtggacttcccgtcactggctgcgccccctcgatcggttagggtttatggggtggagtggcggcggcgac

SEQ ID NO: 44671 - DNA, 1075 bp, Oryza sativa
agcggctaggcgacaatttacaacaagcgacaagcggccgaggaggagcgcggcatgacaaactcagcggtggtggtggcgcggcttgaggtggtcgagaatggcggaaaatggtggccagaggcgatggatatggcggcgactttgggtacgcggggaagacggtgctcgggcggtggtttgcgggaaatggagtggtggtcgtggtgcggagtggcatggcgaagccggaggctctggtggtgcagcgcggtggcggcactagcggcagtagggcttgcccagaatacgacagcaggcggtggagctcggggttgcggcggggtaatgggttggggacgcggcgagctcgatagagaccggaaaacaagcaagagaagcatgggtatcatttatattgcctcgagaggacgagattgaggaggagtgggcgaggcgacgggcatgaagctccgatcttcgtggaggtcgtggtggtggtgcggtgcggttttattcacaaataatattttatttgctaataagtgattcggataagaatatgaataagcgaaacaatggggctctagataaggtgaccaagtagtcttttacctctttacaattctacctccattaaacatgtgatccctctttcactgaatgatattttaaattgaatcaatcaactattaggaggaacataggctttatttctgtctttaacatggtaccaaagtattatgattcctcatcacctaggctatatccagggattcacatttcttatggtgctaggtaaattccagaacatgaccggtcttagaaaaaaaaacatgacataacaatagtgactggaggagtagaaatgagttgttattgatgtccttttgtactattttaccgattgagacctcagtactttatatctacataagtaatcactactagataggtgtcggaatagctaaaaccggcacctttaagcgactataggtgccgattctataaaaaaaccaacaccaatactatagatgtcgtttttttaaaaaaaaccaacaactttaatttattataggttctagttaattaaaaa

SEQ ID NO: 44672 - DNA, 2225 bp, Oryza sativa
atgcataaatgtccaaaatttttaaggtaacaactagcaactgacaactcatgtatatactgattattatttagatattatactaagggccctatctctagtttcgcactggcccctgaaaactcaggaccggccctaaacacgggtgctcgcatttacgactaattattctttcaatggtagacgacgtacccgttgacaacgagacgcccgtgaatagtcttctggaggtgctcatatgggtagggaggcgcccacggatagtcttctagaggtgctcgtatgggtagggaggtgcccacggatagtcttctagaggtactcataggataggaggcacctgtagggtttgaaatttcgattcgaaatttctaaaattttggtaatttcgcccccctaccggcatactcaaatctcacccgaaatttttggttttttgtaattttttatgaatttggtcaaattttattcaaattcattcaaattcagtcaaattttcaaataatttcggccagaaatttacgaaattaccgaaatttccagtaatttcggtcccccgacataaaatccaatttcgaaattaaaaaccctgaacacctgtggtgacttcatcgatatcaagatatgcctcttagaaaagttttagaaaagaaaaatacggcaaagtgctcacccatttacaagggaaaagaaggcctacaaatccaaccatcgtcatccataggtatgacccattcttggttcgatttgctatccatctcctgtgtgatttttttatggcatttgacattttttttggccgctatgcaccacttgcgatgtgagcggcagctcacggcctgtgtcacccagcaatatggctaatgctgctcggcgagcgacaccgtccctctcgtcgtcgtgaaatataaaattacgatcctatataactaaaattacatttgtaaatttagttaatatgacatgtaagcgcactgtaattttgataaaaataatgtgtaagtaaatatgtatttgttattttctttaaaatataaaaatacagtcctatataactaaaattatatttgtaatttcagttgatatgacatataagtccactgtaattttggtataagtaaatatgtatttgttattttctttaaaatataaaattacagtcttatataactaaaattacatttgtaaattcagttgatatgacatgtaagtgcactgtaattttgataaaaataatatgtaaataaatatacatttttttattttcttttgtagttcgttggatgtaaatctaaagatagaaaaaatctaggtgattttttttagaaatcacacgacaaatggatagagttagcaaattcgttgtgcgtaataaaaaaaaatcggaagcaaattatcgatgggccgcacgaagccacgtacacaattgcgtgacggaacccaatagaaaaaaagtacactgaaggtccctcaaccctcaacttgtcatcgggataaaaaacgtccttgaaccgcaaaaccagggtcccttagctatagaaaaccggtcacaataggtccctcggcggttttgatcccggttttgtcctacatggctgctgagtcagcgtgggacccatgtggaccccacatgtcaggatgccacgtcgacacctttctatttcccctcttctctcccttctctctcacttctctgcttctttgcgcaggctagccgacgggaggggaggaggccggtggggcgcgcccaccgtgcgctccgcgaggtgggtcgcagcggcggcggcgtcgtcgtcgccggccgcgccatctccgtccagttcgccacgtaccgctggcgcagacccgtcctctggcgccgcggcggcggcggggaggcgggtgtacgtgaccaacgttgcaccgggcgcgagcgcggagcggctgcgtgccttcttcgcggggttcggggagctcgagggcggcccgttcggcttcgacgctgagacaggattctcccgcgggggcgcgctcttcgtgtaccgcgcggcggagggcgccagctcgccgcctaccccgcctggaagagcaaaccacgcatgccgccgccgctgcgtggaatcacattggtaaacagattaccacccaattctaaagcaatcaagttgggaatgtttgctataccagaaggaattgatcctaagaactgatttaatcccatgtgtatcagtgtatgtactgccgtt

SEQ ID NO: 44673 - DNA, 8144 bp, Oryza sativa
cccatggcggcacccggagcccatagggagtgggtagataccgccgaatgaacatctgggagggacccccatttaggatgaatgcacaccaatttgtcctagactcagtaggccagctaggatgtcctctaatgctgtagagacgacagacgatgaacaattcggggattggaggagactatatacaatttgacataggtagcaagaagagggaagatgtagtatattgagggtttcgaataatagattgattttcacaattgattgattattgtttcaatcggtcttggcccttatatttatgggagggatgatcttgcctctctatcactcttgtccatgtcctagtaagtttgagaagctttacagtgaaggaaaccccaacgatcgaagaaagaaatatgaggaaactccaattggattcgaactatatgtgctaaaagtctgaccacccacatatatacctgcagtctgaccacagttaattgtccggtctaactagccacacaatggcggttgatcgaccttcgctaggaagtctcgatatttttcaaatttggctttaacttcctataagtctaaactactgctaaatttgagtatcgacaaatcgggatatcttgaaattgacaaagtcaacacatgcgtctatctgttgatggatatgtcccctaccacgctaaagagtaatttgtcgtaaatgtgaacacttgtatcaagtctagtacttaaacccagatggacaggtttcactaccaggaacctaaccaaattgagttacgatcactttgcaacaccaaatttttcatgaaactaaagatttaagctagaggctcgtaaatctacatatttaataaaatggttatcacaaaactacaatattttagagttcaaattcctatcatatttctatattggagttataaacactgtaattttgtgatttagttggttctaaacctgtagactactgatatttttttaagtaaatttatatttttgtgatatataatcataaatctgttgttctatgagaattttggtgctcaactgagtttttttttgatccaccatctttaatccaaaatctattgtattgtagttttgggttgattaaaaaaaatgtgatagtttagccgaagcatttttttgtgaaaattttactcttacatttttataacaagatctcacataattattttctgttgacataaatatatagtatgtttgaaccgttaaaatttgatgttttatatgcgagaagtgaatgtcttatgttgtacattgtaagttaattgcttttggttgtgtgaatcctttttaatgtggcatgtggtatcctaagtttacttttaaatattgcacatgatctttttttatgttttaactcttttttttacattttaaaatttaaaattttgtattttatgtatgatatgaaaatattttaattatggacataattatatatactttgttatcagaaatataatctacgatctactttgttattcagtgtaagattttattttaaatattaattactttgttatgtaattttggatcgtagatcggataagtaatgtaagaaaaaaaataaagttagttaaatttgtttagggggagaattgagggagagaagggagagagagaaagagataagcagtggctggaaggagcgcctgctttgtggcatttaaacagctcaccacgtgtacgtagtatcgtacggaaaatattcgttcgcgattctgcatgtgttgattcaaaacagaagactctcccagacggagaatttgaccaatatgcattccaataggttagaaaaactgttcagttttctagtttacatgattgttttttatttgggatgcccacgtacgtacgcatatgtagttgaccaccactagctagttatcaacccacatgcacctacctatatatggtctatacctctagaaaatattgatataactaattaaatctatggatattttctaaaacatatatactcccccatcccagaatataaacatttttagagttgggcacggttactaagaaaataggtagaattgaatagcacaaggttatgattggatgagaagtagagatatgtgagaaatttgaatggtggaggattgtgattggttgagaagagaatattggtgtagaagttgttatattttgggacaaattctagagactagatattgttatattttgggacagagggagcatgtaagtttgcttaatgatccaatactttttaatcttttcttactataaagttataacccactaactcctaaagcttaacatataaagatgtcacatcatcattcactaacaatcattaaatttaaacttcaagcaaacatattatattatctataattttataatttattaaattttagagcttttaaaatgcaagcatgttaaatcatcatcccacataatttacacaatatttcaatatatattcattattttttataatatgctatgtacctatatatttcatcctcacttacttgatgttatttctctcttctatcattcagttatatcatataattgtttttagtttttagatgattaatctacgatccaaactatttcaatactttccttctttcataaagtcatatcagcttacttttacatttgaatcatcattctatatatcatttaaatttaaattatcataaaagacgttaacttatataattttatgttgtctagttgtcttacatattatttttatttattattatcatacttaaactctcgcagcaacacgcggggtttcacaaagtttatataatgttcacctccaaaaaatctatcttaccttccttccgtaaaaacttgtgagcacgctagctttattaatgattttcacagcttcaaaataattatctgtgacttgctataatggcagtgtattgatcatttagaaatgtgatgcttcggggcaaaacaaagagagcttttattgtgtttacatttaaaaacaaattaaaaatctaacggtgcatagtaaaagtacttctagctaccacttaaaacataggaaattgctataaatacaacttgtatgtatgacttgtgtccgaccaacacttagctgctactcgctctggcccacatggaaagaagcagactcatatttggctgatgaggcaggtcggacaggagtaggacgatggggtcggacgtatagcgcgattcaaaaacatactctccatccgaagtccaagacctatttcttttagcaccacaaccaaaaagtaatagtaatgcgaagtgaccatagctggttaggtttctcatggtaaaatcaactcacctggatttaaatcttagatttaacataggtgttcgtatttacggctatttattctttcagttgtaggcgacgtacccgtcgacaatgagacacgtcacccgcgcgatctccgcttccacgcacacagccacactatccccgcgccccagcgcgtaatgacaccgccatagcgcctcccgactctcgacacctcctcacatgacatgtccccgccaccagccggcaggttgcgcctcactaagttgcactcgttggcactccgccgcacctccggtcttgtcgtaggctctccggacctcccattatattggagagatgaagggaataattcaagtcatcaaacaaacataataaaacatccgacgcctcaagagaagaatattagacattgcttggctaaaacattgctaggcctttagcctgccagtcaactcagcctgagatgtgcccgtcaaaccatttgaaggtggcgacaagatgtgttacacattcaggggacttgacaaaaatggctaaagatctacaacatctcaaatattcttaactcatactcatgtgaatctaattttcaggatgtgcactagattcacactttcatattaagcagagttatacatagcaaacacaaataagatggaagcgattataaactacatctactttagttacactggctgaccggccaaataaataatagaacagcagaagcttgtctacccaatccacaagcacaccgactaggggtttacccccattaagttcagatcctagaagaagcagtcgaaacccgcatcacttaaagactaagtctaaaacctgcaagcgaaaggttaattcaacggcaagagtcagtacattattagaaataatgtactggcaagcaccaagacaagcctaacaccctacttgtaaggcatataatcaaagaaggcataatatggttctttttagcataaagcaagttttatttgccatatgggcatcaaagtaggcattaatcatgtataaattaatatgcacctcattgtcatccatggcagcaaggagatcattctcaaatctcatcacaagttaaaagtaaatttcaatatttagaagaataaacacaagtctatactcaacacatatccacacggcgctcatgaccgtgagcatggctaatcgattagtttttactctgtagagtttacactttacccacatgatgcgaaataataatcatgcaagagcatggcacacgatacataagtacccgatttattacatgcaacaaagcttttccaaaatcatgatttagccttacaccagcacgatacgtgtcactccatcctaagccatacactttatatgacctagaaccgttaagtggcgggcccacgccttaaacttaatgccgtggtgacgaacacaacgggaacccaccacgtggcacaataccgttgtattggacagacttagtcacctaaactaccacgtcggtcggggtaaataggaagttcctttgagttatccgaactcatacacaccggcctaccagaatgtaaggctaaaccataaataatttactaagcttgggctatcccatactagcacatgtggttgtactgtatacgaaatgaactgacattgagtgaaatccttaggtcggtttgggcacactctccccctatcagtacacaactaatcacaatatgtgcaccacttttggcccaaacctaaaatccatgttttacatcattttatttatcaaaatcacaagtattaaagttttgtccagattatttcaaaatcatttttcatgtttgtaatgagcccataatgacaaggaagatcattctaagcatggctaagcattatagtaacctataatctagtaacatcaaaactcatatataaagtggtatagtcatattgttcctaaggttaggaaggagagatatggatatatgtggggttaagatgataatgcaaataataggagtttgtctaacaagtttaacaaaattttaatttattagtgtacaatcaacatgcaagatttgcaaatattttcaataaccttcaaaacataggttcaaagtgatcaaagagagggaggtgggaggtgggacttacattgtaactggaaaatatcagcacctaaatcacttcttcaccgattaagcagtcatctatacaaagtacacgttatacaatttaaacaccgaaatatgcgaaaaatccaaaatgctctaaaatgcatgatttgtgcacagtgggttggtattgatctaaaatgaatttaggtgaaagaatttctattttatctcatttcatttaagagttatgaattttagaagtttcatcggtatagtatatgatttacttaggtactattgtgaaatgctattgtaaggtgattcttattaagtttaggaattacttaagtttatgtttgctgagtgaagatatgggttttctaagactaatacatttggtttcacaatttttggagttaatataaattctttatgtatttttacaagttataacgtgttataggtgtatagtgttctatatgcacatgcctttggtatttgaagtccagaacttattctactttgagtgtgcttaaatgaagcaaataattttgttaactaatctatccttagttcacaagtttagggcctttattattttagttcgtattttataatctagaggggttctatatggatgactttataaatatcaacctaggaattattattatatgagctatgttcttctaagtttaagttttggtggatggggatggaactatggctccactggtctaacaagttttatttggatttatttagagctaccatgcatatatatacatattcatatgtattgtttaactactattatgtgtttagagctatggtctgaacagagggtgttatatttcactctactaggttgaagtatattacttgctggttttatagaaatttggttcacttcatttagactaaagatgaatttacttcatttagactaaagatgaattttctgcaaattttacaaattaaaggttgctctatgttggttattaattacataaatatttagaggcttttattacacattaggtgtataattttattttatactccctccattccataatataaggcgcaaccactttttttaatattccataatataatatatgtatgcatatagacaattaactatgaccacttctcgaataaattattacttttttaaatcctactctcatgctctctaattctattggatgcatgtattgtatttattaggatgatccaaataattattatcgaataattattttttggtctttgggtaaggggtggttatgccttatattttagaatggagggagtaacatggaattatatgtttggttgattctacagaacttgggtttactaaaaaggatctaagatgaattttatataaacttgtaaagttcagcttatgtaaaactagttattttatagataatagttttagagacatttgatgtaaagtgtgtatatgttttattttactttgtttttagagaacatgttggtggatctgttgaaactaaattttctctaaaatgaggtgaaatgaattttataagtttgtgtatgctttatgtatgacttatccaattttagagacaaagtctttactgagggtgccaagttttatgtttccacattaaagttcatagttttgtgaaccaaaataaattttaatcatctcaaaataagttatatttgattttatatggattttacaagtttaggtgttttcctgttaaaaagtaaaggattttagtattatcttttacattttcagatttttaaactcatggggttcacctgtcggtctcaggataatattgaaaaaggcccctatcgtttcaggaaatcaacccgcagtcctaggtctataggtcattgagtggaaacattacataatgaaccttatagttgttcaaattcgcaaaatgaagtccctgtttcttctccattcgataagcagcaaagcagccatgggcctctggccctctgctcgccggtgtcggcgacaaatggtgactccgttggggttgcgaccagaatagaaaatgaagggcatgctattgcgattccattcctatacatttctcgcatagcggacatcggagtagcgccagcggtgagtccgagcagaggatgttttcgggtggttgtgcatgtcgtgctatagactggatgtacccaaagggatgcatgcatgtatgttctataggctgcagggtactcaccgaagctcggacgaggtacgggtaggcctggacagcgacgacgatgcagaggatgtcccgtcagcggtgcgcaactccgcgaaaacggcgacggctcgatccactcatcgaagtgacatgcatatgtgtccatgaggtcagtgaggtcacagggatggtgtacgagcaaagaattgatgcgaggctcaccggagaggaagaaatcgaagatgaagctcggcggccggagttggggaagatgaagtcgatctccatccacggtgcataaatcttggggattcttgaggggttttggtcgtggtgatgagacgataacgatggcgcgatgtctcagttatatttgctccacagcaaccggaatcggcgacgagatctcgtggcggcggtgcactgtgtgcgctccggagctcccgcgggcgaggtcgcgttcccaccaaaccacttgcatgatagaggctgagattagaggggatg

SEQ ID NO: 44674 - DNA, 661 bp, Oryza sativa
ccccgaagcccagcctgtcagaaagcttgaacagcaaagcaggacgaaccatttgcgcatatagcaatagccaaggcagacgacctgaatcgagcgcgcaacatagacagaccagtgcctacgcatgaaaccaatttgttcattgacgtagttgagcgtgcaagacaagaaagactgccaatagactaaaaagcaagaaccctgaaattctaaatcacagaatgctcacaaaccacgacataatatactagcactgaaaacatgtggaacaacagcacgcatgcaacgacatccattgaacagcgaactacacaagacactatctaacatagttccttcacaaaatttttgacagaacaaacacacattgtaactctatgtgagcgtgtatatgcagaaaaagggacacatcgtaaacgagcacccagggtgcatgaacacaaaacgcaccccggacaacacgatttttcatctatagacttcaggaatgctctgaatttgtggagttttctgcacctcagctgacgatcatgggggaggctgcaaccccagcgaggcaagaggatgttgtccaggtggatggccacgcctcgacgacagcatagatcacacatgggcagaggaagctggggatagcatgatgggtctgctagctgcaagg

SEQ ID NO: 44675 - DNA, 1164 bp, Oryza sativa
cggtctgtatttatggatatttttgtttctgtactaatatggttcagctcttcaaatttttcgtattacatctattttaccgatataaatataaacagagttttataaattttatgattttttccgccattggatttgacgacttatttgatgttccattttgaaaagcataaccaaccagaatgttctgtgacacacaaaacaagaaaaaatattagcacatgtttaattgagtattaactattacaaacttgaataatctattgagtaaagtctatcacaggtccctaaacttatatcgttgtgtcattccggtccctacactcgtaaatcgaccgttcaggtcctcaaacttgtttgactgtgtcatcccggtccctaaacttgcagatcactcgtttaggtcctccaacttgttcagctatgtcaccccggtctctaaaattggatttgaatatcatctgggtcaaataggacggtctaaatactttatatttaaaaatagttcataactttttcatgtgaactctaatgaagataaactttatatcaaacttgtagccgcgacgcgatctacaactttatagttgaatttttttttattttaagtcattttttgtcccaaaatgtaattttaaaataaaattacaaaatctataaacatgcaacaatattttgcgaccctaaacagttttagttaaaaaacttttcaactacaaagttgtaggtcgcgaagggctacaattttaatataaagtttgtcttcattagagttaacatgaaaaagttatgaattattttttgatataaagtttttagaccgtcctgtttagggaccggggtggcacaactgaacaagttggaggacctaaacgagtgaactgcatgtttagggaccgggatgatacagtcgaacaagtttgaggacatgaacggtcgatttgcgagtttagggaccgggatgacacagcggtccaagtttagggaccggtgatggactttactctattttatatatatacaaagagtatactatttggcagtttgaattgagtgatagcaacaatcgagttgtatgcactttagaactcacagaacgataggcaactagggtcaatactagctacatcgatgctgtatgggtattaaatgcgacattttcat

SEQ ID NO: 44676 - DNA, 2763 bp, Oryza sativa
tatgtgtagttctattgattcggcttatgttctattgatttgtatgtgtatgaaactgtttgtagaaattgattttcacaagtggttgtcttaaggaactagactaaatttggagcaatcaatatatttttaagagaaaaatgtaataactctttcatatgaatgttatagctctcaacaaaatctacaattttatagttgaaagtctttttttagataatttagtggctaaaatatccgttataagctgttaaatctatttatagaaataactttcagtttttcagtctcaattctagagcttgatgagacctgttgaatattctttcagttgagattgtttgtgtgcccaagtatttgttacaagcttttacatctatgtttttgtaaatagggtaattctcgcatgtggtttgttaggaagtccaaactttgaaaattcatataaaattagttttaagtccaattgacatgaaccaaatattcttacaatattttctttgttatagtttttagtttctctgatgctaagttatataaggcaacttgacataactgaacaaacatatgaaaatattgtaggatcactgaaagaactttggttcaaatcaactaaacttaaaatgaattttctataattgtttggtcatctaaaaaagaatttcacaagcgaactgactacaaaattgcatgtgctatgttaatatttcaggcggcaggcggttctcctaacaatcctcctctaaaaatgtaaaaccattttaaagagtgtagattttgcttggttgagctatattagcatggtcgagaaaagactatagtatgctctttattaatgtggtttgcatgctcggctccatcggaggcttgcatggtcttttgggctagctgcccccaagctgcaccctagattggctacaggagtggcgatagaaaattgaggaagtgtcgtcgagaaaataaggagagagtagaaactccggtccaactgaaggagaaaatgataaaaaagaagaaacaataaagaagtctagtggaccccatatctaaagctacaatctttttggggcaaatcattatgctaaagtatactctttttgtaataatttggatctctgaataactttatttcaaatggttgttaaataaaaagtcgtaagatctatgaatatctagaacaaactttgatataaagtttatctttatttgaagtcatatatgaaaaatctaaaagtttattttctggtaatagatttataaggcatacatataggcatgtaaactatatatgcgaatgaaaaaagtcaccagctacaaaattatatcttatatatgttagagttaatgttattgtttaattattttagatgcatatttatggtgcatacatatgtatgacatgcacatgtatatgggtgagagaaacttttatctttagggaagtcagattaacttagaatccccatatgacatgtgtacgtgtatgccatatgcttgatatctaggtaccttagttgagtcctaggttgaattggtttgctagcaatgtatataaggtaatactgggtcaagtaattattaggtgatatggctaattagaagaatagaaaagcctgttgaaaatttgtgcctccccgagaaaatttgtcaagttattcttaatttgtttcatcatgacagcgtgcgtacattaattattgttcgggttgaatcaagctctaaatcttcgttccatatataagctctatcctttcttatgagatgtcccatttaagagtggctatatgtgagtaataagatgtcctatttaagtgtggatatatctaagtaccagttcagttcggttttcacgttttccgtgccagctgaagttacaaatatgggcctgctaatgcgcagatgggcgtgcgtttagtcgtctgcacagcacacactagtacttactgctacactgctactgctactataaaaatatatttttatatgtataaaaaaatatatacacgtatacaaagttcatatacgatgtatacatagtttatatgtgtggtatattaacatttgcatacgatgtatacaaactttatacacatgtactacatattaaaaatttgacaaaactagaaaatacatcacgtatacaaactttgtgtatatacgtatatatacacgtatacgaagtttgcatacgtatgcatacaaactttacatacacatatacaaactttatatcgtacgtataaaaaaagaaaaaaaagaaaaaccaaaaaaggtgaaaactaaagtaaaaaaaaaagaaaaaccgaaacggggacacgtgtcccctatcccagcgcgtcccgcccccgtctcgcgtgccacgtgccgcgccgcgctcgcgcggcggctgatcgctaaatagcgttcctgttacatgtaaaccatgtcgtgctggctggtctgatgagaaggccatgtctggttcatgatacgtgaccgaattacggccagcacgacatggccagttcgtatcatgatggccggttgtagtagtagtataattctccatatcgtgaccgaataaaaaaatcaattccccataagtcataactaatcaattaaaattgtcctgtattacattaattgcagaatgttgagctagctcacagtataatttcagtgagctatcaactaactcactaagggcttgcaattaacgctgggtttttttaatgcatacggacatttttgtgctagcatatatattagcgaaagattaataag

SEQ ID NO: 44677 - DNA, 1574 bp, Oryza sativa
tgtgaggactaagtgcctcttctgtaagtattttacgctttatttacgtttggaactgtttattacttgtcgttttgtgtaccctggctggtcctggacagggatttaatacacgaaatagtctggaaacttgggctaaatttctgggcgtgacaccggcctcccactgctggcgtcgcccatgcgccacggctcctcccaccggccgccgtcgcccgatccacggtctccaccaccgccgcctctctgcggtcgccatccccgccgtcatcggcctccgcagcccggcgcagctcgcccttaccgtcgccgtcgccatccccaccaccatcgccgtccccgtcgccagctgactcctcgccagatcaggcaggagcagcgcggatctagcaatcaccgtcgccaccgccctgagcggctccccagctgtctgagcacgaggtcagcgagaagcgagaagccccgccgccgctgtccttgcggccgcacggctttgccggcggccactcggggtggtggcgatgtggaggatgaaggtgggggagagggagcggtcgggtcgtcgcctcgcgagccacccctgggggagggcgacgtgagaggaaaatgtaggctcaagtgcgtaaaaagattttgtccagctctcaattaaccaggtaataaagagaacttgctccctgagcaattgtgtggcgtgatacatttctccagtctgatgacacccggattattaccctatctgcctatcaacccatagatcgaggcatgttaaaacattcgtggtatgttaataaataattgacaaaaaaggttatattttgttctaaggtttatcaagttaaaagaacttgttactattttctttatctttgatgagaatgtaaagtgagggtgtggtcatggtgcatgagtgacgaggggccgatcttggtttcaacgttgtagtaaagcattgcacattatggtaaagcattacacaaatataaagatttacaaatattcaagctaaaagttatagtaaagctttacacattagtaaaattggagtgaaaaaaataacatggtattaattttccatggcactatatgttcttaatttaattatttttagtaactataaaatataaaattgtgaaatatcgaggtcaagaacaatcaaaattgacaaactcaaaataaatggtagttgcaatggcatggatccaataaacccaaaaatatagggtcgatgcatcggctcaaatcgagccgatgcttcaagttgctccccggtgcacaaaaaatcatttgacaagaacaaaatcatccaaatcaaataccgatatcatttgattatgctatttaccataattttgaaacacaaaaatccaataaggacatcgactagaagaaatccccaaatcaactgctcactggaaaatccaatactcatctaggtcgttgccgtcgaggccaccaccggacccggtagccaaacactggcaggttgcccggaggaatatgtaggactgtggagggaatgtgttagcgaggcacagcttcgggcctccctgctttcaccgactggccgagga

SEQ ID NO: 44678 - DNA, 1882 bp, Oryza sativa
aaaaaaaattctccctgacaagtccgagtattaaatgcattgttaactggggttttctcctggttaaccaaagcaaatccttgatgccatttattagtgatttgaaacctaagggaagggaaaactccgggtgtgacaagcatgcacatattctcctatactacattaattatatttcgatgaaatccgtatccatgcagttatatgatgatcaatttgaaaaattctggactctattacatgatgttcaatttgggaaggaggaaatacctttttacatgccctaagtacaataatataagtggtctctggggcgatgaacattacaagttatgacaggacataaatgttggtggagttttcttaatctggtgagagcaactggaaggtatgactgcactacatcacccatatatattggggataactagggatcggtcgccccatccaaatcttcaaaaatcgggcgctgacgttatgctgacgtcaacgcccgatttatatgcaaaacaaattcaaactgatttttctcttaaattatttatccaaatcattatccgattgcaccattaaattcgttgcaattaaatcttcaaaacaagactacacatggatatattccgacaaaaatttttttagcttattattgattttttttcatgttgcacgatgttccaccaagtatatcggaattgtttcactgagtagatcgaaaatgtttcactcgtttaaatcgggtgttgtttcaccttatataaaaacattgtttcagcaaatagcgaaagaatatttcagttcactgcaacatttgatccatgcatagtgaaatattacgagtatactagatgaaacatttttcgatggaataaaaaataaaacgaattcacttaatagagggtttccaaaatatgtgggtttttttttgttgcaatggagtatctcaaaatcactgcaacattagatctataaatagtgaaacattgtacattaggtgaaatattttttgtggaacaaaaaataaacgaattctcttaatagggggtttccaaaatacgtgggtttttttgttgtaatggcgcgttccataatataaaaatccactacagcatttgatccatacatagtgaaacatcacgagtacactagctgaaacatcgtaaaactactggttggaaacattaaaagagaccatatgcaacattcaaaaaaatatcaataaaaaagctaaaaattttttttgtcgaaatataatcatgtgtggtcttgttgtaaagatttaattgtaacgaatttagtggtgcaatcggatcgtgaattagataaatagtttatgattaaaaaatcttttgaagaaatgagagatggaagcatgtagggaaagattctttgtatgcaaatggcagaccatgcagcgtctgatttttcttccctcccatcagacgcccgacaactagcattctccatatatattggcggttcacctagatcagacatttatgacagaaaaccttgatgtccaaaaaaactggtcaggcaccatctagactccgggtgaaacctctccatgggttggcctggtgctgcatcacccctagacggctagacctcggcagtggaacaaaccaatggttaggccattttggtggggagccgagatagctgtagtggactggatggtacgctactcgaaatagttctatgtgatgttacttttgcagttattgataatatattataaaaagaaattaacgatgaaagttttgaagaccgtgtaaaaaatcttagactttggacagagggagtaaaaggtttttttttttattgtgagctttatagacgaagcagaaaaaagattgttactaggatgacggcctcatcagat

SEQ ID NO: 44679 - DNA, 1980 bp, Oryza sativa
acaagagccacctggatttatattgatgttggacagcagattgcattttgtctctgcgaacaaaatatagaaagtgttggtaataacagggttgtaagttcttctattatttaatatatccaccctgttccgcaaaagaaaaataaacaaatataagaggtgttctatttttcacagggatggaggcagcccaaatatcagaaatgaaataaaattgaaaggaaatataggagaaaaatggctggcttgagaaaagccaataaaacggaagtataattatattgttcatgtttgtgccacgagagacaatatgccgtaaatgttgtgtacagataacagatagccaggtctaatattaatgaggatgccataatcaagccgatgtgtccagactatacatcatttttgtgcccaagacaaatacgcaacacatattcgtgtccagactatacatcatttttgtccagagtatacaaatacgtaagcagcataattgcttaaagcaacaaacctgattaattattattgattaaagactggacatatttgtgtccaatcatacatttatcatttttttgtttttgcttgtttcacgaggatttggatgtggtgagcattatatgtacgctgatatgtactttcagaacttctgcagatatgtacgcggccatttaaaaagtacatggtgtcagggtatagcacgtatatttcagttggcacaatgcatatatacgattagatcaacagctagcaacggttttgtatcactaccagaaactccattagccctgacgggccaaaatttttctgacgtgtatctattaggctgtcaggagtaaacaatttttttctgacgtgctttcggtaccgtcacgatatcatgaatttcgctggcgtggtttgcctgtcagaaaaaaattttaggttcagatggttctcctacagagaccacatacgttttcatacataaagactgaccggcctggttataagaaactatagcatatattattattattattattattattattattcaacatgcatcctatgatgcaagacctatgatgcacacaaccattacatgattaaatcaccaaatgcaaagcatgcacttactacaaggaaagttctgaaaggccgaaaaaaggcatgataaagaaatgaaatttccaatgctttggctgatctgcaaaaagaaaagccatagtgccaccaccaagactatcagtacatcagccatatatacaaactcaaataaactctactacgcaatcaactttcgcggacgagcccccgtccaaccttcaagtggaccgcatatcgtccgcctgtgataatagtgatcccaaagaaaaaataagacccatatgaaaaatcaatttttacagatgggcctattaagagacccatattcctccagcccactagtctggccccctcccttcttccttaaaatatctaagtcgtatcctcgcccctctctcctcatcctctccgccgcaccacctctactccactttttttttgagcaaaacctctcctccacttcaactacttctcctctcctctcacttcggaaggtggtggtaggctctcttgcagccaaggtggcacgtgtcgacgacgggcagtggtgatgaccaatgcgacagcggcggcaggaagagtccgctggatccaccggcagcaacgagggaaggtgcagatttggcaggctctttccctcccgcgtggatcacgccgcctcccctcccctctgcatggatccagaggtgcacttgatggcgacgagggggaatgatgactacaacaacgatgagtggagggtagatccgacgggctctcccccttccacgaggatctcgccacctcccctcccccacgcatggttctggtgatgcgctcgacgatcggttggggtaacgacgattccagtggcagcggggagagcccgccggatctgccggaaatagagga

SEQ ID NO: 44680 - DNA, 1586 bp, Oryza sativa
tgcatggatctgtcggtggcagcgatgggtggtgggacaccggggagggcgtcggccatggtgacaatgaacctagagcacgggaatgacagtagctgtgacggccgacatgcatgggagctaattagctgccgctttagccatcgtctccattcaccgttgccgccgtcaggatcgcaaggaggagcaaagcatgtcagccccatcgccaccgccgctcaccaccagaatgttgccgccgcccccgacccgaactgagccgccactccaaccttgccagcatctactattgcaccacccaccggtgagtcccctgcgccaatccgaacccaccatgccctagatcgccggccaccatctggtcccgtgccactcgcaaccagccatgaacccaacaccgccacatccgcgctgcttcagcctctgtctgccacgtcagccgcacatgtggtgaacccgatttagttcagccgttagatctaggatagatcggtcccttttaatctgagccgtcagatccatagactggctctgcgcacccggtctactgtggagccgatccatgtggatgcagtaatccgttttccaattcataaataattcattattgcgtcataaatgataaatattatctgacagtggtttaaatcctattgaacttaggaaatccataactaattaaccgtaactcggatttaggtggttcaagtctcgaaattcatctaaaatcgagatatatccaacaaaagtatccacatgtcatgtttatgctcgtttttgtactgttttgttgattgtattcatttgctttggctttcgacgttcccaaagaggctgtttatgctgaaggttcgaaagtcttcgcaggcctgcaaggtaagtcacacagatcctaaagctcccctttgggagggttgacctatatcctttgttatgaccctgttgacattccttacctttcctttgcaaatgggttaacaaattgattagctagaactctatgtggtttagctaaagctattaggatgcagtcctgcttagaaacattagcacactaatgggataacttatgttacactatcacttattcatgttcatttgacggtagctcacgatggtcagttgtgattggttaaaaactgaattttccaactaaaacctaataatggtgggttgtgagcacttggttttgatagtcatgctcatgacaattaaggaccggttcacaaggtactattgtgaatgtttaatcatactaaccacaagccagcgtgggaaacggctggacatgttgtatagcatggttcatcgtggagtgccagttagagaagtggccgagataagcccacgagggtcactggggaatccatacctgactaagggggtggctatgatccgggtatacggtgcaccactttgaattgtgttatgctagttttgttgtcaaagctcctttcaaggtactgtggtggtattgaggtgcatggcaacatgttgtgtggttctgtcttgtgtgtgcattggtacacctctgggcagagtaaaactattcgaatagccattcccgcggttatgggtgaacctaa

SEQ ID NO: 44681 - DNA, 644 bp, Oryza sativa
tttggatcaaagaccgcattatgtgcgtgtcggctatacacctcactagtagcaatcatgctgcctggctacacctagtccctctctcaagctcatgtgccgccttggctcagcctatatccactcctagctgtgcacaacctttcgctcccgcagcacctacgcgcatacaagcaagaggagatgccctcttcttttataggtgtttgctgctccatttcagttggcacttgcacatttgccaaaaagagatgtatcctacgtctctacagtattgtgccaacggatcacgccttcaagacacaaggttcttgcacccgaggtgtgtgcatgaccaaattgcttgcctgagttggcatggtcaaaataccttcctccggtacaatctgcatggagatggaggagaaatcgccaatcatatgtgaccatgccactgcctagagatttcaaaatatacatcatgctggaggtaagtacactcaggtatgtgaaagataaaataaggttcaccattccttttactcatacttatcttcatttgaatgagacttgatcatacatggttatgtttcttgtgtctatttgcatatgctctgttttagatgttcgtgcaagacatctataggctttttaaattaagcatg

SEQ ID NO: 44682 - DNA, 1308 bp, Oryza sativa
gcatgggaaatgaccaaaacaccctgcaaccaccataggggaggaatctaagccatccacgtggaagtagacggtgaacggccgcagaacgggttcggccgaacccaaaaagtgtcctcccggcctctcttttggccgataggttgcttaatgggcccccaataacctgcactatgttttggcccaattctaaatggtttttattgacttatggggcctccaattcatgtaaacatgtcctgaatgtagagaggtgcattttgtcgcatgacggatgtgttttccctcaaattacctgcatacacatatttcaccaacactagtggaaatgattagtaataatacctaccactaagttggataccatgttttatttcactatatgcaagcattgacggtcagatattatgatttaaggaccgtctacaatacccccacacttaacctttgctcgtcccgagtgaaggctatggactctacaatagagttatgacttccttactaataatcatgcaaacaaattattcaaagctatacctgtacttgtggatctttgtagtgtctaccatgcaatcctaagcaattaagaaatggaacaatcttgactcaagtcaccctaacttttcgtgaagaacaacttggggtttttcatgtaacacaaaattatagctttgctttgctcctccattgattctatcgatcactcaaggtgtatgattcctcacaaaggcatatgattgtgccttttcttttcctaccatctagtaaggcttatgtgaagctcagggtatggaaaagagtagagcattacttgcatcacatatattgcaaagtaaaataatggatccacggaaatacaagatatactttatggatcaagaatgtgcacgtgtatgtgtatggtgaatttgtgggtggaaaacggaaaataaaagtaactccttttgtatacctcctcctccatttattttctcttttgaaatttaggagagtacatggctatctttttttttctttttctttcttttttttttctcatcatcttgctccatacttgtatgagcacttcttttttcttttttcatagccatgcctcttatcttttttttaaagaactttggaggaagaggcataaatgatatggagtatttattttgtggaagatggatgaaatcgatgacaaatgaaagatgctaacttctagtgtagaagtcaagcattggtgggtgtatgtggaatttgtgtgatcttgaccatgaaagtatgaaaagtatttcactagggtcacaaaatttgacaacgctcaat

SEQ ID NO: 44683 - DNA, 677 bp, Oryza sativa
acgccataaccaaagcaagatcactccagaagtgacgagccatgacgaaccacacagggaaattgatgcggccaaacccaatgaatcgtcctctgttttatatagagcgtaggtttgcacaatttttactttggacatccattctatcttgagtttaatttgattaccaattctaaaatatcgaagataattgaactcaagctagggatggtacaattagaaatcatgatctccctgaaaaataacatgcatgcctattattcttagctcattacttgttgcttgtggtgatatttttaatagggatcccatgctatctaggtaattggtgaatgagatatagtctgatgatagaaatcctgctcttcatgttgcacacttgggaattttataaaaaaaaagaaaaaaaaataacgatgctaaactcctcattgatatttttattcccactagagccataggttgatcattcatgattagcttgctacatacgctgcttgtcattacattgagcgttgtcaagttttgtgaccctagtgaaatgcttttcatactctcatggtcaagatcacatacacttcacatacacgcacatatgcttgacttctacactggaagttagcatttctcatttaccattcatttcatccatagtccacaaaataaatacttcatgt

SEQ ID NO: 44684 - DNA, 1487 bp, Oryza sativa
ggaaaactttcatcttaccgccgatgcagtcccattattcaattctattgtttcatgattaaacaaacaataatagctagcacttgaagcttgctcactgcagagcacaaagataagttaggcaatatgatacatcatatcataggcatatgagacgaaacaccaatgaaataccaaggtatatacaagtctcattataaatacactggaaaaatgcacaacataattcatgaaaaaagatggataaaggacttaattcaaaaggatataattttaacaagattcaccctaacataattcatgaaaaatgagcagcatataaagtaccagatattagaactctctagagaaaacacagcttcattgcattagtgtatcgaggatatgtgcaaaagcttctcaaatttgagcaggatgaatcagactatccatcagactactcagatcagtagagccattacttggttagataaatctcagtgagtccatttattaggacagtttatgacctgcaagaaattaatatctcaatgaacttgcaatggtaaattactaaaaacaattgtagtggcaggttgggtcactagtacagatccttccatctgtgacggcccctaatatgactggaatgagtgggccgttataaggaagtaagctcaatagggccgaaaaagcacccgattaagatatggtcgcacagacatgctagatcggcataaaactagagcccgtcatgaatgacacttatctgtcacgggccatagtttaggcccgattgagatgatggttcaatatctcaatcgggctctaaaagtagcccgtcacagatgaccatcatctatgatgggcaccaactagaggcccgattgagataagtttaatgtccgtcacagatgacactcttttttgacgggcttttattaaggcccgatagagattacttatatgcccatcacggttgattgttttagggtcgttagagatatttgttgcatagtataaatacccccaaccacctaatgtaactgtatcctactgttcactattttggtgggaggatgtatggggcgattttttgtctttgtaccaaggaaaacagaaaattcccaaaagtaatcattaattcagcaatcaagtgagtaatactaatcattaattcagcaatttcatcacgtcttactttagcaatactgatcttataagatgtgtctctaatttatttttttattttgtagcaatggatcgaagttggatgtatgcgacaactatgaaacgtcattttccagagtatagaaatggcgtaataaattttatgaacgccgcggaggaggataggaaaagaagaaacaacgattacatgtgttgtccatgtgcagattgcaagaatgagaatatgtttgattcagcaggggttgtacacatccatctcagccaatgatcattcatggagggctgtacctgttgcgtgaagcaggcagagcaaccat

SEQ ID NO: 44685 - DNA, 765 bp, Oryza sativa
atataattgagtaacattcaaataaattaattaactagcttaactagtatacctgtcatccacaaactctatattgagagaactgtaccatccaggggttgattgatcggcctagatcgtcacacctcttgcatgtgcaactatagtacttgatttagggtcggggccatcatatatgggccaatcgtggacgacgatcagtccgaatgaagctggatgggttgatggtaccatattttcttggttgtggttctgtccagagtacacttggtccaagtacaactgcatggtaatctcgttttcacggagcacatgctttactaggttaacactgaaagaaaagctggccatattgttgggtgtaatggcaaggtgtaactaagaattgtgactctttcgattgtttgggctgtgtggagagatttgggggagggtcgggtatatttatagtgtggtagggctataatttattcattaattattaggggaggctaacaaagagcttcatcatttctcttacaagtatttaattcagaagaaaccactacgccagatcctcacacctctgacgggatacctgtgacgggcaaacgatttggtcactagtgaccattacctctgacgggtcagacgggataacgtcaccggtgagccatccggccgcggaccgtcacaggtatcccctcacctgtgacgggccgaaaggaaaacccgtcacaggtatactagtgacgagtttttcttccaacccgtcactggtatccc

SEQ ID NO: 44686 - DNA, 1098 bp, Oryza sativa
ccgcttctcgttcgatagatcggttgtacttgggataccccatacgcctgtcgcgcatggggtggagagccgcaaactctcttgctacgtgcgccataagggacaaatccacgtagtacaacccatcgatcgaacgattagcggagaaataaaaataacagaaaaagatctagcaagtttatcgttatccctatagaacgagattagatcagatcgatgttgacaatataccttggctgaagagcacctcatgctgataacttgttagaattcatgttgtcaacaatcgaacaagcacacacgaacacacggacacgaaagtggagggcaatcaactttattgatgtttttctctctgttacaagtcttactttgccctcaacctcactattgtatttatacccataataggatgtcctatatggatacatacatatatatatttggtataagcccacttcattaataaggaaacagaaggaagaggaggaggtaccgtgatcctcctataaatccgactcctttgggagatcggttttataacagttcattgcctctagcaatggaatgatggaaaaacagacaatggctcgccgaccagagcaaacgcactccatatttaaatacgcacgagtttatacgtactatcaactacctctatacctcatcagatctactagcaataacagcgcgttacgccgcacgtgattttatcaagctttggtgaaggaacctatatgatttatgagtttaagtagcatgtttcagttcatatataaaaaagtttgtcatatggttctcgtaataatttttttccgcaagattaataagaatgatgcaaacaggaggccaccagcccaccaattattcagcggtggataagatggcaatgaacataacatgcataaacattttttatagtagtataaaagagaacagaacaatattttacatggagtcgacgcgtatgtgtacaggatatgatatttatacggaggacattaggtacgatgcgtactgcagaacgcgatatctctacaacattagcattaaaacggtggtgataacatatagggatatggtgttttgctcatcagc

SEQ ID NO: 44687 - DNA, 943 bp, Oryza sativa
tatagtgattattgtcggttggcgcccatggttttttcccgcaagggttttccatgtaaaattcgtgtctccgttgtgcatctattttcataacggtgagtcaagtgagaggtcgatccagaggcagcgaaccaaatgggagtggatctggcggcaacgactttcacgtgtggcggtggcgggatggcagcagatggagcactggcgtcagcgccctactcccctcccctcccggatctggccggaggggaggaactaggcagtggtggctaccctactccctccccttgcctccctctttctgatttgcccggaggggaggtggccggtggcggcgcgacaacaatagatgggagagcggcggcggtccctccacttctctaccagatctggccaaaggggaggaggcgaacaatggtggcagcagtagagggagcagtggcagtggtggcgactggcaggtggctccgacggtagcaacagagaggtagctctggcggcagctcattctccaagatccccggcaagcttgtccatggctgctagggttgctagatgtgaaattttttatgtgtttgtttttcgggttctcttacagatgatttgatccatttgatgcacatttcgtgtttgatatgtggaaatggatagctgcatgcgtgttaatatttacaattttttttccccaaaatccatcttagcgtggtgaacatcgccttaggtagatgcctatatatgaaaaccattatcactggcagctgggctaggtttcccgctagtaaaaatgatctgccgttggtagttggcatccgctagtgaaaatagtgcatattcactggccattagtcactgacagcaacgccggccgcttgagaaaacttaaaatgaccgtcaggaaaattctattttatagttatgttttacaccactactagaaaaacgg

SEQ ID NO: 44688 - DNA, 3439 bp, Oryza sativa
tgccaaaatgatcgtcatctcacatcatgtggttcgattgtgccataaatgaaatacaaaaggttctcccattagtcgaaagagaagagcaaatacatagagcccttaggagagaaaaaaaaaaggttcatctacattatattgtaggagaaaataaataaaatacaataaatagcacataaaaagtaaggtggtaagattctttcaagtcagtcgtagtacaatcaatggctacagagaatcaatcgataagtcagtggttcatgagacaaacttttcataagtatcatatggaggcagttgcatacttcaataaaaaaaaataagaatgagtaaatttcacaaaaccacacattctttagccaaattatcacaaaattaaactacagatttaaggtgatgtatcacaaactacatatttaacactaaatttatcacagaactacagatttaaggtagagtactgcaaaactataatttagtaataaagttatcataaaaatatatattttggagtacatagcactagtgttatgtttgagttataaacgtctaagtttcgtgattaagttgacactaaatctgtagttttgtggttactttgttactaaatctatatagttttacgataccccacctatttgtagttctctgtgaaatttagtgttaaatatgtagttttataatacatcaccataaatctgtagttttgtgataatttgctcaaagtatctgtagttttgtgaaatttactctataagaattgatgatcgtagcaatcttatcttgcaaagttattattttggagatagcagagtaaattatttggaaggcagacgctagccgtgaaagcatcagttgcatcccatgtctctcttaacttgttggtcaacacatgaatgtacaaattaggatgagctctgaccttatccacatggggttgtgaagctaatggagaaccagcttcacggtccagatcaataaattatcttcagcactcctagaggtagtccgatttctcccaccaagctctaaacatgtctcagagctgggatttggtccgtgctttatcaggccggcccaagacatgatagcctagcacgctagaaattaaagcacggcccgtatatgggccgtgcctgggcctagacaacgggcatggcgggcagcacaaacgaaaaagctaatcggcgaacaatcgcacgcgccctccgccgcgcgactggacacgtgtcgcgcacggagggggtggctgacggcgcccgcgcgggattccttttttttttcatttctctttccttttttcggttatctttctgttttggttttcttcggttttgttcggtttctcttcctttttgttcggttctcgttctgtttggtttttttcccttttttttgtttctcttcctttttttggtttttttaagatatacgtatgcaaattttatattcatatgtataccaagttttgttttttttattcgtgttttttctctcggtttttaatatgtacatatacaaagtttgtatatatgcaaacttggtatacgcgtatacaaactttacatacgtgtataaaaagtttatatatatgtacgtacgggatgcaaggtttgtatacgcgtatacaaagtttgtatttgtacgtacgtataaaaacctaaaaaaaatacacgtatataaattttataaatgtgtatataaactttgtatacatgtataaaaaattggtatatgtacgtataaaaactaaaaaatacacgtatacaaagtttgtatttgtacgtatataaagtttgcatacatacatattaaaaacagaaaaagatatggaaagaaagaaaacagaaaaaaaacgaaacggaaggtacggaagaaaaacagaaaaaaccaaaaaaaaaaagagaaaccgaaaaaaaacaaaaaaaaaagggaaaagcgggcactcccaagaaaagagaaacaaaacgcaggcgctccaagcgacgcaccatccaccgccctagtagtagagaggagagactagacgggttataactgaccgcgcgccgtgcagagggcgcgactgatcgcccattagtgctccccggcacaacacgaccagtgggctatgggccggcacagcacatgaacaacccataggcacgacgaaggcccaatgggcttcgcaatagccatcaggcctggccgggcgcatcaaggagcgacgcatgcttctacatactcatcgtgtgaaacgcgcctccaccaccacgcacgctcggcctgcatcctgcacccgcgcacattgcatatctttccgtgccccggcaacaagctcggcactgcaagtctgcagcgcatcaaagcatctctgtctgcccgtcccacgcgtatacgagtctacgtctctacaagacgctcagagcatctcctgcaaagctgcgacggtgtcccgcgattcccttccgcattggcgcaatgaatcaaagcgtccgtcaactgcgctaccactagtccactgctgtcactgcaaggtcgactggtcgagtaccgaggacagggacggccgaacggatgcagacgcgcggcgctgggcaccacttgtgatttaccgctggaaaaacgaagagctcggactagtactaggactaggtagtaggtagtatgaaggactgggaaggctgggtacctgtgattcccttgcttggttgatcctgtcctgccccgctgctgtccgtctgcatcctgccatcgccattcgccgcctcgccacgaccgcacgaccgcacgacgccgcggatgtgtgaagaaaggctggcgcctgcctcggattgagatggagatgggacgacttgagtttagaccatgccacaccggcgcgaaggacatatacgccgggtcgcctggtgtagcagtgcaggcgtagacgagtagagggccagacctccagttgccagaggcagagtggcagagaagctgcatgggcatggtgaggcgattggctgcgccatgtgcctctgtggagcccgtaggcagcaaatgtgttgtgtgttgtgtgcaagagcaacgagaaacaactagctcatgagggcaatttgttttataaattcctcctcctcttcttcttcctatcataaaagaaaaatgcaccacaaataaacagagcaacatagttatttcctttccacagcaaaaatgtggggcgatactcgtcggaggtcaacctcgtcgagaccctcgcaaaggcgccgccaatgctcgcctggtccttcccgtaggtcggtcgatgcccgccaactatctcctggtatggatgactatgggatggataaccgccatatggatggtctggagggagatggggatgatcctacggaacagtccatcatcgaggccaatgacgacacggtcttgtctttgccgggaggcaaggccgagccatccacaccatctg

SEQ ID NO: 44689 - DNA, 951 bp, Oryza sativa
gatgggcaaaagcaaaaaatttcagaggatgatccgaaatgctttttgtccacagtacacccaagtttcaaggaaaactaccaagaacaatattgttgtgttatatcgttctaggttggatgagttgaaatgctcattcagtactgttagctttcctttttctgtgacatatgacatttggatatccaagcaccaaagaacctcttatcttagtgttgtacttgatgtactacaagaattcaatttagaatctagggtggtttctattactcttgacaatgcatcagcaaatacaacggccatgacgattttggagacaaatttgtaaagctacattggaggttatgttatccatcatagatgcatctgccacatcatcaacctgactgtgcaagcatgtattaggagtcgttgagaatttattgatttttttagtgtaaataatttatcaattttaatgcatctatgacaaggaatttattgtctatgcaggattactgttgttactaatttactcaacaagatccattaagctgtttttattgttggggatcagctagtgatgaaggagatgttccaagactattgccgagcaaagaataaacttgtgaggatgtttggcattgatgtgaaacataggtggaacacaacatacctcatgctacatcaactgaaagggtatgagaaaataatttctgttttcatcgattcattgcactttagaagtaatgatactgatgaggatggtgatggtgagattttgtttcttactaagggagaatgggacatagcaacacgtctgcatatatttctaaagcctttttataaaactacagtcctactatctagaatttactatcctacttctttgtaaggtgcttgaatgtatttggaaattgtcctttgtgtttcaagaaaaccgacatgacagagttttagcttatgttgttc

SEQ ID NO: 44690 - DNA, 651 bp, Oryza sativa
attgctttgttactgtgaataattaggatcatgatgcatttgtctataagcaaggtgctataaaattgtactttttgaactagccataaaacttcaaaacaatcatgactttgtaaaaataaacaagtaatttcagataatatctatttcatgcgtttgttttggcaaactatgctgatttggccagaggataaaaagtttcaacaaataacatacatgggacctatttggggtagcttatagctgctgcagcccccaaacagtccagattgttacccagattctgagaatctgtaattgtagaatccggaactagaatccagaagctggaaaacccagcttctccagattctcggaagctagctactaaccagcagattcttagaatcttaagctcccccaaatagggccatggactgctcttatttatttttatatcttaagttgtcttctcattcctgaatcaggagatccaactgaatctctaatcgaacgtaactgttgtgccaactctatttagcatgaaaacctaccatggtagtttcgtatgacatgcaaatttaatctgatagtgttttttctttgtcagataaagaacttgatgtgattgaaatggctgtctatggggatgtcatccgtcctggaaagcaa

SEQ ID NO: 44691 - DNA, 1780 bp, Oryza sativa
cagtgtagaagcttagcttaattttatatgtggaaatggaaagtggaaatgaaaatgaccccttgatcatgagagtatgaaagatatctaacacaagtcacacaaatttgacaaagttcaatataatgtcaagcagtcatatgcatgataaggttgatcaatgatatacttacatatggccttggtaggtataagataaagtcaattggaggatggagcttttaaaacaattttatttttgaaaataaattcccaagagtcataacaaagttgcaaggattcctttcatcttaatcatctctcataaagcaatcatttagatgtataaggttccctaatcatggatggttgttcacaagcagaagttcagctgagaataatgaatatacaagatcggtcacatgaagaatttcattagttggaaattttatcttacacttatgctcgaaccagttgttttctgaattttcagctctagtactataccatggtggagatatatagataaagaacgtgctcacctgcttacctgtgaaaattgagagggattggggccagctttggttcggctgaacctggtggtttggccgaaccactctggtgcctgatccctctgcaattttctgcagagttcagtgccttccaggttgttggtatttcttaacaacattactagaaatataattctcagcaatggtgcagaaatacttttggtatattatggttacagagttcatccgcaagcgtacggatataccattttagcatttcacccgagagtattccaagggtatcgtatttattttatctcatgggaagataatgcagagagaactcaactaataatttatatattacttgtgataatcatattctaagaaggggttaagataatccagggtagagtgacacacaagcatttctactcatcctcataataaataatctaagctaggtggaaagaaaagagaaaagaaatctatccctatacttctaatatacatagtatacatacattctagttaactgatatactagctaataccctctatccgatgccctcctggtacttcgagaagccacccctgactgccgagttccatacgacagctcgtcatgaccatccaaccggggctaaatacagaggaataccctccccaggaaattaacttaggattatatataggcgcggaggaatatccgtactgagctgtcaccatcagcggcccacctctcatccgcaatatataaccccaaataatgatatcccgtaatctagacaccacgtctaaactaccagatactactctaatatcatcgtcatgacatagagtaattgcataagcaaacactatacccgcaccaaagcatctcccagataagctagccgtatattcagtataacaagaacataatgtaaagtaggtactcatatactcggaaagtatttcaataccataaatgtatatataagagtatactaataaaagtacaaagcttacaaaagaggaaaggaaagctactagagccatacccgaactctttcgaaggcttctggactcttgattcctattctaattctattccaccagctagatactaccaaactaaacttgagaggaatgagagagctcttgcttaaggtgtgtgttgaagtgaagcgagtgaactccttttatagctgaactatgatggttgtgacggttggaatggtcggtaataccctccaacagtcattggggcttcatctcaaccgtccagccaaaacctggatccaacg

SEQ ID NO: 44692 - DNA, 1363 bp, Oryza sativa
agacccatcggccggtggcctggtcggttgcgaagcaaccacaatagccgttgacgcctccacgttcggttgcgaagcaaccacaatagcctgtgatgccggaggagaggccttatcctcatctcgtttcgcactatctgccatcgttctatattataggaatgacaataaaaattatttaatgtgcgtacatataaaagaatttgaatttattactaactcaaagtcatataaaaaaattaaaaatatctaccactcggacaatgtcatataaccgaaatctcatatcaaagcaccatcatttagcattaacagaaatgtcatataaaagcactatctaaatgtcatatcaaagcaccatcgtttagcattaacgaaaatgtcatataaaagcactatctaaatgtcatatcaaccgaaatggcccgaaaatgtcatataaaagcactatctactcggacaatgtcatatgaaagcatataacgaaaatgtcatatacaagcatttactgaaagtcatataaaaaaattgaaaatatcttcccaacatgttatttaattaaaattgaacgaaacgaaaccgacatttcctacattcaacacattcatcctgcatacaaaattcacccttatatatcacaaacaaaacccacatttccccattcacatgtatgagcacatagcacatagccacatctcatccaaaaaaaaaacaaacccggccccacatgtcagccactatcatcacacacacatatatatgccacacacacatgcacagagtcgtggatgaggagtcggggatgacgacgatcggccgagttgcgcggagagatggtggcggccggccggaggagaggaggcgcgccggccggagattgatggaggcggcggccggaggagaggcggcatgaggttggagtggacggcggccgcgagcttcgagtggacacggcggcggccggcccgggcgtagctaggaggccgcgccggccggaggagaggcggcgctagccgcgggtggcggcgctggaggacgaggcggcgctggccggggaggaggccgcgccggcccggccggatggagaggtcgcggcgtgcggcccggctcgaggagatgggcggcgccggcggccaaacggttacgaggcggcgcccagcggtggtggcctagcaggcggtcggcgccggcaagggaggcggcggtcggaggagaggcggcggtcggatgagagccggcggtcggaagcaccaaaaatttcggtagcctaacggcgccaaattttctagggttcccgcctggactttgagaatttggcgccggggtggtcgcgcttttataggcctcctatcttcgcaggcgg

SEQ ID NO: 44693 - DNA, 685 bp, Oryza sativa
ccgcttccgcaataaaccacccgggcaccgattccaccgtgaacccgagctccaccgccactttgccgactccggcagcgcgccaccgccgccctagccaccaccaagccacgccaccgcctctactgcgttcgccgcgctcccccgtaccccggccgctcctccaccttcgttggagaccgctgaatcgccgccgtcgtcttcgccccgtggagcgccaccgcctccctccgcggccgctccctccgtcgccgcgtccttggtgagcccctcctctccctccttgcatccctcctctgtctcccatgcgcgctgccgcgccggtggccgccgccggcgtccacctggccgtgcgctgccgccccgctcgcctgggccgcccggacccccccttgtcgcgtcgcgtcgatctcccgtgcgtgccgcctctcccgcgccgcccgtcggtcgccgtcgccggagaccgcgccaccgccgcgccatggctcagctaggccggctttgtgccgtgcccgtgtgtcacgcccggaatttctatccaaaattccaaacgcttacatgtgtgtgaaccctcgtccaggaatcagccgaggcacacaataacaaattgataatagagtacaattattactctaattaataagcgaataaaatgtcattacagaggtagatagttcctctcaat

SEQ ID NO: 44694 - DNA, 682 bp, Oryza sativa
tccacttggcttatcctacagtcaacctggctctgataccagcttgtcgcgaccgagaaaatttgcattttcccgaacgctagtgtattaatccccgtcccaggaaaagccggggtacaccatacaaacatgatacaaaaggcacatctttattatatcgataatatttacattattacaaaggcacttcaggcctaacagacaaaaataaacagcagcagactagcgggcctacggctccatcttcacaggcactcaactggggtataagctaggactccacctaagacttcttctccaaagcttctcttactgaagggggcaaagatagagaaagaatgagtacaaccacagtactcagcaagccacaccggcagatgcatgattaatgcaagggggtacaaggggtaataatataggggttaaattttgcagtaaacagcatttaaaagacacttagttgctcaaagctactttgtaaacacgatcctaaagctacacaatattattatacaaggccgtgaacccacacgaacctgccttaacccaaggcctacgatgattcagaccgaactggcaacccgaccctgggtcccagctcgtcccaagccaacccaggccaaccattccacattttagttgttaagcaaattttaagaagtaaaccactaacttgggtaca

SEQ ID NO: 44695 - DNA, 1267 bp, Oryza sativa
aagaaagttttcaaattgacgagtgagtcctcaagttcaattcacaatggaggtagatcagggtcggaaacaaatcaattgctaacatacaaaggagacacatatcacctatcaaggtgcacggtgcgtatattactaattactcctttagcatgttcatgaaaatttacctccgccctgtatgagttgtgcttaaacgaaaatttggtgaataataaaaaaaaattgaaaaaaatatgtttcagaataaaaggattgtctctcgaaaaataaaataaaacgatggcaaatttgtgggatccacgcttcttatgttttgaatccgatttctttttagcatggatgtgaacaattaatcttgaggctacaataaaatcatttcaaatcttcacagtgcttcgagtatttgttgtccactaaccttttgcaggaaataaaaagacgatcaaggagcagtgtacagtaacttcaacacttatatcacgctccttattgttggtattccttacgaccacagataaatccgcaagcgcacagaataccgctgtagcacttcaccttcgggtgaccccaaaaggatatcgaacgcagggaacgtatgtaatctacctaaggctaagactatccaaggccaacaactgatgataggtaggctaggctagagaggactttctatatttcttaattatctaagctaagcaaaggtaatttcctatctattgcttcgggcacaaacccctgctggtctgcaagcgtggttccgattatagctctatgatgtatccgaacgtggaggattactgggacggaatttagggctgtcaccacctgtcgcctacctctgacaaatacgtgggatacacaacaaacaaaggtaatctctaacctagacaccacgtctaagttactaattactactctaatactcgtacaggaacttccttctttatccagagtcctagtactagagcacttagcatgaatactaaacaatgaacccgcaaagatggaaatatatcttactcagactaaataattaaataacataagaaaagaacacgaatgcttactttatagaagaagttctccgaacccggagcagagtgtaccgacagctccggtactcctccagaattcctcttaggaagctacactcgtcgagggagaagtcggatgagcgccaaacttccgggcactcctccagagcttcccctcactctctactttattcgaatgtacaaaagatacaatagagcctcttataatt

SEQ ID NO: 44696 - DNA, 554 bp, Oryza sativa
ctgcaaatttcgtcatattgttactgtaaaaagtgtagtaacaacctataaagtttgcagtaccaacctatacatttttgcactaacatatgatgttactatccttctgggataatgttactgctgaatcatagtaacaaggtatgattgttacaggtacataactgatttgttcacaaatcattatatggtaatttgattagaagtgcttgccatgaaccatgagatcatgggttcaagtcttgtattcaccaatttatttttattttgcctaaaatagagaggagggagagaagaaaaatttatttttatttttcctaaaaaagagagaagaaggagggagagaagaaaaaagaagaaaaggagagattgggggatgagagattgagacttcgggagggacagatggaaggtgggagaggggcgtagaatagttattctaaggaaggggtgtataatagagctactctctatatacacacacgtacatataggtctaagcatatatgaaccaaagttcatatgctccatgaatctcaacctttggtcggttc

SEQ ID NO: 44697 - DNA, 995 bp, Oryza sativa
tgatggtgctggaggggatgaaaagggtagcgctggcatcgatggcgtgatcagagcaggtggagctgacgacgtgggtggcggtgtgctcaggagtgttggagcagcgacagagagcagtggctgactagccgggggctagcagtcaagccggcggatgcaatggtgatgaagcgggtgagaaggtgatagaggcggtggcggtagcgcgttttgaggatgatggcagtgcaaagatggccggtgtgctttttgtcggcatagcagttgccagttggcatcagtgtcgcacatgtagaacaagttaggcgtcagccccatagaaatggtccaatgaggacactttgggtatttaaaagaattggataaggctaacggagttggatggacggaactccaacggtaatggacagatagaatatttcctagctgtgtgattaatttgtttgtttggtaaacatggatcgaatttcaaagtataaacttaataataaatgactaacttcttcagggctgaccaaacataatagatgaagaaattccaaattagtcagaatactatataggaatacattctttgcacgcaagaagatgcttattcctttgtagttaagttacatgcatgatatattttggtgaccatgtgttaggctaagatttagatgttgtgagtttggaaactcacaggccaatgtacagccagccggaccgctgtcaagctaggaaatgcccaaattccaacttgtttgtttggtttagtgatgaattatttgtacaagtaacatataactgaatgacgtcgtacgtagtacgccaaataacatattcagtaggtatgttaattggttagatgggtacagaataaaattttaagtgcaaattatggttgagctttcagtttttctattggtcaatttggctataccaaatgagatactcgtattatcaggcaaatataaaactttccaatcctacgtagtgtattatatcaacag

SEQ ID NO: 44698 - DNA, 591 bp, Oryza sativa
ttatcgcagaagtgcttaacatggtacgttactgcgaaatgtataagtcgttactacgaaatttataggtcgttactacactttttgcagtaacatcatgacgaattacagtaacagagaacatatgctagtaacgggtactactacagtaccactgcttgtgcatagctaaatttttaaatctcaatcttgtgcaaagtacaagtgctaaaaagtacttctctttgtccatacaaagatacatagtagcaagcttagtacaagtaaacttttagaattctaatctttaaacaataatatctctcacatcgcaattattttttagaaccgttttcaccataatgctttaaaacaacgttacaacgagacaatagtcctgttactacacgatgatcgagacaataatgcttttataacgttgttactgtggaaagtagttgtgttactgcacattgatcatcgcgttctacgccgttctaaagagacgagaagttaaaacaagtaaatctcaatctttagagagcaatatgtctcacgttatatagaatttttctaatccatctgcaccatgatgttcgtaaaaaaatgctt

SEQ ID NO: 44699 - DNA, 1380 bp, Oryza sativa
ccataatataaaaggaaacgtaatacccaaggcatgatctgttacatattccatagatataagctatcccctatgactagtcggataaccatgtcgtgtgggtatggggtacccataatctccacagtagcccctgagaccttcatagtcgaaaagataatcttctctcgaactagattactctaaagccgagtgcttcattcatcttcaccatgatctcccgagtaatttaccaaatccgaagactgtggagggctgagaaataaagtcaggtgcatcgactagatgcacctaataggtgtagcccctgactatatggttagctgaacaaactaagcatatagtcaaggaataaataatccaaccaaccgagtggttttgataattgtaatcgaccaagtgacttgatatcaatatatagcatatgcggtgtgaatccccgaataacatgatccaagtgatataccgactgcttggtaaaaattgatgcgagcaacctaaagttgactaaatcattgaaaatacacatagcaaaacagctataaaaaagcttggatgctgtgaataaagaaattttcaaagtattaggcatacgccatgcgcacaccgctttaacagatgtgcttaagtccctaaaagacacatggttccaccacacctggaaatatatggcatatgtggtataaaatccgagtaaataaactcataaaggatttaacaaccgcctggaaaatgaccaaaatatataatcagcctaagccataatattggtcaataaaaatgcacacttacatggcaaaaagcaatgatattgtatccaatcaattgcttggtaaacccaaacagcaccatgactatataaaaaagtctgcgtggcagctatataaagatttactgttcgacaccttttaagatgcattgtaccaactcctaaaaagttgagtaactacggtataaaaggattttaaggtattgggcacttgatcacacgcactttggcctaagcaaaaagtgcctaagtccctaaaagaacgtgacaagccacacctgaaaatgtgggctgcagacatattaggcctaggccaaaaaatatgccttcgacaccctttaaaggatgacgcatgtaacatgctcccgagtaattaatcttccgggtgatatagaccaagtgtagctcatatgaatagcttctgatctgagtgattatcccttatgggatattccaaaatagatataataattgaatcccgactggcgcaagtattctgttgataacccttatggggaataataaatagtgcagtctttgagcatagaaaataaactcatgactataaatccatgttgaatgtatccgaaacaagtccaaattaaaggtat

SEQ ID NO: 44700 - DNA, 646 bp, Oryza sativa
taaaacatatatgaacccgcttaaaaacatattcatgtattttataaaaaaatagcttatacttaattaatcatgtgtgaataaacccatcctttctctatgcagagggaatgagttcccgaccgacagaatcgaacgcatccaaacataggtgcctgcacggatgcacccttacgttgacaaggcgtcggtacagtgcagatatatcatcacacaaagcgaggatcaatttatttgatgttcttcataccgggtcccaatagaggcgtttattctgttgagcctacatgacgtgatgaccttggcatactaaaaacactgcaattatttttgctgcaaattatttggctgcacaaaggtctagaaattaaactgagacccatcatttgcactgatggaatctcggcgccgagctagacaatactttcatcagactacatttcctaaggctctatatatatatatatatatatatatatatatgtatatatatatatagaatcacctgtcttgaaacgacataaacgtcgaccctgatgtatatgattacgagtgtttaacaccctatacaaactacatagatgggtacaacccgtctacagccactatatatatatataagaggtacatccttggtttttatatg

SEQ ID NO: 44701 - DNA, 504 bp, Oryza sativa
acggccggccggccagcgccgcgggcgtcgcgtcacaccacgagcgcgcgcacagtacacggaatacaagacgcccgtacgtacagccgcgcagctacagtcccccgtcacgttgggctcgctcgctcgcgcgcggcctgtgcactaacggcgtacgtcgactctggtgtacgtacgtggtggagaggccggccaccgggcacgtctcgccgtaagctagcgtataccggtatacgtcgatcgatcggcgcgctgcgcggcgcagcgcgcgtggagtcaaacttccccgcgcctgcacgtgcgccattagctatctaagccggtcaagcgcgctcgcccaaatcggcaaacaacccggcggaacccgatcgacgtcgacgcgcgcttgtcaccgagccgtgtaccgctccgccggccacacgtggcgtggcccgtcggcatcgcaccgtacgtggaggcgaagcatcgatcgccgcctacagagactcctccggcccgggccgc

SEQ ID NO: 44702 - DNA, 672 bp, Oryza sativa
acaaacatcacatagaggcctgccggaaccatatgtgccgatttgcttaacatcggagcctattaggtgtttcctgcttaccgaatcttttttttttctcgaacactctccttaccaaatccatttgggcgggatgcaattaaggccctgtttgggacagcttaagattctgattctgagaatctgctggttggtagccaatttctagagaagcttggtttttcaacttttgggttataattcatttccagattaagtaactacagattcctagaatctaggtgataatctggactgtttggtggagctagagattctgagagaagctgcagtagctagaaactcccccaaacaaacccttcaatacaaaagtagtatttgggcgggataaaaattaagaacctgcctgtaagatcccctccccaacagtcctcaattctcaataagtttcggataatatgtaagaatcggcacctagaacaaaactcctaataggtaccggctcataggtgccagctcatttaaagccggcacctattgatcatttcccacctccgcgggatggaaaaaaatatagaactagctccatggagcagatacagatgcttattctaaataaaaaccagtacctatagtatgagcgactacccgacgcctaccttatctacttga

SEQ ID NO: 44703 - DNA, 754 bp, Oryza sativa
catcattacaatctggcaggtgaagcgtgcacagggccgccaatgaaaaaaaaatggtgccgctatgaaaaatcgatttttagtagtgaaaggttccaagcacagttccatggcaaaagatttggtgatgcagaatatttcttatataaaacaatttaactctctggaagttccatgcatcaaatcttttctacccactaacatgcaaaatagtttgcatattgtcgtaaaaagatgttttcaagcatgcaaacgttaattatattgattaaaaatagaaaatatttgttatactacatgaatctgcccaaccaaacagcccataactaatctaacaacattggagaagcgatcatgaggctcaatctgctgatgttccaatctaaacggactactccctccatctacttttgatagttatatttccaaatctgaaaaatttatttatgataggcatatttcaatccaacaacctatcatcttaatgattttctcggatttaacatgtgactcttcattcttccacacatgattggctacatggacattgagaaatgtaaatattaatgaatcgcttgtttacgaggaatgactagtagcatgtttaaatagatgataagtagaattacttatccttgttctgtgtgccaagatgaaatatgaccatcaaaagtagatggagggagtactacaaaacccctgataggtactgattcatttaaaacaggtgggatggaacagtatagaaccggaa

SEQ ID NO: 44704 - DNA, 960 bp, Oryza sativa
gtagccacgttgtttccacgtgtccagcccgcgtggaatctagtggagtcggttgtcggccactcgcctcggttgacacacggggtccgcttccgtcgacccgtggaccgtctctgtgtactcggtctaccgcggtcctttagattcacatgtggggtgtgcatgtcaacggcgcagccttcctgtctttttctggctagcgcttacacatgttttatagttgcaaaacctaattataataatccgcaaatctccatataacagcattaaacttcggatgaccatgtcttggtcatacgaactctgaatcgacccgttcaagtctcctaatgtttgttataacctaaagaaccctgtgctttctttttatgtattgttattgcttctttatatgcttgtagctttgcttgtgtgcttcgagtagcttctgtcgttccggaggttctcgaggcgtgggtcgtggtcgtcgccgaaggtttggaaggccgttgtctctgagcaaggcaagtcacatcatccttgagcatattgaatcccagtttataaaattattttgatttaaattaatgcactgtcgatttatttaaattcccgcgttatcactgttttatttagccatgcctatttacctttgttatgaccttattattattgctattgttattattaccttgtttaccctaggataaaaaaaaccccaactagtgggtactctattcatggttccactagtatgaatttaggtagatgcttcgctgattaattaggaaccattaggtggttttataactttagactttgggaattctcatatcacttggacactatggaatggttggcttatggtggaattggacatactcctctcttcctctttcaaaacccctaaaacctattttccggtggggtttgggtgcatgccagttgtgggaagtagcaccccggccaatataaggatta

SEQ ID NO: 44705 - DNA, 691 bp, Oryza sativa
cctgtctctagttctggtctatctttcctggcttgtttcctctctcacctcaatccctgtcatagatgtttaacagagaaaaatgaaagaatgtcagggggtatgcctccagtaactcaagttttcaactcaatccaccactagcctgaagagagttaacaagggcacacccttggtccattccgagcatgctgcatggttcacagctaccattggttggaagtcaagaccaaaatcagtatgtgtttgatcgagcatttgccacccaggtcaatgagcttccaatgccagaagatgatgtccccttttgtcaggattgtagagagcaaggacactatgccctgaattgttcatgggtatatgccaaagaagccccttcctttggtttagcagggcagacatcgctaaaccagcctcctcgcaccaagtcaagcttgcagcctagtgtgcaaagtagagagtccaatggagagaatccattgaatcccgggaaatgctttcctcctagcctttcgtaccacgtggggtcacgtgctaaacaagccaaaggcaagaagagtaagaatcgaaaagaaaagcaccgatgcgaactgaagaagaagtacgtaagatgacttttaccagcaccgaatggcctccagcagggataactcttcctagacgtcaaagaggaaatacctttcaggctgca

SEQ ID NO: 44706 - DNA, 723 bp, Oryza sativa
cgccgatgaaccattcgaacttgcgaaacaattcgagcagatattctacataaacgatccttcaaacaagaagatgcacatcgtaagggatggcaagcgccgaattgtcggagttgacaacgtcgttgatgaagaagaatacaaccagaatcttcttgtaagacctcatatcgaccttaacgaagatccccaagaggctgtggaatatgctcgttcagatcaaacgtaaggcataaccttgtgaccgatgcctttgtacttatctattgtaatgaatggagtattttgttttattagaaagacttgatatgtgtaatcatttatatggccaatttagttgattattttgactaatatgatgaattattatactgtagtgaattattttgctacaggtgaagtaacaaatataaacatctcatatgaaaaatggaaaaatagtcaagcgggacgggctttggttaagctccgatagagacaaagtcatcacaaacgggcattcgtaaatcccgtaagtcatgagtcatctcaatcgggcattagcatagagcccgtcacgacatttacgtccgtcactgatgactcatctatgacgggcgttaaactaatgcccgattgagataaattaatctctatcgggctataactaacgccagtcacagatgacatttttttccatttttcgaatgaagtctttatattagttagtgccaaatgattagc

SEQ ID NO: 44707 - DNA, 645 bp, Oryza sativa
ttgtatatgcatgtatttctgtcatttttgcagtgggcatggctagcaaaggctagaggctagccaaaaaacaaaatttattttttgtgaattatactcatatgtgactggccataacttagtgccagattgagatgagggtcatctatgacgggatgtagttaatgcctgattgagatgatggtcatctgtggcgggctatagtttaggcccaattgagatgagtatcatatgtgacgtgctctagtttaggcccgattgagattagtagtcatctgtggcgggtgctatttgtggcccaattgagatagatcatccgtgacgggctatagtttaactggtagtctgggtcaaagctatcggtgacgggttttaattagggcccaattgagataggttcatccgtgacggccgtttgtccgattgagataactgttcacatctgtgacttctagcctctaacggacgccgtgcccgattgagatggggcttaccgcccgattgatatgatggtatccgttctagtgtgttaccgattttgtttgggaaaaaagatttcatagccaaagtgttgaaaggcttgaagagctcatattaagaaaactgagattgccgcagccatccatcaaatttgagatccaatag

SEQ ID NO: 44708 - DNA, 663 bp, Oryza sativa
cgcattctaaaagaggtatggaataatggcacaaccaaacaatggcagatgtctaattctttggcccccactggcattagccatgcagcatttgatggccctttatgggcactggtacacaacaagagatgccgctgccagatactagaaacggcgcgctgcatgtggcgcagggatggagtaggagttgacacagagatatccatggaggttagggattccaggtttagtccaccaaccggacgtgatatggatttgccgataaaaacaaatagtacagaccaaatgtgcacgatagaagacagggtgcatatgggagagtaaacattgatagatattttggagctgataatccatcgttactgtcgaggtgcttatttaaaatgattgataatgcgtttacagacagccatgcattatgcatacagctaatgctatcacagttggtttgtgtctaagttttacgaagttatacataagggagcagaagaatcagtgcatcgttcgagtcagataccgtgagacaatctgatgatgagggtcctcaactcttggaacaagatgatacattaccaacatgaacatgagattaacttcaagagacatctcgaatcattgggttgaacgagtatctatgcgtgataagattcttacatggcacat

SEQ ID NO: 44709 - DNA, 1365 bp, Oryza sativa
ctgtgacggagtagcaaataaaggcccgtcagaggtgacctacatgtgacgggcctttacttttggggccatcacaggtagatcacctgtgacagcttctaactacggagacctcaacctctgacggcctttatttaaagggccgtcagagatgagttacctgtgacgggtcctaactcgccctaggctagcggagaccaacacctctgacggccttctagtaacttgctcgtcagaggtgggtgtcacctgtgacggccggccacccgtcaaaggtgactggactcaccagtgaccactgatcactcaccatgcgcgaagccgtcaaagatgagggtttgggctcgtcacaggtgaccttggccagtgtagtgaacgtagtgcatgttctgtcaggaagagttcagtatttttaagaaatacaattgtgtaccacttgggaggaatcaccatggtgatgttatataaggaaaaaatgatggcgtatatattaattgatttttcattatttaaatgtaccgaagcacaaactagatcaaatttgtaaaacttcaaaagtaattattaataaatcaaaatgttgaaatggacactcgctaggtgttaatatgcaatttatttgattttggactttttccccctcttttccgcacagtccatgcactcatttatactgaaattttcaaaacataaaaatatgctctagcaagtcacgatgacatttaaaaaccaaggatgtttttcttataaatatatatagtggctgtcgacgggttgtacccatctatgggatttgtatagggtgggaaacactcgtactaatatatatgagagacaacgattaagtaggtggaagacaagtgatttatatatatatatatatatatatatatatatatatatatatatatatagccctaggaaatctagttgatgaaactattgtctagtttggtgccaaaattcaatcagcgaaaatgataaaatttgagtttaatttctagaactttttgcagccaaataatctgcagcaaaaataattgcagtgtttttagtataccaaggtcatgacgtcctctaggcacaacaaaattaacgccacaattggaacaccgtacgtagaacatcaaataaattgatcctcgctctgtgtgatgctctatctgcactgttccgatgccttgtcaacgtaacgctgcatccgtgcacgcacctatacttggctgcgttcgattctgtccgtcgggaactcattccctccgcatagaaaaaggatcggtttattaacacatgattaattaagtataagctatttttttaaaaaatagataaatatgtttttaagcaaattcatatataaatttt

SEQ ID NO: 44710 - DNA, 980 bp, Oryza sativa
gtcaaacatgtgagaaaaagtcaacggcgtcatttattaaaaaatggagggagtataatgtaggaggatggataatacttgcctatgtgggaagaaaggatgattgatcacgcttgtcttaaaaaatatagtagccaagtccttcaccttctttttgagaacaaaatagcagtcataattagtgatactggcgaaagggtctgtaacctattggttacaagagcctcagtagtacctgagatcctccccatggaagcgaattttctaggatttaacggcattgtgctttcagtggtaggcgacgtacccgtcgacagcgaggcgcctatggtgactttgtcaatctctccaggatttaccggcccagtattcgaagatactcataggggtagggtttgcatgtgtgtgttcataggggtgagtgcgcgtgcgttgtaagtgtgtgcgttgtactgtgtaattctaaaaaaaataattagtgatactgaatatagaatatgttctacatctttttttggctgtaaaagtgacaaattctccaattagtagttttttcatgcctactaagctatgctaatttgtcgcaattccattttaaatcactattacataaatcgattttgatagacaagaccctctccaggctgaagatggctgtaactgcatctgcatgcaaaaatggctctgttggatcggttcaaggctgcatgtgaaaatacattatcccaaacagccacttaagaggtctgcctccaagtcctaccgttctctcgtccttctcagcatgcatcttcaaaattttccaagtcctaattattatctcctcaccttctctctcaccccaatcctctcctcatctttatctctctcatctcccctctctcatttctcacctcctctctctcccttgtctacacctcccaagttgcagcctgctagcgggcgggtgcgggcagcggtgggctctagtgggagcgcgc

SEQ ID NO: 44711 - DNA, 2681 bp, Oryza sativa
tcatgagtacatgcttgttgggaaggttgcaacgatgtaatccattgcagtaggctgagtggagataaatgcacgcatatatcaggacagattgacataaacagtatcgatctataaggtgtaaactattttgcagggaagtaattagtaagtgtttgagatacagtataagtgaatggcctgactaatgggagaatagttacctggtttagagggatgttgtcatgtcttcttcagcgagcaaggtcgttgcggtagggttggcgagatgcggcggagaagacattgccggcgccgccgacgggagataggaggtcagcaacacatgcgatacgtggactgagacggaggcggggtttagaggcgactgctggttggggaagacgggaggaaatcgtggcctcgtgggcgagcgatccacgcggcgagactctcggagaggatgaggcgttagtcttgtgggtgagcgatccatgcggcgagactgttggcgcggcttgcgagaggaaaggggattagtgcgaggggagagaagtgtgggtgaggtgtggcagtgcagggagcgatccgaaggcgaaggtgcggttgccagtgcggaggaaggaagcggagtaaaaggggagacgactgatttgcttggaaggaaactaccgatgacccggtgcgcgatcgatctccccccgcgtgaccccgcgtgcgcctcgggtgtgcctgctgttgttggatgtgatacgctggatgatttccatccgttagatttaatgaatgaagtatgaaggaaatatttgatcaaacatctgtaacttgtccactataataacttctcgtagcttatatagcttagtttaccaaacatgggaaagtaatacataaaatattattataaacttactgtcataatcttataaattcaaactgatgattaaagttcattaaattgactgaaaaatcttattttaaatataaaatatttttctatagttggagttcttatttttcttttctataattttctatagttttgtgtttgctaggcatgcacacgcctaagataggaaggaagagagactttcttaatgagagtttgataagcgtcaggcccatgcgtgtatacaaggcccagccgaatgccaggccctcctatgagcgcaacgtagcgcttttttctcttttttttcttgatctctctcgatgcaagtatgctcgtctgttattttgcgtggaaaccgattttgtgaatagggacgtgccacgtggtttatctctccagcgattaatatgcatagaatttgttttaaaagattctgtactaaatatccaagtagataattaccattctggtgttctatttagtttttacggacgacagattagtctgaagatatacatttacatgactcgctcactcactcgagcagttacatttacatgaccatccgcggcagtagtaaggccctgtttgtttcaacttataattattatattctagattattaagccagattgctataagctggattataataaactgatatagaataagctgtgagttgtttgtttgtctgaattattggaggcatggattattgggtttgaaaggctaaagtctataatgcccttagatatttgttcggttcatggcataggtgggtaatttttcttaactatgtaggggtagtgagtctttagccacttgataatctgaaaaaaaaagctcctttagagcagcttattagattataataatctggcttatagattataataatctacttgtttgtttcagcttactcataataagctagattataataatcctaagctgaatcaaacaaggcctaagattctttatggcacaccggcacagcgctctgatgaatcttcactcttcaatgcagatgaatccatgttactactgcgtttgaggcctttttttctgactgttatggatggctgcattgcaaatatggattaacacgtgcgatattagcagtaaattaacatcagaatcgacaggagtattcctattcctatcgtgttaatctgccagattttagtactctactcggatgctttaatttcactacgtagcactatcagattttgtctgaacatcaactcctcatccattgccatggcggcatggcgccgatgctgctggcctgctgcccccaggctctgatgatccatggtccacctgaacaagaacaaaaccacacgatttttgaagtttcagatctggccatcattttttcagcccccgcatctgcatatgcagtcgcaaaagatttaagcctctgcatctgttcaaatgcaaacaaaccaaaggccttcatgaagtcaactagtaatcccctttctgcctattttcatcatataacttctctagttgccgattcatgaagtgaaggagttactgattgtgtcaatgggcttttctgaatttttgtgaataacttttttgcaagatgtgaatatgttgatctccacctaataattttgtgttcccttgtaaactaacaaagctaccgcgaaatcttataggagttttcataaaactagaataaaaatatttttgtacatgcacacccaatacttttcctaatacaattctgaagtcatgatatgtatccttattttctaaaataaaacaagttaagtgggcatataccattagcaag

SEQ ID NO: 44712 - DNA, 1376 bp, Oryza sativa
tcggcaacgaagccgaccggagagggcccgcaatagagttggggcgccggcggagggcgcaccggccggccacgcggatggagccggaggtgggcgttaacggcggcgccgtggatggcggacggcagtgctggagctccaggtggcaatccgacgaccacgtcgctggcggccgcgtcctccaccgtcgctccccatgccgggctcgtcgccgcggccacgtcctccgccgtccgtgcctcacaccacgctgaagctcgtcgcctgagtccgcaatgccgggggcttgtcgggggtggccgcatcggagctcgtcgccggcgaccgcgacctccgtcatccacacccatgcaacaccggagctcgtcgttgacttagttgcagcagcacacgtgagagagatgttgtagaaagaatagctaggtagaagaagagtggattggttggtgtctatcctatcccgtcgagacggtataccagtgtttagcatttcccttaaaatattgctaagaacacatcaactaagccctcctctgtcctaggtgtgatcatttcttggctacgcctatgtggaaaatgatgtatgtttctgtgtacggctgtcaaaaaaagctcgagctccagacgagccgagcccgagcctctccctaagctcgcgagctttgtcaagccgaggtcaagcttccaacgagcctagtaatatatgatttttgttgttatttaataaattaggatatcaaatatgttatttgtatgccttatattgacatcatatatttattttattattttttgccttttctattaatatgatgaactagaaattaattatttttttaagataatctttcaaatatatactgtattacgtaaaaaaaatcaagctcggtagtcgagctcgagcttggtcaagctcgagccgagcctgtcagaaagcttgaacattttataggctcggctcgagcttgtatcgagctcgagcctaggcagacgagctcgctcgagctcggctcgttgacagccctatttctaggcatgataccatttttttcatttccgttgtttaacctgtttgtcaaaaatgtaatccattttactataaagttataaccctctaattctaaagctcaacatgcaaacattccacatcatcatctactagcaataattacatataaaacttatgcaagcatgcaacttcatctataattcattgaattctacaaatcaatatctaatcatcttccttcacattatttttgacaatatttttaacatttttactctatgtgtgtgtgtatatatatatatatggacacgctaaactgcacccagggtgcgttataactaaaacgctcccctcacaacacccctcc

SEQ ID NO: 44713 - DNA, 677 bp, Oryza sativa
agcctcagccgcaggggagagggtgggcgccttctctgcttcgtcgccgtcacctcccaagtctggcatcccctcccacacggcagcggcgacaggcggacggggaggcggtggtgtcggcgatggaaatgaggcggagccgtttggctaactgggtgtacgcgagggctagatccgaaaataatggagagcgcggggaagaagtaggggcggcttctgtagttgggcccctgagtagtatacatagcacgtacagttgacagtaatcgaattactatatgaggaggggggagggtagggcgccccccggggggtgcgggctggggtgttgtgggggtgtgttttaattttctttttttctctctctcctcttcccatctgtaatatagtgtatatatatatatattccctcctcattttttttctttttttctctccctcctcttcccagctcctcctcccaatctctctccctcctcttcccagctcctcctcccaatctctccatccggtttcttttttctaaaaaaaagaaaaataaattaagagaatttaagacttgaaaccatgatctcatagttcacagaaaactcccctaaccaattcaccttatgacactaagtgattagaggttattgtttgtttgttttatatgtttgttcgaattagtgtttgtt

SEQ ID NO: 44714 - DNA, 982 bp, Oryza sativa
cagccccctaaaagttaaggccgcctcaactctacaactgaaatcacatttgccatttccatttaaagaatcctgttcatattttgttcgcttctctatctctacttctgatttatattcatgctcgaaattgaattgatagaagcaatttctattgatgttttcattgagcatcgatctgttatgcagaatctgcttcaaaatccctcgccaaggttaacaatttcagaaagctaaatttttttaagggaccactaaacctgaaataacccagcccctcagcggagctcatgtcagaaactttttgacgtatcaagaatattaatttgcatattcaacgactggacattctttggattaacctgtcctagccgatgaccattagcaagaacaatataagggcacattcaacggtttagcctgctatggactcttaaataggccatgtcagaaaaaaaaaacaattgttctacaaaggctggttttatgatcgtctctccactaatatgcagtaatatataattaaattcttgtagcaatggtgctgtgattttctgcattttggatctaaatacgtgacttttcttgaagatggaatatacaacggccgttgcttatcgtctgctcgtgttttcctcgttgtgagggccgatggcatgcaaaagatggatgcatctcccttctttttttctctctcatccacatcatcaaatctgcttacatggcaacaaatagagcccactaattaatactctctccttcccaaattaatcattagagcaagtttaatagtatagccaactactagctccaaatcatctatagccgatttaatagccaattcatacaatatttacccagaaaacctacaccacggcatcccgtggagacgggatcccctcctcctaccttactcctctccccaaaatcatccgaatcctctcctcctacctcactcctctcccccaaatacacgggactg

SEQ ID NO: 44715 - DNA, 1661 bp, Oryza sativa
tcgtcgcctcggggagggcagaagcgggagctccccttgtcctcgccctcggcctcggcgtcaccgtcgtccccgcttttgcacctccaggatggacgccggcagcctgcgtcgacctgcaacaggtatggccgtcaacctcctcctcggctcctcctcaagacttctcaaactctctggctcgggcctcgaccctcacctcgtcgtgcctcctcgacgtcatcctccgcagttgcggccctccctccctgacgtctcctcctctttttgacagtaccctctgataccccataagtaccaggctttataccttggtaccaaggtttgatacctaggtatcacctggtaccttaggtactgggcatcaggtatcggtcgatacctagtcggtaccaaaggtaccaggtaccaggtacgaaccggtacctaaggtaccaggtactaggggagcacacgtccctcaccttgccgtgcctcctcgacgccatcctccgccgttgcggcgctccctcccccacgtctcctcctcttttttgatggtaccctttgataccccacaagtatcaggcttgataccttggtaccaaggtctgatacctaggtaccacctggtaccttgggtaccgggcatcaggtatcggtcgatacctagtcgataccaaaggtactagttaccagataccgaccggtacctaaggtaccaggtatcaggtaccaggtactaggggagcacacgtggacagaggaaacgaaaagggagagtcagttaaaatatcccgttgcaacggtatcccgttgtgtagctgccctcatatttacctataaacatatactacactagtaatacttgatcccaactgtcatacatacattttgtcttatggtctgtgctgtagcttgctacaaatctgtagaccgctgctcttttctatcatcatttatcttcttgatatgtatttatagctggcttatagcctgctattgtacttgtcttatataagtttaagcaccaaaaccaaagacaatttaaatcacatcaatcaagacaacatgcacacattctcccacaatgcatgcattgattaaaaccccataccaattacaccctagcattgtcgcgcccagggattcgacaacccgaatcaccggctatctgtggatttaacctctgtctaggcatcaaccagagtacatagatgacaatttgacacagatccacgtcttacaaaaataacacaataaaacccatatgcagcggaaaaactagagaactaaacttaatcttcacagcaacgcgaagcttcctccataactccataggcaaactcttgatggctggcacaagcctaatcttcatagaactcaccatctgaaccaacttctgcttctgggagattgggaaaaagaagcaagactgagtacaaccaccataatcaacaagtcataccaaggggaaggtatgatgcaagggtaatcaaaggattggctcaaaggatattttgcagtaaaaacagcatttgtaaattataagttgaaagcaataaaacagtatataattaagtagtattaaccatcatcgcagtacaacgctaaatccacgttgaaataggcccaacccaaaaccacccgaactacaccagttcattaagacaaattattaa

SEQ ID NO: 44716 - DNA, 1057 bp, Oryza sativa
aatcccaaagtgagctagttgatctaagcatgactaagcaatcctagaccaatcatctagtcaaattattaacctaggctatcaatgaatcaggataaacaaaggctgagtatgggtagaaaccatcccacatgacattataaaagtaatgcaattttgagagaaaagcaggggttttgcaaataggctcaatatgatgaatgatatatgtatgacttgccttgctcttcagctgacgggacctcggcgaccacttcaaaataaactggagcgtcggaactgccggagtctaaacgacaaacaaggcacacaataaatacaagctaaaaagctactgaaacatcaaaagaaaccaattttaatggattcttgacattttaacgaatttactgcaatttgaatgggttaaaacaaagctctgattattaagttatgaattttacaagatgctctgtgttatttactattgacagaaacttaatcaattgataggaattagagcccaaaaggaacataggatcaaaggataggttgactagcaagcaaacctcacgagataccgactcaacgagtcaatttaacgtgacacgggatcaccgaaatgatcgaccgaaactggcgaacggaaccggccgctctaaacgactctaacctaaagaacgaatcgggttggacaaacgaacaaaccatgggggaacacctcgttcgaacgaacgagcggacgactcaacaacggctgtggctaaaccggtgggctagacatgattcacggtaaagccccggtacagcaaacgataggcccagtaggaacctagggttgcacctatggctagacaactcgactaccaagctatgggacaaaaacaacggctaggattaagcggcacacggctgcgacacagcggcgcaaagcggcggctcggctcggcagtgcggcggcatggcatagcacggctcggcggcggcgggacgacccgacggtggcggtgcaaggtggcggcacggcaacgacacggcgacgacttgactaaactacgacacatgaaaagaaaaccct

SEQ ID NO: 44717 - DNA, 651 bp, Oryza sativa
cctctctcccttctcctttccccatctggccacgccgaggtaggccttctttctactactactcccgctaggactgctactttcctaatcgagtactcccctttgtaaggttccttctccagtttacgcttcttccgattcctagctttagacccaccctgcaccccgccgccgcctataccctgctccgccaccgtcgtctttaccatcaacgtacccaccgagtgccttcagtaccttaactcccagtttctttaatgtattcgctcctacaatcatcaatctaacaacctaagttgttcccctattagactccttctagcgtagtcgtcgatcccgggagttgccaccttaaccaccgccgctgatgctgacatctctccctgatttatgctccccgataataaatctctcctgttattaaggctctcttatcatgtgccgtatattagtacaagtcgtcactatgtcgttgccttagccgcccgcttgcaccgcctccgtcaggtcatgccctcctcacccacccttgctatatcatgcctacaccacttatgagccgtgcctacatttttgcgcccttttttcacaaccctgctgccgcttaatccatacccgttctttaaccccactagcctcggtatcacagcc

SEQ ID NO: 44718 - DNA, 533 bp, Oryza sativa
gggtctataattaccccccacctaacccttttctagggttacccaactcatttcattctcattcactttgggttgagcttggtgctaaggtgctttggatctttgagctctctctccatctctcaaatccctccttgttctttgtgtggtggatcttggtggttgtggatttggtgtttgagggcctagtgtgtgtttcactcgatcttgagcactaaggtttgaccaagagttgtgtggtgtttgttactcttggaggttgagaactcctagacggctaggtgtcactcccgagccaccgatctacgtgtggttggctgggagaagtttgtgaaggccggatctcacctccacaaggaaagagataccccttagtggaaggaggagtgcttagtgcaacctcttgaggaaagggttagcaaagacccggctcatagtgagctcctcaacggagagtagaatccctcaaggatttgaactccgggaataacttcgtgaacttcatcattggtgatcacccttcatcctccttt

SEQ ID NO: 44719 - DNA, 854 bp, Oryza sativa
atgggcaataccagagcattatgttttaaatttaggagagaacattccgaaaataataaccataatatcctatgaaattctcgaataaaattgcatctaaaattagacatttggcaaaaattaatgtatttggtgttgtatgtattatttattgtgttgcttcattaggtcaatatagtgaaacaaaacaagcatgtccgccgcaagtttctcgtcatttggatcattttgcatgacatccaaacggataccaattacttaagcaaaaagtaacaatataggttgtgttatcatatatcactttataaaaatttataacaaaattagacacacaacataaaaaataaagcttgcgcgattttgttctttacggttaaattaacagtttaatcccatgtcgacttactttattttataaaaaacgaaggctattttctatcatattcttactcatgcaagtcatccaaggccatctccacacccaaggtcatctttgctggtgttctgaattttaatgaaattaattgagacattgaaaacaagataaggttttcttaaaaaaaaatcaaaccaacaccttgaaaatgcaccagtcaagcacaagtggcagccaatagctagcatgtggtctggcaacgagcaacttgccaacgatgcaaaagctcagtgacgactcatggcttagcacatcctggcgaagcattatatggcagcaggagaacaaccagcgatgtacatagtgtagatggatggccaaagggtgctcaccagcaaccatcgcacatgaaaaaacgctataggaccgaaattatcttcaatattagaagctctaactgctcgatcggaaggatgaa

SEQ ID NO: 44720 - DNA, 1008 bp, Oryza sativa
ataaatttatgttcacaaggaacaagtattatgtgaagaataaagagtatgcaagtcatttcaaggaaaatcatataccctagttaagacgtcctagtttattgtaatcttgagtttgattttccagatatttttcaatagtaagaaccatttaaactaaaaattctgggaggttcagtgaggaattgtgcaaaccattgctcatgggtggttcggccgaccacatcttagtcccgatcactttgtcttttcttgtgtggttcccaaatcatgttgtagcatagatatgggaatctcatttgcgtacgtgactggaagcctgcgagatttcccccacactgtacttggattagaatgaatgcctttgcctttgtaccaagatttcccgcaaacttgcctttgcacgcctttcccctgcaacaaaatagtgaaagcaaaaagactcaagcagtttgcgagccggaggattgtaaactttatttgattgaattaaaatggataggcgcattacaatggaaataaatgaaaataaatgaaatgaaagtaaatgcaacttaacttgtgtctttatcttattggaggattagaaggaggcctcctggggactacgtgcacgaaggctgtgtaggggcggcccaacccatgggtcgaacgaacaaggggttcggccgaaccatggagggctcccttcttcctcagctcaggagtcatgataactggtcttggtaaatgcgtcaaaattgactaaatttaccacgtgtaattttttattttggttttcgagcaattaattctaggaaaacttttaaacgatgaccatttgcattaaagattgtgtcagccgtcttgaagcataactactccatgtgcagaggtgtcaatgatggtgaatggtcccatccatttgcttcgaagtttttcgtgcccgaagagtttcacatagaattgaacagcatcactttatctcttgccatgaactccttcccttttattatcttaccatgccat

SEQ ID NO: 44721 - DNA, 873 bp, Oryza sativa
ctaatgatggttgttaagttggtttcactcataaccggcatctggaaccaatgaggaagctccacgcggcggatgagagctaggggcccacatgtgtggttcaactgaaccacttccaccgcctccggtcacgttcttttgtgaggctcatatgtgggccctcatgatggtgcatggtgaattggccaaaattgtatcagtttgttatgatttgtgggcccttcagtccgtatgatcgtgtttgtttggatgtgtgtctctttgcatggcgggtgtgtgcaaatggtttgtaataaaccctaccactatgtccggtgtttctttttcttcctttccttacgctcgtcggcatagtggaggtgacgggaagagaagaaaggagaggagaagtaaaggaacaaggtgaagtagtgtcacgcccagaaattcccgaatagaatttcaagcagaatgtgcattaaaatccccgtccaggaccggccggggtacacaaacgacaatgttgacattcagatccacgtcttacaaacatcataaaagtcttacataaatgcagcggaagaaaaaaaaagacaacaggagctaagccttgactaaaactgcagcgggaacaccactccacaggcatcctcgacggcacggacaaagcctactcctcggagaaaccttcatctgacccgaactcgaactctggggttgggaaaagtagagcaagactgagtactacccactgtactcagcaagtcataccggaataggggtatgatgcagggaatcatcaaagaagagctgaagtggttcatttgcataaagcgagcatttataaacagaaattgaaagatttaaacagttgtaataattaattaatattaa

SEQ ID NO: 44722 - DNA, 614 bp, Oryza sativa
tggatcccccagttttaaaagagggaaaatctagggccaacaaaaggaagtgtacaactgaaggagtatcaggagttgctgctactacttcaaagaacagagctcccaggaagaaagctactgctacaaacaagtgatatgtgttagaccatatgtttgatggtcctttagtgctagtagtactttgttatgccaaaatttgaaccctgtatggatttcatgggcatgcttgcttgattttgtgttgccaaacttgtggctattttgtgatagaacatgggaattttgtgatgccagacatgtgttcactgaatgtagtactagaaatactactaaatgccagaaatttggtattgtgatgaatatgggaaattactgcctgtaatgcatgatgcatgtttgctatttccagatgacattttacaggacatttcataagctagaacaaaataacagttgtctgctgaaaaaaaaatagagatgtcgattttcagaacaaaatctcatatttcagcttcacataatagcatttagcatacatttttcatacatggttcagattcagcatacacaaaagatcactcaagtgccttattagctgacacaaaacacac

SEQ ID NO: 44723 - DNA, 727 bp, Oryza sativa
tacttctactgaaggaaacaccatgccaaccttaaaaactaggttcttaacatcctctgccatgaaagccttaaactttaatctcacttcaccatcatcatctgaatctgggagctgcaaatcttcatcatcagtggaaacttcctccacatcagaatttctaactactatttcttttcccttcaactaactgcccttagctttcttccaaaactttgccttgcagtcagataagtcttcaacacccacatcaacattgtcaacatacaagtcatcatctgcatctgatatatcagtcactatccataaaatatgggtcatcttctaagctaccatcactgtcactgtcatcttgtttgtttggcaccttcctatcagcagttgacatcttcctaggactaagcaccttaggcaattcactaataggattagctactacatcatcccaatctacacctgcaattgtgtcaccctgatcaaaatagataataaaattcttaaccttgtgcacaactgatttcatcacttcaaagtcagccctagtagatataaccctaaggccatcttcaagagtttttccagggagcaaccaataagccttaaaatctggattcatatcatacccaagcatagctaaaaattcatcaaaacaaacaatatcccatgttcttgcttcacagtggtcaatccaatttatcgttcgatctacatatgccctgttgctacc

SEQ ID NO: 44724 - DNA, 1911 bp, Oryza sativa
aaagtagcatttcatcctgtagacagagcgccagggaaggcctcccgggcggcgccgaaggcctcgccaggcgacgtcgcctcttcctccactggcctgctgccctatcctcctccccccgtcatcctcgccagccgccgccgcccggcgaggcctctggcgccacccgggcagccctccacggcgctcccctgatctcctctctctctccaaggatattttgggcacaaaaatcttcaaagtagcatttcatcctatacacaatgtattgtatctggtgcatgtattgagtggtattttatcccagcccaacctgtacagtggcatattgtccgttttctcactattagctcactattgtttatgctcttaccacttaaatactggggattcactgttatttcttgtcgtgtaaaagaatgggatgcccatattatgtgtatctataataataattgatagtaatactgatgctagtagatagatagatagatcgatcgatcgatcataaagccaaaatgtaaaatcaatattggtgtgcaacatttcttttatactacattaattaaagaaaggcaaaatacaatgccaatccttaaactaatcatagaatgtcatctagacccataacttaacaaaagctcatatagagcctattattttggcttaatgtaccacgtgagatcggtcaattagatgggccataaagctaacatgaccatccataatgatgggaccttatcatttaaccccttaatttccactacagtaacctctaaattaattgctcggctcaaaagggaaggaagagtatagaccgggtcattcgtatgtgcacaaacttaacgtctccctatcgcgtcatatatctcgctatggggacctttaatttgattgtggatgatcaatgtcgccctaatatatagctacttcttcgcctgctctcctattcaagtggtggcatgctgaattatgagagccgattttgatattattgtaacgaaaggggctgcataagaaacttcacccacggtagatggccacgtcagtacatagtttacaaaaccatgcggttactatgcagttatagcggttaccatgcacggtaactttttcagtttttaaaccacggtacgtctcgtggtttctcggtaatcgcgcggttaccgtagtaatcaccttatcgtgggggtgcggtaaccgcgcaaaaagaataaggggaaccctggtcagtactctagtcccgcaagcagcactttggacttgacgtggtatattaaacaaagattatgtatctaagatgtatgttatctaagtttatgaaactagatgacatcttaggataagtttaattaagggcaagcaatctattttactcataaaaaatcatggatttatgtaatcatttgtaaaaggacaatcatctccctctccttcagtctccccaattcaaaacagtattaaatggacatgttggtggttgcacttgttaatgttcttgttagctatcttgctctggagcataaattcgctgagtcttaggggttgtttagattgtagcaaaaataaacatttatcaaattttaaagattttagcaatattgtcaatttttagcataattttttatgtatttatcaaagtttaataaaaactaaatggattattttaccaaaaaataatatggtttaaaatgatatcaatctatacaaactagattaatttgtttgtactgcagctaatatggaccaaatatcaccaaagatgcgtaccaccccactttaaggcctcattgacaggcttaaatttctcggcccatccatcacactgggctttccctggaggccgagttacgaaaatttcaaagcagtgggctttcgatataaacattcgcgaacgcagggggatccact

SEQ ID NO: 44725 - DNA, 1050 bp, Oryza sativa
catgactcgtgaacttccaggtaatttcatcattctcgtgttgagagttttatatgtaaagttgaaagtttaggatttgagttggaagtttgaaaagttgaacagaaattttaattttttagttaaaagtatttagagattaaaaatcaagactccacatcttcgtttggtacacttttagcctcacaaaagcctagcgggccacgtgagaaaccagcctatgcttgtgggctcatgcgcgagcgacttctttaagttgcatgtctgtgcgaaaacgactcctctcgccactattttatacgtaaaatctaattcgagagcccctctcgttttagcgctattgcgcgatgctggcagagccgtccgatctccaaccacacgcacacgcaattcctgcttcaaagagagtcacagagagaaaggctacagttttctctcccatgtcatttttctcttcaaacaaagttttctctcaaattatttatccgatctacaatttgattacaccattgtgtttgttataattaaatcttcacaacaagatcttacatgattatattacgatgaaaaaatatttatatttgtaaattacttttattatatacgtaagttacttttatcatatatataagttacttatagatttcactaaattacttcttagacatataaaagtaaattcaataaagtctgcaagtaatttacatatattataaaagtaacttaaaacaaaacgtaagtaactttgtcacgacattagaagtaaattcgttgtagggataaaaatatactttatctagaaattaaatttaatcagcacagatcaacacacgtaagtttaacaatttttaaaagtaacttcaatgttaattggaagtaacttttgcatggttcaagttgaaaggagatgctagatagagtacaaactagctaccactagctgtgtagtcacgtccaatgaaaaaaatgtattaattagagttactttctttttgttataagttacttctataatatatgtaaattacttttaggctttatgggggatcc

SEQ ID NO: 44726 - DNA, 1071 bp, Oryza sativa
gtaagaattataaaaaaccatttaaatggctcaaaacttctaaaattcataactaattcatacgaactccaaaatgagccattcaacttgcaaaattcatctaaaattgagctctacatgtttgtttactttttatgtactgtttacttcatgttcattagggtttttcctcgtttgtgtgccggcgagtagatttcgccgtttcggaagtccgcggtcgcgaggaaaagaatccctagttctacttggacaagggaacatctatgggtataaatacaagaccccctagaaggcaaaggggcacgaaacagtcaaaatagacaccaatacccaccgccaaacatcgatatcagagataagcctaaacatacccaatttgtcgcctacggaggccgacaagagggatctagcgctatctctgatctcgccaagtccatattcgaggaggaagactaccccatcgtcgactacgcgttagtgttcatgccgccaagtcaatgacggctagatgggttatccaaatattgtacttgtgtgattcttttgaataagagcaacaccggcttcagccaataggagtagggctatttatctgattctgatgaataagaggcccgaacctgtacaaaaatatttgtctccgtctcttttatttcaatctcgcatataccggaggatcttgtaccaagatcccccgtaattttgctggtttctataatggtcacccataatttggcctaacttaggtggtgaaggtgaagatgatggtgcagttcatggaagtggacggctgtaggatctttggtttgcagaggtgttcaagggtcagctatgcatctgcactcctttcaccaatgtcttaactcctttcaccaatgtcttaacgtattaagcacatactaccatataagtattattagtgttgggatacgcgtaggctacgatagcataaatcaaaattttctatcgcgtaaactaggaaccatgcaagtattagatcatagatcgttaccactcgacgcgttgcgcagtggaataaggcgctaagaagtcgaaggaattctcgcgaag

SEQ ID NO: 44727 - DNA, 1631 bp, Oryza sativa
caagtgaataatcttcctaaaattattttaaaaatatctataaaataaaattcaaaattggtttcttccatttatctgttgggcggggtttacaaaaccgtatggttatcacgtgcaataaccttatcaatttttaaaactacgatataccttgcagttttcgcggtaaccgccaaaccgtggggtggcggtaaccccactccaaacggtttggtgaatcctgctgctggccctagaatcctcctgaaccatctagagctctgtatctgcttgtttcttcttcctcaatttctctgcccgtgtctgataatggcatctagctagagagagaattgggtttgatacttgatcgatcaagtttggccttccttggtaaagttagatgcccctaattgatgcaagcatgtatgtaaccactaattaacaaaagagttacaaaagcatttacatttaacttgagcaaaacccaagacaaatgagatcataagtacttctactagatttctaaatcataaaaatattttgtcctctttatattagcagtcaaatgtagccttttctgccttcaatttgaaagggctgaagcgtttcgattcattttctttctgaatattgggatacttaacttggagtaattttaccatcttcgagaaggtactaggaggttactttctcatttaacttaaggttctttcttgtatagtaaagcttggtgaatgaaatttgagaaggcatcaattaggagatggaggacaaaatgatgccttgtgcagaggagatgacgaatgcctctctctctaacctaatgatgctctctttgctgcagctgctggcttgggcaaagcttgctcgctttgctacctgctgcatgccctgcctccttgctctccgatcacccaaccgctccatgcacaaacctgcaaaacacctctctctctagatgtgtccctgtgtactggaccagccatgttgcttgcaagcaatgctgctgctgacaaattgggatcacaaggaaaagaattagtatattctagctagctagctgctgcatcagatattcagagatggtgagtgaatggtatcaatgccctttcagtgtcttgcatggtgtgctgcctgcagaaaaggatagcttgttgctagcagggcacacaattgtaaaggtatgcaacaacaaggtgctgcacatcatgccatttccctggcatgtggatgctgctaattgcctgacaagaattgggccaaacagcttttagctttcaagggagagagatcggtcgatcgatgagcgtgtcaacaaacgcactcgatcgatcatcagatggtccaattgacagatatatgttcaggcaacggtggacatgctgtgtgtgtcgatcgatcgtacgtccttcagatcgaaatgcatgaataattccttattcctgtcctaatttcagatgagagatgctgcaggtaacgttaactatgcaagctactagctacctgcaaatctgcaacttgctgccttcagaaaagttcagcgaataagccactacaaagttcagagatcaagcagctgacggtgtgagcacaatgcctgacgtaggatcaagctggctacgcatgtctagctcaaaagcttgggggat

SEQ ID NO: 44728 - DNA, 877 bp, Oryza sativa
taaaaatgatctttagtcccggttggtgttaccaaccggggctaaagatcaaaaagtttttaaccaggactaaaaataatctttagtcccggttcctattcgaatcgggactattgtggattttgggcgaccgagcaaagatgatttctccaccagtgtgtttgcattcaaaattaataaaagtatgagactaaattcagtgcacccggaattttggccttcctgaaattcaaaaccctagtgacatataatagtactacaaagcaatgactcgcttcacaaagagcttacaaattcatgggatcaaatctcttaaatgcaagagagaagtgaatactcaataatactgaatgtaacatccatattatcgatcaaataacaagcgcgacggtaggggataaatcagatgatactacagttgcctactgatttaattgcactaatttgatttaattgcattacttaccactaataataaattagtggagtagtagatattgcaaagctctaagggaattttgcacaatatagaaaatcaaacaactaacaaaggttaacccacgacaatgtctaaaagggaagaaaacaaacttgcatgataatatattgtagaacctgtgtctctcatcaatggcggcaaaccatagaattttctcttaattaattatatatgtacaatgttgaacaaaataatattgaaggtccattaactaacttgttagagtttcataattctagacaaagtatggtgttgcatgctatttttttaaaaaaataatccaatttcagggatgataatagtctttaacacggcaaattgcaacattaattgtaggcaaattcctgagaaaaggcacatcatattcaagagttgtca

SEQ ID NO: 44729 - DNA, 1424 bp, Oryza sativa
tactcccttcattttttagatgtttcctttttcagatgtttcctaatataaggcatacatgaatacatgctattaactagcacttctttctcactaaattattatttttttcaatgctctatccttaagatctttaattttattgggtgcatgcattatactccctccgtattttaatgtatgacgtcgttgaatttttgaccaacgtttgaccattcgttttattcaaaatttatgtgaaaatatgaaaatatttatgtcatgcttaaagaacatttgatgatgaatcaagtcacaataaaataaataataattacgtaatttttttaataagacgaatggtcaaacgttggacgaaaagtcaacggcgtcatatattaaaatatggaggtagcatatttattagggtgatccaaactatgaggtgataataactactctctctgtcccagaatatagggatttttagggccggatacgggtattaagaaagtaggcagaattaaatgggagaaggttgtgattggttgagaagtggaggtaggtgagaaaattgaatggtgaagggttgtgattgattgagaagagaacgttggtgaagaagttattatgttttggggcaaaacttgaatgctagaagtcgttatattttgggatagaaggagtatttcttggcctttatgggttaagtgtggttgcgccttatattttggaatgtagggagtaccataaagtaagacatcatttattacttattcacagctttaatagtacattgtggatatccttagagcgggtacaataagctgactaggcgggctccaaaattatgcactacagcatattcctacgtggagggaagagaactgatgggagagaaggaaatggatgacaaatttgtcgccgggcgatatctctcttctcaacgtgactgcagtccaactcgactattaaaaacacgcttggtaggtcccacacaccacaaccaatccccttccccaccgagcgagatcgatctctctttccccctccaccccagccgagcccgctcgatctccgcccgcccctcccgtgcgatcttgtgcgctcgactcccacgcgtgatttccgcctctccctcgcgcgcacaatctacctcctctctacttactacttcatccacgagcgtgaaaataaatttacatcttcctattttgccggccccaaaaatccggtggattgacgatgccgcctccactatccgccttccctcttctacctcgcttaatcgctcaccgaaaaccctagttctttaccaccaaggcactaacaaccttgtctcgccagaggaagagagaggttgcgccacctccatgtaccatcgcgagcttttcttaaactcccggtgtttcaaaaattgtgatatatgtgcccatatgcaataa

SEQ ID NO: 44730 - DNA, 522 bp, Oryza sativa
ttcgaatgggcaaagaaagagaacaccaatattcacgatgtgtacacatttgcgtaatgatcgaccttattatagttcaacgaaaatgagatttcctaccctctttcgtacttaatatagcaatgcagtattgaatatgatatatattaagtactacaaagttaggctcccatcggatggcctattcagccaaagaaaaagccaaaatttgaattttcaaacttaattttgatattgattttgagatattttcaacgtagtttttttttcagcattgacttttaagtcaccgagaacacatatataaaaattttactaacaaattcatttttattctctaataagccgttttggcttattacgaaaaaagccaaacgatgaggccctcaccgtattatagaatgaagggagtagctgatataagaaacaaatgacattttattctaccagagcgaaattgagaagggattgagacacacatcatcactacgatcgcttgggagtgaaggagcggaaccacca

SEQ ID NO: 44731 - DNA, 3355 bp, Oryza sativa
tcggaaatgatatacatattaaatgtgaagattacctaccttactactgagggtaattataagtcatcaatatataagtgtccaacccttaatttgcactttgcgactggtgtcactgccgcattcgatcacgtcgggccctgacgctgccgccgtattcaaaacttgaggaaatatgtttctagattttttttttgcgtcctatacatgcgtctaaaatcaggagaaatatgttgtttgactgaatgaatggtgatggaagcatcgaacgacgtctattaattgacatagaattggtcttgcgtcatatatttatgtcaattaattaatatatgtcattcgatgttttcatttccattcatttagtgaaacaatatattttccttgattttagaccactgcgggagaaagggtttttaatgccagttcgtaaccccttagtcccggttatacaaccggaactatgattctgggactaaagatgtccatgtttagtcccggttgaaataactaggactaaagatgaatctttagtctcggttggtgttatcaactaggaccatagatggtaacgccatgtggctggtgtttccatctttagtcgcggttgttgttatgggactaaagcttttttctttttttctttttttttttttgctatcttgcatatcttacgccatccccaaatcattccaatatcaaaatattatctcccgacatccaaaatcatctaaaaaacataatcccaaatcattcacaacaacaatatcatctcctgacatcacaaatcatccataacaacataatcccaaatcatttacaacaacaaaatcatcctcaaatcatcacaaaacaacaacataatccgccgcggcctacagctctccgtgcggcatggccacgcctgcgctgctgcttgcggccctctgcattggccgccgcagccaggccccgccctccgcgctggccgccgcagccaagccccgccctccgcgcgcgacggctgcgcctgccgccgcctcctgcggccctcaggcgccaccctttgcgagtagaaggggaggaggagaaggagggagaggggaaggggacaccctctgcgaggagaaggggaggaggataaggagggagaggggaagggaaggatgagaaggagagagaggagtggaggaggaggagaggggataaagaggaattaagtacgtgatgtataaagataaaggtagagagtgaatgtgagagatgctaagacttgggagattgatatttactcccggttggtaaataccaaccgggattaacgatacgatttttagtcccggtttgtttgccgtctaacatagcctgacagtaattgaaccgggactaaaaatgatgtataaagatcaaaaagtacccatgagcttttttaccaggactaaagatcatttttagtcccggttcctattcgaaccagggctaatataatttttgcccaacccagtaaagatggtttctccagtagtggacacacgactatagaaatagctagaatacgttaatgtattgcatagacggttggccccatatatggaccgtctgcaatccgagagcatctccaaaaatcattttccaaagtagtagagggcaagttatatattttcacaagcatatatatcctctagttctactcctagttattaatgatttactagctagtactaaagtttcatgacgtttctaatgccattgaaacgcggatcggatataagctaatttgactatgaatttgcttttgaaccagaggggtgcaatgtgatgcatatgcatgcgtgcgtggctgagctagctatgaacttagtaaagtaacgcaagacagtacgtcgatccatgcatagttcgatagtaagtacttaatcatgcttgaattgtacgtcgaaccagtaggccgggtagaaattagctaaagagaggaaacttaattaatccattgctgctatccgggcaatcgaagctaatttttctataccaaaattttggtagtgtcagaacattggtaagttttggttactactaaattttgtagcattgaatttgaactattgtagataaattttggtatcaaaccaaacatgcatgtgtcattattaaagttataaaaattttgatagggtaaaaattagcatcaaaccaaacaagctcggcaagtcatttctatagctaggatgccatatattatatcatacatcgatcaataacaatgagaacaatgttatacatgttcaagttgtctcataagataagctcacaaagtgtccattctaaaagttaattaccttcgagctttcttaatacattacttatagctttcatcaggattgagctaattattgtattcagaatgctttgaggtaattaactttcacacaatcctgatgaagctaattactgtattcagaaagttcttaggtaattaactttcgcaatggctaattggctatacacatcagtataaggcactaacttttttttcagctagctagtttactgatctgcatgcacggtcaatttcttagaacaccatggtcaattttatctaatagcaatatatatatagctgtaattaagtctcaggtaactgaaattcaattaatacgagtgtatgcatggaaagtttcattccgtagtacagtacgaactgccattgtttcaaaaagaaaaaaaaaacgatctcgatcgattttgatgcataattatactccagatggataaggttgctatgtcacagccagcaggtgctagcttgtttagcaacatatataattaggtagcaagtatatatagtggaattaacacaaacaaaaggcatacattacatttgatgcatggctcaacgacggccatagcttttttcagcttcttcttcttgtacctaccgatcgaccttgcacgtaccgacgctgccatatgcatgcagagactagcttcagcattcgtacaacttttcttttactcttttttaattttcagtgcagtatgactcaaaaaggtcataaaaatttggaccatatatatctggtgtacgagctgatcaacagatattacattccggataagcatgcgtccattaaagagagagtatagtagattaagactagatagctacgtgcctaaatatagggctagatctagagctataacgaaatggcgagagtttgcattactctactttgatctaaatttagattgatgcggttgcttaaatttaatttaaaccaactaaaatgtttttttactaggttcctgggcaaattaattaatgtagctctacccctgcctaaatagtcttaatataatatttaatctagtatataaa

SEQ ID NO: 44732 - DNA, 1037 bp, Oryza sativa
cagctggcaaatgtcagatcgtgaaatgaggttttgcaaagggtaggaatgtcaaaactatagctttcgcgtttatttcggttattagagcacccgcaatggtaaagtagggtgctctctataaaacatgtacatctcagcaatagactagattaatagtaaaccacctcaatagtatgtctacacaggtatctatagctctctcatgcattgcctcgtttttctctatagactatctctaatctagtagatagctttgctctctctcttcatttaatatcttccaagtaggaaaatatgctgacatggatctcttgtagatagcttatagataaccattgtgggtgcccttagtagtacttcctctctcttaaaatatacttatatcactaatcaattagtagatactaatcagtaatacaattctgaaaatttttaaactcatagtactataatcaagtattgatcattatatcttaaaactattttaaaacgaaagaagtaaagatatacataagtgcagtagcaaggacgtgtgttattcaactaactaatgaacgctctctagtttttaagttcgggcttttaaaagaaatgtttgtccctccattttctcataatcgaccctagcaccattcaaacctatttttttaagcatttattttatttgtggaaattttataaatacttaaaaatatattatatttgtcaaagtatatagctcaaaacggtaaaatatgttatattgtcaaaaaaattgttaacattcacgttaacaattaacatatgatacaacgtttgcatcataccgtcagattctttcccaaaaaggaaggggaaaaggttaattaagatgatttttttagatgaaaagatgatagttgtattttaaccaccaccactacaagatcgttgggaaaaaaagcacggcgtgaagccgtgatacgaaggaccattgtaatttacatcgaccccatgacattgttttgccagctgagaaaccaccaaaattcgacggtcgcttctcccgtcccaaa

SEQ ID NO: 44733 - DNA, 583 bp, Oryza sativa
ggatccccccattttttatctttaaccttaatcattcattcttcctattccatttaatcataatcattcattaatttttcaatcccaatcccacctctcatttcccattatccaaatactccatccgtttcaaaatgtttgacatcgttgactttttagtacgtgtttgaccattcgtcttatttaaaaaatttaagtaattatttattcttttcatatcatttgaatcattgttaaatatacttttatgtacacatatagttttacatatttcataaatttttttaataagacgaacggtcaaacttgctataagaagtcaacggtgtcaaacattttgaaatggagggagtatatcctaagctctacagcatcaccaaaatatggtgattcctcaaagaaaaataggaagacacggtaattaaataaagcagagtacgtacctggaagagcagtgagttgagatggagggaaggcacgatccaataaatccatggatagcggaatgtgaaaaacgcgaatattagggaatgactaatatcaaatgattataagggggtgaggcttcgaacctatgtcgtct

SEQ ID NO: 44734 - DNA, 1192 bp, Oryza sativa
ccaggttccaactgaagtcatgctttgtggtatgcatctcttgtttttaatctgtctgttgttggatataattcagcagattaacttggctctttaagtcagagctgtaaacataaagtcatgagtggatgtgaaacctggctcctctaactgctaggaaagagtacacaaaacagagttaaatatgccatttttatacagttcttttttgacttgtatctttattgacagttgttgttcaagcataatactgaagcttgcagcttgtcctagggatgttattgtcttaattctctcccattgtaacctttacaggtcatagcatggtcataagacaagatagcactcgcttcaatatccattgccccaaacttgtcatcttcaataagccatttacacaaactgtgtttttgttaacattgttgtcttggggttttacttatcaaagaaatagcagaaaatatttaatatcacttctcggtcccaatgaactatcacacattggatatgattttaattgaagctttactatggttctttcaccttgctcatgaatccatcatgtagtgatttatctgcattttgctgacgagcagtgctatgtttacttacaaaattcttactaacaaagttctcaaccatttgattcaagtagcaggaagttatagaaaagctagattcagtcatggtatgccacatcaccgttagtaagtttgtaacaattattttgtacgtgtagccttttcctttgctgaattacttcaaactatttaagaaggtttacagtttacaccagttgggatagtatttcatggacaggtttcacctttagattataaacagtggttacctttgttctgttgtggttgaaattttacctgccaaacactttgtgagcatcagaacaaaaatttatatctcgatttgctcatatgattctgtacatgttcacaatgtttctgaatatttatccggtgcaatagatgaatttattcatgtacggtactcaataatatctggataccacactgttgaatacttgaatggcctaggaatttgaactggtaagatcaaattatggcaaatgctctgatgcactatggttatcatagatggattatcgttagtcatcttgcttcatcaggcaaaagcatccatagtctgagttgtttctgaaattttttttgaaggg

SEQ ID NO: 44735 - DNA, 783 bp, Oryza sativa
gcgagctctgtagcatatatagaatgtttgctatccactggtacatctttaacccgagcctacctactgtatagatgtgtttagtacgtgcttactatgcttaattttggggataatatagtgcgacgtgtaagaaaattcagaactatgttgtatgctctagctgaatttgtttacttcctacaaaaaaaatggatgaactactgatccagttcatgttgtgatcctcctccaaggagtttgttttgtttctttgctatctgaaagattccttttttttttttttgctttgttgaagtggaaggagctcattggtgtacctttgttgaaatggctccttttaatcctcattgtttcacatgtctgtttcattttcgtttttaaggggctggccttattaaaggttgtttaaaagcttaaacaagacttctgtttgattgatctttagtccctattttacctaccaggtgaattgtcgcctcgggtaagatattgctaacagggaattaactctatttcattgccttgtaattaacttgttatactaaatcagaagattctccggaggaggggatcaggggagaagaaaccaaagaaatggcagcaaccctcttttttccggaggcgatacattgatactacttcgatagtagtagcggtagtagtcgtcgtctatatggatatagaacgctacagagttcactactgctttagctattgatactacttcaatagtagtagcagtagtaatattttggaactaaacaaggtcatatatatata

SEQ ID NO: 44736 - DNA, 1708 bp, Oryza sativa
tttctaccataattgaatatatgtgccttttatgggtaagaatattcttatagcttctgatttctcttgaatatatcattgaaatctggtaatcagctatcaggggatgagctaaagattgtactggtggatgtgaatggtgatcacatatttttggagtcatccgtatgtaactacagtgttgcatattgtagaaggagctatgctttaccttccatttaaaaaggaaaattctggggtcaccctcacccatatagaactatagcatgtttactctataatactgatacaacaacatctactatataaagtttgaaagtttttaaagtataacaaatgattcgcttagctattttaagctccgaagttactcatttctgtaagaaagctgacgaatttatgacatcataaattggccaaactagttcatgctcttgtcttttcagaattaactagctttcttcacgtcgtacatgcctgcaaaaatagaggctgtgatgtgggggtagcattgtagcaaccatgcacgacaatctcatatttcttttatttttcctgtgactgttcttgtgcatctgcaattcacaccatgagctttgttggtaaagattacatgaataatactccctctgtttctttttatataacgttggttagttcaatcatatattttgggatggaggggggtattcatttggattatattgtatccagtaacctttcatgtgtagtcttttctgattgcttttatttatgggttacgttaaaggatggacacgaatattcgtttcatcatgcactacactgaactaattacagagagctttaacatgcattcttgattctagtgaccttcagaaagatggattctagtgaaagaacctttctttcctttggggttacccacaagtagttgtcaaattgctagaatttcgaattgccatatatgtgttgtgcgttaatgttgttacatatcccagttttgctggtttctgtgatggactgatggtcttccataatttggcctaactctccagtaatggcaggtggaggtggtgaaggtgaagatgctggtgcagttcatggaagtggacggctgtaggatctttggtttgcagaggtgttcaaggatcagctatgcatctgcactgctttcaccaatgtctaacgtattaagcacatactaccatataagtattattagctattctaacttatgttagatcacgcatgtttcagtcgtaaaaggccaatgtgtcagttgctctatgtttgagattacagctaatactccattgagcatatatttgctttatgcgaagatattatcagattatctttatgctccgtagttcttctgtaaacagaagatgatcttattctgtttgttctgtgataatccagcagctgctctagcctgtaggctcttctcagaagtagcagttaatatcttaaatggaaaattgatgattttctccatagttgcatgtgcttctacattttgtccaaagatattttttcttgatcttctgtaaacagatttgggacaaaaaacatgaagtacagtctgtacagacaacttcgtggcatatttgtcgaagcgcgtgcaactgtagagcgaacaataaaatttcccatttagaagtattctttgttgaaaagaattttaaaatcgtgaacacacggaattttgaatttcaatatttga

SEQ ID NO: 44737 - DNA, 2923 bp, Oryza sativa
ataggttcctttcctgccacgttcatagtttctacctgaaacaggaagtgacatatcacaattcatacactctccagaggtgtgtcgctctgtacccacagacgccttaaacattttaatactcacgcccgttagcgcttgaagcatacttcatggtgtatgccagcaaggctaaggtcataagcttttcatcaatcccatctatcaattatctctacgggtgattccctcaacaacggcgatccacatcatctaatcggatcccgcaacaacggcaatcctcatcgctagcctacgctcacggggttcacggaagtccttaagcccgcaggataaagccattaagaaagatctactacgctagcctgtcccattccaggtcatgtggtctataatacaccgagtttcaaattagtgtatttcagaaaatattagaacagatgcgcaaaagtgcaatttttaaattgttgttcgaatagacgaccaggaaccatggatgcgtagggcttgccgactaatgcaaaatagactataagttagtttatagtaatcggagtccaaacgaagtctcggggattgaatcgatttggaccgttgttctcctttctagactatatataaccaacagtaaaaaaaaaagggggcaaagagagggatcgatcccagccctagccgtctttatctgttttgggcaccgccatcgccggacgtcgccgctgtcgccgatcgtcgccggtcgtcgccacagccgtcgtcgtccacagccggtcgctggtgagctgctgctccttctgttaatttccctgctgctgccgatctgatctcttccttgctgctgatgcatggcttgttgttgctgccgatcctcgttgctgcttctgctgttgttgatgatctgcaacgaatgctgctgctcctgttgatggtctgcaacgaacagagaggaggagggttagaaggcagagaagaacatgaaggagggagagggggaaattagatagaagaaaggaaatttggggaatttggtggatatttcaaaattcattgttttttttacaaattagtactgctaggtaattcgttttagtctctatttgtttctaatttatacataagacgatctgtttccgatagctcaaatttattttattggctgctgggctgaaaacgtatttttaaatctggtattaaaccatcgggattcagattagttgttctaaataaagtttgtagtcatcgccgatatctttctaacggcgctggtttcactcgattctgataaacggtttgagacaaacatcagaaacaacagtgctgacctggtccggaaatcaagatagcaattcgttttgtttaatctgagaccaataaagacttaatctgattttgtgcccaacatgaaagatgtagacaattttatctagatgtccgaagtagtattatttgctagatttcgtaaacggtttgcgagttacgcataaaacagtaatgaagctgctatatgttgtttaatataaatcggttaaagtttatatgttctaggtttcgattttagtgtaactattattagttgaacatagtggtttattcgtagttttgctgcataggtgtggggagatctggtgtggagggtggttcgtcgggttaccgtcaaggttaaaggcaagtgcatgatgaactaattgtgtgattcttggatcgtttactctatctatttatttctgacatatttttatgtgataagtgactgtttatgttcagactgttgtttacgccatttagatttcaagtttatcttatgtctatgacgttattcttgtttcgatattccggattctggttctggttaaataattcaagttccatgcttgccatggatgtgcaatatggtttcaatttggttctttgtttccggtttcagttattcatgttccatgtgagtcatggatgtgctacttggttttctatttatattcctgtgggtaagtgctgatcacgcttactcagctttgccggcaaatgctaggatgtattcacaattgtccgggatggaaactactatttcaattcatatttgtctgggatgggaactactattgtctttaacttggtgtttgaaatatgattcttttcaaagaaagaaagttttctgttcaggctttattgcgcatgatgtgtatacgtgttttctagttccatattatacttgctgagtatttctgtactactataaaaaaagtatttctgtactcactcttctgtttatttgattttagatacacattgagatcgacatgcatgggcgggaagtagcacccttggattacacatttatagcactaaaaaaatttggttttagattatgatcctgcttagcataagttttgcgtagaatttgtaaatgtcaattaaagttatggttcgtattcttatgtgggatttatggaactaggatggtttggattgtgcgaattatttcattattgatttatcttataactgcctgtcgtggatgttcgtatttataggggagactgtcgaaatttctaataattttgggagttagtggttttgagtgtttttggtgtggcactctaggtacgtggttacctgggctgttacatagtcgacacgatcgctacgacacttgcatgccatataccagttgtttttttaaccttatgatgataaatatatgcaactgagcccccaccacaatgacaagtttagaatacatccataatatgaccaactgctccaacaaccaatcgaatccttcaacatatttattttaattgcagaaaatataattaatgcaaggtgatacatatagattgcaaatacgaaaatataacaagagttggtcaaaggtgttggacttgcttgagatacccgaaatcgaagaatgaataaatcaataaag

SEQ ID NO: 44738 - DNA, 1721 bp, Oryza sativa
gctgccagcctgaatatgttctgtggctcctcatgagtctgcccccaagctaaccctagccatcaacccctctccaatcgatgctgctgctggctactgctctcaacgactgagattggaatttcccagccccatcgcccctgattcaagcatggctcagaccagccgtgtctccccgagctcccctctgatcccttctttccctacttctgtggtgtgatctaattggtgttctcttgtgtggtaacctattgtgaatttcgatgcttgtgaacacgtcctaatgacgaacttgatggtgctatactaaggattatcctgctgtctgtagggatgaatgaatgaaggcaaaaaattgcttaagggcatccaaaaaagtgtaataaaaaaagtgtaattagttggtggacaccgaaataacgtgagtttgttgttgggcaccacgaaaaactgataattagctgatggacacttgcaaccttattttatgattctgcccttgcgtggctccaacacaatattctctcaagtcctcatccctatttacccaagatatttttgatgttcttgttagcaatagctaatcgctttttgggaattgaatttaaatttttctggatcacaccgtcagtccaaaagctagggaaagcaaggaagcagcggactcaccaatgcacttgccggagctctccttgggaggcggccgttgcggttcatctcgtccaagaagcgatcgacatacttcgatccctccttcctgccggccggacgtcttgtcgaggaagtggaggtcgcggagccccacctgcgcgttggactgcatccacgtcatccttccccccggtcgcatgcccatcccggccaccctttccggcactagaacgacgacgtcgacagcaactgctccaccccattcgccaacgccatggacgacagcatcgacagcaactacggagctcgagttcggcgagctctaccacaacggccagatccagccgcgaaccttgtccccgcccccgaatctcgaccctgacagcgatgacgatgacgactgctgccctgtgccagtacgaggctgtgagccatcgtcgcggagcggatccgcgcaccacacgcacaaggtccatgtcgtcgctctggatcttggctgggctctcttgcactcggctgggtcggaggagctagccgcgaaggcgtcgcatgaggatccttgatgccgcccaggtccctcgagctccgccgccgccacccaactgctggtcgctgtcgtcctactgccagcctcgtcgaactagaggaagatccagcgaagaagacaagtcttacaggtaggccccacagaagaagtttgacaagggtaaatttgtctttaatgagtgtttctctctctaatttctccataaatagtaaaataatcttaggagtgttcatcagctaattatcagttttttgtgatgtccaacagcaaattcgtattcttacggtgtccaccagctaattacatattttttgaatgccctgtagcaaattttgccatgaatgaatacttacataatatatcctagagtaaatgcagtactgaaattaaaagcacactaacatgattttgtccttataaatatgcttgcatgtagaataaccgaatttctgaaattagtggcacattagcaggattaaatccctgaattaggtttattgagcaatttacatgttctacaatt

SEQ ID NO: 44739 - DNA, 1002 bp, Oryza sativa
cgtcagcgaaaccgctcaccaaaaccgtcgagggagtcaaattgcaccggttttaacagtttaggggtcaagatatactgattttgcggttcagggtcatggattaaatttgggtcagttttaagggagtcaaagtggacttattcctcatcataattgtgtttaattattgttgttaagctcagacctgagactgatttctaccatctgtatattatccaggcttcttgacaacaacaaattatccggaagcatcccttctactttaggccttcttaatacattggaagttctgtgagtacaagcgcatattatggatgagacaataaaattcatagattgacactgctgccttatgtcatgaagttcgatcgatgcaggcgtttcgataacaatgcgcaattgacaggaccagttcctaccaacctcaacaacttaaccaggcttacagaactgtgagtttactatgtgtgtctgctttattaattgtcaattattcaatattaatagcttacgcgctatgctttcatttgacactagccatcttgcaaactgcaatcttactggtccactgccagacctaactggaatgaacgaactcatgtatttgtaagtgatcagtcaacccttccaatgttaaaactaaaattgactttccatttatcatactatgcaactttctggatggtttcatcttactaacttgcaattcaatttgttacaggtacatgaacaacaatagcttcagttcatcattatttgaataatcactagccgacgcattataggctgaggcgctatcagattcataatttacatacctaaaataattatttgaataatcaccagccgacgcggtatatatatccattaaaaataggtctaacaacatatgtatgagaattaatggtacttgtaaaattattttgagaaacatatatatttgtaaattttacctcaggcttggtgtagtagggaaacggtgtagttctatggtatgct

SEQ ID NO: 44740 - DNA, 632 bp, Oryza sativa
atcacccctcacaccatttgcacaatattttaacaaatcaatatattatttttataatatttaatatatttattaatatgttaagaaaatatattaagaattagtaattcccgcgttaaaacgtgagaagcgtagagttcagcacctggtatgcatgcagcatggttggattggcgtgtttgtgtgactcacgtctctcttctgacataactatacattgataaagactagggaatcattagttataaatgattgcgatatggcctctgtcagattgtgtacgtgagcctctcgatcttggatggaagatcaaatgcatgcggggtgttatttattgacatataagaaacgtgcaagttaattaattggattagtggtttctccaagcttaatgatgcatcgaaaatagtttcttttcagaactaaaaatttgtttgttcaactcctctttagttgagatgataacatcagtagtagtagatgagaacaggacatggcagctgacaaatcggatcaaactagatcagactattaagaattggtcacatttaaaaaatatagatttggccagttcattttgttgatttctatcaattctgaggctccgttcatttattatgagattcagattc

SEQ ID NO: 44741 - DNA, 1379 bp, Oryza sativa
ccactacatgtttcacaacatacccaaaaactacttttataactacccaattacggagtagcgtttagcagtccctaagtaagctactacacatgttggaaaccataataatctcaggtctaaggattcaacaccaacactaaatgagattactgatgacacaacacatatggctcttgcagtgtctcatgttgggtctatccaacaacatgttccccaacatatgtccacattattaatttggtatctctataccatgatccatgagacatgataatcaattaatacatgtgctgatcatctaaacatatttgtttcacatatgatatttgatcagggatcctttagaaatagtaacaaataacataaagagtctcatgaaagaatcacatattcattaaccaataatgagttatttatttcaatgaacaaagtcggataaatatgtaaatatagtatgtgatataattatctctatgattgcctctagggcatgtcactaacaattagctattctaacttatgtttgatcacgcatgtttcagtcgtgaaaggcaaatgtgacagttgctctatgtttgagattacagctagtactccattgagcacgtatttgtttatgcgaagatattatcagattatctttatgctctgtagatcttctgtttaattctgtttgatctgtgatgatccagcagctgctctagcctgtaggctcttctcagaagtagcatttacgtggtgtttggatccatgtacttaactttagtctttgtatttagatatcaatttagagtattaaatatagactacttacaaaactaattaaataaatgaaagttaatttgcgagacaaattttttaagcctaattaatctataattagagaatgtttactgtagcattacgtagactaatcatggattaattaggctcaatagattcgtctcgcgaattagttcaagattatggatgggttttattaatagtctacgtttaatatttataattagtatccaatcatccgatgtgatagggacttaaaagttttagtcccatctgaacagcgtcttaatatcttaaatggaaaatgatgattttcttcatagttgcatgtgcttctacatgttgtccaaagttattttctcttgatcttctgtaaacagatttgggacaaaaacatgaagagtctgtacaaataactttgtggcatatttgtcgaagcgcatgcaactatagaacgaaccatcaaatttcccatttagaagtgtttttttgttgaaaagaattttaaaatcgtgaacatacggaaaaacgtcagactttggctgccaaaatcggggattcttgcatcaaaacctgaagagggctgcaggaat

SEQ ID NO: 44742 - DNA, 1966 bp, Oryza sativa
aggaaggagcagaggcgagcttgactatggcaggcttactaccgtgtttggactgaaccgtttttcccggctattctgtagagtttttaaggcattttctgaccaaaaagtgttatgttgagtaagtttctacgttttgggacgacaactcccttactctctctgtcaaaaaaaaaaactcaaccccctcctaaaacaacaaatttagataaaggatagtacagatttactatactagaagatgttacatctctttctacgtttatttttttagaacggagagaatatgttgaaaaagtttcccgaattgctaaacagtccgttttatataaatttttttcttatagaagttcttttaataaccgaaataaatctattttaaagtttattagttactaatactcaattaatcatgtccctgattatctctcctgtgtttcgagtcactaaccgctctagcctaatagcttgaataagccttagggcccattcgaaccatcattttggggggtgtttagttcgtgaaaagaaaatttttaggtatcacatcggacgtttgaccggatattggaatgggttttcggacacgaatgaaaaatttaatttcataactcgcctggaaaccgcaagacaaattcattaaggctaattaatcagtcattagcagatgtggtttactgtagcactttatggttaatcatggattaattaggctcaaaatattcatctcgcgatttccatataaactgtgcaattggtttttttttaatctatatatccatgtatgtgtacgtccaaagatttgatatgacgttttttggaaaaaaaattgagaaaccttggtttagctgatcgagaagtatgctaacgtaaaatgagaaagttgtcggcccttcagaagtcaaccttaattaggaagaaccttttcttgctgagtaattgctgactctgcgtgatggccatctgcgcatctctacttcaatcttacagtgtggtactgagctactagcaaacagagagggattgcttgccagcatgggcgtgttggaagtatgtgtcaaggtgtctgtgctttgagtaggatgaaagatgagggatcattttcacagatatagaaaagttaaatgtcctagaatggtgggtggattttctatgcaacacaaattaatcaaaatgttgaatgttactaacttgtatttcctaaatatatgacttttgaaaataacacatctaactattcatctcattaaaaaaaatcatgtagtatcattcattttattatgacttgttttattattaaagatactttagacatgataatttgtaccaaaatttttagtaagacaaatggtcaaaacatcatatattttttaaaacaggagggagtataatacaagatagaaaaagtttatattcgtttaatatttacgcactaaattaaaataccattccagtatattgtccttgataacccatcagcatatagcccagttataatgtgtgaaatatctgtagtagcactgattagtcagctaacagtctccaaacatcaatatagctcttctataggagtgtacttccattcttgttgttgggaaccattatggctttatgttacgagtccgaatatctgaagtgaatatcttggatcgcctatggacaatatttgtatgtgtggtttgtcgaaaccaaataaagattaattatatggttcattcatggagggggaaccattgcaaattcttattgaggaagtttattgtcaagagattttagtcgatctcttttacgcctattgattttgctataaattagtcgacaattttttttctaaaaatttaatagatgtaaatatagtacaatcgtggtgtaattacgttgtaacttgcatgtaactacaatctaattttgaaccgttcgatttgctttaaaattcgtgcaaaggaggtaaaaaaggggatccact

SEQ ID NO: 44743 - DNA, 1618 bp, Oryza sativa
tggggggggggtaattcgtactttttccgtaaaaaaaaaaagctaactggcttgaaagtccaattattattattttttcttttggaaaaagccaagccagtggttttgactagccaagtgatcagattgttcaattcccagctaactcccttctcattgacgcttctaccaagtcccttgaccagacctgcccaactaactctacaaaatgttgtttaatttatccaaaacagtattctccatgtgcaaaatttatctcccgtcatagtcgctgattactagagaggagagcaagcaggtaagaagcttcgaatacgcattaattaatttattgcaaaaggcattaatttgaacgcaaaatttctaaaacctgatctggagtagtaatattaaatatataaatatacaaagtaatgacgtggatagaagcacgtgcggaacacatgaaaaatttggtggttggatcagctgttcggttttaggaagaattggggaaacttcaaaaacaataatgatccctcggttcatgacatgtaaaagcttctagatattgatgtagatatatttgactaccaccactttatatgcatgtgtgtgcacgtggcgcttacgtgtattaaattattatataaaagattttacaatatctataacatgaaaactaagacataataatagtttggtgcatatcacaatcatcagtttcgtcattgagagacaatgacccccgtagttagagcaagatgtcgggaaggacagaaggagacaagataatccatatacacagcctctacagtcttaaaaaaaacaaatttgagtacgaatttaggtttaactagttgtagtttaatttatttttttcgttacgagatgtggaagttgaatttgaacttgtatatatatttatgagtaaaatacagtagcggcccttaaacttgcgggtggatgtcatccaggtccattaacttgcaaatcgtgtaattaggccactaaacttgctaaatgtaccatcgccggtccaaaatgccgtttgaccgcggtcgcgccgacgtggcatgccacgtgcacagctgagctggcccgcaccatgccttttctcacgcgcaccgtgtgtgacaccggccacacttgttttttttcatcgaggcccctctgtttttctcattttctttcgacatccactgctgcttcgtcttccccggagtgccctagcgcagagtgcagcggagatcgtgaggggagtgatcgccggagaaatagggttccagcgaaagcgcaaagaggcgagattggctgttgcggcctcccgccggccataatcgcggggaggcggcatgattttccgcctggaaggggaagggcctccgttgtacagtgagtgtaacttcaaaatttcatccattaatctgcaagattagcatgcactgattgatgttggtagatagatacaaaggaatatggcgtttgattatgcaaaaagatgttattttttcctgtaggatgattatcctgacattgttctcgagtaggctagaacatgagagtaataccgctaattaggattgcaatgcaggtcctgatgatggtaaattcaccgtgaggtacaccatggtggttt

SEQ ID NO: 44744 - DNA, 1217 bp, Oryza sativa
gaaagtcatgcaaacagcaaagtaagcatgtaaaacaaaatgaagagcatacatgggcacttcatgtatattgtgcagactgtaaaaagtaagatcaaccatatagtactttccccactatgagccccacgcttcatggcgatagagccgaccttagtggcatcaagggcccatatgggtggtgtccataaaacaaagggcatccataacgacacttcagggttgtgcagaaggttcgtttgcctccgatatttggcggcaacggcggcagagccgtccattaagttgccatgccggtgcttcaggcatctacatcacctctagaatttgggcgataacggcggcagagccgccattgtgttatcgaatagtgctaagattatgtaccatctcaagcctttggacggtaacggcggcagagccgccatcatgttaccgagcgttgctgagaggatgtatcaactctagcaattggacgataacggcgggagagccgccatcatgttatcgtgtattgctgagaggatatcggaggatggtacttcaggtaccatgttcttctgcttatttcaactatagtagaagaatgatttgcatataaagagcaagatgatcagtagaaactgatttctcacctgtttacctttttagctcggaagagtctcgtgctgatgacatgttgagaaaccagtcgattctacttatcagcacacaagcaaaccaaacacagagttgtggaacacagaaagtatgagtgagtggaagctttatttcttctggatttgagtacaagctacaagaggagaagcaggagaccgaagatcggttgtcctcgccttggaccttctgggccctatttataggcggaggagggtggaggcttacgtcgtaagccttggaccttctggcttgtgtcgtaagccggcttacgccgtaagctggcttctcctgtaagctggcttcctttataagctggcttatgccgtaagctggctttctctgtaagctggcttgtgccgtaagctggcttcctctgtaagctggcttctagcgtaagctttcttatgtagtaagcttcccacttataatttaattcatccacaataagataggtttcataacaaaaatatccatattcagttaatctgccatgctcattttctgctggttgataagattgggctgagatccacatatatatggccagtgtgtcgagt

SEQ ID NO: 44745 - DNA, 1995 bp, Oryza sativa
gcaagctagcatgcatgctggcatgtagaaatggagagaaaaaatgtgtagtgcccatgatatcttaggtgctttgctcacttgtcaaccatgtccaaggtcacactggctattactccctccgttccaaaatataagtgattttggatggatgggacatttcctaatactacaaatctggatagcgatctctatccagattcatagtactaggtctcatccgttcaaaatcccttatattttaggacggggggagtctcatccgttcaaaatcccatatattttgggacggagggagtactatatagacgtcgtcgtacgtactctcatatatgtgcatatatggtttttaataatcttgaatatatactgagttagtcaatttatttaattttatactaggcatttgttagatatatattatttttctccaaggcttcaaaatcttgggatccaataatcacgcaaagtataaaattcaattgaatatggccagtgtgagaaattcaaattataattaatttgaagttgtaactataacttgaagaaattcaattcatgttaatatattacctccgtacataaatataaatataaagatatttggctataaacctatttgtagacagaggtcgtggtcgtatactgtagaacttctgaccagttcaaaaactaatatagatagtgttacccaagataatgagatctgttgagatattgccgagaaaaatgatttataggaatcacatgactggaaaggttgaaaaaatggaacttggatataacatggaaaacccttgcaggagaaaatagacgtactaaggcctaatcactactttgagaaagtagacattataagtaaaggtgggtacttctatgatgcattgtctacttaattcatttctccctttcaacttgggcgtgttgactttcaatttgatgtttttttttctttcaacttctcgctaatccattttagacttaactggttgtaaactaggacaacttagggtgagctcggctgcaagggctgcagcgctgctgcaacctgtacgaacagtgaagcaagaaaaaaaaaggcagctgctggctgcagccagctgctacacctgcttgccgtacaggcccttatacaatagcataggaactaactaaatagcataggaactaactaaacataaatattttcaacgaattagttcaactcatgtaaaaatatgtaaactaaaagtatattttagttctcgtatacattgaaatggtatgccatatataatcctcatcaaggtctcaaaacccatctagatacaatataatggagaggaatagataaaaaaaaacttagctagtgaaatctatatatcagtgtgatataggtgtacatgtacatgttttttattactttaatatacattaaatgttagtatcggtagtgatggtggttctatctgcagtcagccactacaactgtcatgtggggccccaaacaaaatttgttggtggatcatatttgtcaagctaaccactggaaaatatatagcatgaatgattttataaaatgtatgtcaagctaacatataatgttcgactgatttaagtagtattatctgataattagataatagaaaatagtctaatatcgaaaccatcacacgaggtcttttttaaaaggaaaaagtacgaattaccccttcaaactatcgcggtcgtctgaattaccccctgaatcacaaaaccggacattcttcacccccaactatgcaaaccgaatgaattacccccctcgacccaatccacggtggttttggtctacgtggcagtccagttaggaattctatttataaaatagttgtgggacccacctgccatacttctattctcactcttcctctctctcttatctatctcactcttcctctctctctctctcacgggtggcaggcgagggacagagcagcggcggcagcgcgagacgcggagacggcggcggcaggc

SEQ ID NO: 44746 - DNA, 2277 bp, Oryza sativa
gtttctccctttcccctctccatttcctgcaatatagcagcggaggtggtctggagcgaagaaggccgtggcagggagggccaccacctttgcgcgagcgctatctgctgctaggagcagtggtcgtcgctgcagggaggaagaatggacgagaaggcagctcagtcgtgtcgtcagccgtttgctcccccttctcttccgctaggtccgccttctcctccgccaccggccgccaggtctgccttcgcctctgccactagccgcctgggcgcctagtccgcctctacgtccacccatcaccgcctcgagatcccccttcgcctcacctcagcggatgggtggatgggccaccatgctgccgccgcgtgacgacaccacacgccgccacccggagtacgagctggtgccgaacgccggcagggacatggtcacaggtctcccccacgacgcactcgtccaccgtcccttagcctctgcgctcgccgccacactcgtccaccgtccctcagccaccgcgccgccgccgccgcctcgcctcctcagccaccgcttgcatagttgacagtgagagaagagagagaggaagaatgagagaagagagagaggaagagtgagaggagtatgacaggtgggtcccacaactattttataaatagtattgctgactggactaccacatagaccaaaaccaccgcagattgggtcgaggggggtaattcgtccggtttgcatagttgggggtgaagaatatccggttttatggttcaggaggtaattcggacgaccgcgatagttcggacgggggagggaggggggtaatccgtactttttcctttttaaaattccgttgtaacgcacggtgcaaaggagaaggccggcacgaacatgtagccatgattggtgattctgatgagtcatgagcgaggagtccccgtcatgtgtagtctcactacatcttgactggtcagtggtcactacataaccttaacaaatgccttgtccttacttaggggtacctaataggccatgcgtgcctcttcaataagatgcaggttttctaaccttgttggctgtgcttttgatgtttctatatccttaattctctgtagcacataggatcggtattgttgttgtagtagctagctggcatgatcatatatctgtaggctccaaattatgcatccaacagtgaacaatgaaaacttatcccagaaattatggtttgctactcctgataatggtgtgatcatgccgtcaacatgtaatctgattcgtatacataaatgttgtacactctagctaggcagctgctagaaatgttgttcctccgcttccaatgcaaaacatggaatcagatagaatttgaatttggaccggaatgtgatatttaatttccttcttatatatcttaatctagtgatatgaaaacagggttttgtgtggactgaaatctccaaaatcagtaagatttggagaatttcagtaccctgacagagtgcattctcaataacaccaactactcccttcattccataataaaatcatttccagatacattttattctgtaactgaaggagattgaattttgccttttttttccactgaaatttctcgaaattcttcacatacctgtatgaaaaattaagacatctatatatattacagggaaaacataagatctatttagtaggagcaaaaataaaaagaaatcccttggaattcccaagatctattatatgtcactggtggacaaaccctttttaatcccggttcacaacccccctatagtcccggttatgcaaccgggactacgaatccgggactaaaaatacctatttttagtcccggttgaaataaccgggactaaaaaaggatctttagtcccggttggagttaccaaccgggactaaagatttagtcccggttggagttccgaaccgggactaatgctcttttttctttttttttttggtttcctgctgcttgcatgatttcgagccccacgaatctccacaaatctttcgaacaccacgtatcattcaaaaaatccctaaatacatcaagctgcattttctatccccaaatacatcacaaatcattcacaaaatcacaaaatcatctccacaaattcattcacacatcacatatcacacagatcagaaaaagaaatccacatcgcacagatcggccgcacagatcagaaaaagaaaccacatcacacagatcgaccgcacacatcacatagatcaggaaaaaaccacatcgcagagatcggg

SEQ ID NO: 44747 - DNA, 1052 bp, Oryza sativa
cacacccactaaagttcaggaaagaaaatgtgtgtcagctagctagtagatatagacggttatgatcgagtgcatgaaatgatttcttaattaattaatataatttcaatttccctttgaaataaaccctctgattaatttccagcttcttcaggattacactcattatattgtataataagttcttctcccattcggaaaattgcattcaagcaggttggccaaatatatattctgcagaatataaaaggagtaggccggctcggcgtacaaacaaattgtatcagtcaccccggccgttgttgtaacatttgcatggaaagccccaaaagagaacagcaaaaggggaaacactgtgccaaaaccaagggaaggaatgtcccccaggccaagctgcaagagctactagcatgcatgaacataattatattattatatattcggattaattgcacactcccccaactcggtcactcactgccacctggggcccacaccaccatagtctcccttatgggcccactgccatagtctccaaaggctctctggtcactggtctcctctccatctgtgcaaagtgcctttggagtttggagtgctcacatacattcataggacattgttcttgctacattctctctctctctgatattctctctgtgagatattctcatgtgcagagaggatgcagctgctagctgtgatggatagctagggaggcagtgcaaactcgggagaacggaaagaaagataaacaaggtgatcgaggtagctagcaagctagagagagaggatatatagaatgcattgcgatgctcaaaagccataacacgctcgccacaaaacgcaatgatgcggttctctgctctccatgctccctctgatggtgtagattaatgtatataaacctctaatctttatttatctagttaaatcctttcttgatcaatgcatgcatagtgtaaagcccaatgcatgtatgggacatgcagatcaaatgtcgaatgtttaaattgatcttcatatatatcttatcaagattttagctgtaa

SEQ ID NO: 44748 - DNA, 4443 bp, Oryza sativa
gtttgggcatgtcgttctttgggagtaatttaatttgcagaaatttctctgaaaatatattgtagctagatgcatatgaataggtgaatatattattactcactccatcctaagaacttagtatttgatggaatacatcctagtacgtacttcgaatatgaaaagtcaatctagattcatataagcactaactaggacgatgatgtgtcttattcagtactaggttctaatatttttggatgaaaatgttactaaattggtttctagttaattaatcgatcatatcatgcacgcctatgttgccaaggcttaggataccatgcaagagagagcaatgcaagggcttgcatgcttgggttagggctctcatttgataacgtggaggggcctagattcccatcatttgggttgtaccaactctgtctccttcagttcagcaggcttcagagctcaagtcggcaaaattgtttgcctcacaaatttggcatgatgagtgtggttctacatgcaaaggtcagcctgcttgtctaccgactttataacccggccatatatatagttctcttttgaacaactagtagatcttacatatattgtttattttgagatatagcttaattaacatattcacctctgacaattaagaacacaaataattgagatgatctcaggttcatcacttgaaaggcacttccagtctcagatcacttttggtcatgtgtgctgatgacatgttttgaaagtttgcatgatgcgcacatatgcagccgcttgatgtcaattaggtccactaagttcatatcaagtcataactagtataggctatagcccagatacgaatatgctaaagttatactagcaattagtcagctctttctgagtgcatgtgactgaaaaacacaattgattctcacaaactgcgggtttggattgtaatttgtttgggttgcccggcccgcaggggccttgaggtaacttgagcataattaaactaagaattttttttcactgccaagaaaaaggcattaattaattaagtgtagtttcaaaatcagcatcaacggttgctctgtattgaaacaagcaatggtaaattaatgccagttgtgaaattaaagtgtgttttgattattaatttgcgatgaaaaaatggcatagtagataattggttttaatatttagagattattagagaactagttttgttgactgtgtggacaggtccactagctactacagaaaactaaatagggtgctggttggaaagcgtgcataggtgtcggtttccccaaccagcacctagaatgcggcactgatgagaaatataaaatgtgccggtcttagaaccggcacctttgaggtccctagaataaaaaaagaagcgctcgatcgatgcttcaagccaagaatttcatacaaaaattgaatcacaaaatcttagaaaattcatcacaaatctaaatcacacagaattcatcacggatctaaatcacaaatcaattcatcacaagaacaaaggttggagaagggtgtcgacaggaggatcacactgccgatgggagggcgtgccatggccaccgtgcgccgtgaggaggaggttgccgcgcgacgaaagggtgccaccgccgccaacgggaggaggccgccctgagatcgtgtcggtccggataagggagctgacgtaaggaggaggccgcccagagctcgtggcgtcaggagctcgcagtggccgccctttgggttggagaagaggactgccatgaggaggaggatcactgccaacggagggtgcgctgcagcgcactgtgtgcagtgaggaggaggccgtcgctgtcaccgtgaggaggccacctcgagcttgtggcgttcggatctggacgcccggagctcacggtggccaccccgagattagagaatggggccgccatgaggaggaggccaccgcaaacgggagggcgccgccgtgggagagagagagagggggcgggaggagggggaggggaggagaaggaggtcggagggcggcgcctccccattgtctccatgtgagagagagtgagagaggaggagggagaggagaacaagataagacggaggagataaggaagagcgagagaaagagagagagcgaattgataagatctacatagccctcccccgtgcggctcggcttataggtgtctttttttaattaatcagcacctataatatataataggtgtcaattctctcaaaaaaccgacatatataatattgacacctatatttgttcaaaggtgctggttattttttttttcaacttgtggggatgggaaaagcactatagttgccagttttagctattccgacacctatagagccgacctctatgtgcttttctgtaatagtggtcagaccgggtaggataggccggtcaaaccagcgtgtatcatgtgattagactggctagcttgacggtctaaccggtagagacctatttagtgtcggtttcaggttgtttatttgaatacttacgattatctcgtgattatgacttctagatgattttgatacgtgtgtaatactgtgtagagtcaagttaagaacttgtgttcggatatggttcttgtttagttcatgtgtagattattgaaggtcattaagtaacaacttgaaccgtcaactcctacataaaagatacaaaatataatatcaaatttaatggtcggggtttattactaactgttttcacaagtattggtaaatatttgtatgcgggtgattttagatgaatttacacccaccatgtaactaaatgtacctccgaccaatcaaacgagagaacaaagattggagggcccacatgacagtttaaaccaacttaaagtggggccaaaccaccgtgcaccaccttagaggcccacatgttagctcctggaagaaggtggtggagagagttggggcccacaggtctgctgaaccaggggtttggccgaaccaccatagccccacctcatctccaccttccacgtgaacgggcaagatcacctcccaatgatggttgtggatgcaccgacctccacaaccgtaattccaaccgttatatggcccaaaaaaggaggagctcaagccatttcacaatacacaacaaagtggagtacaagtcacttctcatactttaggcatcccttagtagtgtggagaaaataggtagagagtgaggggaaggcctggaggaattccgaagctatcggtactctcttcctctcttgtagctcagcgaatgcttctttaataaagtaagtgtttgagatttccttttggtatttaaattacttacttgagtgagatatattctcaccgttgcgagttcatcgcttagtatttatattaagtactccagtactaggactctggataaagaaggaagttcctgcgcgaagctagagtagtaatcaataacttagacgtgatgtctaggttagcggttatcttcatttgttgtgtgctccacggaaattgaggtagacagcagacggtgacagccatatgcgccttttgtatctttccacgtccgggtacaccatagagctacagggccgtctcagcttcgtagaccagaggagaatcggtgcccgaagtaatcgataaggttttacctttaacttaagtctaattaattaaaccataagaatcctatctaacataagtttagcattagatgttgttcttgattggattatgttcttaaataatatacacacacattccttgtgattaaataaacctataatactctaaggtgaaatgctacaacaatattcttatgcttgcgaatttatctgtgaccgtatcaaataccaacataggtgttgtcttgatgcctcggaagttaatctctatcaatatatacgaggttaaacttttaccatttttttaaaataaaatattaagttactaaaaaaggtagctagctagaaaaagttggttgtcaagggccgacatctccctcgtccactcgatccactatttatagtcatgttgtatcttaaagcttacttatggcacggatgtcttttttaagcgagtaacatgaaacaacaaagaagaaaagccggatcgaaccctataaataattacgacttggaataatataaaagaagggaatggaatatccacctaaaccgaccgtttgggctttcacgtgcaatcagattaagacagcaaaacaacacccaacaacaaacaacaacatgcatataattaaacaatctcttaattttctttggattgatataattctctctcagacgatgtggagacgatcgaactaaagcaaacggcaattaagcatcatgcagagacaagctagcagatgcgcgacccctgaccggattatatgtttactagtttaatcacgcaattattaacaagctggcacacattcgataagtgggggatcca

SEQ ID NO: 44749 - DNA, 1561 bp, Oryza sativa
gtcacaaaaaatacagaatgataattatataattttttaatgagatgaatagtcaaatatatcttaaaaaatcaatcacgtcatgtataggaaaacaaaaacagaggcagtatatttttggatgcagatactaatagaaaaatgacacatatttatgctggtttgcatgcagggatgggggggggttttgccttgccggtgcaggcgcggcgtctgccctgccggagtcggaagggaagacgaggagaaaagctctctgtctatctcgggagaggtgtgggtggtggtcgccgggcgctcgtgcggcgtggtagaccacgccggcggccggccaccgagagcgcgcgcgcgtatatatggcgggatgtatcgcgcccccgccaaattttctttttatactatacgattccccgtgtaatttataccaccagcagctatagcttctctctctctcgccatgcatgcacactacattatggtattttgcatgccactactgagctagctagagagacgtaaccgtccctaaataccctaaatatttgacgccgttaatttttgaaacatgtttcaccatttgttttattttaaaaatctaagttaattctattcctatcatttgattcagcataaaatatacttttatgtatacatatagttttacatatttcacaaaaatttttaaataagacaaacggtcaaacatatttaaaaaagtcaacaacgtcaaatagggaacggaaggaatatatctatagagatcttgctatatactcccttcgtttcgaaatatttgataccattgactttttagcatatgtttgaccgttcgtcttattcaaaaacttttgtaaaatatgtaaaattatatgcctacataaaaatatatttaacaatgaatcaaatgataggaaaataattaatataattacttaaattttttgaataagacaaacggtcaaacatgtgctaaaaaatcaacggcgtcaaacatttcgaaacggagggagtataattaattttgtatatactccctccggtttcattttaattgacgttttagacaatgacacggtctacaagatacatctttgaccttatttttctattataatatatataataaataaatgcatgtttacttttttatagtattttaaaagacaaatctatatatgttgttctagttcctttaaactaaatatttttaaagttattgatagtctaagttataaaagtttgacttcaaccttatctaaaacgttaattaaaccggagggagtactgctagaaaagcattggaacccatacagtgcaatccgaacaagacaaagacacaagaaatactctatatatcttgcatgcatgctgctgtacgcctgttcgatcgtcgtgatcaaatcgactaaacaattcgatcgtatactatatacagacgaacggacggatacatgtcaaattaaatgtcagctgcaattgttaggttgtagccagccctcaatcgtatacatatatactccatccgtttcgaaatatttgacgccgttgactttttagcaca

SEQ ID NO: 44750 - DNA, 1582 bp, Oryza sativa
ttttgtgtggagctgcttttgagaaagaaagaagagagatcacaatttaaaaaaaaatggaaaaggaatgttactgctgagtcatcaggagatgctacacctacaaccaaactcctagctagtacactatctttctcttactctcatgtatgttcctctcttttttttagtgcagggttgattcgtccctgtgactttttatttactccactgaacttgtgacgcagtcaatccggcacattttactttggtgactgaggagtgacaggtaaatactcccgcatgaaacagagtaaaaaccttgtctgtttataagcagtaggagtaggtactacgagcgtttgcagagtactctgattttccagtgcccaaatgcttttgctgcagtggatttctgcacattttgttgcttggagaatggcttggcaggtgattcaaccaaccagcctttcatcagttcttcagtttagggcagagaggagaggaagtgccacatcgattgatcacatcagggtcatctctttgaccacttgactgaggtttcttaccatgatttgacagttttgacgacatgttaattacctctaaagcattgaacccgaactccacattattggctaatagtaatttgttcatcaggatgcacctttagtaatatcacaacatacctattctctccatccgtaaataggtaccacctccgttctaaaataagtgcagccgtaagtattcatgttcaatgtttcaccgcccatcttatttaaaaaaattatatattttttttaaaaaaatagttacacataaaatattattcatattttattatctaataacaataaagatactaagtataaaaaaatttcaaataaaatgacggtcaaacgttggatataaacggtgtaaaactgtacttattttgtgacggagggagtatagttttagctaagcaaaacaaattaaggaaaatgttgaaaaaaaattatatcttttagtaatatggagagaaaatgatgaggagagagtactattggtttcaaagaggtgtagtggaccactctgaaactattttttttctgataaattcttatgttaaaactagggacgaaagaaatactcactatgtctagaagtacaggggattttgccccattgatatatccagaaatatagtggatttatcttctcccaaaacaaacaaggactgcaagccctccatcaatcgatttctgtgagaaactaaaaaatacagagaacgtctagtagtaccactactccacaccatccgtgtcaaaaaccaaaaagattacagagaacgtactggtactactactactttgtcaaggatgttttttcaagctacacagatatactattttctctttcttaatttgtgctattttagaaataataccctatattcttggatgaagggagtagttgtgaagtacatgtatttgcggtgtttacgagtcacttttaagggtgtgttcggatgccccttttcccaacccccctcactcgtttttttcatgcacgcttttcaaactgctaaacggtacgttttttaaagggctgcaggaat

SEQ ID NO: 44751 - DNA, 625 bp, Oryza sativa
tccatctcgaattctcgatccggttgagacaacgacgaatatctatcatgtccggttgacacatatctgtgtcggtctgcccatcatctgcggactgcggtcgtcacatgaaacagccagagaatctattatatcccactgactttatcacgttctacaatataccatcgacttttgcttaacttctacgatttaccatatcgccgttcggttagtctttgttagtactgtacaaatttatcaaaatgaccaaaatatccctaggataaaaactttcaaaatctggataaaaattctgaaatgttagattttaagtttttttttctaaattttggatgtttacaatcttgtgttcataatacgatattttgataattttatccaaattttagaagtttttatcttaggggtattttggtcatttagacaaaattgtatagtgctaacggaggctaactggacggcgatggtaaatcgtagaagttaagcaaaagtcgatgatatattgtaaaacgtgacaagttagtggtaaagtgtagacatgtgacaaagtcagtgacatataatggattctctctttttattactccctcccgtctatattttttcagtttttatactatgt

SEQ ID NO: 44752 - DNA, 733 bp, Oryza sativa
attttacataatcatatgaagtcatattgtaccttacaagtatctcaaagcatgacaacataatagccaacaccaaaatagcaaagtttagttcatagcaagcaccaacataatcaagttcacatcataaccaacatagtatcacatattacaggttcaaatcatagccaacatagtaacaagtagctgtccagatcatgcattcaaacaaaagcactcataaagctattacatatgaggtccaaaccattgagctagcctccctcctcttcctccccttcctctctcaccaccaccaccactagcaacaccaccacctccacctccactaggggcagcaccagcgcctacacctacccctctccccgccgccacctagcgtgccgcttggccgccaccctctccccggctactctcctgcacacgccgggaggagcggcgcctagcctacgcccgctctcctccgccgccgcccgctcgccgccggctaggtctccagtttttttggacacgggctaggtctgtcgccgagaggagaaagactctttatggttaacatttcgtaggggtaaaaagtaaatcactaattcggaaattctttatttctgccataaacccggtctcactaacttctatccaaaccagaggtaaatatctgtttcagtgaaaaaaggtggggaaaaacgaaaaccctaaaagtagagacaaaatcaatattagagataaaattggg

SEQ ID NO: 44753 - DNA, 1442 bp, Oryza sativa
tatacatcactgatggggaaaaccatttacttgaccgaataagcacacctcgacatgaataaatcccatccgctccaaagcatcaaaccccccaaaatcccaaaagaaaaccgaccaaaaaccctaatcgacagcaaccaagggcacctagacacacacattcgcgatctcaccaccgcattttcaccatacccgaaccaagaacggcaggagcgcctcaaaaccccccgaaaatccaatctttcctttcaaaaaaacaatccaaaaggaagcgagcgaaatgcgctacctcaaaacggaaggccaaaccagcgggtttgatttgatctgggatgctttgggtccagcttgaatgatgctactgcagtgaagggctcgagaggaagaggaaccgaggaggagtcaggagcattcgaaataaagctcctcctctctctctgtctcctctctatcagaggaagttttttatggtctcttgtggttttccttccccatctcctcggggtttggaaaggattatttcgatgttactgttcattcagtgggggcctgtctgtttggtgcaggtcatcaacggtaaaaacgaattactgctactccattctctgtagttcgaattctttaatgatgagcagtagatgcacaactgatgcttccaacagtgtagagtgacaatgaagaacttcatttttttccttttggaaacttcaggtgtccaaatgaatcttcctacagtatatgaaggaaaaattatgggaaaactgtcggaggaatctttttgaacttcttgtagtttgtactcattggctttgtttgagaggcttatcacagctgtggattctttcagaatctctaccttcagaaacaatccaaatttccacttacgccgtgttcagttccaaaatatttcttcaaacttccaactttttcgtcacatcaaaactttcctacacacataaacttccaatttttccgtcacatagttccaatttcaatcaaactttcaattttgacgtgaactaaagacagccttactattagattttgagaaaccctactattagctatgtttagttctcactaaaattggaagtttggttgaaattggaacgatgtgatggaaaagttagaagtttgtgtgtgtaggaaagttttgatgtgatgaaaaaaattgaaagtttgaagaattattttggatctaaacacggcgtagtactccagtagtatttgcactgtacttgcccaaccaaagttatccagattccagagcaccccaagctgatggcttcatcagaaataaaggaaacctgaaagttcagacttggatttctttttaataatgaaactgtaaagtgggaacagcctttgtcattttctgaaaaagaaaaaacaacgagccagctttaacagaatgaacattcaggccaagggagagaggaaac

SEQ ID NO: 44754 - DNA, 2818 bp, Oryza sativa
gaagtcgaatctgctacgcgtttgcgagctcggcaacaatgactcatgtaagatttcgtcttttgcgtttcgctatggtgtggggttttaagcttttcgatctacacggtttgtcagtctagcttgcccttgtctcaatgagtctagtggtcgtaacgtaagagctgccgtgttgacggggcgcgacgtgtggcaacgatgatatgagcctagttgagttgtgcggcgcggttttgattgttgccctaaccctggtgtttcctggtgaagttggagttgcccaatcggtgttggtgtgatgacgacaacaccatagctgtgtcagtgtgtgggggccgtatgtttgtctagtttgtgccttgttagcagctttggttgggtgttgagttctgctgtcctgttctcattgtcgtggtagcttagattagttggtggtgttgtgtgacagttacggtttttctcaattttccctaattaactgtgtattgtaaggtttggtcccgttctctttaaaatggagcacaatcttctttatataaaacgtcggcaaaggcttgacaattaaaaaaaaaattgcatggatctcccatccacctagaaactggtgagttcagccttcagcccaaattttcttcagtatccatttaggcccacaaacgcatgagtatttgcctcaggcccaaaattttatgagaattggccttgcggtcagaaacacgttaaaataactgatttgtccaatatttcttgataataaaccttggacataaacgacgcacacattttagatcaggcaaaaaaacatcaattttaaccaaaggcaaaaaattataccaaaagggcgtgtatgttagccttccacacaagaaaatcatggtttatcctttattccagaagatccagaaattttgccattatagcagaaacagatgagtattagccttggctcaaaaaatttcaagaccagtgagcattccatcctaaatttcgtgaccattagccttggggtcaatacattagatttctgctcaagatttattgattattaatcttgttgtgcacttgtgctaaaaatgcacaaatttagactcggtataaaacatgatattttttcctttggcctaaactttttggtgctaacctagagcctaaacatgcataaattgtagcctcttacgcagaatttcatgattattaacgttggggtaaaaattgcatggatctgccatcagcctagaaacaggtgagcgttggcgttcaaaccaaattttacattcggcacaaaaattcattagaagcctttgatgcatattaacataggcactctgtccaatttttcatgattattcaccttgtacataaaaatagataaatttggactctgccgaaaacacatggattttaaccatcagccaaaattttagcccccaaaaacgcatgtactttctctgtttcatattataaatcgctttaactttttcttagcatgtacttcctttgtttcatattataaatcgctttaactttttcttagttaagctttaagttcataaaaaaaatatatagtaacatttttaatacaaaacaatcatatttaatgttacaactaatgaaattaatttagtattgtagaggttgctaaaattttctataaaacgacagaggtagaattgcccttctgcacaagaaaaccatggttcgtccaccattaagaaaacacaaatgccaccccaagcacatggccctgttcttttctccaacaaaagttggattaaattttgaatactcgtggcacgcttttcaaactgctaaacgttacgttttgtgcgaaaactttatatatgaaagttgttctaaaatatcatattattctatttttcaagtttgaaataactaaaactcaattaatcacgtgttattataatcttattttacgtaaaatatttaatctttatcttcgtctttcagcacattcatgctacctttgttggcgaccctggtacgataaaagcggctcataaacggcgcattcattagggacagacaggtggagtaggagaaagaaagggggccatacaccacaccacagctcaaaagccaagtcctcctcggctcgccgctcgcggcgcctccctctccttttccgtctcctactccactccaatccctctccggactcggtctctctcccccactctttttcagtttttccccaccaaactcgcctcgccctcctctcttccttcttcttcttcctcctccgagtaccagagcgcacgaaacccctctcgaattctccgctctcctcccgccggtgaccccatccgaccgatcgcaagccatggccgccgccgccgccgactccgccgatcccgtcatcaccaccgccacctgcgcgcactggtaaccttccggtctcccgctaccagtagtaatctgtcatctgccattctgctgactgctgcttgtttgtttgctgcgtgctgggtagaggagctatgtagcaatcccctaggacttggctttcttcttctatagggcatttttttttcaggctatggtttacagctacagctactatgggagaaggcagtgtttagggttcttggttaccaagctggtatttttactgtataagtgacatctctagtctgtacctgatatcatggttgctttgcattctcagtaaggcctttgtctaattctctaatgatccgggaaggaaaactggaaaaccccctgacagtcaatttcatgtacatcagcccggcgaaaaaaaaaaaaaacgattacatgtacattggcccgggtgaaaaaa

SEQ ID NO: 44755 - DNA, 1375 bp, Oryza sativa
ccattcatgttttatcatttaataacaataaaagtagtaaacatacaaaattttcaaataagataaacggtcaaacgttggatataaacagtgcaaaactgtacttattttgggacggaaagagtataccacatcctaatactacctagatatggtgtattacatactcgatttgttttttataagacggggagaggtatagagatgcaaccggtgtgggcaagcaagatttttttttgcccgcttatcgttctttcttcttaaatatgtactatcttaaaaaaaaaagaactagcaagcggggattttatgtgggcagtgggttttcttcttaaatgtgtacgttgagtgggcctttgttgtagtattttatttgtattttcacatttttagggagaaaatacattgtttttggaagaaaaggcaagagctttgcccttatgtatcgatagagcaggagttttaataatgattttagggtgggtggaaagattacacatgaaaatatgacaagaaaatatataagattgatgtttcttttctttactacaaattagttcaggaggaggagtcatggcaattggttatgcgtcttccgtgtaataaaaaggtttagcatatcaacattgaataataggctcattagctatatcagacaatcatcaccaggggaacttttagatgttctctacagtgccaggctcctagcagccttacaaatcaaagatgaaaagtcttgtctagttccttctatgagcacctaattaagattccaaactccaaattattctgccagtgcactgtattctggtgccacttttcattgttcagtttatttattctcttaagctcctctcctatctccatttgccacctgtagatgtcagtgttattagtccttaattaagttctcttaatattgatgtagaatctcgataatggagatggttaaggacaaatataaacattttgtcagtagcttgtcaagatatgaagatgaattgcatgtccagcatacttaacacaacatatgaaagggatctaagatgtactgaaaattatacagtctgaatatattttataaaaccttatattgttccaaaaactttgttcgcgtaaaaagtacttttcaaagttaaattctcaatctgaacagaaaagggacatgtcttgccatggcataaaatggattatgctatttcagtactagttccctgaaagagaatactcctatcttcccacaccatcacgatataaattgtttgcataaaaagaacttagaagttaaattctcagtcggaatggaaaggaacgtggcatggcattaaacggattatgcatttatgctattttaatactagttccctgaaagaga

SEQ ID NO: 44756 - DNA, 1454 bp, Oryza sativa
acactttcttttgacttaccatactacctttgataagctggccgggctgtgcggtttgtgcgtccccgggaagttggagccgtgcgtgcgtgcgcttcccgggccctgtcgcgtgatccgtgtggccgcgcggcgcgtggagatcgaacgagccggccggcacgcgaggcgagcgtacgtcccgtgcgcgagcgcgcggctaaaccgctaaagaacccgggaattcgatcggaatggcgttaacgtacgtgctaacgtgtcgggtacgtacgtgacatcgcggcggctggcgtggcgtaacttgatcgatcgggatgccatgccgttcaacccaagcgtcgagaaatattctgcatgggcactaacgtggccaaaacccccaaaacccaatccaatctcctctcgcggaaactggtgcgtgattgttcgatcgattgatgatcacgtatattattgttcctgatgaattaataattaatcaggaaaataactccaaagttttagtgctgctgtgtgataaccagatttattgccccgtgcattagaagcttggaatggaagacctgatcatgtaaaataataataagaacaagatgaatcgctgagtaagcagctgatgttctacgagccattttcttctccctaatgcgtcatgcgtgtaaactccaacagaatggaccaaagattcggtgggtacgttcgtacgaatcaatgggcacaggccaataaaacaccgaattaaccactaaaaccaccgtggcagcgtccctaattaaactaatcgtgatagctttgctttggcgatccatcaccaacgctacgggacatccacgtatgtacaaaacgaccaaacggacatgagaaaccattggctctgtggcgactgattgaggctttacctgaataaaaacggtcagggtcgtcttagcttagtcaagtgtgattgtttatgattggaacatacctaaggaaaaaggtgattaggtgaaatgatttcttaaactaacatgggtgcacattcggttccaaccagtatcatcattaccaaaagcaagttgcagttgagtagacatgcaaaccaactttaatcctactctctgttaacctcccctgagcagctgagccgaaagttcaggtttcagactgcttacctagcagtcattgtaaattttaagttgagctatattactaccataaaacgctattgcatcaagatgcttaaatcaactaacatgatattttttccttgattggtgtatgctttgaaggcctgccaaataccaatgcaaatgtacaaggtagtagtaataccacaactgttgtaaataaaaaagagtaaattttactttaagtcaccttttattatcaatgtttctctttggatcacccttcaaccaatgttttcattttagattagataattttatctttgtgacattttaaaccatcctcaa

SEQ ID NO: 44757 - DNA, 2529 bp, Oryza sativa
aatgaattccgcggatggctcgtgaatcgcgatgccttgtcacgcatactgttgtatgttcttgatttgcatactcaaatgtgcccatagttctgttatgtgcatactcaatgacaaaaaaaattaattttattttaggacgaacaaagtaacgtagatatgccctttctgggtaataatttctgggtgtagctagcgccaacacaaatttagacaatttgacacttcgcaaaaactatttttacaaataatcactgccaaaacttattttgaccttttgttcagcgtcaaatagcatgacgctgaatgtatgataacatgctaacttaacctcccatctgtggtgacacggtattcagcgtcagttgacgtggcgctgaggcgtctaaattcagtgccacatgatttggcgttgaaaaaaaaaggtcattttcaaataagttttggcgacgattcatttgtaaaattagttttttcaaagaatcaaattgtcaaaatttgtgtagcgccggcgcctcttcttttcaatgcttatctggagcgtcacctgggacacgtaaatgctgcgatgtagaagctgtgtaactgtactctgtattgctgctacttatgttcctttagtagtagtatttacgtcgtgtttagttccaaagtttttcttcgaactttcaatttttccatcacatcaaaactttcctacacacataaattttcaactttttcgttacattgttccaaatttacaccaaacttctaattttggtatgaactaaacacgggctttagttctagaaatttttcttcaaacttcaaacttttttatcacatcaaaacttttctacacacataaacttctaactttttcatcacatcatttcaatttcaaccaaactttcaattttggtatgaactaaacacacccttagtatacacccttagtatagtggatgcagcgaggagctcctgatcgatctggtgcattgacatttcgatccatctcatctgcatccacatgtcggcgtccggctgcattgaagcgtttcacataaataggcacaggaaatttacccaaccagtgaccacacggaggtatcgttagaaagaagcgtgcatattcagatcgtacatatagcagcatttgttgctaggatctgtacgagcatgagcattcatttcactctctatttactggtagtactattacattaattttacctcactagtcaatactacccgagttatataacttgtggccagcacaacttgttgatgttgtggttaacaattttattggctacaaagtgtgtggcatgctacattttgctaaatattttgtggcgaagtgatcgatcgatggtgtcatccaaacaggctcatgttagctctgctctcgagtagatcagaccactgtactgtgttgggcgagtgtgtttagtcgacggagcctcggagaagaaagcttcttcgcccaggcggccgatctgaatccctagtgcgcccgagaatgattagttcttgatagaatcatgtataggtacaacagtagtactacctccgtccaaaggtaaatgcagccgtgagtttctgtgtccaacgtttgaccgtccgttttatttagaaaaattataaaaatatttaaaaaatagtcacacataaatttctattcatgttttatcatctaatcacaataaaatattaatcataaaatttttttaaataagacgaacgatccgccgttagatataaaccgtgcaaaactatacttttttgaaacgtactccaggagaatacatgcaggtattccgtcgtgatcgtcgaagcagcaggccggcattggtcgatctcgtcgagaacaatggatcacaattcacatgcacacacagaagagacacccgcaatccctcatctgacgtcgaattatatcatactgcagccaagtcaagggagttgcagttgccagctgcctggcatatactagaacagtcggcacaggcaagcagcagcagcatacaactagtacatgtcaggtcgggttgacgccggcggcgcgcgatggctgcctcgtgagagcgaggcatatatcacagtagcagcatcacgagccacacgtacgtgctagcaaagctagctcggccacgctgcatgcatgcagctagtgcgtgctcccccgttacaaaataatttagcttacaatcgttatgatttatcccagaacaatcaatttaaataaaatcaagcttgtttcgatttgtgtttctttctttttcgtgaacgcgtaaaaaaatacgcgtcagtatattagaaaaagatataatttttagttccacaacgtaacataacagaccaaacataagtcattgttgagttacatgaaaaaagaccgcaagaggtaaaaaaaagaaagaaagaaaagcgaaagctgctgttcctatatagagggagagagatggtggggaacccctatgcttccaacaagtgctcaaacaaaggggcactagctaaagaccagaaacgaccccttctaaagga

SEQ ID NO: 44758 - DNA, 3948 bp, Oryza sativa
aattagttttttcattcgtgtcaaaaaccccttccgacatccgctcaaacatccgatatgacatctaaaaaatttcatttcaccagctaaacacgcccaaagattaggacctctttggtgctcctttgttaattgggagtttgggaccaatgattcctacgacaattcaatggatttatattttgatgttctagggtagccttataactgcacggatctagatcagggcaagataattaatatttctcttgtttctcttaattttggcaatatcctgatgtccccaatagtgcctaaacaggatttatctgatcttaggcgtgaggtcggtcgtcgtcgtatctaggattactgtttgtacatgtggtttgtgctcatgcgagtgaagatatatctgtctctggtgtgaactgtgatgaaaggaagggtccctcagtacttacagtgatacaagcctatgctagcaaacagtgtagaccttaagtacactagcttaagctttgccctttcatcatttaacacatgtccgtgcattctctgcatgcctctcctaattatcacatccatatgatccactccaacctcccaacctttctacacagcattattgctacttttgcctgtagtgttacctttacagcatcatccatttaacacatcacatcccccacaacagtagcgaagaagacacggctattaaaaaagaaactcctaactcaaatttatagtaatacatatatatgtcccaaaaatatatatataataacctcgatatagattagacttttcatattactatgaatttgaataaggctctgtctaaatttattgtactagaatgtctacgtataagagattttagttggatgaaacgtatactaatacaattaatctggatagggagcatattcatattcatattattagaatacgtcacatccacacaaatataatcttttatattttggggcggagggggtatatttgaagatggagggagtagcgaagaagacacggagtgtatatttctgtgtagattttgtctttaagtcaaatatatctacttttaactactagtttttaaaactcacgtagtaacaacatataaattataactacacatttttttagaaacaatttgtaaaaatacaaacgttcaatttaggacatagttagaacgatatataagtaattgaaacggatggagtaaaaatgacatctaggattacattaacctactagtacatatatatggtatacatacgtacatatccttgtgacttgtgagtgaaacactgagggaacagccaaaaaaaaaacagtttccaattgttgcaacaagtccatttcagaacttctagaaacaaattaagtgaagcttagcttgagcaagaagattggtgagacaatgttcgtgtcgagtggtcatttgtttacggcagtaatcacaatgtgtcttagtcttgccggccgctattgactgcttatgtgtgggatccataaccgaggctatagctatcaatataatgtaatttactactagtagtaacttagaaaacaatatgaattatttagtgtttagtggatacacacagaaaagcttgccacctttgtgtatgtctttcttgtttatccctacattctttgattatgacattagactatttgacatttatgcttctagcattcaaataacagtaaataataataaagcctatgcaaaatctgcacaataatataacccaaacgagtagtctgataaaaaagaacggacaatttacttgtttatttaatgtgttttccttggatagaggttccctatgtcaaggtggattgtttgctcttcggtttcgcaaccaaaagttaaattttaaattttaatcttagagtttactttgacttttttatctaggtttattttttagcattggtttttaagtccctcagaacatatgtataaaagattaatttactttcaaattaatttctatcgctaataaacattacgacttataattaattacagacgaaacgataaatcgatgacaatactttaatttttttcttcattagttgtgtcaatcataattcgaacccagacttctggttctgatgccatactttacaagttggtggctttgctaggcaaatgtagggagaatgtcagctggcctcagcacaaatcctactcccacaaattagccccagcttaattagccccacaagagctagcaatcaaccaacaaacatagggtagcatcatcttaattagcctcccatcattttcatcactaatttaattgcgattgttggggcaatgacatccacaacaagactgatgacccaatgaagtgatcgatcagctccaaactaaagagtcattaaattactaaacctcaatccttttccgctaagttggttaccatgatgaccctagtgtggttttgttggccattagcgcagtcactgggcccaccagccaccataatcccaaaactgttaaattcctatacacttagcctttcctctttccccatgatatcattttactacgacccaaagttaaatcccttaaaaggggaggggaaaaaaaccaaaactttagtcacaagtggagaaaatgtttgatcacttatctggatatatattagagggacaaaagtgtgaacaatatgatttgacagcattattaattaaggaccacaagatctcatcaagaattgctttccactccattatctaaagagttggccgtggctagctggagttggagttaggctaaggcaatataccaattccatcacatgcggctaatataattccctatggattgagaaccctactaccaagtactccctccatccctaaatatttgacgtcattgacttttttaaacatgtttaacagtttgtcttattaaaaaattaagtaattattatttttattattatttaatttattgttaaatataattttatgtatacatatagttttacatatgttataaaagtttttgaataagacgaacgataaaaacatatttaaaaacatatttaaatatttagggacggagggagcagtgctactatcaattctctgtggcaattctcggtgcacaccaactcgaccgatcgaccgattgatcgatcaccaagtggagtcccggaaaagcaggcaatgcaaaaaaaaaaaatttcatggatgttaacatggtactcgtcacctgactgacgtaacagttgtgtaatgaccgtacgtaggtagccgacaaggccaaggcactgccatttggcaaattgaattgccaggtttgatacgtacgcagcaccggctcatcgatcatcgatgatttcacgggtaggtagtcaaagttagtactagtacactgtgtaacccgtacagttgcaactgtacatgagactacgaggtttaaattctggtgttcacgattacatatggatacacgcttacatgaatttagtatgttagaggattaccgcgcctccagtggcggagccaggatttcaaagttgggtattcccgtctaagcgctgagccgctggccgcccctgcccctcgcagccgccggcaaccaacaggcctgaccgcctgagcttggcggagtgtcgggcgccggccaccgcccgccgcagcaatggcctccccctccgcggtagcacggttcagctcctgccgccggttgccgcctcaccatgccgctacctagggtttgcaaataggaagcggcgcgagggagccgagccagggagggatggatcacggagggagagcgagagggggctgtctagaagagttgtggctaagagcaggtacaataacaacttaataagctagctatacacatattttaatgggataaaagaggagagatagagtagcgggctacagatttgtagccagctgcagcacagacttcaagatgcatgt

SEQ ID NO: 44759 - DNA, 1271 bp, Oryza sativa
tatatatatatatatatatatatatatatatatatatatatatatatatatatacatatatatatatacacacacacacacactagaagtatacttgttttttgataaaaaaaaagttgggtattcctaggaataccagggaatcatgtagctccgcccctgcgcgcttccagctttttatcacgtggtaaaggaacacactcattgatcattttctttgtaatcgtaaaaaattagacatgttttatattggtttttgttgtgctgatagtagaatcaatctaagcttttttttctcctaatttaatactctctctgcttcattatgttataagttattttgaattttttctagtaaaaccttttaagtttaattaaatttattaaaaatattttcaacacaaaacaagcatattattaaaaaatatattcaatctacatttaatgatactatttgatgttgtagtattgctaattttttttaaacttggtcaaatctaaagaagtttaacccgaaaaaaaaatcaaaacaacttatagtttgaaacggaggaagtagatcgtacctctacggttcttaagaaagtatcttgagatatctaaattttaaactaaactttttggtaccttgaggtacttagttactagagataccaaatctattatattattaaaggaatagaaaaaggagcctccacgttcgctctcatagcctagaaattctcacattaatcggagaaaaagaaaaacagagtccatatagaaatacaatttagaaatagctaaattcggaattaaaaaataaggaatattaaaagaggagactagagtccatatagaaatacaatttagaaatagttgaaattcggaattaaaaaataaggaatattagaagaggagactagagtccatatagaaatacaattagaaaataactgaaattcagaattaaaaataaggaatattagaagtagagtataaaaataaggaatattagaagtagagtatagagttcatatagaaatacaattaggaaataatagaaatttagaattaaaaataaggaatattagaagaggagactagagtccatatagaaatacaatttagaaatagttgaaattcggaattaaaaataaggaatattagaagaggagattagagtccatatagaaatacaattaggaaataactgaaattcggaattaaaaataaggaatataagaagtagagtatagaatccatatagaaatacaattaggaaataatag

SEQ ID NO: 44760 - DNA, 999 bp, Oryza sativa
tcttcaactctatccttttacatgaaacaatcatttaaacacgaaaatggaatggggacttactcttcttcacccgatgaatcagccaattctgactgttgactttttcttccctgcataaaccgaatgtgtaaatcacttgaaacaactttatacactgatagtgtcctaaggagtgcatatctcctaatgttttcccagaggaaaccataatgttctttaaagaatatcacagaaccataagtcagtggtcacaattctacttcccttcaagtaacatgaactttctgaggagatacagtaaaggacaaaagttctcacttacattgttccgtccccaaaagttggagcgcttcacatgcatctgagttccattggatttgatggactgcctgtctacagaatattcaggtccaggaccaggtaaggaaattccagcatccaaagaagaaagaatatctcccatcgacaacggggaatcctgactggacaccatatttggtggatctttttcattcggtgatctctggacattcactgaaacattttcagctaaatgactatgctgggcatcatttacatccacctttgtttccaaagccttatcttctgtagaaggttcaccgtctgaatcatcatcagctacctgtcgttcatgttgcaatgagaacaaaagcataagccacatcatgatttttgacagatgaacttgctaatcaaataaaaattaaaagccaagttggtttctgattaagctactcagaatgcttcatatcatgaaccaccaaaaatatgtaaggataggcgcgataagattatgctactatatagtgaaaagaactactgcatgtgcaaagggaagaaaaaaaacttctcatcagtggaattggaatcttaaacctttttccgtgtatatatgattgacttgaaaatattcgaactgtatatatgattgtattagatcaaacttactaccgattaaaaattttaagactgcaa

SEQ ID NO: 44761 - DNA, 1123 bp, Oryza sativa
ttgataattaatttttgaaatgtgtgtagtttaataacatatgaattatatattatgaaaatatttttatgatgaataaaaatataagtcttatcatgttaaactatatgagtttatagagattgatggtcaaatattaaaatatttgacctaaaggcctgtttggtaaagctctgacttctaaatttatttttaggagatgggtttaaagtggtgctgtggatcagtctaaacctaactccatcttctatttcattttgtgagaacgcttcactcaactctagtcctatttaagatgaagctggaactttttgattagacgctttagaataggtgaagttgaaactggacttacgctaaacatacctttatattctaacgtcccaatcgtccaatcgatcgtatctcaaaaaagcacgaaaaaaaacataaaaaagagcagaggcaaccgataaaaaaaaaggatgcgagataggtttgcgctgtactccctccatttcaaaatatttgacaccgttgactttttagtgcatgtttgaccattcgtcttattaaaaaatttaagcaattatttattcttttcatatcatttgattcattgttaaatatactttcatgtacacatatagtttacatatttcacaaaaaaaaatttaataagacgaatggtcaaatatgtgctaaaaagtctaacgatgtcaaacattttgaaacggagggagtatcttccaaatctggctcttttccaaggacgcaacacgtacgtacgagcccacgctcaccgcgccgcgcgcgccgcgacggcgaccgcggcgaggccaccactcgcacacgcgcgcgccgcggcgagcgctgacccccgccgtcgacgacccgaccgcgagtggagaacaccggcgagaaatcgccgtcaagctagctactttggctgggaaaggtgcaggtgcacgtgatttgctggtaatccgagacaaaaacccgcaccaattggacagctagcgaacgcagcgtgggtgtgtacttgtgaccgtgataatttcgcgttggatcgcgttcgtttagtagtcatcagtctcgtctcagtaccagccaatgcaaagtcaaatccccagctggaatgccc

SEQ ID NO: 44762 - DNA, 891 bp, Oryza sativa
gcgctgactgttgttttttttataggaagaacagaactttacgtcaaaagatcatcattacctctcgtgttagcttaacacaagagtgcaatcactctgtgtaagcaaccttgtagaggcttgtaattagtgcctctaacagccacttgcaaactaattatgagcctcacttagtacatgcatgcatgagctaccgttttattgttgtaacaactatgtatataaactcttgctgaccaacgcatgtggaaggtatggaacttaaaatacttttgagaaattaaaaacgcgaatattagggaagaatctaatatcaaataattagaaggggtgagcgttcgaacccagatcgtctaacccaccaccttatggagcttgccggaaaaccactgagtgtttctcagatacttttgaggaattgaactaaatcctattgatatcctataaaatttctgcattctaaattctgaagtagctagcccaagcttcctgacgcatgagaaggtcggtgtgttgaaaccaatcctgtaaaacctctgatttcttccatatatacatcatcaaccaaaccataacctaattaagtatacattaaccaaaatatttaaccgatgctaattacgagttatgtgcttcactgttattttaggcttgtcctaaatttagttgctcttttaaaccggtgtacaagtagcagatcatgtatatatggtgattaattagaagatccttgagagatgccaaataaaacggatataaatgaaacgtatcaagctaagaatcggcaggagaggcttaatctgtgccatatatagagggggatatgatcttatcccagaggtggttcacttgttgttttccaggaccatgaacagtatagcaacagccaat

SEQ ID NO: 44763 - DNA, 1382 bp, Oryza sativa
atatgatgagcagcaatgaaaccactttccaggacgacagacaaaccatgtgtggctgacaccttcctctatcttactactacgattacgatcgatctcattctctgctgccatgcacctttgatgacgatgatgataataaccaacttcacaattaattcacaaacaaaccaatcacaattaattaaagatcaatttgctgaagatcctgtcagggtgtggaggagacaggcgccaagacattgctctcaacttaatcacgttgcctgcgctgatggccaggccggtttggtgctatgtctccgataccccaaacccatcagggggcgccatcacgtatatgtttcatactgtacgtacgaatgcagtggcagtagcaagcagggcattgaagacggctgctggtacatgcacgcaggaacaatgtaccagtacaccagtagcagttggagatggacggaacagtgcatgcagtgtagaggtagtagtagctaagctaggtggtgggtgatcgttgtcatgaggcctggagaggctccaccgctgctgccgctgccacgccctacaccgcgggctccacgccgcaatccgctgtccccctcatgctggtgccgttgccgtctacctcgcgccatctctctccgctctcccacaccgcacagcgcacgccgtccgtcgatctgccggttgtccccgcgcgcgccactgtgatcaccggcacccgcgtacgcgacggatcgatcgatcgcacgacaccatgtataccacggttctccccggcgcgcaatcggacgggagacggataataatcgcgccgttgttcgtttgttgaatgtggtcttgataattgattcataagttcagttatgaggtattttctcggtgccatagaaaaccaatcaattattaaacatgatgtattttaatatcatttggatatgtctctctctaaatttgtaatacatgaatgtgccaccttcgatactaggttgatttttttataggacaaatagagtagaaaaagatattctgctattgataatagaggtagtataaataggtagggtaattttatcatccttgagaagataccaagatataccatattttctaatataaaactagcatggtggcccgcgcagattgcgcggctaacatcattatattttctctcatatagtagcatatatgttttctcattatattactaaaatatattaaattgacaacataactttaaatttcgcaataacattacaaaactaccaatactaccaatgtgtaatattgatattgtattttatatacgtgttatttattaattatttttaatatcaaattttagttatttgtaaattatatatattcctatatggactcta

SEQ ID NO: 44764 - DNA, 714 bp, Oryza sativa
ggatcccccaatattaaatatttacaatatttagaagtaatttacttaaatgctagaagtaactgaattctaaaatggaagtaactttttatagcattataagtaattacatatatgtgttaacagaaagatcttcgtatgtaatgtgtagattcacaagtaaatacataatattttttattcgaggtaagccatatatatagagagagagggagatttttgtttttcgataaaagcaatttatttcatctaggaagtgattctttagaaaatagatgtaactattcacagtattagaagtaactattgatattcgaagtaactttttgcactgtgtcagaaggaactgcactgctggagggaagtaacttaactaaaaattaatgtaactcttcatggtattaaaagtgactacactgctagaagaaactaacccttcatgctactaaaggtaactatgttgctagaggcaagtaactcatcgtggtattcgaagtaaaaacactgctaaaagagttaaaatcaaaaataaattttaaataatctgaatatatttaatattgtactcgttcgtcacatatattttaaatagagtacgatggctcaataagattaaaaaaatatacagttataaagatataagccataaaaggctctaaaaatactagtgcaatagtgctagacgatgtagcatataaactgcatggtgctaac

SEQ ID NO: 44765 - DNA, 763 bp, Oryza sativa
atttgctagccatgtaacacaaaacaatctgatattgtaattatacggtatcgttagaatcaaagtatgtatattttggaatgaccgaatatgtaataattgtaaagaacttgtatgtttgttgctcatctttcttcagatggaccctttaattttttttattcttgcatgacgcttctaaaaaaaattgcaagttgtcttgttcgtagccgattgcagttaggctaatctaggatgtatgatgacacatagagggcggttttaaaatgactaatgagtgaattgcacttttggtgaccttttcttaccaaagttatggtttggctcgaccacccttcactcaacccactaggaaattttaccaccacaattctcttatatatccacatctaagttatcctctgtcaacgaaccacatctaggcataactgatttcagaagagggcagcgacaatgaggtcacctttgaagctcgagggcgagcctcggcggagggcttggtgaaggcgactgcggcgaaggagaagggtaggggtgtcagtgatggtgaaggggaggagtagcctcatactgcctgagctagtggtgacacgacgaagaggaggaacgtaactagcggccgcggggaagcccttggttggcggtgacaatgctggccttgcgccactccaggcccgatgcgagggctgtgctaactggtggcaatggtagctgcgacgatgaccagctgctgtgaggaggtgagcaaggagggctgctgctg

SEQ ID NO: 44766 - DNA, 1212 bp, Oryza sativa
aagtcgggggctacacctaattaggtgcatctactcgatgcaccatgttttattttcgcccttcacagtttttgatttttagtactcggcgaactggagcaagttgaattgaagcactcggactactgttttttgaaggctattttgtcaactgcgaaggtctcgggggctactgtggagattatggataccccatatctatatgacagttgtaatttagtcggatatacggtaccaaatatagatggaatatctctatgaagactcgggttaggttctaaacttgtatgtcaagaaaatacccgggattttagtaagttacgattgtattttatctataatcccatattccgttaggatatgggctgtattttgtaaagcggactccttcacctctataaggagggtccgtgtgcctcttggggggcgattctttttcccagtttatacaatcaataatacactcggcggaatcatccccggacaggagtaaggtattacttcttgaataagaaggcctgaacctgtataaaattccttgtttccaaacccatccactttcctagcttgatagccacccccttttattattgccgaaatcttgcttcgacacagggtcggcctagctagttcgcgattgatcgcgagaccttgtgacccacgatcatgtccataccacttcacacgcgtttttctttttcatagcactgtcctgttcgatatttttttttgctgtgaggttgcgagaatcctactgcacgatcaaagtttatacatcttaagtttatacacctattactttcctattttagtaaatttatgcacctaaagtttatacatcttaagtttacacatataaagtttatacacctaaacacaaagtttataagtcaaaagttgatatacccgattcaaatttgaatttgtattcaaatattttttatatgtagtatttctatacatctaaagtttatacacctaaagtttatagacccaaagtttataagtcaaaagtttatatacccggttcaaattgaatttgaattcaaatatttttttcaaatattttttatatgtagtatttctatacatctaaagtttatacacctaaagtttatagacccaaagtttataagtcaaaagtttatatagcagattcaaatttgaatttgaattcaaatatttttatatatagtatttctatacataaat

SEQ ID NO: 44767 - DNA, 646 bp, Oryza sativa
actagggcgacgacaacaggcgcttgacggcaggcacgagctagacaccaaacccttcaacttccaggaactcctcttttggtttgggaaaaattgagcaagactgagtacaaccaccgtattcaacaagacacacccacaagtgcagaataaatgcaagggtgtacaagggagccataatataggggttagggtttgcagtaaacagcattaaaagtcacctagttgctcaaagctactttgtaaacacgatcctagagctatgcaatattattaataaaggccgtgaacccgcacgaacctgccttaacctaagacctacgatgatttggaccgactggcaacccgaccctgagtcctagctcgtcccaagccaacccaggccaaccattccacattttagttgttaagcaggttttaagaattaaaacactaacttgggtacattgctcgggcttgcccataaccaagggcgcggctattcgaataggttatactctgatcagaggtgtacatctttacccacaagacacatcttcctcacgtgtaaccacgtgccacataccaccacggtatacggacggaagacatgacatagtttccaacccatcctagccatagacaagagtaccgacccaaccccacc

SEQ ID NO: 44768 - DNA, 830 bp, Oryza sativa
tcatgaactttcaagtgatatgtgtatgcatatgatacgtgcgattcaaacctaaaacctttgaacacatgcaaatcaatcttactatctcacatatagatcacaggacaatcggtcatcagatattattcttttaacttttcctctccaaatataaaacacaaatttgaaactccagatttttcatatgagaacgtaactacaaagttgcagatctcatcgatttctacaactttagtgtagggtatatctctatgcagggttgtttgagaaattcagaaatattttagaattagatcacatcacatataacacatattcgggtatttcaaatttttgattttttttctcatccgtgacggttcgtaactaccacccttcacggataacgttatccgtgaagggtggtaattaagacccgtcacggcttagtgctatcatctttgacgggtcatctcattacatccgtcacaagtgatttgttagctttgacggggtattgttgtgaccctttatagtttatctgtgacgtgttagaactacgacccgataaagatgaacttatatcggtaatgggtcattcccggtagttatattttaaaagggaaacttattgagccattagagatgagtcatccgagcgagtttgctacatctcagagcaagatgtgggagtctgggtgcagccggcttgccccgccagcccgctgtgcttgcccctgaaccccgggtggatcatgagctcacgtggcgacttggcaaactggttgcaagttcataaaaacatgggaatctaggagaactaggaaaaatattatgacatgtgtctg

SEQ ID NO: 44769 - DNA, 1371 bp, Oryza sativa
cacctgagattatgttagatttctcaatatcaaaaacaagtgcaacatgagcacaacttctcacagccacagtgtaatcagagcacaggcccaaacaagctgaggcatgaacatgtagcagagtacctagctgctttcaacaccggccacttgtccatgatggttgtgtcaatgagggcgattttatatgaatttattaggtcttcagtgatggtctcatataaaaataaataaatttgtacatagtacattgtacgaatattttcatcgacgaaaagaaatataattagattatgcaatatttttatatttcgtttcaaagagcatgtatttagctagtgattgacgaaaattcttcatccttttgaaaataatgtgcaaactagggatagggaacacctaagtacaatccctgatgaagtctatgaaaccacccaagcaattcttctaacagactaagaatcggtttcaagactattttatcaatcgttacataagaagttgatggtgccaagataacaaccccataaaaatggatggtgtaatggactcatgtccaagtcctacgtttgctagtactttgattaacgtgatgacaccttttcgtcagttgaaacaagagatcgcatgtgtatgatcagttgaaacgtagagaaccttgttttttttttcttttagaggcatgcaagtagcatcaaatgtgttgaacgaattatggcaacagttcagaagttcatacggtttcccattcggatgagcccggtcatcttgcatctgctctacaaaatgctcaccattgtcaatactaaagttctacaagaaaacacatggttgtgagatttttttaataaaaagatgccattgcatggctagcgaaatccacacggctaaatctatctccatgatagtttattgctacaaatagggctcatgtcacttgtgaatgggtagtgtcaagattgcaatgagcacattgcataatgtttctatacatgcattaataaagagaaacccgtgacattcaagcttggtaagaccaataatgtttctcatttctctttaatgtgaagacattagctagaacggagaatgaaagaaaactctcctagtgatgtcaccatatttgacacctagccgatcatatctgtttgagctaaacttcaactgtaattaaaggctaagtcgggaccaggttcagcgtacaattgatattcccactgtctctcattccgatgaacaacagtctcctcagcaacctaagcaagttccctttcctgtcctattgtcatcagtactaaaattttacattcaaacagactgatctgctgtgcagcttctgttcaatttggcgtgcagagatgtgctttattt

SEQ ID NO: 44770 - DNA, 2095 bp, Oryza sativa
gttcagtagagtttttcaggtgcacattaacaaagtaaaattcaaagcaaatttgggagaccgctgccgccaccgctgtcattgtcgcccgctccagacgctggatccgctgccgctctcgtcacccacgccggatccgtcgcccccatgcctccccatcgccaccgacgccaccctcttctccggccgtcgtccccgtggtcgccggccgaagacacccctagctcgtctccaccggatatccaaggggagggaggggaagaggagaggaggggccacgtgccgccatatccgctgcctccatgcctccccaccgccgacgaagccaccctcccctccgaccgtcgtcccttggtcgctggccggagacccctgcgcgtctgccagatctgcaaaaaaaggggcggcgatccagcgcccccccccccccccccccgcccacgccacgcactcagagaggatgggaggagaggagatgagagaaagagtgatggactgatgagagagattaataaaatgagagagtaggtgagagatgagaggaggagtaatggagtgaataataaaaggaaaaaggtagagagagtaggtcaaaattttgaagtgtatgggagagaatgcatttttgcgtgcggttcagttaagacgtcacctgcgaaaacagtctcatttttgcgtgcggttcacttaatacgtccgtctgcgaaaattaatttttccgtgtggtcctcttatataaaccgcacaggaaaatgagccaattttcccatgcggatcgagttaccgcccacatgcaatctaaaatggtccctgtccaggaaaatcatttctgtagtagtgcttggtggtggttgaacctggattgtggacccatatacttgaattcgtgatgattcattcatcacttctgaaatgcaaattttgcccaaatatttgtagttagaattatggtattgtctattttatatattgtaaatatgggcaatatgtatcttgaattatgtatttagttatatataacacaacaattcaaacaaattgagaaaacgacatgtaactcaggagttgtgatcatttaactatctgattattatttttttattgttagctagaaaataggagaagttttcttagaaaataagagaggagaggagaggagagtcagagggtggagggagtatacgtgcatgcgtacatatggtatggtgggggtggcggcatatgggtgtttttttaatctaattgttaaaattactggatcatctatttaaaggatcatctatttattggatcatctaatagttaaaattatcatattttctatttttttcgaatttattagagcatcatgtggtaacataggagcatttgtaaagcgttgtatggtagcttaagagcatttgtgacatgtttagtaaaattttaatatataatagatgacatgagctaaccggcaggcaccttctatccaaaataatttaaatttctctcaagatttctgtctgcgtagtccaaaaggcctgtaacttttaccacgactccatcaatcctataggtgtgggaaaaaatacgttctagctgatgttacattcccacattatatagattccatggacagcagaaattcctagtgctttccattccaaggatccacaactgtttgagactagcagtagtgaaaaagcaaaattgtaattccaataatttcacaagaaaaaaatcatgtgtggtctttcattgatcaatatttctcaaatagaaacaagggcatggcatttatacaaaaaagcttagtaaccagccatatcagccataaaccgcacacgaactaggcaaccacccatcaacttcccaggtatattttagtgagcaactttatggtccttgaggaggtaccacgaggtaccattttttctattgtaaatttagtacctctttgtacctaggtactataagataccatgaagtaccaaattttacgctaaatttttggtatcttatggtaccttctcaagtaccgtagaattctctattttagtagtacgatctttcaaggttttttgtttgactgcttgctctcgtgttccagcgtgta

SEQ ID NO: 44771 - DNA, 1199 bp, Oryza sativa
gcatccggtccaaaaccaagggagaataatatataggacaaaaaacatttttacccattgcaacgcatgggcattttttctagtgtaagagtaaattcactgtgtacccctgaaaactcactcaatcccttttctacccctgaaattaacccgatcgcttctatatactcctgaaatttcaacttgatcccttccatgcctctaccattacattttccatcgcttcactgttatttttgtccttgatactttaggtttgaatataaccttcaaaaaaattaaaatttttgtttaagtgcgcaatatatgtattttatgaaactaatgagactaaataattagtgcagaaaattttgacataaattttagaaataaaacaaatgttataaattaaatttttatttgaaattttaataggacaatggatttttttatcaggagcattcataaaaacattattgtgaacattggtcctatctttgtatgaatgctccttattttttataatttttttaaaactaaatacatattttttatttcattatataaaaataatttttgggataaataatgcttcgcacaacaaactcataactataatagtctcatacgagaagcttttacatttttaatattgtaattcataaatttatatgtttaaccaaagggtaaaatggacatttttatagaaattagacggtcaactgacgggagacgtatcgaaggtgtcaaaatcaaatattgggtgtatacaagtaagtaaaattcacgggtgggtatataagggattagctaaattttcaggggtataaggggattttctcatattttatatatggcccgcatgatcaagtaggtcatgcaacacaagcacgtacgagtgttccttataaccagcaatgctccatgcgtgaagactgtcactgggccatgtgccggcgtgtagatcagcgcaaagcgtgatcaaatttatgtcggtaggattcgcgaggtcgctgactgcttcctcgcaatctcagttggcatataaaaaggcaaaaaatatcagaagatcaaataatgattgaaaattactctactaaaagtttatttggaacgacaaacccgattgaagattagagcggtcgaaataagtgagattgatctcggtgtttcttcagaagttaaacccatcacacttttcgacgagtaattcgacg

SEQ ID NO: 44772 - DNA, 1086 bp, Oryza sativa
cacctgacttggaccagggtgcaccttttggctgactcagactaggttgcggcacttgaagatggggcttcagttccagaacttcgcatagttcatatctttggagtcaacctcatacaagttaccacttcatgtcaggcgtcaacactagcttgtcattactaggataccatgcttgtcatcataaggatatcaggcttggcgtttccttccagcttaccaccatacgctttagactatgatatcccgcttactaaggataccatgattgacaacttgccattaactgtctcatattggctttcctggtctccagtgctaggtacttctgctattcgatgccagggtcaaccattctaactataagttatgcttcccaagagaaccaatttatcccgcttgacatgctttgacgtcttcccgaatgactttgctgctggacttgttattgtctgatcgtgatcctgccagatctgaagcttcgttgttagaggtgattttaatctgacctctgtagactatcttcgaacatatcactggttctataactgggaatggctctcacgaacaagcagctcggattcactttctttacattcagtttacttcccattattatcttcaggttgtcctcagttagcattcaacgtattcctttacacctttaaccttgatgtgttctttcccattggatcatctcccaagacatggcattacctggtaaccggtgcttgcacttttcactccgtgtagcatctgataccgagttgaagatttcactccttgccttcatagaaacacttttacctaggtcatcttgcttacttaatgacaaggtgactgttgcggggcaatttacaatcaggggtcttccttgagcgatgcagagcatgtttctgtttatcaatcacctttcggcctacttcttttatgctagagaacatctttgccaatctcttttatcaatcatctttcggcttatctctaacaggtggtattctgaatgtggattgcggacgcttctggggatgatgaggtcctttggcttcctgcctttcagtggaaccttgatgtggtgcgtcaaaa

SEQ ID NO: 44773 - DNA, 1105 bp, Oryza sativa
acttaattaggacctacgctctataaaagaagcaaatggtgttcgattcaaacattgttccaagccaactacatactacatgcttagtacagtggcggctaggccgacgtaagctggccggaccaaggtggggaagacacagaagccggcttagcccgtttcagggtttaggccaaaaagctctgtgagattaaataattggtttcagtattcaagaaattcaggagaatgttatggcataaaaagaagcaaaaagatcttaatagaacttaaaacatatgaaatctgacaagtttgaaattgaaacaagttatttgtgaaatgtgatggtgggtttaaagtttgaggtcaaaacaattttgttatgcttgaaatggaagaaaaatggaagagactccttttaaatcttgatgtgactatcttagatgaataaagtttcctttatcttaaaaaatgtgaggttttaagaaacttaatttagacgttatataacatctcttgctggttgtaatagctctaatttgtctcacaacacttagtaaatcctatatataaaatagttgtatggttgtaccaattgtacaaatcatatgaaattttccaaaaaggaacagttatataatgattgataaagtatgaattgtacagatcagatgagattaaaccatatttcattgctacaaatcaattccagtttgcacctctacttttgtgacatgcagcttttccactgcaacacgtggagttttcgcctggtgttttaccactgtgtcttaatgataacaacactactacttactccctaccctcaaatataagtatttttttaccaggtcaaaaaaaatataagtatttttacgacacaaaattttaagtatttatgatttcaatgcatgggaattaaaacatttttagccaattaggtgcgtaggagggaatccaagtaatattagaattgaaaatttgacaaataactggtgacagctaaaagatcattattagaaaacatattttttacaaagagttaaaataaatttttctaggcggctcttcaccccgcctacacttcaagacatgtgaaaatacactattttcacaggcacct

SEQ ID NO: 44774 - DNA, 3693 bp, Oryza sativa
attcctgcagcccataggatggaattaaattttatatgtaacggtgatagatgatcaaccatgggacaatatatatgcatggtgattgcattggaaatgagcggcgtcagaagaacacaatctcgtcagtgaatgagagcttgaagcatcttgttgagcaagaagatgggtgcctgtgagtgtatgatggtgctgtttaactcacagtatcgtcttgcacttattttcgctggcttaatggttctagctgtttctccctccatcgtaaaataagccaacctcatactaggtatgacacatcgatcctaacactataaatctggacgatgtatcacattctagtatacgatgttggtttattttgggatggagatgttagaaataatcttgttgtattaggtgatcatgtttattttgttgcatgtcatcatatataggagtagactataagttgtcagctgcatgcgttagtcgttatggcatagcgagctaatctcatgtgaagcacaaaatttggaagaatgcttaaagtagattggcagccaagtagtgcgtacgtgcatgttgggactagtctcaggattatgtggtgaattagtcttgcatgcattaaactattggagaaaccatctttgttggtcgtccaaaatccacaatagtcctggttcgaataggaaccggaactaaatattatttttagtcctggctaacaacattgttatctttaatccctgttgatgttaccaaccaagaataaatatcatttttagtctcggttcaagttatcaggtcgagtcagggccccaaatatctttagtctcggttgtttattatatcagccgggaccaaaattcaccccgagaacgcaggcctcattttgatctcggtcagtcgtcgatcttatcccctcccccttcctcattaaattaacagcctcagcccccatctcagtctcgcgttgatcttatccatctcagcctcagcctccatcgatctcagtcatatcccctctcccccttcctccccttcccctctcctccccctcccgctccccgcctcctcctctccaggcgaccgagcccaggcggcgactactggagcggcgggccgtgcggagggcggagggcggagggcggcgggtggcggcgtggccgcgctggcgggcggatgggagggcggcgggagctgccggccagcggcgccctcccctctgccgaaggggaggcgggaggcggcagcggcaactcgattttgttgttcttttttttttaagaatttgtgatatattggatttcagaatttttagaagttgtgattcgttggtctgagaacttttagatgttgtaattcattggatatgtgatgtatttcttttagaatttgagatgtattttttttaagaatttgtgatgtgaatctatgtttgtgttgatactttgattttgatttggggatatgattggggatatagggagcatcttgatttgtgccgttccaactcgatttgtgcagttacaactcgatttggaaagaaacaatgaaaaaaaaaagaaagaaatggtgaccaaccgggattggcgttgccatctttagacccggtttgtatcaccaaccgggactatagatggatgtttagtcctaggtatttcacccaggactaaagatacctatctttagtcccggattcgtacttctggttataaaactaggagtatagggggctacaaaccgagaggaaaaacgctttctctggtagtgttagttagttgcagatgcatgtgcatgcatgcatattatttggttggtgcaagcaacgacgtctgggaggactcatgttcgaatccaattaaaaccgtgaataaaattttggataaaagtggcacgcttttcaaactgctaaacagtgtgtttcgtgtaaaaactttatatatgaaagttgttctaaaatttcagattaatctattttcaagtttataataattaaaactcaattaatcacatgttattaccactcgctttgtgtgaacacttaatctttatttcaacatcatcttccgtagtggagatgcggcctgagtcaagcagttgcgatacttgtggagttttgcggccaagtaaaccggacgtgggcgtatgtgcgattagtagtatgcatggattgtaaatagctgctccttgtaatcgtttgttttgtgaagaaatagcaagagaaaaggcactagttgtatatgtgcggtgccacaaatatgctcggtactgtgttctcttcttccctgtgttcttcacgtgcaattgtgattcgtgtccactgtgttcgcgtgagttgctttgatttccaacaggagggaatatactgataggctgggatggaactgggatcatatcatacaaactaataggctggttgtacacgctatctccacttccctttgatagtaacttgtgaaacaaaatcaaacggccttgtcatgtccaacagtgcagactgaaaagcaacatatcgcatcaaattgtggaagggcctgtagccttgtggttaccagagcctcaaacctcagaagcatctgaggttctgggttcgactccccttagaaacgaattttctaggatatatcagcgttttactcatagtgattagggtccgtcctttgattattgaggtgtgtactcgttgatccgaacggccgaatgtcgaatgtaacgtcaagtagaattgcgcatgtctataaagtaattaagatattcagaaactaaaataaatatatatcatctatccatccaaatcaatagcaccattcaccaaatcaacaccttgttctattctgcaagtattaggttcagacacacgaatgtcaggcagcgattaatcgcaccagattggttaccttttacattctgttaaaaactgtaagatattcagagaaatcaaaataaaaggattcaaggaaagaaccaaaaataagagggggtggacaggatgatacatataactacacatgacaagttgctatgagattccaggtctagcattgtaaacaccagctggttggaacacgaaaacacaggaaagataaggaagggatgcatgtaagaatcgccagtgtaatacaatgcgactgtgcctaaattctgcactatcacctgatgacgctgttgtgaattaaaatagttggttctgataacaaagcaagcaaacaaaaacagttgataaagttgcccattttcatgtgatctcattacagcattgaacacccaaaccaaacaccacgtagattagttcgtacctatatatagctagagggatcaatggccttaattattttattgaatgaaaggtttgttgaaatattagctccattgatgtgttcatcgatcctgaagccttgctattttctgtttattcacatgattattttctgttgttttgaagaacaggaaggaggtcttcgtgtctttgattgagaaggaatgatggaatggacaacaaaaaaaaagagttgacattgtttacccttgctaaagaaaagttcatttagtaaatttgatgtatgaacacttgaaatcacgttagctagtaaaccatcatatactaggttgcaaaacgtactaatgattacgaattctcagagatttatctcttgaactcggtgactgaatagttttatattttcaagtatatattgacattcatca

SEQ ID NO: 44775 - DNA, 1888 bp, Oryza sativa
agctttgttaggctgcaaaagctgtttgggttgatttgagatgactggtttattaatagtcattcttttagcatgttatatgcttattttggttatggtaagggtcacagcctaggctattggactcattaattaccatgattttctatcctgtttggtgggtcattttatgagattcttactcggattcctatcaaacatgtttatttttggacctttgagtgtttatcactcggcccttcttgtattttttgtccttgatatattcaagttgagaagcagtcggctgggtatcttactaagtaccattcgtgcttcgctataaaaccactcggttcttgactatatgtttagtttttcaactaatcacatactcgggggctacacctaattaggtgcatctactcgatgcaccatgttttattttcgcccttcacagtttttaatttttagcactcggcaagctggagcaagttgaattgaagcactcggactactgtttttttgtttcgagaaggctattttgtcaactgcgaaggtctcgggggctactgtggagattatggataccccatatctacatgacggttgtaatttagtcggatatacggtactaaatatagatggaatatctctatgaagattcgggttaggttctaaacttgtatgtcaaggaaatacccgggatcttagtcggttacgattgtattttatctataatcccatattctattaggatatggactgtattttgtaaagcggactcctttccctatataagagggtccgtgtgcctcttggggggcgattccttttccattttatacaatcaataacacactcggcggaatcatccccggataggagtagggtattacttcttgaataagaaggcctgaacctgtataaaatttcttatctccaaacccatccactttcctagcttgatagccacccccttttattattgtcgaaatcttgcttcgacaaaagtaattaaggccatcgcagaaatatattagtctagcccatgctacattaattgatcacgttggttttacccaacagcacggtatagataaatcataaatggtctatataattatatagattatatgtatgcttgttatctcgttatatttgttcagctaaaagatttctagaaccgccaatcgtaatattatagcatcactggcagaattgaaataattcacccccaaaattttgtttttggcttcttaatctgaaaataggaagtgaaaaaaataatctcttcaagaaaaaactttaatttaatttgaaaaactaaaagtgagctattctgttaaactaccaaaaaaggctcgcttcccctcgtatcagacaatttcagggtagggaactccaaaaatcatgcaaaagaataaagtatctggtgaagtagttttttttaaactaaaatccctcaaattggttttagaaataaaataggagtactgttggtgatattcttagataatatcccatcctaaaactccgaagctacatttatggacagatatactagctattaatattctcgtagccacctagagatgctaacctcctgaaacaatcctacgacatgatctggtattagcgacatatcactgcatcagtgctacatacagttccagcaaggaaatcccagaaccatttcttcacgatgcacttgcagaatccaacgaatcagcattcttacatctcgcagtacctcccaatcccatgcaaagatagttaccaacaattagggccaacaaatgaactgactaaaggaaagagttctgaacttaattgtgattgatcttctcgtctgctagctggtaatgatatgtctgccaatcacccgaatcagaaatcgatgcatctg

SEQ ID NO: 44776 - DNA, 4661 bp, Oryza sativa
ccacgtgtgcaccacgtggtgcgccgctcctccccggtccatggacacggtccaccgtggaccgccctccccgagtcactgccatgtggggcccgcatgtcggcgccaccctctctctccccgggattttatttattacgcaataaatcaattaaggatttttctgtttatagtaaaagcacattgaatcttctaaaattcatatctaattcatccgagctccgtttaagcccattcaagtctcagtaaatcaagaagaatgtgaagaatccattaaaaatggttttgttctttgtttcagtagtcttatagcctgtttgtattgtttgctttgtatgtcgcttagattccggctctccggatgctccggtgtactttgaaatagtcgccgaggttcctccagcagtagagcaaagcaagtcatgcttgtcacttgaacatgttgatcctatattacaaatgctctaccgttttactttaaatgctgcatcgttttataatgtcaccatgggatgtttacctactgttacagccatactagttttgtatcatgctccgttgttagcttggggatataacatgacttgatattagactagggattgcttagccatgcttagttcaactagcacacagtggggaaaatacattaaagcatagatatctgattctagtaatgatgttggttaataccaccgctccggtgctggttaattaaaatatattaaacgatgggctgtgggtgcttggcttcgatggtcgcgcccatggcacttaaggatcggttcgcgggaaacccctggaagaattccacgtacttatcacaagctagcgtgggcaacggctgggcttgtagtgtagctttcctctagctgacgcatccaggcaagggtgggcgtgatggagccgggcgggccctgcgacggcctctgttgcttccggattctcctaggcacgagaggggactgcccgttgcccgctggggacgggggtgaaacctgaggtgtggtgtgcttggctagatggggttatgcgaagagtcctgtcacggcctctttccggtatgtcgtggtggcatgtcggcgtatggaaacatgtcgtggggctgtgtcttgtgggtacagttgtacacctctgatcagagtaaaactattcgaatagccgtgtccgcagttatgggcggtcaacgagattcaccgtgattagtctcaccctagtttagtctgatggaactgattagttcaggtggttggttgggcctgttgcaacgtggtatagcgttggacagtggatggttaatattgattaattattacacctgattttcctgctttcaactactgtttataaatgctcgctttatacaaaagaacctctctagctatcctttggtaatatcctgcatcataccccctgttccggtatgacttgctgagtacggtggttgtacttagtcttgctttattttccccaaacccccagagtttgagtatgcatcagatggtggtttctctgaggagtaggcttcgtccgtgccggcgagaatgcctgtggagtggtgttcccgctgcagtccaagtcaaggcttagctccagttatcttttaattttccgctgcatttatgtaagacttttataatatttgtaagacgtggatctatatgttaactttgtcgtttgtgtaccccggccggtaatggacggggattttaatgcacattctacttagaattctattcgggaatttctgggcgtgatagttcggggtctatttatacccgaaaattacaaactatgtccatatcggacacgactcttatctctaacaaactctaagataccataagtctttgcggcagactttttccctaaacatatctctaaggaaattacataaaatgtcctaattaatagatacaattgccttctcaagactctatccatgtgcggcaaccatcttgaagcatcttaattcaacctgatatcgtataccaagtcgtattatcagaatcggctatatcaacttactcagtccgactcggatccagccgatcctaatcgtagccgatctggactccagccgattcttgctctattctcgaatcgatctccgccttcgactccacttcgatctaatcctcttttccgatgctgatattaccaaatttggtcgttaacaaggggaagcgttgggtcggcgatgaggagggccctcgcgccaccgtcgccactccctccctctgctccgagcccggcagccaccggcgccgccgctccctctgtccgcttcaagcacggcagctgccgccgacaccgctccttcctcctgcgcgccgatgccaccgcttcctccgtcggccgcagcactcgccatcgccggcgactaaaaactgaagatgtggggattgggaatttgggatggagaggtggggatagggttaattagtaatatgggggtatttttgtcactttggggtagtatgttttttttttcttttttctaaatgttgttccaacggtgaagtctaaacagagtcaaacggaaacttcaatttcaaaaaagagggtcaaataagcaaacctgaaaaagtaaggtcaaattggtagttgggctttaaaatagggtcaaataagcaattgtcccaaaaactaatcaagaatctattagaaatgaacaaatatcaatcgtgttgggataatttgaggactgcacgacttttcttctcgtcggagaagacgaaagaaaggttacagattaatttttatttgtaaatatgccgtttcttattcacttaataagccaaatgatgggggcctcgacctttattagaactcaagtgtacagcacctccactcttcatcatgctatagtttataagagctcatatgttggtgaaatatgaagagtggcagtactggagacgatcataatgttttccagacccccagttctctaagctagctagcatgtatttatatttttcaggtagtgcgatatcttttgtaccaactagcaaccaaaatattgatgaaagaattagcaacagcaagtgtgatagccaccagcagcctcaggttttcttgcatcaacgaacatctcctcacagcagacagcactgttgttcgttcattagccacatctgcttgtcttccgtcttcagcttcagcttgccatgaatcaaattcccagccggtttgtccccagcagccagcccgccatccatggttggagctagacatcatttgcttcctgctttaacgggtggataccgatgcttctcttctctatgcctctcattccttagtcatgcccagatgcaggccaagctaacgagattgtctaacaaagagcatcaatgtcctttgggatgtttctgcgcagttcttatgtacagtagaaaagatgaatatgaataggatgattggttgaagcaatttaatggtactactgcgtgatcacggggatttactggacaatgactgccactgcaacccttatactacatctatcttccacgcaacaatgactgcaactgtaggggtgaacgatgaatgcaatatgaaagtttattaatgtaattttagtgctacaattgtactcgctccatttcatattataaatcgtttgaattttttcttagtcaaacttatttaaattcgatcaaatttgtagaaaaacatattaatattttcaataccaaacaaatatattatcaaaatatattcaatattaaatttaatgaagctaatttgatgttatagatgctactaaattttccaataaacttagtcaaacctaaagaaatttgtctaatgaaaaagtcaaacggattataatatgaaacggagggagtacaaaactgtagggatactcggtttgagtacggtatcttgaaatcacccatgatcgtccaggattttgatcgtgtacagattgataaacaaaatatctttcggtacatatatttgagattttacataaaaacattacatatgagtatattagagtaggttttaggggccgatagaccaaacttacaacgacacactccctacaaatagaaaaaccatacacaacataagataaaataacaaaacaacacaggtgttgcctgagagcggatcgacctagaacgtgaactcgtcagcaccgaagaaatcttccccttcccgcgcctcctctaggaagagccgatcatttgaaatatgtagttttgtcatatttcaccttaaatgtatatgttttttttataaatttgatgttaaatttatagttttgtgatgcatcatcttaaatctagttatatgataatgtggtcaatatatatgtcttacttaaaaaaaaaaccttggtatctgcttggaaggcgtcttggacctaaattcaacgtacatgacagccccagttgggctaaagaacgttttttagatggtaatttctataattacaaccccagttgatcctagcctacctaaaaagtaaatatctcctaatgccacaaagaaaagacaggagttgtcaagggcaaatccaccctgtgtcgtgaaccataagcttcatggaggccatcacaatcctttcgtaggatccatcagtccatggcaaggttctgaattgctgatgccactcattccaaagccggggctgtttgtgttgtcct

SEQ ID NO: 44777 - DNA, 1584 bp, Oryza sativa
ttatagtatgtagaaaactaccaatccacttgcaagctagtggatgtgattttcctattcattcgtttgaacgggtctgtccacttcatgggagtacgagttatcggtgttatatggagattaaccggtaattcatacattaccataatcctacggggatcaacttattcttccggaagtcattttctctactatgagaaatattctcgcttctaggagaaaaactcttcgtgagtcatcgtaaactcttctacgagtcttgcaattctcttcatgaaaatatagtgtgcttcatgatactaattagtatgagatttacatatatgttgcggaattgttttctttctagtgaaaacttcatatggattttcataacccataaactgcatatcatttattcattcatgacttttgccagcgatatatatagtggaatttaatacattcatagtaggagaatatcggtcttttccatgaccaaatgagccgtcgcttttcaccacttcatttcctattaagtctgaacttccatgttcacatagacttatttagcgactatggttcaacctcattgctttcttcaatagacctgatatgagtgctactatgcaactctgccatggactttggttccggatccggattctcattagagaaatattagtaatcatagaggcgatgttgtcgacaactattattttctccacatactcattccgtgaagttaattcattataaacaatatcttagtcatttccaaacataagatgtatggttgttccgcaccccagaattagatagatgtgcgttctgggttttcatcttcatgatgaacctcttcatgaggcaattcaccttcatggtgattactctacaagagttgtaaggagttattaatgggtacattgaaaatagtcattagatcttagaatccgcacgtgttcccgtagattttagaacattgactaacatgtcactctgcatttgtggatatactattcaaaacccggggtataccactgttagcagaaagtttactacaagtaaacataacttctgattactcctttaattcataattatctagcaagcttccgcttctggcttacacgagaataaactaaaccttctagtttagtttggcttgtacgttattcttacttataaagatctttttcttcttgaaaatataaggcatctttaacacatgggcttttctccccctgatgctgatattcgatctttatctaatagcatatcacaaaaatcccctatcataggcactggattaatggaattcggtccatttgtatccccaacttcatgtggaggcccatatatgtatgctatggtggtgatatatgagggaaatgttcattcattgaacatgcacttatacaaaataaagggggtaaagatattatatgcagtgagctaacataaaaattaatgcaatggcatgaaaaattgcacatccctaatattgtaggttatcccaagtcatagagggttattattctgcgacaatgaagcccaaacaaatatccactagtcgacaaaattcctctattttctagctttttt

SEQ ID NO: 44778 - DNA, 500 bp, Oryza sativa
ggtttaattgatcatatcaattaaacttaaggttttggtataccagtcctggtgatctgtcatgtgaattgcctgtcatttcgttcagcttttctatctctcacgcaatcccgcgtctccattcactcctctttcacctctcagccaatctattccccacatgccttcctgcgcttttccatcttcgttggttcttcctccaccggcgtatacggtatacctttgtctgagtcattcttgcttgtcgatcatctaggctccacaacgttattgttatgccatcgtgccgtttgtatatatcagcgtgtggcggtgtcctcatccatgcattttctagacaagtaaggatatttatgatgtggctttgcagtactggcagcaataaaagggtagcaatgtactagtactaccattttgaaggaccttccccctggaggaggaggggaggaggactgtgagtagcgcaccaacgacagggggaggggggcggggaggggggg

SEQ ID NO: 44779 - DNA, 1055 bp, Oryza sativa
tggagtaacgcattttcttatgattaattaagtatttactattttttaaaaatggattaatatgattttttaaagcatctttcctatagaaactttttgcaaaaaaatataccatgtagcagtttgaaaagaatgcgcacggaaaatgatggaggtgagttaggaaagttgggcaaagaactgaccaccttttgtcattaggggtgacaatgccgaatttggccacaatcgcataatattgtagatttattgtggcgattgtagatgcatccctaccttagtttccctgttttctggagtaattgcaattagtggacgttactatcctgaacctgtaacttcatagcaacaaatcttggagttcatcggtgccatcctctggcattttcttacctgatttcagtttgtaaactattttgcttcattgattcctttattttatttctctgaacaaatcttgtatttttctaaccaaaatatgaaagtaaccatttgtttctatcatattgtaatggaaaattttaaatcaaatctaaccaagataatatgaagcattgccaaaaaaacagagaaattttgagcatgcatatagagtgccagttgaagtgaatttatttaaattgaactttgcaatggatgaagctcgccatgtttctgtatcaggtttagcatataatttcactttaaactaggtgcatagaagtaagtttcactttaaggtcaatataaatcatcaaacatatggaaattttctcataaattctgattgaaacttcatgaaacaggtccaaattcgaaagttccaaaagatacactcttgatttataaaatttcccttccattatatggtgaacctctagcggaaagtggaaattattcagaacattgcaatttactcagaacattttgatctgcagtttaataaatgaagagagatcacagtctaattttgctagaatatcacattggcgggtcattatcgtacccagtgccaatggttacgatgaaaagacatgttttaattcttacgtagaacatagactttcttactaact

SEQ ID NO: 44780 - DNA, 3708 bp, Oryza sativa
agctccttgaaatgtccaacatcgggttccttcttgaattcctgagcactgctcttcttcagctcatctccatccttcattttggcctctttcagcaactctgcacaggcagcttcataaatgaagccactcctcttcaggaatttgatgtaggcttcctcccaataccagaaattacaaccacttccatccttctatacatttcacagattgcaacatgtaaatttcaagcaaaatgacaaaaatccacaaagggcactttatcagaggcaagagatttatcacgtggtctggacatgtgaagaaaatgcgacctcgattagcttccgtggtcgcggttagctccaagatctgcttcaccccgcatgaagggcacttaatcagcgggattgagggcctcctcctcttgcgactcgagtggcttgagctgcttgcagaagccatgccgacgacgatgaacacacctcggccgagtgccctccctcgccgttgactctcagccggaagccctccctcgccgtcgactctcagccgccctcccacgccctcactcaccgtcgactctcagccgccctcccactccctcactcgccgtccaggggaaaagagagcagaaaagagagggctagggtttggagaattcgagggaactgaggggcttagatgaaaaagtgcacggtgcgggacggtgcagtgtggcatcacacgtgtcgcgacacgttgctgtccacgtatgcacgaaacgagtcaaagcgttctctggaccggattgatacaataaaacaagattagtgaccttgaccctgtgtttgtatgttcatggacctggatgaaacctcctcacaagtttaaggaccgccagtgcaatttactcttcttttagccaggttatctttcgttagaattactttcttgtgaagaaaccacataaagaccattgaattactttttttcgttagaattactttctttagatgaagtggatgaatgaagctaatatgtcaacaaacgattcatgaaaacataattaagacttttggccccaatagctatacatagctaggtatgtacgtactccctccggttccactgcacccctgctcagcttcactgttttctcgtgtaatagaaatcaccggacgttatgaccctgaaggcctgaacctggcatttctgggaagatggcaatcagcttccctcttttcttgagtccatcctctgttttttttccccctgtggtttcaatctgtacactaattaagaacagaggaagtatgcaagtctgtaaaatgcaaatttggaatggtgcatattatgtactacttgacaattagattacttaaatatctgcttggatgttttcataataaatgcttatcataaacactaaccaaagagtacaaatcagaaccaccttgctagatcaaatccctctcatgagtcatgagaatatattatgttggaagatcttatggtcatgaacccttgacatgttaattagcgcgcgcgtactacgaaataatacatgaatataatccgggttttgtggataatagtaaaatgttgcaacaaagccaaataatactgatgagattcggttgtatcactggtgaccttttatttcgtgattgaatcatcgctgtatgaaaaaaaaattcatacaactgaaattagtttgcgccaataaattatcatgggtagggagctacacaccaatgtgataaaccatgacatatgggtcttttccatgccaactaccatcagcacatctggcggatcagtaatcctcggttgagcaggcagacatctgactgttctgagatatcattttcctgatcccgcgcattccaatcagacattcatatttcaattgaaatggaattaaatgtgaaaaatacccccctacaaatcacttgtgtttcttctttgcctactactacttgatttcgtacattaaacctccacacaagacaatttctcctaacaattgtggttggtctctcgcaacctccttcctcccttctagtatctgccttcccaaatccctgtatgagctaagatgatggcagaacacgatggcacaacttgtgcgctagctgtaatttctataataccaacctatcgaggtggcatgagtttctattgtcccatgacgctggaggcccatgcagcactagaaattgaaataactaggtgaaataattgacaatgggactttggggaagttaggacataaattaacttgttgggaggattttctgtataaaattgagttgtagggggaaatagaaaaactagtgagttgtagggggttatttggaatttcactggaattatattatgagcaaaataaggcggatttcttttttgaatatttaaatgtcatgattcagctcctgttgtttttgcgtgctctagggcgcataattcctctggaaactcaggatgtatcctggcagaataagagagagaatgtggggatacgtgttacggctactgtaccaaatatgacaacgatgaacccgatcaaagtgaggcgtgttccacacatgccaggcttgccaatgttcgccttggtggatccggatgggaagatgtgctaattgtaaaggatgcgactatataagcaccctggagtggactggaagcttgaaaattaccgttggatcaaaaatagatgtccgagattcgtcaatgtcacggttaaaattttactcatagcaaaatttttactcgtgatgacatagacaaatatcagacgtctatttttcgatccaacggtagttttcaggtttccactacatatgtactttgcaccatatatttttccgggttagacacagatggattgggttagtgatcatattagtataggatgctgctagccaacagatggggaattgaggtttaaggaattactaagctaccattattaatattatttgttgtttctagattatcctttcgaaatcaaaggtgcatattaattcatttaggaggtacctgggtacctctcaagcacagtaaaatcctctcagaaatgtatgttgatatgagattgatcaggtagtgaccaacgcagtgtttaattagctttcttttgtgcttacgttttgcaaaaaataaatgaatgaataaataattagctcagatttgtcattttggtcttatacaatggtcatgatatatagagtcagaacttttgaaactttaactatcattagtttttctaatgctcattttaaaaaggaaaaaaatagtatatatgcttagttttgccttgaaaaagtattatcatggtataaaaacttattagatattctaatacaaaattgatagtcaaagtttgtaagtgagagattttacggtctggaggtaccacattttacctctcgttgtgtttggtactaggagctacgggtacctcttagtaactcttgagtgctagctgtaaaatttcaagtcaaattttgttctaaatattaagtatttatgaccggatggtgtatatgatacggatccgtatcctcaatacttcatgcagtttgtccttgatataaagttctgaaaaaaaaaaccttttttttggttggggcgggggggggggggggtgggacattgacctgctgtcttctctgctctgaacattcactacccacagatacacaccttctgctcttcttgcccgatcacctatcccttattatt

SEQ ID NO: 44781 - DNA, 2247 bp, Oryza sativa
ttaacgaccaaatttggtaatatcaatatcggatatgaagattaaatcgaagcggaaccgaagataaggattgtcgcggaaacagagtaagaatcggctggagtccggatcggctacgactgggatcggctaagtccgagtctgactgggttaagtgatacagccgattccgacaatacgacttgtgtacgacatcgggtttgagttgataagcttcaagatgattgccgcgcatggatagagtcctaagaaggcaattgtatctattaattaggatattttatgtaaattctttagagataaatgtgggcaaaagtctgccgcaaagacttatggtatcttagagtttgttagagataatagtcgtgtccgatatggacatatcttgtaattcttgggtataaatagaccccgagccctatgtaattattaacacacacgttcaatacaatctcggcgcatcgccacccttttacttttgttttgtttcgacgagttcttgctttcgggttgagctgcatcggtttcgatcttcaacaacaggtaagacttgttatggcggttttatgatactctaatcttgtttatgtaattcgtcgagttatcatatatcttatataatctttgataatatcgtcatctaacctacaatcggctaacatctgttaacacaaggcggccgattagattaaatagcgacgttggcttagattatataagatatctatcactttatgaaacatccagtggcttgattgtctagatattgttcttcttttcatactcaatgctgcatcagttgagtttgatctattaagtcgtgcttagaatttcaatctctagcctgccttctggttgccgattagggtagtatcggagtttcagtcgaccttacctgatttaactaccttatcttatatgcttgattgatatgttgaatctgccctttatattaagatcttgctgcatttaagtatattaggcttctgtttggtatatcctatttgctttaatatcttaatacagagtggtatcggagtattagccgatacatgctagatctatctgatcggctatgctatgaacatatataatcttgttgttaatatatatttcgatctaagtgatttatactgtctcggcatggcgaccgatctatcccaatcacttgatttaagtatatatcgacataaggattatatattattaatatctacagccgatcgagtagatttagttcctttttattcatttatggttgtcgatcgatgtatatatgacatcggcccaaaggtaaatgatatgtcatcggcacttagccgatcggctatcatttatggatttaaccacggtttctttgtctttgtttcttgttgattgcaggatcaaatcaactggcacgctcatacatctgaaggcgagttttggacctgcactggagttaaccagatctcccaggcctcgtgttttctgtcaacaacgcttagtattcatctagaaatcataaacatgatttatccacaaatatctacagaaaacaacctgaaaccgaaatcgacacatattcggccgatcagaccgcgggctgaccggtctgaccgcgcaacacacgccggtctgatcggcaaccacagttcgctctaactggtccaaactgacagcagtccctatttatcatctgaaaatcaaccttctccaaaaccacttcaccaataatctaaaaatatcaaaacaataatctcaaatgataattgttcatcacaaaataataagagtaaagtccatcaccggtccctaaacttgtaccgctgtgtcatcccggtcccgaaactcgcaaatcgactgttcaggtcctcaaacttgttcaactgtgtcatcccgatccttaaacttttagatcactcgtttaggtcctccaacctgttcagttgtgtcaccccggtccctaaacttggatttgaatatcatctgggttaaataggacggtctaaagactttatatttaaaaatagttcataactttttcatgtgaactctaataaagacaaactttatatcaaacttgtagtcctcgacgcgatctacaactttttagttgaatttttttttattttaagtcattttttgtcccaaaatgtaattttaaaattaaaatttcaaaatctataaacatgcaacaatattttgggaccttaaacaattttagttcaaaaacttttcaactacaaagttataggtcgcgtcgag

SEQ ID NO: 44782 - DNA, 1331 bp, Oryza sativa
gatggagggagtatagctgagacagtgagacaagagataatcaacatgacagggatgaaagactaatgacccacctacaagatatttttaaatatgattttttattataatacacacatgtatataataagtagatattttattttctcaaagtatttctaagacttatctatttgtttgaaaacataactactttattaaggtagaagcaaaggacatgcatggtttaaggtaacatccccaaaggggttggataataacatctccactgtaggacaagtcgatgaatgatgatagatatgagtgatattctggcatattttttaaaacctgtacattggcaacagttgcttttactttttttgataaataatctgccattttgtttagttttcttggaaccagccgaacattaagcgattgaccctgcagtagaaaattaagtaattttaagacttatctacacatcgtgttttactgtctccaaacaaaatattctgtaagttattaatggtcaaaagttctaatttttttatgttaaccttgtccaaaacagctagagcaggatataatactaattaacatggtgtttgctttgggtcttcaattaattctataatcagaatacatgaaaactaactttttttttaggtaaacgacggcaggagctctgccggaatttcattagaacaaaaacatgtaatattttgcaactggtttgtttgattatcagaacccactatatctggactcaccacttctgtcatcatcaggtgacaacgccaaattttcaccacagtcgcatagtatttcatatttatagtgccaattaatttatacatgcacccctgctcagcttaactgttttctcgagtaatggtaatcaccagtcgttatgaccctgaacctggcatttcataggaagcaggcaatcagcttcactcttttcttgagtccatcctctgtttttttcccagtgtggtttcaatctgtacactaattaagaacagaggaagtatgcaagtctgtaaaatgcaaatttggaatggtgcatattatgtactacttgacaattagattacttaaatatctgcttggatgttttcataataaatgcttatcataaacactaaccaaagagtacaaatcagaaccaccttgctagatcaaatccctctcatgagtcatgagaatatattatgttggaagatcttatggtcatgaacccttgacatgttaattagcgcgtactacgaaataatacatgaatataatccgggttttgtggatgatagtaaaatgttgcgacaaagccagataatactgatgag

SEQ ID NO: 44783 - DNA, 2340 bp, Oryza sativa
ttttggacctaaaatcaacgtacatgacagccccagaaattgttcaagttgggctgaagaacgttgtttagatgggtcatttctagaattacaatcccgagttgatcccaactaccaaaaagaaatatctcctggagtcgtgaagggctactccgctctccttgtggcttcatggaggccatcgcccgcaaggaagaatcgataaatcatcttattacagccttcacgattatgtcattacaaccatgagtccttatcaggaccttgccatggactgatggttgtaacgacatgaattgctgatgccactcattccaaagccggggctgtttctgttgtcccagtgggatgttcatcaacactgaaattataaaaaattcatctctcaagacttttgtgtgctctaattaacccccaagtctcttttgcagctgaggctatgttgtagccaaattgaagggaactgaaaaatgattgggaggggttcatatatagagctgagagacagtgagaccagaggcgatcaacattacagggatgagatcatgagagagcaatgacccaccctgtactattgcacgatcaactaagtgatgaatggagctaatatatcaacatgcttttcactgaaaaataattatgggtcttgatccactaggcactagatatatacatagctaggtagtaacatgttgttcgctttgggtcatataatgctgtaatcagatcgcagggaaatgtgtaacttttagcaactactacctccatctatctatctatctatacctatactaattgagcactttctcggagcttccacgttaatcagattaatctggccattgattaactagatcgtaaaatcatgaccatagattaaatattataaccactagccgtcaacctgtgcgttgcacgggttactgtgactaataattaaaatattattactttcactggataatgataaaatatgttactttgaatgaagctgatagttgccaaaatcttaattagtaatttcatatataatccattctaatatttcttctattactctattttttcaaaattacataatttaaaatttcaatattagaaatatagatttatactcgttttgttgctcttgttagcatttgctataaaataatttagcaattttgaattaataagtacagaaataaacttagtttggagttaagctttttcatgatttaatgattcctatattcataataattaaatatcaagttgtattctgtgtggagtctcaattataacatcttcataatttaattttaaaattgctaactaaaaatattatactcggtttgaaatcttaatttttgttttatcgtgatttaaaaattgttccaaattttcgaatcaatagcagttctttcatgatttaaaagtatcaaaatttgaaagtaagtaatatatatcgctacagtatcagttatttctatgatttaataattatgaatttaggaattaactggtacctatttgtccttgtgttggtctcctaatttggtgtactacactagatgcatgaattttagtggcacttttacatcatcggtgtgttgtaaaagtggcccacatcattacaatagacataattcagaccaaatagtccttaaaactgacaaaaggcataactcctagttagaaatcatgcaatctaactcctaattagtcagctaaattgaattttttatgaaatcatacattcactgaaacaaatgtatttggatgaagcatatatggagcagatttgttagtgatgtatgtttaacttatcttgtcatcttggtaattgggcactttctagaagcttccacgttaatcagattaatctggccatttattaaatagatcgtaaaatcatgaccatagattaaatattataaccatggacttttaattaaaggcccaacaagagaaacatgtatctgggctaccatttaatctatatcggcttccttcaaagtctacaaactgtgtccatgtcgatctcagccaccggactcaactccacacacggcaagatgacgatacgacaggacatacgtcgatctccttcacaccctgccgctgatgaactccatcgatcgatctccagttcactattttatcgatgcagatactattcagattgatctttgcagctatgattgctattttaaatactcaagtaagcaagatctaattcattatatttaagttttcattaagtattttttacatgttctcatctattctaaactatgtaaaaatttcagattttaaggtatcgcaatttgatagccataaatttggatggagttatca

SEQ ID NO: 44784 - DNA, 627 bp, Oryza sativa
cacctacgacacacatctaacttggatagagatactttctttgtaactaaccctagaggcatttggtaaccgatactaaaaaaaatatttagtaccagttagtaatataaaccgggactaaaatttctccagcattagtcttggttggtgtttctaactagtactaaagatgcttttttaagtatcggttggtaacaccaactggaactaaagatgtttcttggatttaaacttttagaatcggtattaaaacatctttaatatatgttcttaatctagtcgggatatttgtgttttgaggtttggaataaaaaatattttttctagtagtgtaacggccactgattgcaattactcccgaaagcaaggaaactaaggcatgatgcatgtacaatcaccattataatctacaatattttgcgattgtggtcaaattcagcatcgtcatctgatgacagaagtggtgcatctagatagtgggttctgataactaagcaatataacaaactacttcctctgtaaagctaatgcccactaaacatctaaaactcaacatgcaatcataatatttattagcactcttaaaacctacatacaagcatgccacatcaaccttttaagcacaca

SEQ ID NO: 44785 - DNA, 695 bp, Oryza sativa
cacatgttgacaaattgggcccgctgcgtgtcccttagggctaggagttcccttaatggagctagcattgtgcatggcagggttgcctagctagctgccacctcctctcgttgtgtggcctggagtaggtgactgggatgctggtgacgtctagtgatgctaggtggacccacttgccaaccgcaatgagcttagcgtgccgggtcatggcggtcctagctaagcgacgtgacagtcaaccatgttgcctgacagcccacgaccccgactttttaggactgatgatggcttatcccatggtcactccccacacgtagccgacagattcatatccttcacattaaatgcgagactggctgcgcgatgcggggaatgacgactcaggtgttgacgaaaaacacggtggcctgagagatctgcttaactccagtgcatgtccaaggcttgcctctagtgtgctaagggcatgccagctggtttgatcctgtaaccagcaaggaaacatcaaacagagtgagttagccaatagccgatcggccaataggccgatgacatatcgttagtgatcccagccgatatagttagaccagatcggtaatgcattgatatataaattacgtgcaaaccataaaaatgcctcatcggctgtaatatcatctaattattttgtcaagtttacgtcagatgatattata

SEQ ID NO: 44786 - DNA, 1189 bp, Oryza sativa
ctctaactccaccccctaatacttattacaactccaactccaatcgtaaccaaatagaactagtatattcgacacctattctaacaaactccagattactatgccgatccaccggtcctccagacttgggttgtcttctttgcagcttcaccacgagccacctgacaagcctacaccagactcaccgtcatcaagagacttcattatcactgtaattttcttcctttggactccacccgtaatagtgctccaccttctcacctatcatcccagtagttttgccatcacatcatagactcccgaagaccatgttcacctccatcttctatctttaatttgatttgatctaatacatggctagataatcgatgtcatcaccaaatagataaatcaaactcaccagacatgaagaaaaccctttcttccttgttttttttgaccggaaatactgccagggctttgcccaatagtgtaattttataaggaaagagaaaatttacaaggttacagagttacatgcgggtcacacaggaagactataaggtttgtaaccaattaaaaacagtttgctttaaaggatctttcattctgcacataagcagaagaacttctttgacaaaaaaaagatctccatgcttggaaggagggttgaacattctgaaatattaagcttttcctttgcttccagatgtgccaagctgccaaaaagaaaatttctaggaaacccctctgagcaaacttgagtcttgctagggtgatcatttggaaaaactccaaatcatgattccactcaattcccaggtattgccaacacctgatactgaatggacatgaggagaagggatgtagccttgtctctctgcaattcgcattgcacaaaacacatgtgagatcatcattttctttggcacaatgtcttctatccaacatatctcttgtactgagcctatcacagaacatgagctaggcaaaacctttgatcttcatgacacattttattttccataaccaaatcatgggcctggggtgttgcaatgcagaatagtttagcttataaaatttcttagctgtgtacttatctgaaccccagataaaattccaagcatctcccatccctgactgtaaattcaaactgtccagaacttcctgaagttgcaaatattcagaatatgcctcatctgagaggggt

SEQ ID NO: 44787 - DNA, 505 bp, Oryza sativa
acaagttgggatctactcacgacttgatcaagtttttgaagctcctcctgctgtgaaagatgttttaattagtcaggctaatttggaccgttcggtataactgtttatgtcgacttcattaatctataccaagctgaactgaccagaatcctcaatcgtgtttcctcttctgtttccccctctattatgcctatatagtatataggtacagatgaaacacacaatagagcagatgatgtaccaaagctaggcatttctgacttttggaccccagataaccactatcggtggtccaggtcaagatatggcggtcatttgtcagcatttgtagatgccgtcaatccttcccgtctttttatgtgcagtatgtgttacaatctcaacattaatgcctgtcagctacttgggttgtgcattctgatctggtggtgcctgatgcttgtcagattttttatgcagatttagatgttattgactctgaaagacttcgatctcagaaggataa

SEQ ID NO: 44788 - DNA, 724 bp, Oryza sativa
tctgtctcaaaccatcatgatgctctgagagactgagaggctaccccaaaggagaccggcttttcctctcgcgagacccctttcccttctgtcttcggtcggtggccgacagctgtccacgaggggccgggagtgggggtccagagagtggtagggtctatcccatagtcgggttcatcccgttgttgtttcctccccctttcttgtatagattgaagaatatgtcttcctcatccgggcaaccgcgaattatctgccaaacagttgtagggttaagcttcgacgcctatagctgctgaaaggcgtactccaatcgaattttctccggcgaggttcctgctattcctctagtgcttcttcatgtctccggcgacagagctccaaggtttggctgaactttcttttgcttggcttgcttgttggccgggttcgtggcttggcatcctgcagcacccactgtacccatcgctagaagcatggagaacaccggttcggtttggaggaagaagaagcaagctcaaggactggattgcttttttgttttcttttggtgttcttgtatacatattgcacgagtgatatttttttaagaaacacagtacaaacgcaggcgctcacaacgtgcgcacactcactcctatgaacgtacacacgcacctataaataaaatgcacgaataattctcaaaaaaataaattgggatgtaaaccaaacacttccgtag

SEQ ID NO: 44789 - DNA, 1827 bp, Oryza sativa
ctggaccattttctttgacaacatatctcccatacatgggtcccttagcaacaatactatcaacccgtatcacggtgttttcatttactctgagtcctaccttacccaaggcagttcttctctcacttccttaaaaaaacaaacccttttccttcgcacaaaaccaactaccctttcccataaaaaaaataactatctttccttcacttcgagaaaccctacctccccgagaaggtagtctccctcaataaaacactagaaattttgctaccaaaaaaagaatggtatattgttgccttgtatgcgaaggaagccttgactttggtaccgagttgcccccggtccaacaatgagattggggggttactgtcgaagaagtaggaaccgagattcccacccctgactgctcaggacatcaaaggtctgcagaataggccccgtggcgccacatcccgccaagcacaagcaagaccaagacctcagtctcttagttcagcaggccatgccctaagcatgaggggtaaacccaaagcaagcctcgagctcggccttttgctggctgctcggggcccctggcacaccataactacgattcaacctgatgttaacaacggaattttgcatcaaattcggagaagaagaaacaagatcgaagcggatttggtgtggaatcgagttaattaccaattcggactacgcatcggctgagtatcgtatcggctagaaacaagacagaggcttgacttggccgacatagcaagtagccaatacgatacaacttggggcctggtttgggtttgttttcgaataaccatcattgccaattagagatagagctcgaataaggcaattgtatatattaattaggatatttaagttgatttgagagatttggcaagagactgccatgaggtcttatttgtatcttatctttaggaaagtttgagtcatgtccctaatggactaagtttttattcagggtataaatatgaaccccagaccattgtaatcggggagacaatctaatacaacttcagcgcatcgccaccctttttgttcttcttttcgatgagttatctcgacaagaggtaatccgtcttgatggcttgtgctatcggtgctattatgtcggtttagatgttctagtccttttaccataaccatatgctattatatgtcttaattaatctagtcttagtatctcaatttagccctatcggctggttctcgtttcagggttcctgtcggtataagcttaattgccttactatattagattaactaaggcatccaccatcttgaaaagtgattaatttcttgattgtttagactttagatttctttacttactcagagatgcatcatccctagtcttgtctagaaccctagaaactaatatggaattaagcataattagagatagtatcggagtttcagccgatcttacttaatatacatgctattttgctagttttatgtatatttcccccttatatagagagatcaccttatataaatatattaagtctaggtcaatatcagctgagttgccaaatttggtagatgatcgttatttgatatgtttctatagattggtttgtctatataagtttttactagagtactagctagtatattatctttatttatctatcttgctctaaatattgttccatcggctacttctataatatcatctgacgtaaacttgacaaaataattagatgatattacagccgatgaggcatttttatggtttgcacgtaatttatatatcaatgcattaccgatctggtctaactatatcggctgggatcactaacgata

SEQ ID NO: 44790 - DNA, 1908 bp, Oryza sativa
tgatatattatatgtataaataagatatatctacaaccggactccctatatactctctccgtctcataatataagggattttgagtttttgcttgtactatttgaccactcgtcttattcaaaaagttttggaattattatttatttttttggtgacttactatattatccaaatccaaagtactttaagcacaactttttattttttatatttacataatttttttaataaaataatacaaacaaaaactcaaatctcttatattatgagacgggacgggaggagtagatggtaacctcgcacgaatccgcaaaaagatggattaaattctgttgccaaaatatttctccactacacagaacggttgcacccaagccgactgctctcaattgcatccaaacaggccggcccctgcatgcagttcgacacaacctgaccacatcctgcacacgttgcagaaatttgtcttccacgttgctgctctcactcaaaaaacctgacaatacaactcacacgttattagtttaacagccctgctacacagcttttttttttaataatgtattaagaaacccgacctctacatccatgataaaatgtacacagccaacacagcttgaatttgcctggttatagtagaccttgtggttatgtttgtttggcctcttcactcagcagggcttctcttcatcctgcctctttgttgactgataaacctgtagtgtagtgcatactccatactagatgtgaggcttcaatctggtcggtcagaccgaactatcgtaactttggtggtaataacaacttgggtttcctaatcctgtttctgaagagagaccgaagttttttttggaggatttttatgctacactatactacaaaagtatatacttatagtataaattaaggtgtagattcatccaatcttcctttcgattagttttgcagtataaatcgaaaagaatatatttgtcttttcatctttttgcgtgagggtatttttgtattttcgcgtttcagaacctgctcgagagagtggctcagatgaaatcagcttgagagaaatccgttccctttccttcgtcccatgcgctaacgccgctgtggacagccaccgcaccgcgtccctggctcgccgccgatatccaccgcgagcaagcgccggcccgccccgcaccaaacgaacagacaagaaattccagcacatgtactactcgtctatccgtccatgatatatgcatgccagagtcctaatctcttgcccgtctcgtcgtcgataggtcggcatgttcgctagctacatactcggtccgtaaaaaaaacgctagcacaaatggacgacgagatacagaacaattactcctgaatcctgatgaaaataaatctcaacttcaaatgatttagcagccctttacatgttttaaaagaaatacctactagtataatgtcgagtcgcctataaatcagacgctcgattttttttttcaaaaatcggttgctgttacaccaggtagattgagcatgtttcaccaggtagatcgaaaatgtttcagtcttttaaaaagctaaaacacaatcaaatcaactcatgaaacattttgctacaacgtatgaaacaaacggttatccaaaaaattagatgttgtttcatgttggtatttcttaacgacattactagaaatattcattcctagcaatggtgccagaaatagtcctggtatatttatggttacaaaattaatccgcaagcgtacagatgtaccattgtagcatttcacccgaaagtattctaaggtatcgtatttttaatcccaaagaaagataataagagcgaactttactaatgcacttgatacatatattacttataattgtcaaagcctaaacaggggttagactataacata

SEQ ID NO: 44791 - DNA, 1887 bp, Oryza sativa
ctggtcctggacagggatttcatgtacattcagcttagaaattctggttcgtgaatttctggacgtgacacaggtcctaatacttgtgaggtatcatgtcctgatacctaaccagtatcatctcgtaccaactggattatgttgtatagcagctccaataaaaaagcagaacgaaattcttcgcctcgggcgaccggcgcgggggagcaaaatcgcccccccccccagcgcgacgtggatgcctcctgggccccaccatttgtcatgcctccacctaccacgtgtccttaccaaacatgtttcacctagtgtactcacaatgttcactatgtacagatctaatgttgcaatgaattgaaacattcttttgcaacaaatcacccacatattttgaaaaccctctattaaggaattcgttttaatttttgttccataaaaaatgtttcacctagtgtactcacaatgttttactacgtatagatccaatattgcagtgaacgaaacattcttttgcaacaaatcacccacatattttgaaaaccctctattgagggaattcgtttcattttttgttccaccaaaaatgtttcacctagtgtaatcagaatgtttcactatttatagatctaatattgcggtggattgaaacattcttttactattcgctgaaacattgtttttatataaggtgaaacaatgcccgatttaaacgattgaaatatttttgatctacttagtgaaataattccgatatacttggtggaacatagtgcaatatttaaaaataattcaataataagctaaaaaaattcgtcggaatatatccatgtgtggtcttgttttgaagctttaattttaacgaatttaatggtacaatcgaatcatgatttggataaataatttaagagaaaaattagtttaaagtggttttacacgcatccggtggcgctgacgtcttttttttttgcccgatcggtagtggatttggatcgtctgacttcaccctgtgaaggcacgggcgtgccgtcatcacttatccaccgtccatgcaatccaacagctcccgagcacagagacctatgtcagcccaacaagaagcacgttctccagactttaggggttgtttggcaggactcctctccaagaaaatagctccatctccaagttttttttgccaaacacgagtagtggagtagctccggctcttgaatcgcagctccatctccaggaatattctggagctcctcaaggggtactccaccaaaacctggagtcatatgtcctcatggagatggtaaaaaattacccaccattgccattggtcacaaaaaaaacgattcgcttctatttcactgtaccgccccgttcccgttcctcattcgtgaaaaaattgattccaccagagcgccgcccaagtctgcaggcagatcgccgccgccgccaaccctagagccgccgccgccgagatggccggatccgcctctgtccaagatggatccggcctagaggaggaagtcccggccgccgagatgaccatgggcgccggactggagcatggccatgggcgcggcttccctcctcccgcaaccggccaggggcgcggctgcccgcctcctgctgccggccagtggcgtggccaggggcgcggctgcccgcctcccgctgccggagccgccctgcgcccgcctcccgctgccggagcagccctggggcgcggctgcccgcctcccgctataggagccgtcctggggcacgacaaccctgccgcaggagcagccgtggggcgcagctgctcacccgccggggctgcactgtggcgcgggtcccagccgactggcgatgcccagcagcaagctcgtcccccgcgtactggagcaacgaaccagg

SEQ ID NO: 44792 - DNA, 1407 bp, Oryza sativa
aaacccacttaaattgcagagatagtcaagtttccagtctctgagcataaccattgaaatgctcaccccacggttaaacgcggcgacgcaaatgccggtggcgagcccaaggaggcagccgatgagcagcagtgcccactccggcggcgcccaatccccgagctcctccccgaccctctccctctgctgcggcgacgatgtcggggacggctcggagcgattgagctgctgcggcggctgctggcttcgacgcccggatccgcgcgcggagagggggaggtcgaggtgctgtaggaggccgcgcacgccgccgctgctccgcctcggggaggcggtgacggtggccccccgcgcgcgcgcgcccaccctcgccgcagccgctgtcgcccttgcagcggcggccgccgcctcgcgcacgccctccccgtcgccgccgcgccacgctctcgccgctatggtttcgcacgcacgcagggaccgacgcacgaggtggaggggacagattcaaccctatcctgtccattccctcaggggtacaatggtaatttcatattttctcaaacctttgttttattttcttttgtatttctttaacacaaaatgtgggacccgccagacagctgttacaagtgggggtagacagccggttcagattcaaaaggtggggataaaactgcaaacaaaacagcaattgactttgaaagtggagggcatggatgcaattgtccctatattatatagaaggacaagcaaatgtatatatagacttctgtagtagtagtagtagagcagagtacatgtatatatatgattaattatatattacatatataagtaatagtattacatgcgatgcgagcttaataatggagtgagtacgcacatgatagatacgtacgtacgctacagatatatatatatatatgcggaagatgagtaattaataggagagggatgagccgctgcagcagatgaattgaagatgcgtgcgtgcgagcgaggttgtcaggcggccggataaggaggaggagaagaggaagaggaggaggaggaagaagaggccttcttgtggtgcctgttgagctgctgatggttgatgcatttgtccttcctgaacctgagcacagtgctcatgtggtcgatctcccagatgtgctcctgcatgagcacgttgccgatgatggaggggccttgcgaaatccggttgaagccgaggcagacaacccccgggacgacctccggaacgacgatgctctttgcgtcggcggccagcctcgcatccccggccatctcgatgctgaaactgggtatcgtcacgttgtgagccgggtccaccccgtcaccggcgaaggtccagttgtagcagtactcgaagcccttgatttcggccttaggcaggtgcgccag

SEQ ID NO: 44793 - DNA, 1275 bp, Oryza sativa
  unsure (1)..(1275): unsure at all n locations
caagtcattaacacgtcttctctatcagaaaggacaattgagagctacactggaggacatagaagatctgaaaagacaagaaagatcccgtcagcaaaggatcttgaaggctaaggaagcccttgctgctgctgagagggaacttgatgatctacaaccatatgaagcacctaaagctgaaatggttggtttattcaccttattttccctagtttttgctgtcatttattttagataacgagcttttgctgtcatacatctttttttttgtttgcaattttgcatatgtagcatacaagtattgtgtacggtttatctgctctagtaattatttaagcccgttaataattttatgtttcttcacagattcaactcacggaggaaattgcacgactgacttgcgatataaatgagctaaaaaggaaaaagacagatatggagtcccagttagttcgagagagagaaaatctgaggaactgctctgataggtactcgttttgtctattaatttctactttgtccaagacttgggtacctactagctagttattatttatcacaggttgaagcaaatggaaaataaaaacaataagctgctccaagcattgcgatattctggtgctgagaaaatcaatgaagcatacaactgggtgcaagataaccgacacatgttcagggctgaagtttatggacctgttctccttgaggtttgtttacttgcatgttcaccaactattgtctgctttgctgatcatacaagtaatagtacatcttctttgtactgctgtcaggtaaatgtccannnnnnnnnnnnnnnnnnnnnnntggaaggccatgtcgcaagctatatatggaaggtatagatactacgatagcaccttatgttcctctctgctaattagtgtgatgcttatgttttactttattttagcatttccatgaaacaatggaaagccaagaggaacacacttaccagtggctgctggttctgttgtgcactgcacattgtgttttgtttttccttcacatagtcaatgtgctgttgcaaatttatcctccagttgctggacatggttagtgtccagtaggatggcatctcattaaaccatttctagacaaggtcccttatttattgtcatcattgacttggaaaccataaaacactaccatgccatcttattctttcctcctatggaagatactgcatctgtaattaactgccattttgcttttatgtggcagtcattcattactcaggatgcttccgatcgtgac

SEQ ID NO: 44794 - DNA, 557 bp, Oryza sativa
  unsure (1)..(557): unsure at all n locations
attcctgcagcccgtgcgctctccagtctactgtgtagctcgatcgtggccattttggcgttttgctgcaacattacctgtcgcggcaggattgaaataggtgcttgcatcgtcttgaaaaaagtctattttataattttttttattttttattataaaaaaattagctattcgagctaattttgtaccgttcttgaaatagctacttgcatcgtcttgcaacaagtctattttgtaatatattttattttttattattgttatggctgtgagaaatattaaacatcactatatattagtaatcaacatccatacaagatccatgggcaaaacagtcctttcactcctcctcctaccaaatctggagctggaccatatgtattattacccaaacaggtgctagctccaggagcctccacggtggaaaaaagaaatttctcttggtaggaagggaagccccttccaatttttttttnnttntttttttttgggcttcaagagtccagttttgtagacttgtagtgccgccatcgctgctgccggcgaatagctggagc

SEQ ID NO: 44795 - DNA, 687 bp, Oryza sativa
aaggtattacctacttattaggttcaccgaaggacacgaagctatggtgggaaaagggtagagaggatttcctagtgagaaacagtgtctagggtatgcgtaattttaatgctaacgcgatacttcatgtactggcaacctgctgttccccgatgtcgctctactatgtacctagacagggaggacttaagtgctcttgagggctatcaccacctctacacccacctcaatcgtactgtgggacacgcaacaattactggatataaattacctaaacacctcgtctaagcattataactcactaaagtaatcactatattttagtgaacaataatccagtatgatgattaggaactaaccaagaggtaattctcacaagcaaatctaaattactcggaaagatatttctattgaaaacagagtaattaacataataaaagaaacatgagaggattaccgacaactccggaatccctccgacttcttctactctactctcttcctaattctagtatagaaaatagtacaatagagcctcttataattcagctcaagtgtgttgagtgtgaaggagtgaagcttgttttatagggtaggtaatgacggttgtagaaggggaaatgtccgaagtgccctccaatcatcatcaaggagtgatccggagcatccatgccaaacctcacatca

SEQ ID NO: 44796 - DNA, 1137 bp, Oryza sativa
agaatggaggatgacagtaatataaggtaaaatctacagtcgccactattactgtcattttaataaaaccttaagcaagtgtcctgtaaaattaataagcaatattacttacaacacagttattaatacagtcatcttcactgtattgtgtttcctactaccttgatttagtactggattccagtgaaacagttggcattcctgagtcaattcagtcaagatgaaggcatctactcaaccaagataaacggtatcagtcactgaaacagcagtgaccaatcaccattctactagagcatagccaaaaatcaagattatggcatatactcgcatgacaattggcagagttacgctggttaactaaagaaaatgtgatgaagggtatagagcccttagctccctgccgtcgctcttttgcatgccaaacatatggcaaaatgttaataataaatagaggaaagtcgttcaaggatgcaacagaagctatggatcagtaattcagtagttaaaaaaccagtacatagttgagctaagttatgccaatcatctagcaccacacgtaccttgaaaaaaggcgcagaatttcacaatgtaatctggaagttgagtacgcatacatccggaaatttgtctccacaactacaaaaccctacagcaccaacatcatacaatgtaattattaacagaaagtattttcatcttcatttgttgttgcttaggtgacgagtagattgaggttatgaaagatttggacgtcatgaataactgtaatagcaaggatataaaatgttctgaaacctctttgttagacgatgaatctgacaagcttgctgagagatttgtagccagttttgtaggtatgaaccagctgtcctttcgaccctgccatggcttaactcttgacatttgtattcatcaagttgactagggaaaagactaaatcaaagttttacctgctgaagtttgaccagtcccaactccgccagatccctaatagcatttctttggacatcggtcagagtattcaagctataagcctgaagcatgaataagttaaacagcatgttgaagcgaatttgcaacagatgaaccaggccacaaagcttggactccacaacagatgaaagataatgctta

SEQ ID NO: 44797 - DNA, 674 bp, Oryza sativa
acagaagctgcagaggcgacgagaagagaggcaatcgctccccgtcgtcttcccccttctcccctgctcgtcgtcgcgggcgcaatcgggtaggtcgccggcggccgcggttgggtgcgcgagagcggcggcggggtcgctctctttggcctggagtatcctcggttggaatcaggtaagcgcgctcgtctctgatggctctctcatctctattactgcacgcgatgcgtcgatcctagtgtggagcttgggactctgagactgtgactgccggcggcgggagcttgctgctcggaggaggtcggggggaaggagcggcggcggaggatctcgggcggagtcctcttatcgcgattccgattcagaaacgctctgaatttggtttcttctccatgttgagcttcatgagccctattagtattttgtcttgtttggtggtgaatggtataggtaggggagtttccagtgcttgctatctgcgcccccattactcttttaatgttgcctgctggttaatgcccaatggagtttccttctctatatatatattgagaaaattcatagttctgagttctgattgactggctcatatagcaatagcagatctgtttttgactgcttgaatgatggaattgcatattatgctagggcttctgttgcataatcaggcagag

SEQ ID NO: 44798 - DNA, 517 bp, Oryza sativa
aatctatcgacatacaaagcaaacattgcaaacaggctataagactactgaaacagagaacaaaaccatttttaatggattctacacattattcttgatttactgagacttgaatgggattaaacggagctcggatgaattacttatgaattttagaagattcactgtgtttattactataaaagaaatccttaaataatttattgcgcaatattaaccagggctgacgtcagcgagggggcgcggcgccgacaggcgggacccaccggtcagcgaccgggagagagagaaagggggtggcggcgcgcgggcccacgggtcagcggcgccacgtggcggccgaaccgacggccccgatctacccaagggtagatcggacggcggcgggacctcgcggccggggcgcgcgggcgcggcgcgagacggcggcgaccatggcgccggcggcgcggcgctcacactgcggcggcgcgcatgcggcagcggcgcaaggcggcgaccgacggcgaccgaccgg

SEQ ID NO: 44799 - DNA, 700 bp, Oryza sativa
attcctgcagcccggcgattgcaaggatcagcggtgctgaccagaagtatatatgtgtagcttgggaggcacaatatatagtagcaaaggaacgcaattgtactaatcagaaaatgcaaagttgaataatagttcaaagtactagtcaatgtgctggcctagtctagactcaactctagctcaagcaagcacccgacaaaactaatgactagatatgaatcaatgcacaactctgcactctgaaaacatactcaaaggatgatttttttttttctttctaggtacggcttttttaagcacctttctgcccttttttttgtgcggctttctgccttttctttgcacctttctgccttttctttctttttttattttttttacttttttttaacaagaactgaaccactgacttcaaacaaggactcaaatgtaaatatgaatattatagggactcaaatgcaaagtgcaaaactaaaattgggtcacctcaaaaatggattgctcatatcatgtaggttccgtttttataaaaatatctcaaattggctaaaggaatttcagtgtaacaatacttgattgaggaaaatacggagagaggtgctagaggaactcagtcacggtatggatgactcgaccgaacagaccaaaaagccaaacaaaattggttccacccttatccacaactctatatatctctccc

SEQ ID NO: 44800 - DNA, 800 bp, Oryza sativa
aaaagaaccgaacagaagagaaaccggaaaaaaaaagaaaaaccaaaccgaaaagaaacgagaaaaactcactactccctcctctcgcgcggcgcgtccgccgcccctctccgcgcgcgacatgtgtccagtcgcgcggggaggggtgcacgcgactgatcgcccaatagctttttcggtgcgcgcccacaagcacggcaacacataaaccctcctttcccctctgcgcgccaaaagcacggcaacacagaagcaatagcaataaatcaactctctaaccgctcgataaaattttttggaaactacgaaaacggaaacccaacgacgagacgattcaatttttcaaggtcctggcaacaaccaaccagatgaaaaactggacctaaaacaactcagacagacttgagtgatgaaccctaaacctaagtgatgaacagatgcaatactcaaaactaaaaattaaatctaaaattaaaccagcactcgacacgacgatgcaacatagaattcaacaaagcaaaatctaatagaacaatgcaacggctcaaattgtccaggtaaagaataaatatttttatgtggcaattttctggttatgggaacataaattaactaacgggcaactgcgctctgataccaactaatgagggagttaggtcccgatcttccgataggtactgataaacagtcgatttgggcggagttgcgacacaactcgatccggcttctgaacgaacacgctactgagcccgcaatcgcagcaccacgtctcctctggttatcaaccgtgccgaaacccg

SEQ ID NO: 44801 - DNA, 940 bp, Oryza sativa
ccccggttgagaagatgaataaacatgtagaacaacagaagttgagtgattactcttgtaagtatgaacaaaccttgagccctaagacgcctgcatttaataggctctctagtgcacttggattgagggcattctctggaacgaggcctccccaaaccctgtttgagaacagcagacaagtcaaaaaaggtcggaccatgaaacaagtttagatgcagaattactgttattatggtggatgagctgtttttacctcccttggttctctacttgctaatgtgcaatgatactgaaacgtgtaactattgcattgcaacttacctacatcaacatgtagtttatccttagctgcatccaactgataatcaagcacgtaatgtcagtgttgactaaagagaaagcaggtagtagcaatttgatgctttatatactgatattggtacgataaagaaacactgaccttcagcttgagagtttcttcagaaacagttgacgggtagctattaagaggcatgtccactaatgttgtaatgccacctgaaatgaacaaaccgtgaaactttgagcaaaaagtctgatctctttctgttattgaaaagaaaaagaaaattgattactccctactaactcggtctcatgtctcaatccaagaatacgaaaatgataaaacaacagtcccagtggcagtatagtattcagaacacatcccaccatatgcgagggatgttgccgtaccgaattcagaatgcatcccacatgagagggataagaactaagaaacgtgccttatttagagcatccccgacattagtacgcaaggattaactttatttagattgacaagccaacacgttaatgagggttaacttgatatagattgataatgactgataaaaagctgcacctgcagctgctgctcttgtaccagtggagaacccct

SEQ ID NO: 44802 - DNA, 2800 bp, Oryza sativa
gtagctcttgtttattgaggcataaggttttataatctgtaatgactgtctttctttacaatcagatgggggggacaaggacaatatgaaaaaaaaaagaagtcagcccttaaaaaaacttaatttattcctttttatttattgtttttatcacttgtaaagttcaatcaattaattcttgtgatattatttgcatccttagtgactttttttactttctgtttcctgttataaatgtgcctaatcaattaagttaatttgccaaccaccttaattatgacaattacttttggacagtagtgtcattttgtaccacctaccttaattcttgtactgaatccaaatggacttatatttgaaattgaagggattttgtttgggcatcgaagttttccacccgtttctttaaaatccttcatattatgtttacattctattctgtggataattgtttaccacttggtctttcttcaagcttgtcagcgagtttttccgtagcaacgaggaagctcaagctcaaattgttccccacagggtacagttcttaacccatgactattattatttaccacaattatgtattccgatataacatacctatgatgactttgctcctgaattgactcattgtattttaaggtgaatttttctgtatatatataatcaagagaaatattcttttacacagtcatgtttaattaatgtgataaaattttgatcaagtttgcgaaatttatgccaatccactagtatccatgctagctaaatccgcatgatcacctaatgatgttgtttttgtgcgatgatgttacatttttgcctaggtctaacaagtgtcctagtgtgttctgctctgctgtccatggaacatatggctaaacgcagggtccgggatcttttattataactatatcacattagagaacatgcacagacaggagaacaataacttgcttctactataattttcaactactctaccccaatgtgtccctaaaagattaaccaatgcagcatctataaatgcaccagataaaatcttcccaaaatgtgactagtttcatagagcctgaattcctggcactaagattgatttttcttgaataaataaacaatatatggaagtacttcaatgactcctctagtgtaggatctgaaaggaaaatagagtggtcaaccaaagataattttttagtgaagtgttctactgatcaggttgtgctattaggctgtgagatgcaacggccaggatgttatcccatttgactaaaaggcaccgaaattatccttttcacctgcataataactcttaccataaacaacagatcaggcaagtataatttaaaaaatttcgtgcacttgatatgagaattaccatacaagttgatcgaggtacacaaataaatagggtgtttggtttgtggatccggttgccgctagcaccatactacattagtaacataaattttaaaaatttatgtccgatgttcaattccttttcgactttcttttaactggatgtttccttttgacttcagttacaggatgaaattggggcagatatccagaagatccaattgcagaacgaggagatgtctggtcatgtaagtttacttagacatgtatttagacacctgcggcagaccagatttaactacgcagctaactaccggaatcgttttttttttttgcaagacatttattttctcattagttccttattttccagtgatgccacagctgaacgaggaagaaaaatacaatatatgtgttgccgatagaggagaaatctgggtttctttggacaaacttgtatatattgccgctagaggaggaaatgaataagataaacttgtttaaatgtttctgtaactgtaccaaacatacatcgatgtgacggaagttttcaaatatatgtaaattattattatttatatactagggtgaatttgtgagccgtgtataccatgtgcgcacgatcgagttggatttacatatatgcgcgtgcacgcagccagctaaccacgggccacggcattgtcgcatttaatttcctctcaggcagcagcggcaaaccggtagaccaaacaaacaagggggttaattaaatccgtaccactatgaatttataggttttaaaatataccattataatttataaaattaaaactatgtcattataacttaacattattttaatatgtcaccacttactcattcactacatttttctaatattttaaaccaaattggccttgtttttttcatccatcctcttctttcttcgcctctccttttcacctctcaccgatgagttcatgtagccgtccacggcacaggaaggttgtagtaggacaccccgatgagctcgtgcagcaggtggccatggtgtaggaagagctcgtgagtatagttatgtggagcaaaatatcttcatcgttttgagtgtgttataggttgtattcgtggatagcgctcgaagagtttgtgagtatagttatgtggactataatatcaacattggttttagagcatcggaagttcacattcttgtttctatagcaccgaaagatatcagttcactttagtagcaatgaaagttatctcagttccccattttagcactatcgttagtttttctgccatttgccgtcaaaattttcctctctaatcggttgcgccatggtagcatcgtcctgccatcctgccgctagcggaagaagggatggcacaacgcgtgtgctcctacgctgctggccctatcgccttggatcgtcgctcactcttgctggaccatttg

SEQ ID NO: 44803 - DNA, 794 bp, Oryza sativa
ggccacggcattggcaacccgctgatttctcagtgttacagaagttttcagaaatcgtgaaggggcagcgcatgcatatgcatggtttgaaacctacaggctttcatgaatggctgcagtcaattaacttttacacttctctagaaacccggcaaatgatcaggataggtctgtaaagagtatactcaataaattaaaggagtactcaaattaagtgtgcaagctagcttctgtgtgctggccgctgcagatgcgagtatcattagtacagagatgcacttaactgtgcttgttttgatcgagagctggatgcgcgctcctggacaagtctgttcagtgagtccaacagcttgaagtgtactgaagggttgtctgcaagtgagctatagctaagctaatcagtttagtagtcatgcaaaatactatagtatatatggatgcacatggtcagaggaatgtctgtttaatagctagctagttacagggtatgttgctgtgtgattaattaactataacatttatatgtcctattctgtggtgcaaatgagattattagagctagcgtgttgtgtgaggggatggtggttggttagagcggattttatattttatggatgctatatagtactgcaagcaccatatatagtactggggagatgtctttaataatcgtgtgggagggaatatggaatcaaatgcactgatcgcaacaggtatattttaatcgaacaattgtactggatatgcgtatgtcgttaggttgagaaagacaaatacgcctttagggctgcagg

SEQ ID NO: 44804 - DNA, 784 bp, Oryza sativa
gacttggccggcaagtggtgtgcatatggtagtagttgcgcaccgatagggggagtgttcgcctaggtcaattaaggactgaactacgtgtcaccaactaagattacagtgcaaccacatgtgttggttatggggcaaccttagcttattatgttgcttattgcttaaccttgcattgggaggccgttgtagtagggactagtctgagcaatggttcataggagctacacatgtgaccctctatgggaacggttgtgttcgccatatggcatgggcgtctgagcatatccaatattactgatagtgcctcgttgagggaacggatgtgttcgcctcacggcgttaggattaggttggggcccatctttcctagtggcattggttcatggccattgtggagaaacactctccgtgcgcatgcaaggttaatctttgagcaatgtagtggcttcgtcataggctagcaaaacaggtaccggtttggtatcgcgtggcatggtttacatgattgctagctcgtgtcatgtgcgtaaagtgcacaaactctgcagagtctaaactaattgattagccgtgctcacggtcatgagcgacttggtgaaatgatacaagtataatgttcgtgacttttgttaagtaaattctgaaatgggtatggtaaataatggtgatgatttatgcccagcatgggttaagaataaaattgttacttgttgccatggagggcacaaggatggcactatgataacattaatgttactattactgttgtttatcctttgat

SEQ ID NO: 44805 - DNA, 644 bp, Oryza sativa
ttgaggaacataatttaaaggcaaagttatcgacccttgcgtcaaataacagaagtagctagcacccggagaccaggaaagttaatatgaggcagttggtagcaagttagaagcaaatgacaagcatgatattcttatgatgacaaacatggtatcctagtaatgacgagctgatctcgacgcatgacatgaagtgggtaacttgtatgaggttgactccaaagatatgaactatgcgaagttctggaactgaggccccatcttcaagtgccgcaacccagtcgaagtcagctaaaggttcaaccagggacaagtcaggtgaagagaagactccatctgcaacaggagatcgagccaagcagtccagagtggagaagttgtgctaggcaagtttgttataaaagacggagcggaagaagtcagacaagaagagaggaccgcccaacctatcttcttgctagcctcctcgaatctcggggacgagattcttgtaaggggggtggatttgtcacgtcctgataaattcattccgaaataaaattcattttctaaaaggaataatagaattaattaaaattcgaaaagaaattggctaacactaaaatacgtacaagaaaaattcgaatgtggcccgggaatttttg

SEQ ID NO: 44806 - DNA, 753 bp, Oryza sativa
attcctgcagcccgtaaataaataaagtaaactaatcttgcagataagttgaagcagttgaaaacaggatcacaaatttttgcacttttgaataacaagtttcaaaagaaataaaataaaagagagttataaaatcaacttgctaagtttattatattgcaacacgattaaataaaataatgttgtaaaacttttgctggtaaatggtacattagtacagtaatagatgtacaatactaataacacaggaataataaataaattttgaatgagaacaattaaagagattataatctgcatgtgccattagcttggtttaattaaaagagaaagagaggagaacaattctactttttcaacatttttagagggcttctataggtaaccatttggcataacctagggtcaaggaggctatgatacaaacttgtcacgtccgaacgcttacatgtgtgtaaaccctcgtccaggaatcagctgaggcacacaataacaaattgataatagactgcaattattactctaattgataagcgaatatacagtcattacagaggtagatagttcctctcaaacaataaagatctaagcagcggaaaataaaataaagagcgcaggcgacaccttcagcatcactgtagaactcctcctgtgatgaatgattgcaaggtgagtatatgatatactcaacaagccacgctgcgaatatgcaagtgcaggggataacaaaagatggcataatatagtctcatt

SEQ ID NO: 44807 - DNA, 891 bp, Oryza sativa
ccagcgagacttggcggaggggaccggtagacggggtagagctcgaccttgcggagccgatggaggtggcggcgcaggagggcgacggcctaggagacggcgcacggctgctgcagcggcggccggaggcggcgaagcttggattcttgtcggcgaggtacttccagaggtcttcgtcttcggggaagtggaggccggtcttcctctccttcttgcgaatccaacggcggcagcggcgaccgaaagcgacgacagacgacgacgaacggtgcggctggagcggcgccggcgcttggagagagaaggagagcgtggggagagcgattccggcggcggcggaagaagggacttgagaggataggtataggacgactagtgggtcctttatataggcacgggagctcgggtccgggcccaaatcgacgggaaaagtcgggaaagtctagggttctcgccggagtaaggaaagattgaaccgcgaaattggaaaagatttccatagaaacttttagtgatttcttggggaaaaggaagaggagattgagaggatcccattcccgcaactaatttggaaagaggagcaacggggaggtcggatttggaaggatatcggcggcagctgtgcacaggctggagagctcgggcgctgtccagaggtagaagaaggagcactgtagcgagagggacgaaaaacagacttttctgcgtctgagaggaagggagagaatgagctgaattcggcccaagctgaggggaaaattcttattacttttccaaataaattaaccaatgagatgatctttcaattgttaaaaatacttccaatgctcaaataattaaaagaaaaatcttgaacatacttggacactctaagtatttaataatattgaa

SEQ ID NO: 44808 - DNA, 727 bp, Oryza sativa
tttacaggaatcgtgaaaaccaagaagtgtacttaagcctttccatgtaagtgtgtactccttatggaaaaaacgaaaggaaatttcatcttctatttctttcatagtgcacagaaattgcaaagtaagcaaacgagaaccaagctcatctaccacaataaatctctgccaaccaaccgctttccaaatagaacgaaattcaacttcaatacctatctttttcagcagctccggtgagtattctcgcgtgtgagcatactcccggtcgctcagcatgtagtaggcttgtctcttccgatcactgacaaggtcgaggtcggtgtcgttcaggagtcgtcgcggagcttcggcgtcttccatcaaaacatctgctgatgaatgagtactagactcgtcatgacgacttgatgaagagccggaccccttgaacagacgagacagtcgcctcctcattctgcacaatggagcaagaacggagtaactcggcgggggttagagatgacaagaatttcacacgccggttagtttcaccaaagcaacttgtatacatgcaactaaatattttaatttgagggaaacaatcaaaacttgaatgaacttgagagcaaactttggagagggaatgaaaatgtgttgaaatggggtggagttccctctcccggctggctggcttttatagggtacccataacagtcagaaatgacatgtgggacccactagccgttac

SEQ ID NO: 44809 - DNA, 1752 bp, Oryza sativa
ttgttaataactctgctttgatagaaatatcattttgagtaattaaggtttgctgagtgagaattacttcttgtttagttgctaattagcatacgggatcattgttcactatagtctatttatttatagtgattgctttagtgtttgatcggcactagagtagttattaattgcgtagacgcggtgtctgggtaattaatctccagtggttactgcgtatcccaaagtacgtttgaggtgggtgtagaggtggtgacagccctcaagagcacttaagtcctccctatccgggtatgtagtagagcgacatctgggaacagcgggttgccagtgcctgaagtattgcgttaggattaaacataagctttccctagacactgtttctcattaggaaatcctctttgccctctgcccacattagctttgtgtccttggatgaacctgacgaggagataaccacacacgttcccttggattcgatacccatggaatactctgtataggaagtgctacatcgttatatccgtgcgcttgcggattctatctgtgatcgtatgaaataccaacaagcatttctggcaccattgccggggaatggttgctgatcatttccgaaccctgttcatcctcgcatcctttttactttttttttaccttcacccctgctatcctagagaagtattcctgtcaaactcttctcgaccatggagcaactgctttttgagctgtctgctcctcggggcgaattctatgaaccacctccttcatcagagcccatttatacaactggctatgaaattcgtcccgaactaattagtatggttagggaaaaacctttttttggctttgatctagaaaatctctaccatcatctgcgatacttttaacaagtttgctcatgccttaagattcgtggcatgagacaagaaactgtgcggtggaaattgttcccgttctctcttcaagagagagcaaagcaatggtacacctctaccgttggatgtgtaggcggtagctgggagaagttgcgagacagattttgtcttgccttctttccagttactcgtattaccgcccttcgagtagaaattctcagttccagcatattaataaagaatcaattggtcaagcctggtccagattcactaatttagtgcagtccgaacgaaccttgtctatacccgaatatgtgcttttgcagcattttcatacgggtctagataaggagtctgcattttatatggacataactgcatgaggatctttcatgcacaaaactccgtcagaaggaaaaataattctagatcgaattctagaaaatacttccttcatgatgcaatgtgatgaaccacctccagaggcatctgtgtctaagatagaggagccatcgatagtcgaattacaacctaaaccttccacttcaaccaattcaactgacgaactagctcctgagccatcatccgttgaggacgaagaaatttggactccggatcaagctctagttttatttagggatggtttcgatgaagactacaacaacaccctgaattatttcagtaaaaagaaaccacttgttcctttgccacctcctgatcctacggcaacatccataatgagtgacgaatggctgagtaggtagagctttcatcggaagtaatttggataaataccgcccccgagtcattccatgtcatttggaaggaaacaatgtcggtattctttatagtccaactgtcggggctaatctcgttt

SEQ ID NO: 44810 - DNA, 1310 bp, Oryza sativa
atagaaaaaaaaagagagaaaaaaaatctaaaatattagatcatgatgagcctatattataacggttgaggttgattggatacctataagtattaaggttagacaaaatatagagagaaattaattctactcaaacttggtaaaaaaaattgctaccctaaaaaaaatagaaatcatgttggaatcatatccggacacccattcggacaatgtctcacacctcactaccacgtactccatgtttttttagagtacatgtttttcttaataatactataaaaaaatatttatgcattgtaacgggtgaatgttattataatcttattattgttatataatttagttaagatgaaattcaatgtggaaattcacttgggtatatactttttagaaaatcataagctgcaattaagagcctgatcatctcaagttagcatgcgagttttttaaaaatatatcttatacgactccttccgtatttccaaaagcgaacctaaaacctggctcaaatatagatttgtatttttaaaatcaaacggatttaaaaaccgactcatacattgtatgaataacgtatcaagatacactatacgcagcatcaacatatggcctcatatgtatagttatacatgtctatgaataaatatatatggtgggttgagaatatatattattagtttggttgattgatggtcgatcaatccatcaaagttggcacgtatatagcagcctgctattgcacgggcaacaatttttgaccttataaaatctgtcaatatttaatgccattatgttagctttatttttttaacgaaccgccagttagatagcgtgaagtttcattgaatatagtagtaaaaagttaaaaagaaaaaaaaaactacaccatgcactggtatcgatgtcccacacaaccgaggaatgtttgctttacaagttgaaaataggaaataatccgaattacacccctaaactatagcagcggtgtaaattaccatcttaaaccataaaacagacatcattcagtctcaactttttaaaatgcttatattttaggatggagcgagtagtaatgatattttttaaaaaactaataaattataatggcatggagcccactaaaagaaaaactccaagtctaaagcaagccggtccaaccagccgtcgacctaaccaaatttcttcctcgtaatttcttcctacgccgccaacgccatctgtccgtacgctgctgctgccgccgtcttctccctacacaacggggagccgctttcctatccccttcacgacgctgtctccctctccgtcgg

SEQ ID NO: 44811 - DNA, 1363 bp, Oryza sativa
aaacaaaacacatccgaatcccgcagcaaaacaaaactgcatttcggaatgtttccaaaacaaaacacatccgaatcccgcagcaaaacaaaactgcaaaaggaggctgcatctgcgcaagggtccctacgtggcgaggcaagtgagcgcgcgtgtttcccctcttctctccaccacacatgtttcaagtagcaaggagggcatcctcctttttaaggaggtccccctctcctagaataagcaaggtggtactaaactccacatgcatgccatcccatgaggtgggcttttgagattttccaaagaattaatcttcgaatgggccttagcccatctattaattccaacactgtatccggttttgcagtcaagatatccgaatgtaactaagactcatacttgaggtatctatagtggacattttcctttttttatctatcaggacacccaacgacccaaagcccatgcctaatttgttctgtggatagcggcctattcctaaattaacttgccagttggaatcaggcctgataggtggcccacgtctggtgacaatcaagtaaggcccattgaagagtgaaaccggagttgtcgctgatatgggccatgcctcacgggccatagcccataggcaaggagatccagttgcgtctcacacgattcacaaacatccagagcctagtgacgtgttgctagatgcaaatgccacaacagcatatgcatcagttcagttggcctcgtgcgtttttgtggcgcgtcgagacaaaacgttgagttgccgagaaggcagataaaacaagattatgttggtgccagccatgcatatgctggagcaatatgcagagtttgctaccgccaaaacacaaaaccctctttcatatgctcctactccagtatggatacaaaagaacatcgggaaatgtcattcgtgtacgggctctcatctgatcaaactcgttgcgatcgccaaaaaatctctctgactaagctgggaaactaaacagtttttatttaaaaaaattgacaaagtagattaatactatgtaatatattattttacaaatatacatattaaaattcgacttctacaacttataataaaaataataatttttatatatacgtatactagtgatttatttatacatattaatctactgtgtatattttttaatattttttataattatatagttaatacggaagaaacgggtgaatgtctattcgatatattagaatccaccttggactaatctggtatgtagctcgcctggccaccaacccgaatttactctcgctgaaaccatatgtatgcatcatccaatccagacgtcacatatcgaccaacaaactttgcaaaatt

SEQ ID NO: 44812 - DNA, 2523 bp, Oryza sativa
cggcggccggggaagccaggctggccgcctcgccgtcgccgccgcagaggaagaggtgcacgtcggccatgcacaccctgccatccacttcccccttcgtcccgtcccacacggcgacggcagcgtccggaccccggccgccgccggcctcgatctcggcgatggcatcggcgacggtggaggacggcggcagccacctcaccggcggcttgccgatgcagagatccgatacatcgtgagattgcagcaccatgcaacgatacacacgtacagcgacggctgctgctagtctctccaggatcttggaggaggaatcgagggttttagtcaaaaaagcgtagggaaaatcaaaagcgcaagaatcatctgtagctggtgaggactggagtctgagatatgcgagcggcgctaaatatatacaaggcgtcgtggcgacatcatcatcgagttaaatctctaccagcgttttcttcgcccaaacggttcagtagtagaaaacaaccgtttatctcataaatgattgaattgtttggatttatttatactaccaccaatattaaaaagtattattataaaataagtatagagggatataattgtcttgtcatagtgaataaactttatttttttctctctttttcggcttttgtatgaaatacgaattgtgctagcacacaatggatgatcataatcaatttaacccggaaaaaatataaatgcaaaataactcctaattattttattagtaaataactattttattcttaataatattggtagcataatagtaataagtggagtgcacccgctcgttttcggggatttcgttgattgagccgatcaacagaagcggttatgtatgcttaaacggtcgagacgtcggcgtcattcgtagacacgtctgttgcgttgttaagctgaagaagtagctagcctacttggacgtggcaacgatacgcatcgcccggttcccttgtgatcggtgagaaacagtaatgacgtgctagcgtgagaccgataataattagtttgtttaattacgactattaattaattaattaattagcctttttttgcgaggaattaattagtacgactaagcttaatcgatctgctgtttataactttacatcatcgtcagcatgtcaaaacagtatagttgggattgcacgtggcaagtgcatgaatttgaataataaacttcataatccatatgcttcacatacatatatacgtggtgggtgcttactactttagttgcttaccttgccagtgcgtccaacgaaagacaaattgggctagctgtgtattttttgtagtctgtacaattggattgaaacgtctaaaggtttcgtatcagcttcaggacagtaccaacccataacactagacatgatttctataaactccacatcattaagaaaatagtactagacactactctttcaatgcaaacaccactattccataacttcaatttaatgctacttatctcacatgatgtattggatattgtgtaggaaccatgtctcatgcaagacatggtttccttctctttcctcatttattcacttgtcacatcattttttttctaggtggcaactcatttaatgctatggacaccattctagtcattgggttgggaatgccctcataagttaatgggctaaatgatatagattagaagtctcaccaattctaattatttgatattagatcattctataatatttgcgtcttttttttttacaatttggttgtaggaatatacagattgcatatgacagcatgtttataataagcatgtttataatagtatacttaaccattttatattttagctaacatgtataataaattaaatataagattagctttgttttttctcctatttctttctcacactatatatgaatttaactgatcaccagctagagggcgtggttgtcatatactccctccgtttctaaatatttgacgttgttgacttttttaaatatgtttgaccgttcgttttattaaaaaaatttaagaaattattaattctttcctatcatttgattcattgttaaatatacttatatgtatacatacaattttatatatttcacaaaagtttttaaataaaacgaacaatcaaatatgtgctaaaaattcaacggtatcaaatatttagggtttgttcactttgctaccatttcaaccttatcaagttttggcattgccaaattttggtaaggttaccaaaattttagcaaggttgctaaattttggtaagactttatatgtacttactaaactttgacaataaattaaatgtagctattttttataactttatctaaaaagataaggttaaaaatggtagtaaaatgaacgatccttagaaacggaggtagtacaatctgtattatactcccttcggtttcattttaattgacgctttggacaatgacacgctctacaagatatacatttgaccttaattttctattataatatatacaataaataaatgcatgt

SEQ ID NO: 44813 - DNA, 2569 bp, Oryza sativa
tgaaagttcatctattgtttaggtgtggaaaaggagtgaagtgaagtttgaaaaaagttgaaagtttaaaaaaagagttgaaagtttgaaaaaaaagttagaagtttatgtgtgtaggaaagtttttgatgtgatgaaaagttagaagtttgtagttggtggagaggaactaaacatggccatagtacccgtttttcgattcgaaatgtgcgagtattcattggtagtgaaacggatgttcacctccaagtccagtgaccaactacctgaaaaggaccgtcactaaactagctggcccaaattcgatcgagcaggttcagttctcaccttgagtgacctttatgcctactcatcataattaaagaagacaaatgtactttaatcgacccggtaacaaacagcaataaaaagggtcgccacactctcgatcattctcttctttcttttccacgagtcgtgtcccctcaaaatggacgctagctagctagtagtagtactcatcacaattcagagtctagaaagcaaaccagtagggtttgttatcgaaattaaccttattaaaatttagtagtgtgaagggcttgcaaagttggtaatactaaaatttggtaaagtgataatggtaagagtttgtttagtttgttaccctactaaattttggtaataccaaaaaattggtagggttgagagtctttgagataactgtggatcctgcacgcaaaacaaacattgatcaatgctaactgacaccagagtgggtgaagaatgcaacaagttttgggccgcaactggctgctggccactttttgggccagaacgttagccagtcacttcaggcccattttatctgggctgaaactgtacagagacgaaaatgcggcccattatatacgtgccggataaacaggctataaatggaaggaaggcccatggaatataattgcatgggcctagaggaaccgggagttcgcaccaccactgcactcttcctttttctatctcttcatcactgcaaaagataacacaaaatcacccatcgacaaaaataaaaaatgctttacttcaattcaggtactctaacagatggacttactacgctttatttagtttgaaaactggggacttacaaagttacaccggccggtgaatggggatgacgtaacagctgttttgcaaccactcaatctaatcattcgaattaataatagcgaaatctttcgctaatacatgcactaatcatgaatggagaggaggctacacgacgacaagtaggatatttttttataatccggcagtttgcgctctcaaacaagttcataaccaccgattacgagagtgacaaatgaccgtaacaccgcaccaaccttcttctcgccgtccaagttcaaccgctctgtgcacctggaccatacggagtagtagaaatttggaatagactacaaacaattttttccaactacggcatgtggtgcacaaagtcgtattcttattaattaattataggtaggagccttggtattcaatcaagacgaaagaaatgtccacaaataggtatgttttgcagatgatttctcaagtgtacatcaacagaagttgaacataaatggattgatgcctgaatggtttttcaaacgtatcctctatttgaactagattctctgtttttttttctattattactatatatatcgtctggtgtactactactaaccaaaaacggtatataagaaaccaagtcataaattatggaccaaacttttctgtttgtgttttctgcggtttaaaagttagtgttgaataaaaaaaatcctaaatttaactcaaaaccaaagttttataatttaaattttaacaacggcttataaactgtgaggcaaatgattggaagcttttacctccctgttttcaataaggatttggaaaaacctttttaaaaaccacatctagaagaagggatatttaaaaacaatcacaaaaaagttcttaatcgttaaatcgaactatatgaggagcaggagttatacaaaaatctaaatttacttgtaccatgccacttcagcgtttgtaagatttttttttcttgaagaaaattgtacgaatcgacttttccactttcaaattcactgttcaagccgccgtgcaaaattcgtcaacacccttttttttctccaaattttctccgtctcattccctaaacccccactccccccggtcgtgggtgtatagaccaagctcacgtggccgcctcgagcgtccaaccgtgggccccacgaggtcactccacttttccccaccgccatccactcccacctcgcgcctcaacccccaccgacaggtgggccccaccttaacccgaccccacctgtcattcgaaggggtaaccacacacctacgtcgccctccacgcttgggccccacctgtcagtcagttggagctttttatctctctctctctcctgggacgcgtgcccctctctccctcctcccgctccgcgcacgcaacgaatagaagcagaagcagaagcgaagccaagaacaccgcgaagtggaagacgacgaagcgggcggc

SEQ ID NO: 44814 - DNA, 1605 bp, Oryza sativa
tttttttcgtgaacacgcaaaaaagattacacgtagtatattagaataaaaaaattgtagttacacaacacaatcagtcagaccgacttatgccagagaacggctaaacacaaactctagaaagtagaaagagcgagccacgctacattctcaacaaatctccagaaacagcaacactagctaaaaaccacgtatatccctacacacttccacagctaatatgcaactgcatctgcaagtgtaattaagtatgtaaccgagtaattaactgacctggtgcggcggcgaggcgtcggaatcggccgggcgcttgttggaggcggtggcggcggcggcggagagcacgagtgacggggaggaggcaaccgcaggagccatttggtcggttgcagcagcagaagggcatgccgcgcgcggtcagactgctggccttaataacctcgcgctatctacaatctctgccgcttaatctgcagtttctgtgggcgcgtgatctcgatcgtctctctcgggagaaggaagaagctaaagctagcaagcagccggctatttgtagcaagatcctagtacgagacgacgacgaggaggctggggtatacgtagacagagacgtagcagtcagtccgacctggagggcggcaaagcaattatgcctgagcagttggtgatgtgttggttttcgtcgtggaccggctaggctaggcgagcgagcttggcatagctgctatatatagacggaggcgcgaggaaggaaggaatggaaggtggcgggcggccgccggtggagcccgcgcctgacgcagcgagatatactctccttgtgcgttaagctttcctcaacttgtaccacctcgctaagctagctagccctgtacacacggttcgcgatgcgtgcctcttgcctctggccacacgagcagagcaacgcaccgcaccagacgtacatgcgttcagggatgaaaacggtcggaaggatagcatttctactcaacaattgactgagtatgtttagtttgtgaaaagaaaatttttaggtatcacatcagatatttgaccggatgttggaaggatttttcggacacgaatgaaaaaattaatttcagaactcgcttgaaaaccgcaagacgaatcttttgagcctaattaatccgtcattagtatatgtgggttactgtagcacttacagctaatcatggacttattagactcaaaagattcgtctcgcgatttttctcctaattgtgcaattagttttttcatttatccatatttaatgttttatgcatgtgtccaaagattcgatgtgatgtttttagaaaaaaaaattggagaactaaacggggcctgagtgcgtagcactctttttttctactaatatattggcatgcaattcttttgcgcgttcgaaaaaaaactcaacaattctcggtcagttgaaaattttcatatccgatttagctatgggaccaactatacatttgtcgacaaattttctactaaaaatttgacagatgtaattatagtacaatcgtaatgtaattacactgtaacttgtatgtaattacactgtaacttgtatgtaactacagtgtaacttgtatgtaa

SEQ ID NO: 44815 - DNA, 5224 bp, Oryza sativa
aactacagtgtaacttgtatgtaagtttcacgtaattgtgaatcgttagatctgttacaagatttgttctagtgaggaagaaaaaaatcacagcacacacatatgtgaaaggatttgttcccacgacctctattttactgaaataacatgttatcgagagattcttcgaagttacattataggtacagtgtaattacactacgattgtactgtaattacatgcaagttacactacaattgtactgtaattacatctgacaaatattagggggagaaatttgatgataaatatctagcaaaatcgtttagctattggttagcgcaatacgacactaaaaaaaactggagaaaaaaacagaatttacacatagctagaacaaaacgataaagaaaacgttacagtactacttttaacttaacgagatacacgattggtggggattttgatcgtctatcattttcacccgagcaatctacatgtactactaggtaccaacaaaccagtctaccagcatgcatgcatgctcctagtgtacgaagtacgtggaccgtggacgtactgctcctgcctctagtagtcatgcagaatacagtgtaaatcgtacagtgatcttggccactgggattggctggcgtggatccatcccggctggatgaccagccagctcgatcggtcagcagcacactatacggtgggcacgcccgtgtcacgcattcctgcgtctgcgtgcgtggcagccagccaggttcgctcatctcctactacggccctgttcgaatctccaactaaagctggataaatttttagataaaagtaatacttttcaaactgctaaacggtgcgtttcgtgtaaaaactttttacatgaaagttgttctaaaatattagattaaaccattttttaagtttataataattacaacttaattaatcacacattattatcatctcgttttatataaaaacacttaatttacatcttaatcctcatgttcggcaggttctagcgctcgctcgatcgatcgatcgatctctcggcgcaatggatggatggatggggacgcgggcggaggaggaggacgggtgtgcgtggctgggttggcgggcggtggagttggggaaaaaggacggatgcgggtgtggggtcttggtcggtggcggcttttccacgggacgggccccgcctccgcgaaatattgcgctgtcaccgtcgccccccgccttgcattgcttctcctactctcgaatcgaatcgaatgcgttgctcgctcgctcgcttctctgcagtgcagtgcagtgcagcgcgtcggctgctggccccagctcgggctgcccgctgctcgccgcgcggggcacacgcgcaccgcgacctgtcggccgacgcagccacggtgcgtgcatacgtgcagtgcatctcgtcggatcggcgcatgcatccgtggtttggtttgtcatcagcgcgctgccgccctgtagctcgtgaaaagcagtaaattggaatctgaattctctgcggctgggatttctgaccgggtgggttgatcaattatcggcaaccatgaagcgactaaacttggaaaataattaacctgtcaacaccccgtcaactgatatgagtctactttgatacttcggccgccgtatgtagcccatagtaaattactagaggatgttagtttcaaattagaatcttattttttttttggcttggtttgtttactgagagcgcggtttctccatacgagcccgaacaattggactgatatataattgtgttttttatcctgtgattgccatcgcctattgtgaatgctgcttattcgtgtgaacgtaacgatgtcgttatgcgagagacacgcatcacgctctcccttgtatgacgctcggcccgcgaaacaaggtggtgcgtgagcgtgcgcgtgcggctgatattttttatttaagttcttatgacttaattcattacatactgaaggctcttcaaacatacttcctccgttttacaatctaagtcattccagtatttttagattcattaacatcaatataaatatgaaaaatactaaaataatttacattgtgtaacggatgaagcaacttactctctccgtccaaaaaaagacaaactctggtttccgtgcccaacgtttgaccgtccgtcttatttgaaaaaattataaaaaaaattaaaaagacaagtcacgcataaaatattaatcatgttttatcatttaacaagaataaaaatacgaattataaaaaaattttatataagacggacagtcaaagttgaacatggaaacccagggtttgccttttcttgggacggagggagtatatcttttatattttttgaaaaataaatataataaatggttaaacatttataaaaaatttaacaacgatatatacaatatatttaaaatagaaagataaatatatatatttagaatagaaagatagtacttgtgtcaatacagaacatagacggcacgcactagctttcggtggatatagagtacgcacaacgtgctctgcctggctgccttgtctgtcgtttgccgatgcctgaccaccataccatgcccgcgcgtgcgccttgactcgagcgccgtggagccttccaattctactggccacgaatgcacatagtccgatcccaattacatcagttaggattagcacatgtcatgcacacaccaacccaacaatgttcagaacttgctcgatcatctagcttttattcctcgatcgctagctaaaagttcacaagttgctgggaacggaattgtattctagtagcttcgagcattgctgacccccgagaagtcagtcagagcttaatcatagatcatcagctagcaattagtaatatgctcctacgggagattgaacagcgttttttttggtagcacctgtcactcttacacacaatatactccaataattaacacttgggtgttgcttcagaaaccatcaacatttttaaaatccggtgtcctaccgaccaatgttaccggcgacggcgacgcccagctgatggatcgatcggaatcgcggccgcatgctagctacagtagctaccagctcgatcgatcagctgtaatatattctgaattaataattatcatatgaacaactcgcaagcttctgcatctgcatgcgtctagttaaacattttaagctgaaccctggtctattgttcgtggacacacgcatcctacctctctcgaccaagcacgcctcttcgcccatcatctcaatttaattagcgctacaatacattactatagtacacaggatctcgcatgtatatgattagttggatcaggtcattttggtcaaacgataaggacgagtgtgctggtcgatgtccatcatcagcagataatcacattagtatgagcgtacgacggtctataatatcatatagtaaattatgtcatgcttgctaagattgatgtgaatgaaaaatgtcatatactgatgtaggtaagttggactttccagcgagatcctgatggagaaggaagctaaaataggcaccgtctgattaggacgataacgaccagagggcaactcgtcatgcatcttggttgaatctctgggttgaatggcctcatgggcaattgggctttatttgttgtgggtaattagcccaggtttttgtggcctgcatgaggaagtgatggggcccatagcaatgggcctcctggaaatgaaacgtattgggcttaattagaagatttgcttcattttgttcattttgtctctcaggtgttcattttgttcgccgagagacagcttctggatcgaatagccttatcatttttgcttatgcttatatttgtaagctaaaatttaaatttaaatttttaatttgatatgattttatgatttttcatcgtatttttattttatggcgtttgcttttaaattgctatagacacatgtataaatttttacttataatatatactatttggttgttaataaactatgcggataagcataaccaaaaagacaatgcactattccgcacaaccgcatcaagtacttgctaggccttgcatgattgagttggtcgcagctgcagcgcaacacaaatgcaacagcgataaccatcagcaaaaactctcttgtgtttgcagttgtgaccaagtaagctgagcatgcccttaacttcacctagaaaaaagtatacttggcttaactgctagtaagacatttcagaactgagactggtgtacgcatttcatgcaagccattaccactttacctgacattttggacagagattagaaatagtttcgtactacctgcaagttgcaacttgaaaagtgaaatttgttccttgctaatatattgacgtgtaattcttttatgcgttagcgtaaaaagttgaaatttgggtcaagttactggtcagattaaccagtaactggttaaagttgaaagatggtcttttagtaatggagggagtactacactatcctcagctgatttaaatcttattccgtcggtggtgatttcgtcaatctcccaacttagtttttcaatatatttataggatagagtgtgcatatgtgtgtttatagggatgagtctacgcgccttatgaacacctacttttgtactgtatttgtcaatgaaaagaaaatcttaccaatgctgcgatgctgacaccaagaagaggcgatgaaaagtgcaacggatatcgtgccacgtcggttgccaagtcagcacagacccaatgggcctttcctacgtgtctcggccacagccagtcgtttaccgcacgttcacatgggcacgaactcgcgtcatcttcccacgcaaaacgacagatctgccctatctggtcccacccatcagtggcccacacctcccatgctgcattatttgcgactcccatcccgtcctccacgcccaaacaccgcacacgggtcgcgatagccacgacccaatcacacaacgccacgtcaccatatgttacgggcagccatgcgcagaagatcccgcgacgtcgctgtcccccgtgtcggttacgaaaaaatatcccaccacgtgtcgctttcacaggacaatatctcgaaggaaaaaaatcgtagcggaaaatccgaggcacgagctgcgattggctgggaggcgtccagcgtggtggggggcccacccccttatccttagcccgtggcgctcctcgctcctcgggtccgtgtataa

SEQ ID NO: 44816 - DNA, 1735 bp, Oryza sativa
agatgctgtacgtgtcggcgccggtggccgctgcggccatggaggagtgggtgctcgacgagtacgccgccaagcacagggtcgccatcgataggctgctccaactgagggtatttgtcgaggtgcgcgatcggtaaggcctcatccatctccaccagcgctgggtgcttcaagtgcgccgcagacttgcaacttcctctatagatcagaagtcgatgaaccaactgtataatttcaatccagaatgtcagatttctggtgctaattttgccttagtggtttgccagcgctgtctttggcatgccggggggcctgatatgttatcatatatgtcaacttactgaaattttggtgtaactgtttggccctaaggatgctatgcaactagtaatgcttttatttattgtaaaaaggaaacagcaatatatttggcatgccacatttggtctgcaaagtgcaaactcttaaggtgaaatatgcaacagcattaagaattatgaatcaatgttggcatgagaagaaaccatcatgatgattatacccttggacgtgaacaagttttattcagctctagttggggtagtcgattatttttagctaattatactgctggaacatcaatttcatgtgtactttgtcacatgttctgtttcttgcatgtgcagaggcatagctaatatgaatcttatagcttactcagtttatgaattactttaattttactacatagtagactatgtttttctacagaagaaaggaggtgagctacaagatgaaccagaagttccagggcaacatgcaaaagtatttggttgatgggtaagttttagtaactactgagctacttttactgaaagccacatacttttctcatattttgagctaattgccttttccccgtcgaaactttatgatagtgtaagcatgtgctttatttccttatatatattatgtacaactcttaatattgtagagtaatccttactatatactccggcatacgttgcatgtatagaaaaatttctcctgcacacattacatgtagaaaatgaaaaagccacaatgtggtagcaatagggtggaaatagttcacaaatttaccgatgattgcactgaagaacagtaaaatcaaattgactaatttgtataaaaataaattactgtatgttacatgtttcatgttattcagttatttttcctgtgtgggcagcctgagctaataattaaagctttattgccatgtattttgttctgcgtgttgtagcatatcaaactagttgacgacattacagttttatttttctgcagtggaagtttaccaagggaacctataccatcgagtgtcactgcaaggttgcctacattggcagaattagagtcttttgctcttgagcagtgggaggtcaggatgacaaaagcttatgtttgcatgtatattttattttagggaaacactttctatctttttttgctcatcagatcgtactgtttgaatgctaccaatgttcactcccctagtaaaggaactcattcttttctctatgggaaaatagtgcttcttgctgcaattgatcaactcatctcaagtcgagagagggacaagtttcagctcatccatgatgagaacttttcagcgaggtcttctgagttcaaggtccatcttatttcctcccttgcttttggcagtgagttatgcataaaatacggacaatcaaattttgtaacaacaacaaag

SEQ ID NO: 44817 - DNA, 602 bp, Oryza sativa
tgaacaaaaggttcagttcatggtcgcaatttttgtcctcgtatgtacatcaacgaagcttagtactgggattaattgatgagaaattcgatgggtagatcagggggtggttggttgaggtgttcgcgaagaacccagagcacgtcgaggaagcggacgacgccgaccagctcgccgtcgtcgaagtccaccacccacacctgcgtcacgcggtgcgcgaccgcctgcgccatcaccgccaccagcgagctccccgggtggcacgcgatgatctgcctgttgttgtctcgccgcgcgcacggcgctggcgcatagtgtttgtacccgtcctccgcctcgtcgtcggaggaagacgagaaggaggataacgacgacgatgacgacgaggaggaggaagaggaggagggggaggggggccacgacgaagggtcgccggcgtacaggaggtcgaccatgccggggaggttgcggcggcaccggaggtcgctgcggtggaggaaggccgtgaggtcgccagccgagagcgcggcgatgggccgcgcgacggatacgtcgcaggagcagagcgccgacggcgacacctcgccggcgaggcggggggc

SEQ ID NO: 44818 - DNA, 520 bp, Oryza sativa
cacttggttcataactgggaatagttcccacgaacagacaactcggattcactttccactattctcttcaggttgtcctcagttagcattcaacgtattcctttacacctttaaccttgatgtgttctttccagatttctcttatcaatcacctttcgacctacttctttgcctgatcataaacacctttgctggtatcttctatcaataaccttttgaactttgtcaaccaagtactcttcactccgagagttgtggatgcttctggtgacaatgtggtcttttggtctgctgcctttcagtgaaaccttgaagtgtttcgccaaaagctgtactgactgtctttgcctttgatccgaaaaagacacatctgaaactcttagtccaaacaaatgtctctttggttaatcgcttgattttcttttccattatcaggttggttattaactcgaggttagaacatagttcctctgaaatgagaccctaggtctcctttgacagtgaacgattatacacataa

SEQ ID NO: 44819 - DNA, 1476 bp, Oryza sativa
ttttattgtggaacatcgtgatgattcaatcggctcggttgaaattgtgcccttgactttattcgttgatggatcggtttgtactcatgattgtggtatcagcttggttataatctctcctcggggggcaagttttgaatttgcttatactattaaacttgtttgtatgataatttggcttatagttagtgcatgtgtgaaggacagattggtttagaattgatgatacaactgtcaaatgattcacttggaaaatctactccgtttacaggtgtaggaaattgtgatgcatcggtcatatgtgatagtattgactaaatgaatatagaccgatgtagtttataatattgtggcctgtgcaagctgattacatatatatgcatatgtatatttggtttttatgcaggctacagaagctatacagggcgtggtcacattacgttaatcacggaggcaggtgattatccctaattgggtgattaagtggcaagggaatccttcgttgctcctgcagatggaaagtcaggtgtcgtatttactgagccaaagagtctacatcgtcatcgagcgagcaggggctcagacgtgcggctgtgatgggagtgctgcttgcatggatgtgatggtattcgctggatccaaccatcacgtggcatctgcgttgagagcagggctgcggcgaccgagccaagccgcgtgcgatattatttatctagttagaagataaagagtttgttggatcgaattgtttcaaatattccggtaaaccatcattgcatattgcgtgggaccgagtagacatgccaaaagatcagagcaattagctatatatattggtccacggtagaatagaagggaacccaatttcaatctaatattcatctcttttactttttagttcttttctattttgtttttatggctgagttctagcaaccctagaatttggttaatctttgccgttttgcgctgaaaaacggtcgtgcttctccatgaaagcgagaaggttatcctttgctagtttgctcggaaactagtcgttcgtcgtcacgtaagtacgatattatcttctttactaatttgctcgtaaattagtcgtgtgattccacgaaagcgaattaatctcgaaatcggtttcactagccaattttgatttattgattttggcgactctgtttaatgcaccgcaaatcattaggtgatcttgtgttggcaaaaaaaaagcatcaacaaaaccttatgcaactaacaatcaagctaagtacgaagcagttctcaaggggttgcagttgcttatggaagttgaagcccacgccgtggagataatgggggattctttgttggtgatcagtcaattggcaggggaatacgaatgcaaaaatgatgcgttgatgatctacaacgagaaatgctgggaattgatgaatagttttcggctggtgattttgaagcatgtctctcgggagcagaacgttg

SEQ ID NO: 44820 - DNA, 1279 bp, Oryza sativa
aaaaatctttcaagcaaattacgtccaaataaaaagaagtaacagaaccggccatagaatttatgcattgcatcattattagtaattacaaagtcatcagcacacttcaatattcaaaatgccagagaaaacacatctttactggattcatccaatagcactttttcatggatattatgaagctatcgtttcattgtctggagctccaaaattggttggtgcatacaaaggagatactccacttaatatcaagcaattgacaaaattaacatattttcaaaattatggcacctcacaaaagggaaaattgaccttctgctgcagcctacataacacatatcagcagcacaacaattgcagttcaaagagtctacactgatgaataaaaattgatttggttgatagaaagaaccacccaagtactcaatacaaatagaaaattgcaataattgttcagtatttacagcgaaacctaaatctacaggaaataacagcctcaatctgccatggagaaacttttccaatatatttccactaagttaggcactcaggctagcaaaatgaatacaagattccaactaatcaatttctgaaataacatggtgtctagaaatgctaatcctaattttagtgctgttctacttaccctggagagatcttggtcgatgtcaacgattatcatgaccatgttggtggatggggacaaggctctttgaggcggtcttcctcctttcattggcaatgcaaaaacagttctgcaccctccaaatcctactctgagtgggcctcacaccgccggcggaattccattagtatataatataattcaatctgcattcaacaaagaccaagagttattgagccctcccaagtatttgcaataaaaatggaagataactgcatgaataattgtcactctaatatcaatttacaagttcacattatacctctttgtcgacaaggccgaggaactcttgatgctccttgctaacagactgcaatataaggaaatcagaaaaagataacatcacctgttgttttctcaacgcaatgttagcgctcctttcataatataagcattcttcctagagtaacaacagtattcatgctcttctctaattgaatatgcaaagaacactgatttttccttatcaaacaaaggatgctaccatataacatttaaaatgagtagaatcatcaatacaaatttatcaatttatgtgccaattatgatcatcaactaataggcgattagcctaatgaaatactctacatacca

SEQ ID NO: 44821 - DNA, 1253 bp, Oryza sativa
tgttgagcaagtcaagaagtgcgaaagctgtcagcgcctgtagccagtcggcaaccttaaaaaccttatagctgcggccgtttatcactatttcgcaataaacaggccgaaatgggcatcgcaccgttggcaaacccttcaacgccacaaatttcttgtttttgcttcgccgaatacacaatttttggcgaacaccctgttaaactgtgcagaaagggcaaaagacgatttgtatagtaagaattggcgaaagaagaggaaatattacataatacgaaaatgacataatcatatacgccaaaggcatcgaccataaaaagtggctaagatagagtcatacattccaaatacccaaagggacgttttcggctacaataaggagggaagaggccgaatgtacattgttcgcctttcccggcaaacgcaaaaaagaagaagaaaaacttcaaaaatctaaggaaagggcggagggcctcacacctctaggtgatcctgggcatcgcctgcaccccctccagctgctgcatcctcttcaaggtcgatcgcaagggcgatcgggtagcgatcaattcaccccccccccctccacctggttttcttttttggcaccgcattactttcctattttagtaaatttatgcacctaaagtttatacacctcaagtttacacatctaaagtttagagaccaaaagtttataagtcaaaagtttatatatccgattcaaatttgaatttgagttcaaatattttttatatatagtatttctatatatctaaagtttatacacctaaagtttatagacctaaagtttataagtcaaaagtttatatacccgtttcaaatttgaatttgaattcaaatattttctatatatagtatttctatacatctaaagtttatagacctaatgtttataagtcaaaagattacatacccgattcaaatttgaatttgaattatatctgattcaaatttgaatttgaattcaaatattttctatatatagtatttctatacatctaaagtttatagacctaaagtttataagtcaaaagtttatatacccgtttcaaatttgaatttgaattcaaatattttctatatatagtatgaatttaggtagatgcttcgctggttaattaggcaacattaggtggttttacaactctagactttgggaatactcttttcacctggacactatgtaattgttggactattgtggaattggattcacacctgcccctcta

SEQ ID NO: 44822 - DNA, 2353 bp, Oryza sativa
attcctgcagccccgaatagccgcgccctcggttatggcaagccgagcaatgtacccaagttagtgttttaattcttaaacctgcttaacaactaaaatgtggaatggttggcctgagttggcttgggacgagctgggacccagggtcgggttgccagttcggtctgaatcatcgtaggccttgggttaaggcaggttcgtgtgggttgacggccttgtttaataatcttgtatagctctagaatcgtatttacaaaatagctttgagcaactaagtgtcttttaatgctgtttactgcaaaccctaaccctttatattataacccccttgtactcccttgcatttatcctgcacttgtgggtgtgtcttgttgagtacggtggttgtactcagtcttgctcaatttttcctaaactcagaagaggagttcctggaagatgaaggctttggtgtctagctcgtgcctgccgtcaagcgcctgtggtcgtcgccctagtcttccgctgtttgtcgtttgtcttctggtgtgctgggccttcgccgcccatgtaataaattaactatttacgcttccgcttgttaaactctgaattgtatcaacttttggtgtaccttgcctcctgggacaaggaataatgcacgcacgtaaggaacgcctgttgggttattcccggtcgtgacactagcaatgtgaataacatgtttaaactcaacacatggtggctctactatagaactaacatgttcattaactagttgtgcctaaccaacacatcactgggccaaggagttagttgctaagtcccaagaggaagcccagtgctagggaatccggtgttaagagcgaaatttgacaagatagactcagatttggagatgtatatcgacacataatcaaaggagattgaatcttgccaaattcagaacgcgcattggccggaaacagtgttggaaacaatatcgccgaaccatcgaggtgtatcgtcccggcttcgtcgtcgtccaacattgcctaggcgaagtagtcctgttcgctcacgatgtggggaggagtcaccagcctcctttgctttgtcactggctcagcaagggtcacatgctgataatgtttcctctctttgcacgataaagttgatgcaggattagaggcactgaccaagctagctctagatctttaggggcatcttccgcgttctctagggtagcgtcttttacatcgatgatcttggttgcagcgtgtgtcttagcaatcccaatttcaggacaggcattgcgccacctttaagagatgcgcaaaaaccatgtctagcgcagcctcctccaagtcatcaggttgagtttgagtgatgtccataggactggtatagagccaacaccgtcagctccactagttcaggatggccaagctatgatggtggaagtcgttgtcaaccatgttggcatcaaggccggccttgattagcctgtatccagcagcacctcagtccagacttccagtttctttactgtgtcaagggtgaagaggactcgttgtgggtagttctgcaagacactactatcaatataattcccaacaatggcgcagaaatactcctgatatattatggttacagagttcatccacaagcgcacggatataccattgtagcatttcacccgagagtattccaagggtatcgtatttattttatcccgtgggaatatcatgtagagagaacattgactaataatttatatatgactggtgataatcatattctaagcaggggttaagataatccaagggtagagtgacacacaagcgttaactactcattctcatactttataatctaagctaagtggaaagaaaataggaagaaaatctattcctatacttctaatatacatagtatacatacattctagttaaccgacattctatccgatgccctcctggtacttcgagaagccacccctgactgccgagttccttacgacagcccgtcatgaccatacaatcggggctaaatacgaaggaataccctccccatggaattaacttaggattatataccggcgcggaggaatacccgtactgagctgtcaccatcagtggcccacctctcatccgcaatatataaccccaaataatgatatcccgtaatctagacaatacgtctaaactaccagatactactctaatatcatcgttatgacatagagtaattgcataagcaaacattatatccacaccaaagcatctcccagataagctagccgtatatttagtataacatgaacataatgtaaagtaggtgctcatattctcggaaagtatttcaataccataaatgtatttagaagagtatt

SEQ ID NO: 44823 - DNA, 1221 bp, Oryza sativa
atttaatacttttgttgcaatagaaaatgatatatcgccacaaaaaatcgtactgttgcaaaaaaacatgttctatcgccacaattttaatttttgtggcaatttatatagtacatggtacttttcactattttttttttgccacgatcaacaaattcattgcaataaaaaaattgtcgtctcataatttaaattaattttttcatatggacacggattgagacaaattttatatggaaattatagctctcgacgagatctacaattttataggtgataactttttcatttgaaatcttttagatattcaaatctatgattcaaatctcagttagctaggctcaaatggaacgatatgcattttccaacagaattgatgcgtagatgagttggtaaaggagagcacgcgtgaaggataggtcttgggttcgaatcctagccaagacacaaaatcaaaaaaataagtagataaatagataggatgatagattaatatttgaacttttaatttggtacgtaaaactaataccacatatggagtggtggcaataatttttattacaacgatgtgaagtgttgcaatatgactttttgccacatccattccgtggcaacatctaaatttattaccacaaaataaaaatcgttgcaataacctattaccacggctagcaacgattttacaattgtggcaagatgtatctattgccacaatttgagtattgatgccacgatttttttcgtggcaacaaatgatttttctagtagtgaatacccgtactgagctatcaccatcagcggcccacctctcatcggcagcatataaccccaaataatgatatcccgtaatctagacaccatgcctaaactaccagatactactctaatatcatcgtcatgacatagagtaattgcataagcaaacattatacccgtaccgatgcatctcccagataagctagcagtataatcagtataacatgaacataatactaagctggcattcatatactcggaaaatatttgaataccagaaatgtcggcacccggggattgaattcccgaatacctggagcgtacactgtactagtcccatgatcaatggctagtacacgcgtccacaacattgttatcacatccatacaatcatacttgacatataagtagataagtggttctcataacttaacggtgcataggtcttacatagtagttaggccg

SEQ ID NO: 44824 - DNA, 998 bp, Oryza sativa
atacctgtacctatgaacctttgccctatctaacttaccatcttgggaaattgatgaatggaacggtcatgattcaagtccttctttttcctcctatcaatctgttagggttttcatttattttcgcaaagtagctttactcctcaaatgaccttctctcagatcactcatgtggtttgatttgtggatcctcaccatgcatgtttgccgaattgtccctattctactaggttgtataggtggagctcggtagggatcaatcggggcatacctgcatcacatatatagcaaagccaagataccggacccaaggagatagcaagtcatactctctgatcaagaatgtgcatgtgtgtgatctgtgtatgggtatggagaattgtgtggatggaaaaaggaaaatagaagataacaactcctttgatatatctcctcctccaattttctctctttggaaatttgagagagtgcatggctatctttttttcttcccttttttttcatcatgccccatactttgtatgagcagatttttttattcatttttttctcttttgtttatcaatgctccatacttgtatgagcaagactttttttccttcttttgcatagccatgcctctctctatctctgtttttttttctttgaaagaattttggagaaaaaggcataaatgacatggagtatttattttgtggataatgggtaaaataaatgatggatgagggatgctaccttccagtgtagaagtttagcatagtgtgtgtatatggagtgtacgtgatcttgatcatgaaagtatgaaaagcatctcacacgggtcacaataatttgacaaagctcaatgtaatgcaagcagcctaaacatatatcaggattttgcaatgagaatcatatatggcctttgtaggtaataatatagtcagtgaggagtattgctctaaaacaattttttaattttcgcaaagacaaaatcccaagtatcatgacagttggac

SEQ ID NO: 44825 - DNA, 3517 bp, Oryza sativa
gagtcaatttttggcacgcccggtgggacacaagttttgcacccaacatgtctgaagaggaagtcaataccaagaagtagcaatctcgcaagccgatggttgaaacacttcaagatacagttgatgaagcaattcatcgcgcattgtttaatcaatctggagttttggcggatacattacaaagtttgatcaaggtaacagttgatgagttaattattcaaaaaagtcagctcggggggtagattgaagaacaacatcagcatcggctcggggggcaagcacatcggtgtcagcatgatgaggcatatcaacaatatcggccagaaggaattcaaagatatcattatagggaagatttggccaatagaattgcaaaggtaatagaggagcagtttggaatcaatcttaaggaacatacttctgtgtatcggctgccatatgccgagtggtttgatagggttccattgccacaccgatagttccaaattactccaaattttcagggcaagatgatatatctacaggaacaaatcagccaattcttagtgcaatgtggggaagcaacggctgaggaagctctgagagttagattttttccactgtgtttgactggatcagccttcacatggttttcatcactaccatcgaattctattggaggatgggccaatcttgagaagcaatttcatgactatttctttgctggcatcgatgagatgaagcttttagatttgatatcagttcagcagcaagaaggagaatcggctatggaatatattcaaagatttcggaatatctgcagccgatgttatagtttgagcctgagcgatgagcagctagcagatctcgcatttcaaggattgtcagcacatatcagagagagattcttttgctacgagtttgatagcccggctcatctaatgcagacagtatcggctcatgaaagtcgactgcacgaagcaaaggaagatcagttttggagtcaccaagacaagaaatgagataagattgaagcatgagctttcatactccaaaatttggggcatgtgttaacgccaaaatttggtaagcccaaagtcatcatcggcctaaagttagtatcggcttcagagtcttagaatcggccgatgggagtcatcaaatcggcagcagttgtgttcttgatggagtcggatcaattgaaggaaatttatccagaagagtccgagttcaaggaggatgcggcatggcaagtgtatctattaattaggaatagttcgttagtttccttttatctttatgaaagtgtgtttagtgttcgataaggactttgtgttttccttttatctttaggaaattttctttattgacctacaaggactaatatctacccatgggtataaatatgtacacccggggtcattgtaatctatcaatctctcaatcaatacaactactctcggcgcatcaccaccctctttactaaggttttacttgtcatctgacgttacttggcacctgacgcggggctgcatcggctttccatctctggcgaaggggtaagtcctacgttccgctggccctggtgaatctaccgactacattggtgttgttcaagactgcatcgcttcgatctcttggatcgctctggtttggttgatatatttgcctacctgatacctcaattctatccctaattgcattgtgtttagagacacatcggtttagttgggactgtctcggttaggtctgatcttttgtcttagccgatatatctctacaatcacaatgaagttctaaggccctctttgtttaggcttaggcttattggcctagacttttaagtcagtttattggcttatatgatttataagtcagtggatttaatgtcctaagtttagtggtggagtcatacatctatctcatataagccaaaaaagcttctccaacctagcttttggctaatagtgttagagtggcttatggcttcaaaaaagccaaataaaaaagctgcttgtttgttttggcttagacttttcgacttataagttggcttataagcctaaacaaagagggcctaaatagatttgctatatccatcatattagatagatctatcggcttaccgagtattagattatcatatacaatctcgtgctgcattggtaggttcgacctactagattgttgttgataatataaatcttgctaagtcgataggttcatgctaatgttttatcggggtgctagccgataagttatctggatgttgcatcggcttataaggattgcatatacatataagttgtatttagccgttgacaacaaaggtttcattgatttatctaatcttgtggattttatgacatcggacctccagccaatgcatgctttaaccatcggatcagtacttgttctatcatatcatcttgttagccgattagtttctactggattatattgttgtatattgcatcatcatcagccgactgcctttatatattatctacatttgacatattgccaatagctcaaaaccctatcggcatcggctaatatcggctatcgactgaaactactccatcggcttgtcagccgatcggctcattaatctactatttgcatatctaccctatagttaaacaaatgattttattcatttactcattcatcatatcacatatctaacggtgtaaaatcatccgatgtgttagatcggacgtcccacatgggcgcgtgtcggtcctcatcctctcccgcacccccccccccctctctctctctctctatttgccgcaatcgacgcgcctcctccgcatcggcgcgaccgcgcatcctctcccgcatctccctctcttccgcattcgccgtgcctcctccgcatccctcccctccgcgtcaggatcgagcgccgcctcgcgcaggggttcaccggcctgctgcaggcgcagccgccgcagttcccgtggccggcggcgtcgcacaagcggattcccttcgagatcgacctccccgtggtccccttcggcgcctcccggggtgcccgggccgggaaggagttcttcctcgccgcggccgtcgcctccatcatcgacatcggcaggaggccaccggcgccagggaggtgattctgccactccgcgcctcaccggtctccactctccatctcgccgccgccaccacgtccgccctctgccgcagatagaggtacacatcccctcacccatccctaatatgtcagctctcttccaaataagtccccccgccggctatatttcaattttattatgctgcaagtaatccgcgtcgtcacattcaatactatggtgatcatataatttggagtacatgtttagaaaaaaaaactaatgcactaaacacaatgatgatttgaatgaatcaattattgctgacgatcgcatctgaatcaatggtagtttacccttgaatgatttgtctctgttcttctatgtttggtgggggtggcattatatacatgtttagacaaataaactaatgcagtataatttgcatatgt

SEQ ID NO: 44826 - DNA, 1816 bp, Oryza sativa
taggaggccttgatatgtcagttaccggattcatggccattgttccacaccctaggaattatttgaagggcaatatttttatgaagcttaaagattgaatttgaatccatctgccctggcttgaaggtgaacatgattttatttttaagattgcattttagttactcttaacatactccagttactcaatcatatacatatctgtttcacacatgatctatttatgcacttttgtcgcgtttagtctaaaacgatgctgtcaaattttaaaagggcattgctttactaaattgtggtgtatgtagtattagcatgtcaaattacatttatgcgtttcttgcttcccgaccatatgtcaaataactgaaagtgttagtacttgagttaacccttttttcatacttatgccatatagcaccctaattttgttcatgcgatcagaggataaaatattaagaggattctttagtatggctcattttattgtttctaagtttagggttattcagacagataacactttagctttctatataatattggttttacaactttgtctctcgaaggttttttttttttggaacgtattgatggttttcctcataatatgctcttgaaatccatcttgtccctgttcaatgcagtacaatccaaatattatggtatatcaacagcagcttcagtctgggacagagcaatacaaggtcctccctgtaagtttagtatgaacagtgcaatcaaatttataagtcttccctatcaaaatttcagtatagccccatttgtgctggtctgattaattatctttgaaatgatattctgctttgagattaaattacatgtaactaacttgctttgataccttcacaagtcgtgaaatggtttagctgtacttccatgtttgggttacttgtgtaatatttggtaggctataaacccatttgttgtgcctttttttttattatattgctcaataaagatagtcaatcaatgtgttgtaaataataagggaattggcttgtatcatttgtttcttctatgctcaagatcctgaactgttgtgcatgtatcatttgttgccactgagtcattatttggattcatcagagaacatccatcattttgattaccagactatggactgatttatgccatgcttgctaattgatagagggacatttgctacttctgcatataggacagataattaaactttttgtgcgctgaaatgctctttgtacggtgagtatatgacacgctaaagatgactgaaattaaacttaggatacttctgtttgcaactataagacatgagttcttttgctatatttctggataggtggagtaggttttatttttaagagtttggtctgtggattttcgtctgccgatgagtctccaatgtttgatacagtgtagcccatgagcagctgctgttttctgattttttttttcaaggtaatgtagctgctttgtgtatatgtgtttgtccaatagtgcctgccattccctttggatggtttgcattgcagatgaattacgattgccatctcatgttgctatggcactatgctaagtgaatcttgttcacttcctttattcaagcacaaggaatttatgtatgttcattatgaaatctgtaagttagataatgaacatacataaattcactagctgttgtgttatcacattgattgtaacatcaaaacaatcaactactagaaaatactaaagtttctaaatggttatcagaacacactggaatttttttatgggcttactgttccacactgcattccttcacaattgaagtttg

SEQ ID NO: 44827 - DNA, 965 bp, Oryza sativa
acttatgtggagaagccaatccatatcttggagacagataagagaagaaccaggaatcgagttatccgtttctgcaaggtccaatagagtaatcactcggaagaagaagctacttgggaacgagaagatgaattaaagtcagcccatccgcatcttttcgccagctcttctgaatctcgaggacgagattccgtttaagggggtaggtttgtcacaccctaaaaatcttaaattcataaattgttgtttaaatggaattattagaaatgattttaaaaccctagaagaaaagatctaattttaagtaataaattccaatataaaagtgggccagataaaattttattaaatacgtcacttgattctatagctcctagatttttctgggatttatttgagccaaggaagtatttttaataaatggaattgcatttcatgaataatttaaaaagaagaaggttttaaaatccttcttttggatttgggccgaaagtgggcccaagtctctctctctccccggcctgtgcacgcccggcccaagccggcccagtccgccctgctctccctcctctgttccactgacaggtggggcccacctgtcagggccgtgttcaacctctcgccgccagccgcgccctagccgtgcgcaagccgtcgccgcccttccaaattccatcgcccctttcccgatctgatcaaattgatagaggggaaatgatccctttgatctcctctatcttttctcctatagaaacttcatctaatttcgtttcgaaatcgttggattcgagctcgattcggattcgatttttccctccaaccctaaaccttccatcgccgccgtgggcctagccgtcgcctcctagcccctataaaaggacccccgagacctcttttcgtcgccaccttcgccttagctcgccgccgctcgtagcgccatagcctctagagcccgtgcgttgccg

SEQ ID NO: 44828 - DNA, 743 bp, Oryza sativa
ctcgacgaggcaaatccattcccctacttctcccttcctttccccctccgatttaagccaccaccgtcgccaccataaccgaccaaaccgagctcttccatccgccgttccgaccttctccctcactctctcggccagccaccgccctccccggctgcgcggtgctcgggaacaccacccgtcaccggcgtcgccgccttccgaccgccggaaagccgctgccccctctccctctctctctctctattggctcgggaaaaaagaagcagaaggaaggaagagaacgacgggaggaagaagaagagaaagaaaaagaaaaagaaaaggaaaaaaggtactgacaggtaggtccatcaacagtgactttttacaatttctctatttaattcaaatccaatctttagaagcccatatctcctaaaccgtagatccgattccagtcaaacttggacctaaatttatataaattcaaaatatacattttgataccaaatttgctattttaatattttatttgaatttccttaatttattcaaatactatttgaataaatatttgatttaatcttatatttgaattcccaatttaaacttagattttcctttcaaatatttcctttttacccaaaatactctttagccactaaaaaccgccggttggaactttacgccttccatggggacgttcgcgtggtctattggccccgacgtcgaaccgttggttgtaaagcccggcataaacc

SEQ ID NO: 44829 - DNA, 1291 bp, Oryza sativa
cagtagaaaagggttgatttccggggggctagtactgttccaaccgacataagactgcccaagtacttgtgaagaacgaacgagtacgaccgtagcttttagaatggggacagacctagatattatgttaattaacaatgtggtacctctgtacagtggtttcttttgtaagtcctcgcgcaggaggcaaatttacgccgcgaagggcgattgtaatatttaccgagccgcaggtaaatatttgagataaattatgatgactagtctgtttgtgaaccctgattgcgatgacatggtgtcatacaatcagttctctctaaagaccccgggagcgccagaactcctctcgctgctgataacgttacgtttagagcgcatggggactagagttcatggaacaggtgccacaattgttaataacgtaatactaggccatgactaagctaataaatattggcaactcgtggactgtgggtaaagcgtacatctactgtagtagaatatttatgaaactattcgaatagccatgctcacagaattgagtagcgggactcatatggtatttggttagaaaccaaattcaagattttactaaatactgttgcattaaagtcattacaggctttcttcttctacatcctctgctttctgcaattaaatctagccttactcaaatgctactatttcatacattattgaatataatagcttgctgagtacgttgtactcacccttgcttcaacctcacctttttcagagtcattttggagtttgtgcctaagctgggagttcaatcatataagttagtttcatttcaacctaattctcaagtctagattagatagatggtttaagtctatagccaaacattagagttaagtcattctatagcttctgttgtattagtttgccacaagtttgtaaatacccatatattttgtaataatatatcctttggagccttattcaaacgtatgcaatgaagatctagattgttgaacctatatcaatttactaatccagggcttgatacagtctaaacatgtcggtttcggaatcattagtttcgggacctgacataatcgtaggacaccccggatctttcttcttctccgggagcttgtcgagtatgacattgctgcactgctccgtcagcttgaccacctccgttggcgggagcggtcttttattgtcgaggatgtccttgagataatgtgcgtatgttggcacttgcatagcatccaacaatggcacgttgatgtggatttttcgggatcacttcaacaaaacg

SEQ ID NO: 44830 - DNA, 726 bp, Oryza sativa
aaaacaaattacagattccacctgtaaattgcgagatgaatttattaagcctaattaattcgtcattagcaaatgtttactgtagcacctcgttgtcaaattatggagcaattaggcttaaatgatttgtctcgtaatttacacgcaatgtgtctaattagttttatctttttgtgtatatttaatatttcatgcatgtgtctaaacattcgatatgacaggatgaaaagtttttgcgtaggaactaaaccgggcctctaaatgtagtcacagttgacatctagctagtatatttctgatcgcccgtatgttgcttgtgcgtgctgtactgcactttcctggatgcaatcactgtcttgtttgttaaattctctgcagatcacagggaaacttagcctgttctcatatgcaatggaaaagttaaggctagctagggatggggcttgtgtctgtactcaaggctgcgcaaagaagggaacaaactgagcgcagaacccgattgaaactgtatattctatcagatgatgaatacaagagctatatatatatatatgaatgtcttctggtatacatgttttttgttgggaagagaaaatgaaaacaaagagtagcatggagaaatgagaagggaatatgtactgtagagaatggaatccgtgcaagtactgctagctgcaggaatgcatcagaggaaatatatactagagagcatgttctgcatcatat

SEQ ID NO: 44831 - DNA, 730 bp, Oryza sativa
attcctgcagcccatcccttaactgagcatactatcgatcatccagcagcatcgctgaatcaccaaccaaagaaaaagcttacatttggttggtccgccactttgccaaagagttgagtagtcaccgctggtccaacgccaaatgaacttgtccttgatggtactatacataaatagtgaagctcgtgaaaaatgaatggccgctgccctcatggaatggcacctggttgcaagatggcatctttgaaaccttttgacttggtttttttgaggcagagaaaaaaaatcttatttcgttagtaaaagacgctatagattaaagaaaattatagatatcaaatgtcaacgacccatgacttaggcaaagtgttgtggcctcaggtactgcaggttgaatcaacatcagtcctctgctctttttcctgtaaaactgaagcatccaacttagtcgcatagtgctcgttgttctgtcaagtacctatcatccgtggatgcaggcaaaaccaaactaaactgcatctatctgcacatcgcgacgaacaataacgagtaatttatcctaagaaatgcagtactttttgactgaaccgtcgatttttttaaagataatgaaatagataatcgtttgatctagtcccataaactgtcatttgtcatgtcggaggacattgcgtggaagctgaacacaaggttcattctactcctactattgatacacctctctgaattt

SEQ ID NO: 44832 - DNA, 1699 bp, Oryza sativa
aaaattccttaatctttcttgatttaaaataaaataaaatggaattaaaagcagtgtctatacgtcactgtctactattttacaaacaagtggttttcaaacaacatgtatactatatctagaaataaatattttaaaatctttcccttgaaaaattattctagaattctatttgatttgcaaaaaaaaagctttatttacagccacattgaaattacattttttttactggtatcaaatggaaaggtagtcatctctttcgtcctgtcacacttgatatatcagctagctaagcacagaagcccaggatatgatgcactagggtgaaatagattttgccataaatcaattagtcacgcaagtgaaaaaaaaaacttgagcaagacataatgcgatgactgtgtgttgttatgtttggttgcctgccacttttcttcttttatttcctattggttctttcagtaaaaagagaaaacatcagagaatgcacctactgaaaagcttgcctacccctttgaaataataccttcctaccacccagtgtgtagaccgcattcaatatgtagagtgtggtggtaccgacaggtaccggacaaactagagtaaatcacattatgtgggtaaagctgtacaaactctgcagggtctaaaactaatcgattagccgtgctcacggtcatgagcgacttggtgaaatgatacaagtatagtgttggtgatttactaaatgaattgtgaaatgggtatggtgaatattggtgatggttttacccagtgtgggctaagaatgaatttgttacctgttgccatggagggcacaaggatgatactatgatggtacttatactgctactattatggtctattctttgttttaaaaattatgtttcaatctattattatttactattgcgaaacaaaatttgctttacgctaaaaatgaggcacaaatatagccatccttgatctcagcttgcaatagtcctaggtttcccaaggtttgggtaggacttgccaatacctcgtgtattgacccacctcttgttgtttttagtctcgtttgcaggaaacgggtgttccttctgttaccggagtttctaaggatggttctttctagggtgattcctagtcagttgcctgtgtggtttggtagatgggcatactgaagaacttatgtatctttatcttttccgctgcgtttaaactcttttatttggccagtcggcctaactactatgtaagaccattgcactgctaagttatgataaccatttcatctatttatatgtcaagtatgttgtatggatatgatagcaatgttgtggatgcgtgtgctagccactgatcatgggactagtacagtgtacgctccaggtattcgggaattccatcctttgttggatgactaaatatattgccgagctataggatgagtttttttaaaatgtatcgaagtttagatgggattgtttttaatttattttaggcccaagaactgcagccaattcagttaggtggacattacggacaactgaatttgtagtatagtttagtactaaatgggaaatatttgagaaggtattatccttatttgagaaggtagaaaacttgattgtcttagaacaaatacttatttgagtatcgttttgagaggacgactgtagatgggctcaagactgataccatatgtgggagtatc

SEQ ID NO: 44833 - DNA, 503 bp, Oryza sativa
tacccaagatggtgtgggctgacagcagatggtcattggttaattggtttggtttatctgtgttcagtttacctgtaagtgaaatggggctgattggtctcttagtaatcctaataatccatcttttagcaggttgctttttttatttggatagttcagatttgcaccacatttctggaattttaaaagctactagagtttttttgccctgctatatattctctagctttattgtatatgctttcctcattgcatattcaaacaacaactgaacgatagagttcctgatctgatatattctgcagagatggtgaagctccaagattaactgagaacgggttccagtttctggtgtgtcattggctatcagttgatccaattatctaacagactgcagacttctatatttgtttctcactcttttctatttaaccagctgatggagacaaatgctcaactttggtacatcatgagagaatacatctcatcagcagaggtatcgg

SEQ ID NO: 44834 - DNA, 518 bp, Oryza sativa
tatatatatatatatatatatatgctaacacgtaaaaaaactttgcatattaatatattagaaaaaaaagtgacacgccgagacgatcaaccagcaaagctcctaagctatgacctcttgcatgttaatatattagaaaaaaagtgacacgcctagacgatcacccaacaaagctcctaagctgagaccgagagaggaagaaactacactaaacataactaagctatgtgcctaacaactctccaactggattggcagttgtcgccacccattgcctcccttcttccacaatctgctccaccaccatcagcacttgagatagaacatcatcaaggacatgggcattcctctccttccatagttgacaagggagtcgagacatttcctactcttattatggtggcgatgccgcaaaagcttgccactaatcttagagcactgagtgacggcctggtgagagagtagctagtccatcaaaaatcaatactccctccgtacttgtaaaggaagtcgttttt

SEQ ID NO: 44835 - DNA, 1538 bp, Oryza sativa
ctcatccccatttcatgcaaataatcattttttattcagtcttacccctattaaatgtgcatgacacaccagtgaaacccccattgtgactggccttatagcccactattatccttgctcttagcagggatgctcggggatatatggtaagatatggttggatcgccatcaacgctgggaggtcagcagcggcgaatcgatcaaaatgttcaacgaatcaccattgccggcctccgtgggaaggcggccggccggctacgttaccgcaagatgattcgttggttatacgtctcattccactgatgattattgattggggctatccaaatctgacaacagttttcttttttaagaaaaaagaaaatctttagagcataactatagtatggttacagtaacttttatttaacttataaaaacagcgtgtgacacagttgacctgtagacacgtgtttgtgtcttgcagatcgtgcattctatacccaccttccatgcgcatcgtacatttttttccccttctccctgaacaaattttgatgcaatatgatactctagaaatagaaaatcttttcgacgaacaattggcgatagagttctagcaatttcattccaaattttgatgtaatctagcagttcagaaatcaaatgtttttttaataaacaattggtgacaatacttctagcattttcattctaaatttccaacaattcatatgtttaggagttatttttgaacataggaattttacaggatttttatagaaattagttcatttcataaacaaaatcccattgtattcattttagatgaggcttaattgagggtttgtaaaagttttcgctctcgcgcgtgctgtaccaatggatgtaatgacaaaggtagtgatcaccctcacttaaactgagtagtagtaaataaaaaaaacgttaatttcagactttaagatacgattgatttatgagaaggatcaatgacatgcattatcatttcgtgctcgtggctggtgacaacctgtgacgaaaggattaggtcacgctgaaaagtagtagtttggcacaacacaacaaaaacacaacaggagagaacacataatactatttttatacgatgccgtcagagatatggagctcttcgcttctgacgagtcacattagtcttatacagtaacaacaacaatagggcaattggatgatcgtggcgtagactccttcaaaacaaatcagatcacaccagatggacgtgtgaacatcaacagtaacagagcataattggttgacaagaaggcagcaatcatccaaaaccaaaacaggaaatagcagcggatgtcagtcgttgactcgtcaccagtccacctaagccaacagcaagaaaacacaggagctcacttaaaacgaggagttaaatcatgtagtagtattaattaacttgcgttaattaactctaattagggcttgatttttgttcgggttagatgaatgattttgtgaccacatagagttaaaatataaatttaaagcagtttactttcttttcatgt

SEQ ID NO: 44836 - DNA, 1190 bp, Oryza sativa
  unsure (1)..(1190): unsure at all n locations
attattatattttataacggagtaagtagtgatttttttaattttttttatcaaagggacttcagtgggagtagcaattacttagtacgaggtaggaatagcaattagcatcagcaagaagacctgttnttnttcctcntcctcttcctcattcccagccgggtgctatctctcacctacatcttcttgatagtagtattattttgttccaactttttatttaggttttgtggcgtgctggtagctccttcttccctcgtaccattttcgctgttggtctttattgcagcagctgctgctgttgctcgtgctgagctgagctgaacctgccaatctgcaacactgcaatcgttagcaagttcgctcaactggccagctgctacagatatatctgctgataattgagccccaaccacctttctcttccccctttaaacttccctggtctccgtcctcttcgatctcctctgccgtcgatctcatcggaagagagcgccaagcaagaaaggtaaccatagtgttcaacgttttgtttttctttggtacttttctgctgctttctcgaagcatttcttgcctcttgttgtttttatcccctcgtgttcttgatttcctagttcttgggctttctcgcacactagttttagcctagagtttctccacctgatttctgatgatgcgtctggagtcctgacctgtgatgtggtgatgctctgggagtttgtgttcatcagatgacgatctgtcaagagtttttcttgagtggcaaagcatcattcggacagagattctgaaaataagtgatgccgtcgaatcatccgctgggatgcgaacaaaagaattcttggaattgtggtctgaataaacaagttggatgatccgttacttatgaggtgtttgaattgattggggaaaagaagtggatgataatggtttaagacatgctgatactcccatgaaaatatgcatatgtacaagcatacagattgaggcgagtggaccatggtgttagaagaaatcaccaaacttcagcttgctttggtgattgttcttggcagctatgccatctggccgtttgctttgcaaatcatgtgaactgttcagtggatgaggtgctaacctagtatttacatgtgccatacatggccattggatccagtggaacatctggtatattcacctgagattgg

SEQ ID NO: 44837 - DNA, 866 bp, Oryza sativa
caaaaaaccaggtaacaagcatttatttcaagcctactacccagtagtaagcattgtgggaagaggtagtagttaatacctgatatttgtgctattgccggtaacaaccaaataaaatatgaagattctgacaggatccaggtaatggagggttgggatggatggattttttcaggtggaccccaccttgtttaccactacactcatataagcattgtgagaagagttgcagcttactacctcctggtcatgggcccatcttatttactagttgggtaagatacattgcgcatgccctaacaagtaaagaacccaatgcttttgtagtttgggcctttttggtggaaaattttagacgagatgattttcatttgcgttcctcgacgttgatcttgacaagatacggttcgatttgccatgtactaagtgttatgtagacgttacaggatatgaagacaaagttaatatgttacgtaagataaactatcttgcagttaagcaagatactcaatttatactggttttgatggtcagcggatgctctgtatgttgaaattataagcacataatgatttaatttattccataaataaatcatgacattgcagatataaactagattgaacgcatcattagatctacacatgtaaactaagcagtaaaacatgaacagatcaaatatgcgtaacatgtcgaacatgtaccgaggtggcggaaaaaacggttgttcggcaggaactactcgtggttgcgagcgtcgacgaaggcgcgaagcacgcgagcgaagaggaaggcgagccatcgtgaacgaacaaggagcagtcgcgcgaagcgcttcccaaaaaccttatgccgccttctcccgg

SEQ ID NO: 44838 - DNA, 672 bp, Oryza sativa
cctgcagccccaaaggagaagagggaatttatttgcttttctttttaattaattgattacatgatctttgtgctgttaaaattattttttgagctccgaaaattcatgcgaaaatttcggagaatatttagggcacaaagagtattgcaaaatattctcggccaatgatttttaaaggaaaaattttaaattctcccattatttcacttgattgaattgacttaacttttatttaatttctaaaaaatatattatttaatgatttttaatcccgaaagaaaatcggggcgttacagatgccgctgtggatgaggaggtggcaccgacgtaccctagaatcactaccacgtgctcatgtggcaaatctgcaccgtggtcgtcgatgcagaccaagctcagccacaaccgcgtggctgccgttgtcgatgccgtgccgagctcggccatgtcagccacaactgcgccgccgccatcgtcaacgccgcgaagctcggccgcgtccatagaagagggagcgagagaagcgaggaagagggagagcgagataagaaacgagtggctgagaatgaggagcgcccgatatttttatttttatcgggcactcaggtaggaactttttcccataaacctgttttgggctgaaagcccatatgtgttttgccgaaaagggcg

SEQ ID NO: 44839 - DNA, 762 bp, Oryza sativa
  unsure (1)..(762): unsure at all n locations
aatgaagcngctatcgtattcctgcagccccttcctgatgaacccaatctccaaggccaggattgatctgccctaccactggcactgcgacgacgaggacgacgccatcctccccgactacggggaggagaaagagggacaacgaaccatgtgcttcggcgagaacgccgtgcggaagatcgccgtgtgctcgcctgatctctcgccgccgtcatcgccggctctggcgttttcttctaccggccgggaatgcactcaacctggctgtttgcctccggcggcccctgcttcgcgcgcgacatagcctactacaatggcaagctctactccattagcagtgacggggagcttttcgttcacgagttcagcgatagcatcagtgcagatatcgtgatcggcatagctcctcaagcctagagttgtcaaggctacagttggcggagcactttttacctcgtcatatcgtgcgctactggaaggctgatgatggttcgatggcggtggcatctccccatattttacaatgtacgccgttggggcgtcgacgagctgaggaaggagatcaagctggacgtgttcgaggcagatctggagaagcgcaggtggttggaggtgaaggaactaggtgaccaagctctcttcctcggcacctcctgctccagggcaattctttcatcggattatggcagctgtatattcttttcgagcttaaacataaccagattatgctctgatgggatcattaatggcattggtgactgg

SEQ ID NO: 44840 - DNA, 769 bp, Oryza sativa
  unsure (1)..(769): unsure at all n locations
attgaactgctatcgtattcctgcagcccataaagaatgactatacatgcctctgatctgacgaacggagaagcatataacaaagaagacaacggagcctggtattataaatcggagggagctctagtgttgcagcgtgaggagctgttacactcgtatatgttgtattggtccttgaagcaacctctcataaatagatgcctgtctctctctatcagaaatattctggatcaaataagagagactctgccgtgctgtggaaaccagatcactgctctaaccacttttattacaaatatggagagagtgagatgcatgagcacacgcgccgtcctctgaatccattatgactgctgctacttatttactagaaccttaagattgggtctacatgatagcttgattacttatgcaaatgaataaatactgctatggtctgatgcatgggctttggtgtggcctggggggattgcgagtctgtgacaatactcgctagtgctattggctactaagccaatgggaaactgataagatatccgcgctctggatacgtactatagtgcacgcatgctcatgtaatagatctctgacttgtataatgtctcagtgtcaccataagattgaagccatggttaatgttgctactttgaatggttccccgcatctaattaatcattcgcgcatcatgcatctcacattatatcgacanttaacaagctttcatgcttctgggaatcttttccttggatacatgaactctactctcacc

SEQ ID NO: 44841 - DNA, 692 bp, Oryza sativa
cctgcagcccgtgcttaccacaagccagcgtgggcaacggctgggcttgtagtgtagctttcctctagcttacgcatctaggcaagggtgggcgtgatggagtttggatgggccctgcgatggcctatgcggcttccggattcacctaggcacgagaggggactgcccgctgccttgcgaggagtgggggttaaacctgaggtgtggtgtgcttggttagagggggttatgcgaagggtcctttcacggcctctttccggtatgtcgtggtggcatgtcagcgcacggaaacatgtcgtggggctgtgtcttgtgggtacagttgtacacctctgatcagagtaaaactattcgaatagccgtgcccgcggttatgggcggtcgaccagattcaccgtgattagtctcacacttaataaatcgacccaatgcactgtagttcaggtgggttggttgggtgtaacaccctgaaaattcgaccaacaaaatcaaaactctaaaaatacggattttcaaaaactttttaaataaattgcatcatgccgattttattgcctatttcattggattttgatttcggagttcattaatcgcgaataaagagtaactaattaggaataaaccctaaaattaatttggctaaataaatagttggaatacaatttaaaataaagattaggtgaggatagaaa

SEQ ID NO: 44842 - DNA, 782 bp, Oryza sativa
  unsure (1)..(782): unsure at all n locations
aggatgttannnatttagctgctatctaattcctgcagccctgaatttgggggcggaaattggaaattgatagtttcatacaccaccatttgtccatttcatattccggcttgaaatgggcactgaacttgtccagatttctaatttgctatgtttagcttttgaattggacagtgcatgcttgatatagatttgaattattgaacctgaacagttttaatctgcctacatccaattgaaacatataagctgatttcaagaatccaatatttgaacctgaacaagggttgcatttgccttcaatcaatttgaaaaacagtaccttagggtctgtgttggtgagcttaagaatctgagaagcacctgggtgtgtaccacaccccaccttatgagaatatgagaaagaggggttttccacagtctgtgttttatatatattctggggatcccacatctacagttttaatgtgaaccaaactctggtctgtataggagagtctgtgattctggtagaagctgtattatcttaaaaactcccccacacatcttctgaaatcaacttttgctattcaataatcgattgacaaccaactttctctacccagatcaaatataggagcagttgttgtaacagacaaaacttggcgttgttgcgttggcgcgaacacgtatccgctctggtgcacgtaagaatcccgggcgcatccggaaaacaccgcctctcgcngggccttcttgttgttccggaaaacgactgaaccccttgtcaccattgcgggagt

SEQ ID NO: 44843 - DNA, 794 bp, Oryza sativa
  unsure (1)..(794): unsure at all n locations
aggaggttannnaagtgagctgctatcttattcctgcagcccggtgtgtacttgtgttattgcctttaaattagagtactccctagtgctaatggcactaagccaatggtttactctaggattagttgaacacttgaacgtactagcaggcatgcatgctcatgtcagacgtgacgacttgcaaaatgtcgtgtatcagtaccaagtctaaggccaaagtttttttccaaactttcaacttttcatcacatcaaaattttcatacacacaacttttctatcatattatatcaattttaaccaaactttcaaactttagtaaactaaacacagcctaaatgaacttcactagcaactcatcaaaagattagattatatatacacacaaacacaagattaattaaggagaggtgagttagtatagaggtggaaattctctacttgatcgaacaagaagagcacccaacgctcgcaatctcctcaggatgccgccgccgccgccgacgccgncgccatcgccaccggtgcgcgtggtgtcgacgcgcacggtgaagccatcgcggccacggccgcgggagcgcatcccgctcaccacctgggacgtgtccctcctcgccgccgactacatccagaagggcctnctcttncggcncaccgccgccactcttcacctcgtngaacatttcgccgncgcccttcgcgacgcgctccacgtgtactaccccgtcgccgggccgtttcgccccgacaagcacccccggcggcggttgctccgtctccatcgactgcgacggc

SEQ ID NO: 44844 - DNA, 765 bp, Oryza sativa
aatgagctgctatcgtgttcctgcagccctatctaggtcccttgccgcctctattggggcggcaaaggacccagatgaaaaagtacggccgcaagctctttatgggcggccaaaattacaattagccccttgccgccctctgtatgggcggcaagggcctaatcgcaattttggccaacgacggcagacggcgcggtcgacccaccgtctgccacgtcagcttgccgcccaccattagggcggtaggggctatttctgcaatttttttggtcgatagattatttctgtaaatattaaaaaaaataatctaaaaacgaaaaaaactcccgcctgcacgcctcctgccaccctaaccctgactcccctagggcgactgggctgtttttttctcgttgggccgtccgtcgccgggatgggccaaattcttgggtgttcccagacaacccattggaacggaaaaagtacaccgaaggtccctcaccttgtcgtcgggattaaaaaacatcctcgaacctcaaaaccagatatgtggggtctcttaactatacaaaaccggtcacccgagatccttcggtggttttgaccccggttttggtctacgtggcgctgaatcagcgtgggacccacgtggaccccacatgccaggtgtccacgtcaccctctgtttcccctcttttctccctttcctatctctctctaactctctgtttgtgtctctcacttatctgcagctggcccaagcgaagcgggagggcggctcctcct

SEQ ID NO: 44845 - DNA, 700 bp, Oryza sativa
ttactttaacctttctgacttccgacagtctccaaatcaaacgttaatcctttgcttttatgtgttacattaatatatgccaatcaaattatatgaaagcattataatgatatgacttccatattatgtattgacagccaaagttaagaaatttcaacagcatagattctaaagtgacaagttaaaaagagagtaaatatctggcgtacttctaaaggtgtagttttctgatagttttggtgattcaagtgtaaatttgtctaaagaaagaacagaggaaatataagcaagttgagtagaattagtcaaagaacatgtgatactatctttatgctgtacatgacctaaacaagcaggacacccctcaatggccctcatctagaacccattggtttttagacagaggtggcacaaaagtccagtggtgccaactgccaaggtccagggtatgtccactgtcaaaagggatgaaagaaagaaggattagtcagcaagatgaaaaggacagcaaggcaagaaaggtcaggagaatgtcatatcacatcacctccatcattctgttccagtattgtcaaatggacgagagagactaatcacctgcctgtccagctaagtatggttgtaacacagaagccgcctcttcatctgaatcctgtcaatagtggcctgtggccagcgattctgctttgtgcccaggttt

SEQ ID NO: 44846 - DNA, 693 bp, Oryza sativa
ctaaaacagcagtacctatagatcacctgtgaaatccaatcatctccaaaaccacttcgcaaataaattctaaataacaaaaccaataatctccgatgccaattgtttatcacagaataataatcaaacacacctttgattttacattatattcttcttaataacttagatagttgtgtccactcagaactagaatatttgatagtttgcatgttcaatcagaaataaggttagggatgctgttaaacaaagcacccaataaccaattttgcaggaatcccagaccagttctactgacgtttaaagatgacttctgtaatcttgtatgcaggacacagcacctcattcgttgatctctgcctgcctacactattcagtattcaccaccagtagtcagtagcaaagtgatgccatatgagtgtgaaagatttgacctaataccagggtttctacctgttgtttcgctagcctactatcaagtgttaacaaggttgcttcatccttcatgtggactaaatattgatcacaagcgtctaaaaagcaacagttgccatcttttgccatattcatttgtcatgtagacctaagaagtttataggtggacattggcgtatttacagtttaggatctgtgtgccgctgccattcggctaggcaattgagagacatacataataataaaaaaatggagaga

SEQ ID NO: 44847 - DNA, 781 bp, Oryza sativa
  unsure (1)..(781): unsure at all n locations
cggtcncaatgagctgctatcttattcctgcancccaaaatttgactaaaatggaaaaaggataaaattttggacgaaatagttgcgtgccggaggggttttcgaaatttcaatcactgcacccgtgtgctacttagggtggttgcatcatgataaaattactatataagctatgaatttgattcctacacggttatacggatgatatatgattacattagatacacacgcacgcagacataggttatcgaaacagaacagcctccctcaatctcaattctcaatattctcaaccgtgttctagattgagatcgaacataaaagttcttcaactgcccttttgttatttgtttttttgacaacatctacaatttaatcttatgaatgaataaactcaattgtcaaaagcttctttcgatatatactatttctggtaaaaaatagaaatcaacttctatatgtttggtttatgaatgaaacattggatatgacgataaatactttgctccaaaattatcacattcataccacaacttggcagacgtaggagtgtagagttagaacatgagttctcgcagaagtgactaaacactcacaatctaccatggtattagccttatattctgactntctacaagaaggtaacattgtagcctgcttacatgcactcaatgaaagcacggtttgcatctgcatatctaactattatcgttacaggtgatttattttttgattcctagtccacttggatgcttaagacaccttaaaatttatttaattg

SEQ ID NO: 44848 - DNA, 665 bp, Oryza sativa
ccagcatgtggcttctagtttattttttggattctacaactacagcttctcaaaatctggactaaaagctggactgttggggtgcttctaattctgagagaagctgcagcagctagaaactcccccaaacagactctatgtgtgtgcctcctctctgtgaaactagtgaagccaaacccatgccatgttctttattgcaactcataaagatttgttcagtgaaaaatgaaaccagatggtaccaaacgcctcacacggcacttataaaatcaatcttttgtttaactccatgtaccctccagaaattcatcctaattgaaaagtcaattctatagtaagttaaatttaatggttgggcccttcttagcgccacctactcctacagcagaagcacaaacgtcaaatttaatggtagagtggcatgtttgcaacttttggatgaaactaatggcgttatagccattggacaaaattacatagaaaatccaagtgcaatatgtgcaatttccccttctcagagaaggaagtgaaatggatcaacatggaaatgtcataaacaatgctacagtgtccatttagagagaaatgcatggagacatacgatcaataaacattttcagttccgttgatgccttccatgcatatgattaattattggaaaattg

SEQ ID NO: 44849 - DNA, 740 bp, Oryza sativa
acttgctccttgttcaaattaatcaaattgacataatccagtgccatgttggcatatttctgcttagttcttccctttgggataaattgttaatgttgttacatttggaagcatgtttaaacagaagtaggatggcaatatctttcggtgaagcgccagagcagctgcgggttttggagcacaggagagcagattgcactgtgatgtagaacaggaaacaacaggttggtccgctctgctgatattgcctttgttttattgctactagatgctttgcccatttttttcaatttaacaaattctgtaggcttttcaacagaaatatttgggtgaatcaaatgctgacaagtgtagtataggaagttccattgcttattgcatgattccactttgttgatcatcatgttggcatccaccaggagaacaaaacaagagcagaagtaattatatcatttatatttgttttcttgtcttcagattccatgactgttggaatcgttggtttgctggaatcattggtccaatattgcatctatactggattctttatgcaataaattaatgctcatttctctagtatgattaggatgactagtccaaggtgtccatctcccggccttaactcatttgatgtcatcgatggtagtgtttcataatcaagttttgaagagttaatggcaagcaggcaaactcatagactcgcattcttttcctcttaacggattatggattatcgggca

SEQ ID NO: 44850 - DNA, 792 bp, Oryza sativa
accattttactgaattataataagaggagatattttttttagatagtgccaataagaagagagccaaaatgaaagaacgacccgttatggtatgaaggaagaaacattcatctgaaaccgagattatacgcaaaagaaacttaggccctatttatttcagcttaagattattgtaatctagattatcgagccagattagtataagctggattataataagccgacatataataagttgttatctgtttgtttctctggattagttagtttgcttcagtttactcctaataatctagattataataatcctaaactgaatcaaacagggccttaccgaagtaactcaaatggcctgataacaaacagagacaagtcactcaagagtaggaaaggtctcaatgttagttgatttatcggctaagtgccagtcagttagctgagaagggataaatcccacttatccatttcctaacaaaaattaaattaagagatagagttattttctgtgataggtaaatctaacttccaaccgtatatccttcaagccccatcaatgcagaggagagagggatgccaaactcttcgcactaaaccctaaaaccctaaattgcccgatcggcttagtgctggaaggggttcgtgaggtgatctcagtgaaacctctgttggcacatcaagaaaaagaagaaaaaaaccgaagaaacaaaagaatcaacaacgatggcttctcaagtaagttagtgagattaagattccgcatcaagcagaggtgattatgtacaagctaaatca

SEQ ID NO: 44851 - DNA, 696 bp, Oryza sativa
ttaagcagagatccaaacattctggtaacagcgaagccacttcccgtatcataagaaatgaggacagagacaagttatgatctccactggcccacaaacaaattaagatctgcaaagttttaacaatataccatgagctaatgcaactaataagaaaagaatttgacacagcagatatattatagaacctattttcagatagtcatagggtaactgaacaacaaatgtatgtcagcacaatataagatactgataccgcaacaattctgacacatcaggaccaataggaagtgtactggacctaaaatggttaaaaaggagctatggaagaagcattaatggtcaattacactagatttttggaacagcatactgttttgaagctggcaaaagcattaacagatatagatggcttaaatgagttaagtaaaagcatgcagctatcatacaaacacaatgtccatataacaaggcaccagcgaatagaaccatcatttctcctcatctctacagcatagcagtcaaacaagtgctggaatagcagatatttctcaaatggttacaatgtaaagagaacaaatttaattttcaccaaaagataaggtatagttgactagaatagctttcaaacatgaatacccttgggtacaagagaacacacaaaatcaagttaagtattaacaagcagcatcacca

SEQ ID NO: 44852 - DNA, 665 bp, Oryza sativa
ggctcatccgtaaatccaaccccattgactgaaaactggggagatggtgatattgctgccaagaatatccaagcagtatacctgtatcagagaacagttttagagaacaaatatatcatgtttacttaatttacctgctcccagactcacagaggtcacctggagaaatgttccagacttgtggttagagctgcataaataaataaaaaatgctgatgtataaactcattcgagcaattagttaactcaataagtaacaataggcatgacaaacatcaacatcagaaatcatttctaaatgatattcggaggcataatacaaaagtaaaagaattctaagagaagcagaaacgcaaagcagacgaaagaaaaaactaccattttcatacgaaactagaatgtgccctgctgttcatgaattaacggatcaaaccaattttttcaatgctgcttccctgaattgaaggatgccgagaaacttgtgcaggttgtttgctatgaattaaaaggatgcttaaaaacattgtgcaggttggttgctgctagaggcagaagatatcacaatgttgcatgattccgtaaacacattagagcaggtacaatagcaggctataagccagctataaccacttttcgggaagaaaagagaagagagagaagaaagc

SEQ ID NO: 44853 - DNA, 765 bp, Oryza sativa
aattagctgctatcttattcctgcagcccaggattctacaatgattatactattctctgaacacacatacagctggtatgcaaaacttatgctacctaagcattagttcctttacggtgctcacatctagccatctagatctaggcattgatatgcacacttgagtaaagctccattttacatgcttatacttacatgattatgtacaggaatataaggataccacccatacaagatcctcatctgaggaatggtgcatggatggattattgccatatgaggaatggtgcgtggatggattattgccaagttgtacacagatgtgtcgatttttatgatcggcaatataatttatagggtgttctatatcaaggagagatggtgacacagacatttatactggttcaggccctcaatgcgaggtaataccctagtccagttgtatgtggattggatttgtgcccgatgagtatgaaagattgcgtaaccccttagggttcatgccagcgccccttatataatgctgggggatttgccggcatgtgtgatatggtatcccttataatcttggtgcataccattcatgtacagatacaggataggtttccctggctgctatccctttccatgtattacaaataaccgcatgggcctaggcaactcggcctaccccctgcgctgtagccgaaggcctcctataggacacccgggtagcatgttccccacaagctgcttaaaaaaggtgcactccataatagtccctgg

SEQ ID NO: 44854 - DNA, 809 bp, Oryza sativa
  unsure (1)..(809): unsure at all n locations
agatgatanaacctgaactcgtgctacannactgcacccccctcggcggcgtgccgcccgtacccctcgccgagttcacgctgggcggcgccgactggaaagactagtactacgtgagcctcgtgggcggcggccgacgggggagtccgcgcgccgctcctcctactgaagaacgcgctctattaatcgctaacataaaaccgactataccaaattatttcatctattcaaactaatcaataaactcatcaattaaatcaacggattgtattatagtatttattcataacaattaaagaatacatacaaactagcagacataagtcattttaattagaacataattcactataaaattaatatcagtaaataataataacatataaaacaattatatcaatctatttttcaaatagatcatatgagttaaacaaatatcaagaactaaataaattaaaaattcgaacgttaatatctatacaacattaacgaattaattaatgttatgacaccaattaaattatccatattatagaatttatctatttaaccattgaacttaactatcaaatcgaaaaaagtgaataaaattaatcaatccgaaaaatcgaacctacccgaattaatcgaaacgaatcgataaatacgataaataacgaaacaatgtaatgcaactaaataaatcgaaactaattgctattcactacaaaaaattgaattgaaattaaatcctaaccaattaaaaaaactctaaatcaattctatatacatactatcatattaaaatacttatgatccaaactgatacc

SEQ ID NO: 44855 - DNA, 765 bp, Oryza sativa
agtgagctgcaatcgtattcctgcagcccgataagtgcacgcatatacgtggcatgcatgaaaacacggtaatgcagctgaacacaatcacatatacatgcaaatccaattccaaatcatgactagcagctagggcagctctcaaacaccatacaaacaagcacgcattacaatttacataaggttgaaaattaggagtccagaagagtacaactattatatgtctaaagaaatttgacatacatgcaggaaaggccaacggattgacactagaaggaattcatcaaactcggtgagctggcacttgagataggacgaagatgacaaggattttatccacagatgcatcttgatttgaggataaattaatgaatcaatcaagtaatactctggatgtgtttgggagctgatgctgaggcagaggcagaggtcgaggcagcagaatcatctccatggccttgacggttatcaggatgcttcacatctggatggttgggagctgagactgaggcacaggttgaggcagcatcagcatccaagcttccagcagcgtctccctggccttgacggttaccatgatgctccaaatctggatggttggggtgatcttttagagcaatttccaccttatctgggttgcagtcaccatgaagctcaaatgatcgcaagctcggaagacgctcaattccagaaatggatttcatctccctgaaactccaaacaattttttccaacttaagattcttgctgaagctgatatcggcg

SEQ ID NO: 44856 - DNA, 774 bp, Oryza sativa
aatggagctgctatcttattcctgcagcccactaatggaataattactattgcatacacacatgtggacccatatgtcatatacagcgagtgacaaatcattaattgccacatcttaaaagtggcaaatagttaaatgtcccgcgatccgaatccccgggccccacagtactcccgcccagcgttctactccgcctccctgacacaagcccaaccatgagcaagaccggcccccgaagcttggtgtggttccgatcctacccaagccctctataagctctatcctccctcatgtgcttactactttcctactcgatcttggctaggatcggcaagcaggtatctccccaaataacccatacaatttatcgcccatttcaattcgttctcacgaccggcagtagcggattgatcaccgcggagcatgataggagaggaggatctagcatatcgtgaatggcagctcccctctcccacagtcggatctacccatgcagatgggctcacattgagggattgatgcagacatgttcctgccaacagcctacaattccaggcatgagaagaaatgctgagccactggcatggatggccgaggatctcaccttcttagcgctttctgttacccgctacaatgtctcgtgcttaccaagctagtttgtactctaaaaatagccaccctgtggaactaccgcaggagatcggatcatatgtgccttcttggtggtagttaaaacttctaactggatgatgaagggccaaggattttacaccc

SEQ ID NO: 44857 - DNA, 637 bp, Oryza sativa
aatttaaatcattctacgatgactataaccgttctctgaacacacacaatacaaacataaaaacaaaggagtacgaagaggatataaatactgatgtggcatccctttcttcagtacatgaattgatatgtacactgagtaaagctatattttacatgtacttacatgatttatatccaggaagaggataccacccatacaagatccgcatctgaggaacggtgcatggatggattattgccgagttgtactgtacacgactggctaaaagaaagggcactccaatacgaggcccagcactgcactactagttcatcacccccctgcaaacgatgtgatggatggggttaggaaaaaggacgtgtaattgtgggatttaggaactagtaggaacatagaagcatctattaccttattagtcgtgcactagagaattagttcgatttctgggttggttttcttgagcttcttgcactgctttacgagcttctcgttgtcgcggactatgaagtatttcagtgaacctgggaggccatccttgggcagtgactggatggatggacagttcataatcattaatctcttgaggttggtaagtctatgaaggcccgcaggaaggcaccgcagcttatcgtag

SEQ ID NO: 44858 - DNA, 759 bp, Oryza sativa
agtgaactgcatcgtattcctgcagccctattaagttaactatagagatttggagctagcaattggctatactattaatcttgctctaattaggcagggatcatttacgtcgccgtctatagctactactgtgtatacgtttgatatattgtatttccagctcgcgcttgcacatgctgattaggaaactttctcacgtattttagtttcaaatcgctgaaatattaatccttgcactttgttgttaattttggagtaaattacactttgcatcgggtaaaacacacccaatttcactttttaccgagctgctttcaaataagtttcacttggcaccaggataaacataatcaaacctatagaaatttcatcaagttttacaaaatatggataaaactttgtgaaacttggtaaaaaaatatcacaagtttcacacgtggtttataagattttcctgcagttatatgatgcaatctagtgtaaaacacaaattattttgatataccctgatgcaaagtaaaaatatgtactaaacccagtgtaaagtgaaataacatatattttacctcgtgtgaagtgtaatcacttgtttgttgcccccccccccccatactcaaatcctggcttcgccactggccatattcattacattgcaaacaggttttctctttttcaaagaaaataaaacattggtttcttgaagataatccaattaccaatcttagttgtaatatggtccatgagcatccatgcatgtcg

SEQ ID NO: 44859 - DNA, 772 bp, Oryza sativa
ttaagtagctgctgccgtgttactgcaccccattattgagcatatctgctaagtgatgtcaaatgtctgggctatttgttgatttatgaaatataagataaaatagtaagttggttatgcatgagaacatctcaaacaagcattaggtgcgatactgcgaaattttgatgattgaatagggcatgaacaatgtaagcaacgggccctcaacctcaaggtgaaagagtgtgctacatacaattcaatatacttgatttatttttatttacactttcatccaaaattgcgtgcaactaccactctccatagaaaaaaaataaaaaggttgtatataaaataaactagtttaaaaaagatgggcaaaacctttgatgtcaatcagattcatgtcgaggtcatgctgaagttgaagttatcatcgagaatccatggcatgcttcctatacattaatatgatctgccattttactgcagtctcagatgaaccatgatatggtttcctgtttctgtcatgtcatttttcttggtggtaatggcctcatgtgtgggttcataccataccacaaagtgctcaccttgattctttttctagctggttaccttttgtaggagatttcctgatgaaactttaacggagcaaaaccacttttttttaattggtgcaaaatcacttgttcttaattgggtaagaaccattttcccaactattgcaatggattataaattttcatggttggagacctgctctttggatgcgaaaaaatctttagtc

SEQ ID NO: 44860 - DNA, 765 bp, Oryza sativa
agtgactgctgatcgtattcctgcagcccacgataggggtgctaaggcaaataaaaaataatttatgggttttctcgcgggggattgctagcgcgcgcaagaaaaagagttggcgagcactttctcccttttagtttaactacctatattatttattaatatactgacactaatgataataattaagaaaatattctcgagatttttttactgacagattgaaaaatttttaagttagatttgaaaactttcgatttaagttttaaattttatagtcaaattttaaaaactttcaacttgaaatttaaaaactttcaactcagatttgaaaactttcaactaaagaatcgagattcaaaaacttttaagtccagatttgaaaattttgaaaactttcaatttgagatttgaaaactttcaactcgagattcgaaaactttcaaatccagatttgaaaaaattgaaaattttcaaattgagattcgaaaactttcaactcgagatttgaaaactttctactcaaaatttaaaaacttttaaactcaaaacatgttaaaagataaaaaaaagtcagaaaaaaagcgaggaaaaaaaaacgaaaaaaacgaaaaaaaaaagcgtggagaggcgcgcgcgccggcgctgggccttctaggcataaaacgcgcgccggcagcgcgcacacgctaactagtgatttcgtttctcgttggaacccggcttgccgtatctaaatatagaggtggatccatccataaacccatt

SEQ ID NO: 44861 - DNA, 761 bp, Oryza sativa
agtgaactgctatcgtattcctgcagcccgttaggaagggaggaggagcgcggtaccgaggggaattgcggccggaggcggcaatggcggaggtggctcgggtacgtggtgaaggggtggtttcggtggtggcgaggagaaaggaagcggtggccgggcttgggattgctgcggtgaagccggtggtgacggtgacacatgcggcggcggttccagccacggggaacgacggccggagctcgcaaaggcgatggcggctcgggttgacagaggggagggcggctcggtgggggattggaggaacgaggcggtggccggtgctcggcttggagcggtgaagccgatggcgcaagcggagcgccgcggcgacggccagggctccggtggcgcgcagccggagtcggtggaggcggtggagagaggtggtgcgcgtggcggcggtgcttcggagacggggaggggaaatggagcggatgccggggtgcggtggggcgctgcgatgctataggtggcagcggcgcagtgcgggggcgacggaagcggcgacggcgcgcggctggagggtcgccggcgtgcggcggcgcacgggaacggcgtggggagctcgagagagcacgcgggagggggcgatgagttggggaaacggatgaggggaggccggggtgcatttttataagcccccggagagggagatcgtggccgaggtgggcggcaacccgccggcggaggagcttcggcgacgttggcgagtgaagcttcat

SEQ ID NO: 44862 - DNA, 783 bp, Oryza sativa
  unsure (1)..(783): unsure at all n locations
aggtggttannnaattagctgcattcttgttcctgcgccccaaacaagcatcgtactagtatgaacgcatcttagacttcttagttcaacgaatctaaatatatagtacaactaaatttgtaagatgtatcacataatattcaaggttagtttattttaggatggagagagtatgaatgaatccatcaataataacgttcaatttttaaatgtcagacatagagttaaggcgacaacaaacgaatggcagggattgtgacttgggatagggaccctttggagtttggagcacttttttttatttggtgctctttggagatgttgtgacagtgtcgaccgtacatttttcaaactagttaaactaatttaaattttatgtctaataaagtagtgaagaggtaaatatatgtgatatatctatccaagtataacagaaaatttcagcgaactatggttttgtttgatcctccggactattaaatagtctttcagaatcttactatctaggagtattaaacgtagattactgacaaaacccattctataacccctagactattttacgagacgaatctaacgaagcatattaatccaggatttgctacagtgatgctacagtaatcatccgctaagctatgtcgcaatcacctcactagtcacagagttgggataagcttgcctctctctcaagaaaaagttaatcgccggctaaatttattaagatttgcaaggccgtgtggagcaaggcacaaagccgtcactcttcacatgctttaatcaaaa

SEQ ID NO: 44863 - DNA, 737 bp, Oryza sativa
ccggcggtgtccctccacgtggatgcaccgtgcgcggcggccgcccgccacgtgggccggtgggccggctcgccacgtcggacgccacccaccgtagcgacgatctcctgctccatgcatataccggacgtgatgatcaactcgatcagttggactaattatctacgtcaaaggcagtcaaagcctgaaaatattcatgaggcagcattatttaatatatattttgttactaattttactttgggtgggtgtttcgttttaggccaccatttaaccattgtttttactttaaatcgggtaattttattttctttaacactttgggtcaccctcaactccttaatttatcaatctaaattcaacttgccatgtgtaaaaaaagatctacaaacagttgaggaagttttattgacgagtataagctgttgtaccattcatatgcttgagaagagagttgagttagtccaaaggctagattacccgatccaaagtgaaaacttgattaaatagtgatccaaagtaaaacaccggcaataaaagatgatccaaagtgaactttactgtggtgtataatatgattcgacaaaatgaagtcaccatgcaattatctaaaagagaacacttgcatgtcgtgaacattcaaaggcacatgtgctatatatatgcttgcgacaactatataattaactatgtgcatatatcttactatattatatatctatacatgcttagacttg

SEQ ID NO: 44864 - DNA, 596 bp, Oryza sativa
tgcgccccctttctgatacaataaatctgacagatctaccccagttggcccgtaacggacgtttcctggtccatggtaaacttggaatatttgtttgttcgacatatctgtcaacgaaataactagatcatattactctttcatgcaataaacatctacaacgtaatatcttcttatgtaagccaatgcaacggtaatgtattgattccaaactagcagatctacgtagttaccgatatctacaatacgtacttctagattagtataactaaaaccctaaaaatataatgcatttattcaaacaaatttttaaagaatacacactatttaactcaatagtcacatataggatttatgaatattacctgaaatcggcgtctgaatccggcagggcttcgccccttcttctcttctcctcccctttcttctttttttttcactgaaattgaggagagaagaatgagggctgggggctgggcagcaggccttttataggcagcgaggcctgccgcccggccagagggcggcaaggggccgcctgcaaaatagccggccccgactggcttttttgcattcgggccccttgcagccccacc

SEQ ID NO: 44865 - DNA, 764 bp, Oryza sativa
  unsure (1)..(764): unsure at all n locations
attgaactgctatcgtgttcctgcagcccattcatgagtcatgattcatcctcgtcttcctccacgctgatggcgacgatatatagatatcttctggcaccatatatatatatatataccatatatatatatatatatagtactagtacttgccaacgaaatttggtagttacatcttaaaatatagcatgcagttacatatgcgcatgttatcagataaagtattgaacaaatattttagaaatagattttttgttagattatggaaatgtcttcagagaaaaaaaaacatgttgcattattacatattaattgacagaaaaagtatgttgcattattacctattaattaattaactgcgggaaaccatacatattaacaacattaaccataactacaatcctatggagtacatgaggcaaataaaaatcagaggtcattacttttggctgtgtgcactaaattatatatacagagcgtggagatataatcatattccataaactaattaaataataataatcacgcaaatcgtcacagactcacaatccacacaggctagctgaagactgatgcatctgaagatagcagtattaattaatttgcaaaagttataattatctcatgtctagtcaaattttaaattttagtaattaagtagctgcagtcattatggataaaaataacttctagttttactatggatcatactctctccatactcgtaaaaaaagtcgttaggacagtggacacggnttccaaaa

SEQ ID NO: 44866 - DNA, 759 bp, Oryza sativa
ggtgagctgctatcttattcctgcagcccggggatattgtattggtctagcttattccatgttctcaggatgaccactggtgtcagaaggttgaagctagaattacataatcattataaacgagaggtaaaagctgaaactatacttggtttgtttatctgatgcagagttactaaggaagttacgagaagcaatttgtatttacatttcctgtcacactaggcttgatttgctattttgctacttgccctactctatatagtggtttgatactgatatatgtagtaaatgtgtgacatatgcatctcctatcggcaatactttggggcaacacaacaaggatttagaagatgatactaactggctatgcgttattgatattagaatacttaggacgtgcgtaaatttatactccgttttcacagaactttctcataggacagaggttggcttcaaactagtacccaagttgttattcttttgcagacttttttatgctggtttatctcgagttgttcaggcagcctgacagcttgaggcaagcttaatgttgctacactaatataccgctcttttcagttttgtggatcggattgtgtttgtgatcttccaccaaactggacatccgaggaacttgtgttgaactcccttcgtgaagtgcaaatcactaacctgagaggaactgagaacgaatttgctgttggggagcggctattcagttgggcagcagtgctgaaacagatgacaataaatttcctg

SEQ ID NO: 44867 - DNA, 764 bp, Oryza sativa
aattagcttgctatcttgttcctgcaccccagtataattctgttccacacgtactccctcactctatccattaatataagcatatgtttggtaattctcagcacacgttactgtgtcaccataccgtttgaaaaccgttggccgctgataaaatttggtcaagttctgttattaactgtaaagttcagtttgggtttttttttttaacttgaccggaaaactaggcgatttatgttctcaagcaagctcggaaagtccggttttcataaaaacaaaccgatgttcatcggttttgtaaactttgttccgaacattaaagtcgtttttaatctcaacattaatcttcactaaaacaccaacattgattatattgcggactaaaaagagtatcacagaaaattgtcacattcaatctaacctgcatagagaagtaggagtaattcttccgtcccaaaatataagcattttataaaattttttaatggtatctaacaagctagagagataaaactaaatagggacatttattcttttacctgagaaatggggatgttcgtttattggttgagaaaagtaggtactatgtactaagaactataagttttgaacgtagcgaggagtatattttgggacggagtacatgtttatttactgatatatttaagggagtaccccataaaactcccacctttaaactaacatgcataaacaagttaagaatatttccgttcaaaaaaaacacggactagggaagtttttttttt

SEQ ID NO: 44868 - DNA, 753 bp, Oryza sativa
  unsure (1)..(753): unsure at all n locations
atggagctgctatcttattcctgcggcccccttgcgtcctcgccacttcacttcctctccacgagcaagaggagcaagaagaacgaggtcaggtcaggtcagctcagctcactgccatgatcactgtactccagttctttgcttcttcctcttctctcttttgattagcttttctgaattttcagtgaagtgtgacctgccggctgtcgaagaattgcggcgccatggatgcgggtgcaactgcaaggtcgtcgtcgtcgtcggcgatgatgatgaaccagaagaagcccttgctgtaatcaagatttttcgttttctttttcctttttctttttgatcttgtgttctgtgttgctatggttcttgatcgatgtaaagattggaggatttcgttctgtttgcttgcgtggcgtagctcggatggcgagctggtggagctcctgtggcaggacgggggcgtnnnnnnncncncncanacnnnnccccnnncnnnccncnccctccccccgaacgccncctcctgcgacgacgagacggctcgcccactgctcgctggcacgctgtcccacggccggcggccacaccactcgcattgatgcgtattggcttgcacgctcgcaccgtactgtggacttgaccgaatgagccgcgggaccgctcggttcgacacgcctggcacggtgcgcccgcacttcccggccgtgatccatggttcgcttacggtttcgccgctctaggactccgtgcgtcgcg

SEQ ID NO: 44869 - DNA, 782 bp, Oryza sativa
acgcgaaccgacgtggcaggaggagggcgctagccatgctggcgccgccccagggaggagggcgccagcatggctggcgccgccgcctccattcctgtttctctgtatggagttacaacggtgtcatttttattttattttttcggatgttttttcacactcaggatcacgatacaaccaaccacaaaaaaaatttaaactcgaactaccacttagctaagtctgaaaatatctagcataccacttagtctactttgcaccttcactaaaattagaccataactcttttagtaaaaccctttgatcagcatgttaaacataatgcactctaccactatatgaaattacttaatctaattcaaaatataaccacatgaaatgacatatataagttaaacagtacatagagatgcaatttttttatttttattttatttttttgatatttttttcacacttaggagaacataggaaccaaccgtataaaaaataaactcaaacggacaaaatatatgacatgtagaattttccaaaactctaccgaaatggacaaaatatgtcatctattaaaataggcataactttctcatacggactcggaatcaggcaaataatatatgcacggacatctacagaaaaagttacatccgattctccctcgcttcgccgggttcggcgatattaaaacctccaaattctgcttgcaagattgtgttttcgaggagagaaatttttcggtagagctttggaaaattccacatgccacatatttcatccgtttg

SEQ ID NO: 44870 - DNA, 727 bp, Oryza sativa
atgtcttttgaccacgtaaaacaaaggccctcgtcaagaaaggaagccgtacgtaccctctatagattccctcgtcaagaaacagaggccctcgatcgtcaacattattacagggtttcttaatttaattcatatatttcccaaataccctaatctaaattttatagatgtaggtatcgtgaaggtatcacgaggtgtttttcttttttaatttctgatttatttggggtactttttaatgatttgtttctttttcatttgaaattctccgagattttccatgaatctctgtgatatattggtgataacgcttggatgatactatatattcactcattgtactggatgatatatatacctctatatgatatttcgaagagtcatggagatacaatacgcaaggcagaatcattgagttttattctataattataaaggtaatactaaaattttatagagatatacagtaccataaatattcgaggtatcatagatatcttgatttttttttataaaaaattcttccacggaagaagcatggtatcttgagtactagtgtagtatcactgggtcattgtataatcatacaaagataacagtacaatttgatagagatatagagatataatgatacttgataaaatattttaagtatcataaattcgtaatacctcgaggtattgtgctctctcatatccctttttgttttgtcagatctggccaggaa

SEQ ID NO: 44871 - DNA, 1977 bp, Oryza sativa
ctactctgtactgcgccgtcgctcgtagactactccatcccgctcgccggcgtgcaccggcgatcgggagagcaggtctccggaacctctgccttcgacgtcctgcaccgggagaaggcggcaataaggtttttgggaagcgcttcgcgcgactgctccctgtttgttcgcgacggctcgccttcctcttcgctcgcgtgtttcgtgccttcgtagacacctgcgaaaagtttcgaccaagcagccggtctttccgtcacctcggtacgtgttcaatatgttgcgcatatttgatttgttcatgttatactgtgtagtttacatgtatagatctaatgatgcgttcatgctagttttcttctgtaatgtcatgatttatttatggaatagattaaatcattatatgtctataatctcaacaccctctcctcatcgtcctccttctccggcaccggcggcccgccgcgcatcgacgatatcgtcgccgccgccacgatgacgacgccacgcgatcataagcttaaggtggtgaccaagcctggcggcggcgcgcagcgcgttgcggccatggagacgctgccgcgggagacgttctcgccgcgcttccgttgcggcggcggcgccgccgccgccgtggcgtcggccattgttggtagaagctaccttggtggtaaatgagctgttggccattgcatgaatgctagctagactaattgttaattcatggcgaattggcgatagatgtttgtgcagtactaagcaggtaatcttggctttgtgatatgcatggtttgtgtctgaaccttcagggtaattgcatttttcctttgtaacatgagacaatctgagttctgaaggattccaattagaagatttatgacctgttcgatgctttcgttgctgatttgctttgcatacctccaaaacctgattatttaatcaatgtcgctttacgccatatgtttgaaacacatgcatgattattttcttcaaaatgatgggatagttcatactttaattgctccaaatggacccttaaatagttatattagtaaaattactttaacaccagcggaccagaattattttaacagagtttatgctgctatgcttagagcaagtactataaaagctcatgtgctgtccctaaaagaaccatataggattagatgataaggtggaagagataagtgagcaacgagaatatgagcacctcttatgcaagaggtaaccactgcacaatcttaaaaaaaaggtgaaaagagaaagtgaaatagtgagagagtgagtcaattaaagaagattttagagtttgtgtgctagaggtaacatattgtacatgttgcctttatagatgacatatacaatatgttacctctaaagagcatcgggtcactacgccgtagaacacaagatcatcgaaagaagttcagatcaagccacaggagagagagagaggaagaagctagatctagactagtacatattgtgattttttttatctttcaaccctttttttttgtttctttgtattagatcaaaatgctttagtagagattcatgtggtgtctcgtacttttgacttcgattcctagggatatgttgatgtttcaacagttgaaactcaatgtatggatgagtgtgatgtttcagtcattattcaaccatgtttcaccaccttaatcgtttgtaatatttttggtctagtggtgaaacctagtagcgataacacagtggggaaaaatcgggcatcaaatttgtagtcttgcgtgaatatgtgctagattggccggctacatcgtgagagtttctagtgtgaactactaatatactcattttccttcgaacttctcatatccgtaattcggcattccgattcgaattccgaattgcactagactgctactgcctcagtagacaaagcagctgcaaaattaattagttgcaaaatttctaatttatatggctactagcacg

SEQ ID NO: 44872 - DNA, 1856 bp, Oryza sativa
tgttatgtgggctgaaggaaagtatttctactcctgctcattgacttgcacccttgttaggtaacttggggtaagcccacttttagctgcagcccactatatggcccatcgtgtatccgaccatttgggtacatgacaacaccgagccagattcctttgttgtctctgttcatagccagcggcggacccctttccaggaggcctgggccctgccgccgccacaccaccactgccgttcgtcgccatcctcagctcctcgtccatctagccggctactggcgctggctcgttcatcggtggtggctgtgtagcagtctcggctatgcagcagctcagtacaactgcttcggtgaattgatgaattcatgttttagtacatcgattcaagtgaatttttgcttcagtgaactatcagcaagcttcttcttcaagcgcatgataaaattttggatactcgtgtcacgcttttcaaaatgctaaacggtgtgtttcgtgtgaaaactttcttatatgaaagttgctctaaattatcagattaatccatttttcaagtttgtaataattgaaacttaataaatcacacgttattaccacctcattttgcgtgaaacactcaatttttatcttcatattcatatccaggagattcaaacaccacattaattaatacaccgtgtggatttatttatcttgttctgcaatctgtgacatgagacttactatgtgcatgatttatttatcttttgcgaggactcaataaaaatcgtcagacgttttctgtactgatctccaagcctgagtacatggcaagagcagagtacaagttctctgtactgcacgaagctacatatggcaattttcttggtgggagttttcgttggtgcgaggctgcgagctaatgatgtggtaccctctgtaggacttgcagtggtagcacttcattttatagagaatctgttatatgccactaaaaattggttttattacttatatgccactgaaaattagttcttcccctatatatattattggtctaaatttacgtaccctctcataccactcccatctattgaccatgtgttgaccgttaactatcaagtaaaaaaagacggttttggcgttttgtccttatgagtataggacatatctaacaactcagaatgataaatacatctttttacttaaagttaacggtcaatacatggtcaacaaacgggagtggtatgagagggtgtgcaaaattagaccaatgacatattggggaagagaccattttcaatgtcataaaagcgatcagactaagactaatttttagtgacatataagggattctctcttgatttttatggcagctctctcactctcttgaccctcgggcgatggggatcgatcggctagggcgctagggccaggccaatctgctgccagcgatggcgatgggggcgtgcagcggaatggtgagagaatggttctcttgttgttctggttctgcttcatcagatgagagagatcgattgatcgattgatccacataagggcagcaatgccaattcatgtacccaatccaatcaacgcagtcaaagataacgggaaaccaagagggatcgacgaaattgctttcaacaataacgaaatgatattttgggtgctgttaagttgaccgcgaactttggatgatatgaaattaaaaagaaaaactttcgatgctatagaatcaatttcgcctccatttttttatagggtaaatagccaattcagtccttgatgttttgctaggggtcgaattagtcctttacattttgcattgtccaaacaaatccttaaaaagattatcgtgtggcttaatatagtccttg

SEQ ID NO: 44873 - DNA, 1870 bp, Oryza sativa
caggcaagtgcggaaggcgaggtccctctccctctccttcccttatcacactccctccacttctcctctatgaccggacagtgagtgtagacgggtgtgtgaggtgacctcgcaatggcgggatcggatgagacaaggtcatggtggagcttgtgacttcgcacgagtgaagaaggtcgttgggggagagggaggtccgacacgcttagggtgacgcgtgatgacggcgtggtcaactgtgttggggaaggtgatgtgcacggtgctatgtgatgatttttgtcttatgcgctgtgtagtaaccaaaataaaaattttcacgttgtcacattgaatatttggatatatgcatggcgtattaaacgtaggaaaaaaccaattacatatattgcatataaattgctagacggatcttttaagcataatagtgccatgatttgataacatggtgctacagtaaacttttactaatgatgaattaattaggcttaataaattcgtctcgcagtttcctagcggaatctgtaatttattttgttattagagtacgttcaatactttaaatgtgtgtccgtatatccaatgtgacaactaaatccaaaaatttttcccaactaaaccaggccttagctcccagatctacacggtagctgtccttcttatcctcttgcgttccaggaggctggcgagctcgaagaggacttcgtcacttcactgccaggagcacgtaggggaggagcacagtaagaatggatgggtgcgttgtgaattttcaataccttagtccaatcatcatgatgtttcattacttcgataaaaatcttgcactgggttttaatggtgttttattttttttctttgatttcactcagatctaatgatgtttcaatagcttaaaaattgcttgtttcatacgtggaagcaaattatttcatctagtgctaattgtgtttcactcttttcaagagttgaaatattttgttgagtgctaaaacattattttaagagttgaaataccgatcgttttagaaaaatcggacacctgatttatagctgtgttaaatagatactactacataatcgatttttgcatgcggtcagaattggttttcgcaagtagctaggcgcccctcctctacgcaggtgtctgcggaaatcaaccttttcgcaagagggtaacgcaaccgctcgcgaaaactgtattttcgcacgcgggcgcactaagttgtccgtttgaaaaacaagtttgaagaaaaaaaaatcctaaaaccaaaaatctagaaacatgccgtcgcaagatccgacaccaccgcttggatctgtggtcgttgttgctcaaagccaccgtcgtcacgcacggatctgttgtagtcgtcatcatgcggaagcttccacctccgtcgcatcgggatccaccaccgttgtcgtcactcaaaggagctgcgccgtccttgctcgaagccgccgcattgtcgttgtcgttgtgcggaagccaccaccattgttgcgtctagatccatcttcgtcagtgtcgttcgagggaggcggagaggcagcggaatctgcgcgggaaggagagatgccaccagatccgcccgtcccatcgccgcagtgggtggatctaagtgtgtgggggcgaaaggtagcaggatccgcacgatccgaggccgctgtcgcctcctgagcaatgcaagtcattgccgctctcgccgttgcggccgctaacccgagttagaggaggccagacgagagtgggaaagagaggatgggaggagggaagaagtgggagagatatggagagtgtggaggaaaaggagtgcagcaaaattagtggggagagaggaagcgggaaaaaaaagagcgaagagaa

SEQ ID NO: 44874 - DNA, 3311 bp, Oryza sativa
tgtgagactagtacgaaactaatgagtatttctataaggtcgtaataattatatctggttaacaaatacaatagaggaaaactgatacatgaaaattattaatggtgatggttattgtccgccgaagcctcattcagccaactgttcatatgtgttgctatcatgtcttgatttgaaaggtactacctctgtttcaggttagaaagtacctctgtttcaggttataaaactttctagcattgcctacattcatataaatattaatgaatctagacacgcgcgcgcgcgcgcacatatatatatatatatatatatatatatatatatattcattaacatatatataaatgtgagcaatgctaaaaagtcttataatatgaaacggaggaagtagaagcgtagaacgtaggatgggttgatgggaatggaatatgacacgagccgtgtcagtccgtctgtagtatatgaccgtcggtgttggatcgcgctcctctgacgtaaagtcagagggacgtgggtcactgatgtcagagaagacttatccgcgttggtgtttaacttgctctcgtgttctgatgcatttggacggtttgtcatttttatttattttttgcataattcgttttaattttttttagtttttagcaccaaaagttttcattttccctaatagcattaaaaattattattattatttttcatattttaaatatttcactaatttttgtggaaacccttagtgttggtcggcggatgaaaaaaaagatcaattgggcgctctcctcgccgcttattctcaactcctcgcatctctcttcctctacatccttatccattcgccttctccctcttgcgctctctctccctctctcctcatcctttctcatctcttgtcttctcgcctagtctgtgagcattggaggcgtggggcacggagaccctggaggcgaggttggcgctgcggaaggtcgtcatcaccaagctgcccgtagccttgtcgtcggcggggcggcaacatcgcacgggcggaggccggcagcaggatgcgctccttgctcgatccctcccttgctgcctgctgctggatgggggagctcgcagcacatcggaggagagagaaatttagttggattgtcttgtgcttttatgtggccctattgaagaggaggaagaaatcaaatttcgactggtacaattttgagtttttgatgtttcagccaatgtatatggatttttttgggtttggattgaaatgttgtacttgatacttcgatggtgtttcatatttttatttactagtgagtgtgcacgtgcaaggcacgttaacatatattgaatggagtaaattagaaaaaacacccaatgcatgtgaaccttaataaaatgatgataatagttgcactgttagatagatagatacttctgttcaaatcccaaaattaaaggaagaggtggatatcaatcccaacataaagtaataggtggatatcaatgtatcaagtagtatatcaatattcatgaaggccagaaacaatcaaacatgtggagtacgcattaaccataaaggccagttagcagtcttgtacataacaaatagaagcaattaacctgtatgtgcatgtgcaaatatttacatatggagcctagtccttgtagaagttaccaacatctatcggccttcttgacagcgaggagtagtcatcactaacatctctcttctgtccatcaggagttgagagcaacgtcaacaataagtatgtggtcctatcctatagacaaacaattgtataaagttaaacatgtattggtcactttgaaaatcagtccagcattcttgaaagaatgaataagatgtgcaataacattcttacggcactgctgtatacataatggatacatgaatatgtacctgaattttaccattaataatgttgatttttgcttcatttgctgaatcaagcaactcataggaacaacatcatccatatcttagcaagctcgatcgttgcagtttgcaatcctctttggtgaggcgcctagctatcacaataggttgtcgaggctgaattctttggtaaggcacctagctatcacaatagtttgtcgatgatgcattcctgctttaaataatcagaacaacaatgatgagcatgttaattagttgcaggaaaaaaattattgcacagctatatatagattgcaatcaagattgattactttgggctcgtgaagttgctttgctctggttgctttaccaagcagctaaaagtaagtcaaccatatctggaagcctcgctgttgttctctgtaaatgggagacgtccgagtgtcataacaggttgtcgattctcgtttccaaaataaaatgtttattgcaagaatattgacttgatgacttatactaatgttcattatatatactattaacattaaatgaagtgaacacgatatccacaacagttgtataagcagacttgcctatggtgcttgatgcctccttgtgctacaattaatggttcttttttattcttacttccttctgctcggcaatgggggaggcgtacctctctatagcatgctttcttctcaactcgagtgcactaaattgttaatatggccaagcagacatttctagttagtctgtattggtaaattattaaaccttaattgcacatgttgtcatatagagaagcgattgaaatattcaaatatgtgatagatcatgaatatggaaaacataaaaaaaacattgacatgtaaaaaacagtctagaagcagagcatgaccaatatgcaggatcaatatatgaatttcccagctgctctaattcagttaatttccattagcgcaatatgtgtcaatgcgatttactcaaaggcaaaacatattagcaaataaaccgaaacaatatgtgtttttacctggccatgcagccgattacgatgtagagcttcatgtgatgtccattgaagtagggcgagagaggagatgagtgcattgaatcacattaaggcgcacaattgacatagttcattgagatgtaactcgagtacttagccaagataatcagtggcaataaaatagagatgggcattgggtagtctgcgagcttgagattccaaaaaaaaaaaagaataatcaatatgacactctatttaagaaataaattaggaaattataatattcataaaacgaaatgagttcaactataaacaaaaataaaagtaagattgaggcatcaaggtgtgactacaagttgcatgtttttagtgccttaattgatcgagcatcacactattcagaaaaattca

SEQ ID NO: 44875 - DNA, 1805 bp, Oryza sativa
  unsure (1)..(1805): unsure at all n locations
tattgattaattactacagctgttttactgctttcaactactgctttgaaatgcctgctttatgcaaaagaacccctagcttcctttggttatatcatgcatcatacctcctcttccggtatgacttgctgagtacagtgggtagtactcagtcttgctctcttttcccccacagcagagctgaagatcttcctagttggagctgttttgtcaaagttggtttcgtcgctgccgtcaaggattgcctgtggagtggagtcgcccgctgctgaagtcaagcctcccggtttagctcgcttttatcttttccgctgcatttgtaatcttttctatttttgtaagacgtggatctgtatgtcaacaattgtcgtttgtgtaccctggctggtcctggacagggatttaatgcacattcagcttagaaattctggttcgagaatttctgggcgtgacaggtatccccttgtccaagtagaactagggcaaccaatatggatacaattcgagtagtccttgtcgtttccatgtagaactctggttgtctttccttatccggaactccctccataactgaagtcagtttccgtataggacatggtatgtggtgggtcctgccgagatttagtcaactactattaggtatgtggtatccataaccatacaatgatcttggagagtagagacaatagcagactataagccagctataaacatattttaaaaagataaaagaaaagagagaaaagcagcaggctagctgcagcacgaacatcaagacgtaatgtttatatgacaggtgagaccagatattaatagtatagtaagcaactattgtatgaattggctatatataatttaaagctagtagttggctattgcgctcgcatgccattcatttatagctctaataacttgaattgttgacaaaatctatgaaaaatatattgatctacaaattatacctttgactttatatatacatgatgctcaaaacacatgcataatccctacaaatcaaagaaaataggtcttatttacgtgtatatatatgtttttctcttacattacataaatctagttgggcggcccgcgcaattgcgcggctagcatcaatttaaaattatctattttttacacatgattttatttaaaattatcattcccgtgattccaacaattttatagattttaaaaggcacgccagtcgctaccccttacttctttgtcacctttttatttgcttgctcgatctaccactacttctatttattctctttggaacattagcccttatagttttagagtttttttgtcttgttgggtttcgttntcataaattttagaagtatcatcaaacatcgccaattttactactctatggcccgtccactgccacctctctttatcgtcattgggattttaaaaatcgataataattattgtttgtgttcttttttactttctataaatctcgccaaatctttagtggctttgccactgtactcccctgcaacgcgcccgctacctcccctccttattgtcattgagattttaaaaatcgaacatgattattattggggtttatttttactctctataagtcccgccaatcttcgtgaccatgctgcttaacggcatgcccatcattactcctcttaatcgtcattgggattctattgaggttttctttatagtttttaaatatcacatcaactattagcactctactcctttataggcctattgcttctcccctctttattatcattcgtcatcgttgtgttctagatggactttttttaaaa

SEQ ID NO: 44876 - DNA, 718 bp, Oryza sativa
taggagtatgacttatacgctccacccgaggggtagtctacagacggtctagtaccagataagactttgagtgaaacttgcttgcacaagacttgcaattcaaggcgtagtccattgttcaagttgtgagtaagtgtagcttggagttctaggtggatgttcaaccttaattggtctctatcgaaccactggtatataaacagtatattggaaaaggcaaatctcagtgggattttgagatttggtgggggattgttggaattatgaatgggccttagcccactcgaagattaattctttggaaaatcacaaaagcccacctcatgggatggcatgcatgtggagtttagtaccaccttgcttattctaggagagggggacctccttaaaaggaaggatgccctcctagccacttgaagcatgtgtggtggagagaagaggggaaacacacgcgcgcgctcgctcgcctcgcctggccgggccgggccgggccgggccgggccgggcggcgcgcgtgcacgatgtacgcgtcgaatggtccgaaaaattggctcctcacccttgcgcagatgcagcctccttttgcagttttgttttgctgcagattcggattcgtttttggttttgaaacgttccgaaaaatcccgtgcgtgcaaacggcgtggagttcggataagttacacgccacttatacggttcggttacgcgcagtatagat

SEQ ID NO: 44877 - DNA, 740 bp, Oryza sativa
cgctggccgcctcatcctccgccatggcctccaccaccactcactcgctcctcccgctctccggttcaacctgcgaggttgcggaaggaagaagacgacgctgaggtgagctgaggtgaggcgagtggagtggaggtaggaggaggaaatcttggaggtagaaagagctcacccgagctcagctgagcaggagcacgccaagagagccgccgctggagctgaagctcaggtgtgtggtggttggtcgctggttggtggtggtggtggtcggagacgacgacacgttcggccgtcgcggaaggaatgggccgggcccttcttgggcctcaaacatgggccgccttcttgggcctcaaacattctgttgagcttccatgcttaactcttttttttttattacacgtcatatgcgcgcacacgtatcactacgcatgccaatgaatacaccctcctaaccatgctcaaagagtccgaaatcagcggcatattcttgctctcactaaaacccattgaaagtccatttacatttgcgtaatactcgtgagcattaggatttaaaccatggtgggtggattcatgtatccacaacttcaacacatattactggtgcttccctaagttttttttttattacgttcattctttttctgaatgatcaagttattctgaatccagtaaatattggaggggagtagaaacaactgaatttagtgaaaaagaaacctatcttgcttgtcatt

SEQ ID NO: 44878 - DNA, 1840 bp, Oryza sativa
tggccagatcggacctcctgtggccggtctgaccgcaccactgaccaccggtcagaccgggccatgggccggtcagaccggttccctaggagtttctccaggttttcataccacgactagcaatattgattttaattattattcatcacctgttaatactgttagtcatgctactccacaatccctgatgcttataatgatgttgctagggggtatcctcccgatactagacaaggccaatataatcatattgcgccgcaacaaccaccccttaggccatcaaatacaccaccagatctacataggcctaaaaatatgaaggagttgattagtgacattatcagggctacgtttggggttgaagcgaaggatcgggctagggagaaccaaaagccgtatccttatttttatgacgctgtcccatatcctcctaattataaaattcctgaatttaccaagtttagtggtgtggatagtaggactacatatgagcatgtagatcaattcttagcgcaatgtggtagggctagtagtatggatacatgtaagtgcgcttgttttctttatctttgtccgatactgctttgatatggtttaattctttactggcatattctattggtacttgggctcaattagaacaaaaatttcatgattattttcacactaatgaaactgagcttaagttgtctgatttaacatcggttaggcataaatacaatgaatctgttgctgattatattgaaaggttagagatattaaaagccgatgttttagtttgagaataactgacaaagatttggccaacattgcatatgatggattgcttgactctattaaagagaaattaaatggccaaatatttcttgatattgatcatgtgttgcatgaagctctggctcaggaaagccgatggatgacaatagtttaaattctagtttagatgaaagtgcaatatcatgtatagccgaaccaagcgacggttcgaattgtgttaataatttgtgcaatgatgccatatcgattatagccgaatcaaatgttggtccggattatcttgctaatttggataataatgcaacaatcattatagctgaaccaagcgacggttcggattgtgttactagtttagacaatgatggaatagccgaaccaagtaatggtttagattgtgttgctagcttagagagtaacatcattgaaaatatagccgaactaagtaacggttcgaattgtatcataagcgaaagtgaaatagcattgtcacctaagaccgaatcacaaatcggtcatgtggatattggaaaagatgatgacaatgtcttgcgggatagtggtgaaatagaatccaaagtagctatgcatacatatcaaaggccgtatcctgaacatgtagattcgatcccatacccgcaaggatttaaggtgcccaacttcacgaaattcacagatgagaatgctatgactacaatggagcatatcggccgctttattgatcaatgtggtaaggctggtagcgatgatttgctaaagttgaagttgtttcccctttctttgtcaaactttgcatctacatggtatagtttacttgctcctaattcaatttctacatggttacaaatgaagcatgagtttcatgattatgtcaaagatgcaagcttgatagagcaaagaccgattgatacttcatcggtcacttgtgaaacgatttcggttacatctatgcctaaaaccggaattggtagtaatcctctccctattagtcctattgatgttaacaaaaagaaagggaaaagtgttattattggggatcctccgcccaagactaggatcaataatg

SEQ ID NO: 44879 - DNA, 715 bp, Oryza sativa
cctgcaccccaaacaaccaagcacatgtttagcgcatcaccaacagtctactaataatctatcgccaaaatttaatttttgggattcctaaactgaaaataggtgttgaaaaaaccccttcctccaagagatagcctaaattcaatcccaaaaactaaaagtgggcccttctgttaaactaccaatagaaattctagtttttttcttttcccgtgcgcagaaggagatcgccccgacgggggaaggagaggagaaacgcggaaggaggggagaaacacgcggaaggaggggattgggagtcgttctctcgccctcaaatacacgtaccgagaaaattggagatgggaactttaaaacatcaagagctcttttgggaatctgttggaccagtttttttaaccaaaatcccaaaaatataggattggggatgtaatagctagactgttgatgatgctcttacatatttaatctgaaaaacaacttcttttgaaaaactcaacaatatttatgagtagtttttttaatgaaagatgtacgttgcatattcagaaatatgagtagtactcatttcgtcctagaaaaaaatcaactttttaaaacgaatctagatagatgtttgttcaatttttttattttacttagagcgagaataatattagagctcacttcctactattagcccatcttaagccaacatatattatagattagctat

SEQ ID NO: 44880 - DNA, 2530 bp, Oryza sativa
caaccactaacaaagaccgggggagagagagaaagataagggagagagagaggtacacactcacatgtgggtcccaccacgctgagtcagcttgtcaacgggtcaacaacgccacgtcggacaaaaccgccagcaaaaccactgagggaaatgatttgctctagttttcagagatgaaggaggcgttataccctgtctttcggttgagggatgttattcacacaagcgcaagagatgagggaggcaaaatggacctattccttctggcccaacccatgaattacataacaggccggcccattcagaaatcgatttgcttttccttatacttcacggtttaacttctggcccaaaaaaattgactaagaaaggttttataaaaaaaaagcaattctacggtatttgagaagataccataaggtaaaaaaacttagtgtaaaatttggtatctcaacttagacatcaagaagtaccaaatttactatagaaaaggtggtacctcctcaagaaccgtgaaattgcttaaaaaaattgtttatcaatttaaaaagtgtgagccgcaataatagtagcactttagaataaagcgacctacacgatatgatcatatgagtgctctaggttcatcagtacttcagcgtgcgatgtggaagtgaatgaaaatcaatgaaaagttgttgatgggtcatgcaattgtaggttggcatgccgagcccattcgtcacgtcaagaatcacctaccaaacagtgtcatgttttgattaagaaaaaaattaagtcactcatttgttgagtgatctgatctgtcttgttggcatgatgacatgacattcttaatagcacgtaagcctgatcttgcacgttggccttctgtaacctcagacttgataacagtcctccaattaatggagtcataaaggaatcaagttagaaactagtacagtattacttaacatttgtaaagcttcatgattaaatgaaatgagatatagtcacccttagcttgttccacaactttcactacaatagcttggccctgcttatatacagactactctgaatactcaaatctattttccttttgactccaagtcattgattgagttggatttattactaagtctccccagcacatgcatgccatttgtttggcactgttacacacacctttcttgtcacacaccctaggaactagttttgcccaaaacattggatcaataattatcactactctcttttttcttcttctaatagacgccattgagttttgacatgatgtttaaccattcgttctattaaaaaaaaatatataaatgttatatttattttattgtgacatgttttattattaaataaactttaagaatgacttatacttgcatattttcatgaattttataaataatgtgaaagatcaaaagttactttaaaagtcaacaacatcatcttttttataaaacaaatggaggtagtatatttttagtcttattggtgcatacaatgctagggtcttcgatcacttgggtaaaatcataattgaggttgtaagggaatctgtttgttggctttaatccatccaactgagaaatgttctcgcctacttgactaaatcacgtggagtatctactatagggtttatgaaatttgaacggatcgaactgggtcaaattgatgataaacgctcaaaattcaaggtaatgactcaaattttatcaaattatgttgaactcaacctagttgtaccaatttgagctgtcttgcataggttgataaccgcgatatatgtttgagtgcttatcttatcgtcgtgtttgcgagcctttatctatttgtcgttgtgtttgctctccaagtctaaaagacttccatgttaatagagagagaaaaaaaaatccatgttattgttgatcatgtgcatttggttgttctagattattatatagtgtaaattgacaattctctaccattataaaaattgaagatatttttgctggtactttggtacgtcatctgtgtatgagtcggtttttaaatccattcgcttttggaaatatagatccatatttaagtcgggttttaagttcgttcatttttggaatacaaaatgagtcgtataagaaatatctttaaaaactcgcatgctaatttgagatgatcggactcctaattgcagctcatgattttctagaaaaatatatatcaaagcaaattcccatattgaatttcaccttcactaaaccgtataacaataataagattaaaataacattcacccgttgcaatgcacgggcattttctagtgtatatatatacatgtacaaagttgttttgaaataataggaatagaagaagaattgtatatcaaatacactttaatcgatctagctcctagcagtttgtgcaggaaatttggctatttattttataccaatgccaaaccatataagtaatttgcattcaagctatactaatatgtaaaactgaaagcctcgcttcttcaaagcttgagtattctatagtgtcacctaaa

SEQ ID NO: 44881 - DNA, 690 bp, Oryza sativa
aaatcatgatctgcagttaggagtccaatcatctcaagttagcatacgagtttttttaaacagaattcttatatgattacttttgtattaccaaaagtgaacgatctttaaaactgactcaaatacggatatgtatttccaaaagcaaacgaacatagaaaccgactcatacacagatgacgtaccaaaataccggtaaaacatctttaatttttataatagtagagaagagatatatattaaaaccaaaacatcaaattataaccgattaaaacacagatgacggaccgcggaaacatcttcaatttttataaccgcctcaaacatggatgacggaccgcagaaatatcttcaacttttataatagtagagatatgtttctcacaagcataaattaaatggaaaaactaatatctgaaacggaggcatatacaaatttggttttgtggacaaataaaacatctttacttgtccaggatttaaatgaaaaaattaactagctaattaattaacttatcagtggagttcaagaattttttttcctacttcattttctaattataagcatatactccctctgtcccacaatataagggattttgagtttttgcttgcaacgtttgaccactcctcttattcaatttttttttttgcaaatataaaaaaacgaaaagttgtgcctaaagtact

SEQ ID NO: 44882 - DNA, 1629 bp, Oryza sativa
acggatggagtactaattaacctggctgaattatgcatgcaatatgcagctttccattacaacttgagctgcgccaacctgccaaaatgcacggaacatgcatgcgtagcggattgccaccgcagaggtttccaggttagtgtgggactagtacattgcatatatggacggcccaatcaatgttgctgcgtacatggcggccttcttcatcctgacgacaagttaacgaccaattaattaggcgatataagagcacccacaatggtaaagtaagatgctatctataaaacatgtacatctcatgcaatagactagattaatagtaaaccacctcaatagtatgtcttcatgggtatctatagttctctcatgcattgcctcgtttttctctatagactatctcgaagttagtagatagttttgctctctctcttcatttaatatcttctatgtaggaaaatatgctgacatggatttcttgtagagaacctagctatagataaccattgtgggtgctctaatggatggatttccgatatgagcaataatgtattactgtcaatgattatatatatgtgcaattgctgcaatgagctgatcgatctcttcgatctttttgctctttcatgcatgcatgtgtcgttcgatcgacctagctatatatttgatgccgactcaataaacaaagtttacatgggaagatttggggctctctacccagtaattaattggcttgatatatattgacttataaatatcattgtacattttcatactgttcatgtggagctatagcagcatctgaaagtgagtgaattagtgggtatgaaaaaaacaagacaagtgcagataaagatgactatgtatactttctctctagtcaagttaactattgaatgttgtatagttactctctcctgttaataaatactcttcacgggaataaatgggttgaatgggctagattaggctgggcacatcatgagagtttctagtgtgaactactatgatctcaattttgccttcaaacttttcatacacaagcaagggcacgccgaggactaatatactacttcccttggtgcctctgcactggtgggtttttgcggcccgacagagatgagtatctttaaaaaggtgtttacacgcaaatttggcacctagtatcgaaatagaaagaattgccaaagtttggatttctgctggttttcctccaggaggaccggtctgaccgccgtatgtagtccaaacgggttgcgtatatgtactaacaaatagatacataagatatgagaagggacatggtattctcatttatgttcttttcactgtatacaaaagcctctcctctcctcttttatatagacaattctcatatatggaaaagtagggtgaggcccattagtatattgggatggccttcatgggccaaaagcccaagtttcttgacagatctatttttttatattttctttgatgagacactaatgtcttaaaaccattaaatgaacgacatccaaattctgaagatacagtccaataaatgaaaatttgttttcctgtatagtacctggcaattaaatatcatagaatctataaaagcatttaatgcatatgtttaatttaatt

SEQ ID NO: 44883 - DNA, 1422 bp, Oryza sativa
atttataaaatttatatatctatcttaagatggacagtctttccacagttgattggaccacatgatgtggttaatgttaagataaatctttaaaaattacagagcataaaaaatacataaatccggataataacttttccatatcctatagaataccaaactctgtgccccattaattagaaaactaacaattcatataaattctggaggtttcgatattttttaacccttgcaattaatcaaagaaatgcttaatttcttcaaatcaaaataaaatgaagaccaaagctgaagaaagaagatgtatttacttcttagtctaaaattaaaaaaatctggaaaggaatacagatattgaagaatagggcctccacttcatcttcttcaatcgattaaaactgaagaaaataacaaagatcaaagtgtgaaaaggattaaaaaggaaaggaaataaacaaagaaaaacattcctcgaactaccgatcactacttctcaatggctaccactcccacaacccatgttgttgataatagtgtctttttatgtgcactaaaaacaaggcaaacgagcaataaacataacaagtgggttataaaatttaaagtgccagcgcacctattttctagtgtcttttaaaaacggccatccaatttgcaagatttttaggttttgccacccatattgtgatcttgtcgctccgtgccactcggtgtatctgaccaggccgtcctatagtgcgccaggatggggccaaacaagccggataattgtgttagcttagataattaggatggatcagctaggagcttgtgtcacaatatattcatccaaactcgagtatgtggcttcacttatacacatctttataacaatatataactatagttagtggaagatgattatgccagcgtgggttcgcggtgtcaggactccatcactgaagacgcagagatagccaacgatgctgtgtcctgccggatatgctacagggcaagggccaagtccggactcgacagaaaggagatgggccgagacaaggcaggcacaacccaagagaaccaacgcgtacataggcccaggaacgtgataggtgagtgagtgagcaagaaccggagatagatcggagtagaacacggcggagacggtggcttgatcctgttggatcaagaactctgtatcgggttccttccatttcgaatcaagcaactaccgattctttctcccaaatcccctttcatttcattcgctagagctcacacgcggccatgcgtgatcacggtgcgtcacatatacgtgtttggatgccatgcgcgctgatggtgtggtgctttgtgtttaccaaccgcgatttctaccaatctctgcatacgccggcgacttggcacaatcggctatatggtagatataattttgtcgggaac

SEQ ID NO: 44884 - DNA, 3967 bp, Oryza sativa
caggttgcgtaagtggaccaacaaatggagacacaagatgtgaggaaggacagagtatctttttttttttaaattacacagtgcaatacagacactcacaacgcacgcgcactcacccctatgaacgcacgcacgcaaaccctacccctatgagcatcttcgaagattgagccagcaaatccttgagattgacgaagtcaccacaggtgcctcgctatcgacggatacgtcacctaccactgaaagcacaacgctattaaatcctagaaaattcgctcccatgcggagtcgaacccagggcctcaggtgctactgaagctcttgtaaccactagtctacatgtcttttcgcaaggacagagttttctcattcacgttcttttcaccgtatacaaaagcctcgactctcctccctttatatagccaattctcatatgtggaaagtagggtaaggcctattagtgtgttgggctggtcttcttgggccaaaagcccaagtttctcaacaatccatttttttttatatattcttggatgtgatattaatgtcttaaaaccattaaatgaacgacatccaaattctgaagatgtagtccaataaatgaaaatttgttttcctgtatacgtggcaattgaataccatagagttctattaaagtattgaatgtatatatttaattattatttagtatctgaaaggttcattgtctacttctatataagtaaggacgaatgaaaattgccaatatacttacaagcatactgaaatataagagaaaattagaaacacaagaaaggaaagaaagctataggtatatcgcccgcgatatggcgattttcaagaaggatggtactgctgttctctttgtcatgtctcttatggtcatagctatggtctctcttcctgccaagcaggtaagctcttccattctttaattttatatttgttgtatatatttactaggaatatacacgtgcattgcaaatatccatgcatgcatatgatgcaaaggcccatgtgattgggatgggttgggaataccatccaatcggttctagtctcagcaattaatggaaagtttttttaatttgaaatatggacgcgtctatgtagcgtgcagtagcacgttagtcttaaatcaagacctctcacttttccaatttcatctgttacttttgtcacataccccatctactttctaccatctaaaattcaaataaaattatttatccgatctacaatctaattacactattgtgtttattgtaattaaatatttataataagatcttacatgattatattataataaaaaaatttatgttgtaaattactttgattatatatctaagttacttttatcatatatatataaattacttctagattctattaattactttttagacatacagtgaacagtttactttattggttagttttataatatgtttattaaatttaatttctagatagacttatgtttctagccccacaacagatttacttttaatgtcgtaacaagttactttcttctttttaagttactatatgtaaattacttttaagctttattgaatttatttttatatgtctaagaagtaatttaatgaaatctaaaaataatttagatatattataaaaaaatgtaattttttatctaaaatataatcatgtaaaatcttgttataaagatttaattgttacgaacataacggtgtaatcggatcataaatcgaataagtaatttaggagaaaatttcatttgaagtataagtggtatgaatatattttctacttacttgatggactactactttaaaattcttccgctcatgcgatgtcatcgctggttacgactaaacgagatgctctcggtttagattttaagttgaaatatatatatgtatgtttctcacaagcagaaattaaatggagaaattaatatctgaaacggaagcacatacaaattaggcgtggacaaacatctctacacttgtggaggataaataaagaaattaactagctaattaacttatcagtggtgttcaaggatttaacttttttcctatttaattttctaataagcatataaatatattaatctggctgaattatacatgcaatatgcagctatccatttcaacttgcactgcgccgacctgccaaaatgcactgaacatgaatgcatggcggattgccaccgcagaggtttccaggttggtgtgggactagtggattgcatggatggacggcccgatcaatgttgctgcagacatgggcttcttgatcatcgtgatgacaagttaacgactaattaattaggcgatggattaatttctcacatgagcaatgtattattgtcaatgattaattacatgtgcaattaattgctgcaatgagctgatcgatctcttcgatcttattgctagctcttttcatgtatgtgtcgatcgatccacctagctatttgatgcggactcaataaacaaagtttacatgggaagaatttggctctctataattggcttgatatcttgacttataagcatcattgtacattttcatactgttcatgtggagctatagcagcatctaaattgagtgaattaatgggtatagaaaaataagacaagcagcagataaagacgattatatatacttgactccggtcaagtagctagcacacaattaactattgaacgttgtataggtactctctcatgttaataaatacttcctccgtccaggattataagagattactaggtcataccccgcgttttgctgcagtattcatggatgagtatatgttaaatatttttgaaatgatgaaagttgaaatactgagaaaataatgtgaggaagatgatttgacacatacttgtcaatctctataatataatattgtagatgatatgtgtcatgcttgcatgagatttaaaatatgctagaatagtaattgctagtgagtgaagatgtggtatgcttgcatgggattttaaataagctagaatagtaattgctagtgggtgatgatgtggtatgcttgcatgttgagttttaacttctaataattgttagtgggtaccaactatatggaaattgtagatttcccatttagcaataattaaggaagtgtcactctggtgctgaatgatgaattagcaaattagatatgtaaaagtacacactgctgctgatggggtaatattattccctattgttttgggttgtgtttagttagttagaagttttgggaaagatgaaagtttggaaaaaaaagctagaagtttatatgtgtagtaaagttttggatgtaatgtgatggaaagttagaagtttagggtagttggcggtgaattaaacacggtagggacggtagaagtagtcctagcagtactttttctctatttgttttttagaaccgatggggtaaatgaaaagttgttgctgttgatagtgtcattgttgtccttgcttgcctcgggacaacaaaaataccatatattcttgaacagagggtcatgatcctttatattcaccgaaggagtacgaaccaatgtcatcttaatgtcaatatatatatgctgaataaataagttaaatgggctaaattgggttgggcaggccatgagagtttctagagtttaccttcaaacttttcgtattcgtaattctgtatttggattcaaattccgaactggactacgcttctactgcccaccttctccccttagttaagcaaggtcgaaacaaattgtatttcaaactttatacatattaattttatataatcatgaaaaaactttatatttcaaattttctactacatgcaaactattatttgagctattctctcgtcgatcgaaaaaaatatatgtagtaactatctacataaaaaattacacatagagggtttctacgtagaaatattcgtataaaaaactttttaaattaaatttga

SEQ ID NO: 44885 - DNA, 884 bp, Oryza sativa
ttcagtcagggccgggattcatcagccgaagacttgaacaagcaggagtagcttctgctcatccatcacggtcaatctccaacagcagcatttgcagtcagaaatcactcgctatcatatactcctatatacgtacagcatttgggcaaatcctatgacgtacattttatggattcagaagtacagatagtcaaatacatgtaggcgattgcacttcaaagttgggtgttggaaactgacgaaagcatccatcaattatcctctcaagtctcgagtcaagataaaaccacacgatgattcatttgattggcttccaagttttgggttattaagaaattaaaaggaatcagttttactcgctcaaactatttcatctctgagaagacttcatcttatgttgctcctttaactatactaaaatctgatgcggcaaatacccctcatgtgtgcgtcgtcgcggtcaatttctccaacagcatataagccccttctatctctctctcaaagaattaattcaaggctggcttctctgactgaattaatcaaatgctctcaattcacaaattaactcgtatatatatatgatccatctgatttatttggcttcaggagtttggattactgcacccagtagttctgtatgttcctcacttaaatgcccctgatctgtccaaacaaccggtctttttggcccggaataagtccattttgcctccctcatctcttgcgcttccgtgaataacatctctcaaccggaaaaccgggtataacgcctccttcatctctgaaaactagagcaaatcacctccctcgtggttttgctggcggtttcgtccgacgtggcgttgttaacccagttgacaagctgactcagcgtggtggga

SEQ ID NO: 44886 - DNA, 742 bp, Oryza sativa
tcctgcagccctatctcttctccaggagccaacgctgcccgtctatctttccggcagtgtttatcccgtcatggcctgagatcatcacaacttggtacaatgtcatgggcattgggctggaaggctgaggcttataggcagcctataccaattaagttagagataagattattagttagtaagagataagataagattaagttagttagttagttagttagttagagataagataagattaagttcttacttaggggtcaagttgtatcatccatataaggatgtgattatatctaggtatatctattatcaattaggcaataaatatcaattagtctaatctctccctcccaacaatgtttttcttcctagcctaaatctacatcccttctccaagagccgatgctgcccggctatctttccggcggtgtttatcccgtcatggtctcaggtcatgacaacttggtacaatgtcatgggattgggccggaaggcagaggcctataggcagcccataccaattaagttagagataagattattagttagttggagataatataagattaagttaattagttagttagagataagataagattaagttcttacataggggtcaagttgtactatctatataaggatgggattgtatctattatcaattgggcaatgaatatcaattactctaatctctccctcccaacattggtcttcttcctagcctaaatctacatccctt

SEQ ID NO: 44887 - DNA, 1003 bp, Oryza sativa
atatatgattcaatcctttgtttgaaaagcgttagtagtaatttttttttctttgtaggaatgaaattctataagactttcaaacaatttaaaggggcctaaagtagctatcgttaaacctaattaataatatggcatcttttaccaattataacaacgaatgatttaatactatgccgacgaacctcctataactcatgggatgttagaatggacaacttcattatcatgaagtgtacaccattgacacgacatcaataagcattactgtacattatacgtagcgaacacacgtactataaaacgacactatagatcgaccacgacccttctctaatcaatcaggagtacgtgcgtcgatgatacatgtttccagaaagatcttccctaacaagtccatgatagcagggtgatttttgcccacttaaccacccaagtgttccgctaacatgatcaaccacgtcattttccaaggtgtcaaatgaactacacaccggctgatgtgttgtgtaggcagcaggtatgcaggatcagctcaaccaaaaaactcccaactgcccaactgtccggtggggcccacctccaaccgtcctctcgcggccgcccagcatgtgcgggatattttcctgcgtctttttctttttttttcctaccgtttggtgggttggccgacggccgatcgaattgaagcgcgtgtggtgtgtggggcccgcgggattctgtcggcgaagagggcggcaggcgaagattccgccacgtggcggcccggctgtgcaggtgagtgtggttcctccatttgggtgtttgagcttctggatttttcacattttggtccttttgaaaaacttatttcgcaagtagacccttagaaaaacttatcccaaaaatggtcctttttggggcgccagagtggctggcgccgtcgttcaacaggacggcgccagcctctttggcgccgtccccctgccgacgtggcggggcgatgctgagatggctaggggga

SEQ ID NO: 44888 - DNA, 1742 bp, Oryza sativa
  unsure (1)..(1742): unsure at all n locations
ggcttccgtgccaccgagccaagcgccgagcgccgccgcaccgccccagcctcctcctccccaccgatgccgcccctttctcctctctccttcccccaccgccgccntgcgcaaggccgccatctccggcgcctctctcctctcgggcgcgcgtgaaggagccaaaggcagagaagagaacgagagagaaaacagagaagaaatcgagagagcagaaaaaggaaccgagagaagggaaggataagagagagagaaaaaataaaagaaagagaggaaaagaaagactgtgggatccactggcgggccccaccatcttgactcctctctgtgatcgacctggaaataccaaaaagtctagtttagcatgaaacttaattacaacagtagttatacagtgtcaacataaaagttcttatgcaatgtgccactgtaggacgacgatatagctatgtcaattgatgatgaaataatgaatgatgtttgacaaggagctgatcagctgaagccatgccagcttgtgagcttggtgttctcgaagacttcaaatctatatcctaaaaaaagtcggacaatattagttatgctgtaatcctatcatgtaagccacattgtatgctttagccacattgatgttgaagtatcattgaactttatttatattatttatcaatcttattgtcaacttattaatcatcatataacggtgttgtgtggcagcgtaatgatgcaagggtgaaattataaggtcatcttcatacatagttaaatgcgggatgataccacagttcgctgtttccgacatgaattttcgacttccgtccgatatcggtatattcccgttccgacggttccgtttccgagataccgatataaccgatatcgttaccgtttccgagtataccgttccgattccattttcgagaaaataaaatgaaaatggaaatggtagagggtttttccgaccgtttccgaccgttttcatccctaatctcgatgactcgttatctaaaaaaatcttgtgtttgatttgattgaagtgcttgattaaccttggtagtaatgagggtttataattaggattgtgcatttcttaattatttaatgatttttttcttgaaaattcatgtgtgaccactacgatcgaaccaagtacaaatagttacgttagtcctctttgaaaagatgtagaaaatataactccaatgtagtccctcctctttttttttattacgtccaacataaagataaaacaaaggaagtaatttaataaataataatttgacaatttgttgtattgggttgggtgtgcatgaatgaattcatataaaggaggtcactaaaagtctacagcactactccctccggtttcattttaattggcgttttggacaatgacacggtctacaaaatatacatttgactttattttctattataatatatacaataaataaatgcatgtttatttttattatagtgttttgaaatacaaatctatatatgttgttctagtttctttaaagtaaatatttttaaagttattgatggtcaaagttacaaaagtttaacctcaatcttgtctaaaacatcaattattataaaactggagggagtacctatttgaaacaaaaatttgctggaattgttgaggttgattgtttaattgattaacgtaacaatacattagtattttgagaaataaaattcacaaaaaccttgaacaagtgacctacacaatgcaa

SEQ ID NO: 44889 - DNA, 696 bp, Oryza sativa
cctgcaccccgcgtgtgtcatctcatctgattggttccaatagactcaaaatgtagggcattgcacgcatttttcagtaacgcgtcctcgtggcatgtgagcatttgcgtattaaggggaaaggatataggcagaagcatgggaggcatatctggcagcagacgtgtgtatagcatgcgacagcacggcgcttggcagcagagaaatttcactctttgccatccaattcatatctaattatctaaagccggcggttttcgatcggtccatgtggcggaataatttgcgtgcaaatttgataatgcgctccgtcgcttgttcaatataagaaaggaaattaacccctcgaccaatccggggaacacatattaggcaagtgaaaaaaaaaggataaaacaggcgctccgaatctgtaaatgggtcgcacaacccagtcgtgggcttgctcgcctggtggctgtcacggtgttcaactacggtctgcattacaggatgagtaaacagaaatgctaggagataagcaaaagtagaggaagacataataggaaaaaaaacagaagtgaaaataaaatttataaaacccaaccattcatccatccatctatctatctatctatctatctatctatctatctatctatctatctggctatctatctactccccccgtccttaaatataagagattttggacgg

SEQ ID NO: 44890 - DNA, 694 bp, Oryza sativa
aagatatattttagtaaataaactattttacatgattaaatgataaattcagtagaaaacatttaatgcagatgactattaattatgcatccaaaggtgcattgattgtcctaccatattttttaaggaaaaaaaagatagccacaaccataattgatatgttttttaatagatgtagattttacctagattttcgttagatgttttcaaaccattaaaaggttcttatatataaattgcttgaaaataccaaataaatctattttttaaaaaaattaaataattaaaactctgttaaccgtacgctaatggttttctcgttctttgtgcacgcttaatcttctatcctaaccaaactggagggatgtagtagtatgatctctcagcatttgcccattgctttttcgtcgaactggtgatcgcccttgtcactctctttaatgatgctcagctttctcatcaatctaccttatgctctttttttcactgattaaccaattgaataatttcaccttgcaaaccaagcaaagagagcacttcatcataagcaagcgagaaaccttcgaaacctcctgcgattgggctgggccgggtgagattttcgtgggcctttggaagttggaaattttgggtttcggatccaaattccgaatcggacttacatcaatcaacttcaaaacaatcgccttccctc

SEQ ID NO: 44891 - DNA, 673 bp, Oryza sativa
aacccgaattgggccacatatcaactaggctaaaccctacatggcaccaatgacacgtcagcttcaaccttggcgaacacatggcacatacgtggcgaagcaaatccgtgacagaaaattatcctacgtggcagccatccatgacggataattccgtcacagctcaccgggctcagcccggcccagagtgagctgattggtccaactgtatgagttagacccaataccgtttctggccatgggcatcacagacggtatcagagccgactcttgcaacccttgtagctatacatgtatatgtgcacgtacatgggcatacggtgtatatgggatgatcccgaagtgattgtatggcatgatggatgtgcgccgaaatcgtacatatatacgtgatgctaacagaggaccattcttggtcagtttgaaaagcccaggtatagatggagttcgacggggacgtcgaatcttcgagtgtgggtgtatgtagcgccccgcaataattagagaaaaagagaaagaagagagagagagagagaaaaaaaaagaaaaagagcaaagctagatagcagcccagcccatgcagcccagtagctagccggcccaatagcaaaaaccagcccaagcatgcaagcagcagtgcagctagaagtgcagagagagagagagagagaga

SEQ ID NO: 44892 - DNA, 1467 bp, Oryza sativa
atcaataagtacaataacccagtcaaagtacaagatggaaaaatggattactgtgtttaaaacatggaaaaggtgcatatttcaacttaattttgtgttgtgttcatctttgtcatccactaattattgaatattccaatattttattttaaggataaaaatgttttaaataatgaagtaggaaaacactagctcccgacaaatctaaataccaacatggcatccccaactgtagttgagtcagaacaccgtggatcagtccaaaattctagttaggaatttgtattaagaacttaagatcctagcctagcacggaaaattcagctttccaaacaataaccaagatggaaaatcaagccaactattacctatgatcattcttatcttcttccttctcatctttccctatagttttgtggtttggtcaaattaagttacactttataaaatatatgagaaattattagtgttttaggcacaacacaaacaatgtgttggtaaaaatcgcacaagaattttttttaaagtcgaattggtcctttcttctatttctcgttgttgatcaagattgaatttaggtttgaaatttcatagtgttgtgatagaacattatatgatactgatttgtttctaaaaaaacactaataatatgtggcaaaaggagattgaactttaaagatattattttttatgggtatatatgttttgaaataggttgggagtgtggatgaagcataaattaagcatgatagctttttctttattaaatgatttccttttccggtccttatttttttgggttttctaggtatggagatttttctcaagtgctgggcacgtgctacacacaaggcgtggagaggggtcggatggatgactcccaatatttcgtaagaacctacatatatcttttgttggtttggaattttgtagatgttacaatctcaggttgtgcctattgcatgttttaggaagcaatgttatctgatcgtccgatcaatcacgattaattgtcctgattggtcccttgactctaatcaaggacattcattcgatcagctcgatcagaaatctgatcgtccgattaatcatcgataaggcgcgattgatcatctgatcagaacacctatcgatcacttttagaacaagtcttaggttttagcacatgtgaataatgtgctactactgctggttgctttatactatgattgctttctaaacatatgagagaaactacttggtatctacataccaaaacaaataggaacaattgcttatttgagcccattctaaagcctaactaccaatctgaccctgtattttcgagtatgctcatttcaccctctttttcaaaattgaacattccgtctgaccctatttctatacaccgttgggtttcatttagggaaaagaaatgaaatatatttactatttgaactgaccaaaataccctcgaagagggttgaa

SEQ ID NO: 44893 - DNA, 944 bp, Oryza sativa
aggggggtaattcgtccgttattgaaagtttagggtgagtgatgtctgtttttgaagttcaagggggtaattcggtcgaccacgatagttcagaggtgtaattcgtactttttcatttggcatataatgatgtggggatgtattatagtatgtatggtaccctaaatggttctggcttgaactgcatctgtctttataacctaaatgatgtggggatgtattatagtcaatgacatgtgggccacagggaggaaaatactcgaaaattccatcattcacatgtgggccatagggaggcaagaggcgcaagacacctggtagttgggttcttcttcccagcatttgcctcttatttccatattttcctgatgggtaccaagattgataggatttgtccaagggcttcaatcccttgttctccttgttttgtgcatgaggtgctttattccctttctgtttttgataaagctaattattcctttttttacttttttttagaaagccaactgcatccatatgagcttcagcagctaagacaatgtatgcaaaatagtgcaaggatgcaccagctaggaattcccgcattagtaaaagtgcttggaaataaaagagtgatcccgcaaaatgatgctacagctaaccatagaaagcacacagattgtgatcctgactacgaacctgagcttgatgaaaccattgatggataattgtgtgctactaacaacgctaaggtgctagttccatcaatcctgtgatgatggtcatgtgtcttctttgctaaggcaatataatacaatccaagcctttttgattgatctatgtttgcatttgtgttcaggaagcatgtagtagcaagaaaaggcattctgacatggctcctggtggcttcaaggcgcgtaaaaagacagcgcttgcagttcggccagtgaatggagtccttacaa

SEQ ID NO: 44894 - DNA, 1084 bp, Oryza sativa
gataaaaaaatagaccgcaggtatttcatacaaaagtttaaatgcatttgtctcccaaaaaaaaatacaacaatacatgtaactagtatgtacaattgattacatgcaaaatttgcccatcaaaacatatattttgaagctagattttgcaaaaaatagttagaacaaaccttgtcaaaatattaaaaaaactccactttccaccaacaaaatataacaaaaatggagccaaatgaagcaggatagagagttcttcacctttcgtatagagttcaagtaaaaatttcgagttgaaaacctccccccctaattggtgcttgctttaggagagagaaagcttcgttttcaaatggtcaagctcgggcctggaggagcatatatggccgatcatcgcatgcggtcccttaagccagccgcatgcgaagatccattatcgcatgcggctgtcttaagcagccgcatgcgataatggattttcgcatgcggctaatcaacccgctcccggggggggcggtttttgcaggcgccgccacaagcggcccgcatggaacctaccgaccccctcgtacagaaaaacgatttttgtagtagtgtaattaaaacacccagtaaagttttggtgcacccgggagagactcccatcctggtagtgaggtcgtggatgtaccccttgcaagctccgcatctccggcggcttatgctacgaccgtcattttgacatcgtatgcagacggatgccttctaagctgctaggaaaagctgagtgttctcgtcttcggatgagtggttagtgcggcaagctgattggaggcgcgttgttgaactatcacggagacggagacgacgatgtgatggagatatcagaaatcatgatggagtgccatatctattatatactaaaagtccattaacctttctaaaatcgctctcaagctgacatgtggcatcctaaaagcgctctcaagctgccacgtggtgcgaggagaggagatgaggacccacaaaaaacgaaatcctctcccacaacgtccgcatgtacgcatgcatgtggatgctttccttccatgcttagcggcaggattac

SEQ ID NO: 44895 - DNA, 797 bp, Oryza sativa
gacatttgtgtacgtatctgactgtatgacattcaacgcatcctattctgtaaatttttttgacaaataaattaatattttgaaagcctgttatacaaccattgatgtcaatctatacctaattaaaaaaacataaggcttctatctataattatcgtccgttttccttttttttcctttttcctttttatttcttttctctgttttttccctctttctatcaccgtttttccggtttatttcttttttccctatcttttttttcgccctttttcgtcaggccaaaccctatttttccctatttcttgcggtttttattgtcgggccaaaccctagcgcggccgcaggtcgatttgcctcccccatgcgtttcctccttcaattgatggcaaaagccgactccccaccactctctcatcatttttcccttgaatttccctttcaatttgcttttaattcaccggatggaattttcctttcgtcgtattgaatctccttttaaccatagtcgtttttgaatctttatttaaccatcgtcgtttttatcccgaatttagcggattgcttcgattttaataaaaaacgaaaaagggagatcgagtagatcaaaatccctcaaaaattttggagatcgagaaagattcgatcggatttgatagagatgattaattccatcattgtacgggcacgggactggtcgagatgggcctatagcttcacttgtgggctgagctgaagagaggtaggccaagcagagggaggtttcgtcattgtacgagcacggactgggggtgcag

SEQ ID NO: 44896 - DNA, 587 bp, Oryza sativa
tattggttaatgtcaagggagcacctctagcctattcaaattaaagaacagattggtaaggggacataagagaatagtaaggttgcagctattgtagaagtacttaggtggatagcagtaaataaggattacaataacaatgattctgaatgtctataaattaatagatcagtaggcattaaagctgcaatggcattggataggaacttacagctaatttcatcctaaacattctgcggatcgcagactgattcttgtagtccttccatttgggaaacacaggcacatggttcctcactataatgttgcattcagttgcaaactttgcagcaacgacaggctgtagcggccttatgtccccttctttgatgaccacgggcagcttcccacgccgagatcgggacaacctctgcagagctgctcctttattattccccctgatccatggttcctcttctgggtgtacatgtacaaataattatagctagtgagctgaaagaaaccttgatttcacatttaataatacaataaactatattgaactgaaacaacatggctaagaggattagggtgaaataacatgcctt

SEQ ID NO: 44897 - DNA, 598 bp, Oryza sativa
gtcggttagcacgtatgtatcatgccttccacgcgtgtgtgatgcaactggaacaatagcttgttgatgtttgatgtttccgagggttactatctacgagaattaatggcacgtatttgagttgggattactatatgggataattaatttatatcgatatatatatagagcacgctttttgcgagacaacgtacggagaagttctttaaatattatcacagcatgataagttgtactagtacttagatagagtgtgttttatacttttctttttttaacttctactccctttttaaacagtgtgttttaaaaaaaatcttaaaatgttacttaataatatattttaatatattttttaaaaattttgagttaatacttaattaatcgtacgctaatctattgttatgttttatctgtcgtgagatgaagaattgtgagcctacgtgtgcttatagttttactagaaaaaagacacgtgcattgcaacgggtaaaacgtttttatcctatgcattatacttccttagttttggagcaaatgcttccttggttttggaccgaacgctcattccttacttccttttcacctctagtcctaa

SEQ ID NO: 44898 - DNA, 676 bp, Oryza sativa
agattcattaacatcaactagaaaggaagcccgcgcatatgcgccggcatctaatttaatgtgcttgaaatattactctacacatgtgaatataatgtttgtatatgcgtgattgttcctgattctattggcaacctatttttttgtcaatattttgtttgtgaatattttgaatgctaattatccttgcaacacataaattctaaactaaaattacttacaaacatgaaatctttaattatagaaaagtattatgtcgcaaaaataaagttggttcctatgaactgtcatctaaactatatgttatttttaatacatatcaaatctttgttttggagttctaaactttaagaaatttgtgttcttaagaatagttattgaactttaagcaaaaaaaaattcaattgatttcttcaatttatattgggctttggattcaacaaattttgtttaaatttagcccaaattttgtctgaattccagtcatcctttctgtttctttgggaatattggaggtctatgttctatcaattgttcttaaaatgcttttgatctcttaaaatttagatgtaaacataactatgttgagtgtataacttggtatgggataaatgtgtcctttctaatgcagcgagaatataaattaagatagagatattaatctccagttgaatca

SEQ ID NO: 44899 - DNA, 583 bp, Oryza sativa
  unsure (1)..(583): unsure at all n locations
acggagggagtatanagcttgtgattagttaagcactctggtactccctccgtcccagaaccagaatatagaaagttttatacactggtggagaaaccatctttcgtcggtcgggctaattccacaatagtcccggttgcaaaaaaaccgggactaaagatgatctttagtcccggttaaaaagggtaacgggcatatttgatctttagtcccggttggtaacaccaaccgggactaaagatcatctatagtcccggttcaaatgctgccagggcctgtcaggccccccccgggatctttagtcccggttaataacaccaaccgggactaaagatcgtaactttagtcccggttaccaaccgggactaaagatcccggcgatctttagccccggttcataacaccaaccgggacaaaagtcccacccctatatatatgtcttcttcctcctccagctcgaggaagcttcaaaatttcttcaaaaaagaggggaggtcatgccaaaatttctagtgaatttagtttggtaattatatacaaatcggaggtgcctaaaaggttagcaacttcatcctccaatgtt

SEQ ID NO: 44900 - DNA, 872 bp, Oryza sativa
gtaggatacaaattgggtctaatgggatgagtagttttgcctagttaatgtaatgacattttgcttctataggatctttactgtaatacatattagttaatagtgaccattctacagggagacaagtacaaagaccaggaacttgatgcagtggatatgttcaaggagtgccactacagtaaaaagaaaggctacacaccagatgtccagcttgctattgtaagttaacttttcacaaataaagcccaaccttaatttttgttgctgcgtctcatgaaccatgtattttttcttgcactactaggatgaaatggaaaacaagctgtctgaacatgcagaagatgaagaggccccttccatgaccgaggtagttgctggtgttcttgctgagaagaccaagaaacccacatttctgcagactgtggggattcagagcagaaagaaaggcacacttaaagagcaactagctgcagagaagttggcaaaggatgacctcaaatcacaagtgcaagagttggcgaagaagctacaagaatctgagcaagcaagggtggcggaacaacaggatatggcaaggaagcaagctgagactaatgcaaagcttgaccttctgttgagtaagattggacaccactagccaactgggtaagatggtctaggtcccttggccacattgttgcttttttgttgaatcatttctgctgctgttgctactgctgctgctgcttcgctatggtgctgtagtgggcaaagtgacatttctgctcttgttgctgctgagctagttattagctccttttgttgtgatgaaaactttgatgctggagtggcaatgccttggacttgtgctgtagtgggcaaagtgacatttc

SEQ ID NO: 44901 - DNA, 1271 bp, Oryza sativa
ttcctgcagccccaagcttcaactgatgaaacatcaacatatccctacaaatcgaagtaagaaaaaatatgtaacatcaaaagaatttatacataaatattttgatataatacaaagaaacatgtaaaacatatatgggatgaaacatggaaaaaatgacaaaaaaatatgccaatccaaatctaggtccttcttactctccgatggctggatctaagattccttcgatgaactcgtgcctatgacgacccagtgctccttaccttcgatgatcttgccttcctcattgtcggagtccacagcaacggccatctccttcattgctggttcgccacgatggggtcatccccctcctcctctccactggtgacctcctagatgtcttcttactctgcccgccacaacagtcgttctccccgtcactatcgccaccaggcggccatggaaacaacaataccatcatcaccgcaaccttttcatgtatgtggtgtgaggtttagagagagaagagagagaataaggggatagagacctagaaagagagaaataaggacatataagtgagtggtgcgggtattcgattttttaaccaggatcggatgcccaacccagtgtttttaagaaagtgttccaattttaagaactagtgagcgtgcacgtgcaaggcacgtccatacatacatactctctcaggaattcatcttggctctagctgttgggcgcgtggctccagcgacaagttggaggcaatagcaacggtgattcacgacccatggcgcagctcaccctctgccgttgatcatgatccatcctgttcataaataatcgcacaggttactaatgcaatgaacaaagatatctaaaggaacaatatattcttgcagtgtgtgctatagtccttccataatttgtccagctcatatggcccaaagcaaagtatttgttcaaaatatatgtagttctgtgaaatttactttgaataaaattatgtctgactaccttcaaatgttttgcatgcctcttgttcaagcaaaattgggtgacgtaataagaaagtaggtctcaagcaccatagatgcttgcctgcaaaatagcaattgacataatattggaatatttcctgtgcgaaatttgttatctacggccagtagcccttatgtgaagaaatatcagattgatcttaaatataagaaaagaaaaatattgattttcagttgcttatccagtgtgtagcagcatggcagttactgaggatgacaatatgcattggt

SEQ ID NO: 44902 - DNA, 517 bp, Oryza sativa
ccccccccccccccccccccccacaaacccaatcgccgatttgccgtcgtctccaaggctctcctccccctcaaatacccctcctcctcccttccccttcatctcgccgccgccgcctcactcgtctcgtgccccccaccgcatctccccgcaaacggaggactcgggaaccctaggtttactcccccgccgccctatgtcctcctccgatcgccgccgcggcggcaacggcggcggcggcggaggccccgtcgcggtgcctcttcccgcgccgtatggcgaccccgctctaccgcccctgatattcccccaccgccccgcgccgccgcccccgcacccgatcgcatcggcccgatcctgccctcccccaatccggctcggaggatcgaccgcagcagcagcaacgtcgcccgcgccggaggaatcatgggggtggcggccagcgccgcggcccgccgcaggagaggccttccgctgcgccgcccccgccgccgccgcagcagcagcagcggcagca

SEQ ID NO: 44903 - DNA, 500 bp, Oryza sativa
cccaaataaaaagataaatacgtgggacccacatgtaagtgagaaaaagtgtgggatcaaccatcctactcagcaatcttcttctcttttcctttttatcttcttctgtttcggttttagagggggagcagtagcggcacgtggacggaggcaagcggagcggcggcgttagcggcggcgggaatggcatcagtggcggcggcggcgctgtgggcggaggcaatggatacgcatatggatttgtgccgcacacgtacagtgaccacggtaagcatctaaacagcccattatttcccttattcgtatgcttatcctaatggcttattactaatatttggcaaataaaaatgcatttgtaaataaaatttttatatatgtgttctcagtgacttaattaaaatcaaatgttgtagaataaattacgatgaaaaaaataaaaaaacttaagttcaaaaatttaaattttgacttataaatataagcataaggcaaacaataaa

SEQ ID NO: 44904 - DNA, 714 bp, Oryza sativa
attcctgcagcccgttgtagggccgctgatcatcacttgaccaacgcggcgctctacagtttcgctgttcaaacctatagatcgagaaccaaaattgataagtcagggggaacatatacttaaggaatggaacccagaatacgagaaaaataccctgaggagaaacccgggtcgcatcctccggccctgagtagtcaaaggctagatgggctcgagcctagagcggctggatccgtctaccgatgaagtcagcagcgacttcataccccgacaaccctcgcactcggaggtcatcgatgacatcgatgaaagactgaagggagggggtcaaggcgggcttggcagtccaagacgaaatattgttcggttgctcctcgggaacaaccaagaccggatccgaattttctaaccacctcacccgccatttactacgagaagaggggcactggaaggggatatagcgcgacttcaggccatccctaagtcgaaaaccaacgcatcctgacaccctgttggattccatccaacgcaactcatagtagaagcgaaagaggtcaagaaacggctctacccctgtcggtgatatgggaccgggagtatcatgaccagaggcttgaggcagacgcaatcgcccacgtggcctggcaccttcggggacgtcgggcccgagggtgaggtgtccgccctcctcctgatttccccgagggggggggg

SEQ ID NO: 44905 - DNA, 672 bp, Oryza sativa
gacgctgcgtcgccgccattggcgaagcggccccgcgcgggcgggcgccgtggtgttgggcgcggaggcggaggcgaggccgtctcacgtcgtttaagtccccgtctcgggcggcgaggaaggcaaggacgaggttgacgtcgaccgccgcggggtcgtcgccctccgcgctcggcggcggcgagggcgcgctcggcggtggcgcgcgcctctcggagtcgctcaccgctcggcaccggcttcatcgacaacccgctcagcaccggcttcagcgccgtgccgtccctcgccgccatccccaccaaccagtccgtcgcccgggcgtcatagtgcaggcggcgacggggaaagagaaggcaggcggcggccggcgcgcgagagggcagcggcggcggtggggaaagagaaggcaggcggcggggagggaggggacagctatcgttgcacaatgtttttctggtgctggatctgctggaaaacgcatgcgagtcattacttgatagcatcgttgcagagaatgcaaagcgtttctgcttgatctgagtgaagctatctggaggcaatgtaagcatcatttttccatgtaaccatgttcagtatctatctatgccatttgattgcgattcagataaccagaaaacgctcacatcagcatgcatttacccaagttca

SEQ ID NO: 44906 - DNA, 686 bp, Oryza sativa
attcctgcagcccctaaatatgttgatggaggatttttcttctctatgttatccaaattgtgtttcttgggtaaatatcgtgaaaaatcttaacagtatatgagattgttacatataaaaactggctggttatgcttgtttaaaaataaaaagctggctatttattaattggtgcaaaagactcagacagttattatgtgtgcaatcttttgtgtgtaacattatatcaccgtacttctcatgaaacttttggccaattttatttcatcatttgctttctggtcctttttgtaacaatgctctagtgtcctgtatacctgaaaatatctctgagaagttccagattttattatcaaatatcaaattatcctactgatgcccgtcgaacaaatatagttctatcttcatttcactaagtattgggacatttttattggaattgtatggaaggaataatgacttaatgtgcgagaaagctagctagtaagcttcctagatggttgctaggagcagactactggcctgcaaaaataattttgcagtatatctcatgtaagattaatgatgcgagagcagcactctagtactgtatggctaaatcataatagctactccctccatttcataatatagcaacctaggaccagatgtgacacttcatagtacaatgaatctaaacagtaagc

SEQ ID NO: 44907 - DNA, 628 bp, Oryza sativa
tgctaattcacgcgcgcgagctttgttgtcgtacagtactacagtcaaaagttcgcaacacgcaagtatgttcattttttaagacagcagacgccgctcgtccatccattttactaaaaatataaatatattttttatgacttgcttttattatcgaagaaattataatcttaacttatacttttacatatttgtaataaattttttaataaaacaaataatcaaacattataaaaaatcaacaatatcattaaaaaaataaaaagggtagtatattctactaccgagtagcctgtttagttactgcttttagcactgtgagccgagagttttggctttggccacttgatctgtactttggctttggctttcactgccttttctttgatcgacgaacgagttcgatggtcgcataaggtcgacttaatataaataagaaatatgtaatggacacaacctatagcataagatcgacctaatataaattcgaactttaaaggttcggccgagctgaaagattgaaaaaattacttgtttttcatgcgcatgttttccgcactattaaccgttgtaatttttttgaaaacaatatatatacaatattgttatttaaaagccacgttaatct

SEQ ID NO: 44908 - DNA, 761 bp, Oryza sativa
tcaccgccggcggcggcggcgatgccgaccgagctgtcgccgaagcacgacgactcccgtgtcgcctctggctttggtttttcttccggcgagattagctgctgcttgctgttgctgctactgcaataaaagagagagttgacgtgacacgctgacatgtggggtccacgtaggttccacgctgactcagccgccacgtaggctaaaatcggggtcaaaaccaccgagggatctaaagcgaatggttttattagttgagggacgtccggtatctggttttgcggtttgaggacgattttgtatctcgacgacaaagtgaaggaccttgggtgtactttttccttatatttgctcgtgaattgggccacatgtgaaccgtccgatcaatctatcgttcatgtgccgcgggggattaggtgggccatcgaagcaaggccttagatgggccatcctaacctgtggcccagcaatcatcatccccttctccctctctctctctctctcaaaaaaaacaaaagaaaagaaaagaaaaacatccctttctccttcctccgatccttgtcccccaccactcttcccggcgagagctccggttaatgcggcggtttgcgtccgccgccgcttttcgcctccgtctacagatgggtaagctgtcgtttcctcctgacatatgcgagagtgcgtgaccaagcctcgccgtcgcccgtaccggcatggcgcatctgttagagcaggttagcaaactagtcagctataaacat

SEQ ID NO: 44909 - DNA, 924 bp, Oryza sativa
cttgtggttcgcatattttgacttaaatttcattgtcaaagtaccctctcattctttagaaaattaataaaatttctgccaatatgaagttaattgtgcatcccatacttatggacaagtatcctctacatgccgttgtgcctagagagcgtcgccagccgttgtcattgcagtaaggaataacaagatattatcactctttgcctccttccattctcattcatcatattacataaaaaagatacatatacttttccgtaaaattttattttccgcacattataaataacattgtatatgaaatgtaataggctattatttgttatagaggggaagattttgtttcattaacatggattaaactaatttattgataaggtgagtacaaaattattaaaactttatagaattccaaataaaactactactaatttatttctttataggtccaccctgtcagatttccatcaatctagttctattgtgcctgaaaaagagaaacacataaaactgattttgccgcgggtttgctccaaatttttgtgtttgtacgcttttttcctccctcaatttgccgggttttcttctccactatcggaagcagttatgatcctaatagagaaaacaaaacccatctccttactcctgaacataccgatccaatctctccagtcatcgcagcttctccacagcagatcccggcgcccgccacggccgacgacgtcgtcggtgcggcggtgcctcagccctgtctgctcgtccccagggcaagatcacccgcctcaacgcgcttctccacgccgtcatcgagatcgaggtcaactccgacgcgctccagcagccggcgcgcgccgacaccgagcacgcctctggccacagctactgcgggccgctccacggcgtccccatcctcaaggacaacat

SEQ ID NO: 44910 - DNA, 724 bp, Oryza sativa
ccccctcgctactttctctaccgtatgtactagtaattattatagttatactctactttaaatttgatttcatgctggaactttcttaggagtaatatgcaacttgtgacctgtttttgctagcattattgttgttttgaatgaagaattgatggttgcaattggcagatttctgctaacccgtgaatcagtaattaagttatgaatggatgcaaattctgctaaatacatagctatttttattcaggatagagcttcgagctacgacatgaataatactcatgtacatgaatgtacatgttaatacatacattaggataaatataataaagaactgcatgattgggtagtgtgaactagcctagcaaaatgcttgtgtttcctattttgtcctaagaggagttctgatttcagttctgttttttaaatcgtttggtggaaaatctgtcagtttttttataaaaagatatgtggaatgatgtagacactcccagtcttatatacggtcctcatcaaggttgttcaagttgcttaggattttattcattcatccttatgtttttttttgtctaggagcaacatctttgtaccatgatctaagctgtcaacgtagtatgatcagccatctgtggcctttcaattattctaattatgcatgtgacaagattgtcattttttttattcaattcagcgatctccaaggttgcatgtggctgcaggaatt

SEQ ID NO: 44911 - DNA, 661 bp, Oryza sativa
aacatgaagagaatagcggaaagtaaactgaacataaagaaagtgaatctgagttgcttgttcgtgggagctattcccagttatgaaccaagtgatatgttcgaagatagtctgcagaggtcagtttaaaatcacatgtaacagtgaagcctcagatttggcgggataatgattagacaataacaaatccagcagtaaagctatttgggaagacgtcaaagtatgtcaagtgggataaattggttctcttgggaagcataacttatagttagagtggttgacccttgcatcaaatagcagaagtagctatcacccggagaccaggaaagctaatatgagacagttgatggcaagttagaagtgaatgacaagcatgatattcttatgatgacaaacatagtatcctagtaatgacaagcaggttacgacgcatgacacgaagttgataacttgtccgaggttgactccgaagatatgaatcatgagaagttctggaacggaagcatcactgcactaccgcaacctagtctgagtcagccaaaaggtgcaccctggtccaagtcaggtgaagagaagattccatccgcaacaggaggtcaagccaagcagttccgagtggtaaagttttgctggaagttcgtcaagacgcaacggaagaagt

SEQ ID NO: 44912 - DNA, 670 bp, Oryza sativa
aatggaggtagagtgtctgatagtgaagattcagatcaagtctcctcagatgatgaagatgaagtagaacttaaggcatgccctcgttgtggagaaatcggtcatgttgccagctcgtgtgcctctacatgcgttcattgtgaggaagacatctacccgacaggtgtccaacgagcaggatcacttgtttcttttgtgaaggaactgatcatgtaccaaaagattgtcaattcagttttctgctgacaaagaagatggccaaccaacccgccagttccaacggagagaagcatcaaggcaacacaaatccccgccaagatcaccgtttcagcctaactccagtgccaggacagaggaatcgaaatgagaaaagaaaatgccgagtccgggaagacatctgttgcttcaattgtcaaggaatgggtcatttcgccgacaagtgcccaaaaccgagaaacatagctgccggcacgtcagtccacgcaactccctgcaatcagaagcttgctcctcaacgaattgtcatccatgcatcccgaagcagtcctatagcccgcgttgcaacagctccaattccaatgaatgcactaccacaaggtgtcaatgctcaatttcagccccagccaccagcctgacaagacaggggccagtatctgcgttgtacctttgg

SEQ ID NO: 44913 - DNA, 1689 bp, Oryza sativa
ttatttgtttgtttacaaacgaaagaagctatatgttatagaaagtgctactgaatgatagctgaaaaaaggtgctacttaatccattcataatttgttctctgctttgctgtgacattcggatcaacacagccctggagctggaggtgttgactccagaggttagtgtggatagcggcaggagacagctgattgcctttgactgaccgggtaatttctttgccgtgaactagggggaagctttcgtttatcataactttgtgattgggatgccatcgttatgtgtggccattggccaaatgtgttgttggccggtgcatttctgtggtgtgcgtgctgcatgagcacgccagagctcattccgatagtgatgatcaagtctccgagacctagagatatatggacctgtttttgctgaaatgaaatgccacgatttggacagcctagtagcgcctgttgttatcgctgggagctgtaatccaaatatccaatatattcatgtatgactaacaaattcactgtacaccccctgtttatgtttgtctgacgactctgaccacaggaggaaagcatagcacgcgcagcggcacaggtacagagctgcaagcctcctccactaatcaataaaccaaacacacagtgtatcagtgtatcagaacttgagatgtgatgttacttcctttcgatctatttacgcatttctgtgcaaaaataaaaaataaaatttttctggaactgtttatccatttgtcaggtgatttctaaccaaaaatcacccaaattttttctacccttagatttacatccaattgactacaaaagagaataactaatacatatctacttacacaatatttttatcaaaattacagtgcacttacatatcatatcaactaaatttacaaatataattttagttatataggactgtaattttatattttaaagaaaataataaatacatatctacttacacaacatctttattaaaattacagtgcacttacatgtcatatcaactaaatttacaaatataattttagttatataggattataattttatattttaaagaattatcaaaattacagtgtacttacatgtcatatcaactaaatttacaaatgtaattttagttatatatgactataattttatattttaaagaaaataatcaatacatatctacttacacaatattttttatcaaaattacagtgtgcttacatgtcatatcaacctaatatgcacatgtaattttagttatataggactataattttgtattttattttttattttatagtttcaaaaatttgtaaagtgaaaagaaccaggcctaccatccgacgcatggtattatccacgtatgcagcctccaccaattattgcacaaatcctagcgagggatcctatggatagaaaaacatgaaatatcagtcaaaaaaaatcacccgtgagatgtatagcaaaatcgtaaaattagatatggtgtctatcatcgctgcgtttggatgatagtggctggatgaaggcccacggtaatgatcgggtcgtgcctgattaagcttgtgggtgggccgaatccttttgtaagaggagatcagtaaggcccacataaactgcaatgcagcccactatgggagaaggccttgcatgtatgcattgcaggcctgtccccgcggcgtc

SEQ ID NO: 44914 - DNA, 663 bp, Oryza sativa
tgcaagttgattaagcaaacaacctagcatggttacatcacaacccactgatgcaaaccacgcgctacacacacaagcaaggaacacacgactaacaacactaccctatagggtggcttaggttctacgacgggttctccaagatcttcactcctgcttcacagctggcttcactgcttcctttgcttcgctagcggatcctgcagtcttccggagcttcggcaaacaactgacgacatcttcttcttcgcaaagctgaccatctagtacttagttgaaatccgaagaaagaaaagagtaaaccttttgcaaatagcattaggggaaggagaaaaaggaactttcgcaaataatttttttatttataaaatatgtccttgggttttatccacttggcttatcctacagtcgagatggctctgataccagcttgtcgcgaccgggaaaattgccttttcccgaacgctagtgtattaatccccgtcccaggaaaagccggggtataccacacaaacatgatataaaagacacatctttattatatcgataatatttacattattacaaaggcacttaaggcctgacaatcaaaaataaacagcagcggactagcgggcctacggctccatcttcacaggcgctcaactggggtataagccagga

SEQ ID NO: 44915 - DNA, 925 bp, Oryza sativa
ccctaacagatgcacctccaatatcgacaatttctatcgagtttttcttgtaaatttatttcttcttaatatacttggatggcctctttcaaccttcccggcaaattcacacctgtgattacccaccaccggccagtcactctgctactccaagccatgccaaattcacccgttgatttcagtaccaacacgctaaaagcgagtttcttttaatttttttttacagaaatgcataaaaagatcgaaaggtgacatctcaagtcaccaacatactgatgcactgttcgtttggttcattgaagtgaaggcttgcagctgtgcacctgttcgtgctatgctttcagctttcgtgcggtcagacaaacatgacaagggtgtgtacagtgtactggtcagtcagacatgaacaattgctagtactcccagcggtaacaacaggcactaccagtctactaggctgtccgaatcgcggcatttcctcatctcggagagacgaaggcttgaccatcactatcggaatgagctctgacgtgctcatgcgcagcacacaccacagaaattacaacagccaaacaacacatgtggccaattttcacacataacgagataacatcccaatcacaactttatgataaacgaaagcttccatccagttcacggcaaagagattactcatcataaataaatagtgtacaataaaatatatcactgtttacaaatattatttctagcttcagcattttaccacctacctacaagctactgtagctactagcttagctgatttggcatcaaaacatgcacaagttcactcgtcctcctctaagatttcagttagcccagaggagaattggtaagaatccatcataggtgacatggattcatcatcacagaagaatgttcttggaggcagggctgcaggaat

SEQ ID NO: 44916 - DNA, 1168 bp, Oryza sativa
  unsure (1)..(1168): unsure at all n locations
attcctgcagccctgcggcatacttttgcccaaacatatctctaaggaaattacatgaaatatcctaattaatagatacaattgcctatccgagagctttatctccatcacggcaatcctcgtgaagtaccttgatcaattctagaagcatcttcaaagtcatcatcatcagaatcggctgcatcacctctatcggctgtatcggctaccctctgtccgatccatctcagtcaatgcagactccagccgatgccttcgcagccgatgcatactccgttcttcgaatctgtcgaggagtgatcctctctagcgggagatcgtgagacccccctttgtgagttcggccgggggaagaggctcgctcaaggagatggtgtatccgccctggactctactgaactgcacactagcaccgagattatacaggttcgggccgctacgaagcgtaattgtcgcgtcccaaaatgaccctaaaatataccctttaaattatgcctagaataattaaaatccttgtgaaagccttcaaaaattaaaatgtgcaaagttaaaagtcaattaaggcttggaggatttttgtatatttcctaaaagcctaaaatgtgtaaataaattttagtggaattttcagagcacaaataataattattaagaaataaacaaagttaaaaaggttttattaagagggggntcgtnggggtccccctttcttgtnttgggcngnantnggcccatctccctccccctctctcctctcccccgcggcccactcggcccctccccgcgcgcgccgctgacgggcgggcccgcccgccaccctcgctggcgggtggggcccacccgtcatccccgacctcccgccgctccgcccgcgccaagcgccgccgccgccgccgaatccgccgcatcccgcggtccccgcgtgcatttaagtggggggaattactccccgtgatcccctccctctttccccccattttcccctctctctctctcgcattcaaacggccggatttgcccccgcaaatctcgccggcgccattgatggcggccggacctcccggccggtttccttccttccccggccgccctctgcccctcccaaccccatttaaaccctccccgcacctccttcgcccatttccaccctttgccgggctgcaggaat

SEQ ID NO: 44917 - DNA, 530 bp, Oryza sativa
ggggggaaacgggagagggaatcacgggggtgattttccccctctttaatgcgcgcggggacggcgggaaacggcgagattcgcggcggcggcggctctagggcacgggctggcggcggcgcggcgggagaaaggcgatgacaggtgggtcccacccgtcagcgagagtggcgggcgggcccgcctgtcagcggcgcgcgcgcgcgggggagctgatgggccgcggggagaggagagagagggagggagagttgggccgagccggcccaagagaggaaggggggggagaagacttttagggtttttcttttttataaaccttttcaactttgtttatttcttctcaattattatttgtgctctgaaaattccactaaaatttgagggctccttttagaccaaggagaatttaacaaaaattctccgggtcacatttgaatttttcttgtacgtattttaatgtttgccaatttcttttcgaattttaattaattctattattccttttagaagatgatttttattttggg

SEQ ID NO: 44918 - DNA, 763 bp, Oryza sativa
gaccatgtggatgtgggtggatgcaagattcaagacaagcatgaatctctctctttattactgcaccggccggtgttgtcgatcttgctagccaccgatttcactgctcaatacacaatgccacagctagcagctactgttgggtgtaatggcatacttaacgcagtcgatccaccaagctcacatacgcaggacattttttttactctttgaatttactgaaacagccagtacaccaagtacactctgtttttttttatttgacactgttgactagtataattttaattttggtcaataatattttttttctgaattacgatgttttgataaatacaagtagtagtatatccagttctttagcatgcaaattgccaaattacatagataatgatatgttttcaaatgttcgtatttttttaaaaaaaagaagatgagcagtcaaagtctgtacttgcatagtacgtactatctgttgtcaaacaaacaaagatgaacggggggagtaaataggtacaaaatcacaaacattttcccgcgtttcatattatttgaggtagaaatgcattcatgtgtaccgtgcagtgaaaatggcctcgtcgtggtaccgaatcaattcaacgattttgatcttgggtttttttttttttttgggaacgcgtggtgtgtgtgcaggggctgtacggacagggggaaaggcggatcgcagtcccgtagctgccgcagatggggtgcctcccggcgtcggtgacgctgttcggcg

SEQ ID NO: 44919 - DNA, 637 bp, Oryza sativa
ttcgattgttgatggctaagttttcttaacccttggtaggtagtttatttcttctgcaatgcagtgccctatacattatggactgttagtgttcacttttcctgtactctgcaactgggacaaatatcatatcttctgtaggcaaagaggcattacattatgtataagttgtatgctgagaaaccaaccactaggtgcaaaatcaaacctgatggttctacatgagccagcacttcaatattttggcacccaagtgctagtggctgatgacaaatttaagatagaatacctgtgtcaacctaaaggagacacaaagaggcatactgatggaaataaagttgaatttgattcaccgacgcattgtttggcactgtggattgtagaatattaatttgttgaaaaaagcaatgaaatgacctttgcatttagtatttaaagaggcagtgctggaaacgtagttttctactgttttattattctattcatttgtcttgtgtttaatagataataacttgttatgttaggctgtgttcgttttcttgtgttgggaacttattccttccgcacagaaactgagtgactcattagcacttgattaattaagtattgattgtatttatttttcaaaaaataggtg

SEQ ID NO: 44920 - DNA, 581 bp, Oryza sativa
ccactcactatacatgcatatgggcaacactgcctatcttggaactctagcatggaaatgggtcaatttccatggtgcatttactaaggggattggtgtgagggaattgtggatttactagcttggaaactctagcatggaaatgggtcacaatttccatggtgctgaaaatgttacattggcaggggcagatcagatcagtccggaatgtcactagctagagcattgtattatagggggaaagcctctagttgtacctatataattgcaacttttgtagtaatctcgtttagctttctctcgcaaaaccggggtcaatttgggataggactatagtaaaaatgtctcttcaacaagggctaatcaacaggcctctgacccccttaattagtttgcctttgtgccaatgaccagattagcaattttaatgtactaatgtagcgattgctggcaagcaagcattcgcattggatgatctccctacatgtgacaccagcaacagtagtactccatgtaaattagaaaattaaatgtgtatctgcgtgcattaactgatgctagctacaacaacgtatgtactg

SEQ ID NO: 44921 - DNA, 874 bp, Oryza sativa
gaatgtaatcaaccaataaagctccaaatgcagtacatagtagtattagtaatcccttgttctttcaacaaatgtgttcagaatgtcaggttatgtttcatatcactaactaaaccgaatggagctttctaaaagaaatcatgtattcatggtttcaagcttttcagctacggttatcacttgaacacaaacagcaaccagaaaggcatgaaccaaagatttgcattaagactcctttacctattaaattgtctcttcaattataatgaatacatcatgaagatggcaattgcctacaaattgaacacagggtgttgggaacaaaatagaactgttggatacgcgaagttgagcaaactaacaatcgaaagagatatgataattgcatttgcttatagagaactgacagagtaatagataatggaaaaattacacttcaaataagattttgatatataaatggctcctacaatctgatatggacagataacaagcacaatgatacaatatgtaaccactttgtttctgtaatagtaatacgaagttgaagtaatatgatcccggatgaatcaagggtcttcttctcatcagtatcaccaaatttaggttaattaactctaatttggcactaattatcaatatgctcgtgtgattagacacggatcttgctcttcaactcgttcttactcctaacgctatagaatctagagattgaaggctccagaaagtgagatcactaggatggattagtatttattttacaagctaaatctaggagtctagttctcttttcctttcttttaaatcatttgaccaagcaaggtttaaactggaaatgttggcgatgttcaaactttgaaataactatatggac

SEQ ID NO: 44922 - DNA, 1134 bp, Oryza sativa
aggctcaggctatcgtccgagacaagcagctcctgcagccgcattctcctcgtcggactcatccccatcctgtaaacttttctctattctaagctgcgaaattcccttattttgttttattctgagatgaatttttttcctaattctgcactcgtacgccttggtgcagggagatgtgtagcttcgaattctccaccatcgaaaccttgcttctcttggacggcatagagctaccggaggaattgtacgggttctctggcaatgtcgtgtatgtcagcgccgctgtgatgaagaaagtttctgggatgcaatcagttgattcaactgaggcaatcgctatcattcacatgcctaagtatttccgcgaccttgacagcgaccagggtggagctgttcttgatgagtggctcggctctgcaaagaggattttggttctggatgggattcaggtaaaaagaagtgtgcaatattccgttattatccatagtaaatggatgtcattttgtgcataagacggcacataatatgttgtttattgtttattttaagtttgaactagtccatttgattcctcttaagcaagggttctaaatttttactgtgtccataatggttctatcctgcaggaccctggtaaccttggaacattgataagatccgcttgtgctttcagatgggtatgtcatttactactaattgttgaagcgtctctgattgcatttctcaaaacttgatgtttcatggtctcatggatcacaccatcctattgtttcatataaagtagttatcacagcttgttttacttctcaataataaggtagaacttaagtgataaaaaagctaatactactggtagtatgtagaattattaggtttgcacttgtttttacatctaaggatgatagtgtaatgctattaatgacattttgaaagcaaaaggttagtacattctgggttagaaggctagaaaccccatacgtgttctacatttccacaaaaaattatgctcctattatacagcatcagatgaagtttagttagcagttagcacatgccaatatgccatcacacaaaaatatctgcatggtgtgtagcctcccagaaatttatactaactcttcaaccgctttcagt

SEQ ID NO: 44923 - DNA, 1122 bp, Oryza sativa
atctaaagtagacaagggataggaaccaattcatgctcaaatccaaattaaacaaagcaaaagaagactcaaataaataaccgagcatgatgattttatgcatagaacaacatttttcacgaaccgagacaaaagacactaatgcaactgactaaacaataacttaatgcatgaaatagatgcatagtcatactgatacgcataaacttaccccacctgaacatagacacgacctaatgcatatcacccgacaattcccgaccgactgccgaataaattccgaataaacttttactaaatccctagactgtcccaagtcgagaaatccaattaaataagcgaccaagatttttcccacaaatcaaaagaacaaaccccaaaatgttcccgaaacaaaatccaagtgcaaaagggcatatgcataagaaaaaaaaagggttcagagggctcttaggtttccagttggcttgtcctacggtcaaggtcggctctgataccaacttgtcacacccagaaattctcgaaccagaatttctaagctgaatgtgcattaaatccctgtccaggaccagccaaggcacacaaacgacaattgttgacatacagacccacgtcttacaaaaatataaaagattacaaatgcagcgggaaagattaaagcgagctaaaccgggaagcttgacttcagcagcgggcgactccactccacaggcaaaccttgacggcagcaacgaaaccaacctctctgagacggctccaactgagaagaacttcaactctggtgtgggggaaaagagagcaagactgagtactacccactgtactcagcaagtcataccggaagatgaggtatgatgcaggatataaccaaaggaagctaggggttcttttgcataaagcaggcatttcaaagcagtagttgaaagcagtaaaacagctgtagtatacccaagttatcaatggcataaggtaaccaatatgtggctgaggaataggacccatcccacattacattgtaaaagaatgcaacattgaatagaaatgcaggatgttggtaaattgggtacaatatgatcaaacgtattgcatgacttgccttgctctcgaactgatgagacctca

SEQ ID NO: 44924 - DNA, 843 bp, Oryza sativa
catttacattccattgaagggataggagttcaagcaatcaaaagaacctcaaggtggtctaaaggccgtctttcggaaatcttgctaagtcttgctttacaaaatgagctacttcacttgccgagcaaggggtgttttgaaaaatcctcctattcctttctagccaaacattccgccaagtagttagtaaagcaccccttatagcttgcttttcacacagtctcactgtcacaactcacaaggaaagccgacacaaatttgtgatgatgtgaaaataggtggacgtattaagtcccctctattaaggctacatgtatattatagagtgatccttatactgatcctttatatgatcccattagccctaaggatcactcgtaaaaaataaaaaaaatcactattatgtgctgcaacttaatttaattatctcatcttactaaaaggtgaaatggtaaaagatgggtgcggcttagcttaacacaccctccttgcattgtggaagaggtgttatatatacctcggtgaagctaacctgacttaaaacctattcaaatattatacgtcaaacatgtcctaaggttaacttgttctcacgagtttaatactttaacaatactctctccatcccaaaatataagggattatgaagggatgtgatactttaaatctggacaggcactttatccagattcataatactataaagtgtcacatccctccaaaatctcttatattatgggacagagagtatatagttaatatcccatctctgcttgctgccttaatctggaccgagcatactagatctaacggccactgtatccatcctctccctcccattta

SEQ ID NO: 44925 - DNA, 1749 bp, Oryza sativa
cagaaagagcgccattctggatgtgtacgtgcggaggaggagaaggttttataggttgttgtagcactgggtggagaagaacgaatgtgattggttcgttgatcagtcacgcactttttgttacgcacccaacaggccaacacctaccggcaagcaccggttaaaattttactacatatttcatagacatcactacacagctaatggtagctatacttcaaacacaattttctcttaaactactcatccaatctacgatccaattacaccgttgtgttcgtaataattaaatctttacaacaagatctcacatgattatattttgatgaaaaatcacaaattacttttatgatatgtcttaattacttttagatttcactaagttacttcttagacatacaaaagtaaattcagtaaagcttaaaagtaattcacatatattatagagttaacttataacaaaaagaaagtaaatttaattaatacattttttcattgaacaaattatcatatatataattatcatatataagttacttttagatttgattaaaatacttcctatacattcataatgctctgaggtgattactttcattattgttttttagttaattttataatttgtgctgattaatttaatttctagatagagtcatgtttttatctctacaacggatttatttcaaatgacatgccaaagttacatttgttttgttctaagttacttctataatatatgtaaattatttttagcctttactgaatttacttttgtatgtctaagaagtaacttagtggaatctaaaagtaatttagacatgttataaaagtaatttgtgatttttcatcaaaatataatcatgtgagatcttgttgtaaagatttaattgttacgaacacaacggtgtaatcggatcatagatcggataagtaatttaagagaaaatttcataagaagaaaaaaaatgtataacctaatagcaaaaactacttgcatgcatgtctgtagcgctattagtacttctcacgtaattgtccgcgtcgctcgttaagcctaaatcgagatgcctctcgaaatagattttgcgatattttatcgacagatttccttaaaaaaaagaatcaaatgtaaatatagtataactatagtgtaatataaacttgcatgtaacaacaatatgtaactgatatgtaacttgtgaataaaacttctatatatgtgttcttaacgatttaaatcaaaggttaaaaaataaacttcgataaaaaaaacctcaaaatcaactctaagtttaagattgacaattcaatttttgattgataatcacaagtaataataccttcattctcttttccttttccccttagtgtggccctctcctccatcgccaccgcacgcccccttgatccggccgcgatgaggagcccccacaccgttgtctttctcgtctcatgagagcatctccaacagtatagctatctcactctccaagctaaaatttggtaattttgaaaaaaaaaaacgagctccaacagactagctattccactctccaagctatttgactggctaaatgggctccctagctggccaaacttggccagccaaaactggttcgccaaccttgggattgtgggacccatgaccatacttttctctcccctctctttctcaacattctctctgcctcggcttccttggcgcgccaccgatgaggaggaggactgtatcacgaaggcgctatc

SEQ ID NO: 44926 - DNA, 1437 bp, Oryza sativa
tgtatcttactttacacttcatattttagcaaggtcattttcataaaatttaatggatttacatgtgaaaatggagagaaaaaagttacactaggcttgttggttgctttcaaaacctttcgacatgttcagcttgttgttttgtactaactgataacaataaagaagtattcttttcgaaaaaaaaaagtatataaatagaagtataaaaactgtaccctaaacttattttctttgtttcgatcacatgtgttcaactttacgcagttaaaaaaaaaagtcaatcagctgtacgttcccagatcctcattgatgggacgattatattgtttttattcttcactaccataattcggctgatctccggtgtactaaagaagttaggaatctgattcggatactcgtatgttattgtgccctagtacattctgggaaaaaaacatggtaaacactgatgagattcgagtttgcatgttaacctgttgtcattcttaaaagaacaaaaacattattgttcacttactcacgttggatcgggtcagaccatcagggtagcacaaaccatgtaatcacattattcttagattagatgaagattcatctcatattacatctctggagatccttttttttaaaaaaataaaagaatggccaataacaatggtagataggactttaactagatgtttcaactagtatcttagttttagtcaactatttgaatacggatcaattttgacaggcatgaacttctttcggtacctaaatttgcaccaccatgagcataataaaaaggctactagcccatccttcgatagttgtttattggttagctcagtggttgcctctttgatcagtcccaagagccgcctcctgtagtcctctgctggattctgtccttatttttctttcataggaggctggattacaatgtcgacactcgacagccaggtatgggcacccggcattgcacatgcaaaataatttcaacaaattaagcaaattgcgcatgtcagaccccagtttgttggtggtcagaagttgtaaccatcttctaatgtaaggtgctgtaacgaaatatctattggagacttacagttggaacaacagaaaataaattctaagtagggctgaagacaatttgtttgttagtttttcaatcttcttccttcaaagattagaataagtggaaatgacgcccttgatcagcaagtaagcgagcggtagttcagtctccgacaagtgaggccgaactagcccctagatcggctctcatggtgggggaatcagagtcaagttaggtgcaaaagaggtaagtttggaactgatccaatgcaaacatatgcaatttttttaacgaatcggcgagccgctaaacaaggaaggagtaaactgcacagtataaaagaaaaaacaggaccaaagctttggtcctaa

SEQ ID NO: 44927 - DNA, 578 bp, Oryza sativa
taagggggagagagtgtgaatcggtgattaatagttgcctactacacttccatgttgaggcgataatagtaacaacggattgttccttactgtcccatataattatggagtctacaaaattagcaaagtgtgaagaaaaaaataacagttataggcataacattaaaaaaaagactttggtaattgcgtgatggcaagcttgtagacttttgttgtacatgatatctgtttggtggagcagcactctatgtgtttgataggttttagagctgacggcttactcttctattgaaattgctcttaggccaatttcaatggtggttaatgtaacaaaaaatttctagtggtagttttatagagttttttctcaataaatgagatgccattcaaacaaatttgatgacatggcaatatcattatgaagagagattaaaagagtttcatatatatggaactggatgtacactgtttctaagactataaaactatttgaaactggcattgaggagctcgagtattccatttcatccaactgcattcaatcccatgcattattattaaatgttatgactaaccta

SEQ ID NO: 44928 - DNA, 1728 bp, Oryza sativa
agaacatgaagggctatagctagccttaggtttcctcacttcctctggccaatttcaatgtgccgctttcattgatgattattagatcatggttgtctcattggtgttcacagatggatcagcttccattgagtacaaattaatttgcatcatattatctcaaaatttttcaatacgaactgcccttctcaatttatatcagagaatcaagtttttttaaaaaaaaattgaagaagcaggagctcctctactaaattaggacgaataatttggtctagaaacgaagaggagacagcgcggtgaaaagaccggcagctgcctcacgcgcggcgcaccgggatatttaactttttgctacactttcataatagagtaaactatacccacaatacataatttggtagctgtgtgtaatttggtgcaagaacatgagaaatgagctagtgccttttataatagagtaaattgcacccacggtgcatagcttggtaggtttgtacaatttggtgaaaaacatgacaatgagcgttttagtgcaacgactcgacagatgggtataatttagtataagaagtttataagtgatcgtataaatacaacaactttcaaggtagatacgattttgatacaataagttaagaatttatatgataacttaattatttggtgtattttttatacatgtttaatttttaagtacttattttgacaatttactagtgtggatttgtttaagcatatttatatttttatcgtaacaactaataactgaaagtcaatataagtggatgtagaaattattatatatatttcggttgagatttaaaaaggtgaaggaaacaaacattattaaaggtaatgggatgtaaattggatgtgcaacgtaatttttaaagactaaaatcaatattatgatgtaatatccgtaggattgctgtgtaatggtatattgatatcgtgaaaaaaaaactcacctaagatatacttaactaatacttaactaagttgatgcaccaaaatactaataacttatcaagttcttgtactagaatacacctgcttttcaagttgttgcacttggacgttcaattctcaagttttgcactatatcacgcacacctgccaagttattgaatcgtatgtgcaatttatactctaataggtcctcatatgtgtgtggatctaatggtaaatttttaatggaagtagctatatttatggcgccatatttttcaccaaaagttagtcggcatgtatttatattgtaaggcactaaattacatatgtaattttagtgtatttacaatgtaagtcccaaaattacatatgtaagtactaaaattacatatgtaagtcacaaaattacatactaattacatatgtaagtagtgtgtaaatagggtgtaactactgtctaaatatactactaatatatactaattacatatttatactttaattacatatgtgtttcgctggtcggtacaaatactcatacttgatcgagtgcatgcagtgaagaaaaaaatagtagcaaaattctccagtagaccgctaattagcaacctgtaacctatgaagcacaactagttacgcgtaattaagtatgcgagcacgaatcctatgaccgatccaatggctcaacaagcgactgtaatcaaccagaaaatgtgtcggcaaaaatttatcaaaaccgtttttaattaccacgttaataaaaagtttaat

SEQ ID NO: 44929 - DNA, 506 bp, Oryza sativa
tccctccaagctagttggccagatgtgacaatcacacctatagactaacaagtggattagataggcaaaagtcttcgttccaattgtccctatgtctatctatgctcacttctacaccttgaagatgtagatctcataggtctgtatactcttattgataccttgaaactatagatcttttgagtctcatactcttcttgacactttgaagatgtagatcttgtaggtcttagtatgagccacaacgccccgaggggaacccctgttcccacttctccgataacactcaatagggatgtcacttgcaaaacttcatagtggaaatacactgcatttctaacatcacaggcaccttcttatatccttattcagtcccgaaattagtgaatcattgatatcccgggaaactttagtgtgtgtgaggaaaaaagaccaaaaccccttattaatagaaaactagtacattaaaaaggggtgatttgtggagaacctaggtaagaaagtag

SEQ ID NO: 44930 - DNA, 611 bp, Oryza sativa
cctgctcagttgcaaccacagaagattcaacttttgccttggggcaatttctcagggtaccctgcagataccaattaggcaattaccagacacagggactagtgccagcaaaggcaaattgcaaacatcagaataagaagtcacatagtgatgtttgagatatgttccttgcacagagaatcagtcaacaataacatgaaacaagcggcttaattaacaacaatggtaggctctctttacttttatttttttcgtataccccctaatttccaaaatgaccatacccgcaattctgacatatagctattgaagtcaacggcgtacctagaaagccaacgaaaaataaaagaaaaggtacaatatgacagatataaccatgtgtccatgtcttcataatatggttcaaaaaccatgactctttttaccctagttggtactgcatatacaccattgctgcaagtgcattatcaaccgcataagatagcaaaacagggccactgccttaacatgccctgtactgtaacgccataacaagaggcatgcatgccatgaataatgtttttgccagttgaaccaagcaatgtaattatgcaatccacctccacgagaat

SEQ ID NO: 44931 - DNA, 801 bp, Oryza sativa
tactattgagaaggttactagtttataagctaaaaaggtcaattgcacaccatgggatatggtttacaagtatatatgggccatattgttagtgaagcagtctttatgcaagagcacctatggtatcaagagacaaatgatccactggcaacgaacactagtgatggatcatcctacttcatgacatgcttaactggaactacacatcaccatttccacaaaatagtaaaggctaaccaagattttgcaccgatctccttttcagatgaccgtgtctgacattatgaacagaaaaggtttgaaatcatttcataaaaaactgtttatgcttgaggaactcacttgcttttggcttatttgggctattaagagaagaacattttatatcagagtagacctcaatcagtggttatggaaacacatagggttattgcagaatgtagaggtacttagggcctatcataaatccataatgccaccacaaaatattccaaatagggtaacctcaagtaatagtactgcttggctagagctatacctgtctaaataatacccatgcataacatgtatcatgaatcgtctctgtaatgcctagtatccgccaagttgattttaggagctccaggatttcttccacttcctggtagattgaagcaaaaatgttaagagaaatacctgcaactgatagtgtatctagacagaggaaaattacaaaagatgattttaagtactggcctctgtaagctttccctcatccaagatatcaaaaacactgccgagcatttactcatacagtgccac

SEQ ID NO: 44932 - DNA, 658 bp, Oryza sativa
actgttgcacttgtacacttatacaattgatgcttttgttttttgctttgttatgccagcgtgtttggagaaagatactcagtcataagaattgtttcagaacagctccatgaagagtgggaagcattaataaaccagcctgacattaatctgacaaaacaatggatatcaagcatgatgcttagaccatttcttttcttcgttactcaaccatcaagctggtacaagggacaacaggacaagactctaaactcgatttcggcatgcttcaaaatcatcttgaatagcataaactcaatgggtatgcctttttcataatcaaagtttgactttaccgacttccatcttgacctttttgtactttattttctcctccttaatgaaatgacacgcagctctcctgtgtagtttgaaaaaaaatgttttactttacccattccactagttgtggttaactcctataaaaatttatttatgtaatacttccttttgctgtaaggattataatcctttatattattcaatccttgtatggcgatgacctaattgttagttctagaatggaattatgtacttaacagaaaagaaattgcagtcgacgtgagataagcagatactccctccgtccctaaatataagggattttggttggatgtga

SEQ ID NO: 44933 - DNA, 561 bp, Oryza sativa
ttgctcaagaaattgtctcacatgaaggtttgccaaaagtacttcaagtacaaggccgttaacctacaagaattaaagatccgcacagttagcgcttcccgcaagcagtcaatgcacttaaagacttacaatacaacagtacaaaaattcgatgatggtgcaagcagtagtttcagtgaatcttagaactcaattgatgattcaccttctattgcagtagcacaatcttttacaaatagtacatgcccgcagatcatgaaaagctttcttgtaaataatatattttaatagataagaatcgactcctagtagaagatactaatcttcctgttcaaatgttgattgatgctggcatgctattgggatagaggcatgccgaaaatttcacaatcataatcaataattatgcagaatatctcatcgtagaacttaaattcaatgcacagttatcaactatgacatgatatcaactatcaagtatagagataagtgccataagttctgcctgaggttcaataactgaaaggtcccacagtttgcaaccttcattgtcccacagat

SEQ ID NO: 44934 - DNA, 995 bp, Oryza sativa
aggagcgatggacggcttgatcttgattgatgatcatatattcatattagctgaatgtccgtgctttgctatggataaaagaaaattttaacataatatttttttcacatcttttttttttctatgggaaatgttcaccttaattctattttatatgtggctatccatttagatttgtttgcttcttaatattaaagaagttcaaagagtaatttgtaaattatattaaaataggtgaggtggtagattccaataaatatttccatgcaggtctatggatcaagaaaatttccaactttgggtcggctgcactgagaaagtgagaaagggatatgggtatgaatgcaaattgcatcgtgtcatatattactatatgcttggaatcgaaggaagaactagtaatagatagctgtacatcaattaggccgacaaaataagtacaaataatattgtaattgtgtgtcaccatcacctaatgttgctcagactttgtagtaacagatcgatcgatctacacacaatcatttgcgtaagaaggaattagaaatgggcaaagatgtgtgtgtagattacttgtaaaacattcttaacccacttaaagacagaaagcttttggttgagagatcaatataataaaatttgacaaggtcgatggggtgaccgggacaaagtcgtgtgagtttggaggatgacgcatgatgtatatatacatatgtttagtaagtgtacatttcgttttcctaagtttaccttttgtccctgaagttaattacctggtcaaatgatatctcatgatcatctagcttaattagtctaccaagtagctgcagatatatatgtaataaattagatgcatggggatcatggcgtcatgcatccaagaaagtctccaaaggcaactagaaaagtattttagtagtgtgtatgcatgctctctgcaatagttagttagttcactaggtgatatacgtacagattattgtcgttgcacagtt

SEQ ID NO: 44935 - DNA, 1730 bp, Oryza sativa
aagttttcaaatctcgagttgaagttttcaaatccgaggtgagggttttcaaatctcgagttgaaagtttttgaatctcgagttgaaagtttttgaatctcgagttgaaattttttaaatctgagttgaaagttttcaaatatgagttgaaagttttcaagtcgaagttgaaagttttcagttgaaagttttcaagtcgaagttgaaagttttcaagtcggagttaaaagtattcaaatctgggttgaaagtttacacatgtatggaaaaatttggaaaaaagaaaaactaaccgtgtcttgccgcctattaggccgtgtgggccggcgcttacgcgccaattaggattcctgctcctagctagcgcgtgcgcgctactggcgcgcacctccccctcttaaggccttaactacctctattagttaacacttgatactaatgatagtaattaggtaagattctgaatatttttttagagattattttactaacagaattaaaattttttaagttagattaaaaaactttcgatttaagtttcatgttttaaagtcaaattttgaaaactttcaactcagatttgaaaactttcaactcgagaatcgagattcaaaaactttcaagttcagatttgaaaattttgaaaactttcaacttgagatttgaaaactttcagctcgagatttgaaaactttcaactcgagattcgaaaactttcaagtctagatttgaaaattatcaaaactttcaacttgagatttgaaaatttttaactcgagatttgaaaactttgtcctaatttaaaattttgaagttaagatttaaaaactttcaacacaaaacatttgaaaaacacgtgtcgttggaagattaaaaaagcgaaaaaaacacggaaaaaaagaaagcaaaaaaataaaataaaaagtaaccgaaaaaagtgaaaaacaaaaaggaaaaaatcacagaaaaaagaaagtgaaaaaaagagaaaaaacagcgcgaaaaaaaagaagattcgcgcgcgcgtgttgggccgtgtgggccagaatgcgcgccggcaacgtgcgcgtgcaagttaggattctcgctttgcactcttggatgggtaacactaccactaatgggcagttgactatcagagatggatttattttcagtgaaaatatataatttttttaataaatacgctctcttaactacttgtattccatttatgaacgggaagcatatagcaaatatttgctcgagggattagaattcaattccattgagtttattgtgctaattttacatagaaattttacggttttccagaggtaccaaaagaccaattttttttagcttaatatctaagatactgagagacatcaaattttacagtagaaataccttcatatcgctctttacataatgttttaaggcagctcaaacaaaggaatcccgggtagttcgatggtttggcgccaaacagaggcacacgaggatttgctagtccagtttctcactgtcattcatcatatcccaatcttcacagtgacaaactgacaattattaattagttggtactacttgttagcaaacatacaaaaaagaaaagcacacagatgagttctcttatcaagacaaagaacagccatacacagtgtaaagcatcctacattattctgaagaaagtgaatcactcaagtacagtctagagagagatacacacataaatacagttatgcaga

SEQ ID NO: 44936 - DNA, 552 bp, Oryza sativa
ccaaatacaactttacactactgtatctatatttcctaaacagttcaactgttgttggttgctctattaaaccacaataaaaattgaagtccacggtgagtagctgatagacaacgaaaaaactcaactaagcaacgaattgaaggttaaacttttatattcgtgttttaacgatttaaaaaccaatgcttaaaagataaattataatgagaaaaaacacaaaatcaactgtaaaatcaaataataaatttaaattttagttgtgaccgattagataataaccaggcaatgagagagaaaatatagccacgatggatttgttttaacagagaaaaaaaaagcttgtgtacatgtgcaatatatagtcgaaattgtgaataagttgagagaaaactaatgcgagatggattgtgcgtggatggggagattaattgctcgatcggtcgcgagccatctagtagttagatcgggaggcaagtcgcattgcaagtaagcgaagtctgaactctgaatttaacatggaaaattcttcagacatgctcatcagatttc

SEQ ID NO: 44937 - DNA, 523 bp, Oryza sativa
tgaccagcaagagatgatgataatcgatcatcgtatatatcatccgaattaaagaaatggattggaagagaaggaagttggcaacgaattgaacttcgtcccaacttgtaatatttatatatataaacgttccatttgactagcgcaactaattaaactaggcttatcaggcgacagcggcgccaaactgacaatacaaagattggattttttttaagataataatataaatattgaatagacgcccaagactaaaacgcatcatcgttcatagtcgtcatataattgccatgcatgcacgttgtcgttcgtcgaccttccttcatttttggtcaacacatgatcggcatcaacgtttatctaccaactgcaagcatgcaaattaagcaagcaaagcatcatgcatatatattgctcatataaaatagtgacgcatattatccggtgtgtgcatgcaagctagctaagctagcctaactcaacccatacaatggcatagtcatagtgttcaactatagcaggg

SEQ ID NO: 44938 - DNA, 1288 bp, Oryza sativa
acttaggcatttttgctttggcaatttatgctcgcaatggtgtggcccaatgctgataaaatcctttttaatgcggttatataattctttggaattattgcaatgcaaattgaaaggtacccgacagaaaagtgttatactatttttgtaagcttttttaggctgcaaaagctgtctgggttgatttaagatgacttgtttttacaatggtcattctcttggcgtgttatatgcctattttaattatggtgagagtcatagcctaggctattagacttattaattaccataatttttataacatttgatggattatctttagagttttttactcggatgtttgttaaatgtgttcatttgtgaaccttttagagtgttattcactcggatttttttactatggctggaaagcagtcggctgaatgtcttgttggacgccgcatatgcttttgtcatatgatgcatgattatgcaattattttattcttgactacatgtttagtttgttaactaatcatatagtcgggggctactgtggagattatggataccccatatctacacggcggttatatttagactgaatataggataccgaatatagatagaatatctttatttgtatctcgggtttgtttcttaacttgtacgtcaaggaaatatcctgagatttagtcggttacgattgtattttatttgtattctcgtattctgataaggatatgagttataccttgtaatacggactccttcccctatataaggaggggtccgagtccttcctgggacaccaattctctttgagatcatacattcaataatacactcggcggtttccaccccggacaggagtagggtattacttcttgaataagaaggcctgaacctatataaatcgtttgtctccaaacccatccacttttcaagcttgatagccacccctttttagtattgccgaaatcttgtttcgacagtaacaaactcttggtctatctgcaattaattgagcaaattccactgtcatggccaatgaatttgggctattttgaagagacaatgcaattaaattccctctctgctgctgtcagacataagaaactctccaactgggtaaggtcaacctgctgctgctattttgtttagttattttttccatcgacattccagttgagaacactgcatctctgcgctcatctccatgttctcctcaactaatcagatgttgcatgatcaccatattgcatgtatatgcatgcatgatcagttgttcacaaattataattaacca

SEQ ID NO: 44939 - DNA, 773 bp, Oryza sativa
atatgttagagttacatgtgtacactattaaattggtattaaaataaaaggcgttgtataaatgttacccatatcatcttaccttcaactcttttgtaggttctattacagtaaatctccgtaatttctaagcatataacaaatatcatatcatgaaaatgttaaaatggcatttagaggatatgatcaatgtgtaacagtaatctccataaccatttaattatatatatcggttaccgcaatttaattaaaatgagcattttggacatcatgagtccatttcaactttgaatctgtatgacccgtttttgtgaaacttttttccttcacattctatcatatggtggtgcacaccctaataccattatcatctaaatgtttgacattgacctatccatacaagaaaggctctagaaatgcataaatgatctttaattaccaatatgttctcttgaggtatcggtctaagccttgtcagtcaacgtggatccttgatggcccaatctcctataatttgaccaattcaatattgttgttttgatagaagctaagtcaaaagtcggatgaatcaatcaaatgcattgaatctatccatgccacgtgtgtaaatcatgccataagaactgatataatttaattttatacctccctgatgtcaaattataccctagaaattttgaaccttctaaaccttcatattgttagattaatttttaccttaacataagccacgttagagtggaaccaacttttcagactcacgcaacgagctg

SEQ ID NO: 44940 - DNA, 720 bp, Oryza sativa
gttcaagcccaataagctcgaggccaatacttttttgggccatgagcccatgaccaacctgtactccgtatttggtttcaggcccgaacgttataaaaccatccagcccacagtatttcgaatttggcccgcatatgaattcatcttaaacatttgggccataatctcttcaaattggcccacaacggctgcctgtttcggtataaattcaggcccatctgaactcgctgaatttgtgcacaaaggaatcatcgaacaaattaaatttacatttttatttgataacagaaatggtcaacatcttcaatctttgttgttcggaacacagccaaaggaattataatttacatgcacaatatggagtgaagcaaactaggaaaatgactgaaactcagttctgcagaaaccagaaagtaaaatgttttgattgaatctgatcactgataaggctggtgaccaacttggtgcaaggcttcaagagttccaagactgttgggcctttcctacaattgggcctttccaggatcaatagaacggcccatcaaagcccaacggactcgagcccaataccttcctggcccagcatatttgatgaaaccatttggccagcaatctttcattctttcaaatctgttccatgatctaaatttttctgaacttttttggcacataatctctcaaatgtgaagatattcaactatcttccacttttagatatgg

SEQ ID NO: 44941 - DNA, 907 bp, Oryza sativa
ggtgtgtgtgcatgtcctgatcatatatgcaggtatttatagcatgacatcgactggaatgcagtgttaaccatgcatgggtgatgatggatggatcaatgattaggaggtaattaattaagctagctgcaacaaattattggtatagctgaatgagctaattaattaattaagctagctaggtatatagctgggttgacattgccacacacaagagggtacttgataattatcttgttcctatgggattagacaagagttatctggccggatatatgcaatgttggttagttagcatttgactctatggaggtatgaacactagttacaactgcaacagaaaatgttatcaaatctggctagctttggacaccaatatcctagctaattaagttgatgactttgagaacttttagctagctaccggcagttaagattaacagaatgaatagaacatagtactaattaacccgacccccaattatctaaaaaagcatggttaattttattttgtaggcctggaaatgtccctagctcctcaatttaattttggactcatgatgatcagttcacaagttgaattagtagggaaacgaattgaatcctgtattaaaaaaaacacaagacaatttattttaagagtaaatttaacaaaactacagatactttgatcaaactattacaaaactacagatttaagaatgtatttcacaaaactacagatttagcgtcaaacttttcacggaactacagatttaatgcaccatatcacaaaactacagatttagtgatgaagttatcaaagaattacatattttagagtttagatcatagcactattatttatttaaagttataaaatctgtagttttgtgataaaatagtttttaaatatgtagtttgtgat

SEQ ID NO: 44942 - DNA, 648 bp, Oryza sativa
tgtgtgtgtgtgaatgacatgtcgatcccacaatttttttttactctaatgccacataagcaacacgtgggacgaagactgggtcaacaccgccatgtagacgccacgtcagacaaaacctcttctaaaaccatccagggatatagtttgcatcggttttgatagttggagaagttgatatacacgatttagtggttagaggtcatgaatcatactcaggttatagttgagagagcgaaagtataccttttcccacgctttaatcatgcgatttgggctgcctgatccatgatgagttttgatcggcctatgctggataaataccaatggcccatgaagagcagggagggacagaggagaatagtggaagcaggctttgcaactataacagcaggctccctttatttccaaggaattttttctttagatgacctgcacagttacaacaactagtgcgtatcttctataaatactgttggaattcaaatctgagcctaaaattaaacataaccgaattgttggtggctcaaagctaagcaaccagttgcgtgtcttcagataaggagtacaaaagagcttttcagaatgaacatcggtctgaagagaagtatcctaattagaacataaaactggttcagactaaaatgc

SEQ ID NO: 44943 - DNA, 517 bp, Oryza sativa
tttttttcatttttatatatatatatatatatatatatatatatatatatatatatatatatatatatatatgagtatatatatatatatatgagtatatacctagttataagtattcgattcatacttacacctttcaacaaaacaactcaaaatttaactttatttcacaatccaatattacatacctaactaattatatgtttggatgctatatacctagaatcaaaatataacaaaaacatgtttaaactaagttcaaacttgttttgaactagttagtaaagtagttaatgttaatacctaaacatttaaaaaaatttcatactcatttgaattgagtatatactcaatttgaaccatggagcccgggcaccatggggcaccaaacaaatttaatatatatatatatatatatatatatatatatgagagatactactaacatgcgctttccatttttcttttaattttctacttttcctattcgttacttctttttctaatttagcccata

SEQ ID NO: 44944 - DNA, 1010 bp, Oryza sativa
tcagagagtttgttccaatcagaacacatgcatcgagctgatcgagctaccgatattttaaaacagcaagtgatgatcactcttgtgaatttactaccatatggtctcatgttctaagttgatccagcattgatcaagttggggggtgaaaagattcgcgtagaaaaggttggcgccaatatactgcagagttgtggtcgatcggccgggtcgtcctgctttgcttcagacttcagagttgaattttttttccattggaggctacatgcgactaagtacactactagtagagtagtggagtagtagattattaatctaatcgagctggtcaattgcatccagtgacactaaaattttgtctctcttccttgctgcatgcagatcccgatgcatatgccattaactttcagtgcagactgcagactgcagtttttgttactgttcagtagaagtttccatagcaattagtcatccccgttcacaaatctaacaatttctatttatttttagaaaaaatcaatacaggaaaatttcttacttagacgtaaaaatatattaacaaggatttcaaggttatttaaccaaaatttagattgacgagaaaaaaaaatctcaatgtctctgttatgcgataggtaggtgggagccaaaggatggtagagataagatataaaaaaaataaattagaggtgatcaatgagataagtagtactctatttttcttagataaactttaaatgtttagaatgcttatatacttttagataaattttaaacgtttagaatgcttatatctgtggggagagagggcgagagtttaagacagatggttttgttctccatccaacctgtagcccaatgctgtccctgcttgctctgactctgaatgtatatggactgaactggaactgcacttgtattttaaggcagaaatgttgagcagctggtgcccatattatttgcacatgcacccatgttagccctttggttgatcccatatgtgtaaagga

SEQ ID NO: 44945 - DNA, 661 bp, Oryza sativa
acattggatctgaattaagtcaccatgacagtgaagttgaaaaactgacgaaatcgatccaagatcactcttcaattaatttatggtgactgcatagcgtgctagatacctcttcatctgtacacacgccctgccaaattgactgaccgcatcctcgtcgtcgttttcatcagatgctgcgtcttctttcatcagcaattcagagatgatatgttcatccggtatccgaaatgtgcaagaaagttcagacatgttcagtccagatccatccatcccatcgccgccgacgacgacgacgaacactgctgcaggtcagcacccgtggcgccttgcaaattaacaagatctcaatttaccataagtccataactaacatgcacgctagctgcagcaagctgctgctaaactaatcgtcgccaattaattactcacctaaaccatgcactacacttgaacagacagtgtcagtgtgatcagcttcatcagcttagctcaagagaggcaggccggtcaacttgtgaccccatgttcttgtctcctcatgacacactggccatgttcccagttagcatcgatcaacacttgcatgcagctgctacctagcttagcttagcttaatcacccagtgcaggtcgtcactagctacgaatcactatcagat

SEQ ID NO: 44946 - DNA, 538 bp, Oryza sativa
ctataagcccatacggggagaggaacgaaattgaactattattcaatttgggcttaaaaagtaggtctaaattggacaattaatttaagcccaactttagagccaattttcatccattacagatttcaaaagctttgattttgtgaattttgccgcttgggcaaatctatgcctagattttcatgcatccgatctaaatctttaaagaactattaatattttaactttttttaatgtttgacttgaaagatgcgtgtctaaactccaaaataatactcactccgtttcatataacaagacgttttgtcttttttttttaaagttaatttttttgttttgactttgaccaagtttaaaaaaaaagcagcaacattttcaatccaaaacatatatagtatcaaaatatattcgacgttagatttaacaaaactaattttgtattgtaaatattgctacgtttttctataaacatagtcaaacttaaaaacgctcaacttagaaaaaaaacaaaagtgtcttataatatgaaactgaagga

SEQ ID NO: 44947 - DNA, 1273 bp, Oryza sativa
gtccacgtgttcgaacttgctgttaatcactgaacagcagagcagcttaagtagcaagaaggaatctttgtaaccctttgtcatcttatctcttgggcaagaataagatggcaaattagattgttgtctactgcctgtcagtggaatcacaatggaagatatcaagataagtacatgattaagaacaattagagatttagaggatctgagaggcatcaatcaaatcttattatgaaaatttagccactattatcttcctgaatatgacatgacaaagagagacggtggatcaaatcaaaacggatataagaaaatcgagtttttttagtagggtatgttttatccggcctctacatgcaaccagatatatatagcctttttaaattagaaacttagcttctcaaataacacaatctgaaatcgagttaggaagttgatgctttatgggcatgattagttactagtttattttatactacagttcctgcaacagggtgcgatcatttaaaaaagaaggtggccaatccaataaatagattgtactagaaatattagtgaataaattacatttcaatgtagttagaggcctagaggacgatcatgtctgcaaaatttaagtaaacatattccaacagaaattttgcaagaaaagtatttttcataacactataatggtatggaacatacttttcaagacaattcttctcatatggttttcacacgttaaatctgaatatttaaactaaattggcgaagagaagttgttcttccttcatacacccaattaagttataagattgactgtgatagtgtgatatctatccccattggtgtctacagtacatatagcttatgattatttttttagaaaaaaaggagtgaagtaaatgaaaaaattgctttccaaataacagacacaaacggtgcaagatttatatataatgttgacaaagcagtggcacaccggacagcctgacgtaattgtgatccaaatcactgttctaacacaggatgagctaatccgatccacttcaagttcataaatgacacaagattgcttcatttggggataaactaaataatccaaatatataatttataattgcaatgctattgcttgcagttccctttccttttcgtatcactttcttcctacaagaagcgaactcttgtggcttcatttgttcctgacgcatcttcactttgtacaagttgaccaaaagaaatagacaacataagaagatcttttaccattgaatggtggataatttaa

SEQ ID NO: 44948 - DNA, 1421 bp, Oryza sativa
aaacttgaatgggttataaattatgtagtatatgctagctggttactcctaacactaacactatgtatactactacttcacaattaagtatactaccaattcagatcctgtacagtactgcaagctgacatgtgcactgagagtctgtggggcccatatgtcagtgagtggtactacatatagaggaccctcactcgcatactactatttactatactactgctactcctaacactaagctagcctttgcatcacatggtaaattagtgctactttgtttacacaatcacttgtatatttgccattgtcaaaaccttcgaatgtttcccccgcaaaagagagacttgtttaaatgcttgatgaatgtgtggtattttagaggttcttggattgggttttgttgatctttgaggtgaacaaattcttatgatttgaaaggatttcaatattaattatcatgtgcaaaatttcttgcactttgaggtgaaaacattattatggtttggaaggattttaaaattaattatcgtgtgcaaatgatgcctgactcctgataaaatgtttttgtgatttttttttactttgtaagttttaacccatttgtgtttgtgtagaaatgtcatttggcaaattatatgctgaagagagtatactaatgctcacgccaaacagagggattatattctacacagacgctttcgccacaagcacaatttactattctgtcaaggcttgatagctgggtttgtcactctcctcaccaatcaccataaatcgatttggtttcctattaacaccagatcctcgtgaagttttgtttatttttctttcttccgaatgaaagctctacgaaagcagtttagtttatcttgcttcactaattttaagctttctgatttgattctctgtagtataattattttctcaacaaatcccctaacatacgaatacttaaaaaaaacaaatccttaaaccttataaaattcctcctgaatattgttgtcagaaaaagctcacgaataccatgaagttatataaaatccgaaacttcaaaatcgagtacgtcaaatcaaataaaaacagggtttacctacaaaacgccagcgtacaaaacgacctgaaaagtcactctctcagaagtcgtcgctgtgttcatcgatcgatcatcacttgggcgttgagtaaccgatcgtttcgtcagacgaagagaaaaaatcagaagcaaaagaaagaaaaagaaatgattttaatttgtgcagctcaaagtcgttgtgaacaaaactgtcatatacaggacacccctgacacactagtctttaattaactaataacagaggagtctgctcatgaaatattctgcaggtgtttatgttaatcttgaggggccaataatcaactgcacaagggggaagctgaagtgc

SEQ ID NO: 44949 - DNA, 756 bp, Oryza sativa
gaaaagcttgaaatgttttgccagtttctacctttatcctttttgctagttacaatgtttaacgctgtgaactgatgctgatggtgtgacaagtagtggtacttgtcttaggctcattaaatgaatcctacagacactttgatattatatcctgtgagcttggtcctcaaattctgaacatttgccatgtttttttgggaaccaattcactagtcttgttggtatgtttaccatgctttgtttcctggacttggagtatgctgtcatctgagaaaattggtagtgcagattacatgcttcaggcttcagcaattaccttcagaatatgctggttgcttcttctcatggacaatgtttaccttgaacttcagcatccattcatatccaacatagggaaagtttgggaaatatcattgtaaatattcatgagttgggacgtgagaatgacatgtgagacctagactcaacgtcaatggcacatccgatggtactctctccaatataagaacttgtctagatttcgtagtgctagaaaatgttccatccagttttaagttcttatattttggaatagagggagtagttttcaactccctgatttttgcaatggtgaatggcaaattggcccatcaaacatacgtgatagctcctagtcacttcaggtgtgtgtctgtatacagtagttctctctttcgatgatgctcacgtgatgggaggtttggaagttggaaccagatccgcgtcccatgtcgggag

SEQ ID NO: 44950 - DNA, 663 bp, Oryza sativa
tgttggggattttggtttaggagattaactaccaaagtcaacatgatggtgccattaaggaggattgcagattaagatgacagggtttgttgttgtttcttggtctgtggataggcatgggactagaatagtcctggtaactgtagcaaggaacttggccacatatagccggcagaatcattgtttaaagatggagcaagtgagcagctaccactagcttgtaaatcactatcattttctttttcaagtgtttgctgcatagtttaacctttgcaaatgcatggtcagtgacagtgagagcaaaccttttggcctatcaaaatggccgcctttggcacagaggaacctgacaaggatcttgcaggaaacattcacaactttctcatggcaaaatgcagtaaggccccttttgattcaaagtaaattcataggaattttagaggattttatttctataggaatttttcctactaagccctttgaatcaaaggaatgaaccctatagaatcctatgaaattcctatggaatgcctcttcctatacaagttttgggggaattttaacaagaggtagaacctcatggaaaaaatcctttgagtctttatctctcctcaaattcctgtgtttttcctgtggtccaatcaaacgatcattcctacgttt

SEQ ID NO: 44951 - DNA, 712 bp, Oryza sativa
ttgaccactactttctattgcaatatatctttataacctgacgagattataatattatgaaagtatttgacaaaatgaatctaattctaaacacatgattttcttccatccaatctaaatatttaaaagatattgatggtcaaagtttcttaagttcgatttgaaacatgtccaaaaaaacatgttttcaagaccagaggtaatacaaaagaacatgctactttgttgtaaccaaatatacttaattgcagccacaggttcgatcaacatcggtcagtacatcagcaggaggctctgacaatcatcgatctaatcaatggacaaacgatgtcgttgaatatttacaacagcttttggatgaattttgtttaaaagaggtacctccatcttttagagaacagtcatcaccagggcttattgctggggtcacacaagtaaaaatgaaaagcgaagcacccccagctgttggagacatagacgagcctttggtgcacttcaaatggtggtatatggtccgccttattcagtggcatctcgccgaagaattgcttgttccctcggtacttattgaatggttatttaaccaatttcaggtgattttatttccattgactgagtagctcatttatttaatgatgtttaagttatctcttattttctttacttaccagtgatatgcttctaccctttactcaggagagagttgcagttg

SEQ ID NO: 44952 - DNA, 522 bp, Oryza sativa
catgtaaaccgtgcagtgtcaaactgtcaaatgtgcccatggccttggcgatttttctctgtcgcgttgtaactaaaaccatgcttccagacatccccgcggagaagggaccacaaagcttctcccagtggctgctgacccacacatcatcaaggacaatcaagaacctcttcccttcaattttcctcagtagagttctctgagttgcatcaagactaggcactctatgaaacttgggagtttcttggccaccatcgatcgaatctatcaaatctgctataactctgcgcacatcaagagtatcagaaacgcatgcccaggctctcacttgaaatgaatcaactactctttgatgattgtagacagactgggcaagagcagtcttaccaactccaccaatgccaacaatgggaagaacattgaagttattgtacctagactccatatctgttctaagcataaggtttatgatgttgttggtagactcatctctcccaaacaacttagtttcagtgggaaagg

SEQ ID NO: 44953 - DNA, 678 bp, Oryza sativa
actcacatgctcatggatattgttttcaacttcaggcactccagtgcttgtgcttgtagaaagagcaccatctcctacatttggaaggctagaaccacaacgaagctgtatatcttggcactcctttaaaaggacagctatctgcaaatatttagagggcagacacagcatatagttagcaaaagcatctgcagtaccacaaaagaaatgttgattcaatgttcttgtcagtagtgacatgcaagaatgaatatccaccttcaaattatatttgaacaggtgaggaccacaagcatcgacatattttcaaagggcatagtctatttttggctcttggactcttttctaggtccattttaacttcaaattgaaaagctagtgttttccaccctttgactttcaaaaccatacaaatactattaataccttcaacactgctccacagtggtttccattgatatcataatagtttttgctagtgcagactcctaatatgcaagcttgtgttggtgcgaatgtcaaatagctggttaaacatcaattaatctcagctaatagaagctaatcatcagtgaaaaccatgtcatctcaactaaaccaccatggaatcaggtatgaggtgttacttgtctggttttataaataaaagttgaaggtgaactaaaaccggggctgcag

SEQ ID NO: 44954 - DNA, 694 bp, Oryza sativa
tgtcgaagtttattttccagcctttgcttttagatcactaagaatacacatataaaaaaatattcacaaattatttccgtttacaaatatgccatttggcttattcccatgataagcaaaaacgatggcgccgcatttctcacaaacttctcagacttcaaccaatcttgcatgttgtttagttttgggcccaaaatttaggcccaattatggccttgttttggccgcccatgaacaacccaggcctgcctccgagggaagagaaaaaacgctacacagagtagtcaaccaacctgcactgtaccacacaggacacgttccaccgcagcagcacaaacaaatcattccgtgtgacactacgtgggacgtgccagacctgcacaaaacccaacccaaacccaaccaactccacccctctctctactgacacgtgggccctccacgtcagcctcacccccctcttgtggccagcaacgaagcgccccgaagtataaagaaacatccacatcgcgcacagcacagcgtcgcgtttcgcattcttattttctcttcgcttcgtcccccgcatcgacacgcacgcacaccagcagcacaagcacccaaaccctagctcgcggccgcggcgaatcctgcgcgcgcgagagagaccccggctgatggtttcgatgagcgcgacgcccaatccgatcgatgc

SEQ ID NO: 44955 - DNA, 711 bp, Oryza sativa
aaaatttcgctagtgctagtatcaggataaccgtgtgtataattcatgaaaaacattaaaaatagcaaaaaaggggggggggatttagccaccatgctataaatttgtgagtattaacccgtgagtattaacctttggaaaaaaatatgatttttttcataggccaaaaaatacgcttgtgaatttttcgaatattaacattgggacaaaaaaaattaataaaacttttctcgaggctataaattaatgagttatatagctttcacataaaacccatgggtattaaactttggataaaaagcatgaaatttttccagtccaaaatttcactagtaatagcatcaacgttacgcatgaatttttttattattaacatcaagaagaaaaatttcatgaaatttagcatccatgctataaattcatgagttataggcttctcgcaaaacccgcgagtattaacctttgaaaaaaaacaagtttttttccctcttgcccaaaattttgctaatattagcaccaggatcgttctatgtaaaatttatgcatattaaaattatgacagaaaatttcattaatttttgccctaaggttataaattcgtgagttatagcctttagccaaaacccatgactccgtgagtgttaatctttagaaaaaaaatacatgatttttttcgctgacccaaaatttcgctagtattatcatatgtat

SEQ ID NO: 44956 - DNA, 698 bp, Oryza sativa
acacaggatgtgacgcatcctagtaatactaatgtgaactgacgtcacatcttatactagatttgtttttttgggacagagggagtacattataacaaacaattcagttacaagagaagcaaagtaaggcattacgtcaaaaatatgacaacagataattgccacacgatacatacaaggatttacaggtgcatgaaagagaatgacttatgacatgctaggttgaggatttcgttctcgacgattctcttatggtactgtggaaattacgctatgtgcgtactattcctagaatgtataaacataaaaactaaggcatactattcctagaatgtacaaacataaaactaaaaggttgaattatactaccagttaaataagtgatactgatgcagtagcctaaactccactagaaaaccagaggtcaactgagatccagacaaaaaaactataacatgcaaaggtaaactaacttctatattgagttaccactgcgaagtttgcaaccatgtattcaggtacaaggataggtgcaaatgtgctacttactccttaaatcacctagggaccaaatcatggatagtgataatactaagttgaggtcaatactaaataaacagtactaaccaacaaatgacctaatgatattagattgcaggaggaggaaacaaccaatgtattcaggtacagggctgcag

SEQ ID NO: 44957 - DNA, 510 bp, Oryza sativa
taacacattctgtcatataaactctaattgtgaatttgtgagcaaagaaaaaaaatcgtggaggacttgtatattccataaggatttgatgctgatctgcactaatcttctgccatatttaagcaagtgctagtaccttcctcgcatgaactttgctgagagatgattcaagctgcagctgcagctggctgagctcatccactgtggacacagatgacaggtcttctccagtttgcctccttaaactggcttcgagctggtcgatctcattccttagccttgtgatctccatgaccatttgctgcaaggcagcatcacacatgtagattagttgtagaaatgaagctttgagtgattaggaatttggtgtgggacatgcaattgcctttcaaatgtaaaaaagaaaaaaataacatgtgttagattcagttcgcttacctcatcatcacggtttgtctcctgaagccgagtgtttctggtggtgatctcataacggtgaaacagctccat

SEQ ID NO: 44958 - DNA, 5204 bp, Oryza sativa
cattaggaaaattaagaagtgtgcacacagtaggtgaattgcattgttatcatgacgtccagatgggcaagacacaccattcactgcatgtgcagaccaacataaccactacatcctcgccatacttatgtattaccattgaccagtaacacctttgaatacatattcatggatgtatttgcctggaaaaattgtagaatgcctaaaacagcatggtgttactcctctaaacgatagacaattgatatgttccaaaatagtaagagcaatctaggtcacttgttcacaactttgtgcacacctgatacatatggaacgcacattggtaaaacaaagatgcccacatgttccaatccaatcatgaaaaggaaccctattttatagggcagattaacgttagcatgttagcatccaagttaactcgaaccacccaatacaactctcacgtttacttaaactttcgtcgtgacatgtactagactaaatcttgaatgtcccaagcaggcaggcaatctaattactctgcatagatgaaattttccagatagaaactaataaagaacgaatcgacaacaccaacaaattacaaagtgtttccacaaagtaggcacctttacaaaggagtcgggtgacacgggccttggagaatcgacccagtcctggttatgagccgccgctggaggagtcgtgggtgccggcagacaaggagtcgtcaggggtggaggaacaggtaagcggggaggaggagaagctggtccctgtgccggtggtgtagctgcctctacacgagttgctggccacatgccccgaacgagaagccgcctgttgccgcacccctcaccaccgccttggcgtcgcccatgcatagccccgcatcttccccgccaacaatcccgcctcgccgactcccggcgccccgctgcaccatcaccagatcgccgccacaggcgacttcgcagccgccggccgtaaccctagctccgaaaccctagatccacggggccttcctccatgaccaagcgcaccgcccgaattcgcctcaatcccaatcaaaccccagacgaaacaacctccctcctcccggaggaggatgaaacagcgaaccggagtcccccacgaattcggccgaatcgacccccaattacggcaggattcggtcgggaaattgggggattcggcagccgcgcacacgggcgagctcggcgacggctctggtggcgatccgccgcgggggggagagagaattcggcgattcgggatgggaggggagagagagagagagagaggaggggagaggcggaggggatgggaggagagagagagagagagagatcgcggcagagacggcgcgcgagcgagcaagcgatgtctagagagagagagaggaggggatgcggtgcggtcgtggttggagaggaaagcagggggcatttccggggatcggctcggctcgcgcatggaaggcgtgggtgtggtgcggtgcgggtgggcgaggtcggttgcttggtgctgtcactgggggtggggtcggtgccggtttactgtgcgggggttgtgtttgtgtgctcttttcctcgggcgctgacatcgacgtgggagattgctggtaccataacagtactactacagtcgtatggcttatttggatttaagctgtattcttttcatattaaaaattcggtaacatagatagtgttacatgtagtacacgtttaaatttgttattaaattcagtctagtttaaattcaatattaccaaatttagcactgctaatattttaataggataaattgggttctaactcctaagcgaacaaaacaaacatgtttagttcccaaaacaaaaattttcatgttgttgcatcgaatgtttggatatatgtatggagtattaaatgtagataaaaaaaatcaattgcacatattgcatgtaaattgcgagacgaatcttttaagcctaattgcgtcatgattcgacaatgtggtgctacagtaaacatttgctaatgacaagttaattgggcttaataaattcgtctcgcggtttactagcggaatctataatttattttgttgttagactatgtttaatacttcaaatatgtgtcggtatatctgatatgataaaaaaaattacccatctaaacaaggcctaaatgaattttcttttgatagtacgacatcggtacatggctccaaagaggatagtacattgatagtacatgctgctttttcaagcgcaccatggtcatttattataatcgtggcatcatatgtacatgtatatacaattgtcaaaacaaatggcgggtgctcaagtggagatcgtgaggttgtgtggtgttgttcggatcgatgaaagtatcattccgaatgatgcaccaaaataggagtacagttgagaagcagtggcggatccaaaaaaaaatagtagtgagctctgagcaaattagatagagttacagttcattcccatctacatatggtaaaaaaaatttagcagagtcttcgtggagctcttatagtcttcacaccagtgtaggggctcgagactccgccgcccccatgctggatccacccctggctgaggttgcaaaggctttgtttcattttgtagatcatgttgatctcaagtattacagtgctcttttggtagttactaatactatgttgtcctcgttgaggagtttccgttgatattcatccggctgaggtctgttccaaaatataataacttttactaataaatttagataaatatatatatatgtatcttaatcatagcttataaagatggtgctcctccttatggtcatgtgggaatgggatcaaatggagagcactgagacagttccgacgtaactgaagtcacaggcctaccaaggatatatcacgagctgacaatatgacaagcagagccctgcggaggtgcggtggccgaggttcgttgttaccgccgccgttcgtacggagcagagtttggcccactatttccagcgtcgagttgaaatttccggcccgcgagtggtagttggagtcacgtagcccatccggccgtgccccacgccaaatcgccctatgatcacgggccacccccgttttcttggcccaccagctgcatgttgtcaaggcctgaaagtctacaaactactggaacaaaccatcgatgtcacgagccaccgcaaaggctcatggtatcacggtgcatttaccactttaaccagctgggaactgggaagtagtagtactgttccccgcattgcgagagaagcgacaggaggaaaatcatgttgtcactcacgctcgccgtggggagcagatggggccctgatcctaggacagcaacctcctccctccttttcagagtgtgcgcatactttctcctcctttccgctctctctttcttttatcacacagagagagaccaaaggggaccaaacattattcccccactagggggtagatctcccgtccctcccttccctcggccatgtggtggggtcacccgtagtagatctcgcttttctgcatggttgtggggcgcggaatcggatgggagcgaaacgatttcagtgggtgtgggtgcccgggcgtacttctccctccgtttcacgcgatacaagttattttagcatttctcacattcatattaaggattatctatacaacattcgattaaaaattagcctaaaaatctatcaaatgtaactgtaacataattacaatgtaattttcataattacactatatttatactataattacatatgtaaactcgcatgtaattatagtataaataagatgtaagttcaatctagatcataaaaatatagtagcccaatgggttagtcacgccttcatcccatgaggtcacatgatctatccctaaatatggttttgtttttcttcctaaaagcacatatcttgatgcgtattaaactgttagtatgaatttaggacacatccaacggtttagaaagtgaaagatttagccataaaaaatctgtcaacaaatatttagcaattccgtttatattaatgttaatgaatctatataaatatatatgtctagatttattagcatcaatataaatatgagaaatgttagaatgacttacattgtgaaacgaagggagtagtgtactggtgtactactactccaatgcggtgatcttctctagtgtgtttcggtttcggtggcgagccacgcgcgtcttccgccacctgctgcctgcctcgtcgcgtaaaggttcggtcaaacatgtgaccggggaacacatttggccattttcgtgccttgtgggtgaaatgattcagcttttgctattgtgaggctgtgtttagttctacgttaaaattgaaggtttgtgagactgtgtttagttccacgttaaaattgaaggtttaaaggaattagaacgatgtgatgttcgatgtgacgaaaaaattgaaagtttgaagaaaaaagttgcctgagtcgcaaacatggttgaccccggattagtatcactactattcaacacatgaagaagctcagagtctgctcagaatttccacttggttattcttattcagtgacgtggtgatcagttattaagccatacgcacaagttataaaagtcagtagtccgaagtgagatgtttccagggaacttttgggacagctggagtatgaatttcttgagtttacggtcacatcgcgagtacattagccacagccacgtaaagcaaagagctctatcacgttcacatgcatctcaaggctcaagctgcgttaataattcaagtgggaggagttttccccaccaaccataccgtaccaacaaacaaaccctcgctttctaactttgacaaggtaaagcttggggggccaacgcctctctctaccacaagactccacttaattatgcccatgagaaaaaaaaagaaagacatggagcacaatttcctcccctgaaaagaaacgcaattgtgcgcttgtgctatattggtaggtttaaagcaaatcctgttagtgagagaaaagtactgtctgcacagtacaagttctcctgtctattttttaaacaggctgaatttatgctaacaattcgaagtcaaacttttagctttaaactctcataacagattgctagaattatttattgcaagatccgagcccggtttagttagtgggggtcatgaatgtacaacttctttattat

SEQ ID NO: 44959 - DNA, 860 bp, Oryza sativa
ctgaccatatcacagttatgcaaccgaatcagctctaatatcccagaatcatatagttacagaaacacttttgtcttctaaaatgagaatccaggcatcgtcgacaggtatgtgctaaagtcattcttaaattagaatttagaaatgcataataattgatggctgaacattcaatacaacagaagctatagcaaagggtaaaagagagagttagcacagtaatggttgtactaaatgttaaacagtgaaataaaatgagcattataacttagggataatatgctggattatcttagttcagtttattcagtagactggtttggtgttatgatgtgtccatccttggaaaacatgtttgtaataagtttgccttggaatttcaaaaaatagtcaatatctttaagcatcaacctttgatcatattcaagcacagtttcagatgttttcttgagttaagacaccacatatactaacagcccaggaaaactgaagggaagatccccctatccaaatactactgttagtataactaatccatgcaacacttacataagattaataatttggaagctttagtggatacgctgttaatttattttagtacatacctaaacatccatctccgatgacctactagatttgcaaaaaaaaattataagatgctcaggtaacatacttacccagaatagagaagaatatcatgaaaccagctgatatctgcaccactcttcggctaccaacacgtgtcaaagctagcaatccagcattttcactacaggtaaggaaaagaatggttgcatcaaatgaaattagatgtattctaatgagaatggaagctgtaccaagatgaacataaagat

SEQ ID NO: 44960 - DNA, 659 bp, Oryza sativa
aaatctgagttgatttcctcatctccttcgcctagaaattcatcagcaaatgaacagggctgtgaaggagacaacattgggaagctaaaagtggaatgtgatgtgagcttgccacagcatgcagggccatcaaatgaagttgagaagtcatctctgagaagagtgaaaaaagtggtgtaggtttggttggaaaggagctgcaccgggaggatgttaatatgctgtcttaaacaacttgttgtcacagggtgacaagggcacaacatctgctggatcgtcccctctaccagaaatagattctaaagcgaagactgaaaatcgtgaagtagaggacaccgataaatgttcacatccaccttcacgtggtgatgatggtgtaaagtcaaatgccaaacaacctattggtttcaagattgatacaaactcaaatataaaatcatctactacgagtgaatataggtctgcatttactgtcgaggtaaagttgaagatggttgtacaaccagttctgatgtgggctccacattaggtgatcaatgtaagctggctgtttcaaatagaaaaatgctccctgccgaggaaccattatgtggtggtgacaaacaagctcatggtttgttaaagccaacagatcaaaagcatcttctgggtctaccata

SEQ ID NO: 44961 - DNA, 742 bp, Oryza sativa
attcctgcagcccctccgggtgattttttttcctttagtgggacccaccttaattacacacattgtggtggtttctaaaactatggactcccatgtgtgggtaccacatctatggactagtttgccaaatacattggtgttgccctaattgaaagaggaaaaaggtagtacaagggcatatataaatatatgatgtctaatcatcggtggatcgatcgatcgcccgtcgaattgatcatgcagctcgagagaattgcggacacgtttagactttggggacttgtaaaaattaaagcgcatgacagccgaaaagctagcaaacagctagcggccattgtcacactaaaaccatgtgaggttaattaatttattagttatatgcactcctcgcatctcatcttataagtcgtttgatttttctattagtaaaattattttaaattcgatcaaaattttatagaaaatatagtattattttaaaaaacatattattaaaatataataatattagatttaataaaactaattaaatattttaggtgattctaaatttttctataaatttagataaacttaataaagttaacgaagggagtatagtacaagcatgacaagctaactagctagttagggcacgtatagtctacagactgccctgatactggttaagttatctgattaacatatttatataacattctacctactttctttgtcttaattggatagattaacttatcta

SEQ ID NO: 44962 - DNA, 1016 bp, Oryza sativa
ctgcagcccaaaatcattcgagcatacctcggatcgaagctcctcatcgctgccacaatcatcagccaaatcctcatgagatcctcccctccctcccaatcctaaacaatgccacaaacacacagatggggacaacgtacgcgcttacccccacacgaaaccacacaacgaaatcgatcgaatcagacctagctcatcgtcgtccgagagcagctccccgagccgatccttgtgcgcgagcgaatcctgcatcggaacgccagagaacaatcaccacctcaatccaaatcccctcccaaaaccaaacgatccaacacgaggtcccgcaacgaagcgggagggatatgtgtacgggaggctagggtttaggggggttcccttacgcggcggccggagccggggctgtcgtcgcggtcgcggtcgcgggggtgggggccgaagaaggagaggaagaagccgacgaggacggcgtcgaggaactccaccaccgccctcgcgatcgccgccgcgcaccggcacatcgtcgtcgcgtcgcggcccttcccgccgacgaggagagaggcggaggggaggaggcgaggagaggggatatggtttgaaatgggaagcgaagctgcgaagaggagggaagcattattattattattttattatttttttattattttggggaagcgagaaggatagttgatgggccaggccttcgcgacttcagcccaactattaatagtttgggcctcttctgttttagtcagatttgtcaacgcaccgggccgtagaaaaaaatatgtttgggcttcagccttgctgctctctctgcttctttctcttttttttttctgggaacatatatgctgtttggactttccagcagattgtaaaaaacaaaaaaaaaaagatttctgggttccttttctgtaaatagaagatcaatatctaaggaaactatttaaaaaatattttctcgatttatgtctctgtacacgtacttacctcctgaatattcctactaaaac

SEQ ID NO: 44963 - DNA, 1345 bp, Oryza sativa
ggttaattagcaaataagtttacataatgatattaggagataaacccagaaaatgaatggtactaattaatttgaatgccaactttaatttctggaaaaacatttaaaaaaaaggcatctatcgagtcacttaaacacttctggtcattctctatagcaaaacgtactaaaaatatctctgaattccagacaaaaaaattacatctagatctatcagggttcacataaattgatctatatctatcaacacgtaatcctctatactacatgggaaatgaagcttgttgttgttgctgttgctactaccactataggatctaataggtaatcctgggaccaccaaaaaaaaatcctatcccaatgtatatttacatatgtgaaatatatttttgcaaaaagaaaaaaacactgtcttattaatatattatgatgcaatcaatttatatttctaaccttattatatttagggtattttaaaaaatatataagttggatcacccatataaaaattctagatacgccaactactattatgggagtgaacattatttgtttgctcacctaaaatagttgatttctctccatgtctagaataaatataagtcaaagttgaaaagttacattttggtttagaattggaaaaatcttacagatatgaaagaatatcgaaattgaatatatactagaaaaaaaactccaaagaaaattaatccaatcgatataccaataattaatttaatattacttctagtcaatgtagtgtgcatttctaaaataaaaaatagccgcgcctagtttttgtaacaaaccaagtaccaaaatattacacgagtgcaaaagcaccttattcacacgtacggcatatgtacacgtgtatcacacgatcgattgaaaaccgaatgtgattaatcaagcatcattttaagtttttaacgcatgcacgcacacggaaaatatgcacactgcatgcgtaatacggcgccgaataagcttaaacttaattggagtttagctaagcttaattggagtagtcatcgttcgtgcaagatgccggtacggcactacgacctttttggcttagctatagactatagtctctaggtagctagctgccacttttgccttttagaccctgcaattgcacgcttgcactattccctatagtttatccgtactcgtaaaataagtcgtttaaaataatatttaagttaaatcttaaaaatataaattataaataattctcaagttgttaagtttgaaaatgtaaaaattatatgaatagatttgtcttgaaaactattttttaaaagtatacatatatcactttttaataaatatttttata

SEQ ID NO: 44964 - DNA, 1238 bp, Oryza sativa
ttattctttcagtactagacgacatacatgtcaacagcgagaccgagacgtccgtggtgacttcgttaatctcaagatatatcagcccagtctttcggaggtgctcataggggtagggtgcgagtgtatgtatttataggggtgagtgtgcgcgtgttatgggtgcctgcatttgtattgtgtttctaaataaaagaaatgaattaattaggatgcatgcattgtttttactctccgtcaactgcatgtaaataactcaaagaaaatattattttagagtggtctcaattagtagtaatctactatcagtataaacaattactcagtttttgatagttaaaaaattaagatacttagttctactactactactactatttgaggtacaaatattaatacatatgtactcctgttaatagagaccatatatactactactactatttgaggtacaaatattaatacatatatactcctgttaatagacaccatagtaaaatagctatgaaagagaatatggtacatatactggcagtgtcatgtcatatcatcactggcccgggcacacagtgatttaattgttttatttcagataatgaatgggacaaactattttctaattataatgtatatatgccatatctttttcgtggagggggatttaccacgtctcgagatatatgctttcatgtgtgtgactatgttcgtgtgtgtgtgtatatagaatgaagaatttgtcttagtgtagagaacacggcaggcatgcagtagcatatatagatgagccctaagtccatacgattttaagaggtcggcaccgtcttaaattagcatgagggcgacttaatagtataggcatctactagcttcaattcatctataaccaacctaatagctcattcatacaatagttacatactacactattaatatctggtccacttatcatacacatcgtgtgtcttgaaatccgtactacagctggctacaaatctgtagctcgctgctcttctctttccttatttatcttcttaaaatatatttgcagctagcttatagcctgctctgtacctgttctaatggagatatcaattaaaacatctagcttataattaagccttgacttacgattccctagctccttcatcctggctccctggaatatatattctcacggcattatttccgttgttccatatgcatgggctgccaagcctttgaatttttagtatagcaag

SEQ ID NO: 44965 - DNA, 1231 bp, Oryza sativa
ttccattgcatgtccttccgttctgtatataaacacgggtggtcgttagttgccattcgtgaagatcacatgaatatacattcttgctattttctgtacttgatgacagtgggttaccatgaatcacatattttcttcaaatgctgaatgcagaataaaattctacacaatcaactagaagctttgcacattagattagctgaaaaagaacgcaatattgctggtctttcatcgcaacgcattgattcacatggtgaagatgatttgcatagcgtcattggctacctgcgcagatcgaaagaaatagtgagtataagattcagtgtcctcttcttctttattattcctctacttggaatgggatgttatttatgtagtctgatggtaatttcactatttcaggcagaaaccgagatatctttgcttaaacaggagaagtcacggcttcagatagaagtatgatctgcttgctcttgcatattgttatttgttcaaatacccataattgtgccacgtcaactactgtactcctccatccacaaaagttacacattttacttttgtcaccaagaccatgaagaaattaaattatcttggatgctacaacatcaaggagtgaatgcaagcatgcaaccaatgagtatttagatgactacttgggttctcatcaaacatttaatttatctcttcatttaagtcttaaatacataaagattacaataggtacaacttatttggaaaaactcaaatgtgaaatatgtctaacttttgtggatggagtaaaacagaactctacctatgcttacttgaattgtatgtaattataaaggaactgttctgtttcttttgttttatgtagtatggtgactgcgaatattgaactgccacctgccagactttgttgttttgtcattttgttccatgctcccatttaatctgcccataggacaattccatgaagtttccactgtttgacccatcatatttggcatttggtatcatcatggaaccaatccatatggccttgtctcctttgtgtgattgcttgccaagcttgtctcatttaacttgatcctatggctccactctggtcttgtatgaacatgtcatgtgcctctgtactttcaacacataactgaaagttatgcattattgttcaatctgtttgtcttgcatgatttgagaacttgttttcactcctcattttgatatatgatttcctattatgtgt

SEQ ID NO: 44966 - DNA, 629 bp, Oryza sativa
aatatgtaaaaaagaaatagagatgcagaagaccgaaatagctaatctaaatcaaaagatttccgaggtatgttatttacccattatcattatgcaacgcatcatgaatataattggtttatttatatgcggttagcatttccttaaggtagctgacatttgatacatgaccttttctaataaataataaataagaattaaaatatagcactgtagcagctaatgttgtactagtacattagatagagaccatgccaggtcaaaaaatattttcttgaactggaggaagcaaaccctcaaatgctgatgctagttttttttaggaaacttacatctaagctaggcagcgcttgtgtggaaatgtgcgtttgtgtacatctgacttgatattcttggtgctacttgtgtcttcactttctgtcattggttttgttatgaatggagggactttaggattagttgcccagtgcatgtgcacagaaaagggtgtctgaacagcagaccggtgtgccggtgtgtacatcgagcaggggttcttgcattgtgtataaattcagtttatgttttacctcttcatcagttagtcttgaatagaatttgtctagtgtttcccaaagttctaacattat

SEQ ID NO: 44967 - DNA, 952 bp, Oryza sativa
tacactctaaacccctcccctcgtttttcacgtgtatgtttttcaaactgctaagcagtgcttttttttaaaaaaagtttttatataaaagttgcttaaaaaatcaaattaatacttaattaatcacgtgtgcggtccattttccatgtacactgtttgggtcgggaaaaagagtgtcgaacacagctatgtatgtatggattgagatgtacaacagcactggcaagaagtcaagaacaacccacgacttttcgaacacacgagcgaattattcgccgttgctctagtaatctaatactccatattaatatccctccacaccgtaacgacaaaaatatttttgtaattagcttagaggggtttctaggtccatcaaaaagatgattataattagagctagtgttgtatgttggtcaatttaacattgttgtaatgataaagttttaatggtaaataactatctaacccatacagcttatcttcatgtcttcctactggctccacttttgatttacgatgttaccacagaaagagcatgatactatgcacaatggtgcttgtcagggttacgggtcaggcatatcccctacccttcgatatacgatacgtatcgacatggcatacccacgcgcatgcggatatttcctttatgatctaaggaaacctttcacgaaatcaatatacgggaaaaagtccttttcggacaagaactgggttacctacgtatcgtgctaggtctgatatgttcgagtcctactcggagagtaccagacttgcgatataaaaggaccccccggggagggcatagatcatcgaatctcagaatccacacagcctacgaagccggagcctatgaggagccaagtcgtcgagagctagtcgaatcgactcgactacaatctcgccggatctgacaagttccatcttttcctttgtaacctgtgttttccac

SEQ ID NO: 44968 - DNA, 730 bp, Oryza sativa
  unsure (1)..(730): unsure at all n locations
tcccctatcctctctccaggtgcgacggagaggcagcggcgcacggcggccggcgggagagaagggagcggcgcggcggtggaggcacggctccggcagctgtgggcggaagaggaaggggcggtgggagttggccctggctgcggcagacggtaggacatgagctgcacaaccgaggccccgccggcgccgactccttattgatgtcaccggcgccgccaaggctgacgaggtggacgcggtggtggtggaggaggaggaggacggcggcgcggcgcggttccatgagcggaggctggtggtggtgtttgtgctgccgtcccagccgatgtgcgccacgtgctggcggtggtggtccgccgngccgccaccctcgccgccgccgcctagacacgtacacaacatcactaataccaaactcctaaatcaccccgcaaaaaacaatcgacaagatagagcagaagtgaagaataagcatccaagctccaaacaacgaaccttggggcttcttgccgctcttgccgccgccatcgacgacgtccacgctggatccattcggcaggtggagaaggggatcacgatgaaccggtccatccgccgctgctccttgccactattactcatggctagctagccactgctagctaagctgatactatcttggaatcaaattgcttgccgctttggctgaacctgtactggtacgatcatttttagtaaaagaaagggt

SEQ ID NO: 44969 - DNA, 1235 bp, Oryza sativa
tctgaaaagttcaacaagaagatgaggtgctggctttgattttattgctggtgttccttcctttctgcctgtaccccaaccaccccgctctcctcgaggcgcagcagccattcgcctaaaaggaaaccagtactaacctcgggatggtgatggccgcgaccgcctgatgcgtgcgctgcggctgtcgccgtctcggcgcgggaggcggaggagaagctggcggcggccgggggcgagcaacggctgtctccccgtggacagccgcgtcgtcgacgccgatgaggaggagagcatcccctcattcgccgtcgctgccgggtggttgttggtgttgctggcgcgggatgtggcctccatggaacggccgcctccccactgcggccgccgccggcagccgtcgcagcgccgctctcctcctttgccgcgtcgccccggcggcctcctccccagccgccgaacagtttgcccagagaagaggagaaagaagaagagaagagagagagtatgaggaggaagggaaagagatggcgtggcatcctgacatgtggggtccacatgggtcctacgttgactcagccgctacgtaggataaaaccggggtcaacactatcgaaggagctattatgaccagttttgattagttaagggacggtcgatatctgattttgcggttgatggatgattttgtaacttgacgacaagtttagggaccttcgctgtactttttccttttaagagatgtttctttttcgaagcattagcgggcacaaggacctgtgcagtcgtgctgaccttgggtgaagcatttgacagaagaattgggaattgatcctatcatcaacgttttcagaggaaacgagtagccgagtactccctccatctcatagtaggtgacgttttcgattttttatttataacgtttgacaattcgttttatttaaaaaattagtgcaaatataaaaaaagataagtcatatgtaaagtacttttgataataaagcaaatgataaacaaaataaataataattccaaaattttttgaataagacgaatgatcaaacattgacaaacaaaaacttaaaaagacaagtaatatggaacggaggcagtaggtattaggtaaacaccgtttggtggaccgaatatacaggtagcagagccgagggttgaagagagcctaaaaacttgctctgggtgaacaatgggccaaccccttctgcttctttgatccgatg

SEQ ID NO: 44970 - DNA, 1298 bp, Oryza sativa
  unsure (1)..(1298): unsure at all n locations
ctgttgcagatttgtcatggcctgttgttcttttgataccctccgatagtcaaatgcgtgatgcatcggaatgtctttttatcgtttgatggatgggaagtatnctacctnnncgtttgctgtgtatcttnngcccactgatnncagaacgagagagattttcgcggaaacgaaacaagatagaattggagtttgataaagaaatggtacttcccatgtgaaatcatgtggactgcccttgtcagtttatcgcgccaaatctttgtgccatacgaccatatcacacatggactactagtacttcacaaatatgcaaagatcttcagctgagccgcctccatctgatagcaatagcctaaaacgatcgccttcagcgaaggaagaaatttcgtcatgttactcccagaattttgcgttcccgtctttctgacgcacgcaaccaaggaggaaaccggcaaatctacaggaaacaacaagcagatgggggctaaccgagagaggatgatgcagcgatgctaatcgatcggccatttggggtgtggtcacggctcacgacagtcgttggaccaccaacacccacggcgatcattgctttgcttccgtccaccgttcgacagctaggaggcgttctcacggccctgaaacctgacaaaaccgccgccccagatggtgccaacgccgatcggcactgcacggacacgggctcggcagtcggcaccaccactgacacaaacgcaccaccatcaagcagaaaaggcgatgatgatgagggtcacagcctcacagtcacagggtttattagcactgatgaacagataaatgacacttggtgccagtactgaattactattgctagtgaggaggatacagattaataatggtattctctccatctcaaaataaacaaacaaaatataatctatctgtattcgtgatgttatgatatgtgatattcaatactagtaagtttaatttttacactacaagtttgcccagttgcgaacgtatggtccctggtcgagctactgcaatttatttttctggcatggttttgggcctctagtccaagattagttcagtcaaagaaatggaaaatttataacagataggagtatatacaagccttgtctgaataaatgtatggctcaggtgcatgtgctgtaaatgtgcacgcattattgccgaaatgattcgagtgggcctggccttcgttggcccatgcatttgccgcaatcgcattatcaattgcatcgcagagccaacaacacgatcgccaaatctcccacttgcgctccatg

SEQ ID NO: 44971 - DNA, 2470 bp, Oryza sativa
cagcatcacaggaaacaaacatacactatgctgcctctgttgcaagatcgcaacttgcaaaggaagatgtccctgcgtaacatgccatcaccatgtcgtacacatgggcatagcaaaccccaataccccatcctatgtttcctgaatcctgactggtgcagtcagctctcggatatgtcactgacgacggtggccaactcggtttttggcccacctgtcagtcaactggtcgatgtgtgacgcatgcaaaacggcagcagcagcagtagcttccgtcccttaaaaaaacaaacagtagtagatgtgacacattctagtactacgaagctaaacatatatgcttggagtgtactccctccgttccaaaaaaacaaaccctggtttttcgtgtccaacgtttgatcgtacgtcttatttaaaaaaaatataaaaaaattaaaaagataagtcacgcataaaatattaatcatgttttatcatctaacaacaataaaaatactaattataaaaagatttcatataagacagacaatcaaacattggacacggaaattcagggtttgtttttttaagaacggagggagtatgtaattaatgggtggcaatttagtcttttattgatggtcctcgacactccatgttagtattattttttttctttttaagtgtggttttgtatgttcagctgtatgtatcttagttatgtagaggttagaggtgttctcaggataactgtatcactttgatgtaattgactaagtttaataaaagcttttattatttaaaaatataatcgagtatatcttaaattcatagtataagaatatgttacattctgttctagaatttttttttcttgacaggaggagtacggaggaagacggcatgggcctgagggtgtgcgagaaggcagcctctcgcacaaagcagagcacatggcctcattaaattcatcagcacttgggtcgtcgaaacagccctgtgggattacgtgacactcgatcttgacatcacgccgcaagatactgacgtttaacttgccttgataactgcgttgccgttgttgagtgttgaccctcaccatgtaatcaggatgaagatcagcgcaaaaatggagtggccctaattgactaaacatcgtgagatcgatgcttatcggttcccctggcccatgacacctataatctcattcggaacttcatattttgatagactgtaaacacctcagctaaactctgtttttaaaacaggcctgttcgcttattctctccctcttccatgagaagcatttaggatacaattaaaatactaaattggactagcttgttttcaggatgttgctggttggacggtaaccagaagacattgtcgtcgcaaatcataaggtagtctattccattatcagcaaaccgcagagtgcagaaccaaaaaaaaaaatactgaagaccaagccatgatcacagaactgtgatagaagcagtattttgggccatgatatgtgccatccatcatggaacttctctgtgacgtttgtaaacaaaattaacgaaggagcctcgaagacgtcatggaactagactgcattttgcatcgcatattatactagtacatattgtaagtttgtaacattttggtgcccgatgtaaatggcaaagcctttccctttttaattaattcttccatagctagttaggtagtggtcgccaattgacatgtggaccagaatatttggctaccggaccagagctgacttcacttaatccatgcatgtgttcgtgttgctcctgagctaattctagtagcatctttcagaggactaaaaatccagttacgtgaaagaaaagattgtgtggccggctctatctttggcatgcattagatgtatacaaaaacaaaaaaaacggaagattctcttacagatgaatacgcccaaagttctctactagtggcactgctagaatacaacgttttggcacaagtttggcagctcttcgcaacttcaccaatacaaaacttcacaattgttcgccaaatccttagccccgttaccagcatgggttgagttagctacaccagtgaatcgatccaaacgtacgtacataggacagcgacccccactcaaaattctcaatgcaaaaaacggtagaaaaagaaaaggaaacggaagcaagccgcacgggtgaagctagcccgaaagggcatagtagtagtagtagtaggctgatggctcggtcggtttggcttggcttttcatggtccaaaccgcacgacgaacccgcgaaagcgaccggcgccgatggccgatgcgacacgcacgggtgtgttcccatctccgcactgtgcaccacactgttcgtttacgcggccacaacgtcagaaaggcagagcttcccgttccggacgagtacaaacaaccgtcccggaacatgtacgtgccaacccccgcgttcacgtgcgcgtcgcttcacgg

SEQ ID NO: 44972 - DNA, 2075 bp, Oryza sativa
aagttttcctatagagatccttgcctaagggcaaaggggcacctcgacagcgtcgccagaaaggttaccacgctcgaaagtatgaccgtgcccattgctggtctagtgaacactgggctaggctttcgtctgggaccctcttcatccctactgttatggttcgtcgtccccaactccgatactactcgtcaaggcttgcagctaggtatggtctctcgcgctcgcgcccacccgcccctcgtgatgctgccgttcagcgcgtgctcgatgccctactcagcttagctgcagtgtgatgtacgcactcgtatccggctctgtggactgtccttgcttgcacagcgtcttcgatgagttcgatcgatcgatctccagctgctgataattttgcacattcggcgccgttggtttcaacgtgttgtttacagtgaaattcctatgagaaatttgctgcttcccgaggctgattgctgtagtaatttcattttttctttttgttttcttgttgggagtattttgggctaaaattagcgtcaatcaaggtgcgaactgttgatcgtgtacccggaatagatcgaaaaatgtactacatatatatagtgggaatgagctgttatgatgacctaaccagtactccctccgtcctaaaaaaaggcaaaccctgagtttccgtactgacgtttgactattcgtcttatatgaattttttttataattagtattttcatatttgttagatgataaaacatgattaatattttatgcgtgacttatcttcttaattttttttatatttttttcaaataagacgaacggtcaaacgttggacacggaaaccagagtttgttttttttttgacggagggagtacgcaataatttcattaggacgataatgacgacctaaccacttaatgtaactttaagttatttttacgttttcgtacagaaatgacccttaatttctggaccaattctaaaaaaaaagcgaaaatgagaggggagtggattctaatccttcgggattatatcctctcgtgtaccttttcttttaaattttatacaaatagtagtaaacaattatgatttttttagcaatatagggtataataatatctatcgctttaccaaaaatcatgtccaaattcaacctacacgttgagaaaaaaagataaatttagatgtgaatagtacattgctattcatacgttaaatttgtcttttttatcttttttttatcttgacgtgcgagttgagtttagacctaggattttgtggagttgtataaatatattgtataagcgttttcaaatttctttagaatttttcataacagtttggatggtttttaagcaatctagagaacgttcctcgtgggatcagaggagaagaatattctattggagaatatctcttggaaaaagtacaccgaaggtccctcaacttgtcatcgagttacaaaatcgtccctcaaccgcaaaaccagataccggtaaaactagataccgaacatccctcaactaattaaaactggtcacagtagattcttcggtggttttgaccccggttttatcctacgtggcggctgagtcagcatggacccatgtggaccctacatgttaggctgagtcatctatggctcccatcggatggcctattcagccaaagaaaaagccaaattttgaattttcaaacttaattttgacattgattttgagatattttcaacgtagtttctttttcagcattggcttttaagtcaccgagaacacatatataaaagttttacctacaaatttatttttattctctaataagccgttttggcttattaaaagaaaagccaaacgatgagggcatatctctccctctcttctcttctgtgcaggccggtcggtcttcctcggttcctcctctctctctctctctctctatgcagggcggccgctgggcggggcgaggcgggagaggaggacggcgccgcgacggcggtcggcggcggcgacaacggcagcccagcggagctccacggcgtgggcgtgccgcggccgtgcgcgggcgtcgacagggaggcgcg

SEQ ID NO: 44973 - DNA, 713 bp, Oryza sativa
aagcacatcaacttaaacccgatgacgttcaccgggtcatattatcggaatcagctgtatcggctagccccgtccaactcgaactctgccgatcctgaccttagctgatttagactgcagccaatttttactctgtctccgcaacgatcttcatcttggattccacttcgatctgatcttcatctccgatgccaatagtgatagaatttaccaaatttggtcgttaacaacaacataatcttcgatcgcaaccatgcgacctaagatgggctgaggattagtacctcctgctttcctctccgccttttcacggccaggaagggcgccgtcctcctggagcttctttagggtcgcgctggtggaagccgacttgccgagattcatcgctgctgaaagatcgccggagatggacctagagctggcgaagctagggttctttacggcagcggagaaggtgaggagtgctaacaggtggtgtgtttgacggagttggcggacttcaaaacgtgcacccaaaatccctttaaataagcgcacccccaacggtgcgaattccaaggaactgagagaaatccccgctggaaatttctaagtctattacgcgcggcagtttttggacttcagttcaaaattcactcgtgactgttgggcttcaaacgggatgctcgactacacatcaactccgcgattctcgcacccggaatgataacgtt

SEQ ID NO: 44974 - DNA, 1247 bp, Oryza sativa
taacagttcaggtaacctattagaattcctgacaagtatgatattggaagttcaaagcttgcaacaactctggccaatctgcttcacataaaggactgtttcaggatgaaaactgttatctgtcgcctgctaacaaaaatcatcaagtgatcccttgcatttggatctatcgagcaaaacaaccacactatatgcttattaacaggtgggtattctaacatttgatatcattgcatattgctctttcccttatttataaccttttcaatttctgtacaggttgtaccacctatatccctttatttcttttttggtttagccctacatggcattttgtagcacattttaacttccattaatacaatgtttatcaggtagagcgacctctatcatcccacataaaaaaggaagcaatgaaatgcttgttttaaactaccatcagatgctaattgagttcaggaaaaataaatattgtaaccctaacatgcaggaaattctataaccactggtacatttagataataccaacagcactcttcccaacattaaacccagcaacttggttcacaaatccaaggatcagaatatcataaacctccctactcctacagctacaacgagattgtacttcctccgtccaaaaataaaccaacttttgtaaatgaatatagacatagcctatgtccatattcacatacaaaagttggttcattttcagacggagggagtagacatgaaagaagcacgcctgtcaagctactggcccctactgaacgcatggattctagcaccgtaattcagttaaaagatcaatcgaaaatcaaaacatcatagtctacccaaaatgtgagacctagaaggtagtgcctcccaaccacgactgctcagctcaacagattcgaccacccaattcgacccagcaggctaaacctatcctcaattgaatacctcctccaaaaaagccgtctttcaaactacccagggttagcattcgcaggaggagcagatgcacaatcgcatccaaactccacaacgacacagacgccaccatacaagattaaaaaaaaaaagcagcacgaaagccgccaaactatccccaaccacggggggcgcgccgcgcgcgcgcagagataagagggagagcgagagacgggggcagaattgggggcactcacagctgcagcgcctcgaggaacttgtcgtgctcgggctccgtccagctctccctcgacttggtgatggtgtac

SEQ ID NO: 44975 - DNA, 684 bp, Oryza sativa
gcttcatgcatttgtttaaagattcaatgtgatttttttgggaaaaactttctagaaactacacagggcctcaggcatgtgcaccatcagaaacttttcttggttgtgcatgaacagtactactttgaacacagcggaatggcagaaagtttcagtggcactcctgttgttgctagacagtgccagaaagtttcaggcaaaattaagcctgaagcttcttctccccacacaaaatcaatgcggttgatagcacagctcgatcggtctgaaagcgttcatgtccactgatgactcagcgatttctgaatcacctgaaatcctgaatataccttatggtcagactgcacgtagcaacattttgctgtgagctcactgctgaaattgctgatgtaccgagtacgacagtagtagaagggaaggggcatggagacagaccggtagatgcaagtgggtgatgagcattgaagatcttcagaacagtgaaaggacaaaatacaccaaaatcgccgcccaaactcaaattatcttatttctgaattttttaaccgcaaaaaaaaaagaatctaattagtacagtactaagcagattttttttaaaaaaaagagagaaaaaggtgatggtgcttgtgcggtgagtgagataagcactgggaagaaaaatactgtgcctgcctgacgataact

SEQ ID NO: 44976 - DNA, 1589 bp, Oryza sativa
aaggacttcaggatacaggtcaggaggttgtgatttttatgaacatgaactccttcaggtttcttacataaacatatattaacagacattggaaaaagtcttggagaaagagagagatgataataagaaagaaaaagcattccgcagaaggaatgagaaagtatttactaccgccattcaaaatatgaatcaggtatttcttcctcaactagcctgagtacagtcttgtcttaaaatttttttgtttatcgtcagttgggtttagattgagcaccaaatttatcatggaactactgatttaatacagattgtcacaaagctacacattaagtagcaaatttgtcacaaagctactggtttattgccaatttaatcccaaaactacaacgtctatatcttcaacataactgtagtgctagggattgaaaatctaaaatctgtagtttttttataacttgagcaataaatctgtagttttgtgatacttctccctaaatctgtacctgatagctttgggggagtggattctaatcccttgaggggatgtcccgtcgtgtacctttttctttcaattcgatacaaatagttgtaaaaatttatgaaaaaaattcgacctactatttatatctctcgacgtgtgcgttgcgtttggacctaagattttatggagttgtatacttatgttgtatgagtgttgtcgatcttttccagaatttttcataaccatttggatggtttttaagcaaacaaggggacatccctcgagggatcaaaatagtttccctagttttggcactaaatgtatagttttgtgatttgtcttaaatccgtagtttgtgaaattttctccttttttttaaccgatgcagtagattttctaataagaaaagccaaggaagtagacattaagataatgaaagattgatatgttgacatgttcacagatgaacttagaaaaatgaaaaacttaatgtgttctgggatatacaagatgaaacttttaagtaggatgttttagtgtattctagagttggaaagttggcatcattatgaatgttctaaagaataagtgccattttaaaccttaccaaaaaattggcaagccaaattttggtaaagtttgagtgtttggtttataaccaagtttttgtcaatgttgcttgtgatgtattgattgtttttgccaaaatattggcaacacaaaatctatggcaacaaaccaaacacacacattttcttgcccttgccaatttttttgtatagtttgtttgggctataaaccaaatgctaagtgttcatgtccattgccaaaccaaccctgagtattaagcctatcattatgatctacacttttcgttacattttcttctattgaatgatttcttagaatatgaaatttcactgtttaaagcttgcaaatgtagcatcatttgagtttgctaatggttaatgtttagcatgatcacaggcaattatagtacactatagtaaattattgtctggggtttgcttattggcttttcaggccatgtcccattcctgtgatagcccttaatgatcagttagcatgcattgcagcttgctccaac

SEQ ID NO: 44977 - DNA, 622 bp, Oryza sativa
ttttgtgcgctctagctctgccgaattctctctcaaggttgcctgttgtatttaagaaatacatgtgataatcgtttatcacaaaactcaaccttacaaactcattaagttcagtcgtattgaccaaataatgaaatttaagccagccatccatgctaattaagggatgtacatcagtatcagtgttatatatcactaaggctgtgttcgttaatacaggttgagaacttatccctcctgcatggaaaactgggctactcattagagcatgattaattaagtattatttaaaaaaaaagttgaaaatcgatatatatgtttttttttcaaaaacacactgtttagcagtttgaaaagtgtgcgtgtggaaaacgagcgattagaagttgagaaaagtgggaaactaactcaactgccatcaataattagaaaacgagcagcatatgcgcatgaaagggcataacaagtccaataccagcgatagccgataataattagaaagtatgtttcgcttcaaaagttcttattccagactatattgtctgtcccctccctctaattgtctcaccaatggtcattttccctattctttaccgtagctatctgattccaagcttgaact

SEQ ID NO: 44978 - DNA, 652 bp, Oryza sativa
aagttagcaatttagcattacacgagtcaaaatttatgcggtgaacgttcgtaccagagtccagtgatagatatagatccatgtgtaacgaatttatgcataaagaatagcaccataacctgcccaactggacgaactcttatcccaggttaaattccgaagaaaggggcctaaacaagataccaagttgaaaaccctaatagacgtcaatagccctaatcgcaacttcgcaatgaactcacaacctaaccaccagcacagccgaaccagatcgcacaaaaacaaagaacaccatcaccatgtcacatatgcaatcgtgcaaccacgagcccgaacgcgattcgggtgtaattaaaggaatcgcaactaaattcaccttgggatcaccaaggggagagcgggggatcaacgaaatgggagaggatcaaggccgtagcggtcgcgatccctccgacccaaaccctaacccgtcccccaccaccaatcaatcaaacggtaaacgcaggaaccgccgcagcagcaccaccacgcctgaatcgcaaacaaaattcccccaccaacaaaattcaggaagaaccagacagacaaaaggctaggatttagggtttcgtcgagtcgccgaaagagcgtataccatacctcccacctcgga

SEQ ID NO: 44979 - DNA, 1850 bp, Oryza sativa
aacattaaaatacactccaagtggttaatacattgtacgatattacggtcctttgtttcagcttaaaattattataatctagattattaaatcagattactctaaactgaattataataagctagcataaaataagctacgagatgtttgtttatctaaattattgaaggcatctatagatagtgggtctttagccacctaataatctggaaaaagctcctctagaggagattattagattatagtaatctggcttacagattataataatctatcctaataacctacttgtttgtttcagcttactcctaataatccagattataataattttaagctgaatcaaacgagtctaataatctacttgtttatttcagcttactcctaataatctagattataataatcctaacctgaatcgaacgagtagtgccattcttttatccctatcactaattcgctatgttccattgttttatctaaacataacgacgactatctcatctcgagctattgtaagttcactatgctaatgctgtcttagtgctagattactgcaaggacgtccatgaaatccacgtccaccagccaccatgtaggctgtttcaattgacaagtcagcgatcctcaatctgcaaggagaagaataatgtgcaacagattagataactgatcagggctaattgtgcttggtggaatattaaccaaagtactccttgattacctaccagagccgcaggtcaggctggtcgccgtcgtgcggctgcggccacagctgcagcaacgtgcttgacgccgccacccccttctcctcctccgggaagaagcaattgaacgcctccgccgccgtcgtcgccgccgccgccggcggcagcatcgtcagcgcctccattgccgacgcctccccggaaccagggctctgccagttctcgctgtgccagttctcactcatctaaagccgaacaaattgagtattataatactcctaaattcaacgtccacatgttaaaaaaagaataaattaaattggaaatagttaacccgcattcacggttatatttgtcatttttgttgtaatttataaaagttgaatttaaacttgtatgtttatggagtgaaatattttcatattgatctatcttatcagttcttttaaaaaaatttgataactattttatactagttacatgcccgtgctaacgctacggcgaaacaacaaaaagatatacaatatattgtttgggctatcaagtatagattcaagacattaattaagacttacatatgagcgagtttagttaagaagcttattagaagttcctcagttattatatactcgaaagggataaacaagccaaataaactacatccaggacaaggttcaaaatttgcaaaacaagccataaggtcgacccattcagtcgacgatgtattatgtcttcaacgtcttttctccatgtcacagaaaaaccagtaagcaaagaacaaaagtttgattgatatattaagttctaaaccgattccaggacacattcagtcaattcagttcaaatacataatcatgcgtttcaacattaattaaagtatcacattcatatatcagtacatggcttggaaaccacaaagctgaggatgccttaatctaagctacaacaaaatttcttttttttttgcattttagaataaacaggtaaagagaatggatagatcacatgtcttggatctgtcaatatctacgaagtcctgagcagctcaattttggagagggtagtagtgttgttccatttatggttcatcttgatgcatgaagaaggcaagttcaatttctggttcagtaactcttgttgttc

SEQ ID NO: 44980 - DNA, 695 bp, Oryza sativa
ctgcagccctcctccctgatataaacgatcgacatgcctcacaatgaactatcgggtcaccgctatactttacatgcgaaagtctcctgcaaacgaactgcgcaaatctgtgacgcgcgcacacaagcagtgaagcaaaaacatcacaaaatttcagatttaacagcatacttcctcccgaaacccgataattagggtagaaacagccgagtcaccccgtcccaacgcgcagagcctttgatccccaattccccataccacaaacagtacacaactacacatataatacaggcaaaatactaagcaggagggaggacaaaatggcaaagcaggagagggggcagatgccataccggtggagaaagccctggggaaggaggagatccgaaggtaggaggcggtgcggcaagcccagagcgcccttgaggcggcggcggcggcggccatgatcgagcgagctgttccaccgccgagctcttcgagtggaccaaccccgccgccaccttggagagagaaagagaaaataatgggctttctcttaatgggcttttgttagtgggctgtagtttaagcccatgttgaattgggctaaactgggttggttaccagtttgcctctgacagcttgaagagatattggaaaaagtacaccgaaggtccctcaacttgtcatcgagatacaaaatcgtcccccaa

SEQ ID NO: 44981 - DNA, 698 bp, Oryza sativa
ggcggcggcggggggaggtggtggaggtggaggtggggggaggaaggcggtgagggttgggaagggtgtcaaggagaaagctggatggcagcaaatgcgttctggagggagaaagggtatgtggattggtggatgaggctggagccgagggtgagagcaaggatcatgggagcattctttgggaagggcactacagcactggtaatatgcttacttgtactgcattttgaaataatttgcattcatggatttaggatactgcagtgcttccatttctcagttgtatcttctatggaagtcgaaagcatcgatgcttgtattttgggtagttagctttgccattttttgtgtgtaaaaggaacgattgtgagaaaggtggtgcggaaataaagcaaatatgtgatcaaagtaacatttgcaaagatactgatgcatagttatgctattctaaaatcagttgttggaaaacaagctgaatatgcgctccacaatctgtagaaacgtgtgctccctagttttcatggaatcatgggaaagaaagaagtgatgatttggtttgtgttaaactgttaatgctaacttttacaatgtaggtttgattttaagtcagtaagaagatttaatgggctattgaatagaagggaaaatctgtgaatctttccatggaaagatttcaaggttttgctatcatctaaaga

SEQ ID NO: 44982 - DNA, 634 bp, Oryza sativa
catgaaaaacatgccgtttccgtcggttggtgaactctatcatgtgtccctcctaattaataatagcacaaaatatatcgatgaaaatttcatattatttgcaacgcgctaggaatgtgaaatatatatatttttttctctagtacagctcgatgattttgacacgggttaattttggttgagttgtagagaccttgagtgattgatcagtgtgtgagagattcaatgaatcagcgcaaagccgtacacgaattaattaccacacagcggcaaaatcactttggaaatcaaacagtgcaggcagttagcgtacgtacaaacgtcatagcgtgtcgatattatccatgggtgaaaaccgcgtgctacacatgtaaatgcagcggaagggaggaatcagcatcaaatcgatcgccacaaatgtcaatgtggcggtgccaacaacaaagcatgtgtgtgcactgtgcatagagcctcgcgtttagtcgccggcggccatgcttttgtcgcggagacgatcgagacgattttgttgggaatcattgaggcgaaaagtcatttcttggaaactttctcgaccgcggagagatggatgcaggtgttgtgtccatagacgcggtgatctgatcgatcgatc

SEQ ID NO: 44983 - DNA, 880 bp, Oryza sativa
caaccctttgttcattgcttatactttttttagtaccaaccgttggaaacaatagagcacactacactccgttgattgacccttcatggctaactaaatctagaatcatgcacatataacaggccaatgggcatgtagagagtctattgattctgttaataatcatctggtaattgattgctctaaagatagaatgaagtctcctaagcatccataagtacaagagaaaactgctccaaagttgcccaaaagttgaatgccagtagtaacacccaaccttggtccaaatttccaaaaatgattcgcaaaagaaacatgggcataagtcagatctctgatgaaagcggccacacctttggggagcgaagcggcgggagagtcggagaccgtgaggccgcagcaagggtgagcgcctgtgcacaagagacatgtaagaaaaagattggattagatatttagaagtaatatctgcttgactaacactgctgcagtagaccggactcgaaggaagagagagagtgagagctcaccggaggaggagagaggaggcggccgccgtgagcttcgccgccgcggccatggccgccatgagagaagcttcgggagtggtggtgggttgcggccgtgcggctcccaggccgcgtgctgggatagtggtgggtatccgactcgacgaccgtccgatctaacatcgacggcccagatggggtaacctagcatttcgaggcccaacaggccgaggctacaaggctaacccacccacaacgaagcccattaatcctttcccgaatcatccctctcggaaaaaatccccaaatcgatccgcctctctctctctccccccttctcgccggcggccggcgcggcgcggcgaggcgga

SEQ ID NO: 44984 - DNA, 1353 bp, Oryza sativa
tatctctggcctatctctagagctgtattgtctgtggtggtggtcccttcaaagttttgtgcaatcggagcatagctatcttcttttacctctaggttgtgttttagcagctgaacaagtgctgtaatcctttctctacttctttctgccccccccccccaaaaaaaaaaaagagagagagagaaagaaaagggaatgtcctatcttgctatgtttctttaagttggttctgttttccttccttccaaatgaaattggttcttgtgaatcaatgtagcgtccctttacacagtattgttttctcccagttgtcttgtctttttatttgacttttcatatatgtaagggaaagaagaaggccttagagaaaaaaacagtagaaaaaggaaaagaagataggggtaagctcatcctagaaccctagttggcttgcagtcaccttcttcctcaccgcaatggctggtgccttatctgctcgtcatgaggctggtgcctggtggagtacgatgcctcttagggcacagaagtatagaacacgtgggtatgaagacctatgttgggctttggtgggctggctgcctggcttagtgggccttttaccaaataccccctttcttcttcctaatttctctaccatgttctccactaatcacgcctcaaccatctcatatggcaaagcaacgccttatgcctcagcgctatggcgctaaggcagtggtgggtcgcgttaaactgccttaacaacactggtttcatatatgtaaattgggttgtacttgcactgaccttttcttttgcaccctgttgccttgcataaatttgttggtacatggctgatgttttactcactgttttgttaagattttacagtttgtttggaattttgttaattggtgggatttttgttgggatgcaaccgggcttggtctaccaacccagataccaatcctttgcttgctttaccactaatattgagtattgttcagaaaggcgctgtgtgagctgggtttctgcctaggagctaggttacctgttaatacttgtgcagcaggcgggaggatgccgcctagcgcctaccattgccctagtatgctgggtggaaccttgtcactggttataggtccatgtgcagaaagtgcggtaggtgggtcagtctacttgcatacctactttgcctcgtatgtttgtaagagtttcttggatgttctatcttgcttatctgtactgcatatagtctgccccgaaaaagaagatttttctgttgatatttgttatcctccataattaacttctcagtgcccttatcatagaattatctccagggaatgccctacgttgtttgctcttgtagtt

SEQ ID NO: 44985 - DNA, 845 bp, Oryza sativa
caggaactatagcaatgcttaatccaatgtgatatgagtcattttattattagctattattttggggaagaggatgctttccggaagatgaacatgagaagcacacattgtgattatggagtcgctaaaatcgtgtagagcacatgcatatggccaatgctttctctaaaaaacaaaaaccatttcaagcggccaatggccaatgctttgcatttttttttcttttctgaaaatcacattctctgtagaatattgtcacagtgtcgaggacagcagttgcgctccctagatgtagctgaaaggatttatggctcctgtcgtgatgttgcctgaaacacttaacagtacagatgtagaactgcagaagcaagttcagatgaactaacaatgtccctggagcattgtttttttgtgaaaatgtatatatagcagtgtagtaaatgtgtccgaggaggaaatgggggacaaaattgctcagagttccaactgagaatgtatcaacagttgtgagattagatagcaatatatcgtactgtatcaaatcatcaagtgcacacaaagaagaaaaccatgttcaagagaaaatgagaagtatatggctaatagtttaatcgttacaggaacaaagaacactgacctcctttctccatagtccatagaagttcgggaaaaggttgcatcatatagcttgtcagcttatagtgatgacctgctgagaaatcacagtcaaaaaagaactacagatcaacagctcgatggatcagaaacaaattgcatgacaaaacaagataacatcgatcagcaacctaccttaagacaattacgaacctgtgatcgaagactgg

SEQ ID NO: 44986 - DNA, 628 bp, Oryza sativa
aagtatgtttaatcccacaaggaacaaaacaatgaaacccatatccctcacaaacaacacagtcaacagacaacattgttgataagaaacccaacgaatctaagagaatacaaggaaacccaacctaaaccaaatagaaaacaatccatctctaaaacatccagattggaaaaaagaaaaaaaaagaaatacatcactactgctttactttaagcattttctaatttttatcacctaacctaaacaagcaagccctacaatcaacggcatgaatgggaaacaacaggtccggttagatttcatgggaacatacatttataaggcctttactttaccctaatccctaaaatcagtgcaaggcaacgatatctgatgtaaattaggttccgagatcaacttggtctgggcgtttgtgcaaggggaccatgcaactgacgggagatatcgccgtcatcgccatggatgcgggagccagtggtcgggtcgtgccgtgcaacggacgccccccgttcaccgaacaaacgctaaccctaggtaccccaaccccgtggattacctgctcgaggcgtcgccgcggagggggagacgaacgaaccgcacgacatgacggtaatcgcaggttgtaatc

SEQ ID NO: 44987 - DNA, 686 bp, Oryza sativa
tttgcttggatggcacaaggccttgttccaacacctggagaggatcagacattggaagatgtaggaaaggagtaccttaacgagttactcagttgctcattcttccatataatcgagagtggccactacatgatacctgggttgttacatgatcttgctcaacttgttgcagaaggggaattccaggcaactaatggtaaattccctatctcagttgaggcttgtcacttgtatatctctcattctgatcatgctcgtgatatgggcttatgtcatccactcgattgttctggtattcagatgaaacgccgcatccaaaagaactcatgggctggcttgctgcatctaaaaaatttgcggactataatgttctctgcctcttcatcaatttggtctccaggttctgaggtagtctttgtccagagcaattggcctagtactatcagactgttgtctctgccctgcactttccgaaaagagcaacttgcagcagttagtaacttcatacatttgcgttacctacacctcagatggtcacgccttgaagaattacctgaagccgtatgcaagctttacctactacaagttttgaacataaagcactgtccgtgccttcttcatttacctccaaggatagccaacttattaaactttgagcatctgattgctgatgaaagaaaacattt

SEQ ID NO: 44988 - DNA, 631 bp, Oryza sativa
gcaagatcttgggtttatacaatgctgcaatctacattctcttcccagtgaactgcacaaaatatacactctcaagcagctcgagattgattcatgcccatgtgttgagtcattgccaaataatgggctgccggaaaagcttgaaaaattgatcatcagaggctgcaacagaagattgtatacaggtgcatcaatgatgggttcaactagcaccaaagtgcacctagtagatagatgatataatagatttaggttcatattagtcggcgaccacgaatataaatagctcgtgcaagtgcacagtaatcaagtagtctacgtagtcgcttttggatgtcaggctatgcaacggtattaatcaaaagatttattcacctatttttatttctgaaaactgttatagatacaaccgtttcgtatggaacaaaaaggcaacccacacagatgttttcatctgacttgataattcctcttaacaatctaattaccatgacatgcatcctccatacattcttagatctcgataccagaatcctccaaataatagctttactttttgttctgatttgcacacaaaagtctcctccaaacgaactgcacaaatcttgacgcgcacacggggtgcaggaat

SEQ ID NO: 44989 - DNA, 790 bp, Oryza sativa
agtcagagctctccctggcgaggtgaaatttgcgtgacccagtttcagccctgcatcgtgctggttcccgcttgcatcacgccaacgtgcctccgtccaagtggagcggtgatccatcaggcggcagctgaacgacgcattcacgcctctcgcccctgcaggtccaaggaagacgagcctgaacgcaatacggtaatcgccatgtgtgatgaacacctttgggtagtagcggatctcccactcgtaaccacccacggtgagtcgcctggacgggaagtcgttttcaccgccggacttggtggcagagtagccgttcaccgtgatgtcgtgaatagccgatgtggcctcggtgaggttccacgatgaaaatgacattgctgccgatcgattgccttgtttgtggtgggttcgcactacggctactgcgagcgtgagatggcaaggctcaagcaactccttctacgagtaccctatatgtagatttgtagaggcaagtggagactggattaatatcggaacgagaggagcgcatgcgacgcccgggttgaatgtagaacgcgaatcgtttggtcactctcgagctaggcgtttcgttattctcaccgacgggttctttccaagggattaacacacgcctaagagcaggtacaatagcagactattagccagctataaacatattttaatgagataaaagatgagagagaagagcagtgggctacagatctgtagccagctgcaacacgaactccaagacgcagtgtgtgtatgacagtgagaccatatacta
